United States Patent Application Publication US 2016/0319361 A1 - sequence listing, part 8

SEQ ID NO: 192414 - DNA, 30 bp, Artificial Sequence
  Synthetic oligonucleotide
gagcagaataggttagggctgggtattgtg

SEQ ID NO: 192415 - DNA, 30 bp, Artificial Sequence
  Synthetic oligonucleotide
gggagtgcctctgcagattaaggacttgtg

SEQ ID NO: 192416 - DNA, 30 bp, Artificial Sequence
  Synthetic oligonucleotide
cttatacaagtcacttagtacttacttgtg

SEQ ID NO: 192417 - DNA, 30 bp, Artificial Sequence
  Synthetic oligonucleotide
cctacccacaacccataccaatccgttgtg

SEQ ID NO: 192418 - DNA, 30 bp, Artificial Sequence
  Synthetic oligonucleotide
gccgaaattgttacgaataatagtgttgtg

SEQ ID NO: 192419 - DNA, 30 bp, Artificial Sequence
  Synthetic oligonucleotide
acgcatataagtaacttgctcaaatttgtg

SEQ ID NO: 192420 - DNA, 30 bp, Artificial Sequence
  Synthetic oligonucleotide
agatggttaagtgcggacacgtcatttgtg

SEQ ID NO: 192421 - DNA, 30 bp, Artificial Sequence
  Synthetic oligonucleotide
ttgggttgacttggtatgctattatttgtg

SEQ ID NO: 192422 - DNA, 30 bp, Artificial Sequence
  Synthetic oligonucleotide
gcaagacgttcgtaatacaaacactttgtg

SEQ ID NO: 192423 - DNA, 30 bp, Artificial Sequence
  Synthetic oligonucleotide
atatatggcaatacagatacagagtttgtg

SEQ ID NO: 192424 - DNA, 30 bp, Artificial Sequence
  Synthetic oligonucleotide
gagcgcactaggggtgcggccgagtttgtg

SEQ ID NO: 192425 - DNA, 30 bp, Artificial Sequence
  Synthetic oligonucleotide
acgtagcggcggtaggaacaagggtttgtg

SEQ ID NO: 192426 - DNA, 30 bp, Artificial Sequence
  Synthetic oligonucleotide
gtcgccaatttccgggcgtaagcttttgtg

SEQ ID NO: 192427 - DNA, 30 bp, Artificial Sequence
  Synthetic oligonucleotide
gagcgaatggtaatcaccccgttttttgtg

SEQ ID NO: 192428 - DNA, 30 bp, Artificial Sequence
  Synthetic oligonucleotide
atatgcagtccatgcaccgttgaaaaattg

SEQ ID NO: 192429 - DNA, 30 bp, Artificial Sequence
  Synthetic oligonucleotide
ttaggacggttgcttaactagtaaaaattg

SEQ ID NO: 192430 - DNA, 30 bp, Artificial Sequence
  Synthetic oligonucleotide
ccggcaggcaaacagttttccataaaattg

SEQ ID NO: 192431 - DNA, 30 bp, Artificial Sequence
  Synthetic oligonucleotide
caacgcatggatccagatgaccataaattg

SEQ ID NO: 192432 - DNA, 30 bp, Artificial Sequence
  Synthetic oligonucleotide
tttcagaaggcaatggatgaattccaattg

SEQ ID NO: 192433 - DNA, 30 bp, Artificial Sequence
  Synthetic oligonucleotide
gggccgtggtctttaatgtgtccgcaattg

SEQ ID NO: 192434 - DNA, 30 bp, Artificial Sequence
  Synthetic oligonucleotide
ggcttttacacgtacgttgtggggcaattg

SEQ ID NO: 192435 - DNA, 30 bp, Artificial Sequence
  Synthetic oligonucleotide
cagctgtagtccttagtaagctatcaattg

SEQ ID NO: 192436 - DNA, 30 bp, Artificial Sequence
  Synthetic oligonucleotide
gcgggtgggcgaagggggcagaacgaattg

SEQ ID NO: 192437 - DNA, 30 bp, Artificial Sequence
  Synthetic oligonucleotide
tactgtgtgtgacttgcctggttggaattg

SEQ ID NO: 192438 - DNA, 30 bp, Artificial Sequence
  Synthetic oligonucleotide
aggcagatcaccataagggggcttgaattg

SEQ ID NO: 192439 - DNA, 30 bp, Artificial Sequence
  Synthetic oligonucleotide
gaggtacgtaggcattacgttgtctaattg

SEQ ID NO: 192440 - DNA, 30 bp, Artificial Sequence
  Synthetic oligonucleotide
tcgactgacagcgtacaactagagtaattg

SEQ ID NO: 192441 - DNA, 31 bp, Artificial Sequence
  Synthetic oligonucleotide
ggtgctcgtggccggtgccctagcgtaattg

SEQ ID NO: 192442 - DNA, 30 bp, Artificial Sequence
  Synthetic oligonucleotide
tccgctatctacccggtacgtatgtaattg

SEQ ID NO: 192443 - DNA, 30 bp, Artificial Sequence
  Synthetic oligonucleotide
agaagaacagggggcccggtcacttaattg

SEQ ID NO: 192444 - DNA, 30 bp, Artificial Sequence
  Synthetic oligonucleotide
agcccactgcagaccaagccacgcacattg

SEQ ID NO: 192445 - DNA, 30 bp, Artificial Sequence
  Synthetic oligonucleotide
tgtgaatatacgaaaagaaacgccccattg

SEQ ID NO: 192446 - DNA, 30 bp, Artificial Sequence
  Synthetic oligonucleotide
tgcccagttttggcgtcccggaatccattg

SEQ ID NO: 192447 - DNA, 30 bp, Artificial Sequence
  Synthetic oligonucleotide
taagcacgagtttgtacctctgctccattg

SEQ ID NO: 192448 - DNA, 30 bp, Artificial Sequence
  Synthetic oligonucleotide
atcgaataggagaaggggagccttccattg

SEQ ID NO: 192449 - DNA, 30 bp, Artificial Sequence
  Synthetic oligonucleotide
cattcccgcccacgaaagaaagaggcattg

SEQ ID NO: 192450 - DNA, 30 bp, Artificial Sequence
  Synthetic oligonucleotide
tcccttggtctccgagcgattcgggcattg

SEQ ID NO: 192451 - DNA, 30 bp, Artificial Sequence
  Synthetic oligonucleotide
cactcgggtaaacgcatacgaggggcattg

SEQ ID NO: 192452 - DNA, 30 bp, Artificial Sequence
  Synthetic oligonucleotide
tgtcgattgtggaattctacaggatcattg

SEQ ID NO: 192453 - DNA, 30 bp, Artificial Sequence
  Synthetic oligonucleotide
ttggaacctccaaacaaagccgcctcattg

SEQ ID NO: 192454 - DNA, 30 bp, Artificial Sequence
  Synthetic oligonucleotide
gggccatatcgctctttattacggtcattg

SEQ ID NO: 192455 - DNA, 30 bp, Artificial Sequence
  Synthetic oligonucleotide
gcggaaattattatcattaggcaaagattg

SEQ ID NO: 192456 - DNA, 30 bp, Artificial Sequence
  Synthetic oligonucleotide
gaactgcgtgttcgttgaagattaagattg

SEQ ID NO: 192457 - DNA, 30 bp, Artificial Sequence
  Synthetic oligonucleotide
cagagctgggaacacccgtcgtgcagattg

SEQ ID NO: 192458 - DNA, 30 bp, Artificial Sequence
  Synthetic oligonucleotide
acactagggcagaccctttgtgagagattg

SEQ ID NO: 192459 - DNA, 30 bp, Artificial Sequence
  Synthetic oligonucleotide
agatcgggatttgacctccaaggtagattg

SEQ ID NO: 192460 - DNA, 30 bp, Artificial Sequence
  Synthetic oligonucleotide
accacaacatctagaaattcgggtagattg

SEQ ID NO: 192461 - DNA, 30 bp, Artificial Sequence
  Synthetic oligonucleotide
actgttgagagctcgaggctgtgacgattg

SEQ ID NO: 192462 - DNA, 30 bp, Artificial Sequence
  Synthetic oligonucleotide
aataaggtaaggtcgtcacaactacgattg

SEQ ID NO: 192463 - DNA, 30 bp, Artificial Sequence
  Synthetic oligonucleotide
caggacgaggggcccgcaacccaaggattg

SEQ ID NO: 192464 - DNA, 30 bp, Artificial Sequence
  Synthetic oligonucleotide
aacaatgcaacggtgtagagcgcaggattg

SEQ ID NO: 192465 - DNA, 30 bp, Artificial Sequence
  Synthetic oligonucleotide
aggttttggagaatctacgtgaccggattg

SEQ ID NO: 192466 - DNA, 30 bp, Artificial Sequence
  Synthetic oligonucleotide
actcaatatgtgctaggttataccggattg

SEQ ID NO: 192467 - DNA, 30 bp, Artificial Sequence
  Synthetic oligonucleotide
tacgtatggctgcattgggtatccggattg

SEQ ID NO: 192468 - DNA, 30 bp, Artificial Sequence
  Synthetic oligonucleotide
aacgagggttattggctcgaaaagggattg

SEQ ID NO: 192469 - DNA, 30 bp, Artificial Sequence
  Synthetic oligonucleotide
ataggagacgtcaacgtacagttgggattg

SEQ ID NO: 192470 - DNA, 30 bp, Artificial Sequence
  Synthetic oligonucleotide
acactcttgcaacctaccattaactgattg

SEQ ID NO: 192471 - DNA, 30 bp, Artificial Sequence
  Synthetic oligonucleotide
gaagttacagagcagttaaacggctgattg

SEQ ID NO: 192472 - DNA, 30 bp, Artificial Sequence
  Synthetic oligonucleotide
ggacagacctatcgtacagtaaagtgattg

SEQ ID NO: 192473 - DNA, 30 bp, Artificial Sequence
  Synthetic oligonucleotide
ttgttgagcgacctgtggtagacgtgattg

SEQ ID NO: 192474 - DNA, 30 bp, Artificial Sequence
  Synthetic oligonucleotide
aacgcgctcagtttaccaaagaggtgattg

SEQ ID NO: 192475 - DNA, 30 bp, Artificial Sequence
  Synthetic oligonucleotide
ggagggaatagttgtttatatccttgattg

SEQ ID NO: 192476 - DNA, 30 bp, Artificial Sequence
  Synthetic oligonucleotide
gggtaagcattcatatggtagagttgattg

SEQ ID NO: 192477 - DNA, 30 bp, Artificial Sequence
  Synthetic oligonucleotide
aggaccctcatctgtggagggctaatattg

SEQ ID NO: 192478 - DNA, 30 bp, Artificial Sequence
  Synthetic oligonucleotide
ctctaactactttagtgaaaagtaatattg

SEQ ID NO: 192479 - DNA, 30 bp, Artificial Sequence
  Synthetic oligonucleotide
agcccaagaggtatcatgaatttcatattg

SEQ ID NO: 192480 - DNA, 30 bp, Artificial Sequence
  Synthetic oligonucleotide
aagtgccaattgcggccgcaacggatattg

SEQ ID NO: 192481 - DNA, 30 bp, Artificial Sequence
  Synthetic oligonucleotide
tacgtattggatcgtgggtaatggatattg

SEQ ID NO: 192482 - DNA, 30 bp, Artificial Sequence
  Synthetic oligonucleotide
caagacagtagcaaactcacagatatattg

SEQ ID NO: 192483 - DNA, 30 bp, Artificial Sequence
  Synthetic oligonucleotide
tttgggacaagtgtgggtggtcctatattg

SEQ ID NO: 192484 - DNA, 30 bp, Artificial Sequence
  Synthetic oligonucleotide
taaggtaggcgagcctctaaaagtatattg

SEQ ID NO: 192485 - DNA, 30 bp, Artificial Sequence
  Synthetic oligonucleotide
gagatctaaagctcattttcggtactattg

SEQ ID NO: 192486 - DNA, 30 bp, Artificial Sequence
  Synthetic oligonucleotide
aacgttctgcaaagcgaaggacacctattg

SEQ ID NO: 192487 - DNA, 30 bp, Artificial Sequence
  Synthetic oligonucleotide
agatctatacgagcgaagacttacctattg

SEQ ID NO: 192488 - DNA, 30 bp, Artificial Sequence
  Synthetic oligonucleotide
actggaaaaatacgtaaagcacagctattg

SEQ ID NO: 192489 - DNA, 30 bp, Artificial Sequence
  Synthetic oligonucleotide
gtaaccgtggtcatctgataatcgctattg

SEQ ID NO: 192490 - DNA, 30 bp, Artificial Sequence
  Synthetic oligonucleotide
actgactgcagggacttacatgctctattg

SEQ ID NO: 192491 - DNA, 30 bp, Artificial Sequence
  Synthetic oligonucleotide
agccaatcgcagcaagctgatcgtctattg

SEQ ID NO: 192492 - DNA, 30 bp, Artificial Sequence
  Synthetic oligonucleotide
cgggtgatcagtgtcttacatgcagtattg

SEQ ID NO: 192493 - DNA, 30 bp, Artificial Sequence
  Synthetic oligonucleotide
gctgaaaccttggaaagcggcgtggtattg

SEQ ID NO: 192494 - DNA, 30 bp, Artificial Sequence
  Synthetic oligonucleotide
gtgtatgtaacgtcagatctgtttgtattg

SEQ ID NO: 192495 - DNA, 30 bp, Artificial Sequence
  Synthetic oligonucleotide
cttaatttgctttaagtcgtttacttattg

SEQ ID NO: 192496 - DNA, 30 bp, Artificial Sequence
  Synthetic oligonucleotide
aggttcgctccgtgaactatgtccttattg

SEQ ID NO: 192497 - DNA, 30 bp, Artificial Sequence
  Synthetic oligonucleotide
ggctatcgagatctcgagcactatttattg

SEQ ID NO: 192498 - DNA, 30 bp, Artificial Sequence
  Synthetic oligonucleotide
caacatctggcggagagcgcttgaaacttg

SEQ ID NO: 192499 - DNA, 30 bp, Artificial Sequence
  Synthetic oligonucleotide
tctcgagcggtggacctgggcagcaacttg

SEQ ID NO: 192500 - DNA, 30 bp, Artificial Sequence
  Synthetic oligonucleotide
gaacgatccagaacgtcaggcggcaacttg

SEQ ID NO: 192501 - DNA, 30 bp, Artificial Sequence
  Synthetic oligonucleotide
ctttaccctctgcgcggagtgcataacttg

SEQ ID NO: 192502 - DNA, 30 bp, Artificial Sequence
  Synthetic oligonucleotide
taggaacacgactgagcgcataaacacttg

SEQ ID NO: 192503 - DNA, 30 bp, Artificial Sequence
  Synthetic oligonucleotide
gcttaaggggagtcggggtgtctccacttg

SEQ ID NO: 192504 - DNA, 30 bp, Artificial Sequence
  Synthetic oligonucleotide
tcgtgaaagcccctaaatggattccacttg

SEQ ID NO: 192505 - DNA, 30 bp, Artificial Sequence
  Synthetic oligonucleotide
agttagacattcactcaggaatggcacttg

SEQ ID NO: 192506 - DNA, 30 bp, Artificial Sequence
  Synthetic oligonucleotide
catacgtatagtgaatcattggaggacttg

SEQ ID NO: 192507 - DNA, 30 bp, Artificial Sequence
  Synthetic oligonucleotide
tcttatcgtcattgcgtgtcgacggacttg

SEQ ID NO: 192508 - DNA, 30 bp, Artificial Sequence
  Synthetic oligonucleotide
ttgtaatcatcctaccggtgccgggacttg

SEQ ID NO: 192509 - DNA, 30 bp, Artificial Sequence
  Synthetic oligonucleotide
ggttagtgcgcaactcaatggatggacttg

SEQ ID NO: 192510 - DNA, 30 bp, Artificial Sequence
  Synthetic oligonucleotide
caaggatccggagagcctagtaaatacttg

SEQ ID NO: 192511 - DNA, 30 bp, Artificial Sequence
  Synthetic oligonucleotide
gggatcactgtgtcgggttggtaatacttg

SEQ ID NO: 192512 - DNA, 30 bp, Artificial Sequence
  Synthetic oligonucleotide
accgggcccatcctagcgcggccatacttg

SEQ ID NO: 192513 - DNA, 30 bp, Artificial Sequence
  Synthetic oligonucleotide
aagtatacagacaacgggtaccagtacttg

SEQ ID NO: 192514 - DNA, 30 bp, Artificial Sequence
  Synthetic oligonucleotide
aatggtggtcttacattgggtcagtacttg

SEQ ID NO: 192515 - DNA, 30 bp, Artificial Sequence
  Synthetic oligonucleotide
ctggaaaaatccgtggtgtgtaggtacttg

SEQ ID NO: 192516 - DNA, 30 bp, Artificial Sequence
  Synthetic oligonucleotide
tccgcactcgccccgtgcgcaaacaccttg

SEQ ID NO: 192517 - DNA, 30 bp, Artificial Sequence
  Synthetic oligonucleotide
acaggacagccgcatgtatggatgaccttg

SEQ ID NO: 192518 - DNA, 30 bp, Artificial Sequence
  Synthetic oligonucleotide
tactacacgcaaggcattacacagcccttg

SEQ ID NO: 192519 - DNA, 30 bp, Artificial Sequence
  Synthetic oligonucleotide
ctgcgcaagaaggtgaggcagttgcccttg

SEQ ID NO: 192520 - DNA, 30 bp, Artificial Sequence
  Synthetic oligonucleotide
actggaccctgaacttaaaacaatcccttg

SEQ ID NO: 192521 - DNA, 30 bp, Artificial Sequence
  Synthetic oligonucleotide
tttgagccagcggtcgataagagcgccttg

SEQ ID NO: 192522 - DNA, 30 bp, Artificial Sequence
  Synthetic oligonucleotide
ccagggcaggcaagtctatcggtggccttg

SEQ ID NO: 192523 - DNA, 30 bp, Artificial Sequence
  Synthetic oligonucleotide
gctggtgggggccacacatgtcctgccttg

SEQ ID NO: 192524 - DNA, 30 bp, Artificial Sequence
  Synthetic oligonucleotide
acggactatctattatgacggattgccttg

SEQ ID NO: 192525 - DNA, 30 bp, Artificial Sequence
  Synthetic oligonucleotide
gttctaaggaacgataagggccttgccttg

SEQ ID NO: 192526 - DNA, 30 bp, Artificial Sequence
  Synthetic oligonucleotide
gtactaacatcagtaattgttcactccttg

SEQ ID NO: 192527 - DNA, 30 bp, Artificial Sequence
  Synthetic oligonucleotide
tatggggtggccacctgttgcgattccttg

SEQ ID NO: 192528 - DNA, 30 bp, Artificial Sequence
  Synthetic oligonucleotide
tatctcaatgaagccaacgtcaaaagcttg

SEQ ID NO: 192529 - DNA, 30 bp, Artificial Sequence
  Synthetic oligonucleotide
gaggaatttatgtcagctagaaacagcttg

SEQ ID NO: 192530 - DNA, 30 bp, Artificial Sequence
  Synthetic oligonucleotide
atcaacttgatttatatgttaagcagcttg

SEQ ID NO: 192531 - DNA, 30 bp, Artificial Sequence
  Synthetic oligonucleotide
acttcgaaatggaactagctcagacgcttg

SEQ ID NO: 192532 - DNA, 30 bp, Artificial Sequence
  Synthetic oligonucleotide
tccagtgatggggcatatctaaaccgcttg

SEQ ID NO: 192533 - DNA, 30 bp, Artificial Sequence
  Synthetic oligonucleotide
caaaaattccgtggcagttaccaaggcttg

SEQ ID NO: 192534 - DNA, 30 bp, Artificial Sequence
  Synthetic oligonucleotide
aggagctggtgatacagaaactcaggcttg

SEQ ID NO: 192535 - DNA, 30 bp, Artificial Sequence
  Synthetic oligonucleotide
ggcgagctgacaatgatcaggtcaggcttg

SEQ ID NO: 192536 - DNA, 30 bp, Artificial Sequence
  Synthetic oligonucleotide
gttacccgaaagcgtgtgcttggcggcttg

SEQ ID NO: 192537 - DNA, 30 bp, Artificial Sequence
  Synthetic oligonucleotide
acatggttgacagggtaattgtggggcttg

SEQ ID NO: 192538 - DNA, 30 bp, Artificial Sequence
  Synthetic oligonucleotide
agcccgtaaattggcaaccgggactgcttg

SEQ ID NO: 192539 - DNA, 30 bp, Artificial Sequence
  Synthetic oligonucleotide
ctgcttgaggtggtcaggcactagtgcttg

SEQ ID NO: 192540 - DNA, 30 bp, Artificial Sequence
  Synthetic oligonucleotide
tgtagacttggtgtgttgtgagcaatcttg

SEQ ID NO: 192541 - DNA, 30 bp, Artificial Sequence
  Synthetic oligonucleotide
aagcgtttccaggtaggttcgtacatcttg

SEQ ID NO: 192542 - DNA, 30 bp, Artificial Sequence
  Synthetic oligonucleotide
actgacgataatttatgtcctaggatcttg

SEQ ID NO: 192543 - DNA, 30 bp, Artificial Sequence
  Synthetic oligonucleotide
gtggtatcggttggcataccacttctcttg

SEQ ID NO: 192544 - DNA, 30 bp, Artificial Sequence
  Synthetic oligonucleotide
atgaaggtaatcggtccctagttggtcttg

SEQ ID NO: 192545 - DNA, 30 bp, Artificial Sequence
  Synthetic oligonucleotide
acgtgatacgggttctccgccaatgtcttg

SEQ ID NO: 192546 - DNA, 30 bp, Artificial Sequence
  Synthetic oligonucleotide
gagcccggcgaggaaaagggttgtgtcttg

SEQ ID NO: 192547 - DNA, 30 bp, Artificial Sequence
  Synthetic oligonucleotide
ataggtaaggcgtggtgtatgcttgtcttg

SEQ ID NO: 192548 - DNA, 30 bp, Artificial Sequence
  Synthetic oligonucleotide
ttgacacctttgtttgcagtacgattcttg

SEQ ID NO: 192549 - DNA, 30 bp, Artificial Sequence
  Synthetic oligonucleotide
tttaccgggcacgttatgagattcttcttg

SEQ ID NO: 192550 - DNA, 30 bp, Artificial Sequence
  Synthetic oligonucleotide
aacttacatagacgaggatgttagttcttg

SEQ ID NO: 192551 - DNA, 30 bp, Artificial Sequence
  Synthetic oligonucleotide
gggcgttgattctcgccccgcagaaagttg

SEQ ID NO: 192552 - DNA, 30 bp, Artificial Sequence
  Synthetic oligonucleotide
cgccgcgggctaagaggccgtgtcaagttg

SEQ ID NO: 192553 - DNA, 30 bp, Artificial Sequence
  Synthetic oligonucleotide
gatcgcatcacatgaggagccttcaagttg

SEQ ID NO: 192554 - DNA, 30 bp, Artificial Sequence
  Synthetic oligonucleotide
gcggtttcacccgacgtcatatcgaagttg

SEQ ID NO: 192555 - DNA, 30 bp, Artificial Sequence
  Synthetic oligonucleotide
gatgagcgtcgaaaaggtaatgtgaagttg

SEQ ID NO: 192556 - DNA, 30 bp, Artificial Sequence
  Synthetic oligonucleotide
atggggattggtggaaacgttacccagttg

SEQ ID NO: 192557 - DNA, 30 bp, Artificial Sequence
  Synthetic oligonucleotide
ctgctatctgttcgtagcgtcgcccagttg

SEQ ID NO: 192558 - DNA, 30 bp, Artificial Sequence
  Synthetic oligonucleotide
aagagcacaaagtactacgggaggcagttg

SEQ ID NO: 192559 - DNA, 30 bp, Artificial Sequence
  Synthetic oligonucleotide
ggaacaggatctcgatgacagcggcagttg

SEQ ID NO: 192560 - DNA, 30 bp, Artificial Sequence
  Synthetic oligonucleotide
acacggatgctcgaagttctagtagagttg

SEQ ID NO: 192561 - DNA, 30 bp, Artificial Sequence
  Synthetic oligonucleotide
agaatagctcagataagagacggggagttg

SEQ ID NO: 192562 - DNA, 30 bp, Artificial Sequence
  Synthetic oligonucleotide
cacaacagaacgctaacgctgaactagttg

SEQ ID NO: 192563 - DNA, 30 bp, Artificial Sequence
  Synthetic oligonucleotide
taagttgggcacgtgtattgtgtgtagttg

SEQ ID NO: 192564 - DNA, 30 bp, Artificial Sequence
  Synthetic oligonucleotide
ctcgtcgtgaggtatgtatcctgaacgttg

SEQ ID NO: 192565 - DNA, 30 bp, Artificial Sequence
  Synthetic oligonucleotide
tcgagctatgtattgtgtgatggcacgttg

SEQ ID NO: 192566 - DNA, 30 bp, Artificial Sequence
  Synthetic oligonucleotide
agaaatggacatgttcctaaattgacgttg

SEQ ID NO: 192567 - DNA, 30 bp, Artificial Sequence
  Synthetic oligonucleotide
tcggcgctaccattgcaatgttgaccgttg

SEQ ID NO: 192568 - DNA, 30 bp, Artificial Sequence
  Synthetic oligonucleotide
tttacacaattcgtcgttcacaacccgttg

SEQ ID NO: 192569 - DNA, 30 bp, Artificial Sequence
  Synthetic oligonucleotide
gcggcagttattggggcagtttcgccgttg

SEQ ID NO: 192570 - DNA, 30 bp, Artificial Sequence
  Synthetic oligonucleotide
tcaccgggcgcatcgagttagccagcgttg

SEQ ID NO: 192571 - DNA, 30 bp, Artificial Sequence
  Synthetic oligonucleotide
gttttcgcatgtggtcacgttagggcgttg

SEQ ID NO: 192572 - DNA, 30 bp, Artificial Sequence
  Synthetic oligonucleotide
atgcgccttggctccagatatacatcgttg

SEQ ID NO: 192573 - DNA, 30 bp, Artificial Sequence
  Synthetic oligonucleotide
cgatgagttctgttgaaatacggaaggttg

SEQ ID NO: 192574 - DNA, 30 bp, Artificial Sequence
  Synthetic oligonucleotide
taaaaatggtaggactcgggaataaggttg

SEQ ID NO: 192575 - DNA, 30 bp, Artificial Sequence
  Synthetic oligonucleotide
ctagaggccgatcgcagttgtataaggttg

SEQ ID NO: 192576 - DNA, 30 bp, Artificial Sequence
  Synthetic oligonucleotide
ccgggggggagaatatcatcgcacaggttg

SEQ ID NO: 192577 - DNA, 30 bp, Artificial Sequence
  Synthetic oligonucleotide
gtcattcagaatgtgctcgatcacaggttg

SEQ ID NO: 192578 - DNA, 30 bp, Artificial Sequence
  Synthetic oligonucleotide
ttgtaacggcaaggaaccacaggcaggttg

SEQ ID NO: 192579 - DNA, 30 bp, Artificial Sequence
  Synthetic oligonucleotide
ccctcgggagtagtgcggtggttcaggttg

SEQ ID NO: 192580 - DNA, 31 bp, Artificial Sequence
  Synthetic oligonucleotide
ggaagttggaaagtgtttctgtaaccggttg

SEQ ID NO: 192581 - DNA, 30 bp, Artificial Sequence
  Synthetic oligonucleotide
aatggaaagggcagactcgagccgcggttg

SEQ ID NO: 192582 - DNA, 30 bp, Artificial Sequence
  Synthetic oligonucleotide
aggtatggaataggcggttgtgcgcggttg

SEQ ID NO: 192583 - DNA, 30 bp, Artificial Sequence
  Synthetic oligonucleotide
ctgggaagtcgataccaggatcccgggttg

SEQ ID NO: 192584 - DNA, 30 bp, Artificial Sequence
  Synthetic oligonucleotide
ggattaggaagcacgaacctggcgtggttg

SEQ ID NO: 192585 - DNA, 30 bp, Artificial Sequence
  Synthetic oligonucleotide
cacttacactgaatcgccttgcaaatgttg

SEQ ID NO: 192586 - DNA, 30 bp, Artificial Sequence
  Synthetic oligonucleotide
cttgacagtggcagggccatccgaatgttg

SEQ ID NO: 192587 - DNA, 30 bp, Artificial Sequence
  Synthetic oligonucleotide
ctgtgcgattaaggtttgtctgtaatgttg

SEQ ID NO: 192588 - DNA, 30 bp, Artificial Sequence
  Synthetic oligonucleotide
taggggggcattctcctacagcgcatgttg

SEQ ID NO: 192589 - DNA, 30 bp, Artificial Sequence
  Synthetic oligonucleotide
cattataaatgcgcatgcccgcgcatgttg

SEQ ID NO: 192590 - DNA, 30 bp, Artificial Sequence
  Synthetic oligonucleotide
taaggtcgagtcctgttggatcgcatgttg

SEQ ID NO: 192591 - DNA, 30 bp, Artificial Sequence
  Synthetic oligonucleotide
acattcgcattttctaactcatggatgttg

SEQ ID NO: 192592 - DNA, 30 bp, Artificial Sequence
  Synthetic oligonucleotide
aggtcaagaccccaaagtggcgtcctgttg

SEQ ID NO: 192593 - DNA, 30 bp, Artificial Sequence
  Synthetic oligonucleotide
agcgcgcgtaagtatgatttgttcctgttg

SEQ ID NO: 192594 - DNA, 30 bp, Artificial Sequence
  Synthetic oligonucleotide
ctagcactgtgtagcttcgtcctgctgttg

SEQ ID NO: 192595 - DNA, 30 bp, Artificial Sequence
  Synthetic oligonucleotide
gggaaggcaggtcatggggggttgctgttg

SEQ ID NO: 192596 - DNA, 29 bp, Artificial Sequence
  Synthetic oligonucleotide
ccaacagggaaacacagttctctctgttg

SEQ ID NO: 192597 - DNA, 30 bp, Artificial Sequence
  Synthetic oligonucleotide
aggttgtggatggcaggccattctctgttg

SEQ ID NO: 192598 - DNA, 30 bp, Artificial Sequence
  Synthetic oligonucleotide
aagagacggagaggacacgcgcaagtgttg

SEQ ID NO: 192599 - DNA, 30 bp, Artificial Sequence
  Synthetic oligonucleotide
aagttagcgcagacttgtgcatacgtgttg

SEQ ID NO: 192600 - DNA, 30 bp, Artificial Sequence
  Synthetic oligonucleotide
tgtcgggcagtcgcttctgcggcggtgttg

SEQ ID NO: 192601 - DNA, 30 bp, Artificial Sequence
  Synthetic oligonucleotide
acatatcctgtggggcgatatgctgtgttg

SEQ ID NO: 192602 - DNA, 30 bp, Artificial Sequence
  Synthetic oligonucleotide
tgaggggtgtgtgcctacagggaattgttg

SEQ ID NO: 192603 - DNA, 30 bp, Artificial Sequence
  Synthetic oligonucleotide
atcggaatttgccgtagatgacgattgttg

SEQ ID NO: 192604 - DNA, 30 bp, Artificial Sequence
  Synthetic oligonucleotide
cggctagtttcgttcaagagaaatttgttg

SEQ ID NO: 192605 - DNA, 30 bp, Artificial Sequence
  Synthetic oligonucleotide
cataacggaattttcttttcctctttgttg

SEQ ID NO: 192606 - DNA, 30 bp, Artificial Sequence
  Synthetic oligonucleotide
accccgtcccaatattcttccccaaatttg

SEQ ID NO: 192607 - DNA, 30 bp, Artificial Sequence
  Synthetic oligonucleotide
ggcgcttaatggtaaagcgaatcaaatttg

SEQ ID NO: 192608 - DNA, 30 bp, Artificial Sequence
  Synthetic oligonucleotide
tttaatagatcagataaggagataaatttg

SEQ ID NO: 192609 - DNA, 30 bp, Artificial Sequence
  Synthetic oligonucleotide
atagcactcaaacgggcgttatacaatttg

SEQ ID NO: 192610 - DNA, 30 bp, Artificial Sequence
  Synthetic oligonucleotide
catcttcaatcccggcgataactcaatttg

SEQ ID NO: 192611 - DNA, 30 bp, Artificial Sequence
  Synthetic oligonucleotide
tgaagtgcgctagtttgcctgttcaatttg

SEQ ID NO: 192612 - DNA, 30 bp, Artificial Sequence
  Synthetic oligonucleotide
taaacgctcatactacgtactttcaatttg

SEQ ID NO: 192613 - DNA, 30 bp, Artificial Sequence
  Synthetic oligonucleotide
attagatgggggggcctacggtagcatttg

SEQ ID NO: 192614 - DNA, 30 bp, Artificial Sequence
  Synthetic oligonucleotide
gctaatgaatgataacgggttcatcatttg

SEQ ID NO: 192615 - DNA, 30 bp, Artificial Sequence
  Synthetic oligonucleotide
ttgtttgtgtaaaggcgagtagctcatttg

SEQ ID NO: 192616 - DNA, 30 bp, Artificial Sequence
  Synthetic oligonucleotide
tggggcaccttaatataagacaccgatttg

SEQ ID NO: 192617 - DNA, 30 bp, Artificial Sequence
  Synthetic oligonucleotide
aacttaaagggatgaggattcgccgatttg

SEQ ID NO: 192618 - DNA, 30 bp, Artificial Sequence
  Synthetic oligonucleotide
cttgcaaagtccgtaagtagggtcgatttg

SEQ ID NO: 192619 - DNA, 30 bp, Artificial Sequence
  Synthetic oligonucleotide
gacataatgggaattccttatcaatatttg

SEQ ID NO: 192620 - DNA, 30 bp, Artificial Sequence
  Synthetic oligonucleotide
ttttactaggagggaggtttagaatatttg

SEQ ID NO: 192621 - DNA, 30 bp, Artificial Sequence
  Synthetic oligonucleotide
cttgaggcaatttctcggagtgaatatttg

SEQ ID NO: 192622 - DNA, 30 bp, Artificial Sequence
  Synthetic oligonucleotide
tcgctgagtgcaagcatctaacgctatttg

SEQ ID NO: 192623 - DNA, 31 bp, Artificial Sequence
  Synthetic oligonucleotide
cgttctaaagacacttaccaaactgtatttg

SEQ ID NO: 192624 - DNA, 30 bp, Artificial Sequence
  Synthetic oligonucleotide
acggtttaggtacggtgcctaagttatttg

SEQ ID NO: 192625 - DNA, 30 bp, Artificial Sequence
  Synthetic oligonucleotide
acgagccataagttaagtgttataactttg

SEQ ID NO: 192626 - DNA, 30 bp, Artificial Sequence
  Synthetic oligonucleotide
atatcagaaggcacacaataaaacactttg

SEQ ID NO: 192627 - DNA, 30 bp, Artificial Sequence
  Synthetic oligonucleotide
agcaaatcggttggaccatcaggcactttg

SEQ ID NO: 192628 - DNA, 30 bp, Artificial Sequence
  Synthetic oligonucleotide
gtcgagacattgatacgtttaacgactttg

SEQ ID NO: 192629 - DNA, 30 bp, Artificial Sequence
  Synthetic oligonucleotide
actaaaaatatcacgaaactgggtactttg

SEQ ID NO: 192630 - DNA, 30 bp, Artificial Sequence
  Synthetic oligonucleotide
ctactgtcaacatcgcgagcagtccctttg

SEQ ID NO: 192631 - DNA, 30 bp, Artificial Sequence
  Synthetic oligonucleotide
tctgcctgataacactgcaattaagctttg

SEQ ID NO: 192632 - DNA, 30 bp, Artificial Sequence
  Synthetic oligonucleotide
accgcaaagtgggttataacttaggctttg

SEQ ID NO: 192633 - DNA, 30 bp, Artificial Sequence
  Synthetic oligonucleotide
agagctgtaaaaatccagccaattgctttg

SEQ ID NO: 192634 - DNA, 30 bp, Artificial Sequence
  Synthetic oligonucleotide
aggggtggcgcatgtatccactttgctttg

SEQ ID NO: 192635 - DNA, 30 bp, Artificial Sequence
  Synthetic oligonucleotide
gctgtgatccggtgggcaactacatctttg

SEQ ID NO: 192636 - DNA, 30 bp, Artificial Sequence
  Synthetic oligonucleotide
ctgataagagattagaaggaccactctttg

SEQ ID NO: 192637 - DNA, 30 bp, Artificial Sequence
  Synthetic oligonucleotide
ggatggtacgacggcactacccgctctttg

SEQ ID NO: 192638 - DNA, 30 bp, Artificial Sequence
  Synthetic oligonucleotide
cgcggccgatagatagcgtaatgttctttg

SEQ ID NO: 192639 - DNA, 30 bp, Artificial Sequence
  Synthetic oligonucleotide
ggacgttcagttgacaagaaaagcagtttg

SEQ ID NO: 192640 - DNA, 35 bp, Artificial Sequence
  Synthetic oligonucleotide
atcgcattcttaattaagggttgcaatttagtttg

SEQ ID NO: 192641 - DNA, 30 bp, Artificial Sequence
  Synthetic oligonucleotide
tggccaggtgcggccatcgtaaatcgtttg

SEQ ID NO: 192642 - DNA, 30 bp, Artificial Sequence
  Synthetic oligonucleotide
cagatcagttgtggctgaacgctaggtttg

SEQ ID NO: 192643 - DNA, 30 bp, Artificial Sequence
  Synthetic oligonucleotide
acagtatacgacgtgccagtattaggtttg

SEQ ID NO: 192644 - DNA, 30 bp, Artificial Sequence
  Synthetic oligonucleotide
tgataatatttattgacaggtcatggtttg

SEQ ID NO: 192645 - DNA, 30 bp, Artificial Sequence
  Synthetic oligonucleotide
ttaccagagctaagtacatcgtgtggtttg

SEQ ID NO: 192646 - DNA, 30 bp, Artificial Sequence
  Synthetic oligonucleotide
ttagttaaccactgtaaaactcaatgtttg

SEQ ID NO: 192647 - DNA, 30 bp, Artificial Sequence
  Synthetic oligonucleotide
cccgtcatgtcgaatatgaatagaattttg

SEQ ID NO: 192648 - DNA, 30 bp, Artificial Sequence
  Synthetic oligonucleotide
gtatgtgagcctatggaaattaacattttg

SEQ ID NO: 192649 - DNA, 30 bp, Artificial Sequence
  Synthetic oligonucleotide
tatggggtggtacgatctgatctcattttg

SEQ ID NO: 192650 - DNA, 30 bp, Artificial Sequence
  Synthetic oligonucleotide
atagtgtaagttagtaagtcagagattttg

SEQ ID NO: 192651 - DNA, 30 bp, Artificial Sequence
  Synthetic oligonucleotide
aggggttactcccatcgagtccggattttg

SEQ ID NO: 192652 - DNA, 30 bp, Artificial Sequence
  Synthetic oligonucleotide
gcgaataaagaaacgtgcaagttgattttg

SEQ ID NO: 192653 - DNA, 30 bp, Artificial Sequence
  Synthetic oligonucleotide
ctgtatacgtcttggcctagagaacttttg

SEQ ID NO: 192654 - DNA, 30 bp, Artificial Sequence
  Synthetic oligonucleotide
taccagaaatccatagtggttaaccttttg

SEQ ID NO: 192655 - DNA, 30 bp, Artificial Sequence
  Synthetic oligonucleotide
aggtgcttaccagattagtagcaccttttg

SEQ ID NO: 192656 - DNA, 30 bp, Artificial Sequence
  Synthetic oligonucleotide
caactcgtccctcagctcgcgatgcttttg

SEQ ID NO: 192657 - DNA, 30 bp, Artificial Sequence
  Synthetic oligonucleotide
cgaaaacgaatagaaatgacataagttttg

SEQ ID NO: 192658 - DNA, 30 bp, Artificial Sequence
  Synthetic oligonucleotide
tctttcgaacctgtcccaatcgtcgttttg

SEQ ID NO: 192659 - DNA, 29 bp, Artificial Sequence
  Synthetic oligonucleotide
gtctggtatgcctcgagtttctggttttg

SEQ ID NO: 192660 - DNA, 30 bp, Artificial Sequence
  Synthetic oligonucleotide
acctaggtcttagtatgtaatcatgttttg

SEQ ID NO: 192661 - DNA, 30 bp, Artificial Sequence
  Synthetic oligonucleotide
aaggccagtcgcggaagggaaacatttttg

SEQ ID NO: 192662 - DNA, 31 bp, Artificial Sequence
  Synthetic oligonucleotide
aaggcaccgacgttcaaacttatcatttttg

SEQ ID NO: 192663 - DNA, 30 bp, Artificial Sequence
  Synthetic oligonucleotide
gtgtacccatctagatgggatggctttttg

SEQ ID NO: 192664 - DNA, 30 bp, Artificial Sequence
  Synthetic oligonucleotide
cgtgagcgatcgtaattcagttattttttg

SEQ ID NO: 192665 - DNA, 30 bp, Artificial Sequence
  Synthetic oligonucleotide
ttggggatctcggtataataggcttttttg

SEQ ID NO: 192666 - DNA, 30 bp, Artificial Sequence
  Synthetic oligonucleotide
cacatagaatggacccttctctcttttttg

SEQ ID NO: 192667 - DNA, 30 bp, Artificial Sequence
  Synthetic oligonucleotide
gaccaagacaaccgtcataccatttttttg

SEQ ID NO: 192668 - DNA, 30 bp, Artificial Sequence
  Synthetic oligonucleotide
tcatgaggcctgtgcagtctgtgaaaaaat

SEQ ID NO: 192669 - DNA, 30 bp, Artificial Sequence
  Synthetic oligonucleotide
ccgtcttaagagaagacagcttccaaaaat

SEQ ID NO: 192670 - DNA, 30 bp, Artificial Sequence
  Synthetic oligonucleotide
agaagggggggacgacttgggttcaaaaat

SEQ ID NO: 192671 - DNA, 30 bp, Artificial Sequence
  Synthetic oligonucleotide
gcatgagcagttgatgaccgagctaaaaat

SEQ ID NO: 192672 - DNA, 30 bp, Artificial Sequence
  Synthetic oligonucleotide
tacgtgatccagggtatacactgtaaaaat

SEQ ID NO: 192673 - DNA, 30 bp, Artificial Sequence
  Synthetic oligonucleotide
gtcgagggcatcctaatcattattaaaaat

SEQ ID NO: 192674 - DNA, 30 bp, Artificial Sequence
  Synthetic oligonucleotide
ctaaaatgactacgaacaagcgcacaaaat

SEQ ID NO: 192675 - DNA, 30 bp, Artificial Sequence
  Synthetic oligonucleotide
ggaggattggttgcggtcgaacgccaaaat

SEQ ID NO: 192676 - DNA, 29 bp, Artificial Sequence
  Synthetic oligonucleotide
tatgtaaagcagaaccgagtacgcaaaat

SEQ ID NO: 192677 - DNA, 30 bp, Artificial Sequence
  Synthetic oligonucleotide
gggtgtagcgaggaatttcatcggcaaaat

SEQ ID NO: 192678 - DNA, 30 bp, Artificial Sequence
  Synthetic oligonucleotide
caaatgccccgtcggtggtgttgtcaaaat

SEQ ID NO: 192679 - DNA, 30 bp, Artificial Sequence
  Synthetic oligonucleotide
caccatcagtcgctgggtctgcttcaaaat

SEQ ID NO: 192680 - DNA, 30 bp, Artificial Sequence
  Synthetic oligonucleotide
aacgtggttcgttaaaattccagagaaaat

SEQ ID NO: 192681 - DNA, 30 bp, Artificial Sequence
  Synthetic oligonucleotide
ttcaacttaaatgtggtgccgatggaaaat

SEQ ID NO: 192682 - DNA, 30 bp, Artificial Sequence
  Synthetic oligonucleotide
agggtgtgaggcgtcaacccagctgaaaat

SEQ ID NO: 192683 - DNA, 30 bp, Artificial Sequence
  Synthetic oligonucleotide
ggtggtgttggctgagcgttagttgaaaat

SEQ ID NO: 192684 - DNA, 30 bp, Artificial Sequence
  Synthetic oligonucleotide
aagcggtaatacaacaggaggacataaaat

SEQ ID NO: 192685 - DNA, 30 bp, Artificial Sequence
  Synthetic oligonucleotide
cagtaggccgggaacatgctgtagtaaaat

SEQ ID NO: 192686 - DNA, 30 bp, Artificial Sequence
  Synthetic oligonucleotide
tatagagtgctcctccagaggctgtaaaat

SEQ ID NO: 192687 - DNA, 30 bp, Artificial Sequence
  Synthetic oligonucleotide
ggtctcacattgaagagcacaggaacaaat

SEQ ID NO: 192688 - DNA, 30 bp, Artificial Sequence
  Synthetic oligonucleotide
gttctgggcccggctgtgataaacacaaat

SEQ ID NO: 192689 - DNA, 30 bp, Artificial Sequence
  Synthetic oligonucleotide
aacctatattgaagcgaggcgccaccaaat

SEQ ID NO: 192690 - DNA, 30 bp, Artificial Sequence
  Synthetic oligonucleotide
agagtcgtagtctaagccaggcagccaaat

SEQ ID NO: 192691 - DNA, 30 bp, Artificial Sequence
  Synthetic oligonucleotide
cgaatatcagccccgtttccttcgccaaat

SEQ ID NO: 192692 - DNA, 30 bp, Artificial Sequence
  Synthetic oligonucleotide
cgagtgctgcaacgtactagggttccaaat

SEQ ID NO: 192693 - DNA, 30 bp, Artificial Sequence
  Synthetic oligonucleotide
cttaaacccaactgcgaactacctgcaaat

SEQ ID NO: 192694 - DNA, 30 bp, Artificial Sequence
  Synthetic oligonucleotide
ctagtgcaactcgaaagttggtttgcaaat

SEQ ID NO: 192695 - DNA, 30 bp, Artificial Sequence
  Synthetic oligonucleotide
aggagggatacataaaaatgtgtatcaaat

SEQ ID NO: 192696 - DNA, 30 bp, Artificial Sequence
  Synthetic oligonucleotide
cgtgatgcaccgagcaaggggtgctcaaat

SEQ ID NO: 192697 - DNA, 30 bp, Artificial Sequence
  Synthetic oligonucleotide
ccaagcaaagccccgattcgactctcaaat

SEQ ID NO: 192698 - DNA, 30 bp, Artificial Sequence
  Synthetic oligonucleotide
agtagcctgcggtactgcataacgtcaaat

SEQ ID NO: 192699 - DNA, 30 bp, Artificial Sequence
  Synthetic oligonucleotide
atgacgggtagtataaacatagcgtcaaat

SEQ ID NO: 192700 - DNA, 30 bp, Artificial Sequence
  Synthetic oligonucleotide
catcaaagattcattagcagatattcaaat

SEQ ID NO: 192701 - DNA, 30 bp, Artificial Sequence
  Synthetic oligonucleotide
accagcatagtaaaacggaaggcttcaaat

SEQ ID NO: 192702 - DNA, 30 bp, Artificial Sequence
  Synthetic oligonucleotide
acagagtgggctcgtggcgtactaagaaat

SEQ ID NO: 192703 - DNA, 30 bp, Artificial Sequence
  Synthetic oligonucleotide
gagcatgggaatgcaaatgagcccagaaat

SEQ ID NO: 192704 - DNA, 30 bp, Artificial Sequence
  Synthetic oligonucleotide
gcgtggcaacagccatctcataatcgaaat

SEQ ID NO: 192705 - DNA, 30 bp, Artificial Sequence
  Synthetic oligonucleotide
tcgtgacccgcaattggcccgcatcgaaat

SEQ ID NO: 192706 - DNA, 30 bp, Artificial Sequence
  Synthetic oligonucleotide
ttatagctgagtcgagtggaatatcgaaat

SEQ ID NO: 192707 - DNA, 30 bp, Artificial Sequence
  Synthetic oligonucleotide
gggttggaggcgctcgggaactatcgaaat

SEQ ID NO: 192708 - DNA, 30 bp, Artificial Sequence
  Synthetic oligonucleotide
gataacggtttgccagatagggtaggaaat

SEQ ID NO: 192709 - DNA, 30 bp, Artificial Sequence
  Synthetic oligonucleotide
ggttagacaggtggtgaataacctggaaat

SEQ ID NO: 192710 - DNA, 30 bp, Artificial Sequence
  Synthetic oligonucleotide
gggagtttattttcgaacagggctggaaat

SEQ ID NO: 192711 - DNA, 30 bp, Artificial Sequence
  Synthetic oligonucleotide
atccaggaaagtagggacacctgatgaaat

SEQ ID NO: 192712 - DNA, 30 bp, Artificial Sequence
  Synthetic oligonucleotide
acgcttctaaaagccatcgtaaactgaaat

SEQ ID NO: 192713 - DNA, 30 bp, Artificial Sequence
  Synthetic oligonucleotide
ttcggcttgtttaagcaacttacctgaaat

SEQ ID NO: 192714 - DNA, 30 bp, Artificial Sequence
  Synthetic oligonucleotide
ttgtagccttagagaacaaacacgtgaaat

SEQ ID NO: 192715 - DNA, 30 bp, Artificial Sequence
  Synthetic oligonucleotide
tggcactattattcagtgcgatggtgaaat

SEQ ID NO: 192716 - DNA, 30 bp, Artificial Sequence
  Synthetic oligonucleotide
atgttccaacaaactagatagacttgaaat

SEQ ID NO: 192717 - DNA, 30 bp, Artificial Sequence
  Synthetic oligonucleotide
ggattactaaagggcaccgtatgaataaat

SEQ ID NO: 192718 - DNA, 30 bp, Artificial Sequence
  Synthetic oligonucleotide
ggggcgcaagatttagcgcagaacctaaat

SEQ ID NO: 192719 - DNA, 30 bp, Artificial Sequence
  Synthetic oligonucleotide
cgctatagttattggaccccacacctaaat

SEQ ID NO: 192720 - DNA, 30 bp, Artificial Sequence
  Synthetic oligonucleotide
gtagggggggcaacgcaaggctcgctaaat

SEQ ID NO: 192721 - DNA, 30 bp, Artificial Sequence
  Synthetic oligonucleotide
aatactggtcactaagcacgtgatctaaat

SEQ ID NO: 192722 - DNA, 30 bp, Artificial Sequence
  Synthetic oligonucleotide
cgaaatcggtgtgaccccggagaagtaaat

SEQ ID NO: 192723 - DNA, 30 bp, Artificial Sequence
  Synthetic oligonucleotide
gcatagatgttttgtaacaatgccgtaaat

SEQ ID NO: 192724 - DNA, 31 bp, Artificial Sequence
  Synthetic oligonucleotide
cattaattcaagcgattcgtccaaggtaaat

SEQ ID NO: 192725 - DNA, 30 bp, Artificial Sequence
  Synthetic oligonucleotide
tgggacacatcgggatacggcagtgtaaat

SEQ ID NO: 192726 - DNA, 31 bp, Artificial Sequence
  Synthetic oligonucleotide
aacctgatctcgggagataagaggtgtaaat

SEQ ID NO: 192727 - DNA, 30 bp, Artificial Sequence
  Synthetic oligonucleotide
gatgcaataaaagaagtcgactgtgtaaat

SEQ ID NO: 192728 - DNA, 30 bp, Artificial Sequence
  Synthetic oligonucleotide
ttcagacagtcacccatggactgattaaat

SEQ ID NO: 192729 - DNA, 30 bp, Artificial Sequence
  Synthetic oligonucleotide
aggatgctaatgatgatgatctgattaaat

SEQ ID NO: 192730 - DNA, 30 bp, Artificial Sequence
  Synthetic oligonucleotide
aaccgcgtgactaggcctctgctcttaaat

SEQ ID NO: 192731 - DNA, 30 bp, Artificial Sequence
  Synthetic oligonucleotide
catgtcaccccgcaatgaatcacgttaaat

SEQ ID NO: 192732 - DNA, 30 bp, Artificial Sequence
  Synthetic oligonucleotide
gactcctcagtaaggacgaagaggttaaat

SEQ ID NO: 192733 - DNA, 30 bp, Artificial Sequence
  Synthetic oligonucleotide
catgccagcataacggcagcgagaaacaat

SEQ ID NO: 192734 - DNA, 30 bp, Artificial Sequence
  Synthetic oligonucleotide
ggtgaattggcgatgtaatagtgaaacaat

SEQ ID NO: 192735 - DNA, 30 bp, Artificial Sequence
  Synthetic oligonucleotide
agtggtggaccaagatccgcagtaaacaat

SEQ ID NO: 192736 - DNA, 30 bp, Artificial Sequence
  Synthetic oligonucleotide
cagagacatgtgcgatgtagatgcaacaat

SEQ ID NO: 192737 - DNA, 30 bp, Artificial Sequence
  Synthetic oligonucleotide
gccacgtccccaccctttaatcagaacaat

SEQ ID NO: 192738 - DNA, 30 bp, Artificial Sequence
  Synthetic oligonucleotide
cggagtgtggcaggcttatgatcgaacaat

SEQ ID NO: 192739 - DNA, 30 bp, Artificial Sequence
  Synthetic oligonucleotide
cggcgtgcgaattttagtgtatcgaacaat

SEQ ID NO: 192740 - DNA, 30 bp, Artificial Sequence
  Synthetic oligonucleotide
gtaaagtttagggtgattcggctgaacaat

SEQ ID NO: 192741 - DNA, 30 bp, Artificial Sequence
  Synthetic oligonucleotide
gaacggtcacgagggcgatttcctaacaat

SEQ ID NO: 192742 - DNA, 30 bp, Artificial Sequence
  Synthetic oligonucleotide
ctcggtaatttagtaattgtggaacacaat

SEQ ID NO: 192743 - DNA, 30 bp, Artificial Sequence
  Synthetic oligonucleotide
acgttcgaggttacggatggagagcacaat

SEQ ID NO: 192744 - DNA, 30 bp, Artificial Sequence
  Synthetic oligonucleotide
gaatagggcacccgcacaaaagtcgacaat

SEQ ID NO: 192745 - DNA, 30 bp, Artificial Sequence
  Synthetic oligonucleotide
tgcgggacattttatagctttggatacaat

SEQ ID NO: 192746 - DNA, 30 bp, Artificial Sequence
  Synthetic oligonucleotide
gatcaccattctaagtgtttcgtatacaat

SEQ ID NO: 192747 - DNA, 30 bp, Artificial Sequence
  Synthetic oligonucleotide
atcgtggtaagaagctgtaggatctacaat

SEQ ID NO: 192748 - DNA, 30 bp, Artificial Sequence
  Synthetic oligonucleotide
tagaaatcgccagtcacgtcactctacaat

SEQ ID NO: 192749 - DNA, 30 bp, Artificial Sequence
  Synthetic oligonucleotide
tttcgtgattagggaataagtacaaccaat

SEQ ID NO: 192750 - DNA, 30 bp, Artificial Sequence
  Synthetic oligonucleotide
gtctgaacagtggtgggacgattaaccaat

SEQ ID NO: 192751 - DNA, 30 bp, Artificial Sequence
  Synthetic oligonucleotide
acagcgtcgatattataaagcagcaccaat

SEQ ID NO: 192752 - DNA, 30 bp, Artificial Sequence
  Synthetic oligonucleotide
gcgatgtaggtagtaaatactttcaccaat

SEQ ID NO: 192753 - DNA, 30 bp, Artificial Sequence
  Synthetic oligonucleotide
agttccagtctgataatgctcgcgaccaat

SEQ ID NO: 192754 - DNA, 30 bp, Artificial Sequence
  Synthetic oligonucleotide
tttagcacgactaaaatccctaggaccaat

SEQ ID NO: 192755 - DNA, 30 bp, Artificial Sequence
  Synthetic oligonucleotide
ccccgaaaccggtgcatgtccatccccaat

SEQ ID NO: 192756 - DNA, 30 bp, Artificial Sequence
  Synthetic oligonucleotide
gggattagtgcgggatagcgggttcccaat

SEQ ID NO: 192757 - DNA, 30 bp, Artificial Sequence
  Synthetic oligonucleotide
ccaacgggcccaagatatctcctcgccaat

SEQ ID NO: 192758 - DNA, 30 bp, Artificial Sequence
  Synthetic oligonucleotide
tctggatgagggaaactgtggcaggccaat

SEQ ID NO: 192759 - DNA, 30 bp, Artificial Sequence
  Synthetic oligonucleotide
taggtccgctccacacttagtaggtccaat

SEQ ID NO: 192760 - DNA, 30 bp, Artificial Sequence
  Synthetic oligonucleotide
cgtacaccctcacagggaattaaaagcaat

SEQ ID NO: 192761 - DNA, 30 bp, Artificial Sequence
  Synthetic oligonucleotide
caccaggatgtagttaactatgcaagcaat

SEQ ID NO: 192762 - DNA, 30 bp, Artificial Sequence
  Synthetic oligonucleotide
tttctgggtaaaaaccttagagcgagcaat

SEQ ID NO: 192763 - DNA, 30 bp, Artificial Sequence
  Synthetic oligonucleotide
gaaaggtagagattacccgagtctagcaat

SEQ ID NO: 192764 - DNA, 30 bp, Artificial Sequence
  Synthetic oligonucleotide
aaacgattgtgggtcagccacattagcaat

SEQ ID NO: 192765 - DNA, 30 bp, Artificial Sequence
  Synthetic oligonucleotide
tccgcgaacgtcaatcttactacgcgcaat

SEQ ID NO: 192766 - DNA, 30 bp, Artificial Sequence
  Synthetic oligonucleotide
cagtcaaacttagtgcggtctgctcgcaat

SEQ ID NO: 192767 - DNA, 30 bp, Artificial Sequence
  Synthetic oligonucleotide
ggccagtatccttgataaacgcgtcgcaat

SEQ ID NO: 192768 - DNA, 30 bp, Artificial Sequence
  Synthetic oligonucleotide
catttacgtgcgggccggcgctttcgcaat

SEQ ID NO: 192769 - DNA, 30 bp, Artificial Sequence
  Synthetic oligonucleotide
tgggaaatggaatattcagtaaaaggcaat

SEQ ID NO: 192770 - DNA, 30 bp, Artificial Sequence
  Synthetic oligonucleotide
gatcaactctataaattacgagaaggcaat

SEQ ID NO: 192771 - DNA, 30 bp, Artificial Sequence
  Synthetic oligonucleotide
aggtaaacgcgcctggtcgacataggcaat

SEQ ID NO: 192772 - DNA, 30 bp, Artificial Sequence
  Synthetic oligonucleotide
catgcagcgatcgtccacacgaagggcaat

SEQ ID NO: 192773 - DNA, 30 bp, Artificial Sequence
  Synthetic oligonucleotide
aaactgagtaacatggctaacaatggcaat

SEQ ID NO: 192774 - DNA, 30 bp, Artificial Sequence
  Synthetic oligonucleotide
ttggtgtcacctgtggctatgcctggcaat

SEQ ID NO: 192775 - DNA, 30 bp, Artificial Sequence
  Synthetic oligonucleotide
ggacttaacaagaatgttgcaaaatgcaat

SEQ ID NO: 192776 - DNA, 30 bp, Artificial Sequence
  Synthetic oligonucleotide
tgtcaggctccaattcgaatgtaatgcaat

SEQ ID NO: 192777 - DNA, 30 bp, Artificial Sequence
  Synthetic oligonucleotide
aaaaaccgtttcaagccctcgctatgcaat

SEQ ID NO: 192778 - DNA, 30 bp, Artificial Sequence
  Synthetic oligonucleotide
ctggctgccagcctagtcttaaccatcaat

SEQ ID NO: 192779 - DNA, 30 bp, Artificial Sequence
  Synthetic oligonucleotide
ctgtctgcatcagaaaggtataggatcaat

SEQ ID NO: 192780 - DNA, 30 bp, Artificial Sequence
  Synthetic oligonucleotide
atgctctcgtcgaaggatcaaaaactcaat

SEQ ID NO: 192781 - DNA, 30 bp, Artificial Sequence
  Synthetic oligonucleotide
caataaaggtttagtggattaagcctcaat

SEQ ID NO: 192782 - DNA, 30 bp, Artificial Sequence
  Synthetic oligonucleotide
ggacgttcagataagttctaacggctcaat

SEQ ID NO: 192783 - DNA, 30 bp, Artificial Sequence
  Synthetic oligonucleotide
tcacataaaatgcccaagtgaagggtcaat

SEQ ID NO: 192784 - DNA, 30 bp, Artificial Sequence
  Synthetic oligonucleotide
tcttaacgtcgaggcgaagttatggtcaat

SEQ ID NO: 192785 - DNA, 30 bp, Artificial Sequence
  Synthetic oligonucleotide
taggtccatcaaccaggaagtctattcaat

SEQ ID NO: 192786 - DNA, 30 bp, Artificial Sequence
  Synthetic oligonucleotide
tgacccaggccggaaatatcggtattcaat

SEQ ID NO: 192787 - DNA, 30 bp, Artificial Sequence
  Synthetic oligonucleotide
gggggcagtcgggtccgatttgtattcaat

SEQ ID NO: 192788 - DNA, 30 bp, Artificial Sequence
  Synthetic oligonucleotide
cggccatcagagttccatatccggttcaat

SEQ ID NO: 192789 - DNA, 30 bp, Artificial Sequence
  Synthetic oligonucleotide
ttgaagagagaccaccgagatatgttcaat

SEQ ID NO: 192790 - DNA, 30 bp, Artificial Sequence
  Synthetic oligonucleotide
ggcacgtgcgagacaactgaagtaaagaat

SEQ ID NO: 192791 - DNA, 30 bp, Artificial Sequence
  Synthetic oligonucleotide
ggcgaggattatgcattgcgcgccaagaat

SEQ ID NO: 192792 - DNA, 30 bp, Artificial Sequence
  Synthetic oligonucleotide
ccatttggtgagggggaatggtccaagaat

SEQ ID NO: 192793 - DNA, 30 bp, Artificial Sequence
  Synthetic oligonucleotide
ggaaagagccaccaccgatcaattaagaat

SEQ ID NO: 192794 - DNA, 30 bp, Artificial Sequence
  Synthetic oligonucleotide
actatcgaaaactctggacctgttaagaat

SEQ ID NO: 192795 - DNA, 30 bp, Artificial Sequence
  Synthetic oligonucleotide
tcacgaggcataaattcgaccgagcagaat

SEQ ID NO: 192796 - DNA, 30 bp, Artificial Sequence
  Synthetic oligonucleotide
ggggaatccttagcagtttatattcagaat

SEQ ID NO: 192797 - DNA, 30 bp, Artificial Sequence
  Synthetic oligonucleotide
tggaatggatttcggggatgcaaagagaat

SEQ ID NO: 192798 - DNA, 30 bp, Artificial Sequence
  Synthetic oligonucleotide
ggtcggaaatgagagaaacccgacgagaat

SEQ ID NO: 192799 - DNA, 30 bp, Artificial Sequence
  Synthetic oligonucleotide
cagtctcgcaatgaaggctcagtcgagaat

SEQ ID NO: 192800 - DNA, 30 bp, Artificial Sequence
  Synthetic oligonucleotide
gctttgtgtctactaaaatccggggagaat

SEQ ID NO: 192801 - DNA, 30 bp, Artificial Sequence
  Synthetic oligonucleotide
ggcaatgtccttaaggttcatcatgagaat

SEQ ID NO: 192802 - DNA, 30 bp, Artificial Sequence
  Synthetic oligonucleotide
gcctccgtttagatttaaatcactgagaat

SEQ ID NO: 192803 - DNA, 30 bp, Artificial Sequence
  Synthetic oligonucleotide
cacttgcaccggataaccacgtcatagaat

SEQ ID NO: 192804 - DNA, 30 bp, Artificial Sequence
  Synthetic oligonucleotide
ataagcacaacacccggcgaacggtagaat

SEQ ID NO: 192805 - DNA, 30 bp, Artificial Sequence
  Synthetic oligonucleotide
taaggcagtggctaccgactcgggtagaat

SEQ ID NO: 192806 - DNA, 30 bp, Artificial Sequence
  Synthetic oligonucleotide
gggggctcttgactgattagatacacgaat

SEQ ID NO: 192807 - DNA, 30 bp, Artificial Sequence
  Synthetic oligonucleotide
actagtaatggaggtgtattcaccacgaat

SEQ ID NO: 192808 - DNA, 30 bp, Artificial Sequence
  Synthetic oligonucleotide
catgtcaaatggtagcactataccacgaat

SEQ ID NO: 192809 - DNA, 30 bp, Artificial Sequence
  Synthetic oligonucleotide
tctggagcgctaaagggtcagcaaccgaat

SEQ ID NO: 192810 - DNA, 30 bp, Artificial Sequence
  Synthetic oligonucleotide
gcgttagctgtcgccctggacataccgaat

SEQ ID NO: 192811 - DNA, 30 bp, Artificial Sequence
  Synthetic oligonucleotide
agattgagtcgttcggtgttatcgccgaat

SEQ ID NO: 192812 - DNA, 30 bp, Artificial Sequence
  Synthetic oligonucleotide
cattagcacctcaactgttccgtgccgaat

SEQ ID NO: 192813 - DNA, 30 bp, Artificial Sequence
  Synthetic oligonucleotide
ggtaggcgcgcggactcaccgtatccgaat

SEQ ID NO: 192814 - DNA, 30 bp, Artificial Sequence
  Synthetic oligonucleotide
ccatgatttctgcgattagtttctccgaat

SEQ ID NO: 192815 - DNA, 30 bp, Artificial Sequence
  Synthetic oligonucleotide
ctaagtcggatccaaggtgagaacgcgaat

SEQ ID NO: 192816 - DNA, 30 bp, Artificial Sequence
  Synthetic oligonucleotide
gcttctttacgaatttgtcaaacggcgaat

SEQ ID NO: 192817 - DNA, 30 bp, Artificial Sequence
  Synthetic oligonucleotide
gctcactgagatgatgtcgcgtgggcgaat

SEQ ID NO: 192818 - DNA, 30 bp, Artificial Sequence
  Synthetic oligonucleotide
ccactcctctgggctggtgactctgcgaat

SEQ ID NO: 192819 - DNA, 30 bp, Artificial Sequence
  Synthetic oligonucleotide
gcaagtgcgcatgcgtattaagttgcgaat

SEQ ID NO: 192820 - DNA, 30 bp, Artificial Sequence
  Synthetic oligonucleotide
aacggcgcaagtatacaccatgtatcgaat

SEQ ID NO: 192821 - DNA, 30 bp, Artificial Sequence
  Synthetic oligonucleotide
aactgtgtattggcgcggatcagctcgaat

SEQ ID NO: 192822 - DNA, 30 bp, Artificial Sequence
  Synthetic oligonucleotide
aagatcagcttctgaaataaattgtcgaat

SEQ ID NO: 192823 - DNA, 30 bp, Artificial Sequence
  Synthetic oligonucleotide
cataaccccgtccataagatgaattcgaat

SEQ ID NO: 192824 - DNA, 30 bp, Artificial Sequence
  Synthetic oligonucleotide
ggtcgtggttcagtacgtagagcttcgaat

SEQ ID NO: 192825 - DNA, 30 bp, Artificial Sequence
  Synthetic oligonucleotide
cccgtagcgtagtctggggaatgaaggaat

SEQ ID NO: 192826 - DNA, 30 bp, Artificial Sequence
  Synthetic oligonucleotide
aggatctagggaactgcatagttaaggaat

SEQ ID NO: 192827 - DNA, 30 bp, Artificial Sequence
  Synthetic oligonucleotide
cctcaagtaaagtgcctataccggaggaat

SEQ ID NO: 192828 - DNA, 30 bp, Artificial Sequence
  Synthetic oligonucleotide
ccgtataatagcgctcggtagctgaggaat

SEQ ID NO: 192829 - DNA, 30 bp, Artificial Sequence
  Synthetic oligonucleotide
acactaaaaggctacggcaaacgacggaat

SEQ ID NO: 192830 - DNA, 30 bp, Artificial Sequence
  Synthetic oligonucleotide
ttgactccgtgtacaatctgcagccggaat

SEQ ID NO: 192831 - DNA, 30 bp, Artificial Sequence
  Synthetic oligonucleotide
tacttggtcatggattcgtatgtgcggaat

SEQ ID NO: 192832 - DNA, 30 bp, Artificial Sequence
  Synthetic oligonucleotide
ggggcgttagaagaatggctgccagggaat

SEQ ID NO: 192833 - DNA, 30 bp, Artificial Sequence
  Synthetic oligonucleotide
ctctcaacctcgcgcatggttcgcgggaat

SEQ ID NO: 192834 - DNA, 30 bp, Artificial Sequence
  Synthetic oligonucleotide
ttgccactttattagctactcatcgggaat

SEQ ID NO: 192835 - DNA, 30 bp, Artificial Sequence
  Synthetic oligonucleotide
agcaagtgaactgagtcctcaaaggggaat

SEQ ID NO: 192836 - DNA, 30 bp, Artificial Sequence
  Synthetic oligonucleotide
gtgtgtaactgtgatccgtttggtgggaat

SEQ ID NO: 192837 - DNA, 30 bp, Artificial Sequence
  Synthetic oligonucleotide
gccacgcttcgagccttagggatctggaat

SEQ ID NO: 192838 - DNA, 30 bp, Artificial Sequence
  Synthetic oligonucleotide
cccgtacaaaagatatctcccgtgtggaat

SEQ ID NO: 192839 - DNA, 30 bp, Artificial Sequence
  Synthetic oligonucleotide
cagcgttactttccatagatcaacatgaat

SEQ ID NO: 192840 - DNA, 30 bp, Artificial Sequence
  Synthetic oligonucleotide
gcaactacgagcaccaatggaacgatgaat

SEQ ID NO: 192841 - DNA, 30 bp, Artificial Sequence
  Synthetic oligonucleotide
accggcttgccgaccgggccaatgatgaat

SEQ ID NO: 192842 - DNA, 30 bp, Artificial Sequence
  Synthetic oligonucleotide
ttacttaagcaagtgtgggagatgatgaat

SEQ ID NO: 192843 - DNA, 30 bp, Artificial Sequence
  Synthetic oligonucleotide
acagcccgatcgcaagaaactgctatgaat

SEQ ID NO: 192844 - DNA, 30 bp, Artificial Sequence
  Synthetic oligonucleotide
gcgggaccgcccgtggccctcgttatgaat

SEQ ID NO: 192845 - DNA, 30 bp, Artificial Sequence
  Synthetic oligonucleotide
ggggtgtgctcatgtcggtgtaaactgaat

SEQ ID NO: 192846 - DNA, 30 bp, Artificial Sequence
  Synthetic oligonucleotide
tgacgctacaaacattaactacaactgaat

SEQ ID NO: 192847 - DNA, 30 bp, Artificial Sequence
  Synthetic oligonucleotide
gagcctgtcaggcccactcgaccactgaat

SEQ ID NO: 192848 - DNA, 30 bp, Artificial Sequence
  Synthetic oligonucleotide
actacattcacaatccacgcgagcctgaat

SEQ ID NO: 192849 - DNA, 30 bp, Artificial Sequence
  Synthetic oligonucleotide
tgttaagaattaaatcaagtcgatctgaat

SEQ ID NO: 192850 - DNA, 30 bp, Artificial Sequence
  Synthetic oligonucleotide
tctgacaaatcgggccgcaaagacgtgaat

SEQ ID NO: 192851 - DNA, 30 bp, Artificial Sequence
  Synthetic oligonucleotide
ccggaatcatagactccgtccagcgtgaat

SEQ ID NO: 192852 - DNA, 30 bp, Artificial Sequence
  Synthetic oligonucleotide
gtgatggttgacagatggtcgctggtgaat

SEQ ID NO: 192853 - DNA, 30 bp, Artificial Sequence
  Synthetic oligonucleotide
gaagttcagttcggacacgagcgtgtgaat

SEQ ID NO: 192854 - DNA, 30 bp, Artificial Sequence
  Synthetic oligonucleotide
ccatattataagaaggttaattaattgaat

SEQ ID NO: 192855 - DNA, 30 bp, Artificial Sequence
  Synthetic oligonucleotide
ggactgcgccaaggcttgtaggggttgaat

SEQ ID NO: 192856 - DNA, 30 bp, Artificial Sequence
  Synthetic oligonucleotide
ttataaagaagtatacactagcacaataat

SEQ ID NO: 192857 - DNA, 30 bp, Artificial Sequence
  Synthetic oligonucleotide
ttctcacagtggttatcgctctacaataat

SEQ ID NO: 192858 - DNA, 30 bp, Artificial Sequence
  Synthetic oligonucleotide
gcgcctggggtagagaccaccagcaataat

SEQ ID NO: 192859 - DNA, 30 bp, Artificial Sequence
  Synthetic oligonucleotide
taagcaactggaaactaatcactcaataat

SEQ ID NO: 192860 - DNA, 30 bp, Artificial Sequence
  Synthetic oligonucleotide
gagcaacgaaatgtcagcgccctcaataat

SEQ ID NO: 192861 - DNA, 30 bp, Artificial Sequence
  Synthetic oligonucleotide
gcacgttacaagagctgcgtaatgaataat

SEQ ID NO: 192862 - DNA, 30 bp, Artificial Sequence
  Synthetic oligonucleotide
cagtatgaagggtgtcttgttctgaataat

SEQ ID NO: 192863 - DNA, 30 bp, Artificial Sequence
  Synthetic oligonucleotide
gggctacggcttaaaaagacgattaataat

SEQ ID NO: 192864 - DNA, 30 bp, Artificial Sequence
  Synthetic oligonucleotide
cgcgattgagggggccccgcaaaccataat

SEQ ID NO: 192865 - DNA, 30 bp, Artificial Sequence
  Synthetic oligonucleotide
aagcaagatcatcacagcatgctccataat

SEQ ID NO: 192866 - DNA, 30 bp, Artificial Sequence
  Synthetic oligonucleotide
tagactgtgcctacgatagaaaagcataat

SEQ ID NO: 192867 - DNA, 30 bp, Artificial Sequence
  Synthetic oligonucleotide
aagttgggggaaggttacaagaagcataat

SEQ ID NO: 192868 - DNA, 30 bp, Artificial Sequence
  Synthetic oligonucleotide
caataaaagaagaagcccccctaagataat

SEQ ID NO: 192869 - DNA, 30 bp, Artificial Sequence
  Synthetic oligonucleotide
gtgaggaaagcggcttcaatggacgataat

SEQ ID NO: 192870 - DNA, 30 bp, Artificial Sequence
  Synthetic oligonucleotide
cacggatccacatacaaggttgccgataat

SEQ ID NO: 192871 - DNA, 30 bp, Artificial Sequence
  Synthetic oligonucleotide
acctctctgtgatgcaaaggccaggataat

SEQ ID NO: 192872 - DNA, 30 bp, Artificial Sequence
  Synthetic oligonucleotide
ggcagagcgtaaatccccggtgatgataat

SEQ ID NO: 192873 - DNA, 30 bp, Artificial Sequence
  Synthetic oligonucleotide
tcatagggaggccagaggaggcttgataat

SEQ ID NO: 192874 - DNA, 30 bp, Artificial Sequence
  Synthetic oligonucleotide
attgatgggcacagagcggattaatataat

SEQ ID NO: 192875 - DNA, 30 bp, Artificial Sequence
  Synthetic oligonucleotide
cacacagtatttaaatttgtagcgtataat

SEQ ID NO: 192876 - DNA, 30 bp, Artificial Sequence
  Synthetic oligonucleotide
ggtcatcaagttgggtattcaccaactaat

SEQ ID NO: 192877 - DNA, 30 bp, Artificial Sequence
  Synthetic oligonucleotide
tcgaccgaataggttcagggtcccactaat

SEQ ID NO: 192878 - DNA, 30 bp, Artificial Sequence
  Synthetic oligonucleotide
atactggaaatcggtgtgaacggcactaat

SEQ ID NO: 192879 - DNA, 30 bp, Artificial Sequence
  Synthetic oligonucleotide
tggtaatcccgcccatcccaacggactaat

SEQ ID NO: 192880 - DNA, 30 bp, Artificial Sequence
  Synthetic oligonucleotide
ggggggcacatctgttataccgggactaat

SEQ ID NO: 192881 - DNA, 30 bp, Artificial Sequence
  Synthetic oligonucleotide
gcagcgcgcggaattatcaagaatactaat

SEQ ID NO: 192882 - DNA, 30 bp, Artificial Sequence
  Synthetic oligonucleotide
ttaaaatacgaaaaggacgtgggtactaat

SEQ ID NO: 192883 - DNA, 30 bp, Artificial Sequence
  Synthetic oligonucleotide
tgatccgatgaacctggggtcgttcctaat

SEQ ID NO: 192884 - DNA, 30 bp, Artificial Sequence
  Synthetic oligonucleotide
atacagtcgtaggtcactcagtcagctaat

SEQ ID NO: 192885 - DNA, 30 bp, Artificial Sequence
  Synthetic oligonucleotide
ctaatgtatccaatgtatatggtagctaat

SEQ ID NO: 192886 - DNA, 30 bp, Artificial Sequence
  Synthetic oligonucleotide
cacaaaataatctgagtaacaaccgctaat

SEQ ID NO: 192887 - DNA, 30 bp, Artificial Sequence
  Synthetic oligonucleotide
ttgttcctgggctcaaaggagattgctaat

SEQ ID NO: 192888 - DNA, 30 bp, Artificial Sequence
  Synthetic oligonucleotide
acagtgaatactcggccagtgacatctaat

SEQ ID NO: 192889 - DNA, 30 bp, Artificial Sequence
  Synthetic oligonucleotide
tagggaaacgaagatcacaccccctctaat

SEQ ID NO: 192890 - DNA, 30 bp, Artificial Sequence
  Synthetic oligonucleotide
attcgtgagagtgggtctcggacgtctaat

SEQ ID NO: 192891 - DNA, 30 bp, Artificial Sequence
  Synthetic oligonucleotide
agtgacaggaaggtggatttcgattctaat

SEQ ID NO: 192892 - DNA, 30 bp, Artificial Sequence
  Synthetic oligonucleotide
aacatatgtagaggtattatgacaagtaat

SEQ ID NO: 192893 - DNA, 30 bp, Artificial Sequence
  Synthetic oligonucleotide
gagatgacaaccatcgagtgcagaagtaat

SEQ ID NO: 192894 - DNA, 30 bp, Artificial Sequence
  Synthetic oligonucleotide
tggacagcgatcgagccggatggaagtaat

SEQ ID NO: 192895 - DNA, 30 bp, Artificial Sequence
  Synthetic oligonucleotide
agatcagcgggattttagctagacagtaat

SEQ ID NO: 192896 - DNA, 30 bp, Artificial Sequence
  Synthetic oligonucleotide
catggcgcctctagaggacccaagagtaat

SEQ ID NO: 192897 - DNA, 30 bp, Artificial Sequence
  Synthetic oligonucleotide
cgcgcgctgtgtggttagttgaagagtaat

SEQ ID NO: 192898 - DNA, 30 bp, Artificial Sequence
  Synthetic oligonucleotide
gtgtattgggtccctacaaagtggagtaat

SEQ ID NO: 192899 - DNA, 30 bp, Artificial Sequence
  Synthetic oligonucleotide
gtagtgctccagcatggtaaccctagtaat

SEQ ID NO: 192900 - DNA, 30 bp, Artificial Sequence
  Synthetic oligonucleotide
gccagggaggtgggttatcggattagtaat

SEQ ID NO: 192901 - DNA, 30 bp, Artificial Sequence
  Synthetic oligonucleotide
gcacactggacaaatattgaaggacgtaat

SEQ ID NO: 192902 - DNA, 30 bp, Artificial Sequence
  Synthetic oligonucleotide
aaggtgtttggaagtagaatgtcccgtaat

SEQ ID NO: 192903 - DNA, 30 bp, Artificial Sequence
  Synthetic oligonucleotide
acaccgatgggcgtgctctggggtcgtaat

SEQ ID NO: 192904 - DNA, 30 bp, Artificial Sequence
  Synthetic oligonucleotide
atgtgtcaacagacataggcaggaggtaat

SEQ ID NO: 192905 - DNA, 30 bp, Artificial Sequence
  Synthetic oligonucleotide
ttcaaggactattcgactagcatcggtaat

SEQ ID NO: 192906 - DNA, 30 bp, Artificial Sequence
  Synthetic oligonucleotide
tcactctgatactaaaacattgcgggtaat

SEQ ID NO: 192907 - DNA, 30 bp, Artificial Sequence
  Synthetic oligonucleotide
aggttcgagtgctttcgtacagtgggtaat

SEQ ID NO: 192908 - DNA, 30 bp, Artificial Sequence
  Synthetic oligonucleotide
taccggtgattggaaccaattggatgtaat

SEQ ID NO: 192909 - DNA, 30 bp, Artificial Sequence
  Synthetic oligonucleotide
cgatgtgatctaaatccagagcgctgtaat

SEQ ID NO: 192910 - DNA, 30 bp, Artificial Sequence
  Synthetic oligonucleotide
acagttgatggggatcattccgcaattaat

SEQ ID NO: 192911 - DNA, 30 bp, Artificial Sequence
  Synthetic oligonucleotide
cagttgaagataagaatcacgtaccttaat

SEQ ID NO: 192912 - DNA, 30 bp, Artificial Sequence
  Synthetic oligonucleotide
ctctgatcgaagagcgttgacgatcttaat

SEQ ID NO: 192913 - DNA, 30 bp, Artificial Sequence
  Synthetic oligonucleotide
taacaggcattaattggcaggccagttaat

SEQ ID NO: 192914 - DNA, 30 bp, Artificial Sequence
  Synthetic oligonucleotide
tcaagtgccctgcagcactgaccatttaat

SEQ ID NO: 192915 - DNA, 30 bp, Artificial Sequence
  Synthetic oligonucleotide
gtaacgtaatccaaatgtggggtatttaat

SEQ ID NO: 192916 - DNA, 30 bp, Artificial Sequence
  Synthetic oligonucleotide
tatacgaaacagacacattacagctttaat

SEQ ID NO: 192917 - DNA, 30 bp, Artificial Sequence
  Synthetic oligonucleotide
attgggcactgtcgggcgttgcgtaaacat

SEQ ID NO: 192918 - DNA, 30 bp, Artificial Sequence
  Synthetic oligonucleotide
tctgagaattcttaaacgattgcacaacat

SEQ ID NO: 192919 - DNA, 30 bp, Artificial Sequence
  Synthetic oligonucleotide
gccagggggatatgagcgccggtacaacat

SEQ ID NO: 192920 - DNA, 30 bp, Artificial Sequence
  Synthetic oligonucleotide
gcggaggaatgtgagcatcgtcgagaacat

SEQ ID NO: 192921 - DNA, 30 bp, Artificial Sequence
  Synthetic oligonucleotide
acagaggatacttacaatgcctgagaacat

SEQ ID NO: 192922 - DNA, 30 bp, Artificial Sequence
  Synthetic oligonucleotide
ggtctaactttgtagatccaccgggaacat

SEQ ID NO: 192923 - DNA, 30 bp, Artificial Sequence
  Synthetic oligonucleotide
cgagtcagatggcgaagccggcctgaacat

SEQ ID NO: 192924 - DNA, 30 bp, Artificial Sequence
  Synthetic oligonucleotide
gtcactacagcgcccagaacgcttgaacat

SEQ ID NO: 192925 - DNA, 30 bp, Artificial Sequence
  Synthetic oligonucleotide
tgtagaggcaagtacgaaatgacctaacat

SEQ ID NO: 192926 - DNA, 30 bp, Artificial Sequence
  Synthetic oligonucleotide
cataaagtcctatctcgccgggcttaacat

SEQ ID NO: 192927 - DNA, 30 bp, Artificial Sequence
  Synthetic oligonucleotide
aacgggagtagtcgtagatcccaaacacat

SEQ ID NO: 192928 - DNA, 30 bp, Artificial Sequence
  Synthetic oligonucleotide
aatgcggcacaattcaggacggaaacacat

SEQ ID NO: 192929 - DNA, 30 bp, Artificial Sequence
  Synthetic oligonucleotide
caggccgcggtcaactgggacagaacacat

SEQ ID NO: 192930 - DNA, 30 bp, Artificial Sequence
  Synthetic oligonucleotide
cggaaggatgtattggtacatgcaccacat

SEQ ID NO: 192931 - DNA, 30 bp, Artificial Sequence
  Synthetic oligonucleotide
gcccagggatgggggaggtcgtagccacat

SEQ ID NO: 192932 - DNA, 30 bp, Artificial Sequence
  Synthetic oligonucleotide
accgtccgtgaatgggtcatccaagcacat

SEQ ID NO: 192933 - DNA, 30 bp, Artificial Sequence
  Synthetic oligonucleotide
taacagcgctagcgttatgaagaagcacat

SEQ ID NO: 192934 - DNA, 30 bp, Artificial Sequence
  Synthetic oligonucleotide
tcgttagaaagacacatcccttcagcacat

SEQ ID NO: 192935 - DNA, 30 bp, Artificial Sequence
  Synthetic oligonucleotide
ccggctccggtaaggctaataatagcacat

SEQ ID NO: 192936 - DNA, 30 bp, Artificial Sequence
  Synthetic oligonucleotide
taatagctcgattctgggttgaagtcacat

SEQ ID NO: 192937 - DNA, 30 bp, Artificial Sequence
  Synthetic oligonucleotide
attcacggcatcgcaagagatcagtcacat

SEQ ID NO: 192938 - DNA, 30 bp, Artificial Sequence
  Synthetic oligonucleotide
gggatgacaagacttgagccatagtcacat

SEQ ID NO: 192939 - DNA, 30 bp, Artificial Sequence
  Synthetic oligonucleotide
ctggcggggggaatgaaccgacgttcacat

SEQ ID NO: 192940 - DNA, 30 bp, Artificial Sequence
  Synthetic oligonucleotide
cttaacccttctcatctgcgtgaaagacat

SEQ ID NO: 192941 - DNA, 30 bp, Artificial Sequence
  Synthetic oligonucleotide
gccgtagagaaggatgatctaagaagacat

SEQ ID NO: 192942 - DNA, 30 bp, Artificial Sequence
  Synthetic oligonucleotide
ttcggatataggacacacactataagacat

SEQ ID NO: 192943 - DNA, 30 bp, Artificial Sequence
  Synthetic oligonucleotide
tgagaaagaatgatcactgctgtaagacat

SEQ ID NO: 192944 - DNA, 30 bp, Artificial Sequence
  Synthetic oligonucleotide
gatgatgctgttcgtttaaggactagacat

SEQ ID NO: 192945 - DNA, 30 bp, Artificial Sequence
  Synthetic oligonucleotide
cgatgacagttccttggcgccttccgacat

SEQ ID NO: 192946 - DNA, 30 bp, Artificial Sequence
  Synthetic oligonucleotide
ttggaccaccatgctgttgactcgcgacat

SEQ ID NO: 192947 - DNA, 30 bp, Artificial Sequence
  Synthetic oligonucleotide
cagagtggatctgtcacaggtgtgcgacat

SEQ ID NO: 192948 - DNA, 30 bp, Artificial Sequence
  Synthetic oligonucleotide
gttcatgtgattagtccaagtttgcgacat

SEQ ID NO: 192949 - DNA, 30 bp, Artificial Sequence
  Synthetic oligonucleotide
cggaagattctattatcccgttatcgacat

SEQ ID NO: 192950 - DNA, 30 bp, Artificial Sequence
  Synthetic oligonucleotide
tcatgccttagaccttaacgcactcgacat

SEQ ID NO: 192951 - DNA, 30 bp, Artificial Sequence
  Synthetic oligonucleotide
cgtcaccagctcaattttgaatacggacat

SEQ ID NO: 192952 - DNA, 30 bp, Artificial Sequence
  Synthetic oligonucleotide
gcggatcatccagactcgcacggcggacat

SEQ ID NO: 192953 - DNA, 30 bp, Artificial Sequence
  Synthetic oligonucleotide
cccaaagatgaagcacccggcaagggacat

SEQ ID NO: 192954 - DNA, 30 bp, Artificial Sequence
  Synthetic oligonucleotide
ggaatccaattagtgcgtgtctctggacat

SEQ ID NO: 192955 - DNA, 30 bp, Artificial Sequence
  Synthetic oligonucleotide
attttgggacaagcgggcgtgtgatgacat

SEQ ID NO: 192956 - DNA, 30 bp, Artificial Sequence
  Synthetic oligonucleotide
aacaaacttggcgacgtatggtactgacat

SEQ ID NO: 192957 - DNA, 30 bp, Artificial Sequence
  Synthetic oligonucleotide
aagcgtaacccagtctactttcagtgacat

SEQ ID NO: 192958 - DNA, 30 bp, Artificial Sequence
  Synthetic oligonucleotide
gaacgggcacctgcgccttccgaaatacat

SEQ ID NO: 192959 - DNA, 30 bp, Artificial Sequence
  Synthetic oligonucleotide
ctctgagctggaatatgtgattgcatacat

SEQ ID NO: 192960 - DNA, 30 bp, Artificial Sequence
  Synthetic oligonucleotide
ctgattaagacaagcaggccagatatacat

SEQ ID NO: 192961 - DNA, 30 bp, Artificial Sequence
  Synthetic oligonucleotide
acgcgcggttggtgagagcaaagtatacat

SEQ ID NO: 192962 - DNA, 30 bp, Artificial Sequence
  Synthetic oligonucleotide
cgagaggggcgggcaatgcgcagcctacat

SEQ ID NO: 192963 - DNA, 30 bp, Artificial Sequence
  Synthetic oligonucleotide
gacgagtaacaagaggagagagtcctacat

SEQ ID NO: 192964 - DNA, 30 bp, Artificial Sequence
  Synthetic oligonucleotide
ggaaggtgacaggaagtctttggtctacat

SEQ ID NO: 192965 - DNA, 30 bp, Artificial Sequence
  Synthetic oligonucleotide
gtgcataggaagtattgagcctaagtacat

SEQ ID NO: 192966 - DNA, 30 bp, Artificial Sequence
  Synthetic oligonucleotide
ttccgagaatcgtcaaaccggtgagtacat

SEQ ID NO: 192967 - DNA, 30 bp, Artificial Sequence
  Synthetic oligonucleotide
cggcctcgtctaccagcgcgccccgtacat

SEQ ID NO: 192968 - DNA, 30 bp, Artificial Sequence
  Synthetic oligonucleotide
ccgtagacaagactatggcacgtcgtacat

SEQ ID NO: 192969 - DNA, 30 bp, Artificial Sequence
  Synthetic oligonucleotide
ttggggagtgtacgttcggatttcgtacat

SEQ ID NO: 192970 - DNA, 30 bp, Artificial Sequence
  Synthetic oligonucleotide
caatgaaacgccctcattcgccgggtacat

SEQ ID NO: 192971 - DNA, 30 bp, Artificial Sequence
  Synthetic oligonucleotide
tacgctactgccatactctaaactgtacat

SEQ ID NO: 192972 - DNA, 30 bp, Artificial Sequence
  Synthetic oligonucleotide
tggccaggtccgagcacattatgattacat

SEQ ID NO: 192973 - DNA, 30 bp, Artificial Sequence
  Synthetic oligonucleotide
acccggacatactggcagctcaacttacat

SEQ ID NO: 192974 - DNA, 30 bp, Artificial Sequence
  Synthetic oligonucleotide
ctcggcaagtagttggatgcgagcttacat

SEQ ID NO: 192975 - DNA, 30 bp, Artificial Sequence
  Synthetic oligonucleotide
ttgctggcgtaacggaacaagcagttacat

SEQ ID NO: 192976 - DNA, 27 bp, Artificial Sequence
  Synthetic oligonucleotide
ccaacgcgtgttatgaacgagttacat

SEQ ID NO: 192977 - DNA, 30 bp, Artificial Sequence
  Synthetic oligonucleotide
actgtaccagctgtatatcattagttacat

SEQ ID NO: 192978 - DNA, 30 bp, Artificial Sequence
  Synthetic oligonucleotide
gctggagacactttgaaacacgcgttacat

SEQ ID NO: 192979 - DNA, 30 bp, Artificial Sequence
  Synthetic oligonucleotide
ctagaaatatccccttagcatgaaaaccat

SEQ ID NO: 192980 - DNA, 30 bp, Artificial Sequence
  Synthetic oligonucleotide
gccccagtcgctggtcttacctaaaaccat

SEQ ID NO: 192981 - DNA, 30 bp, Artificial Sequence
  Synthetic oligonucleotide
tcttggtacgcgggattcacggggaaccat

SEQ ID NO: 192982 - DNA, 30 bp, Artificial Sequence
  Synthetic oligonucleotide
agctattccggcctccgaatagaacaccat

SEQ ID NO: 192983 - DNA, 30 bp, Artificial Sequence
  Synthetic oligonucleotide
ctgagacctaacgatagcgtgagacaccat

SEQ ID NO: 192984 - DNA, 30 bp, Artificial Sequence
  Synthetic oligonucleotide
ctaagtgggaaggacctgggcatacaccat

SEQ ID NO: 192985 - DNA, 31 bp, Artificial Sequence
  Synthetic oligonucleotide
catataagccgaatgcctttacctccaccat

SEQ ID NO: 192986 - DNA, 30 bp, Artificial Sequence
  Synthetic oligonucleotide
gccatcattagacgtgtagtactgcaccat

SEQ ID NO: 192987 - DNA, 30 bp, Artificial Sequence
  Synthetic oligonucleotide
acacacgagagtcagccgtagaatcaccat

SEQ ID NO: 192988 - DNA, 30 bp, Artificial Sequence
  Synthetic oligonucleotide
tatggtccttagtgggccagtgatcaccat

SEQ ID NO: 192989 - DNA, 30 bp, Artificial Sequence
  Synthetic oligonucleotide
ctgcaggagtctcaaactgaacgtcaccat

SEQ ID NO: 192990 - DNA, 30 bp, Artificial Sequence
  Synthetic oligonucleotide
gcaacacgcgtattagatggccgagaccat

SEQ ID NO: 192991 - DNA, 30 bp, Artificial Sequence
  Synthetic oligonucleotide
aacaaccccaacgcaagttgatttgaccat

SEQ ID NO: 192992 - DNA, 30 bp, Artificial Sequence
  Synthetic oligonucleotide
cgcatctgaatccagagatatgtataccat

SEQ ID NO: 192993 - DNA, 30 bp, Artificial Sequence
  Synthetic oligonucleotide
gcgacgttacagcttgcaagccattaccat

SEQ ID NO: 192994 - DNA, 30 bp, Artificial Sequence
  Synthetic oligonucleotide
gggtctcaactgggagaaagatcaacccat

SEQ ID NO: 192995 - DNA, 30 bp, Artificial Sequence
  Synthetic oligonucleotide
tgtcaggaccgaaacgctcgcaagacccat

SEQ ID NO: 192996 - DNA, 30 bp, Artificial Sequence
  Synthetic oligonucleotide
taagagacttcctccagctaagggacccat

SEQ ID NO: 192997 - DNA, 30 bp, Artificial Sequence
  Synthetic oligonucleotide
gccttccgttgattcttagataaagcccat

SEQ ID NO: 192998 - DNA, 30 bp, Artificial Sequence
  Synthetic oligonucleotide
ttgcgtcaatgtacacacatgggcgcccat

SEQ ID NO: 192999 - DNA, 30 bp, Artificial Sequence
  Synthetic oligonucleotide
gccacaggccgaaagctggggctcgcccat

SEQ ID NO: 193000 - DNA, 30 bp, Artificial Sequence
  Synthetic oligonucleotide
aaagagctgacccatgcgagagtggcccat

SEQ ID NO: 193001 - DNA, 30 bp, Artificial Sequence
  Synthetic oligonucleotide
ctaaatgtgtgaagcggaattcatgcccat

SEQ ID NO: 193002 - DNA, 30 bp, Artificial Sequence
  Synthetic oligonucleotide
cattaaaagatagtcaaccttacgtcccat

SEQ ID NO: 193003 - DNA, 30 bp, Artificial Sequence
  Synthetic oligonucleotide
tgcaacgtcctcaaggctaccgcgtcccat

SEQ ID NO: 193004 - DNA, 30 bp, Artificial Sequence
  Synthetic oligonucleotide
ggggactggaccgtataatttgattcccat

SEQ ID NO: 193005 - DNA, 30 bp, Artificial Sequence
  Synthetic oligonucleotide
gtcgctaaggatcgtcgggcttcaagccat

SEQ ID NO: 193006 - DNA, 30 bp, Artificial Sequence
  Synthetic oligonucleotide
tgaggctggggtaggttaattatcagccat

SEQ ID NO: 193007 - DNA, 30 bp, Artificial Sequence
  Synthetic oligonucleotide
aatccgggcaattccttcagagtcagccat

SEQ ID NO: 193008 - DNA, 30 bp, Artificial Sequence
  Synthetic oligonucleotide
atgctactaaggggtggttacatacgccat

SEQ ID NO: 193009 - DNA, 30 bp, Artificial Sequence
  Synthetic oligonucleotide
tcaatgaagcattgtgggtctaggcgccat

SEQ ID NO: 193010 - DNA, 30 bp, Artificial Sequence
  Synthetic oligonucleotide
caggaactggctccaagagccgtgcgccat

SEQ ID NO: 193011 - DNA, 30 bp, Artificial Sequence
  Synthetic oligonucleotide
tctagattcagggggtgagatggcggccat

SEQ ID NO: 193012 - DNA, 30 bp, Artificial Sequence
  Synthetic oligonucleotide
gacatggagccgcatgtattatggggccat

SEQ ID NO: 193013 - DNA, 30 bp, Artificial Sequence
  Synthetic oligonucleotide
aggttctaaatgaacatacactggggccat

SEQ ID NO: 193014 - DNA, 30 bp, Artificial Sequence
  Synthetic oligonucleotide
ctcaaagagcataagatacttaattgccat

SEQ ID NO: 193015 - DNA, 29 bp, Artificial Sequence
  Synthetic oligonucleotide
tcactgagggaaggagctttagaatccat

SEQ ID NO: 193016 - DNA, 30 bp, Artificial Sequence
  Synthetic oligonucleotide
cctagtcaataactggtaagccacatccat

SEQ ID NO: 193017 - DNA, 30 bp, Artificial Sequence
  Synthetic oligonucleotide
tgtctccagtggtgcgtgcttaccatccat

SEQ ID NO: 193018 - DNA, 30 bp, Artificial Sequence
  Synthetic oligonucleotide
aataccacctcggataaacatcagatccat

SEQ ID NO: 193019 - DNA, 30 bp, Artificial Sequence
  Synthetic oligonucleotide
aatggagggaccttaaggcgtgctatccat

SEQ ID NO: 193020 - DNA, 30 bp, Artificial Sequence
  Synthetic oligonucleotide
gtcatttggtgccggcgtgatcaactccat

SEQ ID NO: 193021 - DNA, 30 bp, Artificial Sequence
  Synthetic oligonucleotide
tagcggtatgctgagggagttcaactccat

SEQ ID NO: 193022 - DNA, 30 bp, Artificial Sequence
  Synthetic oligonucleotide
gggtatgtataaaggctccatgagctccat

SEQ ID NO: 193023 - DNA, 30 bp, Artificial Sequence
  Synthetic oligonucleotide
tcggtggggcgcgaagtcggcaggctccat

SEQ ID NO: 193024 - DNA, 30 bp, Artificial Sequence
  Synthetic oligonucleotide
gaagacttgaccattgagtgatgtctccat

SEQ ID NO: 193025 - DNA, 30 bp, Artificial Sequence
  Synthetic oligonucleotide
agcgggagttaggtatagcgtcgagtccat

SEQ ID NO: 193026 - DNA, 30 bp, Artificial Sequence
  Synthetic oligonucleotide
ggcaagtctcagttgaggactagggtccat

SEQ ID NO: 193027 - DNA, 30 bp, Artificial Sequence
  Synthetic oligonucleotide
tggcgggttgtaggtaagtgttatgtccat

SEQ ID NO: 193028 - DNA, 30 bp, Artificial Sequence
  Synthetic oligonucleotide
cggggacccctaatctcgcgcagtgtccat

SEQ ID NO: 193029 - DNA, 30 bp, Artificial Sequence
  Synthetic oligonucleotide
cggctagcgaatggtcaacgcttattccat

SEQ ID NO: 193030 - DNA, 30 bp, Artificial Sequence
  Synthetic oligonucleotide
ccctacttagcacaggatgatatcttccat

SEQ ID NO: 193031 - DNA, 30 bp, Artificial Sequence
  Synthetic oligonucleotide
aacaggacaaaatgtcagtgtttcttccat

SEQ ID NO: 193032 - DNA, 30 bp, Artificial Sequence
  Synthetic oligonucleotide
cccgacgtgagatatagccgaccgttccat

SEQ ID NO: 193033 - DNA, 30 bp, Artificial Sequence
  Synthetic oligonucleotide
gccttgtccattacgaatcgttatttccat

SEQ ID NO: 193034 - DNA, 30 bp, Artificial Sequence
  Synthetic oligonucleotide
taactgcggtcggcgagtttcggaaagcat

SEQ ID NO: 193035 - DNA, 30 bp, Artificial Sequence
  Synthetic oligonucleotide
cggggttgcgttaagcacgcggacaagcat

SEQ ID NO: 193036 - DNA, 30 bp, Artificial Sequence
  Synthetic oligonucleotide
tgtctgacgaccatctcctggggtaagcat

SEQ ID NO: 193037 - DNA, 30 bp, Artificial Sequence
  Synthetic oligonucleotide
ccgggtcattgcggactaagctagcagcat

SEQ ID NO: 193038 - DNA, 30 bp, Artificial Sequence
  Synthetic oligonucleotide
catggtgccgatgttcgcgaagctcagcat

SEQ ID NO: 193039 - DNA, 29 bp, Artificial Sequence
  Synthetic oligonucleotide
acgcgcaaaagctgttagtgtgggagcat

SEQ ID NO: 193040 - DNA, 30 bp, Artificial Sequence
  Synthetic oligonucleotide
agagggacggcagtgtattgtctatagcat

SEQ ID NO: 193041 - DNA, 30 bp, Artificial Sequence
  Synthetic oligonucleotide
gggggcgagcagaactatgtagcctagcat

SEQ ID NO: 193042 - DNA, 30 bp, Artificial Sequence
  Synthetic oligonucleotide
ggaacacgaactataagctgttgctagcat

SEQ ID NO: 193043 - DNA, 30 bp, Artificial Sequence
  Synthetic oligonucleotide
ttcagccgtctgctcactgccccaacgcat

SEQ ID NO: 193044 - DNA, 30 bp, Artificial Sequence
  Synthetic oligonucleotide
agagattggaaactccggcgtcctacgcat

SEQ ID NO: 193045 - DNA, 30 bp, Artificial Sequence
  Synthetic oligonucleotide
acacaagactgccatcacattacaccgcat

SEQ ID NO: 193046 - DNA, 30 bp, Artificial Sequence
  Synthetic oligonucleotide
tagtaccgttagtccacctctgatccgcat

SEQ ID NO: 193047 - DNA, 30 bp, Artificial Sequence
  Synthetic oligonucleotide
tatatgatctaaagccaggtgtctccgcat

SEQ ID NO: 193048 - DNA, 30 bp, Artificial Sequence
  Synthetic oligonucleotide
agcgtacctccttagttagctatcgcgcat

SEQ ID NO: 193049 - DNA, 30 bp, Artificial Sequence
  Synthetic oligonucleotide
ggtcacattaggggagtgataggatcgcat

SEQ ID NO: 193050 - DNA, 30 bp, Artificial Sequence
  Synthetic oligonucleotide
ttgtgcatgagccgatcatcgctctcgcat

SEQ ID NO: 193051 - DNA, 30 bp, Artificial Sequence
  Synthetic oligonucleotide
cgtcttctagcgcttgggactgtctcgcat

SEQ ID NO: 193052 - DNA, 30 bp, Artificial Sequence
  Synthetic oligonucleotide
cactgagcaaatctcagcatcgattcgcat

SEQ ID NO: 193053 - DNA, 30 bp, Artificial Sequence
  Synthetic oligonucleotide
gagaaccgttcatcggttactacttcgcat

SEQ ID NO: 193054 - DNA, 30 bp, Artificial Sequence
  Synthetic oligonucleotide
gtcattattggcaaatcgacgccgaggcat

SEQ ID NO: 193055 - DNA, 30 bp, Artificial Sequence
  Synthetic oligonucleotide
gttggcgagtatactatgactaataggcat

SEQ ID NO: 193056 - DNA, 30 bp, Artificial Sequence
  Synthetic oligonucleotide
cctatctattcgctaccacagattaggcat

SEQ ID NO: 193057 - DNA, 30 bp, Artificial Sequence
  Synthetic oligonucleotide
acagttcaagagtattgagtgtgacggcat

SEQ ID NO: 193058 - DNA, 30 bp, Artificial Sequence
  Synthetic oligonucleotide
acagggattctgttgcccggttgacggcat

SEQ ID NO: 193059 - DNA, 30 bp, Artificial Sequence
  Synthetic oligonucleotide
acctgacatttggaccgacaggtacggcat

SEQ ID NO: 193060 - DNA, 30 bp, Artificial Sequence
  Synthetic oligonucleotide
atcaaacccaaggcagtcgaagatcggcat

SEQ ID NO: 193061 - DNA, 30 bp, Artificial Sequence
  Synthetic oligonucleotide
atgtcgatatgggtagtattttctcggcat

SEQ ID NO: 193062 - DNA, 30 bp, Artificial Sequence
  Synthetic oligonucleotide
atgctggcggagggaacaagttcggggcat

SEQ ID NO: 193063 - DNA, 30 bp, Artificial Sequence
  Synthetic oligonucleotide
tgtttatccggcacccgtggtagggggcat

SEQ ID NO: 193064 - DNA, 30 bp, Artificial Sequence
  Synthetic oligonucleotide
ggtaccgtagagatagtttctcgatggcat

SEQ ID NO: 193065 - DNA, 30 bp, Artificial Sequence
  Synthetic oligonucleotide
caatactcaatggttcttgagtgatggcat

SEQ ID NO: 193066 - DNA, 30 bp, Artificial Sequence
  Synthetic oligonucleotide
atgatatggcctcctgattattcctggcat

SEQ ID NO: 193067 - DNA, 29 bp, Artificial Sequence
  Synthetic oligonucleotide
atgatcagcacattttgcatcagtggcat

SEQ ID NO: 193068 - DNA, 30 bp, Artificial Sequence
  Synthetic oligonucleotide
cgttattaaggcaactgttccaacatgcat

SEQ ID NO: 193069 - DNA, 30 bp, Artificial Sequence
  Synthetic oligonucleotide
aggcgttacgggtgcgctaattccatgcat

SEQ ID NO: 193070 - DNA, 30 bp, Artificial Sequence
  Synthetic oligonucleotide
taagacatgactggtctcccccatatgcat

SEQ ID NO: 193071 - DNA, 30 bp, Artificial Sequence
  Synthetic oligonucleotide
catgccgtgggtcaaggttatgttatgcat

SEQ ID NO: 193072 - DNA, 30 bp, Artificial Sequence
  Synthetic oligonucleotide
accgcattatcatgagccctaacactgcat

SEQ ID NO: 193073 - DNA, 30 bp, Artificial Sequence
  Synthetic oligonucleotide
gtcaatagagattttacttagcacctgcat

SEQ ID NO: 193074 - DNA, 30 bp, Artificial Sequence
  Synthetic oligonucleotide
tttaaggcaatggctaactacttcctgcat

SEQ ID NO: 193075 - DNA, 30 bp, Artificial Sequence
  Synthetic oligonucleotide
gtgtgtctttgcgcgaggtctcagctgcat

SEQ ID NO: 193076 - DNA, 30 bp, Artificial Sequence
  Synthetic oligonucleotide
tcactagttgggtgcctatgtcgcgtgcat

SEQ ID NO: 193077 - DNA, 30 bp, Artificial Sequence
  Synthetic oligonucleotide
agtgttttatatgcgaaataagctgtgcat

SEQ ID NO: 193078 - DNA, 30 bp, Artificial Sequence
  Synthetic oligonucleotide
cgtactacgcctagcgaacacgtcttgcat

SEQ ID NO: 193079 - DNA, 30 bp, Artificial Sequence
  Synthetic oligonucleotide
aggctgaggtggcttctaaaattcttgcat

SEQ ID NO: 193080 - DNA, 30 bp, Artificial Sequence
  Synthetic oligonucleotide
gcaccatattcatatagatgggggttgcat

SEQ ID NO: 193081 - DNA, 30 bp, Artificial Sequence
  Synthetic oligonucleotide
tggagtaacctcgagaccgtgtggttgcat

SEQ ID NO: 193082 - DNA, 30 bp, Artificial Sequence
  Synthetic oligonucleotide
ctcgtaaccgcggtttagaataatttgcat

SEQ ID NO: 193083 - DNA, 30 bp, Artificial Sequence
  Synthetic oligonucleotide
gcaatatctcagtgcgagagcgaaaatcat

SEQ ID NO: 193084 - DNA, 30 bp, Artificial Sequence
  Synthetic oligonucleotide
caggtacatggcatcctgcggtacaatcat

SEQ ID NO: 193085 - DNA, 30 bp, Artificial Sequence
  Synthetic oligonucleotide
aattccgaacactaccgtgggccgaatcat

SEQ ID NO: 193086 - DNA, 30 bp, Artificial Sequence
  Synthetic oligonucleotide
gtgcccccgggtacgggtaagtataatcat

SEQ ID NO: 193087 - DNA, 30 bp, Artificial Sequence
  Synthetic oligonucleotide
cgtatgtgagcgctagcaagcctgcatcat

SEQ ID NO: 193088 - DNA, 30 bp, Artificial Sequence
  Synthetic oligonucleotide
atgcaaactagtccaggctcgagtcatcat

SEQ ID NO: 193089 - DNA, 30 bp, Artificial Sequence
  Synthetic oligonucleotide
tcaatacattggggataagggtcagatcat

SEQ ID NO: 193090 - DNA, 30 bp, Artificial Sequence
  Synthetic oligonucleotide
ccacctaatcatgtgaacggacaggatcat

SEQ ID NO: 193091 - DNA, 30 bp, Artificial Sequence
  Synthetic oligonucleotide
gttggatgattgggccgagcctgatatcat

SEQ ID NO: 193092 - DNA, 30 bp, Artificial Sequence
  Synthetic oligonucleotide
ggcccaggacgagtataattagtctatcat

SEQ ID NO: 193093 - DNA, 30 bp, Artificial Sequence
  Synthetic oligonucleotide
cagtacgtgggtcgacttccaggaactcat

SEQ ID NO: 193094 - DNA, 30 bp, Artificial Sequence
  Synthetic oligonucleotide
ccagtgtagaactgtacatcgggcactcat

SEQ ID NO: 193095 - DNA, 30 bp, Artificial Sequence
  Synthetic oligonucleotide
acaggcattcggatgtttcaggcgactcat

SEQ ID NO: 193096 - DNA, 30 bp, Artificial Sequence
  Synthetic oligonucleotide
ttagacaccggccggcagattcgtactcat

SEQ ID NO: 193097 - DNA, 30 bp, Artificial Sequence
  Synthetic oligonucleotide
aacgaatatattctttttgggtcacctcat

SEQ ID NO: 193098 - DNA, 30 bp, Artificial Sequence
  Synthetic oligonucleotide
aatggggacgtttatggattttggcctcat

SEQ ID NO: 193099 - DNA, 30 bp, Artificial Sequence
  Synthetic oligonucleotide
gggtcggaggagagagtagagcaagctcat

SEQ ID NO: 193100 - DNA, 30 bp, Artificial Sequence
  Synthetic oligonucleotide
tttagggcgcattttaggtagtaggctcat

SEQ ID NO: 193101 - DNA, 30 bp, Artificial Sequence
  Synthetic oligonucleotide
atgtccttagacaaagccagttttgctcat

SEQ ID NO: 193102 - DNA, 30 bp, Artificial Sequence
  Synthetic oligonucleotide
cacggcggaacgccatgacttggaagtcat

SEQ ID NO: 193103 - DNA, 30 bp, Artificial Sequence
  Synthetic oligonucleotide
ctcatgatcaagtcccattctaccagtcat

SEQ ID NO: 193104 - DNA, 30 bp, Artificial Sequence
  Synthetic oligonucleotide
ctacgtagtcaattgggggtagagagtcat

SEQ ID NO: 193105 - DNA, 30 bp, Artificial Sequence
  Synthetic oligonucleotide
gtatatgtcggttcgccacgagtgagtcat

SEQ ID NO: 193106 - DNA, 30 bp, Artificial Sequence
  Synthetic oligonucleotide
cgttagagctcaaatccacgggcacgtcat

SEQ ID NO: 193107 - DNA, 30 bp, Artificial Sequence
  Synthetic oligonucleotide
ggcagcgtaagcgcatagatgactcgtcat

SEQ ID NO: 193108 - DNA, 30 bp, Artificial Sequence
  Synthetic oligonucleotide
gggggcaattctgtaatgctgtttcgtcat

SEQ ID NO: 193109 - DNA, 30 bp, Artificial Sequence
  Synthetic oligonucleotide
ctaaatgtaagatattctcaaccaggtcat

SEQ ID NO: 193110 - DNA, 30 bp, Artificial Sequence
  Synthetic oligonucleotide
aataaactggctgccttggaaccaggtcat

SEQ ID NO: 193111 - DNA, 30 bp, Artificial Sequence
  Synthetic oligonucleotide
gcaatcctacgtcatggctcattcggtcat

SEQ ID NO: 193112 - DNA, 30 bp, Artificial Sequence
  Synthetic oligonucleotide
ccgcgtctgagcgcacagcgtccgggtcat

SEQ ID NO: 193113 - DNA, 30 bp, Artificial Sequence
  Synthetic oligonucleotide
ccatgatgaggcacactctcggtgggtcat

SEQ ID NO: 193114 - DNA, 30 bp, Artificial Sequence
  Synthetic oligonucleotide
catcctggtacagggcggcctctatgtcat

SEQ ID NO: 193115 - DNA, 30 bp, Artificial Sequence
  Synthetic oligonucleotide
agttagttatgcacagcgtgcacgtgtcat

SEQ ID NO: 193116 - DNA, 30 bp, Artificial Sequence
  Synthetic oligonucleotide
caagtgtactctccagactgactgtgtcat

SEQ ID NO: 193117 - DNA, 30 bp, Artificial Sequence
  Synthetic oligonucleotide
cgctcaatgcgtgagagagggggcattcat

SEQ ID NO: 193118 - DNA, 30 bp, Artificial Sequence
  Synthetic oligonucleotide
cacaagttgatgtgatggcgcacacttcat

SEQ ID NO: 193119 - DNA, 30 bp, Artificial Sequence
  Synthetic oligonucleotide
tacgcgacgacgactgaaatagcacttcat

SEQ ID NO: 193120 - DNA, 30 bp, Artificial Sequence
  Synthetic oligonucleotide
caatccacaagcgctaccatccggcttcat

SEQ ID NO: 193121 - DNA, 30 bp, Artificial Sequence
  Synthetic oligonucleotide
aaagaggccggaattctagagtttcttcat

SEQ ID NO: 193122 - DNA, 30 bp, Artificial Sequence
  Synthetic oligonucleotide
gcttacatttggttctgcgaataagttcat

SEQ ID NO: 193123 - DNA, 30 bp, Artificial Sequence
  Synthetic oligonucleotide
gccggcgaagggccgctcgtgacagttcat

SEQ ID NO: 193124 - DNA, 30 bp, Artificial Sequence
  Synthetic oligonucleotide
agaggcgttgtgccccccggacccgttcat

SEQ ID NO: 193125 - DNA, 30 bp, Artificial Sequence
  Synthetic oligonucleotide
cgttgagggggtatcaaaaggtgggttcat

SEQ ID NO: 193126 - DNA, 30 bp, Artificial Sequence
  Synthetic oligonucleotide
cccaacaagaactatagacgaagtgttcat

SEQ ID NO: 193127 - DNA, 30 bp, Artificial Sequence
  Synthetic oligonucleotide
ctcaaacgcgatgaccataagtcgtttcat

SEQ ID NO: 193128 - DNA, 30 bp, Artificial Sequence
  Synthetic oligonucleotide
agaaccgtaccctgatttcaattgtttcat

SEQ ID NO: 193129 - DNA, 30 bp, Artificial Sequence
  Synthetic oligonucleotide
ttgagtgggcgttgaggtgcggaaaaagat

SEQ ID NO: 193130 - DNA, 30 bp, Artificial Sequence
  Synthetic oligonucleotide
cgtatcctgaatagtgttgttacaaaagat

SEQ ID NO: 193131 - DNA, 30 bp, Artificial Sequence
  Synthetic oligonucleotide
aatgaaggcgcaaggagttaattcaaagat

SEQ ID NO: 193132 - DNA, 30 bp, Artificial Sequence
  Synthetic oligonucleotide
gggactatcgggataatgtccaggaaagat

SEQ ID NO: 193133 - DNA, 30 bp, Artificial Sequence
  Synthetic oligonucleotide
tccgatggcaaactaatatctaggaaagat

SEQ ID NO: 193134 - DNA, 30 bp, Artificial Sequence
  Synthetic oligonucleotide
tatccccgtgtaaaatgcgtccggaaagat

SEQ ID NO: 193135 - DNA, 30 bp, Artificial Sequence
  Synthetic oligonucleotide
tagtggagtcagtataaaattagtaaagat

SEQ ID NO: 193136 - DNA, 30 bp, Artificial Sequence
  Synthetic oligonucleotide
taaagaaactcgttatactgcgaacaagat

SEQ ID NO: 193137 - DNA, 30 bp, Artificial Sequence
  Synthetic oligonucleotide
taaaggacaagtcctagaagggtacaagat

SEQ ID NO: 193138 - DNA, 30 bp, Artificial Sequence
  Synthetic oligonucleotide
tgcacattgcttcaactagcgcacgaagat

SEQ ID NO: 193139 - DNA, 30 bp, Artificial Sequence
  Synthetic oligonucleotide
atcgatcgtatagtttatgtcacggaagat

SEQ ID NO: 193140 - DNA, 30 bp, Artificial Sequence
  Synthetic oligonucleotide
ccttactgaatggagctgcagcgggaagat

SEQ ID NO: 193141 - DNA, 30 bp, Artificial Sequence
  Synthetic oligonucleotide
aatccgccaggccagaattaatatgaagat

SEQ ID NO: 193142 - DNA, 30 bp, Artificial Sequence
  Synthetic oligonucleotide
tcacggtgcacgtgggttaaacctgaagat

SEQ ID NO: 193143 - DNA, 30 bp, Artificial Sequence
  Synthetic oligonucleotide
tacaaggacggagtatcggccagctaagat

SEQ ID NO: 193144 - DNA, 30 bp, Artificial Sequence
  Synthetic oligonucleotide
tcaacaatgcaagggggctaagtgtaagat

SEQ ID NO: 193145 - DNA, 30 bp, Artificial Sequence
  Synthetic oligonucleotide
aaacctcgtatctaaagtatccaaacagat

SEQ ID NO: 193146 - DNA, 30 bp, Artificial Sequence
  Synthetic oligonucleotide
gataaagttccatctacgggaacaacagat

SEQ ID NO: 193147 - DNA, 30 bp, Artificial Sequence
  Synthetic oligonucleotide
gttaagatgaggtacttggtaacaacagat

SEQ ID NO: 193148 - DNA, 30 bp, Artificial Sequence
  Synthetic oligonucleotide
gcactgatggtggttgcaggtaacacagat

SEQ ID NO: 193149 - DNA, 30 bp, Artificial Sequence
  Synthetic oligonucleotide
gagctttaagaggaaaatctgccaccagat

SEQ ID NO: 193150 - DNA, 30 bp, Artificial Sequence
  Synthetic oligonucleotide
aagaactatgcaacatactcttgaccagat

SEQ ID NO: 193151 - DNA, 30 bp, Artificial Sequence
  Synthetic oligonucleotide
ggccttagcgcaacctttaacataccagat

SEQ ID NO: 193152 - DNA, 30 bp, Artificial Sequence
  Synthetic oligonucleotide
gccatcaatggggatatgtagaacccagat

SEQ ID NO: 193153 - DNA, 30 bp, Artificial Sequence
  Synthetic oligonucleotide
ctgccgctaaggttacggtggtagccagat

SEQ ID NO: 193154 - DNA, 30 bp, Artificial Sequence
  Synthetic oligonucleotide
aagacttaaagatgagagatgacgccagat

SEQ ID NO: 193155 - DNA, 30 bp, Artificial Sequence
  Synthetic oligonucleotide
aaagctaataaatccgcgtccagagcagat

SEQ ID NO: 193156 - DNA, 30 bp, Artificial Sequence
  Synthetic oligonucleotide
tagcattagtcaaatcagaaaacttcagat

SEQ ID NO: 193157 - DNA, 30 bp, Artificial Sequence
  Synthetic oligonucleotide
acgacgtatgtactgtcgtcacggagagat

SEQ ID NO: 193158 - DNA, 30 bp, Artificial Sequence
  Synthetic oligonucleotide
gtggatcctggttatactggcctgagagat

SEQ ID NO: 193159 - DNA, 30 bp, Artificial Sequence
  Synthetic oligonucleotide
acgcgcaagtgtaaaggttgaagtagagat

SEQ ID NO: 193160 - DNA, 30 bp, Artificial Sequence
  Synthetic oligonucleotide
tgcgtcccgctggaagaaagtgttagagat

SEQ ID NO: 193161 - DNA, 30 bp, Artificial Sequence
  Synthetic oligonucleotide
tccgtgggaggatacagacgttgacgagat

SEQ ID NO: 193162 - DNA, 30 bp, Artificial Sequence
  Synthetic oligonucleotide
gttaagctttaccacattgcattaggagat

SEQ ID NO: 193163 - DNA, 30 bp, Artificial Sequence
  Synthetic oligonucleotide
gttaacacatgaagctgctagccgggagat

SEQ ID NO: 193164 - DNA, 30 bp, Artificial Sequence
  Synthetic oligonucleotide
tgtcaaaagctaagcgccgtaagtggagat

SEQ ID NO: 193165 - DNA, 30 bp, Artificial Sequence
  Synthetic oligonucleotide
caataagggccgagatgtgggccatgagat

SEQ ID NO: 193166 - DNA, 30 bp, Artificial Sequence
  Synthetic oligonucleotide
ctactcggatgcgagcgcacaaagtgagat

SEQ ID NO: 193167 - DNA, 30 bp, Artificial Sequence
  Synthetic oligonucleotide
atgttttggattcgcccgaagggttgagat

SEQ ID NO: 193168 - DNA, 30 bp, Artificial Sequence
  Synthetic oligonucleotide
cgtcggttagactgccgacacgtttgagat

SEQ ID NO: 193169 - DNA, 30 bp, Artificial Sequence
  Synthetic oligonucleotide
gcttacagtacgtctcttagtggaatagat

SEQ ID NO: 193170 - DNA, 30 bp, Artificial Sequence
  Synthetic oligonucleotide
gatgtaaccggtacgccaaaagtaatagat

SEQ ID NO: 193171 - DNA, 30 bp, Artificial Sequence
  Synthetic oligonucleotide
gggcctaattaatgggaaacccgcatagat

SEQ ID NO: 193172 - DNA, 30 bp, Artificial Sequence
  Synthetic oligonucleotide
acggttagcgtccggcagaatgcgatagat

SEQ ID NO: 193173 - DNA, 30 bp, Artificial Sequence
  Synthetic oligonucleotide
acttggagaccgcgggggggctggatagat

SEQ ID NO: 193174 - DNA, 30 bp, Artificial Sequence
  Synthetic oligonucleotide
gttagattaccacaaaaatccaatatagat

SEQ ID NO: 193175 - DNA, 30 bp, Artificial Sequence
  Synthetic oligonucleotide
agtgacccgacgggtgctgaccatatagat

SEQ ID NO: 193176 - DNA, 30 bp, Artificial Sequence
  Synthetic oligonucleotide
aatcggggtggatttcggttaaagctagat

SEQ ID NO: 193177 - DNA, 30 bp, Artificial Sequence
  Synthetic oligonucleotide
gtgaaaggttaacccgtgagatagctagat

SEQ ID NO: 193178 - DNA, 30 bp, Artificial Sequence
  Synthetic oligonucleotide
acaaaatacaagttcacctaatcgctagat

SEQ ID NO: 193179 - DNA, 30 bp, Artificial Sequence
  Synthetic oligonucleotide
taggtgacattcagcttcggacatctagat

SEQ ID NO: 193180 - DNA, 30 bp, Artificial Sequence
  Synthetic oligonucleotide
tgtctcgaggttcgatagtctaacgtagat

SEQ ID NO: 193181 - DNA, 30 bp, Artificial Sequence
  Synthetic oligonucleotide
attaggtccgacgaggaagcgtagttagat

SEQ ID NO: 193182 - DNA, 30 bp, Artificial Sequence
  Synthetic oligonucleotide
caagggaaggggctacggccttgtttagat

SEQ ID NO: 193183 - DNA, 30 bp, Artificial Sequence
  Synthetic oligonucleotide
ttttggaactacgaggtgagtctaaacgat

SEQ ID NO: 193184 - DNA, 30 bp, Artificial Sequence
  Synthetic oligonucleotide
aatggacttgggatgaacaatttaaacgat

SEQ ID NO: 193185 - DNA, 30 bp, Artificial Sequence
  Synthetic oligonucleotide
tgggtgaaaacacgacggtaccacaacgat

SEQ ID NO: 193186 - DNA, 30 bp, Artificial Sequence
  Synthetic oligonucleotide
tgccgtagtatcatattgcttgagaacgat

SEQ ID NO: 193187 - DNA, 30 bp, Artificial Sequence
  Synthetic oligonucleotide
ccgaatgcggagcctaaaaaacttaacgat

SEQ ID NO: 193188 - DNA, 30 bp, Artificial Sequence
  Synthetic oligonucleotide
cagagagcagagtatttcgtaacccacgat

SEQ ID NO: 193189 - DNA, 30 bp, Artificial Sequence
  Synthetic oligonucleotide
cgtagggttaaaaggcgtctccgtcacgat

SEQ ID NO: 193190 - DNA, 30 bp, Artificial Sequence
  Synthetic oligonucleotide
cactccgtcccctcataaataacggacgat

SEQ ID NO: 193191 - DNA, 30 bp, Artificial Sequence
  Synthetic oligonucleotide
gaccttctagataggcgcgattactacgat

SEQ ID NO: 193192 - DNA, 30 bp, Artificial Sequence
  Synthetic oligonucleotide
actcggacgggggaccacgtctacaccgat

SEQ ID NO: 193193 - DNA, 30 bp, Artificial Sequence
  Synthetic oligonucleotide
acgagagcctagccgaatcctgttaccgat

SEQ ID NO: 193194 - DNA, 30 bp, Artificial Sequence
  Synthetic oligonucleotide
ccttccgtatcgcttccgagtcaacccgat

SEQ ID NO: 193195 - DNA, 30 bp, Artificial Sequence
  Synthetic oligonucleotide
cgcaccgtcagccacagtgttgtacccgat

SEQ ID NO: 193196 - DNA, 30 bp, Artificial Sequence
  Synthetic oligonucleotide
acaatcatggcggattcgcgcgcccccgat

SEQ ID NO: 193197 - DNA, 30 bp, Artificial Sequence
  Synthetic oligonucleotide
gcccaaaagatatatggagtaggccccgat

SEQ ID NO: 193198 - DNA, 30 bp, Artificial Sequence
  Synthetic oligonucleotide
gcctgtggttttagaaatcaatgagccgat

SEQ ID NO: 193199 - DNA, 30 bp, Artificial Sequence
  Synthetic oligonucleotide
aaggtgcatatggctaaagtgagcgccgat

SEQ ID NO: 193200 - DNA, 30 bp, Artificial Sequence
  Synthetic oligonucleotide
tcgatcacgagcggattgaacgctgccgat

SEQ ID NO: 193201 - DNA, 30 bp, Artificial Sequence
  Synthetic oligonucleotide
gataccgaacagttggtctccccgtccgat

SEQ ID NO: 193202 - DNA, 30 bp, Artificial Sequence
  Synthetic oligonucleotide
tcaaccaatgaaaatgcgtactattccgat

SEQ ID NO: 193203 - DNA, 30 bp, Artificial Sequence
  Synthetic oligonucleotide
gcacagctcgtaaaatcgcgccagagcgat

SEQ ID NO: 193204 - DNA, 30 bp, Artificial Sequence
  Synthetic oligonucleotide
gccttgttgcttccaacgatggtgagcgat

SEQ ID NO: 193205 - DNA, 30 bp, Artificial Sequence
  Synthetic oligonucleotide
cagtgtactaaggcatgcctagttagcgat

SEQ ID NO: 193206 - DNA, 30 bp, Artificial Sequence
  Synthetic oligonucleotide
tccggaacatactagtcaaaaaaacgcgat

SEQ ID NO: 193207 - DNA, 30 bp, Artificial Sequence
  Synthetic oligonucleotide
atccaccgcacaaggatacgttagcgcgat

SEQ ID NO: 193208 - DNA, 30 bp, Artificial Sequence
  Synthetic oligonucleotide
gattgacgttcaaacagtaccaatcgcgat

SEQ ID NO: 193209 - DNA, 30 bp, Artificial Sequence
  Synthetic oligonucleotide
tggtgtcgtggtctattgttggttcgcgat

SEQ ID NO: 193210 - DNA, 30 bp, Artificial Sequence
  Synthetic oligonucleotide
agtgagtaacgcttgatagcggaaggcgat

SEQ ID NO: 193211 - DNA, 30 bp, Artificial Sequence
  Synthetic oligonucleotide
tataaataggtaagtggacacttaggcgat

SEQ ID NO: 193212 - DNA, 30 bp, Artificial Sequence
  Synthetic oligonucleotide
atctcacccgagaggagcggccacggcgat

SEQ ID NO: 193213 - DNA, 30 bp, Artificial Sequence
  Synthetic oligonucleotide
atcgccgtttcgccgaggggggttggcgat

SEQ ID NO: 193214 - DNA, 30 bp, Artificial Sequence
  Synthetic oligonucleotide
actgatatcacggctgaatccaaatgcgat

SEQ ID NO: 193215 - DNA, 30 bp, Artificial Sequence
  Synthetic oligonucleotide
cggagcctaattattgaatggaggtgcgat

SEQ ID NO: 193216 - DNA, 30 bp, Artificial Sequence
  Synthetic oligonucleotide
ggcttaagcaatgtatcttgaaattgcgat

SEQ ID NO: 193217 - DNA, 30 bp, Artificial Sequence
  Synthetic oligonucleotide
atagatgtggtggtttgagcggcttgcgat

SEQ ID NO: 193218 - DNA, 30 bp, Artificial Sequence
  Synthetic oligonucleotide
actactgattggtctcgtatgaaaatcgat

SEQ ID NO: 193219 - DNA, 30 bp, Artificial Sequence
  Synthetic oligonucleotide
ctgggaaaaatccataaactccaaatcgat

SEQ ID NO: 193220 - DNA, 30 bp, Artificial Sequence
  Synthetic oligonucleotide
ttgcagaacatagcgtaattgtatatcgat

SEQ ID NO: 193221 - DNA, 30 bp, Artificial Sequence
  Synthetic oligonucleotide
caacgccaggtgagtacagcagaactcgat

SEQ ID NO: 193222 - DNA, 30 bp, Artificial Sequence
  Synthetic oligonucleotide
agacgtcgactcatctgcgccatgctcgat

SEQ ID NO: 193223 - DNA, 30 bp, Artificial Sequence
  Synthetic oligonucleotide
agacgtcttaaagagtggtagagtctcgat

SEQ ID NO: 193224 - DNA, 30 bp, Artificial Sequence
  Synthetic oligonucleotide
actaagtggtttcaactgacctgtctcgat

SEQ ID NO: 193225 - DNA, 30 bp, Artificial Sequence
  Synthetic oligonucleotide
gtatcgaactgacatgaaccacacgtcgat

SEQ ID NO: 193226 - DNA, 30 bp, Artificial Sequence
  Synthetic oligonucleotide
acgcagtaacagctaaaaagatgattcgat

SEQ ID NO: 193227 - DNA, 30 bp, Artificial Sequence
  Synthetic oligonucleotide
agaggaacactgtcatgtagaatattcgat

SEQ ID NO: 193228 - DNA, 29 bp, Artificial Sequence
  Synthetic oligonucleotide
acgtcgaaggtaaaccaggatccttcgat

SEQ ID NO: 193229 - DNA, 28 bp, Artificial Sequence
  Synthetic oligonucleotide
agagggtataactcgtacgtgcttcgat

SEQ ID NO: 193230 - DNA, 30 bp, Artificial Sequence
  Synthetic oligonucleotide
aaccgcacgcgtagatggtgattcttcgat

SEQ ID NO: 193231 - DNA, 30 bp, Artificial Sequence
  Synthetic oligonucleotide
gcatagctggtaccagactagcagttcgat

SEQ ID NO: 193232 - DNA, 30 bp, Artificial Sequence
  Synthetic oligonucleotide
cacagcagaacatggggcaagcttttcgat

SEQ ID NO: 193233 - DNA, 30 bp, Artificial Sequence
  Synthetic oligonucleotide
actcaggcaatgggcaaaacatttttcgat

SEQ ID NO: 193234 - DNA, 30 bp, Artificial Sequence
  Synthetic oligonucleotide
actcagatatcattctaaataaaaaaggat

SEQ ID NO: 193235 - DNA, 30 bp, Artificial Sequence
  Synthetic oligonucleotide
ccccgaattatagggctgggtcgcaaggat

SEQ ID NO: 193236 - DNA, 30 bp, Artificial Sequence
  Synthetic oligonucleotide
aagggtaaggaaaacccaggcaggaaggat

SEQ ID NO: 193237 - DNA, 30 bp, Artificial Sequence
  Synthetic oligonucleotide
gactaatctgtggtctatgaatgtaaggat

SEQ ID NO: 193238 - DNA, 30 bp, Artificial Sequence
  Synthetic oligonucleotide
agcgtactgagaataacgccggttaaggat

SEQ ID NO: 193239 - DNA, 30 bp, Artificial Sequence
  Synthetic oligonucleotide
ataagtgaggtgatagctatgaatcaggat

SEQ ID NO: 193240 - DNA, 30 bp, Artificial Sequence
  Synthetic oligonucleotide
cgcgacctaagggggccccaaagtcaggat

SEQ ID NO: 193241 - DNA, 30 bp, Artificial Sequence
  Synthetic oligonucleotide
taacatctacagcccacgaatgcggaggat

SEQ ID NO: 193242 - DNA, 30 bp, Artificial Sequence
  Synthetic oligonucleotide
cgccagggaggtcgttgggagggggaggat

SEQ ID NO: 193243 - DNA, 30 bp, Artificial Sequence
  Synthetic oligonucleotide
tgcaccaataactacaaagttaatgaggat

SEQ ID NO: 193244 - DNA, 30 bp, Artificial Sequence
  Synthetic oligonucleotide
ctgtaggtctgcgtatagcgttctgaggat

SEQ ID NO: 193245 - DNA, 30 bp, Artificial Sequence
  Synthetic oligonucleotide
gggtgtgtagtatcaacatccgtttaggat

SEQ ID NO: 193246 - DNA, 30 bp, Artificial Sequence
  Synthetic oligonucleotide
ctgggcttgagccgtgtgtaaaaaacggat

SEQ ID NO: 193247 - DNA, 30 bp, Artificial Sequence
  Synthetic oligonucleotide
cgtaaggccttaggtgagaatagcacggat

SEQ ID NO: 193248 - DNA, 30 bp, Artificial Sequence
  Synthetic oligonucleotide
cacgctcaatgtcttaggacacggacggat

SEQ ID NO: 193249 - DNA, 30 bp, Artificial Sequence
  Synthetic oligonucleotide
ggtgcccgaacgaaccgagtaatgacggat

SEQ ID NO: 193250 - DNA, 30 bp, Artificial Sequence
  Synthetic oligonucleotide
acaactcgggtggggcgtcatgggccggat

SEQ ID NO: 193251 - DNA, 30 bp, Artificial Sequence
  Synthetic oligonucleotide
cagtcgaatacaccggcagtgtctccggat

SEQ ID NO: 193252 - DNA, 30 bp, Artificial Sequence
  Synthetic oligonucleotide
ggcatctgatcgaagtaaaaatgtccggat

SEQ ID NO: 193253 - DNA, 30 bp, Artificial Sequence
  Synthetic oligonucleotide
acttaccgtgtggttgaatgcattccggat

SEQ ID NO: 193254 - DNA, 30 bp, Artificial Sequence
  Synthetic oligonucleotide
agtgggttgacaagggtcaaccaagcggat

SEQ ID NO: 193255 - DNA, 30 bp, Artificial Sequence
  Synthetic oligonucleotide
tgtgcgtacttgctgtatataggcgcggat

SEQ ID NO: 193256 - DNA, 30 bp, Artificial Sequence
  Synthetic oligonucleotide
tgctttaaacgaagacctcatcaatcggat

SEQ ID NO: 193257 - DNA, 30 bp, Artificial Sequence
  Synthetic oligonucleotide
gtacccagggggactgtacgataatcggat

SEQ ID NO: 193258 - DNA, 30 bp, Artificial Sequence
  Synthetic oligonucleotide
taaagctgcggccaacctagtcgctcggat

SEQ ID NO: 193259 - DNA, 30 bp, Artificial Sequence
  Synthetic oligonucleotide
tgaaggattattcaagccagggacagggat

SEQ ID NO: 193260 - DNA, 30 bp, Artificial Sequence
  Synthetic oligonucleotide
gtactttaactccatttagcggccagggat

SEQ ID NO: 193261 - DNA, 30 bp, Artificial Sequence
  Synthetic oligonucleotide
gtgaggtcggagtgaaaaaatccgagggat

SEQ ID NO: 193262 - DNA, 30 bp, Artificial Sequence
  Synthetic oligonucleotide
ggtgaccatcgggctacgacatggagggat

SEQ ID NO: 193263 - DNA, 30 bp, Artificial Sequence
  Synthetic oligonucleotide
atcaagaatatcggaatcggaaatagggat

SEQ ID NO: 193264 - DNA, 30 bp, Artificial Sequence
  Synthetic oligonucleotide
tacgagccagtagcaagtctgcatagggat

SEQ ID NO: 193265 - DNA, 30 bp, Artificial Sequence
  Synthetic oligonucleotide
tgggccgggacccaattcccccgtagggat

SEQ ID NO: 193266 - DNA, 30 bp, Artificial Sequence
  Synthetic oligonucleotide
atgggtggcggaaagatatccaaacgggat

SEQ ID NO: 193267 - DNA, 30 bp, Artificial Sequence
  Synthetic oligonucleotide
acgagagctctcgcgacttcctaacgggat

SEQ ID NO: 193268 - DNA, 30 bp, Artificial Sequence
  Synthetic oligonucleotide
agaaaaggcttcatcaaaaggtagcgggat

SEQ ID NO: 193269 - DNA, 30 bp, Artificial Sequence
  Synthetic oligonucleotide
aagagattcttctcgatgacttcgcgggat

SEQ ID NO: 193270 - DNA, 30 bp, Artificial Sequence
  Synthetic oligonucleotide
taggtcggacaaggaaaacgataaggggat

SEQ ID NO: 193271 - DNA, 30 bp, Artificial Sequence
  Synthetic oligonucleotide
agatataagccttccaggttcggaggggat

SEQ ID NO: 193272 - DNA, 30 bp, Artificial Sequence
  Synthetic oligonucleotide
ggggcaatagttgtcaaactgaagggggat

SEQ ID NO: 193273 - DNA, 30 bp, Artificial Sequence
  Synthetic oligonucleotide
catgccaggggaacccacaggctgggggat

SEQ ID NO: 193274 - DNA, 30 bp, Artificial Sequence
  Synthetic oligonucleotide
ccactactatcgctgatagtaaatggggat

SEQ ID NO: 193275 - DNA, 30 bp, Artificial Sequence
  Synthetic oligonucleotide
tcaacagcgtgcaatgtatacactggggat

SEQ ID NO: 193276 - DNA, 30 bp, Artificial Sequence
  Synthetic oligonucleotide
tacttcacctagaacaacaccagtggggat

SEQ ID NO: 193277 - DNA, 30 bp, Artificial Sequence
  Synthetic oligonucleotide
tacaaaacgcgttgaccagtcgttggggat

SEQ ID NO: 193278 - DNA, 30 bp, Artificial Sequence
  Synthetic oligonucleotide
cacctctcgtattacctttgggagtgggat

SEQ ID NO: 193279 - DNA, 30 bp, Artificial Sequence
  Synthetic oligonucleotide
aaggcacaggctatcacccttgagtgggat

SEQ ID NO: 193280 - DNA, 30 bp, Artificial Sequence
  Synthetic oligonucleotide
gcgttcaaggtggatagcgtaagttgggat

SEQ ID NO: 193281 - DNA, 30 bp, Artificial Sequence
  Synthetic oligonucleotide
cgtggtgacatttactgagtgatttgggat

SEQ ID NO: 193282 - DNA, 30 bp, Artificial Sequence
  Synthetic oligonucleotide
agacagtttcgacgtacgggggaaatggat

SEQ ID NO: 193283 - DNA, 30 bp, Artificial Sequence
  Synthetic oligonucleotide
cgcaaagtaacatatttcccgaacatggat

SEQ ID NO: 193284 - DNA, 30 bp, Artificial Sequence
  Synthetic oligonucleotide
aacctgggacgtgggccaatcgagatggat

SEQ ID NO: 193285 - DNA, 30 bp, Artificial Sequence
  Synthetic oligonucleotide
tagttcgcgtgctcggccggatgtatggat

SEQ ID NO: 193286 - DNA, 30 bp, Artificial Sequence
  Synthetic oligonucleotide
aggtaagctacccttacaagacccctggat

SEQ ID NO: 193287 - DNA, 30 bp, Artificial Sequence
  Synthetic oligonucleotide
tatgtcccatgatcctagcatgaagtggat

SEQ ID NO: 193288 - DNA, 30 bp, Artificial Sequence
  Synthetic oligonucleotide
ctgaaaatcgattaaaggagttaagtggat

SEQ ID NO: 193289 - DNA, 30 bp, Artificial Sequence
  Synthetic oligonucleotide
ggtccgcgtttacggtctacgcgagtggat

SEQ ID NO: 193290 - DNA, 30 bp, Artificial Sequence
  Synthetic oligonucleotide
gaagttcggcgagtatcggatcgagtggat

SEQ ID NO: 193291 - DNA, 30 bp, Artificial Sequence
  Synthetic oligonucleotide
gatagatcaacctcctacagaacggtggat

SEQ ID NO: 193292 - DNA, 30 bp, Artificial Sequence
  Synthetic oligonucleotide
ctagttcaatactgtaccataagattggat

SEQ ID NO: 193293 - DNA, 30 bp, Artificial Sequence
  Synthetic oligonucleotide
aagggggctgggagttagtcattattggat

SEQ ID NO: 193294 - DNA, 30 bp, Artificial Sequence
  Synthetic oligonucleotide
cgtacagagattgcaatccctagcttggat

SEQ ID NO: 193295 - DNA, 30 bp, Artificial Sequence
  Synthetic oligonucleotide
ctcactgaagtgccagatggtaatttggat

SEQ ID NO: 193296 - DNA, 30 bp, Artificial Sequence
  Synthetic oligonucleotide
aacaagggtgatgtatgaacaactttggat

SEQ ID NO: 193297 - DNA, 30 bp, Artificial Sequence
  Synthetic oligonucleotide
ggttaatacgaatctaccaaacttttggat

SEQ ID NO: 193298 - DNA, 30 bp, Artificial Sequence
  Synthetic oligonucleotide
cagtgttgagcaccgatatactcaaatgat

SEQ ID NO: 193299 - DNA, 30 bp, Artificial Sequence
  Synthetic oligonucleotide
ctatgtagctcagcagaaatgaagaatgat

SEQ ID NO: 193300 - DNA, 30 bp, Artificial Sequence
  Synthetic oligonucleotide
gggatgaggtttaagttcggtcttaatgat

SEQ ID NO: 193301 - DNA, 30 bp, Artificial Sequence
  Synthetic oligonucleotide
ttgaaattgtcgatacacacatgtcatgat

SEQ ID NO: 193302 - DNA, 30 bp, Artificial Sequence
  Synthetic oligonucleotide
ccttgacagagaatgtcaatccgagatgat

SEQ ID NO: 193303 - DNA, 30 bp, Artificial Sequence
  Synthetic oligonucleotide
aacgacgacaccacgcgtgtaggcgatgat

SEQ ID NO: 193304 - DNA, 30 bp, Artificial Sequence
  Synthetic oligonucleotide
acgcaaagtctctagggaatagtcgatgat

SEQ ID NO: 193305 - DNA, 30 bp, Artificial Sequence
  Synthetic oligonucleotide
cagtctgttgggataagggacagggatgat

SEQ ID NO: 193306 - DNA, 30 bp, Artificial Sequence
  Synthetic oligonucleotide
gcttgtatccagtgcgtaatcgcatatgat

SEQ ID NO: 193307 - DNA, 30 bp, Artificial Sequence
  Synthetic oligonucleotide
tcagaatgatcgtttagttgtgtatatgat

SEQ ID NO: 193308 - DNA, 30 bp, Artificial Sequence
  Synthetic oligonucleotide
cacgttgatcgaaacgacgagcggtatgat

SEQ ID NO: 193309 - DNA, 30 bp, Artificial Sequence
  Synthetic oligonucleotide
ggacatctagaagaaaacacgttgtatgat

SEQ ID NO: 193310 - DNA, 30 bp, Artificial Sequence
  Synthetic oligonucleotide
cagacgaggtcacggggggtacgaactgat

SEQ ID NO: 193311 - DNA, 30 bp, Artificial Sequence
  Synthetic oligonucleotide
ggatctcatttgcttacttaagtcactgat

SEQ ID NO: 193312 - DNA, 30 bp, Artificial Sequence
  Synthetic oligonucleotide
gtaatgagccagcatagcggtaggactgat

SEQ ID NO: 193313 - DNA, 30 bp, Artificial Sequence
  Synthetic oligonucleotide
cgtagcaagggtgtgaatggtctgactgat

SEQ ID NO: 193314 - DNA, 30 bp, Artificial Sequence
  Synthetic oligonucleotide
ggtataccgcacaaacaaccgaatactgat

SEQ ID NO: 193315 - DNA, 30 bp, Artificial Sequence
  Synthetic oligonucleotide
ggtcatgtcctttaggcaaaaatgcctgat

SEQ ID NO: 193316 - DNA, 30 bp, Artificial Sequence
  Synthetic oligonucleotide
acctccggacctttatctgatttgcctgat

SEQ ID NO: 193317 - DNA, 30 bp, Artificial Sequence
  Synthetic oligonucleotide
agaggtaggttccgactgacgaacgctgat

SEQ ID NO: 193318 - DNA, 30 bp, Artificial Sequence
  Synthetic oligonucleotide
taacgtcggctctgcctgtcaagcgctgat

SEQ ID NO: 193319 - DNA, 30 bp, Artificial Sequence
  Synthetic oligonucleotide
tggctggcccactctagacggagggctgat

SEQ ID NO: 193320 - DNA, 30 bp, Artificial Sequence
  Synthetic oligonucleotide
gtgatctcaacgagtataaaagttgctgat

SEQ ID NO: 193321 - DNA, 30 bp, Artificial Sequence
  Synthetic oligonucleotide
ccacgagccgtatcggacggggcatctgat

SEQ ID NO: 193322 - DNA, 30 bp, Artificial Sequence
  Synthetic oligonucleotide
ctacgtttaaaactgccttctatatctgat

SEQ ID NO: 193323 - DNA, 30 bp, Artificial Sequence
  Synthetic oligonucleotide
ctctacctcctcacatctgatctctctgat

SEQ ID NO: 193324 - DNA, 30 bp, Artificial Sequence
  Synthetic oligonucleotide
gaagtcatcagtcacaaccgattctctgat

SEQ ID NO: 193325 - DNA, 30 bp, Artificial Sequence
  Synthetic oligonucleotide
tggtacttagttcgggatacctaaagtgat

SEQ ID NO: 193326 - DNA, 30 bp, Artificial Sequence
  Synthetic oligonucleotide
ccatggcagcgacgaccctgtagaagtgat

SEQ ID NO: 193327 - DNA, 30 bp, Artificial Sequence
  Synthetic oligonucleotide
catagcaccagaccacagacagccagtgat

SEQ ID NO: 193328 - DNA, 30 bp, Artificial Sequence
  Synthetic oligonucleotide
tcaacatcgaattaggctccgaagagtgat

SEQ ID NO: 193329 - DNA, 30 bp, Artificial Sequence
  Synthetic oligonucleotide
gataaatgattggtaggggaaatgagtgat

SEQ ID NO: 193330 - DNA, 30 bp, Artificial Sequence
  Synthetic oligonucleotide
gcgaggtacaattgggatccgttacgtgat

SEQ ID NO: 193331 - DNA, 30 bp, Artificial Sequence
  Synthetic oligonucleotide
cgatgaatcccttgaggaattattcgtgat

SEQ ID NO: 193332 - DNA, 30 bp, Artificial Sequence
  Synthetic oligonucleotide
tccctgaagggttgtatcacagccggtgat

SEQ ID NO: 193333 - DNA, 30 bp, Artificial Sequence
  Synthetic oligonucleotide
cttagcgagcaaatctcaccgcgcggtgat

SEQ ID NO: 193334 - DNA, 30 bp, Artificial Sequence
  Synthetic oligonucleotide
tgttaaagagaaagccagtaattcggtgat

SEQ ID NO: 193335 - DNA, 30 bp, Artificial Sequence
  Synthetic oligonucleotide
tgataaatacatgcgctagtatagggtgat

SEQ ID NO: 193336 - DNA, 30 bp, Artificial Sequence
  Synthetic oligonucleotide
acttactgaggcgaccagtcaatgggtgat

SEQ ID NO: 193337 - DNA, 30 bp, Artificial Sequence
  Synthetic oligonucleotide
gtaaataatccgcaatcctgtcatggtgat

SEQ ID NO: 193338 - DNA, 30 bp, Artificial Sequence
  Synthetic oligonucleotide
aggcgagactgccgtaagctagctggtgat

SEQ ID NO: 193339 - DNA, 30 bp, Artificial Sequence
  Synthetic oligonucleotide
gtactgagcatcacgggaagggttggtgat

SEQ ID NO: 193340 - DNA, 30 bp, Artificial Sequence
  Synthetic oligonucleotide
catagctaagacatcggtctgaattgtgat

SEQ ID NO: 193341 - DNA, 30 bp, Artificial Sequence
  Synthetic oligonucleotide
cctcatcagcattttgaaacgctttgtgat

SEQ ID NO: 193342 - DNA, 31 bp, Artificial Sequence
  Synthetic oligonucleotide
agcgcaagtgcacgtcgagttgcaaattgat

SEQ ID NO: 193343 - DNA, 30 bp, Artificial Sequence
  Synthetic oligonucleotide
cagagtttataactactgatctgcattgat

SEQ ID NO: 193344 - DNA, 30 bp, Artificial Sequence
  Synthetic oligonucleotide
cagggcgcccacgactgacaagatattgat

SEQ ID NO: 193345 - DNA, 30 bp, Artificial Sequence
  Synthetic oligonucleotide
tcagcgacggcatgaggttgaggtattgat

SEQ ID NO: 193346 - DNA, 30 bp, Artificial Sequence
  Synthetic oligonucleotide
ataaaacccctaggccgaaggactcttgat

SEQ ID NO: 193347 - DNA, 30 bp, Artificial Sequence
  Synthetic oligonucleotide
agtgggcggaccgtaacaatgaaagttgat

SEQ ID NO: 193348 - DNA, 30 bp, Artificial Sequence
  Synthetic oligonucleotide
ttagccggaatctgccgatcttcagttgat

SEQ ID NO: 193349 - DNA, 30 bp, Artificial Sequence
  Synthetic oligonucleotide
tgttggcggcactctgctgcagacgttgat

SEQ ID NO: 193350 - DNA, 30 bp, Artificial Sequence
  Synthetic oligonucleotide
aaacgcggaactaggcatggctccgttgat

SEQ ID NO: 193351 - DNA, 30 bp, Artificial Sequence
  Synthetic oligonucleotide
aggatcgggttgaggacaccctgcgttgat

SEQ ID NO: 193352 - DNA, 30 bp, Artificial Sequence
  Synthetic oligonucleotide
gccctggcgagaagggccccgtaggttgat

SEQ ID NO: 193353 - DNA, 30 bp, Artificial Sequence
  Synthetic oligonucleotide
gagcgataaggtagacgtgagcgatttgat

SEQ ID NO: 193354 - DNA, 30 bp, Artificial Sequence
  Synthetic oligonucleotide
ctccaacacgtgtcagtcgaaacgtttgat

SEQ ID NO: 193355 - DNA, 30 bp, Artificial Sequence
  Synthetic oligonucleotide
tgaacagcaagacgtcttgtatggtttgat

SEQ ID NO: 193356 - DNA, 30 bp, Artificial Sequence
  Synthetic oligonucleotide
tgccatcaatctaggaagcccgacaaatat

SEQ ID NO: 193357 - DNA, 30 bp, Artificial Sequence
  Synthetic oligonucleotide
accggtgtatgtgcccctattgacaaatat

SEQ ID NO: 193358 - DNA, 30 bp, Artificial Sequence
  Synthetic oligonucleotide
ccccgactgacgctgacgctcgaacaatat

SEQ ID NO: 193359 - DNA, 30 bp, Artificial Sequence
  Synthetic oligonucleotide
gtttatagaggacgggacacctgacaatat

SEQ ID NO: 193360 - DNA, 30 bp, Artificial Sequence
  Synthetic oligonucleotide
tttaagtgcgaattaacactggtacaatat

SEQ ID NO: 193361 - DNA, 30 bp, Artificial Sequence
  Synthetic oligonucleotide
ctggatagtgtctaacaacaacgccaatat

SEQ ID NO: 193362 - DNA, 30 bp, Artificial Sequence
  Synthetic oligonucleotide
agcatattcccaaactcattaggccaatat

SEQ ID NO: 193363 - DNA, 30 bp, Artificial Sequence
  Synthetic oligonucleotide
acgacagacacttcggaaactacgcaatat

SEQ ID NO: 193364 - DNA, 30 bp, Artificial Sequence
  Synthetic oligonucleotide
ccaagacttgtagataaagtaaatcaatat

SEQ ID NO: 193365 - DNA, 30 bp, Artificial Sequence
  Synthetic oligonucleotide
atgcggattgtgttcccgtcatctcaatat

SEQ ID NO: 193366 - DNA, 30 bp, Artificial Sequence
  Synthetic oligonucleotide
acggacgacaacttggcgacaggtcaatat

SEQ ID NO: 193367 - DNA, 30 bp, Artificial Sequence
  Synthetic oligonucleotide
tctgttaggtcagagagttgccttcaatat

SEQ ID NO: 193368 - DNA, 30 bp, Artificial Sequence
  Synthetic oligonucleotide
tgtacgaaatcaggtcttatcaacgaatat

SEQ ID NO: 193369 - DNA, 30 bp, Artificial Sequence
  Synthetic oligonucleotide
catatagattcggcccaatgagggtaatat

SEQ ID NO: 193370 - DNA, 30 bp, Artificial Sequence
  Synthetic oligonucleotide
tagcactctggcaataccatagggtaatat

SEQ ID NO: 193371 - DNA, 30 bp, Artificial Sequence
  Synthetic oligonucleotide
agtgttctacacggtgcagaggtgtaatat

SEQ ID NO: 193372 - DNA, 30 bp, Artificial Sequence
  Synthetic oligonucleotide
cattgttaccgaggaatcactaattaatat

SEQ ID NO: 193373 - DNA, 30 bp, Artificial Sequence
  Synthetic oligonucleotide
ctgggaaaggtcgaggtggtacgttaatat

SEQ ID NO: 193374 - DNA, 30 bp, Artificial Sequence
  Synthetic oligonucleotide
gatcaccagttcactccgacatgttaatat

SEQ ID NO: 193375 - DNA, 30 bp, Artificial Sequence
  Synthetic oligonucleotide
caacggcgggggaaacctttatagacatat

SEQ ID NO: 193376 - DNA, 30 bp, Artificial Sequence
  Synthetic oligonucleotide
cgagatttcctcttagacttctatacatat

SEQ ID NO: 193377 - DNA, 30 bp, Artificial Sequence
  Synthetic oligonucleotide
cgctgacaagagatgtaagaaaacccatat

SEQ ID NO: 193378 - DNA, 30 bp, Artificial Sequence
  Synthetic oligonucleotide
ttgtagtatgggcgtagtcatctggcatat

SEQ ID NO: 193379 - DNA, 30 bp, Artificial Sequence
  Synthetic oligonucleotide
cacttagcttagctaagaggggatgcatat

SEQ ID NO: 193380 - DNA, 30 bp, Artificial Sequence
  Synthetic oligonucleotide
acggtcaccgtctagactatggatgcatat

SEQ ID NO: 193381 - DNA, 30 bp, Artificial Sequence
  Synthetic oligonucleotide
ccggaacagcaaaggcagctgaaatcatat

SEQ ID NO: 193382 - DNA, 29 bp, Artificial Sequence
  Synthetic oligonucleotide
ggcattgaagaatgcacctggtatcatat

SEQ ID NO: 193383 - DNA, 30 bp, Artificial Sequence
  Synthetic oligonucleotide
tatccaaccgggacgaccccaatctcatat

SEQ ID NO: 193384 - DNA, 30 bp, Artificial Sequence
  Synthetic oligonucleotide
aaccggtgtgtggcgtacggaagttcatat

SEQ ID NO: 193385 - DNA, 30 bp, Artificial Sequence
  Synthetic oligonucleotide
atagcgcatgggagggacttgttaagatat

SEQ ID NO: 193386 - DNA, 30 bp, Artificial Sequence
  Synthetic oligonucleotide
acagaacacatgcggctcttccacagatat

SEQ ID NO: 193387 - DNA, 30 bp, Artificial Sequence
  Synthetic oligonucleotide
ggagcggtatgccaatcgctttacagatat

SEQ ID NO: 193388 - DNA, 30 bp, Artificial Sequence
  Synthetic oligonucleotide
acaactatccactccgatattcccagatat

SEQ ID NO: 193389 - DNA, 30 bp, Artificial Sequence
  Synthetic oligonucleotide
atggcccaggagaattgtattcccagatat

SEQ ID NO: 193390 - DNA, 30 bp, Artificial Sequence
  Synthetic oligonucleotide
ggcggaggcgccaacgactggcgcagatat

SEQ ID NO: 193391 - DNA, 30 bp, Artificial Sequence
  Synthetic oligonucleotide
cctagtatatcgtgattaacagtcagatat

SEQ ID NO: 193392 - DNA, 30 bp, Artificial Sequence
  Synthetic oligonucleotide
cccatacaagcggcttcgtcaccgagatat

SEQ ID NO: 193393 - DNA, 30 bp, Artificial Sequence
  Synthetic oligonucleotide
cgacccagttctcccaggcaatcgagatat

SEQ ID NO: 193394 - DNA, 30 bp, Artificial Sequence
  Synthetic oligonucleotide
tatggtgcagacaaaacgatgtcgagatat

SEQ ID NO: 193395 - DNA, 30 bp, Artificial Sequence
  Synthetic oligonucleotide
gacgtggtcgctggcgactcgacacgatat

SEQ ID NO: 193396 - DNA, 30 bp, Artificial Sequence
  Synthetic oligonucleotide
tctcgaggtgcacgaagcccccgacgatat

SEQ ID NO: 193397 - DNA, 30 bp, Artificial Sequence
  Synthetic oligonucleotide
gcgcatatacttcgtaagacgggacgatat

SEQ ID NO: 193398 - DNA, 30 bp, Artificial Sequence
  Synthetic oligonucleotide
acacacgtacactagacaggacccggatat

SEQ ID NO: 193399 - DNA, 31 bp, Artificial Sequence
  Synthetic oligonucleotide
tccatgtagtaggagtccatagttcggatat

SEQ ID NO: 193400 - DNA, 30 bp, Artificial Sequence
  Synthetic oligonucleotide
ggtacaagcgacgttgcgttcaatggatat

SEQ ID NO: 193401 - DNA, 30 bp, Artificial Sequence
  Synthetic oligonucleotide
gtcttatgaaaacgaacggtaggtggatat

SEQ ID NO: 193402 - DNA, 30 bp, Artificial Sequence
  Synthetic oligonucleotide
attcctgagttagagcgaaggacatgatat

SEQ ID NO: 193403 - DNA, 30 bp, Artificial Sequence
  Synthetic oligonucleotide
acacacctcaaacaatctagctcatgatat

SEQ ID NO: 193404 - DNA, 30 bp, Artificial Sequence
  Synthetic oligonucleotide
tagattgcaaagatataaaagtattgatat

SEQ ID NO: 193405 - DNA, 30 bp, Artificial Sequence
  Synthetic oligonucleotide
tcgtaaattcttggtggtatttgttgatat

SEQ ID NO: 193406 - DNA, 30 bp, Artificial Sequence
  Synthetic oligonucleotide
agcacataatacgggtcacaaaaaatatat

SEQ ID NO: 193407 - DNA, 30 bp, Artificial Sequence
  Synthetic oligonucleotide
agcccatgaagaaaacaccggatcatatat

SEQ ID NO: 193408 - DNA, 30 bp, Artificial Sequence
  Synthetic oligonucleotide
tgggtatcaccgtcagaaatgcttatatat

SEQ ID NO: 193409 - DNA, 30 bp, Artificial Sequence
  Synthetic oligonucleotide
agctggacatcgaaagcccgacagctatat

SEQ ID NO: 193410 - DNA, 30 bp, Artificial Sequence
  Synthetic oligonucleotide
acgagcgaatttgaaccggttttgctatat

SEQ ID NO: 193411 - DNA, 30 bp, Artificial Sequence
  Synthetic oligonucleotide
atacagtacaagcacgctaagattctatat

SEQ ID NO: 193412 - DNA, 30 bp, Artificial Sequence
  Synthetic oligonucleotide
atggtggatcctggcgaggaaagagtatat

SEQ ID NO: 193413 - DNA, 30 bp, Artificial Sequence
  Synthetic oligonucleotide
ctcaactgacgaagagtcgcatgtgtatat

SEQ ID NO: 193414 - DNA, 30 bp, Artificial Sequence
  Synthetic oligonucleotide
taatgtgtaacaacaggctattgtgtatat

SEQ ID NO: 193415 - DNA, 30 bp, Artificial Sequence
  Synthetic oligonucleotide
aagtgctgtaattagatgaacgttgtatat

SEQ ID NO: 193416 - DNA, 30 bp, Artificial Sequence
  Synthetic oligonucleotide
cgatcagaattaaaaaggactagattatat

SEQ ID NO: 193417 - DNA, 30 bp, Artificial Sequence
  Synthetic oligonucleotide
gcacatccaagtcctcaagcagtattatat

SEQ ID NO: 193418 - DNA, 30 bp, Artificial Sequence
  Synthetic oligonucleotide
gtccgagcgcatatcggtagggctttatat

SEQ ID NO: 193419 - DNA, 30 bp, Artificial Sequence
  Synthetic oligonucleotide
ccgatgatctaggatgccataggtttatat

SEQ ID NO: 193420 - DNA, 30 bp, Artificial Sequence
  Synthetic oligonucleotide
cggcgttagacggtatagagaaaaaactat

SEQ ID NO: 193421 - DNA, 30 bp, Artificial Sequence
  Synthetic oligonucleotide
gcgtgtgtagcgatccatgtagaaaactat

SEQ ID NO: 193422 - DNA, 30 bp, Artificial Sequence
  Synthetic oligonucleotide
gtttcagataggaagtgggagggaaactat

SEQ ID NO: 193423 - DNA, 30 bp, Artificial Sequence
  Synthetic oligonucleotide
gctgtagaggtgtttgcggggagccactat

SEQ ID NO: 193424 - DNA, 30 bp, Artificial Sequence
  Synthetic oligonucleotide
tacacttatcagtcaaatttgaagcactat

SEQ ID NO: 193425 - DNA, 30 bp, Artificial Sequence
  Synthetic oligonucleotide
tgcatgcagtcgaggcaccactaagactat

SEQ ID NO: 193426 - DNA, 30 bp, Artificial Sequence
  Synthetic oligonucleotide
atacggtacataataaaaatcgcctactat

SEQ ID NO: 193427 - DNA, 30 bp, Artificial Sequence
  Synthetic oligonucleotide
atcgcgcactaggctataatgatctactat

SEQ ID NO: 193428 - DNA, 30 bp, Artificial Sequence
  Synthetic oligonucleotide
tgaatcttctgatctcagagaaccacctat

SEQ ID NO: 193429 - DNA, 30 bp, Artificial Sequence
  Synthetic oligonucleotide
gtggcattctccggaccgatcctcacctat

SEQ ID NO: 193430 - DNA, 30 bp, Artificial Sequence
  Synthetic oligonucleotide
cgggtgtatccactataacttcggacctat

SEQ ID NO: 193431 - DNA, 30 bp, Artificial Sequence
  Synthetic oligonucleotide
gatgacagagctcgtctagctatcccctat

SEQ ID NO: 193432 - DNA, 30 bp, Artificial Sequence
  Synthetic oligonucleotide
cgcagctgcaacgtagtatcaaggccctat

SEQ ID NO: 193433 - DNA, 30 bp, Artificial Sequence
  Synthetic oligonucleotide
agggctatgccaacagttatgctgccctat

SEQ ID NO: 193434 - DNA, 30 bp, Artificial Sequence
  Synthetic oligonucleotide
accccaacataagtagggcatgaagcctat

SEQ ID NO: 193435 - DNA, 30 bp, Artificial Sequence
  Synthetic oligonucleotide
ccagtacaagctaccaatcacgtagcctat

SEQ ID NO: 193436 - DNA, 30 bp, Artificial Sequence
  Synthetic oligonucleotide
cacgacattagtgcgacacgtttatcctat

SEQ ID NO: 193437 - DNA, 30 bp, Artificial Sequence
  Synthetic oligonucleotide
atggggtgcgagaagacctaagtctcctat

SEQ ID NO: 193438 - DNA, 30 bp, Artificial Sequence
  Synthetic oligonucleotide
agcccccgcgggcaactgtgccacagctat

SEQ ID NO: 193439 - DNA, 30 bp, Artificial Sequence
  Synthetic oligonucleotide
taatagggaatctattacgggtacagctat

SEQ ID NO: 193440 - DNA, 30 bp, Artificial Sequence
  Synthetic oligonucleotide
cagtctacctatcaggaatgacagagctat

SEQ ID NO: 193441 - DNA, 30 bp, Artificial Sequence
  Synthetic oligonucleotide
gggagcgatatttctaattctcttagctat

SEQ ID NO: 193442 - DNA, 30 bp, Artificial Sequence
  Synthetic oligonucleotide
agcacctctggaggagtagaggtgcgctat

SEQ ID NO: 193443 - DNA, 30 bp, Artificial Sequence
  Synthetic oligonucleotide
gactgtctaacaaacgtctacgggggctat

SEQ ID NO: 193444 - DNA, 30 bp, Artificial Sequence
  Synthetic oligonucleotide
atctagtagttgagaccgatcatgggctat

SEQ ID NO: 193445 - DNA, 30 bp, Artificial Sequence
  Synthetic oligonucleotide
cgggcaatcatgattttatcttatggctat

SEQ ID NO: 193446 - DNA, 30 bp, Artificial Sequence
  Synthetic oligonucleotide
atgggggtatccacttcagggggatgctat

SEQ ID NO: 193447 - DNA, 30 bp, Artificial Sequence
  Synthetic oligonucleotide
acgtgggataattgctacctttactgctat

SEQ ID NO: 193448 - DNA, 30 bp, Artificial Sequence
  Synthetic oligonucleotide
aaccaaggtccagtcgaactatggtgctat

SEQ ID NO: 193449 - DNA, 30 bp, Artificial Sequence
  Synthetic oligonucleotide
gatctttacacgaatacctgtccttgctat

SEQ ID NO: 193450 - DNA, 30 bp, Artificial Sequence
  Synthetic oligonucleotide
gggtaactgggctccccttgcggcatctat

SEQ ID NO: 193451 - DNA, 30 bp, Artificial Sequence
  Synthetic oligonucleotide
tcatcttccacactgtttaatgatatctat

SEQ ID NO: 193452 - DNA, 30 bp, Artificial Sequence
  Synthetic oligonucleotide
aacggccttgcgattggaacacttatctat

SEQ ID NO: 193453 - DNA, 30 bp, Artificial Sequence
  Synthetic oligonucleotide
tggacatgccatacgatccgtcttatctat

SEQ ID NO: 193454 - DNA, 30 bp, Artificial Sequence
  Synthetic oligonucleotide
atagggtaacccctaaacacttcactctat

SEQ ID NO: 193455 - DNA, 30 bp, Artificial Sequence
  Synthetic oligonucleotide
gtttgtctggttcgcgacagtaagctctat

SEQ ID NO: 193456 - DNA, 30 bp, Artificial Sequence
  Synthetic oligonucleotide
agtaggaagaggcctatatcgtggctctat

SEQ ID NO: 193457 - DNA, 30 bp, Artificial Sequence
  Synthetic oligonucleotide
ggttccaggtaaattttagctagagtctat

SEQ ID NO: 193458 - DNA, 30 bp, Artificial Sequence
  Synthetic oligonucleotide
acgtactcccacccgtccaccttcgtctat

SEQ ID NO: 193459 - DNA, 30 bp, Artificial Sequence
  Synthetic oligonucleotide
ctacgccgaattgcaaggcaccgggtctat

SEQ ID NO: 193460 - DNA, 30 bp, Artificial Sequence
  Synthetic oligonucleotide
tcaaggtgatgcgcattggtcgaattctat

SEQ ID NO: 193461 - DNA, 30 bp, Artificial Sequence
  Synthetic oligonucleotide
ggcagaccgcagctggagtcgttgaagtat

SEQ ID NO: 193462 - DNA, 30 bp, Artificial Sequence
  Synthetic oligonucleotide
tcgagacccacaatcaagctgtttaagtat

SEQ ID NO: 193463 - DNA, 30 bp, Artificial Sequence
  Synthetic oligonucleotide
cacccctctgacgggcaagtgccacagtat

SEQ ID NO: 193464 - DNA, 30 bp, Artificial Sequence
  Synthetic oligonucleotide
taggctagggatttggcctcgcgccagtat

SEQ ID NO: 193465 - DNA, 30 bp, Artificial Sequence
  Synthetic oligonucleotide
ccttaaattacacagccttctctccagtat

SEQ ID NO: 193466 - DNA, 30 bp, Artificial Sequence
  Synthetic oligonucleotide
gacgtagctgcaatcttcgagcaggagtat

SEQ ID NO: 193467 - DNA, 30 bp, Artificial Sequence
  Synthetic oligonucleotide
acgtcgatatgtcctggtgattagtagtat

SEQ ID NO: 193468 - DNA, 30 bp, Artificial Sequence
  Synthetic oligonucleotide
gcaggtgaggttaacctccctttttagtat

SEQ ID NO: 193469 - DNA, 30 bp, Artificial Sequence
  Synthetic oligonucleotide
ttactgcaatgcctggtccattgaacgtat

SEQ ID NO: 193470 - DNA, 30 bp, Artificial Sequence
  Synthetic oligonucleotide
gagtagcatgctgcgttgcatcgcacgtat

SEQ ID NO: 193471 - DNA, 30 bp, Artificial Sequence
  Synthetic oligonucleotide
ctacgttatgtggacagtattcgcacgtat

SEQ ID NO: 193472 - DNA, 30 bp, Artificial Sequence
  Synthetic oligonucleotide
ataacatgtttcgtacgccaaccgacgtat

SEQ ID NO: 193473 - DNA, 30 bp, Artificial Sequence
  Synthetic oligonucleotide
acacctcgatcccgctaaagaccaccgtat

SEQ ID NO: 193474 - DNA, 30 bp, Artificial Sequence
  Synthetic oligonucleotide
ttggaggatagcggcgcatcgccaccgtat

SEQ ID NO: 193475 - DNA, 30 bp, Artificial Sequence
  Synthetic oligonucleotide
gcatgcggtataggtgcatgtagaccgtat

SEQ ID NO: 193476 - DNA, 30 bp, Artificial Sequence
  Synthetic oligonucleotide
ctagaaagcctggagcgacttcggccgtat

SEQ ID NO: 193477 - DNA, 30 bp, Artificial Sequence
  Synthetic oligonucleotide
tggataaggactacagttgccgacgcgtat

SEQ ID NO: 193478 - DNA, 30 bp, Artificial Sequence
  Synthetic oligonucleotide
ccgtcatgctcgtaatatgtgtaggcgtat

SEQ ID NO: 193479 - DNA, 30 bp, Artificial Sequence
  Synthetic oligonucleotide
cgggtgttagagcaagcatcaagggcgtat

SEQ ID NO: 193480 - DNA, 30 bp, Artificial Sequence
  Synthetic oligonucleotide
aggtgttccaatgcacgactttttgcgtat

SEQ ID NO: 193481 - DNA, 30 bp, Artificial Sequence
  Synthetic oligonucleotide
gcaggaaattgacaacttgaccgatcgtat

SEQ ID NO: 193482 - DNA, 30 bp, Artificial Sequence
  Synthetic oligonucleotide
tggtaaaaattgtcgagcggttgatcgtat

SEQ ID NO: 193483 - DNA, 30 bp, Artificial Sequence
  Synthetic oligonucleotide
agtgtacccacaggacaggtgcactcgtat

SEQ ID NO: 193484 - DNA, 30 bp, Artificial Sequence
  Synthetic oligonucleotide
tgtaagggaagaaactcgaattactcgtat

SEQ ID NO: 193485 - DNA, 30 bp, Artificial Sequence
  Synthetic oligonucleotide
cagttgaagttataggtggagacctcgtat

SEQ ID NO: 193486 - DNA, 30 bp, Artificial Sequence
  Synthetic oligonucleotide
ctactttgcgttggagttccaaattcgtat

SEQ ID NO: 193487 - DNA, 30 bp, Artificial Sequence
  Synthetic oligonucleotide
cttactctagaggggataggctattcgtat

SEQ ID NO: 193488 - DNA, 30 bp, Artificial Sequence
  Synthetic oligonucleotide
atggtagcaaaatcgaagcaaaaaaggtat

SEQ ID NO: 193489 - DNA, 30 bp, Artificial Sequence
  Synthetic oligonucleotide
aagttcggccaggggttccgtaacaggtat

SEQ ID NO: 193490 - DNA, 30 bp, Artificial Sequence
  Synthetic oligonucleotide
tgttctggaaacacattttatggcaggtat

SEQ ID NO: 193491 - DNA, 30 bp, Artificial Sequence
  Synthetic oligonucleotide
tacacttcaacattttcaaaggcgaggtat

SEQ ID NO: 193492 - DNA, 30 bp, Artificial Sequence
  Synthetic oligonucleotide
agtaagtcgcatggtgtgggcagacggtat

SEQ ID NO: 193493 - DNA, 30 bp, Artificial Sequence
  Synthetic oligonucleotide
ccgccggtgcggactaaacattgacggtat

SEQ ID NO: 193494 - DNA, 30 bp, Artificial Sequence
  Synthetic oligonucleotide
aggaataggcgattatgtgagatccggtat

SEQ ID NO: 193495 - DNA, 30 bp, Artificial Sequence
  Synthetic oligonucleotide
gtaataaaacataaacatccctagcggtat

SEQ ID NO: 193496 - DNA, 30 bp, Artificial Sequence
  Synthetic oligonucleotide
aacatagtcagcatccctcaccaagggtat

SEQ ID NO: 193497 - DNA, 30 bp, Artificial Sequence
  Synthetic oligonucleotide
tgataactcgtactagtcatacgagggtat

SEQ ID NO: 193498 - DNA, 30 bp, Artificial Sequence
  Synthetic oligonucleotide
aagggacggtggacaatgcgcgtagggtat

SEQ ID NO: 193499 - DNA, 30 bp, Artificial Sequence
  Synthetic oligonucleotide
gtcagggctgcctgtctattcatggggtat

SEQ ID NO: 193500 - DNA, 30 bp, Artificial Sequence
  Synthetic oligonucleotide
ttcaaagcccgagtcagaaggaatgggtat

SEQ ID NO: 193501 - DNA, 30 bp, Artificial Sequence
  Synthetic oligonucleotide
aattggagaggatcaggctcgcaatggtat

SEQ ID NO: 193502 - DNA, 30 bp, Artificial Sequence
  Synthetic oligonucleotide
ggggatgaaagggctgggagtcaatggtat

SEQ ID NO: 193503 - DNA, 30 bp, Artificial Sequence
  Synthetic oligonucleotide
ggaagcagacaatgggcgacaccatggtat

SEQ ID NO: 193504 - DNA, 30 bp, Artificial Sequence
  Synthetic oligonucleotide
gaccgagagggtaggttatatggctggtat

SEQ ID NO: 193505 - DNA, 30 bp, Artificial Sequence
  Synthetic oligonucleotide
atgtgatggtcccgggtaagtcagtggtat

SEQ ID NO: 193506 - DNA, 30 bp, Artificial Sequence
  Synthetic oligonucleotide
aagctagatcttgaagatttgtagtggtat

SEQ ID NO: 193507 - DNA, 30 bp, Artificial Sequence
  Synthetic oligonucleotide
tgacttcgtacagccggggccagaatgtat

SEQ ID NO: 193508 - DNA, 30 bp, Artificial Sequence
  Synthetic oligonucleotide
agtatgtcaagtggtgttttttgaatgtat

SEQ ID NO: 193509 - DNA, 30 bp, Artificial Sequence
  Synthetic oligonucleotide
cagtagtacagcgacgtagctaccatgtat

SEQ ID NO: 193510 - DNA, 30 bp, Artificial Sequence
  Synthetic oligonucleotide
agcaatgggccggaattaaataagatgtat

SEQ ID NO: 193511 - DNA, 30 bp, Artificial Sequence
  Synthetic oligonucleotide
ctacctttcggacattagtggtggatgtat

SEQ ID NO: 193512 - DNA, 30 bp, Artificial Sequence
  Synthetic oligonucleotide
gatcggaacctgcaaagtcacagcctgtat

SEQ ID NO: 193513 - DNA, 30 bp, Artificial Sequence
  Synthetic oligonucleotide
ctgatcggtcgcaacacaaccacgctgtat

SEQ ID NO: 193514 - DNA, 30 bp, Artificial Sequence
  Synthetic oligonucleotide
ggtaaaaactacgaccgtacccttctgtat

SEQ ID NO: 193515 - DNA, 30 bp, Artificial Sequence
  Synthetic oligonucleotide
ggttaaaaaatggcagaaacagccgtgtat

SEQ ID NO: 193516 - DNA, 30 bp, Artificial Sequence
  Synthetic oligonucleotide
caaccgtcaaggccatctatctccgtgtat

SEQ ID NO: 193517 - DNA, 30 bp, Artificial Sequence
  Synthetic oligonucleotide
tactgcaaggggaagtgtggccaattgtat

SEQ ID NO: 193518 - DNA, 30 bp, Artificial Sequence
  Synthetic oligonucleotide
tgcgagatgtacctcatcgacgcattgtat

SEQ ID NO: 193519 - DNA, 30 bp, Artificial Sequence
  Synthetic oligonucleotide
agggctaacttacccctcaaccggttgtat

SEQ ID NO: 193520 - DNA, 30 bp, Artificial Sequence
  Synthetic oligonucleotide
gtcttagcataccaggattaagaaaattat

SEQ ID NO: 193521 - DNA, 30 bp, Artificial Sequence
  Synthetic oligonucleotide
gtgtccaagggcacgtacggggtaaattat

SEQ ID NO: 193522 - DNA, 30 bp, Artificial Sequence
  Synthetic oligonucleotide
gttcggcacgttgatcgcgggaggaattat

SEQ ID NO: 193523 - DNA, 30 bp, Artificial Sequence
  Synthetic oligonucleotide
tacacgaataaacccagtccgatgaattat

SEQ ID NO: 193524 - DNA, 30 bp, Artificial Sequence
  Synthetic oligonucleotide
agcggggtaggggtcgttctagtgaattat

SEQ ID NO: 193525 - DNA, 30 bp, Artificial Sequence
  Synthetic oligonucleotide
ttgtgccagttttaagggaaaaataattat

SEQ ID NO: 193526 - DNA, 30 bp, Artificial Sequence
  Synthetic oligonucleotide
gcaactggcatcaagaactgtaaacattat

SEQ ID NO: 193527 - DNA, 29 bp, Artificial Sequence
  Synthetic oligonucleotide
caatggcataaggttattgcagccattat

SEQ ID NO: 193528 - DNA, 30 bp, Artificial Sequence
  Synthetic oligonucleotide
gtgccaaaccgtatactgcccctccattat

SEQ ID NO: 193529 - DNA, 30 bp, Artificial Sequence
  Synthetic oligonucleotide
ccgcgtaacttcacgaaagaagggcattat

SEQ ID NO: 193530 - DNA, 30 bp, Artificial Sequence
  Synthetic oligonucleotide
cctccgccgaagataagggattggcattat

SEQ ID NO: 193531 - DNA, 30 bp, Artificial Sequence
  Synthetic oligonucleotide
ctaaactggcaaataccaagctctcattat

SEQ ID NO: 193532 - DNA, 30 bp, Artificial Sequence
  Synthetic oligonucleotide
gacccaaatgttatgttttcagaggattat

SEQ ID NO: 193533 - DNA, 30 bp, Artificial Sequence
  Synthetic oligonucleotide
ctagtccgggggaccaggaacggggattat

SEQ ID NO: 193534 - DNA, 30 bp, Artificial Sequence
  Synthetic oligonucleotide
tcaacatccggcttagggcgaaagtattat

SEQ ID NO: 193535 - DNA, 30 bp, Artificial Sequence
  Synthetic oligonucleotide
gtaggcacggattgtcattcaccttattat

SEQ ID NO: 193536 - DNA, 30 bp, Artificial Sequence
  Synthetic oligonucleotide
aacgcgatttcgcattggtctccagcttat

SEQ ID NO: 193537 - DNA, 30 bp, Artificial Sequence
  Synthetic oligonucleotide
acacaggatatattcggactcagggcttat

SEQ ID NO: 193538 - DNA, 30 bp, Artificial Sequence
  Synthetic oligonucleotide
ccggaacgggggacctgagttccttcttat

SEQ ID NO: 193539 - DNA, 30 bp, Artificial Sequence
  Synthetic oligonucleotide
ggacggtgatatggatagttattttcttat

SEQ ID NO: 193540 - DNA, 30 bp, Artificial Sequence
  Synthetic oligonucleotide
ggactctgacgggaaaggaagaaaagttat

SEQ ID NO: 193541 - DNA, 30 bp, Artificial Sequence
  Synthetic oligonucleotide
gtgagtagcggccctaatagggaaagttat

SEQ ID NO: 193542 - DNA, 30 bp, Artificial Sequence
  Synthetic oligonucleotide
ttagagactcgtcttcagcgccagagttat

SEQ ID NO: 193543 - DNA, 30 bp, Artificial Sequence
  Synthetic oligonucleotide
cctggagacaccggaaaacctgaaggttat

SEQ ID NO: 193544 - DNA, 30 bp, Artificial Sequence
  Synthetic oligonucleotide
gcctaagatgggaaccagtggtacggttat

SEQ ID NO: 193545 - DNA, 30 bp, Artificial Sequence
  Synthetic oligonucleotide
aaagacgatacgtcgaataataccggttat

SEQ ID NO: 193546 - DNA, 30 bp, Artificial Sequence
  Synthetic oligonucleotide
aggttaccctgtggggtatcagccggttat

SEQ ID NO: 193547 - DNA, 30 bp, Artificial Sequence
  Synthetic oligonucleotide
gggatatcatcactgtcccgtgtcggttat

SEQ ID NO: 193548 - DNA, 30 bp, Artificial Sequence
  Synthetic oligonucleotide
ccaaatgcccaatggttgatgtctggttat

SEQ ID NO: 193549 - DNA, 30 bp, Artificial Sequence
  Synthetic oligonucleotide
tttgatatcgtacggactggctgtggttat

SEQ ID NO: 193550 - DNA, 30 bp, Artificial Sequence
  Synthetic oligonucleotide
acatctccagtctgcgcgaaacaatgttat

SEQ ID NO: 193551 - DNA, 30 bp, Artificial Sequence
  Synthetic oligonucleotide
attccagcatatagcaggagtgactgttat

SEQ ID NO: 193552 - DNA, 30 bp, Artificial Sequence
  Synthetic oligonucleotide
catatattctagagtatacgacggtgttat

SEQ ID NO: 193553 - DNA, 30 bp, Artificial Sequence
  Synthetic oligonucleotide
gggcagtttgaaaggacacgggattgttat

SEQ ID NO: 193554 - DNA, 30 bp, Artificial Sequence
  Synthetic oligonucleotide
taatagtgacgggaggccaatagttgttat

SEQ ID NO: 193555 - DNA, 30 bp, Artificial Sequence
  Synthetic oligonucleotide
cacgctcgaggtctccaagtccggatttat

SEQ ID NO: 193556 - DNA, 30 bp, Artificial Sequence
  Synthetic oligonucleotide
ctaggggtgaatacaaacgaatccctttat

SEQ ID NO: 193557 - DNA, 30 bp, Artificial Sequence
  Synthetic oligonucleotide
ggtggagggcaggacagagggtcagtttat

SEQ ID NO: 193558 - DNA, 30 bp, Artificial Sequence
  Synthetic oligonucleotide
gatgattctgaaaggacataggtggtttat

SEQ ID NO: 193559 - DNA, 30 bp, Artificial Sequence
  Synthetic oligonucleotide
tttccgagcagcgggagataggccttttat

SEQ ID NO: 193560 - DNA, 30 bp, Artificial Sequence
  Synthetic oligonucleotide
gcgtcgtctcccacagtagtcaggttttat

SEQ ID NO: 193561 - DNA, 30 bp, Artificial Sequence
  Synthetic oligonucleotide
cgtagcggcagtagctgcgcacggttttat

SEQ ID NO: 193562 - DNA, 31 bp, Artificial Sequence
  Synthetic oligonucleotide
ctatgaaaggagagcaagcacgtatttttat

SEQ ID NO: 193563 - DNA, 30 bp, Artificial Sequence
  Synthetic oligonucleotide
ctccttaagcgtcccctcccgtagaaaact

SEQ ID NO: 193564 - DNA, 30 bp, Artificial Sequence
  Synthetic oligonucleotide
tgatcactactccgactccgagttaaaact

SEQ ID NO: 193565 - DNA, 30 bp, Artificial Sequence
  Synthetic oligonucleotide
cagcgtttcctaactggctagggacaaact

SEQ ID NO: 193566 - DNA, 30 bp, Artificial Sequence
  Synthetic oligonucleotide
aaagcgacggtaaattcttgaccgcaaact

SEQ ID NO: 193567 - DNA, 30 bp, Artificial Sequence
  Synthetic oligonucleotide
tacatgacccgggggtaccgcctgcaaact

SEQ ID NO: 193568 - DNA, 30 bp, Artificial Sequence
  Synthetic oligonucleotide
ggttggcataactaaaaaagggtgcaaact

SEQ ID NO: 193569 - DNA, 30 bp, Artificial Sequence
  Synthetic oligonucleotide
tcagagtgtcccagcgttcgcatagaaact

SEQ ID NO: 193570 - DNA, 30 bp, Artificial Sequence
  Synthetic oligonucleotide
ttcggaaagcatctattatgcaacgaaact

SEQ ID NO: 193571 - DNA, 30 bp, Artificial Sequence
  Synthetic oligonucleotide
gaggtacccaaaacgatcctagaggaaact

SEQ ID NO: 193572 - DNA, 30 bp, Artificial Sequence
  Synthetic oligonucleotide
gcgcggaacccacgaattagcttggaaact

SEQ ID NO: 193573 - DNA, 30 bp, Artificial Sequence
  Synthetic oligonucleotide
aagggcggaaattatcggcgtcatgaaact

SEQ ID NO: 193574 - DNA, 30 bp, Artificial Sequence
  Synthetic oligonucleotide
aagatcgggaaaactaatggaacataaact

SEQ ID NO: 193575 - DNA, 30 bp, Artificial Sequence
  Synthetic oligonucleotide
aggtggatgccaccaatcataggataaact

SEQ ID NO: 193576 - DNA, 30 bp, Artificial Sequence
  Synthetic oligonucleotide
agcgctaacgtaacagtgccatactaaact

SEQ ID NO: 193577 - DNA, 30 bp, Artificial Sequence
  Synthetic oligonucleotide
gaaagagaagctatcggggaattctaaact

SEQ ID NO: 193578 - DNA, 30 bp, Artificial Sequence
  Synthetic oligonucleotide
tgaaccagtagagtgctcaacgattaaact

SEQ ID NO: 193579 - DNA, 30 bp, Artificial Sequence
  Synthetic oligonucleotide
caaacagatgctagtcgtatattttaaact

SEQ ID NO: 193580 - DNA, 30 bp, Artificial Sequence
  Synthetic oligonucleotide
taggtgggctagacccttcgagtaacaact

SEQ ID NO: 193581 - DNA, 30 bp, Artificial Sequence
  Synthetic oligonucleotide
acgccatggtaattacgtcgaaacacaact

SEQ ID NO: 193582 - DNA, 30 bp, Artificial Sequence
  Synthetic oligonucleotide
acagtcactcaatgcagtggcgctacaact

SEQ ID NO: 193583 - DNA, 30 bp, Artificial Sequence
  Synthetic oligonucleotide
gcagtcataggggcaattacccggccaact

SEQ ID NO: 193584 - DNA, 30 bp, Artificial Sequence
  Synthetic oligonucleotide
tgcatgaatttaaggccgagctggccaact

SEQ ID NO: 193585 - DNA, 30 bp, Artificial Sequence
  Synthetic oligonucleotide
tactaagggcaattcataactaatccaact

SEQ ID NO: 193586 - DNA, 30 bp, Artificial Sequence
  Synthetic oligonucleotide
cataagctccgcgttcaggcccgtccaact

SEQ ID NO: 193587 - DNA, 30 bp, Artificial Sequence
  Synthetic oligonucleotide
gctagagtgcttggtaacttttaagcaact

SEQ ID NO: 193588 - DNA, 30 bp, Artificial Sequence
  Synthetic oligonucleotide
tctcctggactgctaagttacaatgcaact

SEQ ID NO: 193589 - DNA, 30 bp, Artificial Sequence
  Synthetic oligonucleotide
tcagataagcagggtcctgaatttgcaact

SEQ ID NO: 193590 - DNA, 30 bp, Artificial Sequence
  Synthetic oligonucleotide
tggtgtgggaatgggggtaggaaatcaact

SEQ ID NO: 193591 - DNA, 31 bp, Artificial Sequence
  Synthetic oligonucleotide
atcctaaaggagcttggaagcgggatcaact

SEQ ID NO: 193592 - DNA, 30 bp, Artificial Sequence
  Synthetic oligonucleotide
aatggtacactagaaacggatgagtcaact

SEQ ID NO: 193593 - DNA, 30 bp, Artificial Sequence
  Synthetic oligonucleotide
atctggatattcagttagcgtaattcaact

SEQ ID NO: 193594 - DNA, 30 bp, Artificial Sequence
  Synthetic oligonucleotide
cgtcaaagtgacggtctcgccggttcaact

SEQ ID NO: 193595 - DNA, 30 bp, Artificial Sequence
  Synthetic oligonucleotide
taagtcgcacggtttccttagcacagaact

SEQ ID NO: 193596 - DNA, 31 bp, Artificial Sequence
  Synthetic oligonucleotide
cttcaacgcatgctgtagaaaatagagaact

SEQ ID NO: 193597 - DNA, 30 bp, Artificial Sequence
  Synthetic oligonucleotide
agtggatagaagattttggtataccgaact

SEQ ID NO: 193598 - DNA, 30 bp, Artificial Sequence
  Synthetic oligonucleotide
ttagtttgggctaaaagcacaagaggaact

SEQ ID NO: 193599 - DNA, 30 bp, Artificial Sequence
  Synthetic oligonucleotide
gaaaatgcaccatcatcaatgaacggaact

SEQ ID NO: 193600 - DNA, 30 bp, Artificial Sequence
  Synthetic oligonucleotide
aaacggatacctgtgatccctggcggaact

SEQ ID NO: 193601 - DNA, 30 bp, Artificial Sequence
  Synthetic oligonucleotide
tgcctttaacaaacaagtgtcgagtgaact

SEQ ID NO: 193602 - DNA, 30 bp, Artificial Sequence
  Synthetic oligonucleotide
tgtaggtccgctcgtaacgtaccgtgaact

SEQ ID NO: 193603 - DNA, 30 bp, Artificial Sequence
  Synthetic oligonucleotide
tggcgggcacacagtcttttgatgtgaact

SEQ ID NO: 193604 - DNA, 30 bp, Artificial Sequence
  Synthetic oligonucleotide
gggtgttcagaagccccgacccacataact

SEQ ID NO: 193605 - DNA, 30 bp, Artificial Sequence
  Synthetic oligonucleotide
ggaagaccgggatacgagttgcatataact

SEQ ID NO: 193606 - DNA, 30 bp, Artificial Sequence
  Synthetic oligonucleotide
aaggacctttctttagttaaaattataact

SEQ ID NO: 193607 - DNA, 30 bp, Artificial Sequence
  Synthetic oligonucleotide
ttacggttagggaagtggcggatcctaact

SEQ ID NO: 193608 - DNA, 30 bp, Artificial Sequence
  Synthetic oligonucleotide
tgtagtgaaaggcatcgacctctgctaact

SEQ ID NO: 193609 - DNA, 30 bp, Artificial Sequence
  Synthetic oligonucleotide
cgtgtcagggcgtggaacgttactctaact

SEQ ID NO: 193610 - DNA, 30 bp, Artificial Sequence
  Synthetic oligonucleotide
aagtgggcggcgggtcttaaccctctaact

SEQ ID NO: 193611 - DNA, 30 bp, Artificial Sequence
  Synthetic oligonucleotide
gtattattcgttacaacccagagtctaact

SEQ ID NO: 193612 - DNA, 30 bp, Artificial Sequence
  Synthetic oligonucleotide
ggttgggagaaagccgcgctactagtaact

SEQ ID NO: 193613 - DNA, 30 bp, Artificial Sequence
  Synthetic oligonucleotide
tggtggtatgttcaaatgagtggcgtaact

SEQ ID NO: 193614 - DNA, 30 bp, Artificial Sequence
  Synthetic oligonucleotide
gtatgacactctgaggcaaaacaggtaact

SEQ ID NO: 193615 - DNA, 30 bp, Artificial Sequence
  Synthetic oligonucleotide
tacgtgaaccacagcggtttagtggtaact

SEQ ID NO: 193616 - DNA, 30 bp, Artificial Sequence
  Synthetic oligonucleotide
aacgtccgaaattaatgatcacttgtaact

SEQ ID NO: 193617 - DNA, 30 bp, Artificial Sequence
  Synthetic oligonucleotide
actgggttcgaataagggttaagaaacact

SEQ ID NO: 193618 - DNA, 30 bp, Artificial Sequence
  Synthetic oligonucleotide
catcacaacccgcccgatcccgacaacact

SEQ ID NO: 193619 - DNA, 30 bp, Artificial Sequence
  Synthetic oligonucleotide
caaaaacggtgcgatagtcaggggaacact

SEQ ID NO: 193620 - DNA, 30 bp, Artificial Sequence
  Synthetic oligonucleotide
ccaattgaaagaacggcatggtgacacact

SEQ ID NO: 193621 - DNA, 30 bp, Artificial Sequence
  Synthetic oligonucleotide
ctgacactgttaattaactttatgcacact

SEQ ID NO: 193622 - DNA, 30 bp, Artificial Sequence
  Synthetic oligonucleotide
cttatgaaccaacaaaaaacaagtcacact

SEQ ID NO: 193623 - DNA, 29 bp, Artificial Sequence
  Synthetic oligonucleotide
taacgatgatttgttgccgtgtagacact

SEQ ID NO: 193624 - DNA, 30 bp, Artificial Sequence
  Synthetic oligonucleotide
tcggcgctggtcgaggctcgttatgacact

SEQ ID NO: 193625 - DNA, 30 bp, Artificial Sequence
  Synthetic oligonucleotide
caccacaagtactatgcaatgccgtacact

SEQ ID NO: 193626 - DNA, 30 bp, Artificial Sequence
  Synthetic oligonucleotide
agagggctcgaaatcgagatatattacact

SEQ ID NO: 193627 - DNA, 30 bp, Artificial Sequence
  Synthetic oligonucleotide
gcacctccagtcgaacaagcagcttacact

SEQ ID NO: 193628 - DNA, 30 bp, Artificial Sequence
  Synthetic oligonucleotide
cgggcagacggcgcaatgcgaatttacact

SEQ ID NO: 193629 - DNA, 30 bp, Artificial Sequence
  Synthetic oligonucleotide
tagttcagaggtacagaccttaccaccact

SEQ ID NO: 193630 - DNA, 30 bp, Artificial Sequence
  Synthetic oligonucleotide
ctatatttgacaaagagaagcagcaccact

SEQ ID NO: 193631 - DNA, 30 bp, Artificial Sequence
  Synthetic oligonucleotide
gcgatcgtgaaggggacccaatgcaccact

SEQ ID NO: 193632 - DNA, 30 bp, Artificial Sequence
  Synthetic oligonucleotide
tggagggactcaacttgatacccgaccact

SEQ ID NO: 193633 - DNA, 30 bp, Artificial Sequence
  Synthetic oligonucleotide
gcaaccccggcgtccccaaacatgaccact

SEQ ID NO: 193634 - DNA, 30 bp, Artificial Sequence
  Synthetic oligonucleotide
gtcgaaactcatggtcgcaaggatcccact

SEQ ID NO: 193635 - DNA, 30 bp, Artificial Sequence
  Synthetic oligonucleotide
accgccggcgccatgccccgcacagccact

SEQ ID NO: 193636 - DNA, 30 bp, Artificial Sequence
  Synthetic oligonucleotide
cataggaaaggcgcaaaagcaccagccact

SEQ ID NO: 193637 - DNA, 30 bp, Artificial Sequence
  Synthetic oligonucleotide
tccgacgaaaactacctggttagagccact

SEQ ID NO: 193638 - DNA, 30 bp, Artificial Sequence
  Synthetic oligonucleotide
gaccaagattgacactgggcctgtgccact

SEQ ID NO: 193639 - DNA, 30 bp, Artificial Sequence
  Synthetic oligonucleotide
cttatcgagcgtcaggcaacaccgtccact

SEQ ID NO: 193640 - DNA, 30 bp, Artificial Sequence
  Synthetic oligonucleotide
cctgacggatccttatatacagtttccact

SEQ ID NO: 193641 - DNA, 30 bp, Artificial Sequence
  Synthetic oligonucleotide
acaccaacgtcacgttgcggattttccact

SEQ ID NO: 193642 - DNA, 30 bp, Artificial Sequence
  Synthetic oligonucleotide
ggacttgggtcccaaattttatcaagcact

SEQ ID NO: 193643 - DNA, 30 bp, Artificial Sequence
  Synthetic oligonucleotide
tggacaggtaattcagttcggtgaagcact

SEQ ID NO: 193644 - DNA, 30 bp, Artificial Sequence
  Synthetic oligonucleotide
ccggtttatgtatcaggtcgggatagcact

SEQ ID NO: 193645 - DNA, 30 bp, Artificial Sequence
  Synthetic oligonucleotide
caagggctacggatggctactcgtagcact

SEQ ID NO: 193646 - DNA, 30 bp, Artificial Sequence
  Synthetic oligonucleotide
tatggaagcatagaagctacggggcgcact

SEQ ID NO: 193647 - DNA, 30 bp, Artificial Sequence
  Synthetic oligonucleotide
aatacgagggagtgctgggactatcgcact

SEQ ID NO: 193648 - DNA, 30 bp, Artificial Sequence
  Synthetic oligonucleotide
gcttccgattaaaatcgcgtgcttcgcact

SEQ ID NO: 193649 - DNA, 30 bp, Artificial Sequence
  Synthetic oligonucleotide
taccaatattgacggagtcgaaacggcact

SEQ ID NO: 193650 - DNA, 30 bp, Artificial Sequence
  Synthetic oligonucleotide
atacgtcctgcacccgatttatcgtgcact

SEQ ID NO: 193651 - DNA, 30 bp, Artificial Sequence
  Synthetic oligonucleotide
agacggtaaagtattggtgcgctgtgcact

SEQ ID NO: 193652 - DNA, 30 bp, Artificial Sequence
  Synthetic oligonucleotide
tgagacagtggattcggacaaatcatcact

SEQ ID NO: 193653 - DNA, 30 bp, Artificial Sequence
  Synthetic oligonucleotide
gtcgctatatgattttagtacgaactcact

SEQ ID NO: 193654 - DNA, 30 bp, Artificial Sequence
  Synthetic oligonucleotide
gggccagggagcttatgtattgcgctcact

SEQ ID NO: 193655 - DNA, 30 bp, Artificial Sequence
  Synthetic oligonucleotide
acgcgttgacttaagtgtatggtgctcact

SEQ ID NO: 193656 - DNA, 30 bp, Artificial Sequence
  Synthetic oligonucleotide
gcggcagggatattattcttcaacgtcact

SEQ ID NO: 193657 - DNA, 30 bp, Artificial Sequence
  Synthetic oligonucleotide
ctaagcgggtcagggttagtgggggtcact

SEQ ID NO: 193658 - DNA, 30 bp, Artificial Sequence
  Synthetic oligonucleotide
agcgtaatcaccaagatagctacattcact

SEQ ID NO: 193659 - DNA, 30 bp, Artificial Sequence
  Synthetic oligonucleotide
cgaagagacccgtcatgatagggcttcact

SEQ ID NO: 193660 - DNA, 30 bp, Artificial Sequence
  Synthetic oligonucleotide
aaactaacaatacgcgccaaaagtttcact

SEQ ID NO: 193661 - DNA, 30 bp, Artificial Sequence
  Synthetic oligonucleotide
gagtctaggaaagaaatgcgtattttcact

SEQ ID NO: 193662 - DNA, 30 bp, Artificial Sequence
  Synthetic oligonucleotide
gtctgagaagatcaagagtaacttttcact

SEQ ID NO: 193663 - DNA, 30 bp, Artificial Sequence
  Synthetic oligonucleotide
tttggcactcatgggatatttacacagact

SEQ ID NO: 193664 - DNA, 30 bp, Artificial Sequence
  Synthetic oligonucleotide
acagggccatcgacccataaactgcagact

SEQ ID NO: 193665 - DNA, 30 bp, Artificial Sequence
  Synthetic oligonucleotide
atcgtccggagtgccaagacgaatgagact

SEQ ID NO: 193666 - DNA, 30 bp, Artificial Sequence
  Synthetic oligonucleotide
gaggttactctgacggtcacaggaacgact

SEQ ID NO: 193667 - DNA, 30 bp, Artificial Sequence
  Synthetic oligonucleotide
agtagatgtgccgtaattaggttaacgact

SEQ ID NO: 193668 - DNA, 30 bp, Artificial Sequence
  Synthetic oligonucleotide
atgcccgctactagaaatggggtcccgact

SEQ ID NO: 193669 - DNA, 30 bp, Artificial Sequence
  Synthetic oligonucleotide
ccgtcggggattcggaccattcagccgact

SEQ ID NO: 193670 - DNA, 30 bp, Artificial Sequence
  Synthetic oligonucleotide
attcattctacagggtagcaaaggccgact

SEQ ID NO: 193671 - DNA, 30 bp, Artificial Sequence
  Synthetic oligonucleotide
ctagacatgagagggatcacgcttccgact

SEQ ID NO: 193672 - DNA, 30 bp, Artificial Sequence
  Synthetic oligonucleotide
gattctccatcatggaaagagtcagcgact

SEQ ID NO: 193673 - DNA, 30 bp, Artificial Sequence
  Synthetic oligonucleotide
tgagaattgcctgaactcccttacgcgact

SEQ ID NO: 193674 - DNA, 30 bp, Artificial Sequence
  Synthetic oligonucleotide
tgcattaatatttttgtggcactggcgact

SEQ ID NO: 193675 - DNA, 30 bp, Artificial Sequence
  Synthetic oligonucleotide
atagcctttacgcgcgtacgggtggcgact

SEQ ID NO: 193676 - DNA, 30 bp, Artificial Sequence
  Synthetic oligonucleotide
ccaaggggcgaacgccgccggtaatcgact

SEQ ID NO: 193677 - DNA, 30 bp, Artificial Sequence
  Synthetic oligonucleotide
gtagggtaattctgagcttatgcatcgact

SEQ ID NO: 193678 - DNA, 30 bp, Artificial Sequence
  Synthetic oligonucleotide
aattaggaatgaaaaaaggacctatcgact

SEQ ID NO: 193679 - DNA, 30 bp, Artificial Sequence
  Synthetic oligonucleotide
cggacactgtccggccgccaacattcgact

SEQ ID NO: 193680 - DNA, 31 bp, Artificial Sequence
  Synthetic oligonucleotide
gtaccacggagagaaaatgaggtcttcgact

SEQ ID NO: 193681 - DNA, 30 bp, Artificial Sequence
  Synthetic oligonucleotide
tgtaagaaagggccttagtgaggttcgact

SEQ ID NO: 193682 - DNA, 30 bp, Artificial Sequence
  Synthetic oligonucleotide
cattcacaaacagtgtacaaaacaaggact

SEQ ID NO: 193683 - DNA, 30 bp, Artificial Sequence
  Synthetic oligonucleotide
ggccaaagtagtgtagtgaaaggtaggact

SEQ ID NO: 193684 - DNA, 30 bp, Artificial Sequence
  Synthetic oligonucleotide
tccaggctaagtaataataccagacggact

SEQ ID NO: 193685 - DNA, 30 bp, Artificial Sequence
  Synthetic oligonucleotide
cgatatgccataagtcaaatggtacggact

SEQ ID NO: 193686 - DNA, 30 bp, Artificial Sequence
  Synthetic oligonucleotide
taatagttcgtctaacaatacaagcggact

SEQ ID NO: 193687 - DNA, 30 bp, Artificial Sequence
  Synthetic oligonucleotide
gaagtacggagggaagtcggttgagggact

SEQ ID NO: 193688 - DNA, 30 bp, Artificial Sequence
  Synthetic oligonucleotide
acagatttagcctatgatagacaggggact

SEQ ID NO: 193689 - DNA, 30 bp, Artificial Sequence
  Synthetic oligonucleotide
gagctacaactttcagttatccaggggact

SEQ ID NO: 193690 - DNA, 30 bp, Artificial Sequence
  Synthetic oligonucleotide
ctacaaacttgcgcataaagatgtgggact

SEQ ID NO: 193691 - DNA, 30 bp, Artificial Sequence
  Synthetic oligonucleotide
gtaacaggaacctggggtaccccgtggact

SEQ ID NO: 193692 - DNA, 30 bp, Artificial Sequence
  Synthetic oligonucleotide
gaatataagggtcggaatatcagaatgact

SEQ ID NO: 193693 - DNA, 30 bp, Artificial Sequence
  Synthetic oligonucleotide
aaccgaggggatattcagttcacgatgact

SEQ ID NO: 193694 - DNA, 30 bp, Artificial Sequence
  Synthetic oligonucleotide
ggatgtgtccatgtaatggtcggcctgact

SEQ ID NO: 193695 - DNA, 30 bp, Artificial Sequence
  Synthetic oligonucleotide
cgggttaactcaggcgtttatatgctgact

SEQ ID NO: 193696 - DNA, 30 bp, Artificial Sequence
  Synthetic oligonucleotide
agtgccacggggtcgagtgggcacgtgact

SEQ ID NO: 193697 - DNA, 30 bp, Artificial Sequence
  Synthetic oligonucleotide
cgctcaactggatgttgtgtggtcgtgact

SEQ ID NO: 193698 - DNA, 30 bp, Artificial Sequence
  Synthetic oligonucleotide
cggtattaagtaacaaaccagtatgtgact

SEQ ID NO: 193699 - DNA, 30 bp, Artificial Sequence
  Synthetic oligonucleotide
aaactagtgtaagagcaataacctgtgact

SEQ ID NO: 193700 - DNA, 30 bp, Artificial Sequence
  Synthetic oligonucleotide
aggtgaatagcatattacagatcattgact

SEQ ID NO: 193701 - DNA, 30 bp, Artificial Sequence
  Synthetic oligonucleotide
gtagtcgtatatccagagaagcacttgact

SEQ ID NO: 193702 - DNA, 30 bp, Artificial Sequence
  Synthetic oligonucleotide
tggactcatggcccgaaagttaatttgact

SEQ ID NO: 193703 - DNA, 30 bp, Artificial Sequence
  Synthetic oligonucleotide
ctccgtctggaaatgaatgtcggaaatact

SEQ ID NO: 193704 - DNA, 30 bp, Artificial Sequence
  Synthetic oligonucleotide
aggtattgaacgactcaaaattgaaatact

SEQ ID NO: 193705 - DNA, 30 bp, Artificial Sequence
  Synthetic oligonucleotide
tacggataacaagtcttgcgactaaatact

SEQ ID NO: 193706 - DNA, 30 bp, Artificial Sequence
  Synthetic oligonucleotide
cctgagagaattggacgcttccccaatact

SEQ ID NO: 193707 - DNA, 30 bp, Artificial Sequence
  Synthetic oligonucleotide
taccgggagtctacaacgactcgcaatact

SEQ ID NO: 193708 - DNA, 30 bp, Artificial Sequence
  Synthetic oligonucleotide
atacgagggagagataataggtgcaatact

SEQ ID NO: 193709 - DNA, 30 bp, Artificial Sequence
  Synthetic oligonucleotide
ttcaaagggccgccaccactttgcaatact

SEQ ID NO: 193710 - DNA, 30 bp, Artificial Sequence
  Synthetic oligonucleotide
tctacgaaaggaggttcctcctaacatact

SEQ ID NO: 193711 - DNA, 30 bp, Artificial Sequence
  Synthetic oligonucleotide
gcacggcggagtgtgtcggtagtacatact

SEQ ID NO: 193712 - DNA, 30 bp, Artificial Sequence
  Synthetic oligonucleotide
ggaggggcttacacaacacaattccatact

SEQ ID NO: 193713 - DNA, 30 bp, Artificial Sequence
  Synthetic oligonucleotide
ataaagttcgaaaagaaatgggacgatact

SEQ ID NO: 193714 - DNA, 30 bp, Artificial Sequence
  Synthetic oligonucleotide
ccgggatcgattatacgaaaaatcgatact

SEQ ID NO: 193715 - DNA, 30 bp, Artificial Sequence
  Synthetic oligonucleotide
atccgcagaatccgcacagcacaatatact

SEQ ID NO: 193716 - DNA, 30 bp, Artificial Sequence
  Synthetic oligonucleotide
aaggcggagcgcgccataagcccgtatact

SEQ ID NO: 193717 - DNA, 31 bp, Artificial Sequence
  Synthetic oligonucleotide
tcgtagaggacgaacgtcggaataaactact

SEQ ID NO: 193718 - DNA, 30 bp, Artificial Sequence
  Synthetic oligonucleotide
gacggtatgggaatggccattggacctact

SEQ ID NO: 193719 - DNA, 30 bp, Artificial Sequence
  Synthetic oligonucleotide
ccaaggcatgcggcttgattagtccctact

SEQ ID NO: 193720 - DNA, 30 bp, Artificial Sequence
  Synthetic oligonucleotide
aattaagtcgcaaagacacaaccagctact

SEQ ID NO: 193721 - DNA, 30 bp, Artificial Sequence
  Synthetic oligonucleotide
gaacatggcccagaaccagacaaatctact

SEQ ID NO: 193722 - DNA, 30 bp, Artificial Sequence
  Synthetic oligonucleotide
atcggtacaggataccgacatctatctact

SEQ ID NO: 193723 - DNA, 30 bp, Artificial Sequence
  Synthetic oligonucleotide
cgggaggtatgagccaagggtttatctact

SEQ ID NO: 193724 - DNA, 30 bp, Artificial Sequence
  Synthetic oligonucleotide
ctagaatggtaaggtagggagtcctctact

SEQ ID NO: 193725 - DNA, 30 bp, Artificial Sequence
  Synthetic oligonucleotide
aacaaaggcatgccctgttctcagtctact

SEQ ID NO: 193726 - DNA, 30 bp, Artificial Sequence
  Synthetic oligonucleotide
ctagggtcccaaccgaaagtggcttctact

SEQ ID NO: 193727 - DNA, 30 bp, Artificial Sequence
  Synthetic oligonucleotide
gtaatcgagcacgtcaagggatcgagtact

SEQ ID NO: 193728 - DNA, 30 bp, Artificial Sequence
  Synthetic oligonucleotide
ttacttattcaccgtaataagtcgagtact

SEQ ID NO: 193729 - DNA, 30 bp, Artificial Sequence
  Synthetic oligonucleotide
ttgctggcgataggaagatgcaatagtact

SEQ ID NO: 193730 - DNA, 30 bp, Artificial Sequence
  Synthetic oligonucleotide
cgttggctggacacataaacatcccgtact

SEQ ID NO: 193731 - DNA, 30 bp, Artificial Sequence
  Synthetic oligonucleotide
ggggcttattcaaaggccacaatccgtact

SEQ ID NO: 193732 - DNA, 30 bp, Artificial Sequence
  Synthetic oligonucleotide
atctctgaatgagatcgtagaggaggtact

SEQ ID NO: 193733 - DNA, 30 bp, Artificial Sequence
  Synthetic oligonucleotide
cagcacctgtggacttcaaggtagggtact

SEQ ID NO: 193734 - DNA, 30 bp, Artificial Sequence
  Synthetic oligonucleotide
cgagacataagccgttagcgtaaatgtact

SEQ ID NO: 193735 - DNA, 30 bp, Artificial Sequence
  Synthetic oligonucleotide
attgcggctgacttgagggaacaatgtact

SEQ ID NO: 193736 - DNA, 30 bp, Artificial Sequence
  Synthetic oligonucleotide
caacatagcggtatacccgatgaatgtact

SEQ ID NO: 193737 - DNA, 30 bp, Artificial Sequence
  Synthetic oligonucleotide
agctctggtctaaaaccatatttatgtact

SEQ ID NO: 193738 - DNA, 30 bp, Artificial Sequence
  Synthetic oligonucleotide
ccgcgcataagtctaggatcagattgtact

SEQ ID NO: 193739 - DNA, 30 bp, Artificial Sequence
  Synthetic oligonucleotide
agatcggaaacccggaaaatctgttgtact

SEQ ID NO: 193740 - DNA, 30 bp, Artificial Sequence
  Synthetic oligonucleotide
gtatgtcgacgattatactcatgaattact

SEQ ID NO: 193741 - DNA, 30 bp, Artificial Sequence
  Synthetic oligonucleotide
agcgagctgcatggagactaaataattact

SEQ ID NO: 193742 - DNA, 30 bp, Artificial Sequence
  Synthetic oligonucleotide
ggaatgcttatttatcccatacacattact

SEQ ID NO: 193743 - DNA, 30 bp, Artificial Sequence
  Synthetic oligonucleotide
ccgaggcactgttccatggattagattact

SEQ ID NO: 193744 - DNA, 30 bp, Artificial Sequence
  Synthetic oligonucleotide
gcgaaacaacctcttgacaacgggattact

SEQ ID NO: 193745 - DNA, 30 bp, Artificial Sequence
  Synthetic oligonucleotide
tcagtcaagagcgccaagaaagatattact

SEQ ID NO: 193746 - DNA, 30 bp, Artificial Sequence
  Synthetic oligonucleotide
caacgagaatgcatattagtctatattact

SEQ ID NO: 193747 - DNA, 30 bp, Artificial Sequence
  Synthetic oligonucleotide
gttacaatagcatcgttggggagtattact

SEQ ID NO: 193748 - DNA, 30 bp, Artificial Sequence
  Synthetic oligonucleotide
tcaggcaggttgggcttccgagaccttact

SEQ ID NO: 193749 - DNA, 30 bp, Artificial Sequence
  Synthetic oligonucleotide
cggggttgagtcaaactgtaagtgcttact

SEQ ID NO: 193750 - DNA, 30 bp, Artificial Sequence
  Synthetic oligonucleotide
ttagtaaacaaaagacgcgcccgtcttact

SEQ ID NO: 193751 - DNA, 30 bp, Artificial Sequence
  Synthetic oligonucleotide
ggttaaattgcacgaaaggtgtgtcttact

SEQ ID NO: 193752 - DNA, 30 bp, Artificial Sequence
  Synthetic oligonucleotide
tgaaaaaggccagtatgaattcaggttact

SEQ ID NO: 193753 - DNA, 30 bp, Artificial Sequence
  Synthetic oligonucleotide
caagcgcccgagatcgctcgaggggttact

SEQ ID NO: 193754 - DNA, 30 bp, Artificial Sequence
  Synthetic oligonucleotide
agtggggactggacgggataggtggttact

SEQ ID NO: 193755 - DNA, 30 bp, Artificial Sequence
  Synthetic oligonucleotide
taaaccgactggatgtaagcgaatgttact

SEQ ID NO: 193756 - DNA, 30 bp, Artificial Sequence
  Synthetic oligonucleotide
acgatggcgcgcttctgcaggctatttact

SEQ ID NO: 193757 - DNA, 30 bp, Artificial Sequence
  Synthetic oligonucleotide
acggacagtcaggggcagaaagtgtttact

SEQ ID NO: 193758 - DNA, 30 bp, Artificial Sequence
  Synthetic oligonucleotide
gtgatttgtaaagcctacattctaaaacct

SEQ ID NO: 193759 - DNA, 30 bp, Artificial Sequence
  Synthetic oligonucleotide
gaccggaggacaccgggacatcctaaacct

SEQ ID NO: 193760 - DNA, 30 bp, Artificial Sequence
  Synthetic oligonucleotide
tcagggctttcaagatgtgaaattaaacct

SEQ ID NO: 193761 - DNA, 30 bp, Artificial Sequence
  Synthetic oligonucleotide
agtataaggggacagcataagaaacaacct

SEQ ID NO: 193762 - DNA, 30 bp, Artificial Sequence
  Synthetic oligonucleotide
cgagaccatactgatctagacatacaacct

SEQ ID NO: 193763 - DNA, 30 bp, Artificial Sequence
  Synthetic oligonucleotide
gatcattagtcctaccgcggagtacaacct

SEQ ID NO: 193764 - DNA, 30 bp, Artificial Sequence
  Synthetic oligonucleotide
accagcctcatacgtccgacactccaacct

SEQ ID NO: 193765 - DNA, 30 bp, Artificial Sequence
  Synthetic oligonucleotide
actagtgaattgacgagatgtgacgaacct

SEQ ID NO: 193766 - DNA, 30 bp, Artificial Sequence
  Synthetic oligonucleotide
aacaaatatgggtgtcaacagaatgaacct

SEQ ID NO: 193767 - DNA, 30 bp, Artificial Sequence
  Synthetic oligonucleotide
gagcttgtacgagacagtaccgtataacct

SEQ ID NO: 193768 - DNA, 30 bp, Artificial Sequence
  Synthetic oligonucleotide
acgaacctggctggtatttctatctaacct

SEQ ID NO: 193769 - DNA, 30 bp, Artificial Sequence
  Synthetic oligonucleotide
gcgctatgtcaacatgcatgtcggtaacct

SEQ ID NO: 193770 - DNA, 30 bp, Artificial Sequence
  Synthetic oligonucleotide
aaggtttcaaagtcgagatggaagacacct

SEQ ID NO: 193771 - DNA, 30 bp, Artificial Sequence
  Synthetic oligonucleotide
cattaagcccacggatcaaacgctacacct

SEQ ID NO: 193772 - DNA, 30 bp, Artificial Sequence
  Synthetic oligonucleotide
acaaaaacgaacttccctagaagtacacct

SEQ ID NO: 193773 - DNA, 30 bp, Artificial Sequence
  Synthetic oligonucleotide
aaggtgcagtccgggcaggggcgaccacct

SEQ ID NO: 193774 - DNA, 30 bp, Artificial Sequence
  Synthetic oligonucleotide
agccagtcccttccactactaggaccacct

SEQ ID NO: 193775 - DNA, 30 bp, Artificial Sequence
  Synthetic oligonucleotide
gatagcttagagaataaaaagagcccacct

SEQ ID NO: 193776 - DNA, 30 bp, Artificial Sequence
  Synthetic oligonucleotide
ggcttaatcaaactaagttagagagcacct

SEQ ID NO: 193777 - DNA, 30 bp, Artificial Sequence
  Synthetic oligonucleotide
aacaactttaagcatcgagaggttgcacct

SEQ ID NO: 193778 - DNA, 30 bp, Artificial Sequence
  Synthetic oligonucleotide
agggcatgcgtccggcgtctgacgtcacct

SEQ ID NO: 193779 - DNA, 30 bp, Artificial Sequence
  Synthetic oligonucleotide
gatagccgtggcagggagtgcgagagacct

SEQ ID NO: 193780 - DNA, 30 bp, Artificial Sequence
  Synthetic oligonucleotide
gctaacattgactgtgatgcgcatagacct

SEQ ID NO: 193781 - DNA, 30 bp, Artificial Sequence
  Synthetic oligonucleotide
aacatcggcaagtagatgccgtctagacct

SEQ ID NO: 193782 - DNA, 30 bp, Artificial Sequence
  Synthetic oligonucleotide
tggagtgtagcatatgattagattagacct

SEQ ID NO: 193783 - DNA, 30 bp, Artificial Sequence
  Synthetic oligonucleotide
agagatgaccgggtattccgaagcggacct

SEQ ID NO: 193784 - DNA, 30 bp, Artificial Sequence
  Synthetic oligonucleotide
cagaagtagtagttcgagacaacatgacct

SEQ ID NO: 193785 - DNA, 30 bp, Artificial Sequence
  Synthetic oligonucleotide
cctcgctggtcgggcttgatccgatgacct

SEQ ID NO: 193786 - DNA, 30 bp, Artificial Sequence
  Synthetic oligonucleotide
agcgagtaacaaattgtttgattatgacct

SEQ ID NO: 193787 - DNA, 30 bp, Artificial Sequence
  Synthetic oligonucleotide
cttctccgaactgacaacgaaccgtgacct

SEQ ID NO: 193788 - DNA, 30 bp, Artificial Sequence
  Synthetic oligonucleotide
agtccgctacgtactaaccctaacatacct

SEQ ID NO: 193789 - DNA, 30 bp, Artificial Sequence
  Synthetic oligonucleotide
tcatgccaagaacggtgacaatacatacct

SEQ ID NO: 193790 - DNA, 30 bp, Artificial Sequence
  Synthetic oligonucleotide
ctatgcgtgttggactacgtgccgatacct

SEQ ID NO: 193791 - DNA, 30 bp, Artificial Sequence
  Synthetic oligonucleotide
tagtaagtagggaggatcactgggatacct

SEQ ID NO: 193792 - DNA, 30 bp, Artificial Sequence
  Synthetic oligonucleotide
caggatgattgaacaaggaacgatatacct

SEQ ID NO: 193793 - DNA, 30 bp, Artificial Sequence
  Synthetic oligonucleotide
ggcatatcgcactaccaatgccacctacct

SEQ ID NO: 193794 - DNA, 30 bp, Artificial Sequence
  Synthetic oligonucleotide
aatgcgcggacgtttacagggcacctacct

SEQ ID NO: 193795 - DNA, 30 bp, Artificial Sequence
  Synthetic oligonucleotide
aaagaatatgtgaaaccaatgcttctacct

SEQ ID NO: 193796 - DNA, 30 bp, Artificial Sequence
  Synthetic oligonucleotide
ctacaggtgacctcttgtttacaagtacct

SEQ ID NO: 193797 - DNA, 30 bp, Artificial Sequence
  Synthetic oligonucleotide
ttgctatgtgatgttctcagtgagttacct

SEQ ID NO: 193798 - DNA, 30 bp, Artificial Sequence
  Synthetic oligonucleotide
caagaccggttacagcacgtcaagaaccct

SEQ ID NO: 193799 - DNA, 30 bp, Artificial Sequence
  Synthetic oligonucleotide
acttaatactagtatccaggatctaaccct

SEQ ID NO: 193800 - DNA, 30 bp, Artificial Sequence
  Synthetic oligonucleotide
agggcaaaaaaagcccaaggttaccaccct

SEQ ID NO: 193801 - DNA, 30 bp, Artificial Sequence
  Synthetic oligonucleotide
caggaagattttagaggagagccccaccct

SEQ ID NO: 193802 - DNA, 30 bp, Artificial Sequence
  Synthetic oligonucleotide
ttcaccacggacagggccttgtgccaccct

SEQ ID NO: 193803 - DNA, 30 bp, Artificial Sequence
  Synthetic oligonucleotide
agattgataagataaacagcagcgcaccct

SEQ ID NO: 193804 - DNA, 30 bp, Artificial Sequence
  Synthetic oligonucleotide
gacgccgggcgcgaaaaactgctgcaccct

SEQ ID NO: 193805 - DNA, 30 bp, Artificial Sequence
  Synthetic oligonucleotide
gacttccgtagcaacactgcccaagaccct

SEQ ID NO: 193806 - DNA, 30 bp, Artificial Sequence
  Synthetic oligonucleotide
gcatcgtcctatgcgctcacgaggtaccct

SEQ ID NO: 193807 - DNA, 30 bp, Artificial Sequence
  Synthetic oligonucleotide
tctaagagaccaaccgccaaatgaacccct

SEQ ID NO: 193808 - DNA, 30 bp, Artificial Sequence
  Synthetic oligonucleotide
gggaagacgtccgtggcgtcccgagcccct

SEQ ID NO: 193809 - DNA, 30 bp, Artificial Sequence
  Synthetic oligonucleotide
agaggtaaaacaaagctattatgggcccct

SEQ ID NO: 193810 - DNA, 30 bp, Artificial Sequence
  Synthetic oligonucleotide
agacttggcgctaggcaggccacctcccct

SEQ ID NO: 193811 - DNA, 30 bp, Artificial Sequence
  Synthetic oligonucleotide
atctagcgacgggggcaaagaacttcccct

SEQ ID NO: 193812 - DNA, 30 bp, Artificial Sequence
  Synthetic oligonucleotide
taatccgctcgatactggtggttcagccct

SEQ ID NO: 193813 - DNA, 30 bp, Artificial Sequence
  Synthetic oligonucleotide
caccgtgaacggtagaggaatttacgccct

SEQ ID NO: 193814 - DNA, 30 bp, Artificial Sequence
  Synthetic oligonucleotide
gtctgtagtgcattttaaataacaggccct

SEQ ID NO: 193815 - DNA, 30 bp, Artificial Sequence
  Synthetic oligonucleotide
cgacccaactggttggcgacctagggccct

SEQ ID NO: 193816 - DNA, 30 bp, Artificial Sequence
  Synthetic oligonucleotide
tcccggcatcaatggatggctctatgccct

SEQ ID NO: 193817 - DNA, 30 bp, Artificial Sequence
  Synthetic oligonucleotide
cgataactcaagccgggagacacgtgccct

SEQ ID NO: 193818 - DNA, 30 bp, Artificial Sequence
  Synthetic oligonucleotide
gagctaaataaagcgggccaagtgtgccct

SEQ ID NO: 193819 - DNA, 30 bp, Artificial Sequence
  Synthetic oligonucleotide
cgcgcctcggagaaaagtaaaccttgccct

SEQ ID NO: 193820 - DNA, 30 bp, Artificial Sequence
  Synthetic oligonucleotide
gctcactactaacaacacgttaaaatccct

SEQ ID NO: 193821 - DNA, 30 bp, Artificial Sequence
  Synthetic oligonucleotide
taggcgctaaacagcagtcagccggtccct

SEQ ID NO: 193822 - DNA, 30 bp, Artificial Sequence
  Synthetic oligonucleotide
tctggagatgtgggttcctcgcatgtccct

SEQ ID NO: 193823 - DNA, 30 bp, Artificial Sequence
  Synthetic oligonucleotide
acgtacatctaggggtatgacattgtccct

SEQ ID NO: 193824 - DNA, 30 bp, Artificial Sequence
  Synthetic oligonucleotide
aggctttgacagaaatacatatgattccct

SEQ ID NO: 193825 - DNA, 30 bp, Artificial Sequence
  Synthetic oligonucleotide
atcgggcaactaacacaggcactattccct

SEQ ID NO: 193826 - DNA, 30 bp, Artificial Sequence
  Synthetic oligonucleotide
ggatacggagtcgagcgcattatgttccct

SEQ ID NO: 193827 - DNA, 30 bp, Artificial Sequence
  Synthetic oligonucleotide
ggcgcttaattaaagtgatcgaacaagcct

SEQ ID NO: 193828 - DNA, 30 bp, Artificial Sequence
  Synthetic oligonucleotide
catgtccatgtggctaatactcacaagcct

SEQ ID NO: 193829 - DNA, 30 bp, Artificial Sequence
  Synthetic oligonucleotide
cctggtgatccttttgagaatagcaagcct

SEQ ID NO: 193830 - DNA, 30 bp, Artificial Sequence
  Synthetic oligonucleotide
cccacgatcagagcgtacatgatcaagcct

SEQ ID NO: 193831 - DNA, 30 bp, Artificial Sequence
  Synthetic oligonucleotide
acaatcagcaattctcctaccgagaagcct

SEQ ID NO: 193832 - DNA, 30 bp, Artificial Sequence
  Synthetic oligonucleotide
ataaaaagatgccccaaatatacgaagcct

SEQ ID NO: 193833 - DNA, 30 bp, Artificial Sequence
  Synthetic oligonucleotide
gcagtgttgccacgagaagcaaataagcct

SEQ ID NO: 193834 - DNA, 30 bp, Artificial Sequence
  Synthetic oligonucleotide
ctgacatccaaagtaggtacgaataagcct

SEQ ID NO: 193835 - DNA, 30 bp, Artificial Sequence
  Synthetic oligonucleotide
aataagtaacgctcaaccataggtaagcct

SEQ ID NO: 193836 - DNA, 30 bp, Artificial Sequence
  Synthetic oligonucleotide
catgcaacggatggttaagagaaacagcct

SEQ ID NO: 193837 - DNA, 30 bp, Artificial Sequence
  Synthetic oligonucleotide
ccggtacaaacccagacgtccttagagcct

SEQ ID NO: 193838 - DNA, 30 bp, Artificial Sequence
  Synthetic oligonucleotide
agataagtgattcaggagattggcgagcct

SEQ ID NO: 193839 - DNA, 30 bp, Artificial Sequence
  Synthetic oligonucleotide
taaaccccatacttgtatacaccggagcct

SEQ ID NO: 193840 - DNA, 30 bp, Artificial Sequence
  Synthetic oligonucleotide
cggtcgagactcaaaggctacaactagcct

SEQ ID NO: 193841 - DNA, 30 bp, Artificial Sequence
  Synthetic oligonucleotide
cgtgttcggctggaaactattacgtagcct

SEQ ID NO: 193842 - DNA, 30 bp, Artificial Sequence
  Synthetic oligonucleotide
cgagagtagtacatccggacgaaaacgcct

SEQ ID NO: 193843 - DNA, 30 bp, Artificial Sequence
  Synthetic oligonucleotide
gacgacgagccgaacatcatggcaacgcct

SEQ ID NO: 193844 - DNA, 30 bp, Artificial Sequence
  Synthetic oligonucleotide
aagactgtggaggacgtgtgaaatacgcct

SEQ ID NO: 193845 - DNA, 30 bp, Artificial Sequence
  Synthetic oligonucleotide
acactgcatcaggggggccgaaacccgcct

SEQ ID NO: 193846 - DNA, 30 bp, Artificial Sequence
  Synthetic oligonucleotide
agatttcggccggagcttctcggtccgcct

SEQ ID NO: 193847 - DNA, 30 bp, Artificial Sequence
  Synthetic oligonucleotide
actccgttacattgcgcaataaaagcgcct

SEQ ID NO: 193848 - DNA, 30 bp, Artificial Sequence
  Synthetic oligonucleotide
tttacggtcaacagccctcgcatcgcgcct

SEQ ID NO: 193849 - DNA, 30 bp, Artificial Sequence
  Synthetic oligonucleotide
ccaggacctcaaggctactagcgtgcgcct

SEQ ID NO: 193850 - DNA, 31 bp, Artificial Sequence
  Synthetic oligonucleotide
taattggccgtgtgggtgataaggtgcgcct

SEQ ID NO: 193851 - DNA, 30 bp, Artificial Sequence
  Synthetic oligonucleotide
cgcttgggttttcacacgggtccatcgcct

SEQ ID NO: 193852 - DNA, 30 bp, Artificial Sequence
  Synthetic oligonucleotide
aaggtgatactgcgcttactttgatcgcct

SEQ ID NO: 193853 - DNA, 30 bp, Artificial Sequence
  Synthetic oligonucleotide
catgacaccgctccgccacaccaaaggcct

SEQ ID NO: 193854 - DNA, 30 bp, Artificial Sequence
  Synthetic oligonucleotide
acaacgagtctagccgattcgctgaggcct

SEQ ID NO: 193855 - DNA, 30 bp, Artificial Sequence
  Synthetic oligonucleotide
tcagttgtctgaggatagcggacccggcct

SEQ ID NO: 193856 - DNA, 30 bp, Artificial Sequence
  Synthetic oligonucleotide
cttctgatttcagggggagcggtatggcct

SEQ ID NO: 193857 - DNA, 30 bp, Artificial Sequence
  Synthetic oligonucleotide
tcttctcggtcaatctataaactactgcct

SEQ ID NO: 193858 - DNA, 30 bp, Artificial Sequence
  Synthetic oligonucleotide
gagacgctgtgatttatcagagagctgcct

SEQ ID NO: 193859 - DNA, 30 bp, Artificial Sequence
  Synthetic oligonucleotide
ggtcccaatagacaagggcgcacgctgcct

SEQ ID NO: 193860 - DNA, 30 bp, Artificial Sequence
  Synthetic oligonucleotide
gcacacggtgaatcctctaaccggctgcct

SEQ ID NO: 193861 - DNA, 30 bp, Artificial Sequence
  Synthetic oligonucleotide
atccaagcaatcggggagaaccatctgcct

SEQ ID NO: 193862 - DNA, 30 bp, Artificial Sequence
  Synthetic oligonucleotide
cgctagagttgttaaccagaccatctgcct

SEQ ID NO: 193863 - DNA, 30 bp, Artificial Sequence
  Synthetic oligonucleotide
ggaacaggctacactggtcagatagtgcct

SEQ ID NO: 193864 - DNA, 30 bp, Artificial Sequence
  Synthetic oligonucleotide
agggcttaagaaatggaccgcaatgtgcct

SEQ ID NO: 193865 - DNA, 30 bp, Artificial Sequence
  Synthetic oligonucleotide
acggcgtaaccgtgccggaagtcattgcct

SEQ ID NO: 193866 - DNA, 30 bp, Artificial Sequence
  Synthetic oligonucleotide
ttaccggacggaacggagggcattttgcct

SEQ ID NO: 193867 - DNA, 30 bp, Artificial Sequence
  Synthetic oligonucleotide
accacgaagtggtaccgatgggttttgcct

SEQ ID NO: 193868 - DNA, 30 bp, Artificial Sequence
  Synthetic oligonucleotide
cggcttcttgaggattggtgtgcaaatcct

SEQ ID NO: 193869 - DNA, 30 bp, Artificial Sequence
  Synthetic oligonucleotide
tctatggagttcaaaagttaagcgaatcct

SEQ ID NO: 193870 - DNA, 30 bp, Artificial Sequence
  Synthetic oligonucleotide
cttcagatgcaaccgacgagatggaatcct

SEQ ID NO: 193871 - DNA, 30 bp, Artificial Sequence
  Synthetic oligonucleotide
tacgcctcacaggtgacaccatctaatcct

SEQ ID NO: 193872 - DNA, 30 bp, Artificial Sequence
  Synthetic oligonucleotide
aagagctaacaatctgaaggggaccatcct

SEQ ID NO: 193873 - DNA, 30 bp, Artificial Sequence
  Synthetic oligonucleotide
gatctaaaggtgctagaccatatgcatcct

SEQ ID NO: 193874 - DNA, 30 bp, Artificial Sequence
  Synthetic oligonucleotide
catagaaacaatcatcgcacagtcgatcct

SEQ ID NO: 193875 - DNA, 30 bp, Artificial Sequence
  Synthetic oligonucleotide
cggcaccatttcggacaacccactgatcct

SEQ ID NO: 193876 - DNA, 30 bp, Artificial Sequence
  Synthetic oligonucleotide
cagcatgcaatctcaaagtaaatctatcct

SEQ ID NO: 193877 - DNA, 30 bp, Artificial Sequence
  Synthetic oligonucleotide
cgagaacactcgctttaggcacagtatcct

SEQ ID NO: 193878 - DNA, 30 bp, Artificial Sequence
  Synthetic oligonucleotide
tatgagctcaaacacaccaggttcactcct

SEQ ID NO: 193879 - DNA, 30 bp, Artificial Sequence
  Synthetic oligonucleotide
tggatttaatatgcaatcgatgggactcct

SEQ ID NO: 193880 - DNA, 30 bp, Artificial Sequence
  Synthetic oligonucleotide
gatgctgaccaaaggtccatgactactcct

SEQ ID NO: 193881 - DNA, 30 bp, Artificial Sequence
  Synthetic oligonucleotide
tcatgaatggaagtagtcaccccacctcct

SEQ ID NO: 193882 - DNA, 30 bp, Artificial Sequence
  Synthetic oligonucleotide
ggtgaaatttcggctagcgactgacctcct

SEQ ID NO: 193883 - DNA, 30 bp, Artificial Sequence
  Synthetic oligonucleotide
gagtaccacgtaccgccgaattgccctcct

SEQ ID NO: 193884 - DNA, 30 bp, Artificial Sequence
  Synthetic oligonucleotide
cgcgatgccgaacgactactttcgcctcct

SEQ ID NO: 193885 - DNA, 30 bp, Artificial Sequence
  Synthetic oligonucleotide
gtcttcgtaaggcacgaaaagtgtcctcct

SEQ ID NO: 193886 - DNA, 30 bp, Artificial Sequence
  Synthetic oligonucleotide
cgggagcctactcaagccccttcagctcct

SEQ ID NO: 193887 - DNA, 30 bp, Artificial Sequence
  Synthetic oligonucleotide
ttacacgtaaattcagtaaacaaggctcct

SEQ ID NO: 193888 - DNA, 30 bp, Artificial Sequence
  Synthetic oligonucleotide
caaacgacgaagaccccgtcggagtctcct

SEQ ID NO: 193889 - DNA, 30 bp, Artificial Sequence
  Synthetic oligonucleotide
gggttgtaataaagaatagacaggtctcct

SEQ ID NO: 193890 - DNA, 30 bp, Artificial Sequence
  Synthetic oligonucleotide
cccttgaggtgacggtacctttacagtcct

SEQ ID NO: 193891 - DNA, 30 bp, Artificial Sequence
  Synthetic oligonucleotide
acctcgcaagattggtcggttctcagtcct

SEQ ID NO: 193892 - DNA, 30 bp, Artificial Sequence
  Synthetic oligonucleotide
tttgcactatgtggggaagtatgccgtcct

SEQ ID NO: 193893 - DNA, 28 bp, Artificial Sequence
  Synthetic oligonucleotide
ggtcacaggtatatacgtggtccgtcct

SEQ ID NO: 193894 - DNA, 30 bp, Artificial Sequence
  Synthetic oligonucleotide
cacttaccgtcaaggtacagagatcgtcct

SEQ ID NO: 193895 - DNA, 30 bp, Artificial Sequence
  Synthetic oligonucleotide
tcattggtcgcctgcacggtgaatggtcct

SEQ ID NO: 193896 - DNA, 30 bp, Artificial Sequence
  Synthetic oligonucleotide
ggggtgtcagaaagaaactgccctggtcct

SEQ ID NO: 193897 - DNA, 30 bp, Artificial Sequence
  Synthetic oligonucleotide
gacaaaggacgtacttccttgtttggtcct

SEQ ID NO: 193898 - DNA, 30 bp, Artificial Sequence
  Synthetic oligonucleotide
ccgccttacccagaggcagcttcaattcct

SEQ ID NO: 193899 - DNA, 30 bp, Artificial Sequence
  Synthetic oligonucleotide
agtggtgtacccctataggcgagtattcct

SEQ ID NO: 193900 - DNA, 30 bp, Artificial Sequence
  Synthetic oligonucleotide
tgaaatgtaaactttctcgattgtattcct

SEQ ID NO: 193901 - DNA, 30 bp, Artificial Sequence
  Synthetic oligonucleotide
agcacatccgcagcacccattttacttcct

SEQ ID NO: 193902 - DNA, 30 bp, Artificial Sequence
  Synthetic oligonucleotide
cggcgcgggacaacgtgcatcagccttcct

SEQ ID NO: 193903 - DNA, 30 bp, Artificial Sequence
  Synthetic oligonucleotide
gactcaacccagtgtgtatgtgtagttcct

SEQ ID NO: 193904 - DNA, 30 bp, Artificial Sequence
  Synthetic oligonucleotide
cgtgagggggtttgagagccaaactttcct

SEQ ID NO: 193905 - DNA, 30 bp, Artificial Sequence
  Synthetic oligonucleotide
atagtcctcaaccttaacccttgctttcct

SEQ ID NO: 193906 - DNA, 30 bp, Artificial Sequence
  Synthetic oligonucleotide
tgcattgacacgccgtactcggaaaaagct

SEQ ID NO: 193907 - DNA, 30 bp, Artificial Sequence
  Synthetic oligonucleotide
gcaatacagaatcgatcccaatgaaaagct

SEQ ID NO: 193908 - DNA, 30 bp, Artificial Sequence
  Synthetic oligonucleotide
ttcacgctgaatgtaatgcccctaaaagct

SEQ ID NO: 193909 - DNA, 30 bp, Artificial Sequence
  Synthetic oligonucleotide
cccgctcgagatggctatggaaagaaagct

SEQ ID NO: 193910 - DNA, 30 bp, Artificial Sequence
  Synthetic oligonucleotide
taacgaaaggcatcaagcgagtgtaaagct

SEQ ID NO: 193911 - DNA, 30 bp, Artificial Sequence
  Synthetic oligonucleotide
tccgcgcagtgtaacacggacattaaagct

SEQ ID NO: 193912 - DNA, 30 bp, Artificial Sequence
  Synthetic oligonucleotide
tggtatacgcttaaataccgaccacaagct

SEQ ID NO: 193913 - DNA, 30 bp, Artificial Sequence
  Synthetic oligonucleotide
ggactgggaggttgttagtagcaccaagct

SEQ ID NO: 193914 - DNA, 30 bp, Artificial Sequence
  Synthetic oligonucleotide
attgagctcgttcgatttccactccaagct

SEQ ID NO: 193915 - DNA, 30 bp, Artificial Sequence
  Synthetic oligonucleotide
tcgcacagtgtttaatgcttgagtcaagct

SEQ ID NO: 193916 - DNA, 30 bp, Artificial Sequence
  Synthetic oligonucleotide
ggcggatctgggaattataggcaggaagct

SEQ ID NO: 193917 - DNA, 30 bp, Artificial Sequence
  Synthetic oligonucleotide
tctggccacatattacgaataagggaagct

SEQ ID NO: 193918 - DNA, 30 bp, Artificial Sequence
  Synthetic oligonucleotide
tctccagagagtgtaccggttagtgaagct

SEQ ID NO: 193919 - DNA, 30 bp, Artificial Sequence
  Synthetic oligonucleotide
tcgcgtactgcgagcactgttggtgaagct

SEQ ID NO: 193920 - DNA, 30 bp, Artificial Sequence
  Synthetic oligonucleotide
gattgcctcctaacaccgacatgtgaagct

SEQ ID NO: 193921 - DNA, 30 bp, Artificial Sequence
  Synthetic oligonucleotide
cattagtgtcatcatggggtttcctaagct

SEQ ID NO: 193922 - DNA, 30 bp, Artificial Sequence
  Synthetic oligonucleotide
ttaagagtatacgggccctgtggttaagct

SEQ ID NO: 193923 - DNA, 30 bp, Artificial Sequence
  Synthetic oligonucleotide
caatcctacgctatagcattttgaacagct

SEQ ID NO: 193924 - DNA, 30 bp, Artificial Sequence
  Synthetic oligonucleotide
acattcggtccgttgctacaggatacagct

SEQ ID NO: 193925 - DNA, 30 bp, Artificial Sequence
  Synthetic oligonucleotide
cgtgagcattatgatctgacacaaccagct

SEQ ID NO: 193926 - DNA, 30 bp, Artificial Sequence
  Synthetic oligonucleotide
ctcacctttccgcaagccggtggcccagct

SEQ ID NO: 193927 - DNA, 30 bp, Artificial Sequence
  Synthetic oligonucleotide
tatcatttaatgaatgtcattttgccagct

SEQ ID NO: 193928 - DNA, 30 bp, Artificial Sequence
  Synthetic oligonucleotide
cacgttaccattactggcttcatagcagct

SEQ ID NO: 193929 - DNA, 30 bp, Artificial Sequence
  Synthetic oligonucleotide
tcgaaagatcatgggaaacaattcgcagct

SEQ ID NO: 193930 - DNA, 30 bp, Artificial Sequence
  Synthetic oligonucleotide
tgggtattaaaccgtcgaatgtttgcagct

SEQ ID NO: 193931 - DNA, 30 bp, Artificial Sequence
  Synthetic oligonucleotide
ctcgaaatagaatcgtaaccagaatcagct

SEQ ID NO: 193932 - DNA, 30 bp, Artificial Sequence
  Synthetic oligonucleotide
caatcgaccataggatggctagactcagct

SEQ ID NO: 193933 - DNA, 30 bp, Artificial Sequence
  Synthetic oligonucleotide
cattagctatcataatcagcttactcagct

SEQ ID NO: 193934 - DNA, 30 bp, Artificial Sequence
  Synthetic oligonucleotide
gtggcacctcaattgggccagtattcagct

SEQ ID NO: 193935 - DNA, 30 bp, Artificial Sequence
  Synthetic oligonucleotide
tcgtacggagccgcggaattctcttcagct

SEQ ID NO: 193936 - DNA, 30 bp, Artificial Sequence
  Synthetic oligonucleotide
aagcctttcgacgaccccaccgtttcagct

SEQ ID NO: 193937 - DNA, 30 bp, Artificial Sequence
  Synthetic oligonucleotide
ccaggtatgttgtcgatgatggaaagagct

SEQ ID NO: 193938 - DNA, 30 bp, Artificial Sequence
  Synthetic oligonucleotide
aggagactcacctaaactcacttaagagct

SEQ ID NO: 193939 - DNA, 30 bp, Artificial Sequence
  Synthetic oligonucleotide
gtgggaagtcgaacttggtcgaatagagct

SEQ ID NO: 193940 - DNA, 30 bp, Artificial Sequence
  Synthetic oligonucleotide
tgtgccacgttcttgtagctgagtagagct

SEQ ID NO: 193941 - DNA, 30 bp, Artificial Sequence
  Synthetic oligonucleotide
acaccttgtggatcagtccttggacgagct

SEQ ID NO: 193942 - DNA, 30 bp, Artificial Sequence
  Synthetic oligonucleotide
tacgatgcatactggagaatactacgagct

SEQ ID NO: 193943 - DNA, 30 bp, Artificial Sequence
  Synthetic oligonucleotide
tgtaccggtggagccgccccctaccgagct

SEQ ID NO: 193944 - DNA, 30 bp, Artificial Sequence
  Synthetic oligonucleotide
tgatgcacccgacaatttagtggccgagct

SEQ ID NO: 193945 - DNA, 30 bp, Artificial Sequence
  Synthetic oligonucleotide
cagcgctgtcggtccaggatctggcgagct

SEQ ID NO: 193946 - DNA, 30 bp, Artificial Sequence
  Synthetic oligonucleotide
aagccacacggccagcgccctaatcgagct

SEQ ID NO: 193947 - DNA, 30 bp, Artificial Sequence
  Synthetic oligonucleotide
cgagtcatatgatgtaacgctcatcgagct

SEQ ID NO: 193948 - DNA, 30 bp, Artificial Sequence
  Synthetic oligonucleotide
agcgtaggaattggaaaggccgttcgagct

SEQ ID NO: 193949 - DNA, 30 bp, Artificial Sequence
  Synthetic oligonucleotide
ctaactgctgattaacccagcgtaggagct

SEQ ID NO: 193950 - DNA, 30 bp, Artificial Sequence
  Synthetic oligonucleotide
tcggattaggggttagcccaccacggagct

SEQ ID NO: 193951 - DNA, 30 bp, Artificial Sequence
  Synthetic oligonucleotide
gatagccccgtaaaagcggaaaagggagct

SEQ ID NO: 193952 - DNA, 30 bp, Artificial Sequence
  Synthetic oligonucleotide
acgagcaaactataaattggaatgggagct

SEQ ID NO: 193953 - DNA, 30 bp, Artificial Sequence
  Synthetic oligonucleotide
gatgccaccttatacaataaccatggagct

SEQ ID NO: 193954 - DNA, 30 bp, Artificial Sequence
  Synthetic oligonucleotide
tacttttcccgtgaaaagaccactggagct

SEQ ID NO: 193955 - DNA, 30 bp, Artificial Sequence
  Synthetic oligonucleotide
gagagcataagagagcccacatctggagct

SEQ ID NO: 193956 - DNA, 27 bp, Artificial Sequence
  Synthetic oligonucleotide
tagactgtgctcgcgtacatatgagct

SEQ ID NO: 193957 - DNA, 30 bp, Artificial Sequence
  Synthetic oligonucleotide
tttaggttcatgccccgttccaccatagct

SEQ ID NO: 193958 - DNA, 30 bp, Artificial Sequence
  Synthetic oligonucleotide
gggagccgcctctactcagagcgtatagct

SEQ ID NO: 193959 - DNA, 30 bp, Artificial Sequence
  Synthetic oligonucleotide
gaaacgatttgtgggacagaacgtctagct

SEQ ID NO: 193960 - DNA, 30 bp, Artificial Sequence
  Synthetic oligonucleotide
acgcgtaaaacggttggagcaattctagct

SEQ ID NO: 193961 - DNA, 30 bp, Artificial Sequence
  Synthetic oligonucleotide
agccatcatggcgagttacgcactgtagct

SEQ ID NO: 193962 - DNA, 30 bp, Artificial Sequence
  Synthetic oligonucleotide
cgaatgctaagcctgagatctaccttagct

SEQ ID NO: 193963 - DNA, 30 bp, Artificial Sequence
  Synthetic oligonucleotide
gttcgtggaattatcttcgtagggttagct

SEQ ID NO: 193964 - DNA, 30 bp, Artificial Sequence
  Synthetic oligonucleotide
aggtctaactttaccaagggccctttagct

SEQ ID NO: 193965 - DNA, 30 bp, Artificial Sequence
  Synthetic oligonucleotide
gacttaaagacatgtcgataaattttagct

SEQ ID NO: 193966 - DNA, 30 bp, Artificial Sequence
  Synthetic oligonucleotide
aacatgtcatgttggaaagactatcacgct

SEQ ID NO: 193967 - DNA, 30 bp, Artificial Sequence
  Synthetic oligonucleotide
tggaactctagcggttgtcaacttcacgct

SEQ ID NO: 193968 - DNA, 30 bp, Artificial Sequence
  Synthetic oligonucleotide
ttgtccaacttacggtgcgggaacgacgct

SEQ ID NO: 193969 - DNA, 30 bp, Artificial Sequence
  Synthetic oligonucleotide
cgacccagagagtgggactgccgggacgct

SEQ ID NO: 193970 - DNA, 30 bp, Artificial Sequence
  Synthetic oligonucleotide
cagacacccatacaacgtcaaactgacgct

SEQ ID NO: 193971 - DNA, 30 bp, Artificial Sequence
  Synthetic oligonucleotide
tgggacagaatgtcccgataagtctacgct

SEQ ID NO: 193972 - DNA, 30 bp, Artificial Sequence
  Synthetic oligonucleotide
ctatttatcggtgaatcgcgagagtacgct

SEQ ID NO: 193973 - DNA, 30 bp, Artificial Sequence
  Synthetic oligonucleotide
cgtgcagacactcctcttcttcaaaccgct

SEQ ID NO: 193974 - DNA, 30 bp, Artificial Sequence
  Synthetic oligonucleotide
agttgggggtagatactgttggaaaccgct

SEQ ID NO: 193975 - DNA, 30 bp, Artificial Sequence
  Synthetic oligonucleotide
caacgtgtaaaaatggtagatcacaccgct

SEQ ID NO: 193976 - DNA, 30 bp, Artificial Sequence
  Synthetic oligonucleotide
ttgggaaaagaatttaggtagctcaccgct

SEQ ID NO: 193977 - DNA, 30 bp, Artificial Sequence
  Synthetic oligonucleotide
gcgtacccctgtgtcaattctgagaccgct

SEQ ID NO: 193978 - DNA, 30 bp, Artificial Sequence
  Synthetic oligonucleotide
acggcgttacagcagggttgttggaccgct

SEQ ID NO: 193979 - DNA, 30 bp, Artificial Sequence
  Synthetic oligonucleotide
gacatcccgccaccattactgggtaccgct

SEQ ID NO: 193980 - DNA, 30 bp, Artificial Sequence
  Synthetic oligonucleotide
gcattcgccaatcgttccggaatacccgct

SEQ ID NO: 193981 - DNA, 30 bp, Artificial Sequence
  Synthetic oligonucleotide
cgacattaacgtcacgacttagcccccgct

SEQ ID NO: 193982 - DNA, 30 bp, Artificial Sequence
  Synthetic oligonucleotide
ctgcaagaggagacacggtaaaggcccgct

SEQ ID NO: 193983 - DNA, 30 bp, Artificial Sequence
  Synthetic oligonucleotide
ggtaaatatttctaaaggttccttcccgct

SEQ ID NO: 193984 - DNA, 30 bp, Artificial Sequence
  Synthetic oligonucleotide
gcactttgccaaagtatgggtagagccgct

SEQ ID NO: 193985 - DNA, 30 bp, Artificial Sequence
  Synthetic oligonucleotide
atgttaggaaacgagagacctcacgccgct

SEQ ID NO: 193986 - DNA, 30 bp, Artificial Sequence
  Synthetic oligonucleotide
gggcgtaggtctcaggaccaccaggccgct

SEQ ID NO: 193987 - DNA, 30 bp, Artificial Sequence
  Synthetic oligonucleotide
acaggaaaaacgtccttgcaaccggccgct

SEQ ID NO: 193988 - DNA, 30 bp, Artificial Sequence
  Synthetic oligonucleotide
gccgatacacacccagcacaacagtccgct

SEQ ID NO: 193989 - DNA, 30 bp, Artificial Sequence
  Synthetic oligonucleotide
ggtgcggagaactggaataatttgagcgct

SEQ ID NO: 193990 - DNA, 30 bp, Artificial Sequence
  Synthetic oligonucleotide
ggcggtgacattgtcgagtccaaacgcgct

SEQ ID NO: 193991 - DNA, 30 bp, Artificial Sequence
  Synthetic oligonucleotide
cctggcctcagggactatcgctggcgcgct

SEQ ID NO: 193992 - DNA, 30 bp, Artificial Sequence
  Synthetic oligonucleotide
ggacaggttaatcgtgtacgcccaggcgct

SEQ ID NO: 193993 - DNA, 30 bp, Artificial Sequence
  Synthetic oligonucleotide
tactaacacatcatcaacgtaaatggcgct

SEQ ID NO: 193994 - DNA, 30 bp, Artificial Sequence
  Synthetic oligonucleotide
tgacagcgggcgtatcttaacgactgcgct

SEQ ID NO: 193995 - DNA, 30 bp, Artificial Sequence
  Synthetic oligonucleotide
tctgacagtcgcctcagtcaaataatcgct

SEQ ID NO: 193996 - DNA, 30 bp, Artificial Sequence
  Synthetic oligonucleotide
ttaagtcagaacctgaatgaaactatcgct

SEQ ID NO: 193997 - DNA, 30 bp, Artificial Sequence
  Synthetic oligonucleotide
acgcattttagactatagtaaaaactcgct

SEQ ID NO: 193998 - DNA, 30 bp, Artificial Sequence
  Synthetic oligonucleotide
ccgcacgaccagcgcttagtttcactcgct

SEQ ID NO: 193999 - DNA, 30 bp, Artificial Sequence
  Synthetic oligonucleotide
aaccggatgcctttaaaaccgtggctcgct

SEQ ID NO: 194000 - DNA, 30 bp, Artificial Sequence
  Synthetic oligonucleotide
gaaccgtaggaaaatcgctggcgtctcgct

SEQ ID NO: 194001 - DNA, 30 bp, Artificial Sequence
  Synthetic oligonucleotide
cgtaggtacccgttcctgtaaagggtcgct

SEQ ID NO: 194002 - DNA, 30 bp, Artificial Sequence
  Synthetic oligonucleotide
gaataaaaatactaaaatggtcatgtcgct

SEQ ID NO: 194003 - DNA, 30 bp, Artificial Sequence
  Synthetic oligonucleotide
agataaattgtacagaacccttaattcgct

SEQ ID NO: 194004 - DNA, 30 bp, Artificial Sequence
  Synthetic oligonucleotide
tcaagttacctgtactgtatcgaaaaggct

SEQ ID NO: 194005 - DNA, 30 bp, Artificial Sequence
  Synthetic oligonucleotide
cacgagcattgctgaaactgagtaaaggct

SEQ ID NO: 194006 - DNA, 30 bp, Artificial Sequence
  Synthetic oligonucleotide
attatcgatgaaggtatattgaagaaggct

SEQ ID NO: 194007 - DNA, 30 bp, Artificial Sequence
  Synthetic oligonucleotide
tacgaactccgctatcatatgaggaaggct

SEQ ID NO: 194008 - DNA, 30 bp, Artificial Sequence
  Synthetic oligonucleotide
gttcctacctagtggtcaggcatgaaggct

SEQ ID NO: 194009 - DNA, 30 bp, Artificial Sequence
  Synthetic oligonucleotide
agactcatagctgagtgccgtagtaaggct

SEQ ID NO: 194010 - DNA, 30 bp, Artificial Sequence
  Synthetic oligonucleotide
ctcataaggtcagcgtattcttagcaggct

SEQ ID NO: 194011 - DNA, 30 bp, Artificial Sequence
  Synthetic oligonucleotide
aactcaatagtttgcgggtcggtagaggct

SEQ ID NO: 194012 - DNA, 30 bp, Artificial Sequence
  Synthetic oligonucleotide
ggttacgtcggaggcatttacccataggct

SEQ ID NO: 194013 - DNA, 30 bp, Artificial Sequence
  Synthetic oligonucleotide
atacgacggacggaattattgtactaggct

SEQ ID NO: 194014 - DNA, 30 bp, Artificial Sequence
  Synthetic oligonucleotide
gactacggctagatcgaaaccgcctaggct

SEQ ID NO: 194015 - DNA, 30 bp, Artificial Sequence
  Synthetic oligonucleotide
gttttccacggaaattcgagggggacggct

SEQ ID NO: 194016 - DNA, 30 bp, Artificial Sequence
  Synthetic oligonucleotide
atctgcggtgggtggtactgcctgacggct

SEQ ID NO: 194017 - DNA, 30 bp, Artificial Sequence
  Synthetic oligonucleotide
ggctagtcgaattgggcccacagaccggct

SEQ ID NO: 194018 - DNA, 30 bp, Artificial Sequence
  Synthetic oligonucleotide
tgcctcccttctgttatcccttagccggct

SEQ ID NO: 194019 - DNA, 30 bp, Artificial Sequence
  Synthetic oligonucleotide
gacggagagagacagggtgggccgccggct

SEQ ID NO: 194020 - DNA, 30 bp, Artificial Sequence
  Synthetic oligonucleotide
gtaataccaagagcccaacccaggccggct

SEQ ID NO: 194021 - DNA, 30 bp, Artificial Sequence
  Synthetic oligonucleotide
ttcatgaagcgttcattccttggggcggct

SEQ ID NO: 194022 - DNA, 30 bp, Artificial Sequence
  Synthetic oligonucleotide
agcggggagacgttggttcaatgtgcggct

SEQ ID NO: 194023 - DNA, 30 bp, Artificial Sequence
  Synthetic oligonucleotide
acgtgcagcgtggaaggtgttaaatcggct

SEQ ID NO: 194024 - DNA, 30 bp, Artificial Sequence
  Synthetic oligonucleotide
tggcggggtagccagctaaacccatcggct

SEQ ID NO: 194025 - DNA, 30 bp, Artificial Sequence
  Synthetic oligonucleotide
ggtcggatacataaagttatgttgtcggct

SEQ ID NO: 194026 - DNA, 30 bp, Artificial Sequence
  Synthetic oligonucleotide
attagttggtaaaaactagactgcagggct

SEQ ID NO: 194027 - DNA, 35 bp, Artificial Sequence
  Synthetic oligonucleotide
tgcggtcacaagaacccgacagaagagggagggct

SEQ ID NO: 194028 - DNA, 30 bp, Artificial Sequence
  Synthetic oligonucleotide
ctatgacacgatacacgttggtaacgggct

SEQ ID NO: 194029 - DNA, 30 bp, Artificial Sequence
  Synthetic oligonucleotide
cctcttcagaaggataaggacaatcgggct

SEQ ID NO: 194030 - DNA, 30 bp, Artificial Sequence
  Synthetic oligonucleotide
ggtacttgagctcaatccgatgacggggct

SEQ ID NO: 194031 - DNA, 30 bp, Artificial Sequence
  Synthetic oligonucleotide
aagttagcgtcgtagcgcgtcaagggggct

SEQ ID NO: 194032 - DNA, 30 bp, Artificial Sequence
  Synthetic oligonucleotide
tctattggaaaagattgtgaatggggggct

SEQ ID NO: 194033 - DNA, 30 bp, Artificial Sequence
  Synthetic oligonucleotide
gcctttgtgagatgggtactgtctggggct

SEQ ID NO: 194034 - DNA, 30 bp, Artificial Sequence
  Synthetic oligonucleotide
gccaagctcaagatgttgaacagatgggct

SEQ ID NO: 194035 - DNA, 30 bp, Artificial Sequence
  Synthetic oligonucleotide
aagccagataaagtatcgtgaaggtgggct

SEQ ID NO: 194036 - DNA, 30 bp, Artificial Sequence
  Synthetic oligonucleotide
ccgagtctggacatgtcaaaaatgtgggct

SEQ ID NO: 194037 - DNA, 30 bp, Artificial Sequence
  Synthetic oligonucleotide
atcaaaaacccactttcgaaggtttgggct

SEQ ID NO: 194038 - DNA, 30 bp, Artificial Sequence
  Synthetic oligonucleotide
gtagaatccagtgctccttacgcaatggct

SEQ ID NO: 194039 - DNA, 30 bp, Artificial Sequence
  Synthetic oligonucleotide
cacttgaacagcgggtcaaatataatggct

SEQ ID NO: 194040 - DNA, 30 bp, Artificial Sequence
  Synthetic oligonucleotide
ttaagccagacccacccgtgcagcatggct

SEQ ID NO: 194041 - DNA, 30 bp, Artificial Sequence
  Synthetic oligonucleotide
acaaatcgtgcttctaacatatgcatggct

SEQ ID NO: 194042 - DNA, 30 bp, Artificial Sequence
  Synthetic oligonucleotide
aggaagtactgtgcccaaagtaggatggct

SEQ ID NO: 194043 - DNA, 30 bp, Artificial Sequence
  Synthetic oligonucleotide
tctagtagctggaagtgttaaatgatggct

SEQ ID NO: 194044 - DNA, 30 bp, Artificial Sequence
  Synthetic oligonucleotide
gaggggctcgcgctaatgagcgaactggct

SEQ ID NO: 194045 - DNA, 30 bp, Artificial Sequence
  Synthetic oligonucleotide
ttgcatggtatccgccaagctgcgctggct

SEQ ID NO: 194046 - DNA, 30 bp, Artificial Sequence
  Synthetic oligonucleotide
ccgtcgaggacccggtttagagtgctggct

SEQ ID NO: 194047 - DNA, 30 bp, Artificial Sequence
  Synthetic oligonucleotide
caataggattagacactctacttgctggct

SEQ ID NO: 194048 - DNA, 30 bp, Artificial Sequence
  Synthetic oligonucleotide
taaatcgagcttcgttacgcctctctggct

SEQ ID NO: 194049 - DNA, 30 bp, Artificial Sequence
  Synthetic oligonucleotide
taggaatagagcaactacccatgtctggct

SEQ ID NO: 194050 - DNA, 30 bp, Artificial Sequence
  Synthetic oligonucleotide
agttaccggaggaaaatgctagatgtggct

SEQ ID NO: 194051 - DNA, 30 bp, Artificial Sequence
  Synthetic oligonucleotide
tgctgcctcgggctagctgagatattggct

SEQ ID NO: 194052 - DNA, 30 bp, Artificial Sequence
  Synthetic oligonucleotide
tgagtggaatggggcgtatagaccttggct

SEQ ID NO: 194053 - DNA, 30 bp, Artificial Sequence
  Synthetic oligonucleotide
acaattggtatttgttacatggcgttggct

SEQ ID NO: 194054 - DNA, 30 bp, Artificial Sequence
  Synthetic oligonucleotide
gcagttgtgaacgagtgcctacggttggct

SEQ ID NO: 194055 - DNA, 30 bp, Artificial Sequence
  Synthetic oligonucleotide
acgagtcgctcgtcagagggctctttggct

SEQ ID NO: 194056 - DNA, 30 bp, Artificial Sequence
  Synthetic oligonucleotide
tgatctgtgtcacaataaatagtaaatgct

SEQ ID NO: 194057 - DNA, 30 bp, Artificial Sequence
  Synthetic oligonucleotide
caccgagtagggaacggagatatgaatgct

SEQ ID NO: 194058 - DNA, 30 bp, Artificial Sequence
  Synthetic oligonucleotide
tcatgcaaggactctggcccgttgaatgct

SEQ ID NO: 194059 - DNA, 30 bp, Artificial Sequence
  Synthetic oligonucleotide
ctaacttattctaccaataagcctaatgct

SEQ ID NO: 194060 - DNA, 30 bp, Artificial Sequence
  Synthetic oligonucleotide
gagcaagtcactgaagtgaaaattaatgct

SEQ ID NO: 194061 - DNA, 30 bp, Artificial Sequence
  Synthetic oligonucleotide
taagttcgggcgagatcggatcgacatgct

SEQ ID NO: 194062 - DNA, 30 bp, Artificial Sequence
  Synthetic oligonucleotide
tgtgcgaaatagccacacaccacggatgct

SEQ ID NO: 194063 - DNA, 30 bp, Artificial Sequence
  Synthetic oligonucleotide
catgagacgtataaccttgttagatatgct

SEQ ID NO: 194064 - DNA, 30 bp, Artificial Sequence
  Synthetic oligonucleotide
aatagaggtctacaagtaagcgcttatgct

SEQ ID NO: 194065 - DNA, 30 bp, Artificial Sequence
  Synthetic oligonucleotide
cagcccgatcagatagcgagaataactgct

SEQ ID NO: 194066 - DNA, 30 bp, Artificial Sequence
  Synthetic oligonucleotide
ttacagacggagtagaagaggaagactgct

SEQ ID NO: 194067 - DNA, 30 bp, Artificial Sequence
  Synthetic oligonucleotide
cgcgatcccttcttccgcgatttgcctgct

SEQ ID NO: 194068 - DNA, 30 bp, Artificial Sequence
  Synthetic oligonucleotide
gttgccagggtgcggttttgtccagctgct

SEQ ID NO: 194069 - DNA, 30 bp, Artificial Sequence
  Synthetic oligonucleotide
ggcaattgacctaaccgtctaaccgctgct

SEQ ID NO: 194070 - DNA, 30 bp, Artificial Sequence
  Synthetic oligonucleotide
acgttcccactgaataaatcgtgcgctgct

SEQ ID NO: 194071 - DNA, 30 bp, Artificial Sequence
  Synthetic oligonucleotide
tgggattcctggattgaatgagcggctgct

SEQ ID NO: 194072 - DNA, 30 bp, Artificial Sequence
  Synthetic oligonucleotide
ccgttggtaattagcgaaaaggctgctgct

SEQ ID NO: 194073 - DNA, 30 bp, Artificial Sequence
  Synthetic oligonucleotide
cgtgcatccagtttgcagggccgtgctgct

SEQ ID NO: 194074 - DNA, 30 bp, Artificial Sequence
  Synthetic oligonucleotide
ttagagccagctattgaggccgttgctgct

SEQ ID NO: 194075 - DNA, 30 bp, Artificial Sequence
  Synthetic oligonucleotide
attgacggttaagttctctagggatctgct

SEQ ID NO: 194076 - DNA, 31 bp, Artificial Sequence
  Synthetic oligonucleotide
tggaatgcgatcgttgaagctttcctctgct

SEQ ID NO: 194077 - DNA, 30 bp, Artificial Sequence
  Synthetic oligonucleotide
tgtctagggagttgtggttagcagtctgct

SEQ ID NO: 194078 - DNA, 30 bp, Artificial Sequence
  Synthetic oligonucleotide
ataagagttgttgctttgctcgagtctgct

SEQ ID NO: 194079 - DNA, 30 bp, Artificial Sequence
  Synthetic oligonucleotide
ttgatcaccggatagccaagattgtctgct

SEQ ID NO: 194080 - DNA, 30 bp, Artificial Sequence
  Synthetic oligonucleotide
gggagtagaaaaagcagtaattattctgct

SEQ ID NO: 194081 - DNA, 30 bp, Artificial Sequence
  Synthetic oligonucleotide
ttcggtactaagtgaggtgctcaaagtgct

SEQ ID NO: 194082 - DNA, 30 bp, Artificial Sequence
  Synthetic oligonucleotide
aaggtgcgtgggtaagggctcgcgagtgct

SEQ ID NO: 194083 - DNA, 30 bp, Artificial Sequence
  Synthetic oligonucleotide
aaatagggtcagtataagggcattagtgct

SEQ ID NO: 194084 - DNA, 30 bp, Artificial Sequence
  Synthetic oligonucleotide
atctggccacaaggctttaagatacgtgct

SEQ ID NO: 194085 - DNA, 30 bp, Artificial Sequence
  Synthetic oligonucleotide
ataggcccgtgccgctaagtgctacgtgct

SEQ ID NO: 194086 - DNA, 30 bp, Artificial Sequence
  Synthetic oligonucleotide
gctacatacaaaggatgaaccggccgtgct

SEQ ID NO: 194087 - DNA, 30 bp, Artificial Sequence
  Synthetic oligonucleotide
tccgtttaggatactcagacttgccgtgct

SEQ ID NO: 194088 - DNA, 30 bp, Artificial Sequence
  Synthetic oligonucleotide
ctgtgggatcacctacctcgaataggtgct

SEQ ID NO: 194089 - DNA, 30 bp, Artificial Sequence
  Synthetic oligonucleotide
gggcaatcgaccggacttgctgacggtgct

SEQ ID NO: 194090 - DNA, 30 bp, Artificial Sequence
  Synthetic oligonucleotide
agtgccacatgcgtgttaatgctcggtgct

SEQ ID NO: 194091 - DNA, 30 bp, Artificial Sequence
  Synthetic oligonucleotide
tggaagaccctcatccttacatagggtgct

SEQ ID NO: 194092 - DNA, 31 bp, Artificial Sequence
  Synthetic oligonucleotide
tgaacacatgaagataccggagaggggtgct

SEQ ID NO: 194093 - DNA, 30 bp, Artificial Sequence
  Synthetic oligonucleotide
gaaccaaggggtagtgatagtggatgtgct

SEQ ID NO: 194094 - DNA, 30 bp, Artificial Sequence
  Synthetic oligonucleotide
aaggatggaaaagccgaatgctggtgtgct

SEQ ID NO: 194095 - DNA, 30 bp, Artificial Sequence
  Synthetic oligonucleotide
catcatagtaagtatccgtccctgtgtgct

SEQ ID NO: 194096 - DNA, 30 bp, Artificial Sequence
  Synthetic oligonucleotide
gagccgaacacagccccggctcgaattgct

SEQ ID NO: 194097 - DNA, 30 bp, Artificial Sequence
  Synthetic oligonucleotide
atgtcaggagaggaacttcctttgattgct

SEQ ID NO: 194098 - DNA, 30 bp, Artificial Sequence
  Synthetic oligonucleotide
atgtcttgacattccatttaccgacttgct

SEQ ID NO: 194099 - DNA, 30 bp, Artificial Sequence
  Synthetic oligonucleotide
cgatgcacatacgagactacgaatcttgct

SEQ ID NO: 194100 - DNA, 30 bp, Artificial Sequence
  Synthetic oligonucleotide
gagaacgccttgacaacgagggcagttgct

SEQ ID NO: 194101 - DNA, 30 bp, Artificial Sequence
  Synthetic oligonucleotide
taatctcgttgacgtagttacggagttgct

SEQ ID NO: 194102 - DNA, 30 bp, Artificial Sequence
  Synthetic oligonucleotide
cacgaaggtaatgcgtattaactcgttgct

SEQ ID NO: 194103 - DNA, 30 bp, Artificial Sequence
  Synthetic oligonucleotide
cattttaagaatatggaagtgacggttgct

SEQ ID NO: 194104 - DNA, 30 bp, Artificial Sequence
  Synthetic oligonucleotide
ctcggaacgctcatcagaaaacgggttgct

SEQ ID NO: 194105 - DNA, 30 bp, Artificial Sequence
  Synthetic oligonucleotide
gcctatgaagtcatgagatggcgttttgct

SEQ ID NO: 194106 - DNA, 30 bp, Artificial Sequence
  Synthetic oligonucleotide
tacaagccgacagagagaatcagaaaatct

SEQ ID NO: 194107 - DNA, 30 bp, Artificial Sequence
  Synthetic oligonucleotide
tgaggagcgaaaaactgccgcggaaaatct

SEQ ID NO: 194108 - DNA, 30 bp, Artificial Sequence
  Synthetic oligonucleotide
aaggtccactagaaaaaggctaataaatct

SEQ ID NO: 194109 - DNA, 30 bp, Artificial Sequence
  Synthetic oligonucleotide
gttgggccaaactcgtccgcgtaagaatct

SEQ ID NO: 194110 - DNA, 30 bp, Artificial Sequence
  Synthetic oligonucleotide
caaagagagattgtaaggacagccgaatct

SEQ ID NO: 194111 - DNA, 30 bp, Artificial Sequence
  Synthetic oligonucleotide
cgggcgactcaaaggacgttcctataatct

SEQ ID NO: 194112 - DNA, 30 bp, Artificial Sequence
  Synthetic oligonucleotide
gaaacccagagttatgcaatgtcgtaatct

SEQ ID NO: 194113 - DNA, 30 bp, Artificial Sequence
  Synthetic oligonucleotide
gaaatgcaatcatcgtaagttcggtaatct

SEQ ID NO: 194114 - DNA, 30 bp, Artificial Sequence
  Synthetic oligonucleotide
actgggataggtcgactcttcggttaatct

SEQ ID NO: 194115 - DNA, 30 bp, Artificial Sequence
  Synthetic oligonucleotide
taggcgagaagcagccgagtattaacatct

SEQ ID NO: 194116 - DNA, 30 bp, Artificial Sequence
  Synthetic oligonucleotide
aagtggtacaattgcacaaggcagacatct

SEQ ID NO: 194117 - DNA, 30 bp, Artificial Sequence
  Synthetic oligonucleotide
gcaacagaataccttccttggggaccatct

SEQ ID NO: 194118 - DNA, 30 bp, Artificial Sequence
  Synthetic oligonucleotide
aaatacagctaacttacagtccacccatct

SEQ ID NO: 194119 - DNA, 30 bp, Artificial Sequence
  Synthetic oligonucleotide
cacggaattcagatgagtctgcccccatct

SEQ ID NO: 194120 - DNA, 30 bp, Artificial Sequence
  Synthetic oligonucleotide
ggggagcaaagagtaaattcggtcccatct

SEQ ID NO: 194121 - DNA, 30 bp, Artificial Sequence
  Synthetic oligonucleotide
tcatggcatgcgcaatagtgagaagcatct

SEQ ID NO: 194122 - DNA, 30 bp, Artificial Sequence
  Synthetic oligonucleotide
cacgctgtatggtccgtagatgtcgcatct

SEQ ID NO: 194123 - DNA, 30 bp, Artificial Sequence
  Synthetic oligonucleotide
tcaacgacccggaaaattttcgcatcatct

SEQ ID NO: 194124 - DNA, 30 bp, Artificial Sequence
  Synthetic oligonucleotide
agtgtgtgcaggaattttagtggatcatct

SEQ ID NO: 194125 - DNA, 30 bp, Artificial Sequence
  Synthetic oligonucleotide
gtgtagagagcaactgtgaggatgtcatct

SEQ ID NO: 194126 - DNA, 30 bp, Artificial Sequence
  Synthetic oligonucleotide
gtgaacgaaataggaggacgacgaagatct

SEQ ID NO: 194127 - DNA, 30 bp, Artificial Sequence
  Synthetic oligonucleotide
gccagattggaagttcccgatggaagatct

SEQ ID NO: 194128 - DNA, 30 bp, Artificial Sequence
  Synthetic oligonucleotide
agcgaaggctggtgaaggaactgtagatct

SEQ ID NO: 194129 - DNA, 30 bp, Artificial Sequence
  Synthetic oligonucleotide
ctagttgaaacaaaagatactaagcgatct

SEQ ID NO: 194130 - DNA, 30 bp, Artificial Sequence
  Synthetic oligonucleotide
gtgtattcactaaacaacatcgagcgatct

SEQ ID NO: 194131 - DNA, 30 bp, Artificial Sequence
  Synthetic oligonucleotide
aagagcgtgctctgtagggtatccggatct

SEQ ID NO: 194132 - DNA, 30 bp, Artificial Sequence
  Synthetic oligonucleotide
actaagaagccaggctctttccgcggatct

SEQ ID NO: 194133 - DNA, 30 bp, Artificial Sequence
  Synthetic oligonucleotide
cctattgtatattgggcggggaagggatct

SEQ ID NO: 194134 - DNA, 30 bp, Artificial Sequence
  Synthetic oligonucleotide
acaaaagcgcaacgagccagcccgggatct

SEQ ID NO: 194135 - DNA, 30 bp, Artificial Sequence
  Synthetic oligonucleotide
caggtcctagtcccgatggcgcaatgatct

SEQ ID NO: 194136 - DNA, 30 bp, Artificial Sequence
  Synthetic oligonucleotide
acagccgtataattgcagacttaatgatct

SEQ ID NO: 194137 - DNA, 30 bp, Artificial Sequence
  Synthetic oligonucleotide
aatggagtcgggcatattataacatgatct

SEQ ID NO: 194138 - DNA, 30 bp, Artificial Sequence
  Synthetic oligonucleotide
atcgacatctaatccgcagcggggtgatct

SEQ ID NO: 194139 - DNA, 30 bp, Artificial Sequence
  Synthetic oligonucleotide
cagagacgatagctgctatgagtgtgatct

SEQ ID NO: 194140 - DNA, 30 bp, Artificial Sequence
  Synthetic oligonucleotide
ggagatcaatcgtgtatccaatattgatct

SEQ ID NO: 194141 - DNA, 30 bp, Artificial Sequence
  Synthetic oligonucleotide
ccacaataacactaagatttagccatatct

SEQ ID NO: 194142 - DNA, 30 bp, Artificial Sequence
  Synthetic oligonucleotide
cgttgcccggaggggatgtggtcgatatct

SEQ ID NO: 194143 - DNA, 30 bp, Artificial Sequence
  Synthetic oligonucleotide
agtacatgtcaaatagttagtaatatatct

SEQ ID NO: 194144 - DNA, 30 bp, Artificial Sequence
  Synthetic oligonucleotide
agacaaggcagggcagaaagtgctatatct

SEQ ID NO: 194145 - DNA, 30 bp, Artificial Sequence
  Synthetic oligonucleotide
accttagctttgtaagaggagattatatct

SEQ ID NO: 194146 - DNA, 30 bp, Artificial Sequence
  Synthetic oligonucleotide
tagaattccagatcaagttgcgttatatct

SEQ ID NO: 194147 - DNA, 30 bp, Artificial Sequence
  Synthetic oligonucleotide
ttcgcacaggtgggaggagttttgctatct

SEQ ID NO: 194148 - DNA, 30 bp, Artificial Sequence
  Synthetic oligonucleotide
cggaggttattcaggaagttgcttctatct

SEQ ID NO: 194149 - DNA, 30 bp, Artificial Sequence
  Synthetic oligonucleotide
tggtatggaagtataactcctctcttatct

SEQ ID NO: 194150 - DNA, 30 bp, Artificial Sequence
  Synthetic oligonucleotide
ttgcccttaatggatcctcacagaaactct

SEQ ID NO: 194151 - DNA, 30 bp, Artificial Sequence
  Synthetic oligonucleotide
agttgtccgctgggagggctaattaactct

SEQ ID NO: 194152 - DNA, 30 bp, Artificial Sequence
  Synthetic oligonucleotide
ataaggttcccatatcctgtactacactct

SEQ ID NO: 194153 - DNA, 29 bp, Artificial Sequence
  Synthetic oligonucleotide
tcgtcacatttagggtaagctatgactct

SEQ ID NO: 194154 - DNA, 30 bp, Artificial Sequence
  Synthetic oligonucleotide
cataagatgcggtcgatggtgtaatactct

SEQ ID NO: 194155 - DNA, 30 bp, Artificial Sequence
  Synthetic oligonucleotide
aaggccaatatatacacgagagatacctct

SEQ ID NO: 194156 - DNA, 30 bp, Artificial Sequence
  Synthetic oligonucleotide
cggccattcccgcgcgtcgagggtacctct

SEQ ID NO: 194157 - DNA, 30 bp, Artificial Sequence
  Synthetic oligonucleotide
ggtattgatccgaagaactcacgaccctct

SEQ ID NO: 194158 - DNA, 30 bp, Artificial Sequence
  Synthetic oligonucleotide
ggaaaactttgcggtaagcgattaccctct

SEQ ID NO: 194159 - DNA, 30 bp, Artificial Sequence
  Synthetic oligonucleotide
tcagaagatccggaaaagtttaaatcctct

SEQ ID NO: 194160 - DNA, 30 bp, Artificial Sequence
  Synthetic oligonucleotide
aggttggcacaataggtacaagcgtcctct

SEQ ID NO: 194161 - DNA, 30 bp, Artificial Sequence
  Synthetic oligonucleotide
tttggcctacggaaccctactgattcctct

SEQ ID NO: 194162 - DNA, 30 bp, Artificial Sequence
  Synthetic oligonucleotide
ggacaagcagagagtggtcataaaagctct

SEQ ID NO: 194163 - DNA, 30 bp, Artificial Sequence
  Synthetic oligonucleotide
tgacttgaagaggaatagagcggcagctct

SEQ ID NO: 194164 - DNA, 30 bp, Artificial Sequence
  Synthetic oligonucleotide
gtcatcgcggatcgtactagattgagctct

SEQ ID NO: 194165 - DNA, 30 bp, Artificial Sequence
  Synthetic oligonucleotide
cttctgttgttccagtacattccaggctct

SEQ ID NO: 194166 - DNA, 30 bp, Artificial Sequence
  Synthetic oligonucleotide
gctcagatcgaacaatgtacgagaggctct

SEQ ID NO: 194167 - DNA, 30 bp, Artificial Sequence
  Synthetic oligonucleotide
ggctggcatagcagatgatttctcggctct

SEQ ID NO: 194168 - DNA, 30 bp, Artificial Sequence
  Synthetic oligonucleotide
ggtggcgtagctgtttataggcaatgctct

SEQ ID NO: 194169 - DNA, 30 bp, Artificial Sequence
  Synthetic oligonucleotide
aacataagtgattgtaattgatccatctct

SEQ ID NO: 194170 - DNA, 30 bp, Artificial Sequence
  Synthetic oligonucleotide
ccgagatgggttatctcactaagcatctct

SEQ ID NO: 194171 - DNA, 30 bp, Artificial Sequence
  Synthetic oligonucleotide
tcacataagggaatatgttaattcatctct

SEQ ID NO: 194172 - DNA, 30 bp, Artificial Sequence
  Synthetic oligonucleotide
ggaggtggtcgtacggttggaaaactctct

SEQ ID NO: 194173 - DNA, 30 bp, Artificial Sequence
  Synthetic oligonucleotide
tacagctgtgggtcgataatacacctctct

SEQ ID NO: 194174 - DNA, 30 bp, Artificial Sequence
  Synthetic oligonucleotide
gtggcattagatagcgatccttttctctct

SEQ ID NO: 194175 - DNA, 30 bp, Artificial Sequence
  Synthetic oligonucleotide
attagtgaacagttcaggcggcacgtctct

SEQ ID NO: 194176 - DNA, 30 bp, Artificial Sequence
  Synthetic oligonucleotide
ttggcagagcgtggggggagcactgtctct

SEQ ID NO: 194177 - DNA, 30 bp, Artificial Sequence
  Synthetic oligonucleotide
ttggcacacaccattggttatactgtctct

SEQ ID NO: 194178 - DNA, 30 bp, Artificial Sequence
  Synthetic oligonucleotide
gtggtaaaatcgtgagcagaaagattctct

SEQ ID NO: 194179 - DNA, 30 bp, Artificial Sequence
  Synthetic oligonucleotide
ggatccatacgccgaatcttgcgattctct

SEQ ID NO: 194180 - DNA, 30 bp, Artificial Sequence
  Synthetic oligonucleotide
cggtgctcgcgctgaaagagttagttctct

SEQ ID NO: 194181 - DNA, 30 bp, Artificial Sequence
  Synthetic oligonucleotide
ggtgtgtgcaggttgtcgaagattttctct

SEQ ID NO: 194182 - DNA, 30 bp, Artificial Sequence
  Synthetic oligonucleotide
agggaacgatcagggagtcatcataagtct

SEQ ID NO: 194183 - DNA, 30 bp, Artificial Sequence
  Synthetic oligonucleotide
atcaataatatcacgttcaggctgcagtct

SEQ ID NO: 194184 - DNA, 30 bp, Artificial Sequence
  Synthetic oligonucleotide
ggcgacgtagggtcctggctatctcagtct

SEQ ID NO: 194185 - DNA, 30 bp, Artificial Sequence
  Synthetic oligonucleotide
ttcatgtctacataaactatgcgcgagtct

SEQ ID NO: 194186 - DNA, 30 bp, Artificial Sequence
  Synthetic oligonucleotide
tcatgcttacgtttgtttagctaggagtct

SEQ ID NO: 194187 - DNA, 30 bp, Artificial Sequence
  Synthetic oligonucleotide
ccacaattatttcgaagccgtcaatagtct

SEQ ID NO: 194188 - DNA, 30 bp, Artificial Sequence
  Synthetic oligonucleotide
gcggagggattcactcggttaatatagtct

SEQ ID NO: 194189 - DNA, 30 bp, Artificial Sequence
  Synthetic oligonucleotide
gtggtcgtacataggggcttgtcctagtct

SEQ ID NO: 194190 - DNA, 30 bp, Artificial Sequence
  Synthetic oligonucleotide
cagcctgcgtggtcagcagtaatgtagtct

SEQ ID NO: 194191 - DNA, 30 bp, Artificial Sequence
  Synthetic oligonucleotide
cgtttctcttctactactgtcggttagtct

SEQ ID NO: 194192 - DNA, 30 bp, Artificial Sequence
  Synthetic oligonucleotide
gtctctctgggaaccatagacaaaacgtct

SEQ ID NO: 194193 - DNA, 30 bp, Artificial Sequence
  Synthetic oligonucleotide
gggtaagtcatggtcgacataataacgtct

SEQ ID NO: 194194 - DNA, 30 bp, Artificial Sequence
  Synthetic oligonucleotide
acggttagaaaggtggctagtgttacgtct

SEQ ID NO: 194195 - DNA, 30 bp, Artificial Sequence
  Synthetic oligonucleotide
ccagccggttacagtacttaagcaccgtct

SEQ ID NO: 194196 - DNA, 30 bp, Artificial Sequence
  Synthetic oligonucleotide
ctaacgaacaggactagtatcggaccgtct

SEQ ID NO: 194197 - DNA, 30 bp, Artificial Sequence
  Synthetic oligonucleotide
tattggagaaacttgcatcaaaaagcgtct

SEQ ID NO: 194198 - DNA, 30 bp, Artificial Sequence
  Synthetic oligonucleotide
tgagacgtcgaataagtgatagcagcgtct

SEQ ID NO: 194199 - DNA, 30 bp, Artificial Sequence
  Synthetic oligonucleotide
gggtcacccaggtctttccaaggagcgtct

SEQ ID NO: 194200 - DNA, 30 bp, Artificial Sequence
  Synthetic oligonucleotide
catacagtttgcggatcgttttacgcgtct

SEQ ID NO: 194201 - DNA, 30 bp, Artificial Sequence
  Synthetic oligonucleotide
aaggggcaaccaacaaggtcacttgcgtct

SEQ ID NO: 194202 - DNA, 30 bp, Artificial Sequence
  Synthetic oligonucleotide
ccgcgagagtggtgctgagtagttgcgtct

SEQ ID NO: 194203 - DNA, 30 bp, Artificial Sequence
  Synthetic oligonucleotide
tgagctaaggtgtcaatatgtcgttcgtct

SEQ ID NO: 194204 - DNA, 30 bp, Artificial Sequence
  Synthetic oligonucleotide
gcagatctatccggagattacgaaaggtct

SEQ ID NO: 194205 - DNA, 30 bp, Artificial Sequence
  Synthetic oligonucleotide
atggttgcttattaatccgagttaaggtct

SEQ ID NO: 194206 - DNA, 30 bp, Artificial Sequence
  Synthetic oligonucleotide
ggggataaatggaccggaaagtacaggtct

SEQ ID NO: 194207 - DNA, 30 bp, Artificial Sequence
  Synthetic oligonucleotide
gtgaaatgactgatgcaagagtacaggtct

SEQ ID NO: 194208 - DNA, 30 bp, Artificial Sequence
  Synthetic oligonucleotide
tgcggcatcttgcataaacgggataggtct

SEQ ID NO: 194209 - DNA, 30 bp, Artificial Sequence
  Synthetic oligonucleotide
caaactcgggaatagatggggactaggtct

SEQ ID NO: 194210 - DNA, 30 bp, Artificial Sequence
  Synthetic oligonucleotide
aacgtagatggtatcactatggtacggtct

SEQ ID NO: 194211 - DNA, 30 bp, Artificial Sequence
  Synthetic oligonucleotide
ggcgggaggcctccctcacgaagccggtct

SEQ ID NO: 194212 - DNA, 30 bp, Artificial Sequence
  Synthetic oligonucleotide
ttagccgaatttaattacacattgcggtct

SEQ ID NO: 194213 - DNA, 30 bp, Artificial Sequence
  Synthetic oligonucleotide
cgtaggtgaggatcgattcgtagtgggtct

SEQ ID NO: 194214 - DNA, 30 bp, Artificial Sequence
  Synthetic oligonucleotide
taagaccaataatcgcgactttgatggtct

SEQ ID NO: 194215 - DNA, 30 bp, Artificial Sequence
  Synthetic oligonucleotide
ctaacaggtcaatagtaggctttatggtct

SEQ ID NO: 194216 - DNA, 30 bp, Artificial Sequence
  Synthetic oligonucleotide
ggacaaacgcataatcccgtgtcctggtct

SEQ ID NO: 194217 - DNA, 30 bp, Artificial Sequence
  Synthetic oligonucleotide
cgggaaagtccgatagatgagatttggtct

SEQ ID NO: 194218 - DNA, 30 bp, Artificial Sequence
  Synthetic oligonucleotide
tcaggtgatcagtcaaaagttaaaatgtct

SEQ ID NO: 194219 - DNA, 30 bp, Artificial Sequence
  Synthetic oligonucleotide
tgaaacgtgcactggtacttaaacatgtct

SEQ ID NO: 194220 - DNA, 30 bp, Artificial Sequence
  Synthetic oligonucleotide
cgggaaatctcaatgaaggttaagatgtct

SEQ ID NO: 194221 - DNA, 30 bp, Artificial Sequence
  Synthetic oligonucleotide
taggtagtgggacagaagggatgactgtct

SEQ ID NO: 194222 - DNA, 30 bp, Artificial Sequence
  Synthetic oligonucleotide
gcactaaagtatactgaacacatactgtct

SEQ ID NO: 194223 - DNA, 30 bp, Artificial Sequence
  Synthetic oligonucleotide
caatgggatcatgggcggaagggtctgtct

SEQ ID NO: 194224 - DNA, 30 bp, Artificial Sequence
  Synthetic oligonucleotide
gctgaacatcgatatatttagggagtgtct

SEQ ID NO: 194225 - DNA, 30 bp, Artificial Sequence
  Synthetic oligonucleotide
tagtaaataacgtttcataaggccgtgtct

SEQ ID NO: 194226 - DNA, 30 bp, Artificial Sequence
  Synthetic oligonucleotide
acttggtctctatggatgcctggaaattct

SEQ ID NO: 194227 - DNA, 30 bp, Artificial Sequence
  Synthetic oligonucleotide
agaacatacctgcagagtttggacaattct

SEQ ID NO: 194228 - DNA, 30 bp, Artificial Sequence
  Synthetic oligonucleotide
acgcgcgcctgtggagggttagtgaattct

SEQ ID NO: 194229 - DNA, 30 bp, Artificial Sequence
  Synthetic oligonucleotide
tacggaggcgggggcggcgggtgtaattct

SEQ ID NO: 194230 - DNA, 30 bp, Artificial Sequence
  Synthetic oligonucleotide
aactcaggtcgaccattacggcaccattct

SEQ ID NO: 194231 - DNA, 30 bp, Artificial Sequence
  Synthetic oligonucleotide
gcaggctcatttcgaatcgcccagcattct

SEQ ID NO: 194232 - DNA, 30 bp, Artificial Sequence
  Synthetic oligonucleotide
ataatggctcctgggtgcgtaaatcattct

SEQ ID NO: 194233 - DNA, 30 bp, Artificial Sequence
  Synthetic oligonucleotide
cctcaagcgaaggtgctctcagatcattct

SEQ ID NO: 194234 - DNA, 30 bp, Artificial Sequence
  Synthetic oligonucleotide
gtaatagagactcctaaaagcggggattct

SEQ ID NO: 194235 - DNA, 30 bp, Artificial Sequence
  Synthetic oligonucleotide
ggggttgtgcgtcccatcgacgctgattct

SEQ ID NO: 194236 - DNA, 30 bp, Artificial Sequence
  Synthetic oligonucleotide
gataggacgctcaaccgacactaatattct

SEQ ID NO: 194237 - DNA, 30 bp, Artificial Sequence
  Synthetic oligonucleotide
atagtgacttaagtcacgtagagatattct

SEQ ID NO: 194238 - DNA, 30 bp, Artificial Sequence
  Synthetic oligonucleotide
ccagtccaatttctaagttcaatatattct

SEQ ID NO: 194239 - DNA, 30 bp, Artificial Sequence
  Synthetic oligonucleotide
cccataacatgagtatggtctttctattct

SEQ ID NO: 194240 - DNA, 30 bp, Artificial Sequence
  Synthetic oligonucleotide
gcatggggtttaaagtcaggatgaacttct

SEQ ID NO: 194241 - DNA, 30 bp, Artificial Sequence
  Synthetic oligonucleotide
ataggtgacttgtaggatccttatccttct

SEQ ID NO: 194242 - DNA, 30 bp, Artificial Sequence
  Synthetic oligonucleotide
tgcgtggttctcttacacacatacgcttct

SEQ ID NO: 194243 - DNA, 30 bp, Artificial Sequence
  Synthetic oligonucleotide
tacccaaatgaagaaaatcatggcagttct

SEQ ID NO: 194244 - DNA, 30 bp, Artificial Sequence
  Synthetic oligonucleotide
atagcacgttgtgtcaaaaccaagagttct

SEQ ID NO: 194245 - DNA, 30 bp, Artificial Sequence
  Synthetic oligonucleotide
caaggttaatcggggagataccagagttct

SEQ ID NO: 194246 - DNA, 30 bp, Artificial Sequence
  Synthetic oligonucleotide
agccggtcttaaattaatcctccgagttct

SEQ ID NO: 194247 - DNA, 30 bp, Artificial Sequence
  Synthetic oligonucleotide
cctggggatagagatatgacggatagttct

SEQ ID NO: 194248 - DNA, 30 bp, Artificial Sequence
  Synthetic oligonucleotide
ggtcatcaccgttcatgtaccgttagttct

SEQ ID NO: 194249 - DNA, 30 bp, Artificial Sequence
  Synthetic oligonucleotide
tcataaatcgagttcgcattggcacgttct

SEQ ID NO: 194250 - DNA, 30 bp, Artificial Sequence
  Synthetic oligonucleotide
catttctgcatattatcgccttcacgttct

SEQ ID NO: 194251 - DNA, 30 bp, Artificial Sequence
  Synthetic oligonucleotide
cattagatattgctatccagcatacgttct

SEQ ID NO: 194252 - DNA, 30 bp, Artificial Sequence
  Synthetic oligonucleotide
ttatcgcgtgagttgtggctagagcgttct

SEQ ID NO: 194253 - DNA, 30 bp, Artificial Sequence
  Synthetic oligonucleotide
gtacctataacacgctgggcgggcggttct

SEQ ID NO: 194254 - DNA, 30 bp, Artificial Sequence
  Synthetic oligonucleotide
ctgaagatcctaatcgcctaatgcggttct

SEQ ID NO: 194255 - DNA, 30 bp, Artificial Sequence
  Synthetic oligonucleotide
acgtttccatatgtctacggcttgggttct

SEQ ID NO: 194256 - DNA, 30 bp, Artificial Sequence
  Synthetic oligonucleotide
atcatatgaggtgcgagttgaattggttct

SEQ ID NO: 194257 - DNA, 30 bp, Artificial Sequence
  Synthetic oligonucleotide
cgcaagctccatcggacggaacttggttct

SEQ ID NO: 194258 - DNA, 30 bp, Artificial Sequence
  Synthetic oligonucleotide
ccaacagcttgatgcattttgtttggttct

SEQ ID NO: 194259 - DNA, 30 bp, Artificial Sequence
  Synthetic oligonucleotide
caaaatggttttcattgaggacaatgttct

SEQ ID NO: 194260 - DNA, 30 bp, Artificial Sequence
  Synthetic oligonucleotide
aaaaggagtaatggctttaatcagtgttct

SEQ ID NO: 194261 - DNA, 30 bp, Artificial Sequence
  Synthetic oligonucleotide
gcatataaacggagagatgtgcattgttct

SEQ ID NO: 194262 - DNA, 30 bp, Artificial Sequence
  Synthetic oligonucleotide
ccgtagaaaggagctaccacgagttgttct

SEQ ID NO: 194263 - DNA, 30 bp, Artificial Sequence
  Synthetic oligonucleotide
ggggtcagctatatagggacagacctttct

SEQ ID NO: 194264 - DNA, 30 bp, Artificial Sequence
  Synthetic oligonucleotide
gttgactgacaactagcttacgccctttct

SEQ ID NO: 194265 - DNA, 30 bp, Artificial Sequence
  Synthetic oligonucleotide
cgaatagcgaggaagggcttaatattttct

SEQ ID NO: 194266 - DNA, 30 bp, Artificial Sequence
  Synthetic oligonucleotide
tctcgccgtcggtccagccgttagttttct

SEQ ID NO: 194267 - DNA, 30 bp, Artificial Sequence
  Synthetic oligonucleotide
acacaggcacgctccggtacactgttttct

SEQ ID NO: 194268 - DNA, 30 bp, Artificial Sequence
  Synthetic oligonucleotide
ttagtcgaagaagtaatagaggaaaaaagt

SEQ ID NO: 194269 - DNA, 30 bp, Artificial Sequence
  Synthetic oligonucleotide
cggataacagtgactctcaaagcaaaaagt

SEQ ID NO: 194270 - DNA, 30 bp, Artificial Sequence
  Synthetic oligonucleotide
cgctcaaaatgtcacggctaatgtaaaagt

SEQ ID NO: 194271 - DNA, 30 bp, Artificial Sequence
  Synthetic oligonucleotide
ggcaaagtggaggtggagggaaaacaaagt

SEQ ID NO: 194272 - DNA, 30 bp, Artificial Sequence
  Synthetic oligonucleotide
ccggttgattcatcgggacttcgacaaagt

SEQ ID NO: 194273 - DNA, 30 bp, Artificial Sequence
  Synthetic oligonucleotide
ggttgaaatgcgcggcgtatcgagcaaagt

SEQ ID NO: 194274 - DNA, 30 bp, Artificial Sequence
  Synthetic oligonucleotide
cacgtagggtctcgtgatggagggcaaagt

SEQ ID NO: 194275 - DNA, 30 bp, Artificial Sequence
  Synthetic oligonucleotide
agttagcgacagagtatacctagtcaaagt

SEQ ID NO: 194276 - DNA, 30 bp, Artificial Sequence
  Synthetic oligonucleotide
tgtctagcggactacgatgtaattcaaagt

SEQ ID NO: 194277 - DNA, 31 bp, Artificial Sequence
  Synthetic oligonucleotide
agctcttttaccgagattggcgcaagaaagt

SEQ ID NO: 194278 - DNA, 30 bp, Artificial Sequence
  Synthetic oligonucleotide
gttgtcggagggacggtattagcagaaagt

SEQ ID NO: 194279 - DNA, 30 bp, Artificial Sequence
  Synthetic oligonucleotide
ttgggtgaccaaccgtgttaccgagaaagt

SEQ ID NO: 194280 - DNA, 30 bp, Artificial Sequence
  Synthetic oligonucleotide
cgtcccatagtctacgggagcttagaaagt

SEQ ID NO: 194281 - DNA, 30 bp, Artificial Sequence
  Synthetic oligonucleotide
aaatctctgatcacggcgataaaggaaagt

SEQ ID NO: 194282 - DNA, 30 bp, Artificial Sequence
  Synthetic oligonucleotide
agagcttgaaactgagcgtttagggaaagt

SEQ ID NO: 194283 - DNA, 30 bp, Artificial Sequence
  Synthetic oligonucleotide
ttgaatagccaatccgcagagggggaaagt

SEQ ID NO: 194284 - DNA, 30 bp, Artificial Sequence
  Synthetic oligonucleotide
ggaaaccatttgacggccatatcgtaaagt

SEQ ID NO: 194285 - DNA, 30 bp, Artificial Sequence
  Synthetic oligonucleotide
acggtgaccaatgagagtaccaggtaaagt

SEQ ID NO: 194286 - DNA, 30 bp, Artificial Sequence
  Synthetic oligonucleotide
caagtcgggcggaagcaatcagggtaaagt

SEQ ID NO: 194287 - DNA, 30 bp, Artificial Sequence
  Synthetic oligonucleotide
tccggggggacggcaaccaatccaacaagt

SEQ ID NO: 194288 - DNA, 30 bp, Artificial Sequence
  Synthetic oligonucleotide
agatagacgcgtttcaaacaagtaacaagt

SEQ ID NO: 194289 - DNA, 30 bp, Artificial Sequence
  Synthetic oligonucleotide
caatgcggtgtaaactagcggaagacaagt

SEQ ID NO: 194290 - DNA, 30 bp, Artificial Sequence
  Synthetic oligonucleotide
acagcagcacggtgtcgtggatatacaagt

SEQ ID NO: 194291 - DNA, 30 bp, Artificial Sequence
  Synthetic oligonucleotide
tcggggctgcggcgcttagcctctccaagt

SEQ ID NO: 194292 - DNA, 30 bp, Artificial Sequence
  Synthetic oligonucleotide
atgtgttgttaccgagaggggggagcaagt

SEQ ID NO: 194293 - DNA, 30 bp, Artificial Sequence
  Synthetic oligonucleotide
agtcagagtttagactgacagatagcaagt

SEQ ID NO: 194294 - DNA, 30 bp, Artificial Sequence
  Synthetic oligonucleotide
gccacaagtaggtattccaatagggcaagt

SEQ ID NO: 194295 - DNA, 30 bp, Artificial Sequence
  Synthetic oligonucleotide
gggatccgtcattatcgccgacatgcaagt

SEQ ID NO: 194296 - DNA, 30 bp, Artificial Sequence
  Synthetic oligonucleotide
acgtgggttactaggtatgtaatatcaagt

SEQ ID NO: 194297 - DNA, 30 bp, Artificial Sequence
  Synthetic oligonucleotide
tggtgccgtaccccgtcgaggttatcaagt

SEQ ID NO: 194298 - DNA, 30 bp, Artificial Sequence
  Synthetic oligonucleotide
aacaaagatgcctttgattcctcgtcaagt

SEQ ID NO: 194299 - DNA, 30 bp, Artificial Sequence
  Synthetic oligonucleotide
atggtatcaagacgtgggtaacggtcaagt

SEQ ID NO: 194300 - DNA, 30 bp, Artificial Sequence
  Synthetic oligonucleotide
gttgcgccacaactccaccaccattcaagt

SEQ ID NO: 194301 - DNA, 30 bp, Artificial Sequence
  Synthetic oligonucleotide
gaggtatattagttgacagtgttttcaagt

SEQ ID NO: 194302 - DNA, 30 bp, Artificial Sequence
  Synthetic oligonucleotide
gattcgttactgaagtgacaaataagaagt

SEQ ID NO: 194303 - DNA, 30 bp, Artificial Sequence
  Synthetic oligonucleotide
caaaggccgccaagaagtcgcctaagaagt

SEQ ID NO: 194304 - DNA, 30 bp, Artificial Sequence
  Synthetic oligonucleotide
gatcctagtggcacactggaaaccagaagt

SEQ ID NO: 194305 - DNA, 30 bp, Artificial Sequence
  Synthetic oligonucleotide
tgcctcattacataggcatatgccagaagt

SEQ ID NO: 194306 - DNA, 30 bp, Artificial Sequence
  Synthetic oligonucleotide
gcgggggtgtaagttacagactagagaagt

SEQ ID NO: 194307 - DNA, 30 bp, Artificial Sequence
  Synthetic oligonucleotide
actgtacaccgcttagcagtatggagaagt

SEQ ID NO: 194308 - DNA, 30 bp, Artificial Sequence
  Synthetic oligonucleotide
caatgtaatttaacgtcgatggctagaagt

SEQ ID NO: 194309 - DNA, 30 bp, Artificial Sequence
  Synthetic oligonucleotide
ccttatagttagggggttaatgctagaagt

SEQ ID NO: 194310 - DNA, 30 bp, Artificial Sequence
  Synthetic oligonucleotide
ggtcattcgccacctacactgcgtagaagt

SEQ ID NO: 194311 - DNA, 30 bp, Artificial Sequence
  Synthetic oligonucleotide
gatcctggggcgcaaactaccgcacgaagt

SEQ ID NO: 194312 - DNA, 30 bp, Artificial Sequence
  Synthetic oligonucleotide
tgttgattatatagcgcccacaaccgaagt

SEQ ID NO: 194313 - DNA, 30 bp, Artificial Sequence
  Synthetic oligonucleotide
taggtgaacacacttcttcaatgccgaagt

SEQ ID NO: 194314 - DNA, 30 bp, Artificial Sequence
  Synthetic oligonucleotide
aaagtgcacacaagcatgtttaggcgaagt

SEQ ID NO: 194315 - DNA, 30 bp, Artificial Sequence
  Synthetic oligonucleotide
gtcctcctgttccacacgaccaatcgaagt

SEQ ID NO: 194316 - DNA, 30 bp, Artificial Sequence
  Synthetic oligonucleotide
atatcatgaggagtgaaaatgcatcgaagt

SEQ ID NO: 194317 - DNA, 30 bp, Artificial Sequence
  Synthetic oligonucleotide
caaaggcctagcagaaaccgttatcgaagt

SEQ ID NO: 194318 - DNA, 30 bp, Artificial Sequence
  Synthetic oligonucleotide
aggtcgcttatccacactgggcggggaagt

SEQ ID NO: 194319 - DNA, 30 bp, Artificial Sequence
  Synthetic oligonucleotide
aacggggctaagtgacggtcaaatggaagt

SEQ ID NO: 194320 - DNA, 30 bp, Artificial Sequence
  Synthetic oligonucleotide
cccccgtcgaacaaaaaagagtcatgaagt

SEQ ID NO: 194321 - DNA, 30 bp, Artificial Sequence
  Synthetic oligonucleotide
gtctgtacgttcggagaaccatgatgaagt

SEQ ID NO: 194322 - DNA, 30 bp, Artificial Sequence
  Synthetic oligonucleotide
cttaaaactcgatggcagggaacgtgaagt

SEQ ID NO: 194323 - DNA, 30 bp, Artificial Sequence
  Synthetic oligonucleotide
tgtcataaactagtgtgcctgtggtgaagt

SEQ ID NO: 194324 - DNA, 30 bp, Artificial Sequence
  Synthetic oligonucleotide
tgtgaaagcaagtgcgcaaaaaaaataagt

SEQ ID NO: 194325 - DNA, 30 bp, Artificial Sequence
  Synthetic oligonucleotide
caacctaatgacaacacctgatcgataagt

SEQ ID NO: 194326 - DNA, 30 bp, Artificial Sequence
  Synthetic oligonucleotide
gcactaacagcagggcaatagtatataagt

SEQ ID NO: 194327 - DNA, 30 bp, Artificial Sequence
  Synthetic oligonucleotide
tggctcggtgcattgtttcaaaaagtaagt

SEQ ID NO: 194328 - DNA, 30 bp, Artificial Sequence
  Synthetic oligonucleotide
ttgcaagtacatagatagaccacggtaagt

SEQ ID NO: 194329 - DNA, 30 bp, Artificial Sequence
  Synthetic oligonucleotide
tgcctgagtttgtttacacataatgtaagt

SEQ ID NO: 194330 - DNA, 30 bp, Artificial Sequence
  Synthetic oligonucleotide
attgggtgccatagtaataggcaattaagt

SEQ ID NO: 194331 - DNA, 30 bp, Artificial Sequence
  Synthetic oligonucleotide
ccgaaacatagcagcggatacgtattaagt

SEQ ID NO: 194332 - DNA, 30 bp, Artificial Sequence
  Synthetic oligonucleotide
tgacccggacttacatacagagtcttaagt

SEQ ID NO: 194333 - DNA, 30 bp, Artificial Sequence
  Synthetic oligonucleotide
gacttgagcgctcgaattggttcgttaagt

SEQ ID NO: 194334 - DNA, 30 bp, Artificial Sequence
  Synthetic oligonucleotide
caacgcgatctagtcgggttcgcaaacagt

SEQ ID NO: 194335 - DNA, 30 bp, Artificial Sequence
  Synthetic oligonucleotide
aagtggcgtactgcggtcattagcaacagt

SEQ ID NO: 194336 - DNA, 30 bp, Artificial Sequence
  Synthetic oligonucleotide
ggtgcaatgggattcaaaagggggaacagt

SEQ ID NO: 194337 - DNA, 30 bp, Artificial Sequence
  Synthetic oligonucleotide
aggtaccatattaactcggaatggaacagt

SEQ ID NO: 194338 - DNA, 30 bp, Artificial Sequence
  Synthetic oligonucleotide
agctcggacgccgagtattgccgccacagt

SEQ ID NO: 194339 - DNA, 30 bp, Artificial Sequence
  Synthetic oligonucleotide
gccttgttgggttgaacagatcctcacagt

SEQ ID NO: 194340 - DNA, 30 bp, Artificial Sequence
  Synthetic oligonucleotide
cgttacggctaatggtttacggaagacagt

SEQ ID NO: 194341 - DNA, 30 bp, Artificial Sequence
  Synthetic oligonucleotide
cgaacgactgatctgtagtcaatcgacagt

SEQ ID NO: 194342 - DNA, 30 bp, Artificial Sequence
  Synthetic oligonucleotide
cgaagaatgtggtcttcacgcgcggacagt

SEQ ID NO: 194343 - DNA, 30 bp, Artificial Sequence
  Synthetic oligonucleotide
gcatccacgcttgaagacgattctgacagt

SEQ ID NO: 194344 - DNA, 30 bp, Artificial Sequence
  Synthetic oligonucleotide
ggttgcctaacgcgtgaggtttttgacagt

SEQ ID NO: 194345 - DNA, 30 bp, Artificial Sequence
  Synthetic oligonucleotide
agagagcggctgtgatagggcagatacagt

SEQ ID NO: 194346 - DNA, 30 bp, Artificial Sequence
  Synthetic oligonucleotide
cgggcgtgctcctttttttggcattacagt

SEQ ID NO: 194347 - DNA, 30 bp, Artificial Sequence
  Synthetic oligonucleotide
tgcgaaagacgattcatggagctaaccagt

SEQ ID NO: 194348 - DNA, 30 bp, Artificial Sequence
  Synthetic oligonucleotide
taaatccaaccagagtgtttaaccaccagt

SEQ ID NO: 194349 - DNA, 31 bp, Artificial Sequence
  Synthetic oligonucleotide
aagaatatagttaactcactagatcaccagt

SEQ ID NO: 194350 - DNA, 30 bp, Artificial Sequence
  Synthetic oligonucleotide
ctggtaacgttcctaataatatctaccagt

SEQ ID NO: 194351 - DNA, 30 bp, Artificial Sequence
  Synthetic oligonucleotide
gataccgatcgaatcgactatctgcccagt

SEQ ID NO: 194352 - DNA, 30 bp, Artificial Sequence
  Synthetic oligonucleotide
tactaggcgaggcgtaacccaaatcccagt

SEQ ID NO: 194353 - DNA, 30 bp, Artificial Sequence
  Synthetic oligonucleotide
actgagatccgagtagggtcccccgccagt

SEQ ID NO: 194354 - DNA, 30 bp, Artificial Sequence
  Synthetic oligonucleotide
gaatactgtggcgatatgcaagctgccagt

SEQ ID NO: 194355 - DNA, 28 bp, Artificial Sequence
  Synthetic oligonucleotide
ggtcctcgtcagctgaccggcatccagt

SEQ ID NO: 194356 - DNA, 30 bp, Artificial Sequence
  Synthetic oligonucleotide
gcctaggatcgtactaactttcgctccagt

SEQ ID NO: 194357 - DNA, 30 bp, Artificial Sequence
  Synthetic oligonucleotide
atgtaattaagggtcgcgcttcagtccagt

SEQ ID NO: 194358 - DNA, 30 bp, Artificial Sequence
  Synthetic oligonucleotide
atgtgcaagataaacggagttgcgtccagt

SEQ ID NO: 194359 - DNA, 30 bp, Artificial Sequence
  Synthetic oligonucleotide
cctcgatggctattaagtagttattccagt

SEQ ID NO: 194360 - DNA, 30 bp, Artificial Sequence
  Synthetic oligonucleotide
tccaatataccaactctcgacagttccagt

SEQ ID NO: 194361 - DNA, 30 bp, Artificial Sequence
  Synthetic oligonucleotide
gataccgccgtccgataccatctaagcagt

SEQ ID NO: 194362 - DNA, 30 bp, Artificial Sequence
  Synthetic oligonucleotide
gatcagattaaaacaatggagaccagcagt

SEQ ID NO: 194363 - DNA, 30 bp, Artificial Sequence
  Synthetic oligonucleotide
catatggcaaaaaagtattggtccagcagt

SEQ ID NO: 194364 - DNA, 30 bp, Artificial Sequence
  Synthetic oligonucleotide
ggatggagattagtattctaacttcgcagt

SEQ ID NO: 194365 - DNA, 30 bp, Artificial Sequence
  Synthetic oligonucleotide
atgctagacctacgtctagtgcaaggcagt

SEQ ID NO: 194366 - DNA, 30 bp, Artificial Sequence
  Synthetic oligonucleotide
aactagagtcagcacagcggatgaggcagt

SEQ ID NO: 194367 - DNA, 30 bp, Artificial Sequence
  Synthetic oligonucleotide
gcaacatggatgtagattcggtagggcagt

SEQ ID NO: 194368 - DNA, 30 bp, Artificial Sequence
  Synthetic oligonucleotide
tcataccattagcaagaaaccacgggcagt

SEQ ID NO: 194369 - DNA, 30 bp, Artificial Sequence
  Synthetic oligonucleotide
ggatcattaatgtgcccgccggtgggcagt

SEQ ID NO: 194370 - DNA, 30 bp, Artificial Sequence
  Synthetic oligonucleotide
tcctaaatggacaacgggccataatgcagt

SEQ ID NO: 194371 - DNA, 30 bp, Artificial Sequence
  Synthetic oligonucleotide
ggccaacttgatggccacacttgatgcagt

SEQ ID NO: 194372 - DNA, 30 bp, Artificial Sequence
  Synthetic oligonucleotide
catgagacaacataccgccgcccgtgcagt

SEQ ID NO: 194373 - DNA, 30 bp, Artificial Sequence
  Synthetic oligonucleotide
ggctcacctagcatgcgaaagtggtgcagt

SEQ ID NO: 194374 - DNA, 30 bp, Artificial Sequence
  Synthetic oligonucleotide
gcatgctgtcagagggagaaccaaatcagt

SEQ ID NO: 194375 - DNA, 30 bp, Artificial Sequence
  Synthetic oligonucleotide
gcaggagtctacatcagacggcacctcagt

SEQ ID NO: 194376 - DNA, 30 bp, Artificial Sequence
  Synthetic oligonucleotide
cggaaaactatctcgggcatggtcctcagt

SEQ ID NO: 194377 - DNA, 30 bp, Artificial Sequence
  Synthetic oligonucleotide
acataggaagcacgttaggaagcgctcagt

SEQ ID NO: 194378 - DNA, 30 bp, Artificial Sequence
  Synthetic oligonucleotide
ataaatagacaaccaacgaataatctcagt

SEQ ID NO: 194379 - DNA, 30 bp, Artificial Sequence
  Synthetic oligonucleotide
ctacaccgaaacggtgcagaccgtctcagt

SEQ ID NO: 194380 - DNA, 30 bp, Artificial Sequence
  Synthetic oligonucleotide
tgaaagttcgggcgtcatagagcggtcagt

SEQ ID NO: 194381 - DNA, 30 bp, Artificial Sequence
  Synthetic oligonucleotide
tatgaagaataaagttaggtatcggtcagt

SEQ ID NO: 194382 - DNA, 30 bp, Artificial Sequence
  Synthetic oligonucleotide
agtaaggctaatttgatcggccatgtcagt

SEQ ID NO: 194383 - DNA, 30 bp, Artificial Sequence
  Synthetic oligonucleotide
aaacggcatggacgcgaacccattgtcagt

SEQ ID NO: 194384 - DNA, 30 bp, Artificial Sequence
  Synthetic oligonucleotide
gaacctccctgagtcgtttataaaaagagt

SEQ ID NO: 194385 - DNA, 30 bp, Artificial Sequence
  Synthetic oligonucleotide
aaagagtggcctgaggcggggcaaaagagt

SEQ ID NO: 194386 - DNA, 30 bp, Artificial Sequence
  Synthetic oligonucleotide
taggtgcagccctgttcgggtctaaagagt

SEQ ID NO: 194387 - DNA, 30 bp, Artificial Sequence
  Synthetic oligonucleotide
cggttgaagacggtaccggttctcaagagt

SEQ ID NO: 194388 - DNA, 30 bp, Artificial Sequence
  Synthetic oligonucleotide
aggtactcaactctgttctattagaagagt

SEQ ID NO: 194389 - DNA, 30 bp, Artificial Sequence
  Synthetic oligonucleotide
tgtcaactcatatgaatctaggggaagagt

SEQ ID NO: 194390 - DNA, 30 bp, Artificial Sequence
  Synthetic oligonucleotide
ggggattgcatgttgggggttgtgaagagt

SEQ ID NO: 194391 - DNA, 30 bp, Artificial Sequence
  Synthetic oligonucleotide
gagctgaaagagggtgacccactacagagt

SEQ ID NO: 194392 - DNA, 30 bp, Artificial Sequence
  Synthetic oligonucleotide
gtccggattcaatagtccggcttacagagt

SEQ ID NO: 194393 - DNA, 30 bp, Artificial Sequence
  Synthetic oligonucleotide
taaaatggaacaacgcttgcctaccagagt

SEQ ID NO: 194394 - DNA, 30 bp, Artificial Sequence
  Synthetic oligonucleotide
cgcacgcggtgcggcctcactatccagagt

SEQ ID NO: 194395 - DNA, 30 bp, Artificial Sequence
  Synthetic oligonucleotide
gcggctagttataccttaaatcctcagagt

SEQ ID NO: 194396 - DNA, 30 bp, Artificial Sequence
  Synthetic oligonucleotide
tagcactccgctgcgtttgggattcagagt

SEQ ID NO: 194397 - DNA, 30 bp, Artificial Sequence
  Synthetic oligonucleotide
atcagccgcccaaggggattggaagagagt

SEQ ID NO: 194398 - DNA, 30 bp, Artificial Sequence
  Synthetic oligonucleotide
cgaatatctccaatgtaatagtgagagagt

SEQ ID NO: 194399 - DNA, 30 bp, Artificial Sequence
  Synthetic oligonucleotide
taatagtgatgagcgttaacatccgagagt

SEQ ID NO: 194400 - DNA, 30 bp, Artificial Sequence
  Synthetic oligonucleotide
acaatgactatggctatgaactccgagagt

SEQ ID NO: 194401 - DNA, 30 bp, Artificial Sequence
  Synthetic oligonucleotide
aaagtgcagtacaagattcggtgggagagt

SEQ ID NO: 194402 - DNA, 30 bp, Artificial Sequence
  Synthetic oligonucleotide
ggttattagctatgtaatctgatggagagt

SEQ ID NO: 194403 - DNA, 30 bp, Artificial Sequence
  Synthetic oligonucleotide
tttctcagggttgcgcggccgggtgagagt

SEQ ID NO: 194404 - DNA, 30 bp, Artificial Sequence
  Synthetic oligonucleotide
gcgcgtttgtcggtcctagtaacatagagt

SEQ ID NO: 194405 - DNA, 30 bp, Artificial Sequence
  Synthetic oligonucleotide
atgcctagcttgggtgtagacgtatagagt

SEQ ID NO: 194406 - DNA, 30 bp, Artificial Sequence
  Synthetic oligonucleotide
tctttataaaagctgaaaattacctagagt

SEQ ID NO: 194407 - DNA, 30 bp, Artificial Sequence
  Synthetic oligonucleotide
ttacgaaagagagaacgttgatgctagagt

SEQ ID NO: 194408 - DNA, 30 bp, Artificial Sequence
  Synthetic oligonucleotide
agatgggttgacgttaggaccataacgagt

SEQ ID NO: 194409 - DNA, 30 bp, Artificial Sequence
  Synthetic oligonucleotide
tcccgggtatactcgaagcgcaacacgagt

SEQ ID NO: 194410 - DNA, 30 bp, Artificial Sequence
  Synthetic oligonucleotide
gggaagtctacgaccgtggtagacacgagt

SEQ ID NO: 194411 - DNA, 30 bp, Artificial Sequence
  Synthetic oligonucleotide
ccaggaaaattcgggcgtggtctgacgagt

SEQ ID NO: 194412 - DNA, 30 bp, Artificial Sequence
  Synthetic oligonucleotide
ttcacgattcttcgacattggggaccgagt

SEQ ID NO: 194413 - DNA, 30 bp, Artificial Sequence
  Synthetic oligonucleotide
agtaaatgggcgatctgcgcacccgcgagt

SEQ ID NO: 194414 - DNA, 30 bp, Artificial Sequence
  Synthetic oligonucleotide
gcctcgattcgaccatcatagttcgcgagt

SEQ ID NO: 194415 - DNA, 30 bp, Artificial Sequence
  Synthetic oligonucleotide
gtaaatgccccgttctaaagaagggcgagt

SEQ ID NO: 194416 - DNA, 30 bp, Artificial Sequence
  Synthetic oligonucleotide
gaacagttagcgtacgcatgtgcgtcgagt

SEQ ID NO: 194417 - DNA, 30 bp, Artificial Sequence
  Synthetic oligonucleotide
aaaggtgcgttcgcatcggtccagaggagt

SEQ ID NO: 194418 - DNA, 30 bp, Artificial Sequence
  Synthetic oligonucleotide
actaacgcgctacccggtagggataggagt

SEQ ID NO: 194419 - DNA, 30 bp, Artificial Sequence
  Synthetic oligonucleotide
gcatggggcaccagggtagaaacacggagt

SEQ ID NO: 194420 - DNA, 30 bp, Artificial Sequence
  Synthetic oligonucleotide
tacctactacccggttatggcaaccggagt

SEQ ID NO: 194421 - DNA, 30 bp, Artificial Sequence
  Synthetic oligonucleotide
ataacacggttaacgcttcaccaccggagt

SEQ ID NO: 194422 - DNA, 30 bp, Artificial Sequence
  Synthetic oligonucleotide
accatccgctagtgataatgcggccggagt

SEQ ID NO: 194423 - DNA, 30 bp, Artificial Sequence
  Synthetic oligonucleotide
gtgtcgaagccaatgatacttatgcggagt

SEQ ID NO: 194424 - DNA, 30 bp, Artificial Sequence
  Synthetic oligonucleotide
actccattcaagccaccaactgtgcggagt

SEQ ID NO: 194425 - DNA, 30 bp, Artificial Sequence
  Synthetic oligonucleotide
tgaaattgagcccgcaagacctatcggagt

SEQ ID NO: 194426 - DNA, 30 bp, Artificial Sequence
  Synthetic oligonucleotide
cttatcaggctgaagtcaatctaagggagt

SEQ ID NO: 194427 - DNA, 30 bp, Artificial Sequence
  Synthetic oligonucleotide
cgaggttttacctcatccgcgagagggagt

SEQ ID NO: 194428 - DNA, 30 bp, Artificial Sequence
  Synthetic oligonucleotide
gatggagacggtcgttctgtccgagggagt

SEQ ID NO: 194429 - DNA, 30 bp, Artificial Sequence
  Synthetic oligonucleotide
acggcgcggcagctaaggatcttagggagt

SEQ ID NO: 194430 - DNA, 30 bp, Artificial Sequence
  Synthetic oligonucleotide
aacaagaatgtgcgacggcatctcgggagt

SEQ ID NO: 194431 - DNA, 30 bp, Artificial Sequence
  Synthetic oligonucleotide
aatggcgcgtaatggaaagacaaggggagt

SEQ ID NO: 194432 - DNA, 30 bp, Artificial Sequence
  Synthetic oligonucleotide
cacctattaagcgtaagacaccaggggagt

SEQ ID NO: 194433 - DNA, 30 bp, Artificial Sequence
  Synthetic oligonucleotide
gccaaaaacttcctaaacttacgggggagt

SEQ ID NO: 194434 - DNA, 30 bp, Artificial Sequence
  Synthetic oligonucleotide
gactgaccgaaacgattgttatgatggagt

SEQ ID NO: 194435 - DNA, 30 bp, Artificial Sequence
  Synthetic oligonucleotide
attgagctgtatcgcaattaacggtggagt

SEQ ID NO: 194436 - DNA, 30 bp, Artificial Sequence
  Synthetic oligonucleotide
agctgttggatactagcacaccgcatgagt

SEQ ID NO: 194437 - DNA, 30 bp, Artificial Sequence
  Synthetic oligonucleotide
cataaagacgtagaatacggcatgatgagt

SEQ ID NO: 194438 - DNA, 30 bp, Artificial Sequence
  Synthetic oligonucleotide
ggtcgtatttcaaagataggcggactgagt

SEQ ID NO: 194439 - DNA, 30 bp, Artificial Sequence
  Synthetic oligonucleotide
atagtggatgcgaaatctaagctactgagt

SEQ ID NO: 194440 - DNA, 30 bp, Artificial Sequence
  Synthetic oligonucleotide
acaaatacaatgttcatagaagggctgagt

SEQ ID NO: 194441 - DNA, 30 bp, Artificial Sequence
  Synthetic oligonucleotide
atgtagcgtatctgttttctttatctgagt

SEQ ID NO: 194442 - DNA, 30 bp, Artificial Sequence
  Synthetic oligonucleotide
cgtactatgaggtcgcttgtgactctgagt

SEQ ID NO: 194443 - DNA, 30 bp, Artificial Sequence
  Synthetic oligonucleotide
taacttgaaggcaatatagcgccagtgagt

SEQ ID NO: 194444 - DNA, 30 bp, Artificial Sequence
  Synthetic oligonucleotide
gcttcaggtccttaacctagcagagtgagt

SEQ ID NO: 194445 - DNA, 30 bp, Artificial Sequence
  Synthetic oligonucleotide
atactacctaagttagcacagctagtgagt

SEQ ID NO: 194446 - DNA, 30 bp, Artificial Sequence
  Synthetic oligonucleotide
ttagacgagtggggctagtgctaggtgagt

SEQ ID NO: 194447 - DNA, 30 bp, Artificial Sequence
  Synthetic oligonucleotide
gtgcgtggaccccgttcggcgtaggtgagt

SEQ ID NO: 194448 - DNA, 30 bp, Artificial Sequence
  Synthetic oligonucleotide
tatcgacgatgttaccggtgggatgtgagt

SEQ ID NO: 194449 - DNA, 30 bp, Artificial Sequence
  Synthetic oligonucleotide
aactacgtaccggtcgtacctggtgtgagt

SEQ ID NO: 194450 - DNA, 30 bp, Artificial Sequence
  Synthetic oligonucleotide
ttgcgactccgacccaggctatttgtgagt

SEQ ID NO: 194451 - DNA, 30 bp, Artificial Sequence
  Synthetic oligonucleotide
ctattgacttagtggcacagcgcattgagt

SEQ ID NO: 194452 - DNA, 30 bp, Artificial Sequence
  Synthetic oligonucleotide
acccgctttggtagttgtgaaagattgagt

SEQ ID NO: 194453 - DNA, 30 bp, Artificial Sequence
  Synthetic oligonucleotide
gccgaggacaaattctgtaaaagcttgagt

SEQ ID NO: 194454 - DNA, 30 bp, Artificial Sequence
  Synthetic oligonucleotide
agtgcgcgagtagcctcgctgccgttgagt

SEQ ID NO: 194455 - DNA, 30 bp, Artificial Sequence
  Synthetic oligonucleotide
catgactatccgtggggtagaattttgagt

SEQ ID NO: 194456 - DNA, 30 bp, Artificial Sequence
  Synthetic oligonucleotide
gaatgaggactgtactttaagatgaatagt

SEQ ID NO: 194457 - DNA, 30 bp, Artificial Sequence
  Synthetic oligonucleotide
acatggagtgggcactacaaaggtaatagt

SEQ ID NO: 194458 - DNA, 30 bp, Artificial Sequence
  Synthetic oligonucleotide
aaaggaatttgcaaagttagtcggcatagt

SEQ ID NO: 194459 - DNA, 30 bp, Artificial Sequence
  Synthetic oligonucleotide
aacatccatgtacgtgtgccatttcatagt

SEQ ID NO: 194460 - DNA, 30 bp, Artificial Sequence
  Synthetic oligonucleotide
ctgactctgtgcaaagctttatgagatagt

SEQ ID NO: 194461 - DNA, 30 bp, Artificial Sequence
  Synthetic oligonucleotide
gatggatggccatgttgctgtaccgatagt

SEQ ID NO: 194462 - DNA, 30 bp, Artificial Sequence
  Synthetic oligonucleotide
ctagcgacaggactccccaattaggatagt

SEQ ID NO: 194463 - DNA, 30 bp, Artificial Sequence
  Synthetic oligonucleotide
gtcgacgcgttcacaacagttggatatagt

SEQ ID NO: 194464 - DNA, 30 bp, Artificial Sequence
  Synthetic oligonucleotide
tcggaggacgggacgcttcggccctatagt

SEQ ID NO: 194465 - DNA, 30 bp, Artificial Sequence
  Synthetic oligonucleotide
aaagtcgcacatcgggggaaaaagtatagt

SEQ ID NO: 194466 - DNA, 30 bp, Artificial Sequence
  Synthetic oligonucleotide
cattggagcatggcaaacgatgcaactagt

SEQ ID NO: 194467 - DNA, 30 bp, Artificial Sequence
  Synthetic oligonucleotide
tggatatggttgttagtatcctacactagt

SEQ ID NO: 194468 - DNA, 30 bp, Artificial Sequence
  Synthetic oligonucleotide
agcaatggattgtgtcatacatgcactagt

SEQ ID NO: 194469 - DNA, 31 bp, Artificial Sequence
  Synthetic oligonucleotide
atagtggtgagggaaccatggtactactagt

SEQ ID NO: 194470 - DNA, 30 bp, Artificial Sequence
  Synthetic oligonucleotide
tccaacgccatacgttgtgcaactcctagt

SEQ ID NO: 194471 - DNA, 30 bp, Artificial Sequence
  Synthetic oligonucleotide
ggatttgaaaaaataattgtcagagctagt

SEQ ID NO: 194472 - DNA, 30 bp, Artificial Sequence
  Synthetic oligonucleotide
tgacggggaacttttcatcatgacgctagt

SEQ ID NO: 194473 - DNA, 30 bp, Artificial Sequence
  Synthetic oligonucleotide
acactaacagcactatagaagtttgctagt

SEQ ID NO: 194474 - DNA, 30 bp, Artificial Sequence
  Synthetic oligonucleotide
acacgccagaccatcgaacactgttctagt

SEQ ID NO: 194475 - DNA, 30 bp, Artificial Sequence
  Synthetic oligonucleotide
atagggacattgtataataacttttctagt

SEQ ID NO: 194476 - DNA, 30 bp, Artificial Sequence
  Synthetic oligonucleotide
ttcaattaatctgagagtcccatgagtagt

SEQ ID NO: 194477 - DNA, 30 bp, Artificial Sequence
  Synthetic oligonucleotide
taaccagcaacgacctgcatccgtagtagt

SEQ ID NO: 194478 - DNA, 30 bp, Artificial Sequence
  Synthetic oligonucleotide
aagggctggccaggggactcgtgtagtagt

SEQ ID NO: 194479 - DNA, 30 bp, Artificial Sequence
  Synthetic oligonucleotide
taaaatgggtcgccatagtggacaggtagt

SEQ ID NO: 194480 - DNA, 30 bp, Artificial Sequence
  Synthetic oligonucleotide
cagacggccactggtattaaacgaggtagt

SEQ ID NO: 194481 - DNA, 30 bp, Artificial Sequence
  Synthetic oligonucleotide
ccaggcggaaagtgcgaaatcataggtagt

SEQ ID NO: 194482 - DNA, 30 bp, Artificial Sequence
  Synthetic oligonucleotide
cctaggcgaggaaacaggagatcgggtagt

SEQ ID NO: 194483 - DNA, 30 bp, Artificial Sequence
  Synthetic oligonucleotide
caatgcgtaagctatcccctcatgggtagt

SEQ ID NO: 194484 - DNA, 30 bp, Artificial Sequence
  Synthetic oligonucleotide
gggggttgacgtgcaaggtgcctgggtagt

SEQ ID NO: 194485 - DNA, 30 bp, Artificial Sequence
  Synthetic oligonucleotide
gacaccgtaatgtagaccgattatggtagt

SEQ ID NO: 194486 - DNA, 30 bp, Artificial Sequence
  Synthetic oligonucleotide
gatctaaatgtagtagtgccaaaatgtagt

SEQ ID NO: 194487 - DNA, 30 bp, Artificial Sequence
  Synthetic oligonucleotide
caactagggttgataagatggctatgtagt

SEQ ID NO: 194488 - DNA, 30 bp, Artificial Sequence
  Synthetic oligonucleotide
agtcgctattctgatcagacagtctgtagt

SEQ ID NO: 194489 - DNA, 30 bp, Artificial Sequence
  Synthetic oligonucleotide
acatgtgtcgcttcgggcactggttgtagt

SEQ ID NO: 194490 - DNA, 30 bp, Artificial Sequence
  Synthetic oligonucleotide
agacccctcgagacataaaatgtcattagt

SEQ ID NO: 194491 - DNA, 30 bp, Artificial Sequence
  Synthetic oligonucleotide
cgcgttggaataatgctctcattcattagt

SEQ ID NO: 194492 - DNA, 30 bp, Artificial Sequence
  Synthetic oligonucleotide
agctaggagagttaagtgacttggattagt

SEQ ID NO: 194493 - DNA, 30 bp, Artificial Sequence
  Synthetic oligonucleotide
actcaatcgttggatctagagcgtattagt

SEQ ID NO: 194494 - DNA, 30 bp, Artificial Sequence
  Synthetic oligonucleotide
tcgtacccctacagagtgttacaacttagt

SEQ ID NO: 194495 - DNA, 30 bp, Artificial Sequence
  Synthetic oligonucleotide
ggccactgccaaaagcgcattcgccttagt

SEQ ID NO: 194496 - DNA, 30 bp, Artificial Sequence
  Synthetic oligonucleotide
agcattacactagttctattaactcttagt

SEQ ID NO: 194497 - DNA, 30 bp, Artificial Sequence
  Synthetic oligonucleotide
atattgcacggtgttgtttctggtcttagt

SEQ ID NO: 194498 - DNA, 30 bp, Artificial Sequence
  Synthetic oligonucleotide
acacacctgagaacatgatatgaagttagt

SEQ ID NO: 194499 - DNA, 30 bp, Artificial Sequence
  Synthetic oligonucleotide
cggtagtgagttcatggcgggtaagttagt

SEQ ID NO: 194500 - DNA, 30 bp, Artificial Sequence
  Synthetic oligonucleotide
tcagaattcgtccttcataaaaaggttagt

SEQ ID NO: 194501 - DNA, 30 bp, Artificial Sequence
  Synthetic oligonucleotide
gttagacggggaataagaagagcggttagt

SEQ ID NO: 194502 - DNA, 30 bp, Artificial Sequence
  Synthetic oligonucleotide
aataaacgaaaccgctaatagaatgttagt

SEQ ID NO: 194503 - DNA, 30 bp, Artificial Sequence
  Synthetic oligonucleotide
cctaataagaaaatatgctgtacatttagt

SEQ ID NO: 194504 - DNA, 30 bp, Artificial Sequence
  Synthetic oligonucleotide
ggggaaatttgaaaaaagtaaggatttagt

SEQ ID NO: 194505 - DNA, 30 bp, Artificial Sequence
  Synthetic oligonucleotide
agaccataaccagaacaagcgtgatttagt

SEQ ID NO: 194506 - DNA, 30 bp, Artificial Sequence
  Synthetic oligonucleotide
gttgtaatccatgtcaggattcactttagt

SEQ ID NO: 194507 - DNA, 30 bp, Artificial Sequence
  Synthetic oligonucleotide
catccgagtgaaaggaggatatattttagt

SEQ ID NO: 194508 - DNA, 30 bp, Artificial Sequence
  Synthetic oligonucleotide
ggctgttagccaagggggcaaacttttagt

SEQ ID NO: 194509 - DNA, 30 bp, Artificial Sequence
  Synthetic oligonucleotide
tcccggtagagagtgacactcagaaaacgt

SEQ ID NO: 194510 - DNA, 30 bp, Artificial Sequence
  Synthetic oligonucleotide
acgccctacctctttacttcatgaaaacgt

SEQ ID NO: 194511 - DNA, 30 bp, Artificial Sequence
  Synthetic oligonucleotide
ccggagttaaaccagtgacaggtgaaacgt

SEQ ID NO: 194512 - DNA, 30 bp, Artificial Sequence
  Synthetic oligonucleotide
tcgttacaagtaacaagcaatcttaaacgt

SEQ ID NO: 194513 - DNA, 30 bp, Artificial Sequence
  Synthetic oligonucleotide
cgtatgtaggttcaaattcaacttcaacgt

SEQ ID NO: 194514 - DNA, 30 bp, Artificial Sequence
  Synthetic oligonucleotide
ttatacaatagggaaggtagtaacgaacgt

SEQ ID NO: 194515 - DNA, 30 bp, Artificial Sequence
  Synthetic oligonucleotide
aagcgaacgggtgggcgggtccgcgaacgt

SEQ ID NO: 194516 - DNA, 30 bp, Artificial Sequence
  Synthetic oligonucleotide
aaggtgctcgtttggccgtcgcgtgaacgt

SEQ ID NO: 194517 - DNA, 30 bp, Artificial Sequence
  Synthetic oligonucleotide
ctaatggtatctgtgaaatagtaataacgt

SEQ ID NO: 194518 - DNA, 30 bp, Artificial Sequence
  Synthetic oligonucleotide
aaacggggccccaagcacgggacataacgt

SEQ ID NO: 194519 - DNA, 30 bp, Artificial Sequence
  Synthetic oligonucleotide
gcgacagggggtagcctgtcccgttaacgt

SEQ ID NO: 194520 - DNA, 30 bp, Artificial Sequence
  Synthetic oligonucleotide
cagggccagaaaccatggaccaaaacacgt

SEQ ID NO: 194521 - DNA, 30 bp, Artificial Sequence
  Synthetic oligonucleotide
ggagataggtgggtagctaggctcacacgt

SEQ ID NO: 194522 - DNA, 30 bp, Artificial Sequence
  Synthetic oligonucleotide
gcgtattttatagtccctacggatacacgt

SEQ ID NO: 194523 - DNA, 30 bp, Artificial Sequence
  Synthetic oligonucleotide
gggaagagtccagagtggacgtttacacgt

SEQ ID NO: 194524 - DNA, 30 bp, Artificial Sequence
  Synthetic oligonucleotide
atagtttccgacagaggagtactagcacgt

SEQ ID NO: 194525 - DNA, 30 bp, Artificial Sequence
  Synthetic oligonucleotide
gctcactgcttattgaactcccatgcacgt

SEQ ID NO: 194526 - DNA, 30 bp, Artificial Sequence
  Synthetic oligonucleotide
atacaactgcacctggtgctgggatcacgt

SEQ ID NO: 194527 - DNA, 30 bp, Artificial Sequence
  Synthetic oligonucleotide
ggctgcgtactctcttcaatggactcacgt

SEQ ID NO: 194528 - DNA, 30 bp, Artificial Sequence
  Synthetic oligonucleotide
gaagtccaagtcccctagtgtacgtcacgt

SEQ ID NO: 194529 - DNA, 30 bp, Artificial Sequence
  Synthetic oligonucleotide
cggaatcctcacgcattgctaatttcacgt

SEQ ID NO: 194530 - DNA, 30 bp, Artificial Sequence
  Synthetic oligonucleotide
acgtgaccttacaatcaatcttgcagacgt

SEQ ID NO: 194531 - DNA, 30 bp, Artificial Sequence
  Synthetic oligonucleotide
acacgtcacagtatttgttgcttgagacgt

SEQ ID NO: 194532 - DNA, 30 bp, Artificial Sequence
  Synthetic oligonucleotide
tgatccttagattgggtagaaaaacgacgt

SEQ ID NO: 194533 - DNA, 30 bp, Artificial Sequence
  Synthetic oligonucleotide
ccgcgaacgtatgcatcacagcgacgacgt

SEQ ID NO: 194534 - DNA, 30 bp, Artificial Sequence
  Synthetic oligonucleotide
ttatgtaatgttaggaacagaaaaggacgt

SEQ ID NO: 194535 - DNA, 30 bp, Artificial Sequence
  Synthetic oligonucleotide
cttaaagtgaaaggccgttacaggggacgt

SEQ ID NO: 194536 - DNA, 30 bp, Artificial Sequence
  Synthetic oligonucleotide
tatcaaagcatcaaaggtgagcgatgacgt

SEQ ID NO: 194537 - DNA, 30 bp, Artificial Sequence
  Synthetic oligonucleotide
tcgtcagatgaggctatttcgaagtgacgt

SEQ ID NO: 194538 - DNA, 30 bp, Artificial Sequence
  Synthetic oligonucleotide
gaaggcttcgccagagccagatgcatacgt

SEQ ID NO: 194539 - DNA, 30 bp, Artificial Sequence
  Synthetic oligonucleotide
ctcagaagtgtgcgaggcgttctcatacgt

SEQ ID NO: 194540 - DNA, 30 bp, Artificial Sequence
  Synthetic oligonucleotide
agtgttgctagcaatccgatagtgatacgt

SEQ ID NO: 194541 - DNA, 30 bp, Artificial Sequence
  Synthetic oligonucleotide
acacccaaaaactacagcttccatatacgt

SEQ ID NO: 194542 - DNA, 30 bp, Artificial Sequence
  Synthetic oligonucleotide
aatggatacaggtcaccagacgctatacgt

SEQ ID NO: 194543 - DNA, 30 bp, Artificial Sequence
  Synthetic oligonucleotide
atctggcaaaaggaaactgagtgtatacgt

SEQ ID NO: 194544 - DNA, 30 bp, Artificial Sequence
  Synthetic oligonucleotide
tgatcaagcggtatcgaaccataactacgt

SEQ ID NO: 194545 - DNA, 30 bp, Artificial Sequence
  Synthetic oligonucleotide
cctcgcttgagccgtaggctgggagtacgt

SEQ ID NO: 194546 - DNA, 30 bp, Artificial Sequence
  Synthetic oligonucleotide
agtagggaaagtgaatagaatagcgtacgt

SEQ ID NO: 194547 - DNA, 30 bp, Artificial Sequence
  Synthetic oligonucleotide
caggaatcgcaaacgcagtgactcgtacgt

SEQ ID NO: 194548 - DNA, 30 bp, Artificial Sequence
  Synthetic oligonucleotide
tccatctcaagtaggaaaaatatggtacgt

SEQ ID NO: 194549 - DNA, 30 bp, Artificial Sequence
  Synthetic oligonucleotide
cggatctgacaagggtcctacaatgtacgt

SEQ ID NO: 194550 - DNA, 30 bp, Artificial Sequence
  Synthetic oligonucleotide
accatcatcgttatcgtaatttgtgtacgt

SEQ ID NO: 194551 - DNA, 30 bp, Artificial Sequence
  Synthetic oligonucleotide
cctcgggtcacgcctcagttaagattacgt

SEQ ID NO: 194552 - DNA, 30 bp, Artificial Sequence
  Synthetic oligonucleotide
ggaggtatggaggaaccacttaggttacgt

SEQ ID NO: 194553 - DNA, 30 bp, Artificial Sequence
  Synthetic oligonucleotide
gtcattaagccccagaggtgattgttacgt

SEQ ID NO: 194554 - DNA, 30 bp, Artificial Sequence
  Synthetic oligonucleotide
ccaaggtcatgcctgtatttaagtttacgt

SEQ ID NO: 194555 - DNA, 30 bp, Artificial Sequence
  Synthetic oligonucleotide
acggtaacattcaagtccttcacgaaccgt

SEQ ID NO: 194556 - DNA, 30 bp, Artificial Sequence
  Synthetic oligonucleotide
cgggtaacaaatcgattagtagcgaaccgt

SEQ ID NO: 194557 - DNA, 30 bp, Artificial Sequence
  Synthetic oligonucleotide
cccgacaatacagaaccaatgtttaaccgt

SEQ ID NO: 194558 - DNA, 30 bp, Artificial Sequence
  Synthetic oligonucleotide
cgatttgcgcagtggagggacaaacaccgt

SEQ ID NO: 194559 - DNA, 30 bp, Artificial Sequence
  Synthetic oligonucleotide
tgcgttaattcgacttcgtttacacaccgt

SEQ ID NO: 194560 - DNA, 30 bp, Artificial Sequence
  Synthetic oligonucleotide
gtacaacaaggccgaggggcacaggaccgt

SEQ ID NO: 194561 - DNA, 30 bp, Artificial Sequence
  Synthetic oligonucleotide
agcgattccgccttaattggtgactaccgt

SEQ ID NO: 194562 - DNA, 30 bp, Artificial Sequence
  Synthetic oligonucleotide
accaaataatctatcacgagttaaacccgt

SEQ ID NO: 194563 - DNA, 30 bp, Artificial Sequence
  Synthetic oligonucleotide
cgggagaaaatacgcgggagcgtagcccgt

SEQ ID NO: 194564 - DNA, 30 bp, Artificial Sequence
  Synthetic oligonucleotide
tcgatccgtgtctcacgtttcaaggcccgt

SEQ ID NO: 194565 - DNA, 30 bp, Artificial Sequence
  Synthetic oligonucleotide
tatgtaactgctgagctgtgtattgcccgt

SEQ ID NO: 194566 - DNA, 30 bp, Artificial Sequence
  Synthetic oligonucleotide
ctgagcgtcactagttggagcgttgcccgt

SEQ ID NO: 194567 - DNA, 30 bp, Artificial Sequence
  Synthetic oligonucleotide
tcgtaatgttgatacgcaagtacatcccgt

SEQ ID NO: 194568 - DNA, 30 bp, Artificial Sequence
  Synthetic oligonucleotide
cacaagggggcacgggttggaacttcccgt

SEQ ID NO: 194569 - DNA, 30 bp, Artificial Sequence
  Synthetic oligonucleotide
gttgtgacccgctaagtgcatagcagccgt

SEQ ID NO: 194570 - DNA, 30 bp, Artificial Sequence
  Synthetic oligonucleotide
ccgtgcctttaaaatcatccacagagccgt

SEQ ID NO: 194571 - DNA, 30 bp, Artificial Sequence
  Synthetic oligonucleotide
actaagaggcatttttaaacaacgagccgt

SEQ ID NO: 194572 - DNA, 30 bp, Artificial Sequence
  Synthetic oligonucleotide
gcataacgagtgcatatagcgtcacgccgt

SEQ ID NO: 194573 - DNA, 30 bp, Artificial Sequence
  Synthetic oligonucleotide
acactgccccgagccaatttcaagcgccgt

SEQ ID NO: 194574 - DNA, 30 bp, Artificial Sequence
  Synthetic oligonucleotide
gcgatatatatacgataacttgagcgccgt

SEQ ID NO: 194575 - DNA, 30 bp, Artificial Sequence
  Synthetic oligonucleotide
actggaatggacttgttattcattcgccgt

SEQ ID NO: 194576 - DNA, 31 bp, Artificial Sequence
  Synthetic oligonucleotide
agcggatgtattgggaccagctaccggccgt

SEQ ID NO: 194577 - DNA, 30 bp, Artificial Sequence
  Synthetic oligonucleotide
tcgggggaacgcgtattaaggtaatgccgt

SEQ ID NO: 194578 - DNA, 30 bp, Artificial Sequence
  Synthetic oligonucleotide
cagacgcttaatagagtctgtgggtgccgt

SEQ ID NO: 194579 - DNA, 30 bp, Artificial Sequence
  Synthetic oligonucleotide
gctcacttaggagaaatcggtcattgccgt

SEQ ID NO: 194580 - DNA, 30 bp, Artificial Sequence
  Synthetic oligonucleotide
tgtagtaagaccgacaagcccttaatccgt

SEQ ID NO: 194581 - DNA, 30 bp, Artificial Sequence
  Synthetic oligonucleotide
caatgtcaatgcatgaaaaccatcatccgt

SEQ ID NO: 194582 - DNA, 30 bp, Artificial Sequence
  Synthetic oligonucleotide
aggccttcaaatattgattaccggatccgt

SEQ ID NO: 194583 - DNA, 30 bp, Artificial Sequence
  Synthetic oligonucleotide
tgcgtatggctttatgaccttctgatccgt

SEQ ID NO: 194584 - DNA, 30 bp, Artificial Sequence
  Synthetic oligonucleotide
ggcatgtaccgactcatcttatcactccgt

SEQ ID NO: 194585 - DNA, 30 bp, Artificial Sequence
  Synthetic oligonucleotide
gcggttagaatgatacacgtttgactccgt

SEQ ID NO: 194586 - DNA, 30 bp, Artificial Sequence
  Synthetic oligonucleotide
atgtggggaggacgcatgtgcgagctccgt

SEQ ID NO: 194587 - DNA, 30 bp, Artificial Sequence
  Synthetic oligonucleotide
gattctgggcgccggaagagaatagtccgt

SEQ ID NO: 194588 - DNA, 30 bp, Artificial Sequence
  Synthetic oligonucleotide
ttcgttaaaccgaaaagtgatgtcgtccgt

SEQ ID NO: 194589 - DNA, 30 bp, Artificial Sequence
  Synthetic oligonucleotide
gtctcgtaatgatgacatgcattcgtccgt

SEQ ID NO: 194590 - DNA, 30 bp, Artificial Sequence
  Synthetic oligonucleotide
ggcaatacgctcggacatggtaaggtccgt

SEQ ID NO: 194591 - DNA, 30 bp, Artificial Sequence
  Synthetic oligonucleotide
gaagctggaaggaagcaagttacggtccgt

SEQ ID NO: 194592 - DNA, 30 bp, Artificial Sequence
  Synthetic oligonucleotide
acaacgaataatacatcaagtgtggtccgt

SEQ ID NO: 194593 - DNA, 30 bp, Artificial Sequence
  Synthetic oligonucleotide
cttagatgtaaaatgttcggtcgcttccgt

SEQ ID NO: 194594 - DNA, 30 bp, Artificial Sequence
  Synthetic oligonucleotide
cgggattacggtgtaagcctaatcttccgt

SEQ ID NO: 194595 - DNA, 30 bp, Artificial Sequence
  Synthetic oligonucleotide
acggtgatccttaaacggtttttaaagcgt

SEQ ID NO: 194596 - DNA, 30 bp, Artificial Sequence
  Synthetic oligonucleotide
acggcaaaatggagattctatatgaagcgt

SEQ ID NO: 194597 - DNA, 30 bp, Artificial Sequence
  Synthetic oligonucleotide
tcagcatcctccagggtgtcgtgtaagcgt

SEQ ID NO: 194598 - DNA, 30 bp, Artificial Sequence
  Synthetic oligonucleotide
cactgtgctgtctaccgagatcatcagcgt

SEQ ID NO: 194599 - DNA, 30 bp, Artificial Sequence
  Synthetic oligonucleotide
catatgtcatcctgactacatgatcagcgt

SEQ ID NO: 194600 - DNA, 31 bp, Artificial Sequence
  Synthetic oligonucleotide
cacagagtagactgcaattattaacgagcgt

SEQ ID NO: 194601 - DNA, 30 bp, Artificial Sequence
  Synthetic oligonucleotide
aacgcacagggtacttcactaagcgagcgt

SEQ ID NO: 194602 - DNA, 30 bp, Artificial Sequence
  Synthetic oligonucleotide
tcttggtagggatgccgtcaaaaggagcgt

SEQ ID NO: 194603 - DNA, 30 bp, Artificial Sequence
  Synthetic oligonucleotide
ccctaacaagtatcagatccaaatgagcgt

SEQ ID NO: 194604 - DNA, 30 bp, Artificial Sequence
  Synthetic oligonucleotide
cttaccagcgaaacgatagggaatgagcgt

SEQ ID NO: 194605 - DNA, 30 bp, Artificial Sequence
  Synthetic oligonucleotide
gccaacggggggtaatgatctgaatagcgt

SEQ ID NO: 194606 - DNA, 30 bp, Artificial Sequence
  Synthetic oligonucleotide
gtgagggtaggactgctgccccggtagcgt

SEQ ID NO: 194607 - DNA, 30 bp, Artificial Sequence
  Synthetic oligonucleotide
cgacagacccgtagtgatagtagaacgcgt

SEQ ID NO: 194608 - DNA, 30 bp, Artificial Sequence
  Synthetic oligonucleotide
agtccagaacgggaacgggttctaacgcgt

SEQ ID NO: 194609 - DNA, 30 bp, Artificial Sequence
  Synthetic oligonucleotide
caacctactacggtaaatgcgcatacgcgt

SEQ ID NO: 194610 - DNA, 30 bp, Artificial Sequence
  Synthetic oligonucleotide
ccgcataaagcgggcaccgaatatacgcgt

SEQ ID NO: 194611 - DNA, 30 bp, Artificial Sequence
  Synthetic oligonucleotide
acatggttcgaccgctgaaatgctacgcgt

SEQ ID NO: 194612 - DNA, 30 bp, Artificial Sequence
  Synthetic oligonucleotide
tcataaccgttcccgttcctgggtacgcgt

SEQ ID NO: 194613 - DNA, 30 bp, Artificial Sequence
  Synthetic oligonucleotide
cctaaaacgtttgcataagtataaccgcgt

SEQ ID NO: 194614 - DNA, 30 bp, Artificial Sequence
  Synthetic oligonucleotide
ttagcatgtggatgaacgatcaggccgcgt

SEQ ID NO: 194615 - DNA, 30 bp, Artificial Sequence
  Synthetic oligonucleotide
cttccgtgtaccagatatggcaatgcgcgt

SEQ ID NO: 194616 - DNA, 30 bp, Artificial Sequence
  Synthetic oligonucleotide
ctccatttcagctatacaacgaatgcgcgt

SEQ ID NO: 194617 - DNA, 30 bp, Artificial Sequence
  Synthetic oligonucleotide
tcaagccccttttccctctagtatgcgcgt

SEQ ID NO: 194618 - DNA, 30 bp, Artificial Sequence
  Synthetic oligonucleotide
ggtgcggaaaatacagccattgctgcgcgt

SEQ ID NO: 194619 - DNA, 30 bp, Artificial Sequence
  Synthetic oligonucleotide
ctaaacatctttgaaattgcgcaatcgcgt

SEQ ID NO: 194620 - DNA, 30 bp, Artificial Sequence
  Synthetic oligonucleotide
tacgttttgacgattatatgacagtcgcgt

SEQ ID NO: 194621 - DNA, 30 bp, Artificial Sequence
  Synthetic oligonucleotide
tcacaagtagccctaagcattttaaggcgt

SEQ ID NO: 194622 - DNA, 30 bp, Artificial Sequence
  Synthetic oligonucleotide
ctagcgcgaagcacaaataagttcaggcgt

SEQ ID NO: 194623 - DNA, 30 bp, Artificial Sequence
  Synthetic oligonucleotide
attgtgccagcccgcgcgcttacgaggcgt

SEQ ID NO: 194624 - DNA, 30 bp, Artificial Sequence
  Synthetic oligonucleotide
atcgcggttaaaaatatgtttcataggcgt

SEQ ID NO: 194625 - DNA, 30 bp, Artificial Sequence
  Synthetic oligonucleotide
gcacgaggggaggaggttggctaagggcgt

SEQ ID NO: 194626 - DNA, 30 bp, Artificial Sequence
  Synthetic oligonucleotide
cacaagttaaagctagaaccgggagggcgt

SEQ ID NO: 194627 - DNA, 30 bp, Artificial Sequence
  Synthetic oligonucleotide
cgcgaccagaactcgtcccgtatcgggcgt

SEQ ID NO: 194628 - DNA, 30 bp, Artificial Sequence
  Synthetic oligonucleotide
agagatcattgggcaagaccgggatggcgt

SEQ ID NO: 194629 - DNA, 30 bp, Artificial Sequence
  Synthetic oligonucleotide
gtccactaaaaagcatggaggaggtggcgt

SEQ ID NO: 194630 - DNA, 30 bp, Artificial Sequence
  Synthetic oligonucleotide
ggtgcgtaagttgccagtattatgtggcgt

SEQ ID NO: 194631 - DNA, 30 bp, Artificial Sequence
  Synthetic oligonucleotide
tacggagaagtgtcatttggcgattggcgt

SEQ ID NO: 194632 - DNA, 30 bp, Artificial Sequence
  Synthetic oligonucleotide
ttcccagttagagcacacgtactgctgcgt

SEQ ID NO: 194633 - DNA, 30 bp, Artificial Sequence
  Synthetic oligonucleotide
ccaccgccccctgagtgattgcgcgtgcgt

SEQ ID NO: 194634 - DNA, 30 bp, Artificial Sequence
  Synthetic oligonucleotide
cttaagttttggggctggagaccggtgcgt

SEQ ID NO: 194635 - DNA, 30 bp, Artificial Sequence
  Synthetic oligonucleotide
tgtcgagtgactaaaactttaagggtgcgt

SEQ ID NO: 194636 - DNA, 30 bp, Artificial Sequence
  Synthetic oligonucleotide
taacgaacataggcggctagtgctgtgcgt

SEQ ID NO: 194637 - DNA, 30 bp, Artificial Sequence
  Synthetic oligonucleotide
gaaccaggcggctatagaaatgttgtgcgt

SEQ ID NO: 194638 - DNA, 30 bp, Artificial Sequence
  Synthetic oligonucleotide
agtgaacaacctaacatgtggcggttgcgt

SEQ ID NO: 194639 - DNA, 30 bp, Artificial Sequence
  Synthetic oligonucleotide
tctatacgagagagtgaaggcggtttgcgt

SEQ ID NO: 194640 - DNA, 30 bp, Artificial Sequence
  Synthetic oligonucleotide
gtaaaaggaacccgcttcctgacaaatcgt

SEQ ID NO: 194641 - DNA, 30 bp, Artificial Sequence
  Synthetic oligonucleotide
tcgttgactagggctaaatgtcgaaatcgt

SEQ ID NO: 194642 - DNA, 30 bp, Artificial Sequence
  Synthetic oligonucleotide
ggggtcacagcagacacagtaagcaatcgt

SEQ ID NO: 194643 - DNA, 30 bp, Artificial Sequence
  Synthetic oligonucleotide
ggcaatcaatcatacttgggaactaatcgt

SEQ ID NO: 194644 - DNA, 30 bp, Artificial Sequence
  Synthetic oligonucleotide
accgtagatagcaagttcttcacgcatcgt

SEQ ID NO: 194645 - DNA, 30 bp, Artificial Sequence
  Synthetic oligonucleotide
agaaagaactcacccggagtcaaagatcgt

SEQ ID NO: 194646 - DNA, 30 bp, Artificial Sequence
  Synthetic oligonucleotide
acgcaggtggaggtaatcatataagatcgt

SEQ ID NO: 194647 - DNA, 30 bp, Artificial Sequence
  Synthetic oligonucleotide
gtggcatgagtacaggtacgtaaggatcgt

SEQ ID NO: 194648 - DNA, 30 bp, Artificial Sequence
  Synthetic oligonucleotide
ctcgataagtgatatcatgacggtgatcgt

SEQ ID NO: 194649 - DNA, 30 bp, Artificial Sequence
  Synthetic oligonucleotide
tgaaaggagctactacatcccggatatcgt

SEQ ID NO: 194650 - DNA, 30 bp, Artificial Sequence
  Synthetic oligonucleotide
cctagtctagacaaccaccagtagtatcgt

SEQ ID NO: 194651 - DNA, 30 bp, Artificial Sequence
  Synthetic oligonucleotide
atgctaggagctcactgaaggtgaactcgt

SEQ ID NO: 194652 - DNA, 30 bp, Artificial Sequence
  Synthetic oligonucleotide
ggtacggcattgataatagggtcgactcgt

SEQ ID NO: 194653 - DNA, 30 bp, Artificial Sequence
  Synthetic oligonucleotide
acgactagcctaggaagtcgagggactcgt

SEQ ID NO: 194654 - DNA, 30 bp, Artificial Sequence
  Synthetic oligonucleotide
cacgaagagtcccaagggcagagccctcgt

SEQ ID NO: 194655 - DNA, 30 bp, Artificial Sequence
  Synthetic oligonucleotide
ggggcgaataaacgcgaaggagcgcctcgt

SEQ ID NO: 194656 - DNA, 30 bp, Artificial Sequence
  Synthetic oligonucleotide
cagaaatccagcctcaatgccattcctcgt

SEQ ID NO: 194657 - DNA, 30 bp, Artificial Sequence
  Synthetic oligonucleotide
atgaaatcggaggaacgttcatgagctcgt

SEQ ID NO: 194658 - DNA, 30 bp, Artificial Sequence
  Synthetic oligonucleotide
gatcgtcaaacccatagggggaccgctcgt

SEQ ID NO: 194659 - DNA, 30 bp, Artificial Sequence
  Synthetic oligonucleotide
ggaaggcggagcaggaagtcgctcgctcgt

SEQ ID NO: 194660 - DNA, 30 bp, Artificial Sequence
  Synthetic oligonucleotide
ttattgagaaccgtcgtgtggcatgctcgt

SEQ ID NO: 194661 - DNA, 30 bp, Artificial Sequence
  Synthetic oligonucleotide
cgaggcgagcctttccttccgtatgctcgt

SEQ ID NO: 194662 - DNA, 30 bp, Artificial Sequence
  Synthetic oligonucleotide
gtgtgaccaccgtccttatcagctgctcgt

SEQ ID NO: 194663 - DNA, 30 bp, Artificial Sequence
  Synthetic oligonucleotide
tcgcggtttgacgctttcaatcgatctcgt

SEQ ID NO: 194664 - DNA, 30 bp, Artificial Sequence
  Synthetic oligonucleotide
cacggctgaggctgtataagtagctctcgt

SEQ ID NO: 194665 - DNA, 30 bp, Artificial Sequence
  Synthetic oligonucleotide
cgtccttatctagtagcaaggcagtctcgt

SEQ ID NO: 194666 - DNA, 30 bp, Artificial Sequence
  Synthetic oligonucleotide
tcaaggtgactcaaaccaacaggcagtcgt

SEQ ID NO: 194667 - DNA, 30 bp, Artificial Sequence
  Synthetic oligonucleotide
aagagtcagtcaaggctgtgatcgcgtcgt

SEQ ID NO: 194668 - DNA, 30 bp, Artificial Sequence
  Synthetic oligonucleotide
agcgggaaattatcggccaggtcgcgtcgt

SEQ ID NO: 194669 - DNA, 30 bp, Artificial Sequence
  Synthetic oligonucleotide
gggcacaaggcaaggccgtagcctcgtcgt

SEQ ID NO: 194670 - DNA, 30 bp, Artificial Sequence
  Synthetic oligonucleotide
ttgaacctggtactcgttttagaaggtcgt

SEQ ID NO: 194671 - DNA, 31 bp, Artificial Sequence
  Synthetic oligonucleotide
gagccccaaataagggtcggcggaaggtcgt

SEQ ID NO: 194672 - DNA, 30 bp, Artificial Sequence
  Synthetic oligonucleotide
ccggtcaaggttttttgtaagtaaggtcgt

SEQ ID NO: 194673 - DNA, 30 bp, Artificial Sequence
  Synthetic oligonucleotide
agtctatattgttactccacaggaggtcgt

SEQ ID NO: 194674 - DNA, 30 bp, Artificial Sequence
  Synthetic oligonucleotide
ggcctgcaccccaacgggccaggaggtcgt

SEQ ID NO: 194675 - DNA, 30 bp, Artificial Sequence
  Synthetic oligonucleotide
gggagccgtatgggtggagtgataggtcgt

SEQ ID NO: 194676 - DNA, 30 bp, Artificial Sequence
  Synthetic oligonucleotide
attttatctggggctgggatgaccggtcgt

SEQ ID NO: 194677 - DNA, 30 bp, Artificial Sequence
  Synthetic oligonucleotide
ccagggtatctggcggagtataatggtcgt

SEQ ID NO: 194678 - DNA, 30 bp, Artificial Sequence
  Synthetic oligonucleotide
ttgcgaagtgatcaagtgtatcttggtcgt

SEQ ID NO: 194679 - DNA, 30 bp, Artificial Sequence
  Synthetic oligonucleotide
aaagcgccttgatctctatgcgttggtcgt

SEQ ID NO: 194680 - DNA, 30 bp, Artificial Sequence
  Synthetic oligonucleotide
gacagagacatgacttcgtgtgcatgtcgt

SEQ ID NO: 194681 - DNA, 30 bp, Artificial Sequence
  Synthetic oligonucleotide
actgttaaaccaaaactggattactgtcgt

SEQ ID NO: 194682 - DNA, 30 bp, Artificial Sequence
  Synthetic oligonucleotide
ggtaaagtcgctcgttgattgagttgtcgt

SEQ ID NO: 194683 - DNA, 30 bp, Artificial Sequence
  Synthetic oligonucleotide
cgtccagcacataggacgtgcaacattcgt

SEQ ID NO: 194684 - DNA, 30 bp, Artificial Sequence
  Synthetic oligonucleotide
tccgatcgaccagagaaacttaccattcgt

SEQ ID NO: 194685 - DNA, 30 bp, Artificial Sequence
  Synthetic oligonucleotide
gagcgtcaaacttcgcgatgaccacttcgt

SEQ ID NO: 194686 - DNA, 30 bp, Artificial Sequence
  Synthetic oligonucleotide
agagaccgaccacagtcagtatcacttcgt

SEQ ID NO: 194687 - DNA, 30 bp, Artificial Sequence
  Synthetic oligonucleotide
gtccagcaagagcccaatcagaatcttcgt

SEQ ID NO: 194688 - DNA, 30 bp, Artificial Sequence
  Synthetic oligonucleotide
gtggtcactagctctgagagtcgtcttcgt

SEQ ID NO: 194689 - DNA, 30 bp, Artificial Sequence
  Synthetic oligonucleotide
actggacggtaaggcgacaacggcgttcgt

SEQ ID NO: 194690 - DNA, 30 bp, Artificial Sequence
  Synthetic oligonucleotide
cctgggcgaatgcaagcggaggaggttcgt

SEQ ID NO: 194691 - DNA, 30 bp, Artificial Sequence
  Synthetic oligonucleotide
tcgtacaccgatacgtgggaacctgttcgt

SEQ ID NO: 194692 - DNA, 30 bp, Artificial Sequence
  Synthetic oligonucleotide
tgaccacattattacagatctcctgttcgt

SEQ ID NO: 194693 - DNA, 30 bp, Artificial Sequence
  Synthetic oligonucleotide
cttggactattctcgtatttcagtgttcgt

SEQ ID NO: 194694 - DNA, 30 bp, Artificial Sequence
  Synthetic oligonucleotide
ctgattacttctcctaccccaaaatttcgt

SEQ ID NO: 194695 - DNA, 30 bp, Artificial Sequence
  Synthetic oligonucleotide
atgaacgtaggaattatccttggctttcgt

SEQ ID NO: 194696 - DNA, 30 bp, Artificial Sequence
  Synthetic oligonucleotide
tgcagaataacaatatcggacctctttcgt

SEQ ID NO: 194697 - DNA, 30 bp, Artificial Sequence
  Synthetic oligonucleotide
tcgatattatgttggctgatccagtttcgt

SEQ ID NO: 194698 - DNA, 30 bp, Artificial Sequence
  Synthetic oligonucleotide
ggtaggactaccattaagtcgaattttcgt

SEQ ID NO: 194699 - DNA, 30 bp, Artificial Sequence
  Synthetic oligonucleotide
ggtcgaactgtgcacggacagagttttcgt

SEQ ID NO: 194700 - DNA, 30 bp, Artificial Sequence
  Synthetic oligonucleotide
atgagtactgggagcctagtgaaaaaaggt

SEQ ID NO: 194701 - DNA, 30 bp, Artificial Sequence
  Synthetic oligonucleotide
ttcagtataagttcgatgtcatacaaaggt

SEQ ID NO: 194702 - DNA, 30 bp, Artificial Sequence
  Synthetic oligonucleotide
aatactcgtgaatgcaagccggccaaaggt

SEQ ID NO: 194703 - DNA, 30 bp, Artificial Sequence
  Synthetic oligonucleotide
gttagaaagggatgtagcccaggcaaaggt

SEQ ID NO: 194704 - DNA, 30 bp, Artificial Sequence
  Synthetic oligonucleotide
aacgtacgtgtagctgcgggcacgaaaggt

SEQ ID NO: 194705 - DNA, 30 bp, Artificial Sequence
  Synthetic oligonucleotide
ctatatcaaccgacctgtggaaaacaaggt

SEQ ID NO: 194706 - DNA, 30 bp, Artificial Sequence
  Synthetic oligonucleotide
ttatcgagtggggcccatgaccggcaaggt

SEQ ID NO: 194707 - DNA, 30 bp, Artificial Sequence
  Synthetic oligonucleotide
aggtaatagtacaacagcagtatgcaaggt

SEQ ID NO: 194708 - DNA, 30 bp, Artificial Sequence
  Synthetic oligonucleotide
gccagtggacccaccgaggatctgcaaggt

SEQ ID NO: 194709 - DNA, 30 bp, Artificial Sequence
  Synthetic oligonucleotide
tacatcggtgagccacagaactaagaaggt

SEQ ID NO: 194710 - DNA, 30 bp, Artificial Sequence
  Synthetic oligonucleotide
tcaccagtgacaagttttacaccagaaggt

SEQ ID NO: 194711 - DNA, 30 bp, Artificial Sequence
  Synthetic oligonucleotide
ccgggtcaaaagcgtcctttgcacgaaggt

SEQ ID NO: 194712 - DNA, 30 bp, Artificial Sequence
  Synthetic oligonucleotide
ctggtctaagtttggtgtgctcgcgaaggt

SEQ ID NO: 194713 - DNA, 30 bp, Artificial Sequence
  Synthetic oligonucleotide
ccagcacattaaggctaaccgacggaaggt

SEQ ID NO: 194714 - DNA, 30 bp, Artificial Sequence
  Synthetic oligonucleotide
aagttgtgcatgtgtcttggtggggaaggt

SEQ ID NO: 194715 - DNA, 30 bp, Artificial Sequence
  Synthetic oligonucleotide
ccggggattaggactaatacatgtgaaggt

SEQ ID NO: 194716 - DNA, 30 bp, Artificial Sequence
  Synthetic oligonucleotide
agttgctcgagggtcaacagatttgaaggt

SEQ ID NO: 194717 - DNA, 30 bp, Artificial Sequence
  Synthetic oligonucleotide
gatgatgatggctagagatcgtttgaaggt

SEQ ID NO: 194718 - DNA, 30 bp, Artificial Sequence
  Synthetic oligonucleotide
gttgcgtggatacactccgatgattaaggt

SEQ ID NO: 194719 - DNA, 31 bp, Artificial Sequence
  Synthetic oligonucleotide
atgtagaaaggcgtatatagttgaaacaggt

SEQ ID NO: 194720 - DNA, 30 bp, Artificial Sequence
  Synthetic oligonucleotide
taatgtagtcaaaacgatgacattacaggt

SEQ ID NO: 194721 - DNA, 30 bp, Artificial Sequence
  Synthetic oligonucleotide
cgtctctatgttattgcgcgttatccaggt

SEQ ID NO: 194722 - DNA, 30 bp, Artificial Sequence
  Synthetic oligonucleotide
aagttaacaactaagtacgtacccgcaggt

SEQ ID NO: 194723 - DNA, 30 bp, Artificial Sequence
  Synthetic oligonucleotide
tgaaagacagaatcgtgaaccgtggcaggt

SEQ ID NO: 194724 - DNA, 30 bp, Artificial Sequence
  Synthetic oligonucleotide
cccgagtaactatctcaagaacatgcaggt

SEQ ID NO: 194725 - DNA, 30 bp, Artificial Sequence
  Synthetic oligonucleotide
gctggagaccgtgacctggactaatcaggt

SEQ ID NO: 194726 - DNA, 30 bp, Artificial Sequence
  Synthetic oligonucleotide
catatagagtatataagtacgagaagaggt

SEQ ID NO: 194727 - DNA, 30 bp, Artificial Sequence
  Synthetic oligonucleotide
actcgaacgtccgtctgaaggatgagaggt

SEQ ID NO: 194728 - DNA, 30 bp, Artificial Sequence
  Synthetic oligonucleotide
tcgagggtgtcggtgtccgcagtgagaggt

SEQ ID NO: 194729 - DNA, 30 bp, Artificial Sequence
  Synthetic oligonucleotide
attgtaatactgaagaccgcgcttagaggt

SEQ ID NO: 194730 - DNA, 30 bp, Artificial Sequence
  Synthetic oligonucleotide
gcgagacacagcggcaggaaggaacgaggt

SEQ ID NO: 194731 - DNA, 30 bp, Artificial Sequence
  Synthetic oligonucleotide
catctaaatatctttgcaaggagacgaggt

SEQ ID NO: 194732 - DNA, 30 bp, Artificial Sequence
  Synthetic oligonucleotide
ttggtaaatcactgtcacacaatccgaggt

SEQ ID NO: 194733 - DNA, 30 bp, Artificial Sequence
  Synthetic oligonucleotide
ggcaacgacgcggtacaatcacgtcgaggt

SEQ ID NO: 194734 - DNA, 30 bp, Artificial Sequence
  Synthetic oligonucleotide
ccaacgggttagccactgtatcttcgaggt

SEQ ID NO: 194735 - DNA, 30 bp, Artificial Sequence
  Synthetic oligonucleotide
acctatggatgagggaccttctcaggaggt

SEQ ID NO: 194736 - DNA, 30 bp, Artificial Sequence
  Synthetic oligonucleotide
agcaattataatagtgcacatgagggaggt

SEQ ID NO: 194737 - DNA, 30 bp, Artificial Sequence
  Synthetic oligonucleotide
tcaacgtgtcaatttacaactctgggaggt

SEQ ID NO: 194738 - DNA, 30 bp, Artificial Sequence
  Synthetic oligonucleotide
gtgaggcggaaggcacaataattgggaggt

SEQ ID NO: 194739 - DNA, 30 bp, Artificial Sequence
  Synthetic oligonucleotide
agaactgccgttagtgctcccactggaggt

SEQ ID NO: 194740 - DNA, 30 bp, Artificial Sequence
  Synthetic oligonucleotide
ataagatgacgtagaactatggctggaggt

SEQ ID NO: 194741 - DNA, 30 bp, Artificial Sequence
  Synthetic oligonucleotide
gaactatgctagacgtccgtacgtggaggt

SEQ ID NO: 194742 - DNA, 30 bp, Artificial Sequence
  Synthetic oligonucleotide
gtcggtcgccgtggggagtgcggtggaggt

SEQ ID NO: 194743 - DNA, 30 bp, Artificial Sequence
  Synthetic oligonucleotide
gggagacagtgcaggtgattgttatgaggt

SEQ ID NO: 194744 - DNA, 30 bp, Artificial Sequence
  Synthetic oligonucleotide
aagttagaacattgaatccgtccgtgaggt

SEQ ID NO: 194745 - DNA, 30 bp, Artificial Sequence
  Synthetic oligonucleotide
taaaaagatgtgagctatggccattgaggt

SEQ ID NO: 194746 - DNA, 30 bp, Artificial Sequence
  Synthetic oligonucleotide
aagccaggttcatcgaacccacgttgaggt

SEQ ID NO: 194747 - DNA, 30 bp, Artificial Sequence
  Synthetic oligonucleotide
ccggcagtcatggtactaatcggttgaggt

SEQ ID NO: 194748 - DNA, 30 bp, Artificial Sequence
  Synthetic oligonucleotide
atgtatagcataaggcggatcacaataggt

SEQ ID NO: 194749 - DNA, 30 bp, Artificial Sequence
  Synthetic oligonucleotide
aaggtgctcgattaagttcgagtgataggt

SEQ ID NO: 194750 - DNA, 30 bp, Artificial Sequence
  Synthetic oligonucleotide
aggcagaagatacacggcgaaattataggt

SEQ ID NO: 194751 - DNA, 30 bp, Artificial Sequence
  Synthetic oligonucleotide
ccgtttaactgtttagcagcaattctaggt

SEQ ID NO: 194752 - DNA, 30 bp, Artificial Sequence
  Synthetic oligonucleotide
tccacatgacgaagtagaaagccagtaggt

SEQ ID NO: 194753 - DNA, 30 bp, Artificial Sequence
  Synthetic oligonucleotide
ttgggagctatgcagcctgaaaccgtaggt

SEQ ID NO: 194754 - DNA, 30 bp, Artificial Sequence
  Synthetic oligonucleotide
agtggtgtcccgaggtatgaaccggtaggt

SEQ ID NO: 194755 - DNA, 30 bp, Artificial Sequence
  Synthetic oligonucleotide
caaagtatagtggtagcttaagtggtaggt

SEQ ID NO: 194756 - DNA, 30 bp, Artificial Sequence
  Synthetic oligonucleotide
caccagtcaaacctggagggctatgtaggt

SEQ ID NO: 194757 - DNA, 30 bp, Artificial Sequence
  Synthetic oligonucleotide
ttgataacccaagaaagttctattgtaggt

SEQ ID NO: 194758 - DNA, 30 bp, Artificial Sequence
  Synthetic oligonucleotide
caggctagtgaaaacgatgagtcattaggt

SEQ ID NO: 194759 - DNA, 30 bp, Artificial Sequence
  Synthetic oligonucleotide
cgttaatgaatccagtctacagtcttaggt

SEQ ID NO: 194760 - DNA, 30 bp, Artificial Sequence
  Synthetic oligonucleotide
aggactctggacatagctccagtgttaggt

SEQ ID NO: 194761 - DNA, 30 bp, Artificial Sequence
  Synthetic oligonucleotide
gtggagatagacccgtgttatcttttaggt

SEQ ID NO: 194762 - DNA, 30 bp, Artificial Sequence
  Synthetic oligonucleotide
gagatggacagagtagctggcgccaacggt

SEQ ID NO: 194763 - DNA, 30 bp, Artificial Sequence
  Synthetic oligonucleotide
gtgaccgggtactctttccaaaaacacggt

SEQ ID NO: 194764 - DNA, 30 bp, Artificial Sequence
  Synthetic oligonucleotide
ttgtctcatgaagggaacgtccaacacggt

SEQ ID NO: 194765 - DNA, 30 bp, Artificial Sequence
  Synthetic oligonucleotide
ggagattataaaagcgggaccgaccacggt

SEQ ID NO: 194766 - DNA, 30 bp, Artificial Sequence
  Synthetic oligonucleotide
atagacattggggtatcatggacagacggt

SEQ ID NO: 194767 - DNA, 30 bp, Artificial Sequence
  Synthetic oligonucleotide
cgttataatcgtacgctatcggtatacggt

SEQ ID NO: 194768 - DNA, 30 bp, Artificial Sequence
  Synthetic oligonucleotide
caagtggtaagtactcgccgaaataccggt

SEQ ID NO: 194769 - DNA, 30 bp, Artificial Sequence
  Synthetic oligonucleotide
agcatcattcgatgactgggctttaccggt

SEQ ID NO: 194770 - DNA, 30 bp, Artificial Sequence
  Synthetic oligonucleotide
agttaggggcgtagtgtaagaacagccggt

SEQ ID NO: 194771 - DNA, 30 bp, Artificial Sequence
  Synthetic oligonucleotide
ggttggggggggttacgacatgcctccggt

SEQ ID NO: 194772 - DNA, 30 bp, Artificial Sequence
  Synthetic oligonucleotide
aggtagcagttactggatagtaagtccggt

SEQ ID NO: 194773 - DNA, 30 bp, Artificial Sequence
  Synthetic oligonucleotide
tagctcgtatacattacgtagaccagcggt

SEQ ID NO: 194774 - DNA, 30 bp, Artificial Sequence
  Synthetic oligonucleotide
atggccggttcactagtgtaaatcagcggt

SEQ ID NO: 194775 - DNA, 30 bp, Artificial Sequence
  Synthetic oligonucleotide
ggatttgccgacgaggaggggtaccgcggt

SEQ ID NO: 194776 - DNA, 30 bp, Artificial Sequence
  Synthetic oligonucleotide
tccaacgaatgtattcgtctgttccgcggt

SEQ ID NO: 194777 - DNA, 30 bp, Artificial Sequence
  Synthetic oligonucleotide
ataggctcgcttaagcctggtgctcgcggt

SEQ ID NO: 194778 - DNA, 30 bp, Artificial Sequence
  Synthetic oligonucleotide
cctatggtaaggcaacgataaattcgcggt

SEQ ID NO: 194779 - DNA, 30 bp, Artificial Sequence
  Synthetic oligonucleotide
caacacaaaggggcgggtttgtcaggcggt

SEQ ID NO: 194780 - DNA, 30 bp, Artificial Sequence
  Synthetic oligonucleotide
tcatcagagaaaagcgagaggcacggcggt

SEQ ID NO: 194781 - DNA, 30 bp, Artificial Sequence
  Synthetic oligonucleotide
aaagtaaggagtcaatatgaaacgggcggt

SEQ ID NO: 194782 - DNA, 30 bp, Artificial Sequence
  Synthetic oligonucleotide
gcggaacaccctgctagggcgaatggcggt

SEQ ID NO: 194783 - DNA, 30 bp, Artificial Sequence
  Synthetic oligonucleotide
gggtgaacatgtctgccggtcgactgcggt

SEQ ID NO: 194784 - DNA, 30 bp, Artificial Sequence
  Synthetic oligonucleotide
gttaaggttgatttgccgtcacattgcggt

SEQ ID NO: 194785 - DNA, 30 bp, Artificial Sequence
  Synthetic oligonucleotide
acgtagtgttaatgtacattacattgcggt

SEQ ID NO: 194786 - DNA, 30 bp, Artificial Sequence
  Synthetic oligonucleotide
gtaacattgggttctggcgtggaaatcggt

SEQ ID NO: 194787 - DNA, 30 bp, Artificial Sequence
  Synthetic oligonucleotide
ccggggaaagatataagggttgaaatcggt

SEQ ID NO: 194788 - DNA, 30 bp, Artificial Sequence
  Synthetic oligonucleotide
gttgacagtgcggttaaatagaacatcggt

SEQ ID NO: 194789 - DNA, 30 bp, Artificial Sequence
  Synthetic oligonucleotide
gtcatagagcaggtaagtatcaccatcggt

SEQ ID NO: 194790 - DNA, 30 bp, Artificial Sequence
  Synthetic oligonucleotide
gacagatagcccaactgtcttaagatcggt

SEQ ID NO: 194791 - DNA, 30 bp, Artificial Sequence
  Synthetic oligonucleotide
aacatgtcccacaattaatgttagatcggt

SEQ ID NO: 194792 - DNA, 30 bp, Artificial Sequence
  Synthetic oligonucleotide
ctactaggaacaccctgacacacgatcggt

SEQ ID NO: 194793 - DNA, 30 bp, Artificial Sequence
  Synthetic oligonucleotide
atcgtccttgagacaacgtccactatcggt

SEQ ID NO: 194794 - DNA, 30 bp, Artificial Sequence
  Synthetic oligonucleotide
accggagctagggatgtatactctatcggt

SEQ ID NO: 194795 - DNA, 30 bp, Artificial Sequence
  Synthetic oligonucleotide
gtatcccgtggcgtgctaatgtaactcggt

SEQ ID NO: 194796 - DNA, 30 bp, Artificial Sequence
  Synthetic oligonucleotide
atgggttggtcgtggttagggacactcggt

SEQ ID NO: 194797 - DNA, 30 bp, Artificial Sequence
  Synthetic oligonucleotide
cattggtacaaacaagttatggtactcggt

SEQ ID NO: 194798 - DNA, 30 bp, Artificial Sequence
  Synthetic oligonucleotide
gactgcgcaaacagtctagcggacctcggt

SEQ ID NO: 194799 - DNA, 30 bp, Artificial Sequence
  Synthetic oligonucleotide
cggacctatttcattataccaaatctcggt

SEQ ID NO: 194800 - DNA, 30 bp, Artificial Sequence
  Synthetic oligonucleotide
agactccgaacaaattagtgggatctcggt

SEQ ID NO: 194801 - DNA, 30 bp, Artificial Sequence
  Synthetic oligonucleotide
aatcgcatggcgtttacaagccctctcggt

SEQ ID NO: 194802 - DNA, 30 bp, Artificial Sequence
  Synthetic oligonucleotide
cacggggcgggacgctccgggattctcggt

SEQ ID NO: 194803 - DNA, 30 bp, Artificial Sequence
  Synthetic oligonucleotide
taggcggtccctccgtcgtggagagtcggt

SEQ ID NO: 194804 - DNA, 30 bp, Artificial Sequence
  Synthetic oligonucleotide
cacgaggtctaggcatcccgagaggtcggt

SEQ ID NO: 194805 - DNA, 30 bp, Artificial Sequence
  Synthetic oligonucleotide
cagatctcgctattagccttaagggtcggt

SEQ ID NO: 194806 - DNA, 30 bp, Artificial Sequence
  Synthetic oligonucleotide
ctctgggcctgtacagaatacctggtcggt

SEQ ID NO: 194807 - DNA, 30 bp, Artificial Sequence
  Synthetic oligonucleotide
ctaggaccgggtattagtatgggcttcggt

SEQ ID NO: 194808 - DNA, 30 bp, Artificial Sequence
  Synthetic oligonucleotide
accgacaggagcaggtctattgagttcggt

SEQ ID NO: 194809 - DNA, 30 bp, Artificial Sequence
  Synthetic oligonucleotide
tcaatgcggctaagattaaatgctttcggt

SEQ ID NO: 194810 - DNA, 30 bp, Artificial Sequence
  Synthetic oligonucleotide
tggccattgtttcgaatagtagtaaagggt

SEQ ID NO: 194811 - DNA, 30 bp, Artificial Sequence
  Synthetic oligonucleotide
atagacgggaatcgcaattgatccaagggt

SEQ ID NO: 194812 - DNA, 30 bp, Artificial Sequence
  Synthetic oligonucleotide
gaagtgcattgggatagggatatcaagggt

SEQ ID NO: 194813 - DNA, 30 bp, Artificial Sequence
  Synthetic oligonucleotide
taacccctatcctacgacataaataagggt

SEQ ID NO: 194814 - DNA, 30 bp, Artificial Sequence
  Synthetic oligonucleotide
ccgcgtgagttatcaccggcatataagggt

SEQ ID NO: 194815 - DNA, 30 bp, Artificial Sequence
  Synthetic oligonucleotide
ctaattcgacaccgggatggcaaccagggt

SEQ ID NO: 194816 - DNA, 30 bp, Artificial Sequence
  Synthetic oligonucleotide
tggtagcgtgcttcaacgccaccccagggt

SEQ ID NO: 194817 - DNA, 30 bp, Artificial Sequence
  Synthetic oligonucleotide
cgatatagattttgacgatcgtggcagggt

SEQ ID NO: 194818 - DNA, 30 bp, Artificial Sequence
  Synthetic oligonucleotide
atggtcgcaaaacgtgtcttgtggcagggt

SEQ ID NO: 194819 - DNA, 30 bp, Artificial Sequence
  Synthetic oligonucleotide
taaggtgaaacggtaagctgtggcgagggt

SEQ ID NO: 194820 - DNA, 30 bp, Artificial Sequence
  Synthetic oligonucleotide
caagactcaggaccggacggtactgagggt

SEQ ID NO: 194821 - DNA, 30 bp, Artificial Sequence
  Synthetic oligonucleotide
ttgggagtaaccgcctctgatagatagggt

SEQ ID NO: 194822 - DNA, 30 bp, Artificial Sequence
  Synthetic oligonucleotide
atgtgtcggtttaggtgtttgagctagggt

SEQ ID NO: 194823 - DNA, 38 bp, Artificial Sequence
  Synthetic oligonucleotide
tcccatccattaattaattggaggacttatgctagggt

SEQ ID NO: 194824 - DNA, 30 bp, Artificial Sequence
  Synthetic oligonucleotide
taaatgcaagtaacgagtcggagttagggt

SEQ ID NO: 194825 - DNA, 30 bp, Artificial Sequence
  Synthetic oligonucleotide
gttaaattctaatgatataaatgttagggt

SEQ ID NO: 194826 - DNA, 30 bp, Artificial Sequence
  Synthetic oligonucleotide
gccgaaaaacgcatgcgcataatttagggt

SEQ ID NO: 194827 - DNA, 30 bp, Artificial Sequence
  Synthetic oligonucleotide
ctggggaaagaatggggtactatttagggt

SEQ ID NO: 194828 - DNA, 30 bp, Artificial Sequence
  Synthetic oligonucleotide
gtgcaacgaagacacatatgattaacgggt

SEQ ID NO: 194829 - DNA, 30 bp, Artificial Sequence
  Synthetic oligonucleotide
ttagatgatgatgatgtgtgattcacgggt

SEQ ID NO: 194830 - DNA, 30 bp, Artificial Sequence
  Synthetic oligonucleotide
gtgctgagcctgtgatgggacacaccgggt

SEQ ID NO: 194831 - DNA, 30 bp, Artificial Sequence
  Synthetic oligonucleotide
aagtctatggtaccatacgttaccccgggt

SEQ ID NO: 194832 - DNA, 30 bp, Artificial Sequence
  Synthetic oligonucleotide
caactgctaagaaaaccttgatggccgggt

SEQ ID NO: 194833 - DNA, 30 bp, Artificial Sequence
  Synthetic oligonucleotide
ctgtggacattcgtgtgtgattttccgggt

SEQ ID NO: 194834 - DNA, 30 bp, Artificial Sequence
  Synthetic oligonucleotide
gcaagaccgatacgtatttaggaagcgggt

SEQ ID NO: 194835 - DNA, 30 bp, Artificial Sequence
  Synthetic oligonucleotide
tacaaagaatgggtttaccccgtagcgggt

SEQ ID NO: 194836 - DNA, 30 bp, Artificial Sequence
  Synthetic oligonucleotide
cacattatcatagaatataaaagcgcgggt

SEQ ID NO: 194837 - DNA, 30 bp, Artificial Sequence
  Synthetic oligonucleotide
ccagtattatatgtccgcaatagggcgggt

SEQ ID NO: 194838 - DNA, 30 bp, Artificial Sequence
  Synthetic oligonucleotide
catgagcgctggcagacctttgtggcgggt

SEQ ID NO: 194839 - DNA, 30 bp, Artificial Sequence
  Synthetic oligonucleotide
gagcgggtaactaggtgctaatatgcgggt

SEQ ID NO: 194840 - DNA, 30 bp, Artificial Sequence
  Synthetic oligonucleotide
gcgataaattaatttcgcctgtcatcgggt

SEQ ID NO: 194841 - DNA, 30 bp, Artificial Sequence
  Synthetic oligonucleotide
gatacggcacagcctctaaggaattcgggt

SEQ ID NO: 194842 - DNA, 30 bp, Artificial Sequence
  Synthetic oligonucleotide
gcacgacattaggcttctccagaaaggggt

SEQ ID NO: 194843 - DNA, 30 bp, Artificial Sequence
  Synthetic oligonucleotide
cagattgagctaattatgcggtaaaggggt

SEQ ID NO: 194844 - DNA, 30 bp, Artificial Sequence
  Synthetic oligonucleotide
aacgcgtataacagcgcaataccgaggggt

SEQ ID NO: 194845 - DNA, 30 bp, Artificial Sequence
  Synthetic oligonucleotide
aggaatacaataagactttagggtaggggt

SEQ ID NO: 194846 - DNA, 30 bp, Artificial Sequence
  Synthetic oligonucleotide
gctgtcgtaaaataattaaactaccggggt

SEQ ID NO: 194847 - DNA, 30 bp, Artificial Sequence
  Synthetic oligonucleotide
cgtccctgcactgctggttattggcggggt

SEQ ID NO: 194848 - DNA, 30 bp, Artificial Sequence
  Synthetic oligonucleotide
gagccgaataacccagagagccgtcggggt

SEQ ID NO: 194849 - DNA, 30 bp, Artificial Sequence
  Synthetic oligonucleotide
acaacaattaatatattgtcaaacgggggt

SEQ ID NO: 194850 - DNA, 30 bp, Artificial Sequence
  Synthetic oligonucleotide
tataagaacctgggaggcgtcgatgggggt

SEQ ID NO: 194851 - DNA, 30 bp, Artificial Sequence
  Synthetic oligonucleotide
ttatcacgaggcaataggactgctgggggt

SEQ ID NO: 194852 - DNA, 30 bp, Artificial Sequence
  Synthetic oligonucleotide
tcacgaaaaggtagtaatgaacttgggggt

SEQ ID NO: 194853 - DNA, 30 bp, Artificial Sequence
  Synthetic oligonucleotide
cattccttagcttgtggagtaacatggggt

SEQ ID NO: 194854 - DNA, 29 bp, Artificial Sequence
  Synthetic oligonucleotide
catctattagtcatgtcttgagatggggt

SEQ ID NO: 194855 - DNA, 30 bp, Artificial Sequence
  Synthetic oligonucleotide
tgtcctctggatagaaaattccgctggggt

SEQ ID NO: 194856 - DNA, 30 bp, Artificial Sequence
  Synthetic oligonucleotide
gtaccgaagcagatttttagtatctggggt

SEQ ID NO: 194857 - DNA, 30 bp, Artificial Sequence
  Synthetic oligonucleotide
gttccgaataagcaagtaaacttctggggt

SEQ ID NO: 194858 - DNA, 30 bp, Artificial Sequence
  Synthetic oligonucleotide
tagagatcgcgcatggagttgtgttggggt

SEQ ID NO: 194859 - DNA, 30 bp, Artificial Sequence
  Synthetic oligonucleotide
caccgtgctgaggtattctaacaaatgggt

SEQ ID NO: 194860 - DNA, 30 bp, Artificial Sequence
  Synthetic oligonucleotide
agacttggaggcaaatttgaaaccatgggt

SEQ ID NO: 194861 - DNA, 31 bp, Artificial Sequence
  Synthetic oligonucleotide
agcaatacgaggtctacatataatgatgggt

SEQ ID NO: 194862 - DNA, 30 bp, Artificial Sequence
  Synthetic oligonucleotide
ttgtatacgtatatggcaccactgatgggt

SEQ ID NO: 194863 - DNA, 30 bp, Artificial Sequence
  Synthetic oligonucleotide
cgccacgttaacgtctctgcggatatgggt

SEQ ID NO: 194864 - DNA, 30 bp, Artificial Sequence
  Synthetic oligonucleotide
tcgagggtgatgaagcctttaagtatgggt

SEQ ID NO: 194865 - DNA, 30 bp, Artificial Sequence
  Synthetic oligonucleotide
agttccgatgtaaaggcgctgtccctgggt

SEQ ID NO: 194866 - DNA, 30 bp, Artificial Sequence
  Synthetic oligonucleotide
ggtgggattaggtaagactcgatcctgggt

SEQ ID NO: 194867 - DNA, 30 bp, Artificial Sequence
  Synthetic oligonucleotide
ggatcgtaagtttgagtcgttaggctgggt

SEQ ID NO: 194868 - DNA, 30 bp, Artificial Sequence
  Synthetic oligonucleotide
ccgatgtaggattaactgcacgggctgggt

SEQ ID NO: 194869 - DNA, 30 bp, Artificial Sequence
  Synthetic oligonucleotide
tggttcatcgcatctcaagacatgctgggt

SEQ ID NO: 194870 - DNA, 30 bp, Artificial Sequence
  Synthetic oligonucleotide
agagttcggtaagtaccggtcagagtgggt

SEQ ID NO: 194871 - DNA, 30 bp, Artificial Sequence
  Synthetic oligonucleotide
gtcaagcacatataaaatgagaccgtgggt

SEQ ID NO: 194872 - DNA, 29 bp, Artificial Sequence
  Synthetic oligonucleotide
cagcgggtacgttctaaattagcgtgggt

SEQ ID NO: 194873 - DNA, 30 bp, Artificial Sequence
  Synthetic oligonucleotide
aggggaccaccatagaccctccatgtgggt

SEQ ID NO: 194874 - DNA, 30 bp, Artificial Sequence
  Synthetic oligonucleotide
actagccagaggtacgttatctcattgggt

SEQ ID NO: 194875 - DNA, 30 bp, Artificial Sequence
  Synthetic oligonucleotide
aggccatgatgaattaaattcaaaaatggt

SEQ ID NO: 194876 - DNA, 30 bp, Artificial Sequence
  Synthetic oligonucleotide
tgtgcgctcacggtcaaacatctaaatggt

SEQ ID NO: 194877 - DNA, 30 bp, Artificial Sequence
  Synthetic oligonucleotide
tcgggcgtcagatgtattgatgccaatggt

SEQ ID NO: 194878 - DNA, 30 bp, Artificial Sequence
  Synthetic oligonucleotide
gaagtcggactaagcatcacaactaatggt

SEQ ID NO: 194879 - DNA, 30 bp, Artificial Sequence
  Synthetic oligonucleotide
atgcgacttgtcgccacgacaatgcatggt

SEQ ID NO: 194880 - DNA, 30 bp, Artificial Sequence
  Synthetic oligonucleotide
acgttttgaggctcgggatatgacgatggt

SEQ ID NO: 194881 - DNA, 30 bp, Artificial Sequence
  Synthetic oligonucleotide
atgagaagaacgtggatatctctggatggt

SEQ ID NO: 194882 - DNA, 30 bp, Artificial Sequence
  Synthetic oligonucleotide
gaggaagcatgaacgcgtcctttggatggt

SEQ ID NO: 194883 - DNA, 30 bp, Artificial Sequence
  Synthetic oligonucleotide
cttggtatgatcagttccgcccctgatggt

SEQ ID NO: 194884 - DNA, 30 bp, Artificial Sequence
  Synthetic oligonucleotide
caggatagatgcatgcgcagggaatatggt

SEQ ID NO: 194885 - DNA, 30 bp, Artificial Sequence
  Synthetic oligonucleotide
aaaacagtgtaacaagtgggcatatatggt

SEQ ID NO: 194886 - DNA, 30 bp, Artificial Sequence
  Synthetic oligonucleotide
ttgctggacaaagcaggcgttgtatatggt

SEQ ID NO: 194887 - DNA, 30 bp, Artificial Sequence
  Synthetic oligonucleotide
ggggacactgaaaactggtgaagctatggt

SEQ ID NO: 194888 - DNA, 30 bp, Artificial Sequence
  Synthetic oligonucleotide
accggagtcatcaaagtaagtatctatggt

SEQ ID NO: 194889 - DNA, 30 bp, Artificial Sequence
  Synthetic oligonucleotide
gcgcgtggtgacaaaaggggaatgtatggt

SEQ ID NO: 194890 - DNA, 30 bp, Artificial Sequence
  Synthetic oligonucleotide
atatgaccgggtacatttgaacgaactggt

SEQ ID NO: 194891 - DNA, 30 bp, Artificial Sequence
  Synthetic oligonucleotide
agaacttccgttccgtgggggcctactggt

SEQ ID NO: 194892 - DNA, 30 bp, Artificial Sequence
  Synthetic oligonucleotide
ttcaaatttggcgtgagcacctaggctggt

SEQ ID NO: 194893 - DNA, 30 bp, Artificial Sequence
  Synthetic oligonucleotide
agcatgtcgcgtaagagaaagctggctggt

SEQ ID NO: 194894 - DNA, 30 bp, Artificial Sequence
  Synthetic oligonucleotide
cggtatcgagcgaacgattatccgtctggt

SEQ ID NO: 194895 - DNA, 30 bp, Artificial Sequence
  Synthetic oligonucleotide
gaacacgcatcgaaagagtcaaattctggt

SEQ ID NO: 194896 - DNA, 30 bp, Artificial Sequence
  Synthetic oligonucleotide
tgtgactaagcaagccattgggcaagtggt

SEQ ID NO: 194897 - DNA, 30 bp, Artificial Sequence
  Synthetic oligonucleotide
tcgcaatttgattatttagcaaagagtggt

SEQ ID NO: 194898 - DNA, 30 bp, Artificial Sequence
  Synthetic oligonucleotide
cgtactgggcgctattattaatggagtggt

SEQ ID NO: 194899 - DNA, 30 bp, Artificial Sequence
  Synthetic oligonucleotide
gcaagtcgaactcgccattatcctagtggt

SEQ ID NO: 194900 - DNA, 30 bp, Artificial Sequence
  Synthetic oligonucleotide
cgtcctccatatgcaaatattgcacgtggt

SEQ ID NO: 194901 - DNA, 30 bp, Artificial Sequence
  Synthetic oligonucleotide
ctcaggctcttgcctattaacagccgtggt

SEQ ID NO: 194902 - DNA, 30 bp, Artificial Sequence
  Synthetic oligonucleotide
tcatggggggcctggttctcgtgccgtggt

SEQ ID NO: 194903 - DNA, 30 bp, Artificial Sequence
  Synthetic oligonucleotide
acagccggatgaggtggcaatcggcgtggt

SEQ ID NO: 194904 - DNA, 30 bp, Artificial Sequence
  Synthetic oligonucleotide
tctatttcaggactagtctgaggcggtggt

SEQ ID NO: 194905 - DNA, 30 bp, Artificial Sequence
  Synthetic oligonucleotide
tattctgtatcttttggagggtcgggtggt

SEQ ID NO: 194906 - DNA, 30 bp, Artificial Sequence
  Synthetic oligonucleotide
atataatgtactccaacggacttgggtggt

SEQ ID NO: 194907 - DNA, 30 bp, Artificial Sequence
  Synthetic oligonucleotide
cgctgccatgagttttccgatattggtggt

SEQ ID NO: 194908 - DNA, 30 bp, Artificial Sequence
  Synthetic oligonucleotide
tcactctcctgaccttaagccaagtgtggt

SEQ ID NO: 194909 - DNA, 30 bp, Artificial Sequence
  Synthetic oligonucleotide
aggttctcgtgaaccatctatgagtgtggt

SEQ ID NO: 194910 - DNA, 30 bp, Artificial Sequence
  Synthetic oligonucleotide
cccgtcagcatagtgactccatagtgtggt

SEQ ID NO: 194911 - DNA, 30 bp, Artificial Sequence
  Synthetic oligonucleotide
atgtggattaggatatttggaatttgtggt

SEQ ID NO: 194912 - DNA, 30 bp, Artificial Sequence
  Synthetic oligonucleotide
aggctaggacgtagatggaagaacattggt

SEQ ID NO: 194913 - DNA, 30 bp, Artificial Sequence
  Synthetic oligonucleotide
gatcgtcggtttccctgcgaagcgattggt

SEQ ID NO: 194914 - DNA, 30 bp, Artificial Sequence
  Synthetic oligonucleotide
gcaataccagtttaacggtctgaacttggt

SEQ ID NO: 194915 - DNA, 30 bp, Artificial Sequence
  Synthetic oligonucleotide
atttggaaatgtgtcgctacgggacttggt

SEQ ID NO: 194916 - DNA, 30 bp, Artificial Sequence
  Synthetic oligonucleotide
agtgggcttaggttttattgtaatcttggt

SEQ ID NO: 194917 - DNA, 30 bp, Artificial Sequence
  Synthetic oligonucleotide
tcttacggtgtatatagggatcatcttggt

SEQ ID NO: 194918 - DNA, 30 bp, Artificial Sequence
  Synthetic oligonucleotide
gataagtcgagtctcgttcagtctcttggt

SEQ ID NO: 194919 - DNA, 30 bp, Artificial Sequence
  Synthetic oligonucleotide
acagggctagacgctaaatcacaggttggt

SEQ ID NO: 194920 - DNA, 30 bp, Artificial Sequence
  Synthetic oligonucleotide
cgccggccatcggattaaaacacatttggt

SEQ ID NO: 194921 - DNA, 30 bp, Artificial Sequence
  Synthetic oligonucleotide
cctacatatcggggacgttgttacaaatgt

SEQ ID NO: 194922 - DNA, 30 bp, Artificial Sequence
  Synthetic oligonucleotide
gccgtcacgacagggaataaaccgcaatgt

SEQ ID NO: 194923 - DNA, 30 bp, Artificial Sequence
  Synthetic oligonucleotide
ggttgaaaatcttactcgtactgtcaatgt

SEQ ID NO: 194924 - DNA, 30 bp, Artificial Sequence
  Synthetic oligonucleotide
tgtcgcccagacagggatgattcagaatgt

SEQ ID NO: 194925 - DNA, 30 bp, Artificial Sequence
  Synthetic oligonucleotide
cgcgagtaacatttgtaaaagagagaatgt

SEQ ID NO: 194926 - DNA, 30 bp, Artificial Sequence
  Synthetic oligonucleotide
cggatgaagcagtattgtaacgccgaatgt

SEQ ID NO: 194927 - DNA, 30 bp, Artificial Sequence
  Synthetic oligonucleotide
aggtcagcgtacttcggagagctcgaatgt

SEQ ID NO: 194928 - DNA, 30 bp, Artificial Sequence
  Synthetic oligonucleotide
acctacatcccgcaagatatagaggaatgt

SEQ ID NO: 194929 - DNA, 30 bp, Artificial Sequence
  Synthetic oligonucleotide
tgcatcgcattataaattgacccggaatgt

SEQ ID NO: 194930 - DNA, 31 bp, Artificial Sequence
  Synthetic oligonucleotide
acaagtagatttgcgaccagtccgggaatgt

SEQ ID NO: 194931 - DNA, 30 bp, Artificial Sequence
  Synthetic oligonucleotide
gcatcactcagcatatttgtgcatgaatgt

SEQ ID NO: 194932 - DNA, 30 bp, Artificial Sequence
  Synthetic oligonucleotide
tcccatggaggaagaaccggatctgaatgt

SEQ ID NO: 194933 - DNA, 30 bp, Artificial Sequence
  Synthetic oligonucleotide
gtaactggtaaaaacacactgtttgaatgt

SEQ ID NO: 194934 - DNA, 30 bp, Artificial Sequence
  Synthetic oligonucleotide
gttgcgaactggctcccgacggggtaatgt

SEQ ID NO: 194935 - DNA, 30 bp, Artificial Sequence
  Synthetic oligonucleotide
acaaatcggatgaaccgaaaggcttaatgt

SEQ ID NO: 194936 - DNA, 30 bp, Artificial Sequence
  Synthetic oligonucleotide
cacgagattgaaaggttcatacctacatgt

SEQ ID NO: 194937 - DNA, 30 bp, Artificial Sequence
  Synthetic oligonucleotide
tgcttaccgggctcacctgatcaaccatgt

SEQ ID NO: 194938 - DNA, 30 bp, Artificial Sequence
  Synthetic oligonucleotide
gccagaatatcgcgctatatgagaccatgt

SEQ ID NO: 194939 - DNA, 30 bp, Artificial Sequence
  Synthetic oligonucleotide
tctaattgtgcactagggaacacgccatgt

SEQ ID NO: 194940 - DNA, 30 bp, Artificial Sequence
  Synthetic oligonucleotide
tcattacggcgaaggcaataatgcgcatgt

SEQ ID NO: 194941 - DNA, 30 bp, Artificial Sequence
  Synthetic oligonucleotide
tccccgggggcccttggtgatcaggcatgt

SEQ ID NO: 194942 - DNA, 30 bp, Artificial Sequence
  Synthetic oligonucleotide
aaggaaggtatcaagggagacacggcatgt

SEQ ID NO: 194943 - DNA, 30 bp, Artificial Sequence
  Synthetic oligonucleotide
cgaaattctaatatctacccgtcggcatgt

SEQ ID NO: 194944 - DNA, 30 bp, Artificial Sequence
  Synthetic oligonucleotide
atatcagcctaatacttttaacaatcatgt

SEQ ID NO: 194945 - DNA, 30 bp, Artificial Sequence
  Synthetic oligonucleotide
ctgaaatagcggtgaggatagagatcatgt

SEQ ID NO: 194946 - DNA, 30 bp, Artificial Sequence
  Synthetic oligonucleotide
cgacattgaagtttgtggcagggctcatgt

SEQ ID NO: 194947 - DNA, 30 bp, Artificial Sequence
  Synthetic oligonucleotide
atagcgaacaaagcccgaaagtcgtcatgt

SEQ ID NO: 194948 - DNA, 30 bp, Artificial Sequence
  Synthetic oligonucleotide
cgtctggtgtggatctttatagtaagatgt

SEQ ID NO: 194949 - DNA, 30 bp, Artificial Sequence
  Synthetic oligonucleotide
tgtaaagcttattgatcgtaacgacgatgt

SEQ ID NO: 194950 - DNA, 30 bp, Artificial Sequence
  Synthetic oligonucleotide
aaggccataacaggaggcctataccgatgt

SEQ ID NO: 194951 - DNA, 30 bp, Artificial Sequence
  Synthetic oligonucleotide
gaagcgacggctaagctgtgagtgcgatgt

SEQ ID NO: 194952 - DNA, 30 bp, Artificial Sequence
  Synthetic oligonucleotide
ttacgtatagttcgggcagagcgtcgatgt

SEQ ID NO: 194953 - DNA, 30 bp, Artificial Sequence
  Synthetic oligonucleotide
ccacatggcgagttagaatatggtcgatgt

SEQ ID NO: 194954 - DNA, 30 bp, Artificial Sequence
  Synthetic oligonucleotide
acggtgtagacttgattattgtttcgatgt

SEQ ID NO: 194955 - DNA, 30 bp, Artificial Sequence
  Synthetic oligonucleotide
acaatgatataccaggctgtagcaggatgt

SEQ ID NO: 194956 - DNA, 30 bp, Artificial Sequence
  Synthetic oligonucleotide
ccccccagttcgctagagcgagagggatgt

SEQ ID NO: 194957 - DNA, 30 bp, Artificial Sequence
  Synthetic oligonucleotide
gaatgggttacgagggaggctctgggatgt

SEQ ID NO: 194958 - DNA, 30 bp, Artificial Sequence
  Synthetic oligonucleotide
ttattaagcatacagatttgtgatggatgt

SEQ ID NO: 194959 - DNA, 30 bp, Artificial Sequence
  Synthetic oligonucleotide
tgttgctgtcgcgttattaagggctgatgt

SEQ ID NO: 194960 - DNA, 30 bp, Artificial Sequence
  Synthetic oligonucleotide
cgtaacagagactgtatcatctggtgatgt

SEQ ID NO: 194961 - DNA, 30 bp, Artificial Sequence
  Synthetic oligonucleotide
caaaatgctaagcggtggaatacttgatgt

SEQ ID NO: 194962 - DNA, 30 bp, Artificial Sequence
  Synthetic oligonucleotide
ccgtatcgagtccagtcctatccttgatgt

SEQ ID NO: 194963 - DNA, 30 bp, Artificial Sequence
  Synthetic oligonucleotide
ataacattaacgctgctgggaagaatatgt

SEQ ID NO: 194964 - DNA, 30 bp, Artificial Sequence
  Synthetic oligonucleotide
agccaatgaagaaggtaaaaggtcatatgt

SEQ ID NO: 194965 - DNA, 30 bp, Artificial Sequence
  Synthetic oligonucleotide
aagcgatagtcggctggtgatggtatatgt

SEQ ID NO: 194966 - DNA, 30 bp, Artificial Sequence
  Synthetic oligonucleotide
aagagatagctgacccactgcctactatgt

SEQ ID NO: 194967 - DNA, 30 bp, Artificial Sequence
  Synthetic oligonucleotide
gaagtccacgtttcgaatcgaattctatgt

SEQ ID NO: 194968 - DNA, 30 bp, Artificial Sequence
  Synthetic oligonucleotide
gcacttctgagttacgtacagagagtatgt

SEQ ID NO: 194969 - DNA, 30 bp, Artificial Sequence
  Synthetic oligonucleotide
ctaagactgaccttgcgcccgaacgtatgt

SEQ ID NO: 194970 - DNA, 30 bp, Artificial Sequence
  Synthetic oligonucleotide
ggcgggtgggaaaacggagcggccgtatgt

SEQ ID NO: 194971 - DNA, 30 bp, Artificial Sequence
  Synthetic oligonucleotide
gtacgttgtactctgtaatatggggtatgt

SEQ ID NO: 194972 - DNA, 30 bp, Artificial Sequence
  Synthetic oligonucleotide
tgactgaccaactccttaagttcgttatgt

SEQ ID NO: 194973 - DNA, 30 bp, Artificial Sequence
  Synthetic oligonucleotide
gatgcgggggtaaggttcataatgttatgt

SEQ ID NO: 194974 - DNA, 30 bp, Artificial Sequence
  Synthetic oligonucleotide
ctatgggatattgttcttcatcttttatgt

SEQ ID NO: 194975 - DNA, 30 bp, Artificial Sequence
  Synthetic oligonucleotide
gcaataccatcttggtatgtgatcaactgt

SEQ ID NO: 194976 - DNA, 29 bp, Artificial Sequence
  Synthetic oligonucleotide
cagggaagcgtactatcgcaatgaactgt

SEQ ID NO: 194977 - DNA, 30 bp, Artificial Sequence
  Synthetic oligonucleotide
tcccttggttcggctctttccaaacactgt

SEQ ID NO: 194978 - DNA, 30 bp, Artificial Sequence
  Synthetic oligonucleotide
aggtgcagcctcgtatagtagtcccactgt

SEQ ID NO: 194979 - DNA, 30 bp, Artificial Sequence
  Synthetic oligonucleotide
ctggttggatggagatgccaatgccactgt

SEQ ID NO: 194980 - DNA, 30 bp, Artificial Sequence
  Synthetic oligonucleotide
aagaacacgtgagccatcccttatcactgt

SEQ ID NO: 194981 - DNA, 30 bp, Artificial Sequence
  Synthetic oligonucleotide
cactctggtgaagaaatcacggcggactgt

SEQ ID NO: 194982 - DNA, 30 bp, Artificial Sequence
  Synthetic oligonucleotide
tgcggattaggtggttattattcggactgt

SEQ ID NO: 194983 - DNA, 30 bp, Artificial Sequence
  Synthetic oligonucleotide
acgccacgcgtcgggtagcctaatgactgt

SEQ ID NO: 194984 - DNA, 30 bp, Artificial Sequence
  Synthetic oligonucleotide
tagtagcatgccggtgagacttttgactgt

SEQ ID NO: 194985 - DNA, 30 bp, Artificial Sequence
  Synthetic oligonucleotide
gttgtgacgtatcaattcgggccatactgt

SEQ ID NO: 194986 - DNA, 30 bp, Artificial Sequence
  Synthetic oligonucleotide
cagggaagggtgcattatagccactactgt

SEQ ID NO: 194987 - DNA, 30 bp, Artificial Sequence
  Synthetic oligonucleotide
agtaccttatcaaggggaaacccggcctgt

SEQ ID NO: 194988 - DNA, 30 bp, Artificial Sequence
  Synthetic oligonucleotide
gaggagattatacccccagtatcggcctgt

SEQ ID NO: 194989 - DNA, 30 bp, Artificial Sequence
  Synthetic oligonucleotide
actgccccgagtccttgtcctatatcctgt

SEQ ID NO: 194990 - DNA, 30 bp, Artificial Sequence
  Synthetic oligonucleotide
ctccgggccaggaggtgtaataagtcctgt

SEQ ID NO: 194991 - DNA, 30 bp, Artificial Sequence
  Synthetic oligonucleotide
acgactaagctaacaacggtttcaagctgt

SEQ ID NO: 194992 - DNA, 30 bp, Artificial Sequence
  Synthetic oligonucleotide
ggtactaacaccccagcagttagaagctgt

SEQ ID NO: 194993 - DNA, 30 bp, Artificial Sequence
  Synthetic oligonucleotide
tggatgcgcagagcgtcgcaaatcagctgt

SEQ ID NO: 194994 - DNA, 30 bp, Artificial Sequence
  Synthetic oligonucleotide
gagggtggtatggtcggaacacagagctgt

SEQ ID NO: 194995 - DNA, 30 bp, Artificial Sequence
  Synthetic oligonucleotide
gattgctcgtaactttaggcccagagctgt

SEQ ID NO: 194996 - DNA, 30 bp, Artificial Sequence
  Synthetic oligonucleotide
acgaattggcctatgccttcatggagctgt

SEQ ID NO: 194997 - DNA, 30 bp, Artificial Sequence
  Synthetic oligonucleotide
gatgggtcgtcacgtgtccacagacgctgt

SEQ ID NO: 194998 - DNA, 30 bp, Artificial Sequence
  Synthetic oligonucleotide
ggcgatgtggggctagatatcaatcgctgt

SEQ ID NO: 194999 - DNA, 30 bp, Artificial Sequence
  Synthetic oligonucleotide
atggcagctttgatgaatctacagggctgt

SEQ ID NO: 195000 - DNA, 30 bp, Artificial Sequence
  Synthetic oligonucleotide
ttgttgggcgtgcctgtatctgtgggctgt

SEQ ID NO: 195001 - DNA, 30 bp, Artificial Sequence
  Synthetic oligonucleotide
cggaggacttgtatatgatatgatggctgt

SEQ ID NO: 195002 - DNA, 30 bp, Artificial Sequence
  Synthetic oligonucleotide
agggcagagatattttagatcattggctgt

SEQ ID NO: 195003 - DNA, 30 bp, Artificial Sequence
  Synthetic oligonucleotide
ggatctctgggagcaatggtccattgctgt

SEQ ID NO: 195004 - DNA, 30 bp, Artificial Sequence
  Synthetic oligonucleotide
tcaagccaccagtatcaactcacaatctgt

SEQ ID NO: 195005 - DNA, 30 bp, Artificial Sequence
  Synthetic oligonucleotide
aaaatgggcagggcggtataccgaatctgt

SEQ ID NO: 195006 - DNA, 30 bp, Artificial Sequence
  Synthetic oligonucleotide
cgataaaatcggcgcatttagtttatctgt

SEQ ID NO: 195007 - DNA, 30 bp, Artificial Sequence
  Synthetic oligonucleotide
ttctaaccaaggcgaggcactaagctctgt

SEQ ID NO: 195008 - DNA, 30 bp, Artificial Sequence
  Synthetic oligonucleotide
gtatcggggaagcaggcaaaaactctctgt

SEQ ID NO: 195009 - DNA, 30 bp, Artificial Sequence
  Synthetic oligonucleotide
cagcccgggtaatttagaagcttagtctgt

SEQ ID NO: 195010 - DNA, 30 bp, Artificial Sequence
  Synthetic oligonucleotide
ggatatggtgaagcctacatggacgtctgt

SEQ ID NO: 195011 - DNA, 30 bp, Artificial Sequence
  Synthetic oligonucleotide
tctttagtgagactaggtacaaaattctgt

SEQ ID NO: 195012 - DNA, 30 bp, Artificial Sequence
  Synthetic oligonucleotide
acgagcagtcttctcattttggaattctgt

SEQ ID NO: 195013 - DNA, 31 bp, Artificial Sequence
  Synthetic oligonucleotide
aggactcaatcgtcggaccggacatttctgt

SEQ ID NO: 195014 - DNA, 30 bp, Artificial Sequence
  Synthetic oligonucleotide
gtccatttcgagcccaaactccttttctgt

SEQ ID NO: 195015 - DNA, 30 bp, Artificial Sequence
  Synthetic oligonucleotide
agaaaatggtgatgcgtggagctaaagtgt

SEQ ID NO: 195016 - DNA, 30 bp, Artificial Sequence
  Synthetic oligonucleotide
atctaggcgctgatgttaaccgggaagtgt

SEQ ID NO: 195017 - DNA, 30 bp, Artificial Sequence
  Synthetic oligonucleotide
caataatgtcatgtacacctgtggaagtgt

SEQ ID NO: 195018 - DNA, 30 bp, Artificial Sequence
  Synthetic oligonucleotide
accactggacaggaaaaacgcgataagtgt

SEQ ID NO: 195019 - DNA, 30 bp, Artificial Sequence
  Synthetic oligonucleotide
gcctatgataaatgccaaatatctaagtgt

SEQ ID NO: 195020 - DNA, 30 bp, Artificial Sequence
  Synthetic oligonucleotide
cagctgtcacgaatggttcgctcacagtgt

SEQ ID NO: 195021 - DNA, 31 bp, Artificial Sequence
  Synthetic oligonucleotide
tgtagggacatttactctgcaccctcagtgt

SEQ ID NO: 195022 - DNA, 30 bp, Artificial Sequence
  Synthetic oligonucleotide
cgggaatacggtaacgggtctcaagagtgt

SEQ ID NO: 195023 - DNA, 30 bp, Artificial Sequence
  Synthetic oligonucleotide
tggttttactgtgaatgtcaaacagagtgt

SEQ ID NO: 195024 - DNA, 30 bp, Artificial Sequence
  Synthetic oligonucleotide
tttgagtgtaatcacgccttatgagagtgt

SEQ ID NO: 195025 - DNA, 30 bp, Artificial Sequence
  Synthetic oligonucleotide
tcaagggacacgagactaggtgtcgagtgt

SEQ ID NO: 195026 - DNA, 30 bp, Artificial Sequence
  Synthetic oligonucleotide
gtgtgatcaccgcctcaaacatctgagtgt

SEQ ID NO: 195027 - DNA, 30 bp, Artificial Sequence
  Synthetic oligonucleotide
gtctcaaacggtaggggttcaggtgagtgt

SEQ ID NO: 195028 - DNA, 30 bp, Artificial Sequence
  Synthetic oligonucleotide
cggaatccccagcgcggctcgtaatagtgt

SEQ ID NO: 195029 - DNA, 30 bp, Artificial Sequence
  Synthetic oligonucleotide
ccctgtttgaagtagatagggcgatagtgt

SEQ ID NO: 195030 - DNA, 30 bp, Artificial Sequence
  Synthetic oligonucleotide
atgtgcggagattttatggccgggtagtgt

SEQ ID NO: 195031 - DNA, 30 bp, Artificial Sequence
  Synthetic oligonucleotide
catgaaactacaggtcaaatcctttagtgt

SEQ ID NO: 195032 - DNA, 30 bp, Artificial Sequence
  Synthetic oligonucleotide
aggatgtgggaaaccgctcggtcaacgtgt

SEQ ID NO: 195033 - DNA, 30 bp, Artificial Sequence
  Synthetic oligonucleotide
gcatatatgaattggcactgaggaacgtgt

SEQ ID NO: 195034 - DNA, 30 bp, Artificial Sequence
  Synthetic oligonucleotide
cgcatggcgttcagataggataacacgtgt

SEQ ID NO: 195035 - DNA, 30 bp, Artificial Sequence
  Synthetic oligonucleotide
taacaataacatgatatagcctggacgtgt

SEQ ID NO: 195036 - DNA, 30 bp, Artificial Sequence
  Synthetic oligonucleotide
aaagtagaacctgttaattacaaaccgtgt

SEQ ID NO: 195037 - DNA, 30 bp, Artificial Sequence
  Synthetic oligonucleotide
cagaggggtatcaacagtacttcaccgtgt

SEQ ID NO: 195038 - DNA, 30 bp, Artificial Sequence
  Synthetic oligonucleotide
agacaagcactgccggggaatttgccgtgt

SEQ ID NO: 195039 - DNA, 30 bp, Artificial Sequence
  Synthetic oligonucleotide
taagggacatgcataaacgagattccgtgt

SEQ ID NO: 195040 - DNA, 30 bp, Artificial Sequence
  Synthetic oligonucleotide
gcctgtccaccacatgcgtttgaagcgtgt

SEQ ID NO: 195041 - DNA, 30 bp, Artificial Sequence
  Synthetic oligonucleotide
ggcaaacgtggaagttaactacgagcgtgt

SEQ ID NO: 195042 - DNA, 30 bp, Artificial Sequence
  Synthetic oligonucleotide
agtacgcttaaggcatcaaaggtggcgtgt

SEQ ID NO: 195043 - DNA, 30 bp, Artificial Sequence
  Synthetic oligonucleotide
agtaaggttttgtgatggctggctgcgtgt

SEQ ID NO: 195044 - DNA, 30 bp, Artificial Sequence
  Synthetic oligonucleotide
agcacacagggagctctgtgtatctcgtgt

SEQ ID NO: 195045 - DNA, 30 bp, Artificial Sequence
  Synthetic oligonucleotide
tgtgcgccgagcatatgatttacttcgtgt

SEQ ID NO: 195046 - DNA, 30 bp, Artificial Sequence
  Synthetic oligonucleotide
agtacaggatcatctggaaagtaaaggtgt

SEQ ID NO: 195047 - DNA, 30 bp, Artificial Sequence
  Synthetic oligonucleotide
cagactattgcagttcgaaccatacggtgt

SEQ ID NO: 195048 - DNA, 30 bp, Artificial Sequence
  Synthetic oligonucleotide
tcttgtacaccaagagcgagcatacggtgt

SEQ ID NO: 195049 - DNA, 30 bp, Artificial Sequence
  Synthetic oligonucleotide
aaggagccgatcgtggttagaccccggtgt

SEQ ID NO: 195050 - DNA, 30 bp, Artificial Sequence
  Synthetic oligonucleotide
ggatacgaaggaggagttcaaggccggtgt

SEQ ID NO: 195051 - DNA, 30 bp, Artificial Sequence
  Synthetic oligonucleotide
gggctcccttaaaagctggtccttcggtgt

SEQ ID NO: 195052 - DNA, 30 bp, Artificial Sequence
  Synthetic oligonucleotide
catggggacaaaattgtcaagtttcggtgt

SEQ ID NO: 195053 - DNA, 30 bp, Artificial Sequence
  Synthetic oligonucleotide
acggtggtgtactcaaaattaccagggtgt

SEQ ID NO: 195054 - DNA, 30 bp, Artificial Sequence
  Synthetic oligonucleotide
tcaacaaagtttgcttagttatcagggtgt

SEQ ID NO: 195055 - DNA, 30 bp, Artificial Sequence
  Synthetic oligonucleotide
agcagtgcgacataaaaaatcgacgggtgt

SEQ ID NO: 195056 - DNA, 30 bp, Artificial Sequence
  Synthetic oligonucleotide
gaagtgcagtcatcgcatagtgcggggtgt

SEQ ID NO: 195057 - DNA, 30 bp, Artificial Sequence
  Synthetic oligonucleotide
ttgagaagagatatgagatcatgggggtgt

SEQ ID NO: 195058 - DNA, 30 bp, Artificial Sequence
  Synthetic oligonucleotide
gcaaaacactacattatgaattctgggtgt

SEQ ID NO: 195059 - DNA, 30 bp, Artificial Sequence
  Synthetic oligonucleotide
agattacgaaagacccgtgatggctggtgt

SEQ ID NO: 195060 - DNA, 30 bp, Artificial Sequence
  Synthetic oligonucleotide
cagacaaggggctcgagccagtgctggtgt

SEQ ID NO: 195061 - DNA, 30 bp, Artificial Sequence
  Synthetic oligonucleotide
gtaagtgaaacagtagcaccgatctggtgt

SEQ ID NO: 195062 - DNA, 30 bp, Artificial Sequence
  Synthetic oligonucleotide
gtaaggcgataacttttatcccggtggtgt

SEQ ID NO: 195063 - DNA, 30 bp, Artificial Sequence
  Synthetic oligonucleotide
ataagacacttatcgggcctccgttggtgt

SEQ ID NO: 195064 - DNA, 30 bp, Artificial Sequence
  Synthetic oligonucleotide
gtgaattaccaacgtggccagaaaatgtgt

SEQ ID NO: 195065 - DNA, 30 bp, Artificial Sequence
  Synthetic oligonucleotide
cccattgattcataggactctatcatgtgt

SEQ ID NO: 195066 - DNA, 30 bp, Artificial Sequence
  Synthetic oligonucleotide
ccttctgaggataagaccgaccagatgtgt

SEQ ID NO: 195067 - DNA, 30 bp, Artificial Sequence
  Synthetic oligonucleotide
aataggcgcttaaacggaaaatagatgtgt

SEQ ID NO: 195068 - DNA, 30 bp, Artificial Sequence
  Synthetic oligonucleotide
tgttgggtgacgtgactcttttacctgtgt

SEQ ID NO: 195069 - DNA, 30 bp, Artificial Sequence
  Synthetic oligonucleotide
agatttccggagaaatgggaaggcctgtgt

SEQ ID NO: 195070 - DNA, 30 bp, Artificial Sequence
  Synthetic oligonucleotide
gatacgacagcctactaagggttcctgtgt

SEQ ID NO: 195071 - DNA, 30 bp, Artificial Sequence
  Synthetic oligonucleotide
agttttcgccacgaaaatagaatcgtgtgt

SEQ ID NO: 195072 - DNA, 30 bp, Artificial Sequence
  Synthetic oligonucleotide
atcaagaccaatgctgcggaggaattgtgt

SEQ ID NO: 195073 - DNA, 30 bp, Artificial Sequence
  Synthetic oligonucleotide
gcgattagcttaaggaggaaagacttgtgt

SEQ ID NO: 195074 - DNA, 30 bp, Artificial Sequence
  Synthetic oligonucleotide
ggacgtcaaccactccacaccccgttgtgt

SEQ ID NO: 195075 - DNA, 30 bp, Artificial Sequence
  Synthetic oligonucleotide
agcgtatagaaaaaagtttttagaaattgt

SEQ ID NO: 195076 - DNA, 30 bp, Artificial Sequence
  Synthetic oligonucleotide
gaagtatcgtctgccagagaacgcaattgt

SEQ ID NO: 195077 - DNA, 30 bp, Artificial Sequence
  Synthetic oligonucleotide
acctcacattcgcgcgcataaaagaattgt

SEQ ID NO: 195078 - DNA, 30 bp, Artificial Sequence
  Synthetic oligonucleotide
aatgtggttgaatgaacgggttagaattgt

SEQ ID NO: 195079 - DNA, 30 bp, Artificial Sequence
  Synthetic oligonucleotide
caccttaaggatatgggtgcagggaattgt

SEQ ID NO: 195080 - DNA, 31 bp, Artificial Sequence
  Synthetic oligonucleotide
tactcacaacgtcaccatccccgaacattgt

SEQ ID NO: 195081 - DNA, 30 bp, Artificial Sequence
  Synthetic oligonucleotide
acgtcataaaacgtcactacgtcccattgt

SEQ ID NO: 195082 - DNA, 30 bp, Artificial Sequence
  Synthetic oligonucleotide
cgcgacagtgcattattcatcgcgcattgt

SEQ ID NO: 195083 - DNA, 30 bp, Artificial Sequence
  Synthetic oligonucleotide
gtcatcagattggcgattctaaccgattgt

SEQ ID NO: 195084 - DNA, 30 bp, Artificial Sequence
  Synthetic oligonucleotide
tcagtagatcgtggtctaactcctgattgt

SEQ ID NO: 195085 - DNA, 30 bp, Artificial Sequence
  Synthetic oligonucleotide
aagagaggaacggaactgttgtctgattgt

SEQ ID NO: 195086 - DNA, 30 bp, Artificial Sequence
  Synthetic oligonucleotide
ggcgttgatactgcggatgcgtcgtattgt

SEQ ID NO: 195087 - DNA, 30 bp, Artificial Sequence
  Synthetic oligonucleotide
tatgcgaattataatctgcgtgcttattgt

SEQ ID NO: 195088 - DNA, 30 bp, Artificial Sequence
  Synthetic oligonucleotide
gagccgattctagtaatggaaagaacttgt

SEQ ID NO: 195089 - DNA, 30 bp, Artificial Sequence
  Synthetic oligonucleotide
gacgcaatgaacgctctaaacacgacttgt

SEQ ID NO: 195090 - DNA, 30 bp, Artificial Sequence
  Synthetic oligonucleotide
atcgtgggtcctaacgccactttgacttgt

SEQ ID NO: 195091 - DNA, 30 bp, Artificial Sequence
  Synthetic oligonucleotide
cagtggttacggcccgcccaatctacttgt

SEQ ID NO: 195092 - DNA, 30 bp, Artificial Sequence
  Synthetic oligonucleotide
atcccacaggacgaaccgggtactccttgt

SEQ ID NO: 195093 - DNA, 30 bp, Artificial Sequence
  Synthetic oligonucleotide
gggttgataatgtacggagggctcgcttgt

SEQ ID NO: 195094 - DNA, 30 bp, Artificial Sequence
  Synthetic oligonucleotide
ggtaagtgcttagagtatctacgggcttgt

SEQ ID NO: 195095 - DNA, 30 bp, Artificial Sequence
  Synthetic oligonucleotide
acgaccagcgtcaaaaaagtatgtgcttgt

SEQ ID NO: 195096 - DNA, 30 bp, Artificial Sequence
  Synthetic oligonucleotide
acatatgcggcctataggaaatggtcttgt

SEQ ID NO: 195097 - DNA, 30 bp, Artificial Sequence
  Synthetic oligonucleotide
acagttccgcaaacatcttaggacagttgt

SEQ ID NO: 195098 - DNA, 30 bp, Artificial Sequence
  Synthetic oligonucleotide
atctgaatcgaactcgcaacgaccagttgt

SEQ ID NO: 195099 - DNA, 30 bp, Artificial Sequence
  Synthetic oligonucleotide
cccaaatgcaaatcggcgcataccagttgt

SEQ ID NO: 195100 - DNA, 30 bp, Artificial Sequence
  Synthetic oligonucleotide
tgacgctcccgaggcatgaaaatcagttgt

SEQ ID NO: 195101 - DNA, 30 bp, Artificial Sequence
  Synthetic oligonucleotide
cgtctacatgagcttgaccactagagttgt

SEQ ID NO: 195102 - DNA, 30 bp, Artificial Sequence
  Synthetic oligonucleotide
aacagcgctaacatactacaaaatagttgt

SEQ ID NO: 195103 - DNA, 30 bp, Artificial Sequence
  Synthetic oligonucleotide
aaaccgggccccgcaacaaggtgtagttgt

SEQ ID NO: 195104 - DNA, 30 bp, Artificial Sequence
  Synthetic oligonucleotide
aaaccggatgtagaccaggtgctacgttgt

SEQ ID NO: 195105 - DNA, 30 bp, Artificial Sequence
  Synthetic oligonucleotide
ttgcatttagtctgaatcgggcctcgttgt

SEQ ID NO: 195106 - DNA, 30 bp, Artificial Sequence
  Synthetic oligonucleotide
atcaaagagatatgggttccccgtcgttgt

SEQ ID NO: 195107 - DNA, 30 bp, Artificial Sequence
  Synthetic oligonucleotide
cttgtcctaaatcgagtaagaacaggttgt

SEQ ID NO: 195108 - DNA, 30 bp, Artificial Sequence
  Synthetic oligonucleotide
actggacacagaggaaggagggcaggttgt

SEQ ID NO: 195109 - DNA, 30 bp, Artificial Sequence
  Synthetic oligonucleotide
atggttaggactccccgagacgtaggttgt

SEQ ID NO: 195110 - DNA, 30 bp, Artificial Sequence
  Synthetic oligonucleotide
gaccagatgcatctgagatagttaggttgt

SEQ ID NO: 195111 - DNA, 30 bp, Artificial Sequence
  Synthetic oligonucleotide
aggtgaccactgaagggccactccggttgt

SEQ ID NO: 195112 - DNA, 30 bp, Artificial Sequence
  Synthetic oligonucleotide
gctcgggctgttagataatcaagctgttgt

SEQ ID NO: 195113 - DNA, 30 bp, Artificial Sequence
  Synthetic oligonucleotide
gtatacaacgatgccattcaaggctgttgt

SEQ ID NO: 195114 - DNA, 30 bp, Artificial Sequence
  Synthetic oligonucleotide
gtaaccgggatagtgcgggagttgtgttgt

SEQ ID NO: 195115 - DNA, 30 bp, Artificial Sequence
  Synthetic oligonucleotide
tactgcccgataccattaccgttgtgttgt

SEQ ID NO: 195116 - DNA, 30 bp, Artificial Sequence
  Synthetic oligonucleotide
cgtacgataggtaattaggatcgaatttgt

SEQ ID NO: 195117 - DNA, 30 bp, Artificial Sequence
  Synthetic oligonucleotide
tgaggtggtcatcctgagacaataatttgt

SEQ ID NO: 195118 - DNA, 30 bp, Artificial Sequence
  Synthetic oligonucleotide
ttgaccgaaatgcctggtggaacgatttgt

SEQ ID NO: 195119 - DNA, 30 bp, Artificial Sequence
  Synthetic oligonucleotide
tcgttaatatgctaaagaacgcctatttgt

SEQ ID NO: 195120 - DNA, 30 bp, Artificial Sequence
  Synthetic oligonucleotide
catgagaggacagtagactagtgtatttgt

SEQ ID NO: 195121 - DNA, 30 bp, Artificial Sequence
  Synthetic oligonucleotide
caacctgtatgcacgtggatagttatttgt

SEQ ID NO: 195122 - DNA, 30 bp, Artificial Sequence
  Synthetic oligonucleotide
aagggaaacctcataaacctaggactttgt

SEQ ID NO: 195123 - DNA, 30 bp, Artificial Sequence
  Synthetic oligonucleotide
gcagaactgtattactctgctgtagtttgt

SEQ ID NO: 195124 - DNA, 30 bp, Artificial Sequence
  Synthetic oligonucleotide
aaggccggttgcaccaaatgcagcgtttgt

SEQ ID NO: 195125 - DNA, 30 bp, Artificial Sequence
  Synthetic oligonucleotide
acaggcataaacctgcaggatacggtttgt

SEQ ID NO: 195126 - DNA, 30 bp, Artificial Sequence
  Synthetic oligonucleotide
tcggtcactcgaaagtcggagatggtttgt

SEQ ID NO: 195127 - DNA, 30 bp, Artificial Sequence
  Synthetic oligonucleotide
aactggagtaattgtagatcacgtgtttgt

SEQ ID NO: 195128 - DNA, 30 bp, Artificial Sequence
  Synthetic oligonucleotide
ggacaccccgagtcgtgtccagatttttgt

SEQ ID NO: 195129 - DNA, 30 bp, Artificial Sequence
  Synthetic oligonucleotide
aagggacgaattaagcggcccaacaaaatt

SEQ ID NO: 195130 - DNA, 30 bp, Artificial Sequence
  Synthetic oligonucleotide
agcgctaccggaacatcgagagacaaaatt

SEQ ID NO: 195131 - DNA, 30 bp, Artificial Sequence
  Synthetic oligonucleotide
gagaggacgttccagcacctaaagaaaatt

SEQ ID NO: 195132 - DNA, 30 bp, Artificial Sequence
  Synthetic oligonucleotide
ccttgtggcggcacaccagataataaaatt

SEQ ID NO: 195133 - DNA, 30 bp, Artificial Sequence
  Synthetic oligonucleotide
atagtacgttttaacggacagcataaaatt

SEQ ID NO: 195134 - DNA, 30 bp, Artificial Sequence
  Synthetic oligonucleotide
atcttagggctgtggttaaatgctaaaatt

SEQ ID NO: 195135 - DNA, 30 bp, Artificial Sequence
  Synthetic oligonucleotide
aggtgtcgtcgaaagtaatgacgtaaaatt

SEQ ID NO: 195136 - DNA, 30 bp, Artificial Sequence
  Synthetic oligonucleotide
gggaattctgtcaaggtcaggcgtaaaatt

SEQ ID NO: 195137 - DNA, 30 bp, Artificial Sequence
  Synthetic oligonucleotide
gtaggtgtatgaagctgtcttgaacaaatt

SEQ ID NO: 195138 - DNA, 30 bp, Artificial Sequence
  Synthetic oligonucleotide
gtagaaatgaaaccagtacgaatacaaatt

SEQ ID NO: 195139 - DNA, 30 bp, Artificial Sequence
  Synthetic oligonucleotide
gtaaggcttgaagtaccgttattccaaatt

SEQ ID NO: 195140 - DNA, 30 bp, Artificial Sequence
  Synthetic oligonucleotide
acaggagttatcacactatcgtcgcaaatt

SEQ ID NO: 195141 - DNA, 30 bp, Artificial Sequence
  Synthetic oligonucleotide
cgggtccggttgagagactgtactcaaatt

SEQ ID NO: 195142 - DNA, 30 bp, Artificial Sequence
  Synthetic oligonucleotide
ccggggtacccatgcactaatggtcaaatt

SEQ ID NO: 195143 - DNA, 30 bp, Artificial Sequence
  Synthetic oligonucleotide
ctctacgcctgtgcataagggattcaaatt

SEQ ID NO: 195144 - DNA, 30 bp, Artificial Sequence
  Synthetic oligonucleotide
ggcaaccatatacgagtgactaccgaaatt

SEQ ID NO: 195145 - DNA, 30 bp, Artificial Sequence
  Synthetic oligonucleotide
gttgataattggaggtaatgggccgaaatt

SEQ ID NO: 195146 - DNA, 30 bp, Artificial Sequence
  Synthetic oligonucleotide
tcgttctgatgttgagagcattccgaaatt

SEQ ID NO: 195147 - DNA, 30 bp, Artificial Sequence
  Synthetic oligonucleotide
cattttcactgggggggcaggcatgaaatt

SEQ ID NO: 195148 - DNA, 30 bp, Artificial Sequence
  Synthetic oligonucleotide
taaggctaagtaataagcttgtttgaaatt

SEQ ID NO: 195149 - DNA, 30 bp, Artificial Sequence
  Synthetic oligonucleotide
acgagttgaaaaacatgacgaccataaatt

SEQ ID NO: 195150 - DNA, 30 bp, Artificial Sequence
  Synthetic oligonucleotide
tatcaagatgtacaaagacggcgataaatt

SEQ ID NO: 195151 - DNA, 30 bp, Artificial Sequence
  Synthetic oligonucleotide
agggctctccagcattccaacatataaatt

SEQ ID NO: 195152 - DNA, 30 bp, Artificial Sequence
  Synthetic oligonucleotide
tgtaggttcccggggactgagtgctaaatt

SEQ ID NO: 195153 - DNA, 30 bp, Artificial Sequence
  Synthetic oligonucleotide
aacttgtaggaattaggagaggtctaaatt

SEQ ID NO: 195154 - DNA, 30 bp, Artificial Sequence
  Synthetic oligonucleotide
atcgataggcaatttgcgcgaatgtaaatt

SEQ ID NO: 195155 - DNA, 30 bp, Artificial Sequence
  Synthetic oligonucleotide
cctgcacgtaattccaaggtacattaaatt

SEQ ID NO: 195156 - DNA, 30 bp, Artificial Sequence
  Synthetic oligonucleotide
aaaagaacggacagggattacccttaaatt

SEQ ID NO: 195157 - DNA, 30 bp, Artificial Sequence
  Synthetic oligonucleotide
aggagggtttgaaacttgtccccttaaatt

SEQ ID NO: 195158 - DNA, 30 bp, Artificial Sequence
  Synthetic oligonucleotide
ctggtaccgtggacccctatacgttaaatt

SEQ ID NO: 195159 - DNA, 30 bp, Artificial Sequence
  Synthetic oligonucleotide
caagctaagacggtgtaaccttaaacaatt

SEQ ID NO: 195160 - DNA, 30 bp, Artificial Sequence
  Synthetic oligonucleotide
tgatttggggatcggaccatcccaacaatt

SEQ ID NO: 195161 - DNA, 30 bp, Artificial Sequence
  Synthetic oligonucleotide
tgtcgggaagtatctgtactgatcacaatt

SEQ ID NO: 195162 - DNA, 30 bp, Artificial Sequence
  Synthetic oligonucleotide
agcgtcttcgactgagggttcgtcacaatt

SEQ ID NO: 195163 - DNA, 30 bp, Artificial Sequence
  Synthetic oligonucleotide
tgcataggcgtacaggctgatcagacaatt

SEQ ID NO: 195164 - DNA, 30 bp, Artificial Sequence
  Synthetic oligonucleotide
gcctggtaggaataggctccgaaaccaatt

SEQ ID NO: 195165 - DNA, 30 bp, Artificial Sequence
  Synthetic oligonucleotide
taccgtgaggatccgtgtacgggaccaatt

SEQ ID NO: 195166 - DNA, 30 bp, Artificial Sequence
  Synthetic oligonucleotide
gtgagtacagcggataccctaataccaatt

SEQ ID NO: 195167 - DNA, 30 bp, Artificial Sequence
  Synthetic oligonucleotide
ttctccgtgccacatctcaaccgagcaatt

SEQ ID NO: 195168 - DNA, 30 bp, Artificial Sequence
  Synthetic oligonucleotide
cattacaaacctatatcagtggtagcaatt

SEQ ID NO: 195169 - DNA, 30 bp, Artificial Sequence
  Synthetic oligonucleotide
atatagctccagcgtatgataggtgcaatt

SEQ ID NO: 195170 - DNA, 30 bp, Artificial Sequence
  Synthetic oligonucleotide
taaagtaaggtccctgctcaagactcaatt

SEQ ID NO: 195171 - DNA, 30 bp, Artificial Sequence
  Synthetic oligonucleotide
atcagatcttcgatacttcgctcgtcaatt

SEQ ID NO: 195172 - DNA, 30 bp, Artificial Sequence
  Synthetic oligonucleotide
aacccagttcggtagggtatagggtcaatt

SEQ ID NO: 195173 - DNA, 30 bp, Artificial Sequence
  Synthetic oligonucleotide
ctctgacggagaagggagcgttggtcaatt

SEQ ID NO: 195174 - DNA, 30 bp, Artificial Sequence
  Synthetic oligonucleotide
ttacatcgcttctactaacggatgtcaatt

SEQ ID NO: 195175 - DNA, 30 bp, Artificial Sequence
  Synthetic oligonucleotide
actgtcgatcattttgacgaagtaagaatt

SEQ ID NO: 195176 - DNA, 30 bp, Artificial Sequence
  Synthetic oligonucleotide
cgatgccatcatgggccataggacagaatt

SEQ ID NO: 195177 - DNA, 30 bp, Artificial Sequence
  Synthetic oligonucleotide
aagtcatgggaacgtcttgggttcagaatt

SEQ ID NO: 195178 - DNA, 30 bp, Artificial Sequence
  Synthetic oligonucleotide
gcatggattcagtgttgtttgccgagaatt

SEQ ID NO: 195179 - DNA, 30 bp, Artificial Sequence
  Synthetic oligonucleotide
tcagtgtggccctaccgtcgaatgagaatt

SEQ ID NO: 195180 - DNA, 31 bp, Artificial Sequence
  Synthetic oligonucleotide
attaagtcattatgttgttcgaatgagaatt

SEQ ID NO: 195181 - DNA, 30 bp, Artificial Sequence
  Synthetic oligonucleotide
gtactagagcgcatagggtgacgtagaatt

SEQ ID NO: 195182 - DNA, 30 bp, Artificial Sequence
  Synthetic oligonucleotide
ggtggccgtggtagcgaattcttacgaatt

SEQ ID NO: 195183 - DNA, 30 bp, Artificial Sequence
  Synthetic oligonucleotide
tccgctatgtgttgagtgtagcgccgaatt

SEQ ID NO: 195184 - DNA, 30 bp, Artificial Sequence
  Synthetic oligonucleotide
caatcgctacgcactttaagtgctcgaatt

SEQ ID NO: 195185 - DNA, 30 bp, Artificial Sequence
  Synthetic oligonucleotide
atgagtacatcaagcgtaaacgaaggaatt

SEQ ID NO: 195186 - DNA, 30 bp, Artificial Sequence
  Synthetic oligonucleotide
aggtttaatcgctacgacacacgaggaatt

SEQ ID NO: 195187 - DNA, 30 bp, Artificial Sequence
  Synthetic oligonucleotide
acagccccgaggataccggtacgaggaatt

SEQ ID NO: 195188 - DNA, 30 bp, Artificial Sequence
  Synthetic oligonucleotide
ttggaaatcagtacaggttagctaggaatt

SEQ ID NO: 195189 - DNA, 30 bp, Artificial Sequence
  Synthetic oligonucleotide
gcaggcatcatgcgtccgcggaagggaatt

SEQ ID NO: 195190 - DNA, 30 bp, Artificial Sequence
  Synthetic oligonucleotide
ggccgatgtgtgtttagacaatagggaatt

SEQ ID NO: 195191 - DNA, 30 bp, Artificial Sequence
  Synthetic oligonucleotide
cagtaggattgcctacgaataaggggaatt

SEQ ID NO: 195192 - DNA, 30 bp, Artificial Sequence
  Synthetic oligonucleotide
gatcagcgctattcatggttcgtgggaatt

SEQ ID NO: 195193 - DNA, 30 bp, Artificial Sequence
  Synthetic oligonucleotide
agttcgaaaaaaataagttggccatgaatt

SEQ ID NO: 195194 - DNA, 30 bp, Artificial Sequence
  Synthetic oligonucleotide
gttgaataggaagggaccaccttatgaatt

SEQ ID NO: 195195 - DNA, 30 bp, Artificial Sequence
  Synthetic oligonucleotide
gcgggattaggttttaggagtgactgaatt

SEQ ID NO: 195196 - DNA, 30 bp, Artificial Sequence
  Synthetic oligonucleotide
taccactaagtaaattagcgcggctgaatt

SEQ ID NO: 195197 - DNA, 30 bp, Artificial Sequence
  Synthetic oligonucleotide
tgtaggcaaaccatagtgttcgagtgaatt

SEQ ID NO: 195198 - DNA, 30 bp, Artificial Sequence
  Synthetic oligonucleotide
cacaagttactgccacccagcgtgtgaatt

SEQ ID NO: 195199 - DNA, 30 bp, Artificial Sequence
  Synthetic oligonucleotide
ttggggaaggtatctctttgggcttgaatt

SEQ ID NO: 195200 - DNA, 30 bp, Artificial Sequence
  Synthetic oligonucleotide
ataacaaagatgagggtacgttgttgaatt

SEQ ID NO: 195201 - DNA, 30 bp, Artificial Sequence
  Synthetic oligonucleotide
tcggaagattacggtgggggtaggataatt

SEQ ID NO: 195202 - DNA, 30 bp, Artificial Sequence
  Synthetic oligonucleotide
ctgagaggcgttggtaaggaacgtataatt

SEQ ID NO: 195203 - DNA, 30 bp, Artificial Sequence
  Synthetic oligonucleotide
gaccatctgtgtagatgaacagagctaatt

SEQ ID NO: 195204 - DNA, 30 bp, Artificial Sequence
  Synthetic oligonucleotide
tgagtcactgtgacagaatataggctaatt

SEQ ID NO: 195205 - DNA, 30 bp, Artificial Sequence
  Synthetic oligonucleotide
gtggaccacgtccaagattcaattctaatt

SEQ ID NO: 195206 - DNA, 30 bp, Artificial Sequence
  Synthetic oligonucleotide
ccacatcattggaccttcgagcttctaatt

SEQ ID NO: 195207 - DNA, 30 bp, Artificial Sequence
  Synthetic oligonucleotide
tgtctaagcatggagcgtgtgccagtaatt

SEQ ID NO: 195208 - DNA, 30 bp, Artificial Sequence
  Synthetic oligonucleotide
agctattgtgatcggaccggcctagtaatt

SEQ ID NO: 195209 - DNA, 30 bp, Artificial Sequence
  Synthetic oligonucleotide
atgaccgggatgtaccagatcaccgtaatt

SEQ ID NO: 195210 - DNA, 30 bp, Artificial Sequence
  Synthetic oligonucleotide
tggcccaaaaatgctaatcgtcaggtaatt

SEQ ID NO: 195211 - DNA, 30 bp, Artificial Sequence
  Synthetic oligonucleotide
tcgtctagatggcgaaaagggtctgtaatt

SEQ ID NO: 195212 - DNA, 30 bp, Artificial Sequence
  Synthetic oligonucleotide
atgctgtactatcagggagcatacttaatt

SEQ ID NO: 195213 - DNA, 30 bp, Artificial Sequence
  Synthetic oligonucleotide
atagcagacaacgctacgatcaggttaatt

SEQ ID NO: 195214 - DNA, 30 bp, Artificial Sequence
  Synthetic oligonucleotide
catcacgaatctgtgttgatcgatttaatt

SEQ ID NO: 195215 - DNA, 30 bp, Artificial Sequence
  Synthetic oligonucleotide
ggcgtgctccataatatcaagaaaaacatt

SEQ ID NO: 195216 - DNA, 30 bp, Artificial Sequence
  Synthetic oligonucleotide
cctggtgagaagctcggcgagtaaaacatt

SEQ ID NO: 195217 - DNA, 30 bp, Artificial Sequence
  Synthetic oligonucleotide
ctagcttaaccctaatagcgcccaaacatt

SEQ ID NO: 195218 - DNA, 30 bp, Artificial Sequence
  Synthetic oligonucleotide
agcgctgttctaaactcaatcaggaacatt

SEQ ID NO: 195219 - DNA, 30 bp, Artificial Sequence
  Synthetic oligonucleotide
ctccagaacgaccggacgatgaataacatt

SEQ ID NO: 195220 - DNA, 30 bp, Artificial Sequence
  Synthetic oligonucleotide
atgccactcgtaactaagctcgttaacatt

SEQ ID NO: 195221 - DNA, 30 bp, Artificial Sequence
  Synthetic oligonucleotide
ggctgaggctatggtgataccttgcacatt

SEQ ID NO: 195222 - DNA, 30 bp, Artificial Sequence
  Synthetic oligonucleotide
cagtataaaaccaatataagactcgacatt

SEQ ID NO: 195223 - DNA, 30 bp, Artificial Sequence
  Synthetic oligonucleotide
cagtttggaacgatgtcacggctggacatt

SEQ ID NO: 195224 - DNA, 30 bp, Artificial Sequence
  Synthetic oligonucleotide
tacatggccttgcgatgctcaagtgacatt

SEQ ID NO: 195225 - DNA, 30 bp, Artificial Sequence
  Synthetic oligonucleotide
gggaagatctctaccaatcaagattacatt

SEQ ID NO: 195226 - DNA, 30 bp, Artificial Sequence
  Synthetic oligonucleotide
caggcatggcgcaatgtcgtattttacatt

SEQ ID NO: 195227 - DNA, 30 bp, Artificial Sequence
  Synthetic oligonucleotide
tgtagaaagatacatactctcggtaccatt

SEQ ID NO: 195228 - DNA, 30 bp, Artificial Sequence
  Synthetic oligonucleotide
gcagacggtcgttacaccgcgacacccatt

SEQ ID NO: 195229 - DNA, 30 bp, Artificial Sequence
  Synthetic oligonucleotide
ctgtgtccatagtgggaaatggcacccatt

SEQ ID NO: 195230 - DNA, 30 bp, Artificial Sequence
  Synthetic oligonucleotide
tactgcccgattcctacccagacccccatt

SEQ ID NO: 195231 - DNA, 30 bp, Artificial Sequence
  Synthetic oligonucleotide
agtcggttgtgtccagcgactacccccatt

SEQ ID NO: 195232 - DNA, 30 bp, Artificial Sequence
  Synthetic oligonucleotide
cagaaactcagctagcagttgaagcccatt

SEQ ID NO: 195233 - DNA, 30 bp, Artificial Sequence
  Synthetic oligonucleotide
cagaaaataccacgccgtaaaacgcccatt

SEQ ID NO: 195234 - DNA, 30 bp, Artificial Sequence
  Synthetic oligonucleotide
taaacactgggagggcaatggcgtcccatt

SEQ ID NO: 195235 - DNA, 30 bp, Artificial Sequence
  Synthetic oligonucleotide
ggtgacacaaggcaatggtgatctgccatt

SEQ ID NO: 195236 - DNA, 30 bp, Artificial Sequence
  Synthetic oligonucleotide
gtttgtcgactaacgacaattggtgccatt

SEQ ID NO: 195237 - DNA, 30 bp, Artificial Sequence
  Synthetic oligonucleotide
actgaactcgaggcgcaggtccaatccatt

SEQ ID NO: 195238 - DNA, 30 bp, Artificial Sequence
  Synthetic oligonucleotide
gtctgaggcgggatacgttcatgatccatt

SEQ ID NO: 195239 - DNA, 30 bp, Artificial Sequence
  Synthetic oligonucleotide
acgacctcccatgcgtaaaagatctccatt

SEQ ID NO: 195240 - DNA, 30 bp, Artificial Sequence
  Synthetic oligonucleotide
atagggaatgcacgaacttgcgagtccatt

SEQ ID NO: 195241 - DNA, 30 bp, Artificial Sequence
  Synthetic oligonucleotide
gtagctagctaaggcttgcaggattccatt

SEQ ID NO: 195242 - DNA, 30 bp, Artificial Sequence
  Synthetic oligonucleotide
ctctgccatatccacaatatcatttccatt

SEQ ID NO: 195243 - DNA, 30 bp, Artificial Sequence
  Synthetic oligonucleotide
gttgcatcgtttcggtactgaataagcatt

SEQ ID NO: 195244 - DNA, 30 bp, Artificial Sequence
  Synthetic oligonucleotide
ggtgctgattattcggcagggttaagcatt

SEQ ID NO: 195245 - DNA, 30 bp, Artificial Sequence
  Synthetic oligonucleotide
gccgctgtcgtctaccaggataagagcatt

SEQ ID NO: 195246 - DNA, 30 bp, Artificial Sequence
  Synthetic oligonucleotide
tatgtatatagtgcgacatcgaatagcatt

SEQ ID NO: 195247 - DNA, 30 bp, Artificial Sequence
  Synthetic oligonucleotide
ccgaaattgccgacggtcgcttaacgcatt

SEQ ID NO: 195248 - DNA, 30 bp, Artificial Sequence
  Synthetic oligonucleotide
cgtctcattatacagtcccgagcacgcatt

SEQ ID NO: 195249 - DNA, 30 bp, Artificial Sequence
  Synthetic oligonucleotide
gaaggatcacacttttcataacagcgcatt

SEQ ID NO: 195250 - DNA, 30 bp, Artificial Sequence
  Synthetic oligonucleotide
aagggagtataatttcgtcttcagcgcatt

SEQ ID NO: 195251 - DNA, 30 bp, Artificial Sequence
  Synthetic oligonucleotide
acaatggaggagtaggcgggggaaggcatt

SEQ ID NO: 195252 - DNA, 30 bp, Artificial Sequence
  Synthetic oligonucleotide
aggtggttactgtagcatcacttcggcatt

SEQ ID NO: 195253 - DNA, 30 bp, Artificial Sequence
  Synthetic oligonucleotide
tctcggtttgctaagagaacgccgggcatt

SEQ ID NO: 195254 - DNA, 30 bp, Artificial Sequence
  Synthetic oligonucleotide
agagatgccagcaggtataatccgggcatt

SEQ ID NO: 195255 - DNA, 30 bp, Artificial Sequence
  Synthetic oligonucleotide
gacaaaaggatcaacttttcgtcgggcatt

SEQ ID NO: 195256 - DNA, 30 bp, Artificial Sequence
  Synthetic oligonucleotide
aacatatgctgtgtaagcatgtcgggcatt

SEQ ID NO: 195257 - DNA, 30 bp, Artificial Sequence
  Synthetic oligonucleotide
atgtcagatatcatggggaagtggggcatt

SEQ ID NO: 195258 - DNA, 30 bp, Artificial Sequence
  Synthetic oligonucleotide
tcgtagggccctctccaatgtgatggcatt

SEQ ID NO: 195259 - DNA, 30 bp, Artificial Sequence
  Synthetic oligonucleotide
cggatcccctaggtgtgcatcattggcatt

SEQ ID NO: 195260 - DNA, 30 bp, Artificial Sequence
  Synthetic oligonucleotide
ccagcctggtgggagatgtccacatgcatt

SEQ ID NO: 195261 - DNA, 30 bp, Artificial Sequence
  Synthetic oligonucleotide
ctgccaaactaacctcgcctttcatgcatt

SEQ ID NO: 195262 - DNA, 30 bp, Artificial Sequence
  Synthetic oligonucleotide
atcgatcggacgaacttgcgctagtgcatt

SEQ ID NO: 195263 - DNA, 30 bp, Artificial Sequence
  Synthetic oligonucleotide
gactatgagaataaaaaggtcagttgcatt

SEQ ID NO: 195264 - DNA, 30 bp, Artificial Sequence
  Synthetic oligonucleotide
gttgcgtaccagcgcaaccatggaatcatt

SEQ ID NO: 195265 - DNA, 30 bp, Artificial Sequence
  Synthetic oligonucleotide
tgacaagtcatgactgtagcgaagatcatt

SEQ ID NO: 195266 - DNA, 30 bp, Artificial Sequence
  Synthetic oligonucleotide
atgaaaatacaagctatagcccaactcatt

SEQ ID NO: 195267 - DNA, 30 bp, Artificial Sequence
  Synthetic oligonucleotide
gatggaaggagggaaccatcgagtctcatt

SEQ ID NO: 195268 - DNA, 30 bp, Artificial Sequence
  Synthetic oligonucleotide
gacgactgcgcccaattttaaagcgtcatt

SEQ ID NO: 195269 - DNA, 30 bp, Artificial Sequence
  Synthetic oligonucleotide
tataatgtggaaaatttcagtaaggtcatt

SEQ ID NO: 195270 - DNA, 30 bp, Artificial Sequence
  Synthetic oligonucleotide
aggacatgttgagacgtcgacaatgtcatt

SEQ ID NO: 195271 - DNA, 30 bp, Artificial Sequence
  Synthetic oligonucleotide
cactcttcacgtgtgtctcataatgtcatt

SEQ ID NO: 195272 - DNA, 30 bp, Artificial Sequence
  Synthetic oligonucleotide
gaaatgtaagtgccaacacacaaattcatt

SEQ ID NO: 195273 - DNA, 30 bp, Artificial Sequence
  Synthetic oligonucleotide
gacgcagagtcagaggacaaaatcttcatt

SEQ ID NO: 195274 - DNA, 30 bp, Artificial Sequence
  Synthetic oligonucleotide
cgtatctaggggcgttccggcattttcatt

SEQ ID NO: 195275 - DNA, 30 bp, Artificial Sequence
  Synthetic oligonucleotide
aatcgccagtccaccttcttcgaaaagatt

SEQ ID NO: 195276 - DNA, 30 bp, Artificial Sequence
  Synthetic oligonucleotide
ctacactgcgtactcgtcccgcgaaagatt

SEQ ID NO: 195277 - DNA, 30 bp, Artificial Sequence
  Synthetic oligonucleotide
agtcactatactaggggagcattgaagatt

SEQ ID NO: 195278 - DNA, 30 bp, Artificial Sequence
  Synthetic oligonucleotide
tcgcgggcttagcacgacaatatccagatt

SEQ ID NO: 195279 - DNA, 30 bp, Artificial Sequence
  Synthetic oligonucleotide
aaaacgtaggggggcttgcgtcagcagatt

SEQ ID NO: 195280 - DNA, 30 bp, Artificial Sequence
  Synthetic oligonucleotide
agcgcccaaaggcaactgacgagtcagatt

SEQ ID NO: 195281 - DNA, 30 bp, Artificial Sequence
  Synthetic oligonucleotide
cgggttaaaatgcatgtaccgcgtcagatt

SEQ ID NO: 195282 - DNA, 30 bp, Artificial Sequence
  Synthetic oligonucleotide
attccgaagcaggcggcgagcgtagagatt

SEQ ID NO: 195283 - DNA, 30 bp, Artificial Sequence
  Synthetic oligonucleotide
ggtacgtgtgcattcaatgtagaggagatt

SEQ ID NO: 195284 - DNA, 30 bp, Artificial Sequence
  Synthetic oligonucleotide
ggaatggtcttacggaaacatagtgagatt

SEQ ID NO: 195285 - DNA, 30 bp, Artificial Sequence
  Synthetic oligonucleotide
gtgtaggaaccgggcttgcggtggtagatt

SEQ ID NO: 195286 - DNA, 30 bp, Artificial Sequence
  Synthetic oligonucleotide
ggtcaattcgtcgtctaggcgtcttagatt

SEQ ID NO: 195287 - DNA, 30 bp, Artificial Sequence
  Synthetic oligonucleotide
cggtcaacaccaccccaccaccgttagatt

SEQ ID NO: 195288 - DNA, 30 bp, Artificial Sequence
  Synthetic oligonucleotide
tgagcgacacattgttacggcatttagatt

SEQ ID NO: 195289 - DNA, 31 bp, Artificial Sequence
  Synthetic oligonucleotide
gtcctcatcgagcttgtaaggttaaacgatt

SEQ ID NO: 195290 - DNA, 30 bp, Artificial Sequence
  Synthetic oligonucleotide
agcacgcggcgcgacacagtattcacgatt

SEQ ID NO: 195291 - DNA, 30 bp, Artificial Sequence
  Synthetic oligonucleotide
gtggacggcctcgcacgatggttgacgatt

SEQ ID NO: 195292 - DNA, 30 bp, Artificial Sequence
  Synthetic oligonucleotide
tcgcgcttgacttcttgatcgggtccgatt

SEQ ID NO: 195293 - DNA, 30 bp, Artificial Sequence
  Synthetic oligonucleotide
tcttgagcataatgatggatgcaggcgatt

SEQ ID NO: 195294 - DNA, 30 bp, Artificial Sequence
  Synthetic oligonucleotide
agtgtgctgtgacagttgacgggggcgatt

SEQ ID NO: 195295 - DNA, 30 bp, Artificial Sequence
  Synthetic oligonucleotide
gtgatgtcccagagtaataatgctgcgatt

SEQ ID NO: 195296 - DNA, 30 bp, Artificial Sequence
  Synthetic oligonucleotide
aacagaaaatcgtcattaacgatatcgatt

SEQ ID NO: 195297 - DNA, 30 bp, Artificial Sequence
  Synthetic oligonucleotide
taggcagaactagggactctactctcgatt

SEQ ID NO: 195298 - DNA, 30 bp, Artificial Sequence
  Synthetic oligonucleotide
tcagcgtaatgcggagaccccctgtcgatt

SEQ ID NO: 195299 - DNA, 30 bp, Artificial Sequence
  Synthetic oligonucleotide
tagggcagcggtaagggtatgttttcgatt

SEQ ID NO: 195300 - DNA, 30 bp, Artificial Sequence
  Synthetic oligonucleotide
catggcttatgttcatcgcgttcaaggatt

SEQ ID NO: 195301 - DNA, 30 bp, Artificial Sequence
  Synthetic oligonucleotide
tatccacgtggaactgagcgaggacggatt

SEQ ID NO: 195302 - DNA, 30 bp, Artificial Sequence
  Synthetic oligonucleotide
agtcgtttatccggtatcggtgtccggatt

SEQ ID NO: 195303 - DNA, 30 bp, Artificial Sequence
  Synthetic oligonucleotide
tacatcagcgcaatgtaacttgagcggatt

SEQ ID NO: 195304 - DNA, 30 bp, Artificial Sequence
  Synthetic oligonucleotide
ggctagggcatacctggtgacctgcggatt

SEQ ID NO: 195305 - DNA, 30 bp, Artificial Sequence
  Synthetic oligonucleotide
gaagcaaaatcaagaggataggtcgggatt

SEQ ID NO: 195306 - DNA, 30 bp, Artificial Sequence
  Synthetic oligonucleotide
gggagcagtgttctcgctctagcggggatt

SEQ ID NO: 195307 - DNA, 30 bp, Artificial Sequence
  Synthetic oligonucleotide
aattagcgacaagggtatcatgcggggatt

SEQ ID NO: 195308 - DNA, 30 bp, Artificial Sequence
  Synthetic oligonucleotide
cctaaaacttggcttcccactcgtgggatt

SEQ ID NO: 195309 - DNA, 30 bp, Artificial Sequence
  Synthetic oligonucleotide
ccactggtctcgattgtccgggacatgatt

SEQ ID NO: 195310 - DNA, 30 bp, Artificial Sequence
  Synthetic oligonucleotide
tctggggatggtaatcataataaactgatt

SEQ ID NO: 195311 - DNA, 30 bp, Artificial Sequence
  Synthetic oligonucleotide
acagcggtctctcattaatttcaactgatt

SEQ ID NO: 195312 - DNA, 30 bp, Artificial Sequence
  Synthetic oligonucleotide
ccgggctcatggccctagaaaggactgatt

SEQ ID NO: 195313 - DNA, 30 bp, Artificial Sequence
  Synthetic oligonucleotide
gtggcatactgacgggtctcgatagtgatt

SEQ ID NO: 195314 - DNA, 30 bp, Artificial Sequence
  Synthetic oligonucleotide
tgacgtttatagaggttttatagcgtgatt

SEQ ID NO: 195315 - DNA, 30 bp, Artificial Sequence
  Synthetic oligonucleotide
tacgaccctgatgggccggggcttgtgatt

SEQ ID NO: 195316 - DNA, 30 bp, Artificial Sequence
  Synthetic oligonucleotide
tcagacatttgactacgacggcgaaatatt

SEQ ID NO: 195317 - DNA, 30 bp, Artificial Sequence
  Synthetic oligonucleotide
tgacgacagtatcgctgaatagtaaatatt

SEQ ID NO: 195318 - DNA, 30 bp, Artificial Sequence
  Synthetic oligonucleotide
gtagtccgaaacattcgggacgacaatatt

SEQ ID NO: 195319 - DNA, 30 bp, Artificial Sequence
  Synthetic oligonucleotide
ctatgcgacaattaggtgtgcaccaatatt

SEQ ID NO: 195320 - DNA, 30 bp, Artificial Sequence
  Synthetic oligonucleotide
cggcgcgactcggtacagtctcagaatatt

SEQ ID NO: 195321 - DNA, 30 bp, Artificial Sequence
  Synthetic oligonucleotide
ggtgcgggtttagtagtcgcaaggaatatt

SEQ ID NO: 195322 - DNA, 30 bp, Artificial Sequence
  Synthetic oligonucleotide
ctgtgcgcctcagggatatgcaataatatt

SEQ ID NO: 195323 - DNA, 30 bp, Artificial Sequence
  Synthetic oligonucleotide
cgctaagtggcagaacgcaaccataatatt

SEQ ID NO: 195324 - DNA, 30 bp, Artificial Sequence
  Synthetic oligonucleotide
gtgttaaacggcgctacttggagtaatatt

SEQ ID NO: 195325 - DNA, 30 bp, Artificial Sequence
  Synthetic oligonucleotide
tgacctagtaatcgcgagagccgtaatatt

SEQ ID NO: 195326 - DNA, 30 bp, Artificial Sequence
  Synthetic oligonucleotide
gcatagtccatcgttagctgcaagcatatt

SEQ ID NO: 195327 - DNA, 30 bp, Artificial Sequence
  Synthetic oligonucleotide
acgtgttacggttctgggtgtcggcatatt

SEQ ID NO: 195328 - DNA, 30 bp, Artificial Sequence
  Synthetic oligonucleotide
gcacgaagtggatcaaaaacatatcatatt

SEQ ID NO: 195329 - DNA, 30 bp, Artificial Sequence
  Synthetic oligonucleotide
acgtcgccggatacaaggagtcgtcatatt

SEQ ID NO: 195330 - DNA, 30 bp, Artificial Sequence
  Synthetic oligonucleotide
tctggcatagcaatgggcctcggcgatatt

SEQ ID NO: 195331 - DNA, 30 bp, Artificial Sequence
  Synthetic oligonucleotide
tgctccatagggagctgctaaccggatatt

SEQ ID NO: 195332 - DNA, 30 bp, Artificial Sequence
  Synthetic oligonucleotide
agaaggacctctgcgccgtcgccctatatt

SEQ ID NO: 195333 - DNA, 30 bp, Artificial Sequence
  Synthetic oligonucleotide
gctgtccaggagtgtagaatctagtatatt

SEQ ID NO: 195334 - DNA, 30 bp, Artificial Sequence
  Synthetic oligonucleotide
cgcggggagtgcacctaagagatgtatatt

SEQ ID NO: 195335 - DNA, 30 bp, Artificial Sequence
  Synthetic oligonucleotide
tggagtatagcagacatgtggacgactatt

SEQ ID NO: 195336 - DNA, 30 bp, Artificial Sequence
  Synthetic oligonucleotide
tatcaagatggagaccgtcagcctactatt

SEQ ID NO: 195337 - DNA, 30 bp, Artificial Sequence
  Synthetic oligonucleotide
aatgacacgttccttagataaagcgctatt

SEQ ID NO: 195338 - DNA, 30 bp, Artificial Sequence
  Synthetic oligonucleotide
tactgcaagatcaggcatcgatatgctatt

SEQ ID NO: 195339 - DNA, 30 bp, Artificial Sequence
  Synthetic oligonucleotide
actcatctcttcctaaaaaacagctctatt

SEQ ID NO: 195340 - DNA, 30 bp, Artificial Sequence
  Synthetic oligonucleotide
gcagatggccggacagtatggacgagtatt

SEQ ID NO: 195341 - DNA, 30 bp, Artificial Sequence
  Synthetic oligonucleotide
aatgtcaacgggtttaattggcctagtatt

SEQ ID NO: 195342 - DNA, 30 bp, Artificial Sequence
  Synthetic oligonucleotide
acctgtaagtatgcattagcggtacgtatt

SEQ ID NO: 195343 - DNA, 30 bp, Artificial Sequence
  Synthetic oligonucleotide
ggaaaggcagataacctaactgcccgtatt

SEQ ID NO: 195344 - DNA, 30 bp, Artificial Sequence
  Synthetic oligonucleotide
taggcggtcgcgcacgggggggctcgtatt

SEQ ID NO: 195345 - DNA, 30 bp, Artificial Sequence
  Synthetic oligonucleotide
gcaaaaaactataagccgtgacgaggtatt

SEQ ID NO: 195346 - DNA, 30 bp, Artificial Sequence
  Synthetic oligonucleotide
tgagtcgttacatctaggaccataggtatt

SEQ ID NO: 195347 - DNA, 30 bp, Artificial Sequence
  Synthetic oligonucleotide
tcgaagccattgacactccatgcgggtatt

SEQ ID NO: 195348 - DNA, 30 bp, Artificial Sequence
  Synthetic oligonucleotide
ccaatcgcttctagcctatgcaatggtatt

SEQ ID NO: 195349 - DNA, 30 bp, Artificial Sequence
  Synthetic oligonucleotide
gtaatgtgtaatcaagaccaccttggtatt

SEQ ID NO: 195350 - DNA, 30 bp, Artificial Sequence
  Synthetic oligonucleotide
cgtgatgcaatgataggagggtaatgtatt

SEQ ID NO: 195351 - DNA, 30 bp, Artificial Sequence
  Synthetic oligonucleotide
taccgtatatgcgagatacctggctgtatt

SEQ ID NO: 195352 - DNA, 30 bp, Artificial Sequence
  Synthetic oligonucleotide
tcgatacctatgtagcacctgatctgtatt

SEQ ID NO: 195353 - DNA, 30 bp, Artificial Sequence
  Synthetic oligonucleotide
tagtccggatatcaccgctacaagtgtatt

SEQ ID NO: 195354 - DNA, 30 bp, Artificial Sequence
  Synthetic oligonucleotide
cgcgtaccacccagaggctaaaatattatt

SEQ ID NO: 195355 - DNA, 30 bp, Artificial Sequence
  Synthetic oligonucleotide
ttggactctctgaggaaaatggttattatt

SEQ ID NO: 195356 - DNA, 30 bp, Artificial Sequence
  Synthetic oligonucleotide
ggctcaagacgtatctggattgtctttatt

SEQ ID NO: 195357 - DNA, 30 bp, Artificial Sequence
  Synthetic oligonucleotide
caggtattcacaatacgccaaccttttatt

SEQ ID NO: 195358 - DNA, 26 bp, Artificial Sequence
  Synthetic oligonucleotide
aagcggaaatgatacgctccaaactt

SEQ ID NO: 195359 - DNA, 30 bp, Artificial Sequence
  Synthetic oligonucleotide
tcagcctgagggtggatgtggaggcaactt

SEQ ID NO: 195360 - DNA, 30 bp, Artificial Sequence
  Synthetic oligonucleotide
gtagtgatagggaaacgctcatggcaactt

SEQ ID NO: 195361 - DNA, 30 bp, Artificial Sequence
  Synthetic oligonucleotide
tcatgcaaagcggttacgccccctcaactt

SEQ ID NO: 195362 - DNA, 30 bp, Artificial Sequence
  Synthetic oligonucleotide
ggcgcgtaattcgggtacagcaaggaactt

SEQ ID NO: 195363 - DNA, 30 bp, Artificial Sequence
  Synthetic oligonucleotide
acggcgcactgtccagaatggcgggaactt

SEQ ID NO: 195364 - DNA, 30 bp, Artificial Sequence
  Synthetic oligonucleotide
agatacaagagccgacaagcccatgaactt

SEQ ID NO: 195365 - DNA, 30 bp, Artificial Sequence
  Synthetic oligonucleotide
cgggacctagtatttgaaaatagtgaactt

SEQ ID NO: 195366 - DNA, 30 bp, Artificial Sequence
  Synthetic oligonucleotide
gccggctagatattcttgaactgtgaactt

SEQ ID NO: 195367 - DNA, 30 bp, Artificial Sequence
  Synthetic oligonucleotide
ccgcccacaagcgcatgtaattgataactt

SEQ ID NO: 195368 - DNA, 30 bp, Artificial Sequence
  Synthetic oligonucleotide
tatggtagatgccaacgatgggagtaactt

SEQ ID NO: 195369 - DNA, 30 bp, Artificial Sequence
  Synthetic oligonucleotide
tgtagtctggtcgggaaatacacttaactt

SEQ ID NO: 195370 - DNA, 30 bp, Artificial Sequence
  Synthetic oligonucleotide
caagggaacatcgttgatggtcgttaactt

SEQ ID NO: 195371 - DNA, 30 bp, Artificial Sequence
  Synthetic oligonucleotide
ttatcagatggcatatgctttggttaactt

SEQ ID NO: 195372 - DNA, 30 bp, Artificial Sequence
  Synthetic oligonucleotide
aatgttgataaaataaactcgttaacactt

SEQ ID NO: 195373 - DNA, 30 bp, Artificial Sequence
  Synthetic oligonucleotide
ccctgccagcactcaggggagatcccactt

SEQ ID NO: 195374 - DNA, 30 bp, Artificial Sequence
  Synthetic oligonucleotide
cagataggaatctgatgattgctcccactt

SEQ ID NO: 195375 - DNA, 30 bp, Artificial Sequence
  Synthetic oligonucleotide
acatctccaccgatagggagggctccactt

SEQ ID NO: 195376 - DNA, 30 bp, Artificial Sequence
  Synthetic oligonucleotide
cggacggatccgggactctacagagcactt

SEQ ID NO: 195377 - DNA, 30 bp, Artificial Sequence
  Synthetic oligonucleotide
cgtagaaaggtgagacgagtgttagcactt

SEQ ID NO: 195378 - DNA, 30 bp, Artificial Sequence
  Synthetic oligonucleotide
gccgaataaatagatgaattcatatcactt

SEQ ID NO: 195379 - DNA, 30 bp, Artificial Sequence
  Synthetic oligonucleotide
tcggtgacaacacatcgtgcacagtcactt

SEQ ID NO: 195380 - DNA, 30 bp, Artificial Sequence
  Synthetic oligonucleotide
acttcagagggcggctcgctagggtcactt

SEQ ID NO: 195381 - DNA, 30 bp, Artificial Sequence
  Synthetic oligonucleotide
atacaacaaaagagtgcagccacttcactt

SEQ ID NO: 195382 - DNA, 30 bp, Artificial Sequence
  Synthetic oligonucleotide
gcactaggtgatcaaaagacttcttcactt

SEQ ID NO: 195383 - DNA, 30 bp, Artificial Sequence
  Synthetic oligonucleotide
tgctaaagaagggatagcatgtgaagactt

SEQ ID NO: 195384 - DNA, 30 bp, Artificial Sequence
  Synthetic oligonucleotide
atggagagctgtgatattgagttaagactt

SEQ ID NO: 195385 - DNA, 30 bp, Artificial Sequence
  Synthetic oligonucleotide
acctcgagggtgtacgattggtatagactt

SEQ ID NO: 195386 - DNA, 30 bp, Artificial Sequence
  Synthetic oligonucleotide
aggatcgcgcttccggatgacagaggactt

SEQ ID NO: 195387 - DNA, 30 bp, Artificial Sequence
  Synthetic oligonucleotide
ggccgaacgtttaatcgtgaaaggggactt

SEQ ID NO: 195388 - DNA, 30 bp, Artificial Sequence
  Synthetic oligonucleotide
gctacgggagaatgatacgcaattggactt

SEQ ID NO: 195389 - DNA, 30 bp, Artificial Sequence
  Synthetic oligonucleotide
acgctatatttatcgggagacgcgtgactt

SEQ ID NO: 195390 - DNA, 30 bp, Artificial Sequence
  Synthetic oligonucleotide
aatgtgaaagctattgccttttcttgactt

SEQ ID NO: 195391 - DNA, 29 bp, Artificial Sequence
  Synthetic oligonucleotide
aggtaacgttaatccaggacgaaatactt

SEQ ID NO: 195392 - DNA, 30 bp, Artificial Sequence
  Synthetic oligonucleotide
agactagggatgaagggatatgaaatactt

SEQ ID NO: 195393 - DNA, 30 bp, Artificial Sequence
  Synthetic oligonucleotide
tcggttgtcacgacatcaggctaaatactt

SEQ ID NO: 195394 - DNA, 30 bp, Artificial Sequence
  Synthetic oligonucleotide
cctggccaaaataaggagtttaagatactt

SEQ ID NO: 195395 - DNA, 30 bp, Artificial Sequence
  Synthetic oligonucleotide
ggcattcgacgtgtactaccaggtatactt

SEQ ID NO: 195396 - DNA, 30 bp, Artificial Sequence
  Synthetic oligonucleotide
tcggtaaaattcccgcgcgagaggctactt

SEQ ID NO: 195397 - DNA, 30 bp, Artificial Sequence
  Synthetic oligonucleotide
ggctcgcagttttcgaccgaatctctactt

SEQ ID NO: 195398 - DNA, 30 bp, Artificial Sequence
  Synthetic oligonucleotide
tgtgccggccaagattaatccggagtactt

SEQ ID NO: 195399 - DNA, 30 bp, Artificial Sequence
  Synthetic oligonucleotide
aaccagtcggatagtaacacgcgggtactt

SEQ ID NO: 195400 - DNA, 30 bp, Artificial Sequence
  Synthetic oligonucleotide
taaggagggaccgcgaatgttggggtactt

SEQ ID NO: 195401 - DNA, 30 bp, Artificial Sequence
  Synthetic oligonucleotide
cgatcgacaggagagagtcactgtttactt

SEQ ID NO: 195402 - DNA, 30 bp, Artificial Sequence
  Synthetic oligonucleotide
caagcatgcggcaacgcagatcagaacctt

SEQ ID NO: 195403 - DNA, 31 bp, Artificial Sequence
  Synthetic oligonucleotide
ttgcgaagccatggctatgacaccgaacctt

SEQ ID NO: 195404 - DNA, 30 bp, Artificial Sequence
  Synthetic oligonucleotide
tgatgtatggctcgacggatgttgcacctt

SEQ ID NO: 195405 - DNA, 30 bp, Artificial Sequence
  Synthetic oligonucleotide
aagtcagagacacgtgatatgtccgacctt

SEQ ID NO: 195406 - DNA, 30 bp, Artificial Sequence
  Synthetic oligonucleotide
ttggcgaatcgagaaaaaacgatcgacctt

SEQ ID NO: 195407 - DNA, 30 bp, Artificial Sequence
  Synthetic oligonucleotide
gtctcattccatcacagccacacggacctt

SEQ ID NO: 195408 - DNA, 30 bp, Artificial Sequence
  Synthetic oligonucleotide
tcggacggcccggtaacaatcatggacctt

SEQ ID NO: 195409 - DNA, 30 bp, Artificial Sequence
  Synthetic oligonucleotide
gatgaaaagcgaccgcgtgcagctgacctt

SEQ ID NO: 195410 - DNA, 30 bp, Artificial Sequence
  Synthetic oligonucleotide
atagacctgaggacattgtaaattgacctt

SEQ ID NO: 195411 - DNA, 30 bp, Artificial Sequence
  Synthetic oligonucleotide
agcttacctagcagcggatattttgacctt

SEQ ID NO: 195412 - DNA, 30 bp, Artificial Sequence
  Synthetic oligonucleotide
tcaaacatggtaagatcactccagtacctt

SEQ ID NO: 195413 - DNA, 30 bp, Artificial Sequence
  Synthetic oligonucleotide
atgagatacccctagacctatcggtacctt

SEQ ID NO: 195414 - DNA, 30 bp, Artificial Sequence
  Synthetic oligonucleotide
acgacaccgcgaaactgtttgcgaaccctt

SEQ ID NO: 195415 - DNA, 30 bp, Artificial Sequence
  Synthetic oligonucleotide
cctggtagcatcacgaatatgatacccctt

SEQ ID NO: 195416 - DNA, 30 bp, Artificial Sequence
  Synthetic oligonucleotide
aaggcatatttgtttgtcaatttccccctt

SEQ ID NO: 195417 - DNA, 30 bp, Artificial Sequence
  Synthetic oligonucleotide
ttcggccgtttcccgagccgagcagccctt

SEQ ID NO: 195418 - DNA, 30 bp, Artificial Sequence
  Synthetic oligonucleotide
accgagcatgcggtacaataagttgccctt

SEQ ID NO: 195419 - DNA, 30 bp, Artificial Sequence
  Synthetic oligonucleotide
cctggtcgacggccgcgactccaatccctt

SEQ ID NO: 195420 - DNA, 30 bp, Artificial Sequence
  Synthetic oligonucleotide
tgagcttgaaagctcaagtgttttagcctt

SEQ ID NO: 195421 - DNA, 30 bp, Artificial Sequence
  Synthetic oligonucleotide
gtaaagcggggtgtagggggtttccgcctt

SEQ ID NO: 195422 - DNA, 30 bp, Artificial Sequence
  Synthetic oligonucleotide
ttatggtcaatgaactgtctaaagcgcctt

SEQ ID NO: 195423 - DNA, 30 bp, Artificial Sequence
  Synthetic oligonucleotide
aagcgcagtaagtgaccggtgcctcgcctt

SEQ ID NO: 195424 - DNA, 30 bp, Artificial Sequence
  Synthetic oligonucleotide
cgaatagactagggttcgagtcgtcgcctt

SEQ ID NO: 195425 - DNA, 30 bp, Artificial Sequence
  Synthetic oligonucleotide
ataacaatgtccagtgggacaagcggcctt

SEQ ID NO: 195426 - DNA, 30 bp, Artificial Sequence
  Synthetic oligonucleotide
taacggtttatggggtacctgcaatgcctt

SEQ ID NO: 195427 - DNA, 30 bp, Artificial Sequence
  Synthetic oligonucleotide
caggaaacaaaacattgttgcatatgcctt

SEQ ID NO: 195428 - DNA, 30 bp, Artificial Sequence
  Synthetic oligonucleotide
agacctcgtggttggcggagtggaatcctt

SEQ ID NO: 195429 - DNA, 30 bp, Artificial Sequence
  Synthetic oligonucleotide
aagaccatgacttgagagggggcgatcctt

SEQ ID NO: 195430 - DNA, 30 bp, Artificial Sequence
  Synthetic oligonucleotide
gaggtgcaaggaaggtagtcactgatcctt

SEQ ID NO: 195431 - DNA, 30 bp, Artificial Sequence
  Synthetic oligonucleotide
tagtaatagaaatccgctcagttcctcctt

SEQ ID NO: 195432 - DNA, 30 bp, Artificial Sequence
  Synthetic oligonucleotide
ctagggtgagagtacgcaagaaaagtcctt

SEQ ID NO: 195433 - DNA, 30 bp, Artificial Sequence
  Synthetic oligonucleotide
ggcccaacagacttcctacgcggcgtcctt

SEQ ID NO: 195434 - DNA, 30 bp, Artificial Sequence
  Synthetic oligonucleotide
ggtaagtccagaaacaccattggcgtcctt

SEQ ID NO: 195435 - DNA, 30 bp, Artificial Sequence
  Synthetic oligonucleotide
tgcataagtaaattaatgacccaaaagctt

SEQ ID NO: 195436 - DNA, 30 bp, Artificial Sequence
  Synthetic oligonucleotide
taacaatgaatcgtaccaacggcgaagctt

SEQ ID NO: 195437 - DNA, 30 bp, Artificial Sequence
  Synthetic oligonucleotide
gtgaaagaagataactacaacaggaagctt

SEQ ID NO: 195438 - DNA, 30 bp, Artificial Sequence
  Synthetic oligonucleotide
ggcatctaggggtaaactgacgttaagctt

SEQ ID NO: 195439 - DNA, 30 bp, Artificial Sequence
  Synthetic oligonucleotide
gaaaaaggcaccgggggcaccagccagctt

SEQ ID NO: 195440 - DNA, 30 bp, Artificial Sequence
  Synthetic oligonucleotide
tattgtatccacgatcaagaaaatgagctt

SEQ ID NO: 195441 - DNA, 30 bp, Artificial Sequence
  Synthetic oligonucleotide
taagtatcggtgattaaaccaggatagctt

SEQ ID NO: 195442 - DNA, 30 bp, Artificial Sequence
  Synthetic oligonucleotide
aagaggtcgcgcaatcattaccagtagctt

SEQ ID NO: 195443 - DNA, 30 bp, Artificial Sequence
  Synthetic oligonucleotide
ttggagtgtatgctttccgctaggtagctt

SEQ ID NO: 195444 - DNA, 30 bp, Artificial Sequence
  Synthetic oligonucleotide
ttagcatagttaggccctcaagcttagctt

SEQ ID NO: 195445 - DNA, 30 bp, Artificial Sequence
  Synthetic oligonucleotide
catcatgagtgttcagctagggacacgctt

SEQ ID NO: 195446 - DNA, 30 bp, Artificial Sequence
  Synthetic oligonucleotide
gacagggcgggaccaagtactgccacgctt

SEQ ID NO: 195447 - DNA, 30 bp, Artificial Sequence
  Synthetic oligonucleotide
gtgggtgccctaatacctgcagttacgctt

SEQ ID NO: 195448 - DNA, 30 bp, Artificial Sequence
  Synthetic oligonucleotide
tagagggacaacggatgggcatcaccgctt

SEQ ID NO: 195449 - DNA, 30 bp, Artificial Sequence
  Synthetic oligonucleotide
attgcatttggggactagatgggcccgctt

SEQ ID NO: 195450 - DNA, 30 bp, Artificial Sequence
  Synthetic oligonucleotide
tgttaacatcgcgaatgacctggcccgctt

SEQ ID NO: 195451 - DNA, 30 bp, Artificial Sequence
  Synthetic oligonucleotide
gcgccataacggataaataaatcggcgctt

SEQ ID NO: 195452 - DNA, 30 bp, Artificial Sequence
  Synthetic oligonucleotide
aggtcaatagcagtgcgttggaaatcgctt

SEQ ID NO: 195453 - DNA, 30 bp, Artificial Sequence
  Synthetic oligonucleotide
ggtacgtatttaatcgatagcagctcgctt

SEQ ID NO: 195454 - DNA, 30 bp, Artificial Sequence
  Synthetic oligonucleotide
cgttatatgcgagggacactgggctcgctt

SEQ ID NO: 195455 - DNA, 30 bp, Artificial Sequence
  Synthetic oligonucleotide
tagtcgctcccaagggagaattggaggctt

SEQ ID NO: 195456 - DNA, 30 bp, Artificial Sequence
  Synthetic oligonucleotide
agaatccgaacaaatggaacggcacggctt

SEQ ID NO: 195457 - DNA, 30 bp, Artificial Sequence
  Synthetic oligonucleotide
acactgcatatgtcgggacacagacggctt

SEQ ID NO: 195458 - DNA, 30 bp, Artificial Sequence
  Synthetic oligonucleotide
agtattcgtcaggatcgaaggtgacggctt

SEQ ID NO: 195459 - DNA, 30 bp, Artificial Sequence
  Synthetic oligonucleotide
tgagaagaagctaacttaccggaccggctt

SEQ ID NO: 195460 - DNA, 30 bp, Artificial Sequence
  Synthetic oligonucleotide
cacgttcctaacgaaagaatctaagggctt

SEQ ID NO: 195461 - DNA, 30 bp, Artificial Sequence
  Synthetic oligonucleotide
tatcacgtcgcgtagacacaagtggggctt

SEQ ID NO: 195462 - DNA, 30 bp, Artificial Sequence
  Synthetic oligonucleotide
tagtccttattcgaacatgtcgaatggctt

SEQ ID NO: 195463 - DNA, 30 bp, Artificial Sequence
  Synthetic oligonucleotide
taagtaaggcattgaaacatatgctggctt

SEQ ID NO: 195464 - DNA, 30 bp, Artificial Sequence
  Synthetic oligonucleotide
cctcggaatgtaggctatctaatgtggctt

SEQ ID NO: 195465 - DNA, 30 bp, Artificial Sequence
  Synthetic oligonucleotide
tgggtctaatttcgaattgtgagttggctt

SEQ ID NO: 195466 - DNA, 30 bp, Artificial Sequence
  Synthetic oligonucleotide
acggtccgaatgagaacaggtttaatgctt

SEQ ID NO: 195467 - DNA, 30 bp, Artificial Sequence
  Synthetic oligonucleotide
gcattgaatcggggttaattacacatgctt

SEQ ID NO: 195468 - DNA, 30 bp, Artificial Sequence
  Synthetic oligonucleotide
gggtcaatataccgaccataaagactgctt

SEQ ID NO: 195469 - DNA, 30 bp, Artificial Sequence
  Synthetic oligonucleotide
ctgagatttcgactggtgtcaggcctgctt

SEQ ID NO: 195470 - DNA, 30 bp, Artificial Sequence
  Synthetic oligonucleotide
ccgtgactactggtgcacaagtttctgctt

SEQ ID NO: 195471 - DNA, 30 bp, Artificial Sequence
  Synthetic oligonucleotide
gcgcgtccgtgaggaggtcgactagtgctt

SEQ ID NO: 195472 - DNA, 30 bp, Artificial Sequence
  Synthetic oligonucleotide
cgttcaggagaacttctagcccgtgtgctt

SEQ ID NO: 195473 - DNA, 30 bp, Artificial Sequence
  Synthetic oligonucleotide
ggctcacgtacttgatcgtgtacgttgctt

SEQ ID NO: 195474 - DNA, 30 bp, Artificial Sequence
  Synthetic oligonucleotide
tcttaaactgaaaatcctgctgatttgctt

SEQ ID NO: 195475 - DNA, 30 bp, Artificial Sequence
  Synthetic oligonucleotide
ctgggtaagaaagcgaaacccaaaaatctt

SEQ ID NO: 195476 - DNA, 30 bp, Artificial Sequence
  Synthetic oligonucleotide
tcgcgacacaattggccattaagcaatctt

SEQ ID NO: 195477 - DNA, 30 bp, Artificial Sequence
  Synthetic oligonucleotide
ggaaacttccaggatgattgaaagaatctt

SEQ ID NO: 195478 - DNA, 30 bp, Artificial Sequence
  Synthetic oligonucleotide
ggcatctctccacgtcagtaagggaatctt

SEQ ID NO: 195479 - DNA, 30 bp, Artificial Sequence
  Synthetic oligonucleotide
ttaggcgaggatggactttattgacatctt

SEQ ID NO: 195480 - DNA, 30 bp, Artificial Sequence
  Synthetic oligonucleotide
atgagctaaatcttggtatgaggggatctt

SEQ ID NO: 195481 - DNA, 30 bp, Artificial Sequence
  Synthetic oligonucleotide
ggggacctaacaagctgaagaaatgatctt

SEQ ID NO: 195482 - DNA, 30 bp, Artificial Sequence
  Synthetic oligonucleotide
gtgcggatttacataatccagcggtatctt

SEQ ID NO: 195483 - DNA, 30 bp, Artificial Sequence
  Synthetic oligonucleotide
gaccgcgtgtggatccgataggcttatctt

SEQ ID NO: 195484 - DNA, 30 bp, Artificial Sequence
  Synthetic oligonucleotide
ccaataatccaggtttggcgcccgactctt

SEQ ID NO: 195485 - DNA, 30 bp, Artificial Sequence
  Synthetic oligonucleotide
gctctcgcataggtctagtccggtactctt

SEQ ID NO: 195486 - DNA, 30 bp, Artificial Sequence
  Synthetic oligonucleotide
gtccggctaggacacaaggcagcgcctctt

SEQ ID NO: 195487 - DNA, 30 bp, Artificial Sequence
  Synthetic oligonucleotide
ggcaacagcgatcggatcgcctaagctctt

SEQ ID NO: 195488 - DNA, 30 bp, Artificial Sequence
  Synthetic oligonucleotide
cgagtcgacggcaatctggacttcgctctt

SEQ ID NO: 195489 - DNA, 29 bp, Artificial Sequence
  Synthetic oligonucleotide
ggtgttacgacacgatcctctaatctctt

SEQ ID NO: 195490 - DNA, 30 bp, Artificial Sequence
  Synthetic oligonucleotide
tgaaaggcggtgcggagtcacctatctctt

SEQ ID NO: 195491 - DNA, 30 bp, Artificial Sequence
  Synthetic oligonucleotide
cgctgactagtttcgggtctggtatctctt

SEQ ID NO: 195492 - DNA, 30 bp, Artificial Sequence
  Synthetic oligonucleotide
acaaatggactagaccttgctaccagtctt

SEQ ID NO: 195493 - DNA, 30 bp, Artificial Sequence
  Synthetic oligonucleotide
agtcaaaggggtaaatttcggttcagtctt

SEQ ID NO: 195494 - DNA, 30 bp, Artificial Sequence
  Synthetic oligonucleotide
ctaagggaactaaacacactggagagtctt

SEQ ID NO: 195495 - DNA, 30 bp, Artificial Sequence
  Synthetic oligonucleotide
tacatgaattaatttcggcaatctagtctt

SEQ ID NO: 195496 - DNA, 30 bp, Artificial Sequence
  Synthetic oligonucleotide
ggacaaaggtcaggggctcaaaatcgtctt

SEQ ID NO: 195497 - DNA, 30 bp, Artificial Sequence
  Synthetic oligonucleotide
ctaatgtgcttgcgaatagaatatcgtctt

SEQ ID NO: 195498 - DNA, 30 bp, Artificial Sequence
  Synthetic oligonucleotide
gtacggttagctcaatcttcaccgggtctt

SEQ ID NO: 195499 - DNA, 30 bp, Artificial Sequence
  Synthetic oligonucleotide
ttgatcggtagtgcaaaactgtatggtctt

SEQ ID NO: 195500 - DNA, 30 bp, Artificial Sequence
  Synthetic oligonucleotide
ggcatagagtgagggggtcggtaatgtctt

SEQ ID NO: 195501 - DNA, 30 bp, Artificial Sequence
  Synthetic oligonucleotide
agtgaaagaatagtaagagccttatgtctt

SEQ ID NO: 195502 - DNA, 30 bp, Artificial Sequence
  Synthetic oligonucleotide
tcgattggtcaatgggttagcctctgtctt

SEQ ID NO: 195503 - DNA, 30 bp, Artificial Sequence
  Synthetic oligonucleotide
tatcatttagggtgctaggggacgtgtctt

SEQ ID NO: 195504 - DNA, 30 bp, Artificial Sequence
  Synthetic oligonucleotide
ggccggggtcctgacgatctaatttgtctt

SEQ ID NO: 195505 - DNA, 30 bp, Artificial Sequence
  Synthetic oligonucleotide
gtggaggagtgcatgaatgacaaagttctt

SEQ ID NO: 195506 - DNA, 30 bp, Artificial Sequence
  Synthetic oligonucleotide
gccaagttttccagaacggccagagttctt

SEQ ID NO: 195507 - DNA, 30 bp, Artificial Sequence
  Synthetic oligonucleotide
tggatgagagcctgattataagtggttctt

SEQ ID NO: 195508 - DNA, 30 bp, Artificial Sequence
  Synthetic oligonucleotide
ttggctcgggaaaagttgcttagatttctt

SEQ ID NO: 195509 - DNA, 30 bp, Artificial Sequence
  Synthetic oligonucleotide
tcatgggcgccgattatcatcaactttctt

SEQ ID NO: 195510 - DNA, 30 bp, Artificial Sequence
  Synthetic oligonucleotide
gatagcgagggtgctggtttattctttctt

SEQ ID NO: 195511 - DNA, 30 bp, Artificial Sequence
  Synthetic oligonucleotide
gtagattttgggtgtactgtaaccaaagtt

SEQ ID NO: 195512 - DNA, 30 bp, Artificial Sequence
  Synthetic oligonucleotide
agagccaggtattaccttatccccaaagtt

SEQ ID NO: 195513 - DNA, 30 bp, Artificial Sequence
  Synthetic oligonucleotide
gccacctaactaagcgttccattcaaagtt

SEQ ID NO: 195514 - DNA, 30 bp, Artificial Sequence
  Synthetic oligonucleotide
gaccaaagagcatggcagctattcaaagtt

SEQ ID NO: 195515 - DNA, 30 bp, Artificial Sequence
  Synthetic oligonucleotide
cgcaaccctcatatacaggaaaagaaagtt

SEQ ID NO: 195516 - DNA, 30 bp, Artificial Sequence
  Synthetic oligonucleotide
ggtttggacgttccgcgcaaagataaagtt

SEQ ID NO: 195517 - DNA, 30 bp, Artificial Sequence
  Synthetic oligonucleotide
aaggccaactccgcctattgagataaagtt

SEQ ID NO: 195518 - DNA, 30 bp, Artificial Sequence
  Synthetic oligonucleotide
acaacattggtcactggttcttataaagtt

SEQ ID NO: 195519 - DNA, 30 bp, Artificial Sequence
  Synthetic oligonucleotide
acaggagaatacgtgtagacttcacaagtt

SEQ ID NO: 195520 - DNA, 30 bp, Artificial Sequence
  Synthetic oligonucleotide
acgacaatagtgtgcagagtttgccaagtt

SEQ ID NO: 195521 - DNA, 30 bp, Artificial Sequence
  Synthetic oligonucleotide
gtcgacagcggaaagcgagaaactcaagtt

SEQ ID NO: 195522 - DNA, 30 bp, Artificial Sequence
  Synthetic oligonucleotide
gcaagagacatgactccaatagacgaagtt

SEQ ID NO: 195523 - DNA, 30 bp, Artificial Sequence
  Synthetic oligonucleotide
ccctgaaaacctatgagtcttaccgaagtt

SEQ ID NO: 195524 - DNA, 30 bp, Artificial Sequence
  Synthetic oligonucleotide
tagaccaaggcgctaaactagtgctaagtt

SEQ ID NO: 195525 - DNA, 30 bp, Artificial Sequence
  Synthetic oligonucleotide
agtggacactgagtgtagagctgcacagtt

SEQ ID NO: 195526 - DNA, 30 bp, Artificial Sequence
  Synthetic oligonucleotide
cctcggaggttatttcacaactaaccagtt

SEQ ID NO: 195527 - DNA, 30 bp, Artificial Sequence
  Synthetic oligonucleotide
cctaaatcattgtgtgaggccaccccagtt

SEQ ID NO: 195528 - DNA, 30 bp, Artificial Sequence
  Synthetic oligonucleotide
agtgcctcgtccgtgtagtgtaccccagtt

SEQ ID NO: 195529 - DNA, 30 bp, Artificial Sequence
  Synthetic oligonucleotide
cccggggtgtgggaacctaaatagccagtt

SEQ ID NO: 195530 - DNA, 30 bp, Artificial Sequence
  Synthetic oligonucleotide
agagcagggagcattagcctttagccagtt

SEQ ID NO: 195531 - DNA, 30 bp, Artificial Sequence
  Synthetic oligonucleotide
ttgctatttgtaacctgagtgaatccagtt

SEQ ID NO: 195532 - DNA, 30 bp, Artificial Sequence
  Synthetic oligonucleotide
accacaatgacagtgcacaacgttccagtt

SEQ ID NO: 195533 - DNA, 30 bp, Artificial Sequence
  Synthetic oligonucleotide
caccggggaataggacccaaaacagcagtt

SEQ ID NO: 195534 - DNA, 30 bp, Artificial Sequence
  Synthetic oligonucleotide
taggtacgaaaacagcgcagctaggcagtt

SEQ ID NO: 195535 - DNA, 30 bp, Artificial Sequence
  Synthetic oligonucleotide
tgaactggtcgactcgagtatagggcagtt

SEQ ID NO: 195536 - DNA, 29 bp, Artificial Sequence
  Synthetic oligonucleotide
tgatgcgatggataagtcaacaatcagtt

SEQ ID NO: 195537 - DNA, 30 bp, Artificial Sequence
  Synthetic oligonucleotide
caatgtcgttcgccatgcacgacatcagtt

SEQ ID NO: 195538 - DNA, 30 bp, Artificial Sequence
  Synthetic oligonucleotide
cggggtagggatgttagcccctgctcagtt

SEQ ID NO: 195539 - DNA, 30 bp, Artificial Sequence
  Synthetic oligonucleotide
taatgcgagtaatttgtacatgattcagtt

SEQ ID NO: 195540 - DNA, 30 bp, Artificial Sequence
  Synthetic oligonucleotide
gtttggagaaaaaactgacagatcagagtt

SEQ ID NO: 195541 - DNA, 30 bp, Artificial Sequence
  Synthetic oligonucleotide
attgtatccttggaatgtcttatgagagtt

SEQ ID NO: 195542 - DNA, 30 bp, Artificial Sequence
  Synthetic oligonucleotide
tggagacctgtaagcgaactttttagagtt

SEQ ID NO: 195543 - DNA, 30 bp, Artificial Sequence
  Synthetic oligonucleotide
ataagcgtgtctcgatataagacacgagtt

SEQ ID NO: 195544 - DNA, 30 bp, Artificial Sequence
  Synthetic oligonucleotide
catgtgtgacgcaccgaataggtacgagtt

SEQ ID NO: 195545 - DNA, 30 bp, Artificial Sequence
  Synthetic oligonucleotide
tatggggctcgacgaaagggagctcgagtt

SEQ ID NO: 195546 - DNA, 30 bp, Artificial Sequence
  Synthetic oligonucleotide
gccatagagtatcctggtggcataggagtt

SEQ ID NO: 195547 - DNA, 30 bp, Artificial Sequence
  Synthetic oligonucleotide
agggtccatcgtaagttccaatacggagtt

SEQ ID NO: 195548 - DNA, 30 bp, Artificial Sequence
  Synthetic oligonucleotide
ttgggacttccaatgaccatcaggggagtt

SEQ ID NO: 195549 - DNA, 30 bp, Artificial Sequence
  Synthetic oligonucleotide
ggatgaatttggaaaagtacagcatgagtt

SEQ ID NO: 195550 - DNA, 30 bp, Artificial Sequence
  Synthetic oligonucleotide
acaaagagtccatgctacttcgtatgagtt

SEQ ID NO: 195551 - DNA, 30 bp, Artificial Sequence
  Synthetic oligonucleotide
gtaaaaaggtctgttgactgcgagtgagtt

SEQ ID NO: 195552 - DNA, 30 bp, Artificial Sequence
  Synthetic oligonucleotide
gatcatgttccaagtgagatacggtgagtt

SEQ ID NO: 195553 - DNA, 30 bp, Artificial Sequence
  Synthetic oligonucleotide
cactaaaacatacttaggcagtattgagtt

SEQ ID NO: 195554 - DNA, 30 bp, Artificial Sequence
  Synthetic oligonucleotide
tatgtttaacgtttggaaatgagaatagtt

SEQ ID NO: 195555 - DNA, 30 bp, Artificial Sequence
  Synthetic oligonucleotide
caagtagcgatataggctatgactatagtt

SEQ ID NO: 195556 - DNA, 30 bp, Artificial Sequence
  Synthetic oligonucleotide
ggggtacgttaatgaagaattatcctagtt

SEQ ID NO: 195557 - DNA, 30 bp, Artificial Sequence
  Synthetic oligonucleotide
gcgtgtgttccttattgcagtgaagtagtt

SEQ ID NO: 195558 - DNA, 30 bp, Artificial Sequence
  Synthetic oligonucleotide
tgggatcaaagaacggaagtaaacgtagtt

SEQ ID NO: 195559 - DNA, 30 bp, Artificial Sequence
  Synthetic oligonucleotide
aaggtatagaaagggaaggaagccgtagtt

SEQ ID NO: 195560 - DNA, 30 bp, Artificial Sequence
  Synthetic oligonucleotide
atcacggttgattccatcacttaggtagtt

SEQ ID NO: 195561 - DNA, 30 bp, Artificial Sequence
  Synthetic oligonucleotide
cgcgtagagtgttagagcgctagggtagtt

SEQ ID NO: 195562 - DNA, 30 bp, Artificial Sequence
  Synthetic oligonucleotide
atagcgagaaatgggacattctatgtagtt

SEQ ID NO: 195563 - DNA, 30 bp, Artificial Sequence
  Synthetic oligonucleotide
gaggatatgatatattcaatgactgtagtt

SEQ ID NO: 195564 - DNA, 30 bp, Artificial Sequence
  Synthetic oligonucleotide
acatggggggcggctcggagaacattagtt

SEQ ID NO: 195565 - DNA, 30 bp, Artificial Sequence
  Synthetic oligonucleotide
gtcggcatcacgcaatgtccccctttagtt

SEQ ID NO: 195566 - DNA, 30 bp, Artificial Sequence
  Synthetic oligonucleotide
cagtaccgagtttgattagcggccaacgtt

SEQ ID NO: 195567 - DNA, 30 bp, Artificial Sequence
  Synthetic oligonucleotide
actggtagggttccaatacggctgaacgtt

SEQ ID NO: 195568 - DNA, 30 bp, Artificial Sequence
  Synthetic oligonucleotide
caccgaaacgtccccacgaaatctaacgtt

SEQ ID NO: 195569 - DNA, 30 bp, Artificial Sequence
  Synthetic oligonucleotide
acgcggaatagatgcacgttgagtcacgtt

SEQ ID NO: 195570 - DNA, 30 bp, Artificial Sequence
  Synthetic oligonucleotide
catgggaccttgggggcgctgggagacgtt

SEQ ID NO: 195571 - DNA, 30 bp, Artificial Sequence
  Synthetic oligonucleotide
gggtataaaaagacgtactgggtagacgtt

SEQ ID NO: 195572 - DNA, 30 bp, Artificial Sequence
  Synthetic oligonucleotide
tttcggggtgatgtcgttagattggacgtt

SEQ ID NO: 195573 - DNA, 30 bp, Artificial Sequence
  Synthetic oligonucleotide
tccttcaaggatcgaaagtatgatgacgtt

SEQ ID NO: 195574 - DNA, 30 bp, Artificial Sequence
  Synthetic oligonucleotide
cgtagggtaactaccgctatcggatacgtt

SEQ ID NO: 195575 - DNA, 30 bp, Artificial Sequence
  Synthetic oligonucleotide
gggcggaccattttgtatcgaacctacgtt

SEQ ID NO: 195576 - DNA, 30 bp, Artificial Sequence
  Synthetic oligonucleotide
accgtggagtgtccgcggccatggaccgtt

SEQ ID NO: 195577 - DNA, 30 bp, Artificial Sequence
  Synthetic oligonucleotide
tcgcccattcatcccgatccaattcccgtt

SEQ ID NO: 195578 - DNA, 30 bp, Artificial Sequence
  Synthetic oligonucleotide
agcaataggtgtgatggttatgtcgccgtt

SEQ ID NO: 195579 - DNA, 30 bp, Artificial Sequence
  Synthetic oligonucleotide
gttaaaccgtgcatcgagtataggtccgtt

SEQ ID NO: 195580 - DNA, 30 bp, Artificial Sequence
  Synthetic oligonucleotide
ccttcggatatcagctcccgaagaagcgtt

SEQ ID NO: 195581 - DNA, 30 bp, Artificial Sequence
  Synthetic oligonucleotide
attcgatcatcgactactgggaagagcgtt

SEQ ID NO: 195582 - DNA, 30 bp, Artificial Sequence
  Synthetic oligonucleotide
ttgcaaatccgaagctcgtaagctagcgtt

SEQ ID NO: 195583 - DNA, 30 bp, Artificial Sequence
  Synthetic oligonucleotide
ggagatcgatcagactagatgtctagcgtt

SEQ ID NO: 195584 - DNA, 30 bp, Artificial Sequence
  Synthetic oligonucleotide
acgctctgagcgttatatgttcgtagcgtt

SEQ ID NO: 195585 - DNA, 30 bp, Artificial Sequence
  Synthetic oligonucleotide
aaaggggggtaagctttatagagccgcgtt

SEQ ID NO: 195586 - DNA, 30 bp, Artificial Sequence
  Synthetic oligonucleotide
cggtacactttcaatccgtgagagcgcgtt

SEQ ID NO: 195587 - DNA, 30 bp, Artificial Sequence
  Synthetic oligonucleotide
cgtcctatttgaagccaaaaagtgcgcgtt

SEQ ID NO: 195588 - DNA, 30 bp, Artificial Sequence
  Synthetic oligonucleotide
ggtagtacgacatgtaaccatagcggcgtt

SEQ ID NO: 195589 - DNA, 30 bp, Artificial Sequence
  Synthetic oligonucleotide
tgtcagccgttaggggaacaggctggcgtt

SEQ ID NO: 195590 - DNA, 30 bp, Artificial Sequence
  Synthetic oligonucleotide
tcgcggctccagtcgccgtatgcatgcgtt

SEQ ID NO: 195591 - DNA, 30 bp, Artificial Sequence
  Synthetic oligonucleotide
cctggataaacttagattaattcttgcgtt

SEQ ID NO: 195592 - DNA, 30 bp, Artificial Sequence
  Synthetic oligonucleotide
tacgcggagagcccgtggtagtgaatcgtt

SEQ ID NO: 195593 - DNA, 30 bp, Artificial Sequence
  Synthetic oligonucleotide
acagtctcctgaaatcaggtcaacatcgtt

SEQ ID NO: 195594 - DNA, 30 bp, Artificial Sequence
  Synthetic oligonucleotide
aggatgctcgtcgagactatgactatcgtt

SEQ ID NO: 195595 - DNA, 30 bp, Artificial Sequence
  Synthetic oligonucleotide
agaagcttcaggtcttggagctctatcgtt

SEQ ID NO: 195596 - DNA, 30 bp, Artificial Sequence
  Synthetic oligonucleotide
cgctgaagttacccgcatcataatctcgtt

SEQ ID NO: 195597 - DNA, 30 bp, Artificial Sequence
  Synthetic oligonucleotide
gcggtgcatgagaaccgcacacttctcgtt

SEQ ID NO: 195598 - DNA, 30 bp, Artificial Sequence
  Synthetic oligonucleotide
ctacccgtaaggcaacatgacagagtcgtt

SEQ ID NO: 195599 - DNA, 30 bp, Artificial Sequence
  Synthetic oligonucleotide
tagctgggacttcctgcgggagtagtcgtt

SEQ ID NO: 195600 - DNA, 30 bp, Artificial Sequence
  Synthetic oligonucleotide
cactaacttggcactagcccgatggtcgtt

SEQ ID NO: 195601 - DNA, 30 bp, Artificial Sequence
  Synthetic oligonucleotide
tccctatgtatggtatcggaaaatttcgtt

SEQ ID NO: 195602 - DNA, 30 bp, Artificial Sequence
  Synthetic oligonucleotide
ttactgccgtatgcctcaacctctttcgtt

SEQ ID NO: 195603 - DNA, 30 bp, Artificial Sequence
  Synthetic oligonucleotide
ttaacgtctgtaagacgaggacaaaaggtt

SEQ ID NO: 195604 - DNA, 30 bp, Artificial Sequence
  Synthetic oligonucleotide
tggggtacccatgagtagagtgggaaggtt

SEQ ID NO: 195605 - DNA, 30 bp, Artificial Sequence
  Synthetic oligonucleotide
atcaagccagatttaaggtggtggcaggtt

SEQ ID NO: 195606 - DNA, 30 bp, Artificial Sequence
  Synthetic oligonucleotide
gagggggcagtcacacagcgaactcaggtt

SEQ ID NO: 195607 - DNA, 30 bp, Artificial Sequence
  Synthetic oligonucleotide
aggcatgacaaggggtatccaggagaggtt

SEQ ID NO: 195608 - DNA, 30 bp, Artificial Sequence
  Synthetic oligonucleotide
agtaatttattgtcgtcacataatgaggtt

SEQ ID NO: 195609 - DNA, 30 bp, Artificial Sequence
  Synthetic oligonucleotide
gaacagatacgagagccaaaggttgaggtt

SEQ ID NO: 195610 - DNA, 30 bp, Artificial Sequence
  Synthetic oligonucleotide
cgaatttcctaacacaaaaagggctaggtt

SEQ ID NO: 195611 - DNA, 30 bp, Artificial Sequence
  Synthetic oligonucleotide
atgttgcagttccggctggtggagtaggtt

SEQ ID NO: 195612 - DNA, 30 bp, Artificial Sequence
  Synthetic oligonucleotide
actagtggcgatgccaatcccactacggtt

SEQ ID NO: 195613 - DNA, 30 bp, Artificial Sequence
  Synthetic oligonucleotide
actggtgcatttccatcacggccaccggtt

SEQ ID NO: 195614 - DNA, 30 bp, Artificial Sequence
  Synthetic oligonucleotide
tccccggacaagattaacgcccacccggtt

SEQ ID NO: 195615 - DNA, 30 bp, Artificial Sequence
  Synthetic oligonucleotide
cgctaggatactgctgcgaaattcccggtt

SEQ ID NO: 195616 - DNA, 30 bp, Artificial Sequence
  Synthetic oligonucleotide
ttcaacgatactgatgaggccgagccggtt

SEQ ID NO: 195617 - DNA, 30 bp, Artificial Sequence
  Synthetic oligonucleotide
caaggctctgatataagggcgaatccggtt

SEQ ID NO: 195618 - DNA, 30 bp, Artificial Sequence
  Synthetic oligonucleotide
cattgttagtattatcttctcatatcggtt

SEQ ID NO: 195619 - DNA, 30 bp, Artificial Sequence
  Synthetic oligonucleotide
aattccgagtagaaagggcgactatcggtt

SEQ ID NO: 195620 - DNA, 30 bp, Artificial Sequence
  Synthetic oligonucleotide
acggaagtccccggttcaaaatactcggtt

SEQ ID NO: 195621 - DNA, 30 bp, Artificial Sequence
  Synthetic oligonucleotide
gcgacaccacaggcaagatggaagtcggtt

SEQ ID NO: 195622 - DNA, 30 bp, Artificial Sequence
  Synthetic oligonucleotide
gtgagacttggaatcctcaggcccagggtt

SEQ ID NO: 195623 - DNA, 30 bp, Artificial Sequence
  Synthetic oligonucleotide
cgtagctgctacgaaggacaagttagggtt

SEQ ID NO: 195624 - DNA, 30 bp, Artificial Sequence
  Synthetic oligonucleotide
tatagttgagcgggcgcgtgagaacgggtt

SEQ ID NO: 195625 - DNA, 30 bp, Artificial Sequence
  Synthetic oligonucleotide
caggtcaacgttcaggctcggtaacgggtt

SEQ ID NO: 195626 - DNA, 30 bp, Artificial Sequence
  Synthetic oligonucleotide
tggggtggtctagcctagtgtgtacgggtt

SEQ ID NO: 195627 - DNA, 30 bp, Artificial Sequence
  Synthetic oligonucleotide
caactttacgtcacacttcggtagcgggtt

SEQ ID NO: 195628 - DNA, 30 bp, Artificial Sequence
  Synthetic oligonucleotide
cctatctcattcttccctcgtcctcgggtt

SEQ ID NO: 195629 - DNA, 30 bp, Artificial Sequence
  Synthetic oligonucleotide
gagaggggagggtagctcgcaagaggggtt

SEQ ID NO: 195630 - DNA, 31 bp, Artificial Sequence
  Synthetic oligonucleotide
aaatacacaaacaaggcaactgcgcggggtt

SEQ ID NO: 195631 - DNA, 30 bp, Artificial Sequence
  Synthetic oligonucleotide
tacgtgtgcctatagccaggtctgggggtt

SEQ ID NO: 195632 - DNA, 30 bp, Artificial Sequence
  Synthetic oligonucleotide
aatactcgaaagagatctatatgtggggtt

SEQ ID NO: 195633 - DNA, 30 bp, Artificial Sequence
  Synthetic oligonucleotide
ctcaagtggttgagggtatgcatatgggtt

SEQ ID NO: 195634 - DNA, 30 bp, Artificial Sequence
  Synthetic oligonucleotide
ctgacgtgacggcaaatatcgatatgggtt

SEQ ID NO: 195635 - DNA, 30 bp, Artificial Sequence
  Synthetic oligonucleotide
gtcaatggtcgagtgtagggcatctgggtt

SEQ ID NO: 195636 - DNA, 30 bp, Artificial Sequence
  Synthetic oligonucleotide
cgcaaggtcgaattaggtagtttcatggtt

SEQ ID NO: 195637 - DNA, 30 bp, Artificial Sequence
  Synthetic oligonucleotide
aacgagctcttctggaagaaccagatggtt

SEQ ID NO: 195638 - DNA, 28 bp, Artificial Sequence
  Synthetic oligonucleotide
acagtatacctgtaaatgatggatggtt

SEQ ID NO: 195639 - DNA, 30 bp, Artificial Sequence
  Synthetic oligonucleotide
agtccacttcactaaatggtaactatggtt

SEQ ID NO: 195640 - DNA, 30 bp, Artificial Sequence
  Synthetic oligonucleotide
agcaggccactctgtttaggctttatggtt

SEQ ID NO: 195641 - DNA, 30 bp, Artificial Sequence
  Synthetic oligonucleotide
tacacaggtccgggcatatgtggactggtt

SEQ ID NO: 195642 - DNA, 30 bp, Artificial Sequence
  Synthetic oligonucleotide
agtaggggtgataatcgcgctctcctggtt

SEQ ID NO: 195643 - DNA, 30 bp, Artificial Sequence
  Synthetic oligonucleotide
cggtgtaaagtggttgaggtcccgctggtt

SEQ ID NO: 195644 - DNA, 30 bp, Artificial Sequence
  Synthetic oligonucleotide
gacttagctactagctatgaaacagtggtt

SEQ ID NO: 195645 - DNA, 30 bp, Artificial Sequence
  Synthetic oligonucleotide
gaagaacgtacactgcatatgggtgtggtt

SEQ ID NO: 195646 - DNA, 30 bp, Artificial Sequence
  Synthetic oligonucleotide
gtacctgcaacatgcgcccttcatttggtt

SEQ ID NO: 195647 - DNA, 30 bp, Artificial Sequence
  Synthetic oligonucleotide
gcgtaacatgtacattattaaacgaatgtt

SEQ ID NO: 195648 - DNA, 30 bp, Artificial Sequence
  Synthetic oligonucleotide
attaacgtcttgagttatatggggaatgtt

SEQ ID NO: 195649 - DNA, 30 bp, Artificial Sequence
  Synthetic oligonucleotide
gtgatgagtcctcagagaacgatacatgtt

SEQ ID NO: 195650 - DNA, 30 bp, Artificial Sequence
  Synthetic oligonucleotide
tccggcactgaggggttaacttagcatgtt

SEQ ID NO: 195651 - DNA, 30 bp, Artificial Sequence
  Synthetic oligonucleotide
gcgggttgtgttaagcttggttcgcatgtt

SEQ ID NO: 195652 - DNA, 30 bp, Artificial Sequence
  Synthetic oligonucleotide
ggacctcgggtcactagtagggcagatgtt

SEQ ID NO: 195653 - DNA, 30 bp, Artificial Sequence
  Synthetic oligonucleotide
agcatagatgtttttgtataggaggatgtt

SEQ ID NO: 195654 - DNA, 30 bp, Artificial Sequence
  Synthetic oligonucleotide
ggaggcagggtggctgcgtacaaatatgtt

SEQ ID NO: 195655 - DNA, 30 bp, Artificial Sequence
  Synthetic oligonucleotide
tgtctagtgaggctaactacactcactgtt

SEQ ID NO: 195656 - DNA, 30 bp, Artificial Sequence
  Synthetic oligonucleotide
cttattgcagttctgggcacatcgactgtt

SEQ ID NO: 195657 - DNA, 30 bp, Artificial Sequence
  Synthetic oligonucleotide
ttgaccgcccatggaaaatagcgtactgtt

SEQ ID NO: 195658 - DNA, 30 bp, Artificial Sequence
  Synthetic oligonucleotide
gcaggacttagtagccaaggtgttactgtt

SEQ ID NO: 195659 - DNA, 30 bp, Artificial Sequence
  Synthetic oligonucleotide
gaggaagttgacaccatcccagcccctgtt

SEQ ID NO: 195660 - DNA, 30 bp, Artificial Sequence
  Synthetic oligonucleotide
aacatcgttccgttcgtgaaaggagctgtt

SEQ ID NO: 195661 - DNA, 30 bp, Artificial Sequence
  Synthetic oligonucleotide
cgcctcgtgatgagtggagaacaggctgtt

SEQ ID NO: 195662 - DNA, 30 bp, Artificial Sequence
  Synthetic oligonucleotide
ggtcttgggcgacgtgggcgcgatgctgtt

SEQ ID NO: 195663 - DNA, 30 bp, Artificial Sequence
  Synthetic oligonucleotide
caagggggataatccgagggccttgctgtt

SEQ ID NO: 195664 - DNA, 30 bp, Artificial Sequence
  Synthetic oligonucleotide
aatatgccagcaggcattgaagacagtgtt

SEQ ID NO: 195665 - DNA, 30 bp, Artificial Sequence
  Synthetic oligonucleotide
agtacgaccgacaccagactcaggagtgtt

SEQ ID NO: 195666 - DNA, 30 bp, Artificial Sequence
  Synthetic oligonucleotide
cggagagaatgcgacgactgtttgagtgtt

SEQ ID NO: 195667 - DNA, 30 bp, Artificial Sequence
  Synthetic oligonucleotide
gcgcgtgaaccaaggtagacgcctagtgtt

SEQ ID NO: 195668 - DNA, 30 bp, Artificial Sequence
  Synthetic oligonucleotide
ccaacgttatctgtaaaatccgttagtgtt

SEQ ID NO: 195669 - DNA, 30 bp, Artificial Sequence
  Synthetic oligonucleotide
tttaaggcgggcggatagagactacgtgtt

SEQ ID NO: 195670 - DNA, 30 bp, Artificial Sequence
  Synthetic oligonucleotide
catggacggtattgggttctgaagcgtgtt

SEQ ID NO: 195671 - DNA, 30 bp, Artificial Sequence
  Synthetic oligonucleotide
ggagcgcgagtatcgtgtaagtcgcgtgtt

SEQ ID NO: 195672 - DNA, 30 bp, Artificial Sequence
  Synthetic oligonucleotide
cgtatatgagcaaattccactgatcgtgtt

SEQ ID NO: 195673 - DNA, 30 bp, Artificial Sequence
  Synthetic oligonucleotide
aggttcgcccctagagtacggcttcgtgtt

SEQ ID NO: 195674 - DNA, 30 bp, Artificial Sequence
  Synthetic oligonucleotide
agtactgcgtaaaataattgaagaggtgtt

SEQ ID NO: 195675 - DNA, 30 bp, Artificial Sequence
  Synthetic oligonucleotide
tcagatcgccaacctaattgggtaggtgtt

SEQ ID NO: 195676 - DNA, 30 bp, Artificial Sequence
  Synthetic oligonucleotide
tcaacgaggaatagcttttctttgggtgtt

SEQ ID NO: 195677 - DNA, 30 bp, Artificial Sequence
  Synthetic oligonucleotide
ggagagctttacacgcaattggacattgtt

SEQ ID NO: 195678 - DNA, 30 bp, Artificial Sequence
  Synthetic oligonucleotide
aagtgagaagcccagctaatacccattgtt

SEQ ID NO: 195679 - DNA, 30 bp, Artificial Sequence
  Synthetic oligonucleotide
acatagagttattagtggctgggcattgtt

SEQ ID NO: 195680 - DNA, 30 bp, Artificial Sequence
  Synthetic oligonucleotide
tgaggatgcgcgacatcgggctaacttgtt

SEQ ID NO: 195681 - DNA, 30 bp, Artificial Sequence
  Synthetic oligonucleotide
gggaagcacaatgagttcgaatcggttgtt

SEQ ID NO: 195682 - DNA, 30 bp, Artificial Sequence
  Synthetic oligonucleotide
ggattggataagtcgctaagctgatttgtt

SEQ ID NO: 195683 - DNA, 30 bp, Artificial Sequence
  Synthetic oligonucleotide
taagaaagcaagttcagagtcaagtttgtt

SEQ ID NO: 195684 - DNA, 30 bp, Artificial Sequence
  Synthetic oligonucleotide
atagacataagtaactgtgagaagtttgtt

SEQ ID NO: 195685 - DNA, 30 bp, Artificial Sequence
  Synthetic oligonucleotide
ttatcggggctcggtttcggatagtttgtt

SEQ ID NO: 195686 - DNA, 30 bp, Artificial Sequence
  Synthetic oligonucleotide
gcgagtagtgggttcagagtattgtttgtt

SEQ ID NO: 195687 - DNA, 30 bp, Artificial Sequence
  Synthetic oligonucleotide
gcggacgctcttatgtggtaccgaaaattt

SEQ ID NO: 195688 - DNA, 30 bp, Artificial Sequence
  Synthetic oligonucleotide
cgagctcgaagtggtaaaagcgacaaattt

SEQ ID NO: 195689 - DNA, 30 bp, Artificial Sequence
  Synthetic oligonucleotide
gctcacatggctaataagtaaaccaaattt

SEQ ID NO: 195690 - DNA, 30 bp, Artificial Sequence
  Synthetic oligonucleotide
ataataactacgtggcttctgcccaaattt

SEQ ID NO: 195691 - DNA, 30 bp, Artificial Sequence
  Synthetic oligonucleotide
cgcccctaatttacacctgagagcaaattt

SEQ ID NO: 195692 - DNA, 30 bp, Artificial Sequence
  Synthetic oligonucleotide
agtcaggaggaagagactagcggcaaattt

SEQ ID NO: 195693 - DNA, 30 bp, Artificial Sequence
  Synthetic oligonucleotide
tagaggcatatctataaactgacgaaattt

SEQ ID NO: 195694 - DNA, 30 bp, Artificial Sequence
  Synthetic oligonucleotide
acggtataagaaaacatggaatctaaattt

SEQ ID NO: 195695 - DNA, 30 bp, Artificial Sequence
  Synthetic oligonucleotide
catacttctgtgcaacacactatacaattt

SEQ ID NO: 195696 - DNA, 30 bp, Artificial Sequence
  Synthetic oligonucleotide
aggcattctttccgggtaaagaagcaattt

SEQ ID NO: 195697 - DNA, 30 bp, Artificial Sequence
  Synthetic oligonucleotide
aggaactagctctagcgagctgcgcaattt

SEQ ID NO: 195698 - DNA, 30 bp, Artificial Sequence
  Synthetic oligonucleotide
aaccaggcaggatctcgcggttgagaattt

SEQ ID NO: 195699 - DNA, 30 bp, Artificial Sequence
  Synthetic oligonucleotide
actcgtcgcgttatcacagcggcggaattt

SEQ ID NO: 195700 - DNA, 30 bp, Artificial Sequence
  Synthetic oligonucleotide
gccatccgaactgtttgccgacctgaattt

SEQ ID NO: 195701 - DNA, 30 bp, Artificial Sequence
  Synthetic oligonucleotide
cgaataatgatcaacgcgaaaggtgaattt

SEQ ID NO: 195702 - DNA, 30 bp, Artificial Sequence
  Synthetic oligonucleotide
agtaatgttggtacacgccagggtgaattt

SEQ ID NO: 195703 - DNA, 30 bp, Artificial Sequence
  Synthetic oligonucleotide
gtgaaatgaggctctatagatctgtaattt

SEQ ID NO: 195704 - DNA, 30 bp, Artificial Sequence
  Synthetic oligonucleotide
ggtacactttacacgaccatcgattaattt

SEQ ID NO: 195705 - DNA, 30 bp, Artificial Sequence
  Synthetic oligonucleotide
ttgttgacctgagaaacggctcacacattt

SEQ ID NO: 195706 - DNA, 30 bp, Artificial Sequence
  Synthetic oligonucleotide
atctgacggggggtagctgcttacacattt

SEQ ID NO: 195707 - DNA, 30 bp, Artificial Sequence
  Synthetic oligonucleotide
ccagtacggccgatgagatacctcacattt

SEQ ID NO: 195708 - DNA, 30 bp, Artificial Sequence
  Synthetic oligonucleotide
ctagggaaaatggaccaattaccgacattt

SEQ ID NO: 195709 - DNA, 30 bp, Artificial Sequence
  Synthetic oligonucleotide
agtaatggattctctcttgcatcaccattt

SEQ ID NO: 195710 - DNA, 30 bp, Artificial Sequence
  Synthetic oligonucleotide
acgcggcgttttccgcagtttgggccattt

SEQ ID NO: 195711 - DNA, 30 bp, Artificial Sequence
  Synthetic oligonucleotide
tgatgctgatgaagaggcctgaatgcattt

SEQ ID NO: 195712 - DNA, 30 bp, Artificial Sequence
  Synthetic oligonucleotide
gggtcaacgtttagtagcactaaatcattt

SEQ ID NO: 195713 - DNA, 30 bp, Artificial Sequence
  Synthetic oligonucleotide
agcgattcatatgcatagtgaaactcattt

SEQ ID NO: 195714 - DNA, 30 bp, Artificial Sequence
  Synthetic oligonucleotide
tgcaccattactaccgattggacttcattt

SEQ ID NO: 195715 - DNA, 30 bp, Artificial Sequence
  Synthetic oligonucleotide
gctcaggacggctgcccaataccttcattt

SEQ ID NO: 195716 - DNA, 30 bp, Artificial Sequence
  Synthetic oligonucleotide
ttaaaagcgcgtcatagagcccaatgattt

SEQ ID NO: 195717 - DNA, 30 bp, Artificial Sequence
  Synthetic oligonucleotide
agtgcaagatgcatatagggcctatgattt

SEQ ID NO: 195718 - DNA, 30 bp, Artificial Sequence
  Synthetic oligonucleotide
acacagagtcaggggcttaagaactgattt

SEQ ID NO: 195719 - DNA, 30 bp, Artificial Sequence
  Synthetic oligonucleotide
atacccttgtaagaaccaatagagtgattt

SEQ ID NO: 195720 - DNA, 30 bp, Artificial Sequence
  Synthetic oligonucleotide
tgactctgtgtatcgtatagtatgtgattt

SEQ ID NO: 195721 - DNA, 30 bp, Artificial Sequence
  Synthetic oligonucleotide
cggtaacaaggtttatgttaaagttgattt

SEQ ID NO: 195722 - DNA, 30 bp, Artificial Sequence
  Synthetic oligonucleotide
cgtctaactaagagtcagcattaaatattt

SEQ ID NO: 195723 - DNA, 30 bp, Artificial Sequence
  Synthetic oligonucleotide
gccaattagtagacagagctcaccatattt

SEQ ID NO: 195724 - DNA, 30 bp, Artificial Sequence
  Synthetic oligonucleotide
tcgcatttcgcacatggaatgaggatattt

SEQ ID NO: 195725 - DNA, 30 bp, Artificial Sequence
  Synthetic oligonucleotide
tctagaccaggtgacttcttcgcactattt

SEQ ID NO: 195726 - DNA, 30 bp, Artificial Sequence
  Synthetic oligonucleotide
gaaccaacaaatctcagattactgctattt

SEQ ID NO: 195727 - DNA, 30 bp, Artificial Sequence
  Synthetic oligonucleotide
gaaggtgtgctcattgaacccgatctattt

SEQ ID NO: 195728 - DNA, 30 bp, Artificial Sequence
  Synthetic oligonucleotide
agacggattctagtctgagatagcgtattt

SEQ ID NO: 195729 - DNA, 30 bp, Artificial Sequence
  Synthetic oligonucleotide
tctagaaaggtctacgagagcgaggtattt

SEQ ID NO: 195730 - DNA, 30 bp, Artificial Sequence
  Synthetic oligonucleotide
cgtgctaatcaggtaattcagggggtattt

SEQ ID NO: 195731 - DNA, 28 bp, Artificial Sequence
  Synthetic oligonucleotide
aaggtcccctaagggcagtggggtattt

SEQ ID NO: 195732 - DNA, 30 bp, Artificial Sequence
  Synthetic oligonucleotide
cctaaacaagtgcaagcccagtctgtattt

SEQ ID NO: 195733 - DNA, 30 bp, Artificial Sequence
  Synthetic oligonucleotide
aatacaggctgcagtggagaatttgtattt

SEQ ID NO: 195734 - DNA, 30 bp, Artificial Sequence
  Synthetic oligonucleotide
gtcactatacagaagattcaaactttattt

SEQ ID NO: 195735 - DNA, 30 bp, Artificial Sequence
  Synthetic oligonucleotide
agttaggccacactcgctaggtgtttattt

SEQ ID NO: 195736 - DNA, 30 bp, Artificial Sequence
  Synthetic oligonucleotide
gagacccactaacactcagatgccaacttt

SEQ ID NO: 195737 - DNA, 30 bp, Artificial Sequence
  Synthetic oligonucleotide
gaggatagctaaaaaaccggagggaacttt

SEQ ID NO: 195738 - DNA, 30 bp, Artificial Sequence
  Synthetic oligonucleotide
ctcggggctcgcgaatcaggaaaacacttt

SEQ ID NO: 195739 - DNA, 30 bp, Artificial Sequence
  Synthetic oligonucleotide
tgcatcgtcgagagagatcacttagacttt

SEQ ID NO: 195740 - DNA, 30 bp, Artificial Sequence
  Synthetic oligonucleotide
agatgtgcgcttcatgtaagtctggacttt

SEQ ID NO: 195741 - DNA, 30 bp, Artificial Sequence
  Synthetic oligonucleotide
agagaatgaattgttagtagttatgacttt

SEQ ID NO: 195742 - DNA, 30 bp, Artificial Sequence
  Synthetic oligonucleotide
ctatctgtccagggaccattacgtgacttt

SEQ ID NO: 195743 - DNA, 30 bp, Artificial Sequence
  Synthetic oligonucleotide
gaaggtcactgaggtatcgatagatacttt

SEQ ID NO: 195744 - DNA, 30 bp, Artificial Sequence
  Synthetic oligonucleotide
tatcagtcaaagggagaaaacgactacttt

SEQ ID NO: 195745 - DNA, 30 bp, Artificial Sequence
  Synthetic oligonucleotide
taggccgcgcgatcatgttccgggtacttt

SEQ ID NO: 195746 - DNA, 30 bp, Artificial Sequence
  Synthetic oligonucleotide
gagagtctagcgaagacaaccacttacttt

SEQ ID NO: 195747 - DNA, 30 bp, Artificial Sequence
  Synthetic oligonucleotide
ctgacggttcatgcgtggcactgcgccttt

SEQ ID NO: 195748 - DNA, 28 bp, Artificial Sequence
  Synthetic oligonucleotide
tccggaagacgaggatttctgatccttt

SEQ ID NO: 195749 - DNA, 30 bp, Artificial Sequence
  Synthetic oligonucleotide
cgtgctgatcatatttaaaacaggtccttt

SEQ ID NO: 195750 - DNA, 30 bp, Artificial Sequence
  Synthetic oligonucleotide
gaagaaccaaggcgtagtggtggttccttt

SEQ ID NO: 195751 - DNA, 30 bp, Artificial Sequence
  Synthetic oligonucleotide
tgactgcgcgggagcaatgccttttccttt

SEQ ID NO: 195752 - DNA, 30 bp, Artificial Sequence
  Synthetic oligonucleotide
cgcggtcgtattacgatacccctaagcttt

SEQ ID NO: 195753 - DNA, 30 bp, Artificial Sequence
  Synthetic oligonucleotide
gaggctggaatatctaagagctgcagcttt

SEQ ID NO: 195754 - DNA, 30 bp, Artificial Sequence
  Synthetic oligonucleotide
gccaagcgtaggtcagccaagtcccgcttt

SEQ ID NO: 195755 - DNA, 30 bp, Artificial Sequence
  Synthetic oligonucleotide
taagaacattcgctatcacatagaggcttt

SEQ ID NO: 195756 - DNA, 30 bp, Artificial Sequence
  Synthetic oligonucleotide
ggaaaatagtccgatactgaggccggcttt

SEQ ID NO: 195757 - DNA, 30 bp, Artificial Sequence
  Synthetic oligonucleotide
tacacattggtatagcatgcgggtggcttt

SEQ ID NO: 195758 - DNA, 28 bp, Artificial Sequence
  Synthetic oligonucleotide
ttcccaggatcgatgtgagcattgcttt

SEQ ID NO: 195759 - DNA, 30 bp, Artificial Sequence
  Synthetic oligonucleotide
cggacaaagtagccagagagtggaatcttt

SEQ ID NO: 195760 - DNA, 30 bp, Artificial Sequence
  Synthetic oligonucleotide
acccgagggggaagttgttagggcatcttt

SEQ ID NO: 195761 - DNA, 30 bp, Artificial Sequence
  Synthetic oligonucleotide
gtcggctggtctccgatgcacaacgtcttt

SEQ ID NO: 195762 - DNA, 30 bp, Artificial Sequence
  Synthetic oligonucleotide
cacgagctacctcatcgagcgtaggtcttt

SEQ ID NO: 195763 - DNA, 30 bp, Artificial Sequence
  Synthetic oligonucleotide
cgaccaaaatccatgcaggtgcgggtcttt

SEQ ID NO: 195764 - DNA, 30 bp, Artificial Sequence
  Synthetic oligonucleotide
cggcggaatcagtacttgctattggtcttt

SEQ ID NO: 195765 - DNA, 30 bp, Artificial Sequence
  Synthetic oligonucleotide
cgaaaaccaatcctatccaagttggtcttt

SEQ ID NO: 195766 - DNA, 30 bp, Artificial Sequence
  Synthetic oligonucleotide
gggagggcagctcagtctcggtatgtcttt

SEQ ID NO: 195767 - DNA, 30 bp, Artificial Sequence
  Synthetic oligonucleotide
tggatcgagtgagtgtgagaaaggttcttt

SEQ ID NO: 195768 - DNA, 30 bp, Artificial Sequence
  Synthetic oligonucleotide
ttgattggttgccattatttgaatttcttt

SEQ ID NO: 195769 - DNA, 30 bp, Artificial Sequence
  Synthetic oligonucleotide
aatgaaaggacgggaactactgaaaagttt

SEQ ID NO: 195770 - DNA, 30 bp, Artificial Sequence
  Synthetic oligonucleotide
tgcaatgaccgaaggcgaagatagaagttt

SEQ ID NO: 195771 - DNA, 30 bp, Artificial Sequence
  Synthetic oligonucleotide
agaatgtgccggcaggtcaaggcgaagttt

SEQ ID NO: 195772 - DNA, 30 bp, Artificial Sequence
  Synthetic oligonucleotide
gcgtgtttagataaggctaaactgaagttt

SEQ ID NO: 195773 - DNA, 30 bp, Artificial Sequence
  Synthetic oligonucleotide
caatacttgtgggaaagacagcctaagttt

SEQ ID NO: 195774 - DNA, 30 bp, Artificial Sequence
  Synthetic oligonucleotide
cagtcttactaaaaaagttctaaagagttt

SEQ ID NO: 195775 - DNA, 30 bp, Artificial Sequence
  Synthetic oligonucleotide
tacgcgatgttgcataccgagggcgagttt

SEQ ID NO: 195776 - DNA, 30 bp, Artificial Sequence
  Synthetic oligonucleotide
gactctgacctaactacccattaatagttt

SEQ ID NO: 195777 - DNA, 30 bp, Artificial Sequence
  Synthetic oligonucleotide
agttggcgtggcgtcgtgtaactatagttt

SEQ ID NO: 195778 - DNA, 30 bp, Artificial Sequence
  Synthetic oligonucleotide
ggcccagggaagaatcaatggctctagttt

SEQ ID NO: 195779 - DNA, 30 bp, Artificial Sequence
  Synthetic oligonucleotide
ttggccgggaacatcggggtactgtagttt

SEQ ID NO: 195780 - DNA, 30 bp, Artificial Sequence
  Synthetic oligonucleotide
gtgctgaggaatggggccaatagcacgttt

SEQ ID NO: 195781 - DNA, 30 bp, Artificial Sequence
  Synthetic oligonucleotide
atagaagtccgtcattcttgaaaaccgttt

SEQ ID NO: 195782 - DNA, 30 bp, Artificial Sequence
  Synthetic oligonucleotide
gttaacagatgataatggtggccaccgttt

SEQ ID NO: 195783 - DNA, 30 bp, Artificial Sequence
  Synthetic oligonucleotide
ttcacaggtgcgactatccaatgtccgttt

SEQ ID NO: 195784 - DNA, 30 bp, Artificial Sequence
  Synthetic oligonucleotide
attgtaccatcgacccttgagattccgttt

SEQ ID NO: 195785 - DNA, 30 bp, Artificial Sequence
  Synthetic oligonucleotide
gggatggacaggagggggtatggagcgttt

SEQ ID NO: 195786 - DNA, 30 bp, Artificial Sequence
  Synthetic oligonucleotide
attagaggtcgttcgccagacaccgcgttt

SEQ ID NO: 195787 - DNA, 30 bp, Artificial Sequence
  Synthetic oligonucleotide
ctaagggaaaaatctgggtgccaggcgttt

SEQ ID NO: 195788 - DNA, 30 bp, Artificial Sequence
  Synthetic oligonucleotide
tagcgcggagtagcgtaattcacggcgttt

SEQ ID NO: 195789 - DNA, 30 bp, Artificial Sequence
  Synthetic oligonucleotide
caatggttctagggaaagaggggtgcgttt

SEQ ID NO: 195790 - DNA, 30 bp, Artificial Sequence
  Synthetic oligonucleotide
ccacgcttaagtgttgcaataacaaggttt

SEQ ID NO: 195791 - DNA, 30 bp, Artificial Sequence
  Synthetic oligonucleotide
gtcttacagtaagaccccgaagtaaggttt

SEQ ID NO: 195792 - DNA, 30 bp, Artificial Sequence
  Synthetic oligonucleotide
caatgcaacttcatcgttctagcgcggttt

SEQ ID NO: 195793 - DNA, 30 bp, Artificial Sequence
  Synthetic oligonucleotide
cgaccgctagaaatgtgaacataagggttt

SEQ ID NO: 195794 - DNA, 30 bp, Artificial Sequence
  Synthetic oligonucleotide
cttagtacaatctgttttagcagagggttt

SEQ ID NO: 195795 - DNA, 30 bp, Artificial Sequence
  Synthetic oligonucleotide
aaaacgcggggtcgccgatactgggggttt

SEQ ID NO: 195796 - DNA, 30 bp, Artificial Sequence
  Synthetic oligonucleotide
aggtttgacaaggccgctcacgctgggttt

SEQ ID NO: 195797 - DNA, 30 bp, Artificial Sequence
  Synthetic oligonucleotide
cgccagtgattattcgggcacgtctggttt

SEQ ID NO: 195798 - DNA, 30 bp, Artificial Sequence
  Synthetic oligonucleotide
cattcgcttattcgataagaggtctggttt

SEQ ID NO: 195799 - DNA, 30 bp, Artificial Sequence
  Synthetic oligonucleotide
ccgtaggcaagaacaacgcttgcttggttt

SEQ ID NO: 195800 - DNA, 30 bp, Artificial Sequence
  Synthetic oligonucleotide
atcaggcggcgagcaattaaccgtatgttt

SEQ ID NO: 195801 - DNA, 30 bp, Artificial Sequence
  Synthetic oligonucleotide
gcctacgtctgaaggagtggaggtatgttt

SEQ ID NO: 195802 - DNA, 30 bp, Artificial Sequence
  Synthetic oligonucleotide
taagttatatagaaaatagtatgcctgttt

SEQ ID NO: 195803 - DNA, 30 bp, Artificial Sequence
  Synthetic oligonucleotide
gcgccaggtaacgttaagcttcggctgttt

SEQ ID NO: 195804 - DNA, 30 bp, Artificial Sequence
  Synthetic oligonucleotide
taagatgagcgtagtggttcgagtctgttt

SEQ ID NO: 195805 - DNA, 30 bp, Artificial Sequence
  Synthetic oligonucleotide
catacgctaaagtgaaacccggttctgttt

SEQ ID NO: 195806 - DNA, 30 bp, Artificial Sequence
  Synthetic oligonucleotide
gatatgttaagtatcacgaagaaagtgttt

SEQ ID NO: 195807 - DNA, 30 bp, Artificial Sequence
  Synthetic oligonucleotide
ggacgacagaagagttttttgtcagtgttt

SEQ ID NO: 195808 - DNA, 30 bp, Artificial Sequence
  Synthetic oligonucleotide
gtgatgggacctacacgtaaaagggtgttt

SEQ ID NO: 195809 - DNA, 30 bp, Artificial Sequence
  Synthetic oligonucleotide
agtcgaaccgctagaaatagtattgtgttt

SEQ ID NO: 195810 - DNA, 30 bp, Artificial Sequence
  Synthetic oligonucleotide
gcgaatcgccttagggaggatagattgttt

SEQ ID NO: 195811 - DNA, 30 bp, Artificial Sequence
  Synthetic oligonucleotide
gcggggtggtccggaattcaacgcttgttt

SEQ ID NO: 195812 - DNA, 30 bp, Artificial Sequence
  Synthetic oligonucleotide
gggacaaatagattgactataaggttgttt

SEQ ID NO: 195813 - DNA, 30 bp, Artificial Sequence
  Synthetic oligonucleotide
taaacgtatctcgctcatttcgaaaatttt

SEQ ID NO: 195814 - DNA, 30 bp, Artificial Sequence
  Synthetic oligonucleotide
agtgtattttgacggctggggcgcaatttt

SEQ ID NO: 195815 - DNA, 30 bp, Artificial Sequence
  Synthetic oligonucleotide
atagtaagggccgtcacgggtgagaatttt

SEQ ID NO: 195816 - DNA, 30 bp, Artificial Sequence
  Synthetic oligonucleotide
ttatagtgggagtgtagcacacggaatttt

SEQ ID NO: 195817 - DNA, 30 bp, Artificial Sequence
  Synthetic oligonucleotide
agattaatccttaactggaattgacatttt

SEQ ID NO: 195818 - DNA, 30 bp, Artificial Sequence
  Synthetic oligonucleotide
gttgagatctcagatcgactagacgatttt

SEQ ID NO: 195819 - DNA, 30 bp, Artificial Sequence
  Synthetic oligonucleotide
tacggcctgtacattgtaattgtggatttt

SEQ ID NO: 195820 - DNA, 30 bp, Artificial Sequence
  Synthetic oligonucleotide
tcacatcgtcatttagtcagcggtgatttt

SEQ ID NO: 195821 - DNA, 30 bp, Artificial Sequence
  Synthetic oligonucleotide
cgtaattagatgtttcgcatcgagtatttt

SEQ ID NO: 195822 - DNA, 30 bp, Artificial Sequence
  Synthetic oligonucleotide
tccaccgtaaactcgaaattaaattatttt

SEQ ID NO: 195823 - DNA, 30 bp, Artificial Sequence
  Synthetic oligonucleotide
ggggtgaactacgtttgaaatcgagctttt

SEQ ID NO: 195824 - DNA, 30 bp, Artificial Sequence
  Synthetic oligonucleotide
cgtgcacgccagatatccaagtgcgctttt

SEQ ID NO: 195825 - DNA, 30 bp, Artificial Sequence
  Synthetic oligonucleotide
gcacgactatagtctacaagcaaggctttt

SEQ ID NO: 195826 - DNA, 30 bp, Artificial Sequence
  Synthetic oligonucleotide
cgggtggaatcgggcgtccagacggctttt

SEQ ID NO: 195827 - DNA, 30 bp, Artificial Sequence
  Synthetic oligonucleotide
tgtcacaaggacacatacccaattgctttt

SEQ ID NO: 195828 - DNA, 30 bp, Artificial Sequence
  Synthetic oligonucleotide
gcggcctattgtcaataacacaaatctttt

SEQ ID NO: 195829 - DNA, 30 bp, Artificial Sequence
  Synthetic oligonucleotide
ccgaagaagcgccacatccagtaatctttt

SEQ ID NO: 195830 - DNA, 30 bp, Artificial Sequence
  Synthetic oligonucleotide
tggccatggggtaacttttagacatctttt

SEQ ID NO: 195831 - DNA, 30 bp, Artificial Sequence
  Synthetic oligonucleotide
gcatcctacggcaatagcctttgctctttt

SEQ ID NO: 195832 - DNA, 30 bp, Artificial Sequence
  Synthetic oligonucleotide
gcatatcgtggaaggagactcaaaagtttt

SEQ ID NO: 195833 - DNA, 30 bp, Artificial Sequence
  Synthetic oligonucleotide
ggatctttcgctactcgaaaccagagtttt

SEQ ID NO: 195834 - DNA, 30 bp, Artificial Sequence
  Synthetic oligonucleotide
agcaggtcgcggagctgcaagtggagtttt

SEQ ID NO: 195835 - DNA, 30 bp, Artificial Sequence
  Synthetic oligonucleotide
aaggacccccgcatacacaaagtacgtttt

SEQ ID NO: 195836 - DNA, 30 bp, Artificial Sequence
  Synthetic oligonucleotide
tcatgtgtagcgttagctcttcaccgtttt

SEQ ID NO: 195837 - DNA, 30 bp, Artificial Sequence
  Synthetic oligonucleotide
gctcagaaaatatgcgtgcgcattcgtttt

SEQ ID NO: 195838 - DNA, 30 bp, Artificial Sequence
  Synthetic oligonucleotide
tggcaaacaaggacaagtaatgacggtttt

SEQ ID NO: 195839 - DNA, 30 bp, Artificial Sequence
  Synthetic oligonucleotide
gtgtgagtggaaagataaccagagggtttt

SEQ ID NO: 195840 - DNA, 30 bp, Artificial Sequence
  Synthetic oligonucleotide
tgtacaggtacagcgttattacactgtttt

SEQ ID NO: 195841 - DNA, 30 bp, Artificial Sequence
  Synthetic oligonucleotide
cggtccattttaagcaagtgcgactgtttt

SEQ ID NO: 195842 - DNA, 30 bp, Artificial Sequence
  Synthetic oligonucleotide
aacgagcgatcctatggagcatgctgtttt

SEQ ID NO: 195843 - DNA, 30 bp, Artificial Sequence
  Synthetic oligonucleotide
tgcatagatatagcatgatacttctgtttt

SEQ ID NO: 195844 - DNA, 30 bp, Artificial Sequence
  Synthetic oligonucleotide
aagttaggagcgtgcctaatcacgattttt

SEQ ID NO: 195845 - DNA, 30 bp, Artificial Sequence
  Synthetic oligonucleotide
ttagattggtgcactttaatctcgattttt

SEQ ID NO: 195846 - DNA, 30 bp, Artificial Sequence
  Synthetic oligonucleotide
acgcatatgccatgcgcgatacggattttt

SEQ ID NO: 195847 - DNA, 30 bp, Artificial Sequence
  Synthetic oligonucleotide
tgactatcgtaatacgaatttcatcttttt

SEQ ID NO: 195848 - DNA, 30 bp, Artificial Sequence
  Synthetic oligonucleotide
tagacgagttcccacatctctgctcttttt

SEQ ID NO: 195849 - DNA, 30 bp, Artificial Sequence
  Synthetic oligonucleotide
actgggtcataggagttggatatcgttttt

SEQ ID NO: 195850 - DNA, 30 bp, Artificial Sequence
  Synthetic oligonucleotide
ttggcatgcgacattgtaggattggttttt

SEQ ID NO: 195851 - DNA, 30 bp, Artificial Sequence
  Synthetic oligonucleotide
gatgtgcttacaggaggatagtagtttttt

SEQ ID NO: 195852 - DNA, 30 bp, Artificial Sequence
  Synthetic oligonucleotide
atggatacccctaggccattggaaaaaaaa

SEQ ID NO: 195853 - DNA, 31 bp, Artificial Sequence
  Synthetic oligonucleotide
ccacgccgggacttggcaggacatcaaaaaa

SEQ ID NO: 195854 - DNA, 30 bp, Artificial Sequence
  Synthetic oligonucleotide
cgttagtccacggctattcggctcaaaaaa

SEQ ID NO: 195855 - DNA, 30 bp, Artificial Sequence
  Synthetic oligonucleotide
acagggagccgacggcaaaaattgaaaaaa

SEQ ID NO: 195856 - DNA, 30 bp, Artificial Sequence
  Synthetic oligonucleotide
tggtgcgtgcgagggccagcagataaaaaa

SEQ ID NO: 195857 - DNA, 30 bp, Artificial Sequence
  Synthetic oligonucleotide
aggtttgcttttaaactacccgataaaaaa

SEQ ID NO: 195858 - DNA, 30 bp, Artificial Sequence
  Synthetic oligonucleotide
catttttggaacgcgagaatggcacaaaaa

SEQ ID NO: 195859 - DNA, 30 bp, Artificial Sequence
  Synthetic oligonucleotide
tggccatatcacttgcagcccggacaaaaa

SEQ ID NO: 195860 - DNA, 30 bp, Artificial Sequence
  Synthetic oligonucleotide
ctcacagaagttacatatttggtacaaaaa

SEQ ID NO: 195861 - DNA, 30 bp, Artificial Sequence
  Synthetic oligonucleotide
caatgttctcggagtcttacctgccaaaaa

SEQ ID NO: 195862 - DNA, 30 bp, Artificial Sequence
  Synthetic oligonucleotide
cgcattactgctgtcaagggtttccaaaaa

SEQ ID NO: 195863 - DNA, 30 bp, Artificial Sequence
  Synthetic oligonucleotide
ccgattccctgccggaacggtaggcaaaaa

SEQ ID NO: 195864 - DNA, 30 bp, Artificial Sequence
  Synthetic oligonucleotide
gcaatcatagggtcaagtccataagaaaaa

SEQ ID NO: 195865 - DNA, 30 bp, Artificial Sequence
  Synthetic oligonucleotide
gagaagccaaggagtctcgcttacgaaaaa

SEQ ID NO: 195866 - DNA, 30 bp, Artificial Sequence
  Synthetic oligonucleotide
atgttctgaaggagtgcggtagccgaaaaa

SEQ ID NO: 195867 - DNA, 30 bp, Artificial Sequence
  Synthetic oligonucleotide
aacagatgcgtgatgaatgccattgaaaaa

SEQ ID NO: 195868 - DNA, 30 bp, Artificial Sequence
  Synthetic oligonucleotide
acgaggctaagaatattttttatctaaaaa

SEQ ID NO: 195869 - DNA, 30 bp, Artificial Sequence
  Synthetic oligonucleotide
tcgtggtgttagatttatgaggtgtaaaaa

SEQ ID NO: 195870 - DNA, 30 bp, Artificial Sequence
  Synthetic oligonucleotide
ttccgggacagcgggaagcaggcaacaaaa

SEQ ID NO: 195871 - DNA, 30 bp, Artificial Sequence
  Synthetic oligonucleotide
aaaggggttggaagcgttgagtgaacaaaa

SEQ ID NO: 195872 - DNA, 30 bp, Artificial Sequence
  Synthetic oligonucleotide
tattggcttgacgtgcgtggaaacacaaaa

SEQ ID NO: 195873 - DNA, 30 bp, Artificial Sequence
  Synthetic oligonucleotide
atgatagagtccattgcgcctaccacaaaa

SEQ ID NO: 195874 - DNA, 30 bp, Artificial Sequence
  Synthetic oligonucleotide
gatcccgtctgaatacgggatgagacaaaa

SEQ ID NO: 195875 - DNA, 30 bp, Artificial Sequence
  Synthetic oligonucleotide
aaagtcgcggaatagacattacggacaaaa

SEQ ID NO: 195876 - DNA, 30 bp, Artificial Sequence
  Synthetic oligonucleotide
gtggtactgccctgaccgaacaatacaaaa

SEQ ID NO: 195877 - DNA, 30 bp, Artificial Sequence
  Synthetic oligonucleotide
tatcttggtccggagaatctctctacaaaa

SEQ ID NO: 195878 - DNA, 30 bp, Artificial Sequence
  Synthetic oligonucleotide
caaggaactcatgtactatcgggtacaaaa

SEQ ID NO: 195879 - DNA, 30 bp, Artificial Sequence
  Synthetic oligonucleotide
gataggacatgatcgtttagaggagcaaaa

SEQ ID NO: 195880 - DNA, 30 bp, Artificial Sequence
  Synthetic oligonucleotide
ggggccgagctagtcagaccgtctgcaaaa

SEQ ID NO: 195881 - DNA, 30 bp, Artificial Sequence
  Synthetic oligonucleotide
cagacttacctacattacattaactcaaaa

SEQ ID NO: 195882 - DNA, 30 bp, Artificial Sequence
  Synthetic oligonucleotide
taactcccgtaacttcctccgctgtcaaaa

SEQ ID NO: 195883 - DNA, 30 bp, Artificial Sequence
  Synthetic oligonucleotide
aaaagtatcaaggtgatataccattcaaaa

SEQ ID NO: 195884 - DNA, 30 bp, Artificial Sequence
  Synthetic oligonucleotide
gtttggtggatcctctatatgcaaagaaaa

SEQ ID NO: 195885 - DNA, 30 bp, Artificial Sequence
  Synthetic oligonucleotide
gtcaagtagggagtgtaaatgtcaagaaaa

SEQ ID NO: 195886 - DNA, 31 bp, Artificial Sequence
  Synthetic oligonucleotide
caacacgcccaatccagagcccataagaaaa

SEQ ID NO: 195887 - DNA, 30 bp, Artificial Sequence
  Synthetic oligonucleotide
ggatgttcaaaaacgagaatccacagaaaa

SEQ ID NO: 195888 - DNA, 30 bp, Artificial Sequence
  Synthetic oligonucleotide
gaggacggcataagtagtacgatgagaaaa

SEQ ID NO: 195889 - DNA, 30 bp, Artificial Sequence
  Synthetic oligonucleotide
gccgaggcggaaatatctttagtgagaaaa

SEQ ID NO: 195890 - DNA, 30 bp, Artificial Sequence
  Synthetic oligonucleotide
cccggggctgtcattacaacggaacgaaaa

SEQ ID NO: 195891 - DNA, 30 bp, Artificial Sequence
  Synthetic oligonucleotide
cgagttagtaggcgcttagaaacacgaaaa

SEQ ID NO: 195892 - DNA, 30 bp, Artificial Sequence
  Synthetic oligonucleotide
taggcagtctagccactaaatcaccgaaaa

SEQ ID NO: 195893 - DNA, 30 bp, Artificial Sequence
  Synthetic oligonucleotide
gccctgtgattgggataggcggcgcgaaaa

SEQ ID NO: 195894 - DNA, 30 bp, Artificial Sequence
  Synthetic oligonucleotide
gcttaggcggtcagcgtaggaccaggaaaa

SEQ ID NO: 195895 - DNA, 30 bp, Artificial Sequence
  Synthetic oligonucleotide
cagggaatccccgctgcgagaaccggaaaa

SEQ ID NO: 195896 - DNA, 30 bp, Artificial Sequence
  Synthetic oligonucleotide
gtagggcacttttaagccaagaccggaaaa

SEQ ID NO: 195897 - DNA, 30 bp, Artificial Sequence
  Synthetic oligonucleotide
agaaagaagcatgcagtagtaagatgaaaa

SEQ ID NO: 195898 - DNA, 30 bp, Artificial Sequence
  Synthetic oligonucleotide
gcaccaacaaagggcatacacggatgaaaa

SEQ ID NO: 195899 - DNA, 30 bp, Artificial Sequence
  Synthetic oligonucleotide
actaacgggtggagtagcttcttatgaaaa

SEQ ID NO: 195900 - DNA, 30 bp, Artificial Sequence
  Synthetic oligonucleotide
ctactatttcacaaaagttaagcctgaaaa

SEQ ID NO: 195901 - DNA, 30 bp, Artificial Sequence
  Synthetic oligonucleotide
ccggtcttcccttgaacctatagctgaaaa

SEQ ID NO: 195902 - DNA, 30 bp, Artificial Sequence
  Synthetic oligonucleotide
ctccagaatgatgcatcaaggatctgaaaa

SEQ ID NO: 195903 - DNA, 30 bp, Artificial Sequence
  Synthetic oligonucleotide
tgggccaaaccattaagcagggtctgaaaa

SEQ ID NO: 195904 - DNA, 30 bp, Artificial Sequence
  Synthetic oligonucleotide
tcatgtcttggggcggaaagggggtgaaaa

SEQ ID NO: 195905 - DNA, 30 bp, Artificial Sequence
  Synthetic oligonucleotide
tttgtgtcgtcagcccgcacgtcttgaaaa

SEQ ID NO: 195906 - DNA, 30 bp, Artificial Sequence
  Synthetic oligonucleotide
cccgtccattccacctatctatgttgaaaa

SEQ ID NO: 195907 - DNA, 30 bp, Artificial Sequence
  Synthetic oligonucleotide
cgtttaaggattgagagataaacaataaaa

SEQ ID NO: 195908 - DNA, 30 bp, Artificial Sequence
  Synthetic oligonucleotide
gtaagttagacagccactttgcgcataaaa

SEQ ID NO: 195909 - DNA, 30 bp, Artificial Sequence
  Synthetic oligonucleotide
tagtcacaatttatgtttagaaggataaaa

SEQ ID NO: 195910 - DNA, 30 bp, Artificial Sequence
  Synthetic oligonucleotide
gtaatgatatgccggggggtctaactaaaa

SEQ ID NO: 195911 - DNA, 30 bp, Artificial Sequence
  Synthetic oligonucleotide
aaaaagcaggagatggccggaacactaaaa

SEQ ID NO: 195912 - DNA, 30 bp, Artificial Sequence
  Synthetic oligonucleotide
atacaaggcgaagcgctaagtcacctaaaa

SEQ ID NO: 195913 - DNA, 30 bp, Artificial Sequence
  Synthetic oligonucleotide
cccgcggacttagatggatctggcctaaaa

SEQ ID NO: 195914 - DNA, 30 bp, Artificial Sequence
  Synthetic oligonucleotide
agtccggctacgggattgacagagctaaaa

SEQ ID NO: 195915 - DNA, 30 bp, Artificial Sequence
  Synthetic oligonucleotide
gcaaggggaaatttgctacgatcgctaaaa

SEQ ID NO: 195916 - DNA, 30 bp, Artificial Sequence
  Synthetic oligonucleotide
cgcaatagtgctgtgtcgtcagggctaaaa

SEQ ID NO: 195917 - DNA, 30 bp, Artificial Sequence
  Synthetic oligonucleotide
ggcggcgcggactaccaactatttctaaaa

SEQ ID NO: 195918 - DNA, 30 bp, Artificial Sequence
  Synthetic oligonucleotide
tcagggaaacgcggtgcgcgtcgagtaaaa

SEQ ID NO: 195919 - DNA, 30 bp, Artificial Sequence
  Synthetic oligonucleotide
acatgatacatccaacccgagcatgtaaaa

SEQ ID NO: 195920 - DNA, 30 bp, Artificial Sequence
  Synthetic oligonucleotide
tgcttattgcgatgagcccgccaattaaaa

SEQ ID NO: 195921 - DNA, 30 bp, Artificial Sequence
  Synthetic oligonucleotide
tagggatgatacggagttatgacattaaaa

SEQ ID NO: 195922 - DNA, 30 bp, Artificial Sequence
  Synthetic oligonucleotide
cggtgaaacatcggtaatgtaggcttaaaa

SEQ ID NO: 195923 - DNA, 30 bp, Artificial Sequence
  Synthetic oligonucleotide
tagcgactgtctcggaggtaatgcttaaaa

SEQ ID NO: 195924 - DNA, 30 bp, Artificial Sequence
  Synthetic oligonucleotide
cgactacataccatccctgaatatttaaaa

SEQ ID NO: 195925 - DNA, 30 bp, Artificial Sequence
  Synthetic oligonucleotide
tagggcagggtagaccgttctgctttaaaa

SEQ ID NO: 195926 - DNA, 30 bp, Artificial Sequence
  Synthetic oligonucleotide
caaattaccgttgtacggagaagaaacaaa

SEQ ID NO: 195927 - DNA, 30 bp, Artificial Sequence
  Synthetic oligonucleotide
gccgtctaattctcctaatagaagaacaaa

SEQ ID NO: 195928 - DNA, 30 bp, Artificial Sequence
  Synthetic oligonucleotide
ctccgctcatcgtaccggctactgaacaaa

SEQ ID NO: 195929 - DNA, 30 bp, Artificial Sequence
  Synthetic oligonucleotide
tggacacacccgcacgaagggaataacaaa

SEQ ID NO: 195930 - DNA, 30 bp, Artificial Sequence
  Synthetic oligonucleotide
tctagccctagtactccaaaacgtaacaaa

SEQ ID NO: 195931 - DNA, 30 bp, Artificial Sequence
  Synthetic oligonucleotide
tatttgcataaaagtggttgagaacacaaa

SEQ ID NO: 195932 - DNA, 30 bp, Artificial Sequence
  Synthetic oligonucleotide
atcggctgctttcgaaaactataacacaaa

SEQ ID NO: 195933 - DNA, 30 bp, Artificial Sequence
  Synthetic oligonucleotide
gcatgttcagtgcattaggacagacacaaa

SEQ ID NO: 195934 - DNA, 30 bp, Artificial Sequence
  Synthetic oligonucleotide
gtttgccaaaatagcggatcgacccacaaa

SEQ ID NO: 195935 - DNA, 30 bp, Artificial Sequence
  Synthetic oligonucleotide
tctctatagtagtacactcatctgcacaaa

SEQ ID NO: 195936 - DNA, 30 bp, Artificial Sequence
  Synthetic oligonucleotide
tcggtcatgtcgggtcttgcaggtcacaaa

SEQ ID NO: 195937 - DNA, 30 bp, Artificial Sequence
  Synthetic oligonucleotide
gctatgcttgggttgtttaaacaggacaaa

SEQ ID NO: 195938 - DNA, 30 bp, Artificial Sequence
  Synthetic oligonucleotide
caataggtgaagtgcaaggtggcctacaaa

SEQ ID NO: 195939 - DNA, 30 bp, Artificial Sequence
  Synthetic oligonucleotide
ctagcctacgcctccattaagtagtacaaa

SEQ ID NO: 195940 - DNA, 30 bp, Artificial Sequence
  Synthetic oligonucleotide
gacttggatagtgcgtggaccgattacaaa

SEQ ID NO: 195941 - DNA, 30 bp, Artificial Sequence
  Synthetic oligonucleotide
cccgatcactcccatcgaatgtcaaccaaa

SEQ ID NO: 195942 - DNA, 30 bp, Artificial Sequence
  Synthetic oligonucleotide
tttcgcggacagatcaggcatagaaccaaa

SEQ ID NO: 195943 - DNA, 30 bp, Artificial Sequence
  Synthetic oligonucleotide
actcgtgtggagcgtcgacaattcaccaaa

SEQ ID NO: 195944 - DNA, 30 bp, Artificial Sequence
  Synthetic oligonucleotide
ctaccggttcttggcggttggaggaccaaa

SEQ ID NO: 195945 - DNA, 30 bp, Artificial Sequence
  Synthetic oligonucleotide
cccaaacgcgtttcatttttgcataccaaa

SEQ ID NO: 195946 - DNA, 30 bp, Artificial Sequence
  Synthetic oligonucleotide
tcaaaaatcaataaccccacaatacccaaa

SEQ ID NO: 195947 - DNA, 30 bp, Artificial Sequence
  Synthetic oligonucleotide
tcccttcggaaaacgttgacgctacccaaa

SEQ ID NO: 195948 - DNA, 30 bp, Artificial Sequence
  Synthetic oligonucleotide
gtatatcaccgggcatggttagggcccaaa

SEQ ID NO: 195949 - DNA, 30 bp, Artificial Sequence
  Synthetic oligonucleotide
tctaccgtaggaccaagccagaatcccaaa

SEQ ID NO: 195950 - DNA, 30 bp, Artificial Sequence
  Synthetic oligonucleotide
tgaatttattggggatgggactaagccaaa

SEQ ID NO: 195951 - DNA, 30 bp, Artificial Sequence
  Synthetic oligonucleotide
agtacctactaaatcaggtggccagccaaa

SEQ ID NO: 195952 - DNA, 30 bp, Artificial Sequence
  Synthetic oligonucleotide
gcctaatcggacgatagtgggagcgccaaa

SEQ ID NO: 195953 - DNA, 30 bp, Artificial Sequence
  Synthetic oligonucleotide
ggcatattgtgaaaacacgaagtcgccaaa

SEQ ID NO: 195954 - DNA, 30 bp, Artificial Sequence
  Synthetic oligonucleotide
cggactcacttctcatagctggaggccaaa

SEQ ID NO: 195955 - DNA, 30 bp, Artificial Sequence
  Synthetic oligonucleotide
taggatgtcttagtctacaatgaggccaaa

SEQ ID NO: 195956 - DNA, 30 bp, Artificial Sequence
  Synthetic oligonucleotide
ggatatgtgtggcaccacgggaactccaaa

SEQ ID NO: 195957 - DNA, 30 bp, Artificial Sequence
  Synthetic oligonucleotide
gccatatgtgctggatgatttctttccaaa

SEQ ID NO: 195958 - DNA, 30 bp, Artificial Sequence
  Synthetic oligonucleotide
aagatagatagagctgcacattaaagcaaa

SEQ ID NO: 195959 - DNA, 30 bp, Artificial Sequence
  Synthetic oligonucleotide
aaaggaaaacgttgtaactaactaagcaaa

SEQ ID NO: 195960 - DNA, 30 bp, Artificial Sequence
  Synthetic oligonucleotide
ccttgaaattaaggcgcatgtcagagcaaa

SEQ ID NO: 195961 - DNA, 30 bp, Artificial Sequence
  Synthetic oligonucleotide
cttctaggactcggtcagacgacgagcaaa

SEQ ID NO: 195962 - DNA, 30 bp, Artificial Sequence
  Synthetic oligonucleotide
ggataatacgtggttatgtgggtgagcaaa

SEQ ID NO: 195963 - DNA, 30 bp, Artificial Sequence
  Synthetic oligonucleotide
acagtatgatcaccaatggggagtagcaaa

SEQ ID NO: 195964 - DNA, 30 bp, Artificial Sequence
  Synthetic oligonucleotide
tgctcggagcacgtgtcagacgttcgcaaa

SEQ ID NO: 195965 - DNA, 30 bp, Artificial Sequence
  Synthetic oligonucleotide
gtataccgaaaggtaccatgtctaggcaaa

SEQ ID NO: 195966 - DNA, 30 bp, Artificial Sequence
  Synthetic oligonucleotide
ggagtgatagttgcgaaggtaactggcaaa

SEQ ID NO: 195967 - DNA, 30 bp, Artificial Sequence
  Synthetic oligonucleotide
atctagtaggggaccaggtcgggtggcaaa

SEQ ID NO: 195968 - DNA, 30 bp, Artificial Sequence
  Synthetic oligonucleotide
gttcattctcgaaatagtcgttgtggcaaa

SEQ ID NO: 195969 - DNA, 30 bp, Artificial Sequence
  Synthetic oligonucleotide
atctaacatatagaatagggggttggcaaa

SEQ ID NO: 195970 - DNA, 30 bp, Artificial Sequence
  Synthetic oligonucleotide
tattggcagatttggtagagctttggcaaa

SEQ ID NO: 195971 - DNA, 30 bp, Artificial Sequence
  Synthetic oligonucleotide
ggtcaaggcatgaaccatgtcggatgcaaa

SEQ ID NO: 195972 - DNA, 30 bp, Artificial Sequence
  Synthetic oligonucleotide
gggtgagcccctggtaacacctgatgcaaa

SEQ ID NO: 195973 - DNA, 30 bp, Artificial Sequence
  Synthetic oligonucleotide
tcgccagctggatcttcattccggtgcaaa

SEQ ID NO: 195974 - DNA, 28 bp, Artificial Sequence
  Synthetic oligonucleotide
ccttgctagatcgcacagactgtgcaaa

SEQ ID NO: 195975 - DNA, 30 bp, Artificial Sequence
  Synthetic oligonucleotide
ggactggactacggctcgagcagttgcaaa

SEQ ID NO: 195976 - DNA, 30 bp, Artificial Sequence
  Synthetic oligonucleotide
cacgatagacgtgatacgtagaatatcaaa

SEQ ID NO: 195977 - DNA, 30 bp, Artificial Sequence
  Synthetic oligonucleotide
aaagccctgtcttagtcgcccacactcaaa

SEQ ID NO: 195978 - DNA, 30 bp, Artificial Sequence
  Synthetic oligonucleotide
acgtttccttgattacatgacaccctcaaa

SEQ ID NO: 195979 - DNA, 30 bp, Artificial Sequence
  Synthetic oligonucleotide
tgcagataagcgtgagtttcatccctcaaa

SEQ ID NO: 195980 - DNA, 30 bp, Artificial Sequence
  Synthetic oligonucleotide
gccttaaggtcattatgatttgagctcaaa

SEQ ID NO: 195981 - DNA, 30 bp, Artificial Sequence
  Synthetic oligonucleotide
gagacgcccgtccctttgagtgcgctcaaa

SEQ ID NO: 195982 - DNA, 30 bp, Artificial Sequence
  Synthetic oligonucleotide
ctcgtgccgttaggactaaacgtagtcaaa

SEQ ID NO: 195983 - DNA, 30 bp, Artificial Sequence
  Synthetic oligonucleotide
gaccactggaacttatacctgttagtcaaa

SEQ ID NO: 195984 - DNA, 30 bp, Artificial Sequence
  Synthetic oligonucleotide
gagcaagacaataggcttcagtacgtcaaa

SEQ ID NO: 195985 - DNA, 30 bp, Artificial Sequence
  Synthetic oligonucleotide
cataagtataccagatgactcatcgtcaaa

SEQ ID NO: 195986 - DNA, 30 bp, Artificial Sequence
  Synthetic oligonucleotide
ggtaccggaggttaccaggaataggtcaaa

SEQ ID NO: 195987 - DNA, 30 bp, Artificial Sequence
  Synthetic oligonucleotide
gagagtgcacgaggaccatgtggggtcaaa

SEQ ID NO: 195988 - DNA, 30 bp, Artificial Sequence
  Synthetic oligonucleotide
tcgataggagtaattaaattattggtcaaa

SEQ ID NO: 195989 - DNA, 30 bp, Artificial Sequence
  Synthetic oligonucleotide
tagagttacgcgccgaattggcctgtcaaa

SEQ ID NO: 195990 - DNA, 30 bp, Artificial Sequence
  Synthetic oligonucleotide
ggttcgtcgaatatcaagcagtgtgtcaaa

SEQ ID NO: 195991 - DNA, 30 bp, Artificial Sequence
  Synthetic oligonucleotide
cggggaggtccaattagcaatcttgtcaaa

SEQ ID NO: 195992 - DNA, 30 bp, Artificial Sequence
  Synthetic oligonucleotide
ctctggggctaggcgtagccgcgattcaaa

SEQ ID NO: 195993 - DNA, 30 bp, Artificial Sequence
  Synthetic oligonucleotide
agcgggcgtgagttggaccgttttttcaaa

SEQ ID NO: 195994 - DNA, 30 bp, Artificial Sequence
  Synthetic oligonucleotide
agcataacggctcaccacgggaaaaagaaa

SEQ ID NO: 195995 - DNA, 30 bp, Artificial Sequence
  Synthetic oligonucleotide
cacacagaggtcagataaaccataaagaaa

SEQ ID NO: 195996 - DNA, 30 bp, Artificial Sequence
  Synthetic oligonucleotide
tgacagcaccaaacgcgcatggacaagaaa

SEQ ID NO: 195997 - DNA, 30 bp, Artificial Sequence
  Synthetic oligonucleotide
tccaatcagtctcggaaggtaagcaagaaa

SEQ ID NO: 195998 - DNA, 30 bp, Artificial Sequence
  Synthetic oligonucleotide
aatgggtgatgctcggtagttcgcaagaaa

SEQ ID NO: 195999 - DNA, 30 bp, Artificial Sequence
  Synthetic oligonucleotide
ataggacttgagattacactatgcaagaaa

SEQ ID NO: 196000 - DNA, 30 bp, Artificial Sequence
  Synthetic oligonucleotide
acactaacgggcggtcaggacgagaagaaa

SEQ ID NO: 196001 - DNA, 30 bp, Artificial Sequence
  Synthetic oligonucleotide
gcgccaggttaaggggccgtcaggaagaaa

SEQ ID NO: 196002 - DNA, 30 bp, Artificial Sequence
  Synthetic oligonucleotide
ccgccaagcaccgcggaagcggctaagaaa

SEQ ID NO: 196003 - DNA, 30 bp, Artificial Sequence
  Synthetic oligonucleotide
ggagttcgggttgtccttagtattaagaaa

SEQ ID NO: 196004 - DNA, 30 bp, Artificial Sequence
  Synthetic oligonucleotide
aagaggcacactggcactcgtacacagaaa

SEQ ID NO: 196005 - DNA, 30 bp, Artificial Sequence
  Synthetic oligonucleotide
gggaatactcgattacgctggatacagaaa

SEQ ID NO: 196006 - DNA, 30 bp, Artificial Sequence
  Synthetic oligonucleotide
gaaaaaaatggagagattaatatccagaaa

SEQ ID NO: 196007 - DNA, 30 bp, Artificial Sequence
  Synthetic oligonucleotide
ggggctggatgcaagcaccccctccagaaa

SEQ ID NO: 196008 - DNA, 30 bp, Artificial Sequence
  Synthetic oligonucleotide
acttctatccgttcagcagcgctccagaaa

SEQ ID NO: 196009 - DNA, 30 bp, Artificial Sequence
  Synthetic oligonucleotide
accctaaatcacgctatttaaaagcagaaa

SEQ ID NO: 196010 - DNA, 30 bp, Artificial Sequence
  Synthetic oligonucleotide
ctgataaaatgcaagtggggaaatcagaaa

SEQ ID NO: 196011 - DNA, 30 bp, Artificial Sequence
  Synthetic oligonucleotide
ggagtaaaagcatttccaggatctcagaaa

SEQ ID NO: 196012 - DNA, 29 bp, Artificial Sequence
  Synthetic oligonucleotide
gaagccagccggacagcatctctcagaaa

SEQ ID NO: 196013 - DNA, 30 bp, Artificial Sequence
  Synthetic oligonucleotide
gtaggaaaggtactaacttgacaagagaaa

SEQ ID NO: 196014 - DNA, 30 bp, Artificial Sequence
  Synthetic oligonucleotide
ttaccattcgacaaggcctatcgagagaaa

SEQ ID NO: 196015 - DNA, 31 bp, Artificial Sequence
  Synthetic oligonucleotide
cgagttttaagttaatcgcatatacgagaaa

SEQ ID NO: 196016 - DNA, 30 bp, Artificial Sequence
  Synthetic oligonucleotide
ccgacagggcaggttttgttgcccgagaaa

SEQ ID NO: 196017 - DNA, 30 bp, Artificial Sequence
  Synthetic oligonucleotide
tcctacaaggggaaaagggtctaggagaaa

SEQ ID NO: 196018 - DNA, 30 bp, Artificial Sequence
  Synthetic oligonucleotide
taaactgagtgttgcacataatatgagaaa

SEQ ID NO: 196019 - DNA, 30 bp, Artificial Sequence
  Synthetic oligonucleotide
aagggagcaacaaatcatctaaaatagaaa

SEQ ID NO: 196020 - DNA, 30 bp, Artificial Sequence
  Synthetic oligonucleotide
ttcctacagtggcgaacacttcaatagaaa

SEQ ID NO: 196021 - DNA, 30 bp, Artificial Sequence
  Synthetic oligonucleotide
aacttcatggctattaattcagcatagaaa

SEQ ID NO: 196022 - DNA, 30 bp, Artificial Sequence
  Synthetic oligonucleotide
atggggttgtgagtggttttagtgtagaaa

SEQ ID NO: 196023 - DNA, 30 bp, Artificial Sequence
  Synthetic oligonucleotide
cattaggtagagtagcgcgatatttagaaa

SEQ ID NO: 196024 - DNA, 30 bp, Artificial Sequence
  Synthetic oligonucleotide
taagcctccgcgcgtattaatggaacgaaa

SEQ ID NO: 196025 - DNA, 30 bp, Artificial Sequence
  Synthetic oligonucleotide
ccgtgttaagggtggactcaggagacgaaa

SEQ ID NO: 196026 - DNA, 30 bp, Artificial Sequence
  Synthetic oligonucleotide
cttaaagcgagtcctgtgtttaatacgaaa

SEQ ID NO: 196027 - DNA, 30 bp, Artificial Sequence
  Synthetic oligonucleotide
taggatgcgaccgggcaagcgggaccgaaa

SEQ ID NO: 196028 - DNA, 30 bp, Artificial Sequence
  Synthetic oligonucleotide
cgcgacggcgccaagctcgcctgaccgaaa

SEQ ID NO: 196029 - DNA, 30 bp, Artificial Sequence
  Synthetic oligonucleotide
actcagcaaaacctagtgtggccgccgaaa

SEQ ID NO: 196030 - DNA, 30 bp, Artificial Sequence
  Synthetic oligonucleotide
cagttagactcgctgtacctgatgccgaaa

SEQ ID NO: 196031 - DNA, 30 bp, Artificial Sequence
  Synthetic oligonucleotide
acgacatagcaggtacaagcggttccgaaa

SEQ ID NO: 196032 - DNA, 30 bp, Artificial Sequence
  Synthetic oligonucleotide
aaccggctttgagcacgagtcccagcgaaa

SEQ ID NO: 196033 - DNA, 30 bp, Artificial Sequence
  Synthetic oligonucleotide
agcaagccagggtaataggcccgcgcgaaa

SEQ ID NO: 196034 - DNA, 30 bp, Artificial Sequence
  Synthetic oligonucleotide
gctatctggcagccagggctcaatgcgaaa

SEQ ID NO: 196035 - DNA, 30 bp, Artificial Sequence
  Synthetic oligonucleotide
cgcgcaggttataatagtaaccatgcgaaa

SEQ ID NO: 196036 - DNA, 30 bp, Artificial Sequence
  Synthetic oligonucleotide
gaattagacaaacttaggcaatctgcgaaa

SEQ ID NO: 196037 - DNA, 30 bp, Artificial Sequence
  Synthetic oligonucleotide
gttagcttgtgtgatcctcgagttgcgaaa

SEQ ID NO: 196038 - DNA, 30 bp, Artificial Sequence
  Synthetic oligonucleotide
ccttatgtatgtcttggagttaaatcgaaa

SEQ ID NO: 196039 - DNA, 30 bp, Artificial Sequence
  Synthetic oligonucleotide
aaagtcacatcgcttattatactatcgaaa

SEQ ID NO: 196040 - DNA, 30 bp, Artificial Sequence
  Synthetic oligonucleotide
accagttaccggggggttcggaagtcgaaa

SEQ ID NO: 196041 - DNA, 30 bp, Artificial Sequence
  Synthetic oligonucleotide
atgtactattatatgacaaaaacgtcgaaa

SEQ ID NO: 196042 - DNA, 30 bp, Artificial Sequence
  Synthetic oligonucleotide
gcattgctactctctcgattacaaaggaaa

SEQ ID NO: 196043 - DNA, 30 bp, Artificial Sequence
  Synthetic oligonucleotide
cacacatggccagtatcgccatcaaggaaa

SEQ ID NO: 196044 - DNA, 30 bp, Artificial Sequence
  Synthetic oligonucleotide
cccgaatccgggctgcataacataaggaaa

SEQ ID NO: 196045 - DNA, 30 bp, Artificial Sequence
  Synthetic oligonucleotide
aggttccagggccgatttgggtacaggaaa

SEQ ID NO: 196046 - DNA, 30 bp, Artificial Sequence
  Synthetic oligonucleotide
gtttacaatgtgctcactaaaaccaggaaa

SEQ ID NO: 196047 - DNA, 30 bp, Artificial Sequence
  Synthetic oligonucleotide
agtataccgcttcggaaagaactgaggaaa

SEQ ID NO: 196048 - DNA, 30 bp, Artificial Sequence
  Synthetic oligonucleotide
actaaaagtgtagcgataagtgttaggaaa

SEQ ID NO: 196049 - DNA, 30 bp, Artificial Sequence
  Synthetic oligonucleotide
agaagatgggtgggctgtgcgtcccggaaa

SEQ ID NO: 196050 - DNA, 30 bp, Artificial Sequence
  Synthetic oligonucleotide
ccgtatcgatcccgacactcacgccggaaa

SEQ ID NO: 196051 - DNA, 30 bp, Artificial Sequence
  Synthetic oligonucleotide
cccggacaatattataaagaccatcggaaa

SEQ ID NO: 196052 - DNA, 30 bp, Artificial Sequence
  Synthetic oligonucleotide
taaatggaacagcaagtacctaaagggaaa

SEQ ID NO: 196053 - DNA, 30 bp, Artificial Sequence
  Synthetic oligonucleotide
ttagactatacttgcatcgttacagggaaa

SEQ ID NO: 196054 - DNA, 30 bp, Artificial Sequence
  Synthetic oligonucleotide
aaggccgtggccccgaaacgcagcgggaaa

SEQ ID NO: 196055 - DNA, 30 bp, Artificial Sequence
  Synthetic oligonucleotide
acttgagattctagtgttccaaactggaaa

SEQ ID NO: 196056 - DNA, 30 bp, Artificial Sequence
  Synthetic oligonucleotide
ctatacggcaaagagaaaggaaactggaaa

SEQ ID NO: 196057 - DNA, 30 bp, Artificial Sequence
  Synthetic oligonucleotide
ggatgtgggttgtcaacaaggtcttggaaa

SEQ ID NO: 196058 - DNA, 30 bp, Artificial Sequence
  Synthetic oligonucleotide
atcaatagacattcctggtatgtttggaaa

SEQ ID NO: 196059 - DNA, 30 bp, Artificial Sequence
  Synthetic oligonucleotide
tggggtgaattacagtctggactaatgaaa

SEQ ID NO: 196060 - DNA, 30 bp, Artificial Sequence
  Synthetic oligonucleotide
tgtagaatgagcgaatgtctcttaatgaaa

SEQ ID NO: 196061 - DNA, 30 bp, Artificial Sequence
  Synthetic oligonucleotide
tgcaagcgtccagatcgctacagcatgaaa

SEQ ID NO: 196062 - DNA, 30 bp, Artificial Sequence
  Synthetic oligonucleotide
agccgtccggccctggcatacccgatgaaa

SEQ ID NO: 196063 - DNA, 30 bp, Artificial Sequence
  Synthetic oligonucleotide
aacgctgatgtccgcgaaaacgctatgaaa

SEQ ID NO: 196064 - DNA, 30 bp, Artificial Sequence
  Synthetic oligonucleotide
acgatacgtcgaaacctataataactgaaa

SEQ ID NO: 196065 - DNA, 30 bp, Artificial Sequence
  Synthetic oligonucleotide
acgactgtctccgttagttccatactgaaa

SEQ ID NO: 196066 - DNA, 30 bp, Artificial Sequence
  Synthetic oligonucleotide
gatccatctccgaattttcctaccgtgaaa

SEQ ID NO: 196067 - DNA, 30 bp, Artificial Sequence
  Synthetic oligonucleotide
tcttaggtggttagaacttaagtggtgaaa

SEQ ID NO: 196068 - DNA, 30 bp, Artificial Sequence
  Synthetic oligonucleotide
tccgatagtgcagagttgagataattgaaa

SEQ ID NO: 196069 - DNA, 30 bp, Artificial Sequence
  Synthetic oligonucleotide
ctggcgtcagcgcagcccctcgacttgaaa

SEQ ID NO: 196070 - DNA, 30 bp, Artificial Sequence
  Synthetic oligonucleotide
cccctcgattactaagggacgttcttgaaa

SEQ ID NO: 196071 - DNA, 30 bp, Artificial Sequence
  Synthetic oligonucleotide
gcctggggggaccgacttggaatgttgaaa

SEQ ID NO: 196072 - DNA, 30 bp, Artificial Sequence
  Synthetic oligonucleotide
ttaggactataggatgggaaattgttgaaa

SEQ ID NO: 196073 - DNA, 30 bp, Artificial Sequence
  Synthetic oligonucleotide
gtgcatttgcacggttcggttgtcaataaa

SEQ ID NO: 196074 - DNA, 30 bp, Artificial Sequence
  Synthetic oligonucleotide
ctggcaagccctgtccggaacaagaataaa

SEQ ID NO: 196075 - DNA, 30 bp, Artificial Sequence
  Synthetic oligonucleotide
tgcgattgcacatggtggcccttgaataaa

SEQ ID NO: 196076 - DNA, 30 bp, Artificial Sequence
  Synthetic oligonucleotide
ttgctgttacggaaaccgggtcataataaa

SEQ ID NO: 196077 - DNA, 30 bp, Artificial Sequence
  Synthetic oligonucleotide
tagtataacggagaggaacggaaacataaa

SEQ ID NO: 196078 - DNA, 30 bp, Artificial Sequence
  Synthetic oligonucleotide
ggggctcaactaatcacgcaaacacataaa

SEQ ID NO: 196079 - DNA, 30 bp, Artificial Sequence
  Synthetic oligonucleotide
cacagaatgactaaatgagaaatacataaa

SEQ ID NO: 196080 - DNA, 30 bp, Artificial Sequence
  Synthetic oligonucleotide
cacctataaacgggctgattccaccataaa

SEQ ID NO: 196081 - DNA, 30 bp, Artificial Sequence
  Synthetic oligonucleotide
gggcaactgtctccgacatcacgccataaa

SEQ ID NO: 196082 - DNA, 30 bp, Artificial Sequence
  Synthetic oligonucleotide
acccgttctaagggacaagccggccataaa

SEQ ID NO: 196083 - DNA, 30 bp, Artificial Sequence
  Synthetic oligonucleotide
cgtctagaaactgtgatctcgtgccataaa

SEQ ID NO: 196084 - DNA, 30 bp, Artificial Sequence
  Synthetic oligonucleotide
tatccagaccagacgggtaacgcgcataaa

SEQ ID NO: 196085 - DNA, 30 bp, Artificial Sequence
  Synthetic oligonucleotide
ctacgggattggattcgggcaaggcataaa

SEQ ID NO: 196086 - DNA, 30 bp, Artificial Sequence
  Synthetic oligonucleotide
ggtatcatagacattcagagggggcataaa

SEQ ID NO: 196087 - DNA, 30 bp, Artificial Sequence
  Synthetic oligonucleotide
gagggctcatggtaactggggtacgataaa

SEQ ID NO: 196088 - DNA, 30 bp, Artificial Sequence
  Synthetic oligonucleotide
tcccggcacagtaagcgcgcatccgataaa

SEQ ID NO: 196089 - DNA, 30 bp, Artificial Sequence
  Synthetic oligonucleotide
actcctatatgatcatcgtgtatggataaa

SEQ ID NO: 196090 - DNA, 30 bp, Artificial Sequence
  Synthetic oligonucleotide
atcgaacgaagttacggctcaactgataaa

SEQ ID NO: 196091 - DNA, 30 bp, Artificial Sequence
  Synthetic oligonucleotide
tgaatatgcctaagtgatgtccctgataaa

SEQ ID NO: 196092 - DNA, 30 bp, Artificial Sequence
  Synthetic oligonucleotide
gtcagcgggctggaccgacgacttgataaa

SEQ ID NO: 196093 - DNA, 30 bp, Artificial Sequence
  Synthetic oligonucleotide
aggcgtgacaccgtgacgtgtgaatataaa

SEQ ID NO: 196094 - DNA, 30 bp, Artificial Sequence
  Synthetic oligonucleotide
agagacaagttcgtgcggaacgcatataaa

SEQ ID NO: 196095 - DNA, 30 bp, Artificial Sequence
  Synthetic oligonucleotide
ctgagagcttggccgctcgaactatataaa

SEQ ID NO: 196096 - DNA, 30 bp, Artificial Sequence
  Synthetic oligonucleotide
tccacaagaaattcgcactcttcctataaa

SEQ ID NO: 196097 - DNA, 30 bp, Artificial Sequence
  Synthetic oligonucleotide
gcagagaggctacacgtaaagtcgtataaa

SEQ ID NO: 196098 - DNA, 30 bp, Artificial Sequence
  Synthetic oligonucleotide
ttagaacggataataaccgcattgtataaa

SEQ ID NO: 196099 - DNA, 30 bp, Artificial Sequence
  Synthetic oligonucleotide
tgctctgttaagtagtgacaccattataaa

SEQ ID NO: 196100 - DNA, 30 bp, Artificial Sequence
  Synthetic oligonucleotide
gaggtgacagatgccatgtacggaactaaa

SEQ ID NO: 196101 - DNA, 30 bp, Artificial Sequence
  Synthetic oligonucleotide
acgatgcgactgtacccaaaagtaactaaa

SEQ ID NO: 196102 - DNA, 30 bp, Artificial Sequence
  Synthetic oligonucleotide
gccatcattcttaataaggagctcactaaa

SEQ ID NO: 196103 - DNA, 30 bp, Artificial Sequence
  Synthetic oligonucleotide
ggaaagttctgcaagggctgatggactaaa

SEQ ID NO: 196104 - DNA, 30 bp, Artificial Sequence
  Synthetic oligonucleotide
acgctctcctcgatctactaccgtactaaa

SEQ ID NO: 196105 - DNA, 30 bp, Artificial Sequence
  Synthetic oligonucleotide
gctctcttgagagagccgttaaaccctaaa

SEQ ID NO: 196106 - DNA, 30 bp, Artificial Sequence
  Synthetic oligonucleotide
tgcactattctcggtgtggactaccctaaa

SEQ ID NO: 196107 - DNA, 30 bp, Artificial Sequence
  Synthetic oligonucleotide
tgtgggagtgagtctgaacgttaccctaaa

SEQ ID NO: 196108 - DNA, 30 bp, Artificial Sequence
  Synthetic oligonucleotide
agttttttcgtacgacagtagtagcctaaa

SEQ ID NO: 196109 - DNA, 30 bp, Artificial Sequence
  Synthetic oligonucleotide
cgcgcgtgctgaggatcgccgaatcctaaa

SEQ ID NO: 196110 - DNA, 30 bp, Artificial Sequence
  Synthetic oligonucleotide
aaaaaagaacaaaactataggggagctaaa

SEQ ID NO: 196111 - DNA, 30 bp, Artificial Sequence
  Synthetic oligonucleotide
ggacaagctctgttagatactagcgctaaa

SEQ ID NO: 196112 - DNA, 30 bp, Artificial Sequence
  Synthetic oligonucleotide
cgtgacagataaaattttttagcggctaaa

SEQ ID NO: 196113 - DNA, 30 bp, Artificial Sequence
  Synthetic oligonucleotide
cgagtgtcgggggcctcgacatatgctaaa

SEQ ID NO: 196114 - DNA, 30 bp, Artificial Sequence
  Synthetic oligonucleotide
ctgaaccgtcagttggaacggcaatctaaa

SEQ ID NO: 196115 - DNA, 30 bp, Artificial Sequence
  Synthetic oligonucleotide
gtaccacgatccatttgttgttcatctaaa

SEQ ID NO: 196116 - DNA, 30 bp, Artificial Sequence
  Synthetic oligonucleotide
tgctaagagaggtaatcgggttcttctaaa

SEQ ID NO: 196117 - DNA, 30 bp, Artificial Sequence
  Synthetic oligonucleotide
tatgattcgctaaggtacgcttaaagtaaa

SEQ ID NO: 196118 - DNA, 30 bp, Artificial Sequence
  Synthetic oligonucleotide
aacgtatccccgcttgaatcgctgagtaaa

SEQ ID NO: 196119 - DNA, 30 bp, Artificial Sequence
  Synthetic oligonucleotide
tatgtcaatgtttcaaatctgctccgtaaa

SEQ ID NO: 196120 - DNA, 30 bp, Artificial Sequence
  Synthetic oligonucleotide
acaagcttagagctcaaagtcgcgcgtaaa

SEQ ID NO: 196121 - DNA, 30 bp, Artificial Sequence
  Synthetic oligonucleotide
agaagtgccttggcgaatgccttgcgtaaa

SEQ ID NO: 196122 - DNA, 30 bp, Artificial Sequence
  Synthetic oligonucleotide
aaccgcacagctgagcgcgtccaaggtaaa

SEQ ID NO: 196123 - DNA, 30 bp, Artificial Sequence
  Synthetic oligonucleotide
ttcgcaactccgctaaattaaggaggtaaa

SEQ ID NO: 196124 - DNA, 30 bp, Artificial Sequence
  Synthetic oligonucleotide
tcggatagaagatcgttcacgcacggtaaa

SEQ ID NO: 196125 - DNA, 30 bp, Artificial Sequence
  Synthetic oligonucleotide
accctaatctcgctttcgaaaatcggtaaa

SEQ ID NO: 196126 - DNA, 30 bp, Artificial Sequence
  Synthetic oligonucleotide
tctcccattgccgccgaatcgacgggtaaa

SEQ ID NO: 196127 - DNA, 30 bp, Artificial Sequence
  Synthetic oligonucleotide
tagagctcgtacattcgaacaatgggtaaa

SEQ ID NO: 196128 - DNA, 30 bp, Artificial Sequence
  Synthetic oligonucleotide
atcacggtacgagtgcggaaaacatgtaaa

SEQ ID NO: 196129 - DNA, 30 bp, Artificial Sequence
  Synthetic oligonucleotide
accgggtccagaaggcaagtggtatgtaaa

SEQ ID NO: 196130 - DNA, 30 bp, Artificial Sequence
  Synthetic oligonucleotide
gttatcagattcgaatgcccgttatgtaaa

SEQ ID NO: 196131 - DNA, 30 bp, Artificial Sequence
  Synthetic oligonucleotide
agcggcgcgaagtccatatgcacgtgtaaa

SEQ ID NO: 196132 - DNA, 30 bp, Artificial Sequence
  Synthetic oligonucleotide
ttagggcagcaatcaatgtccaggtgtaaa

SEQ ID NO: 196133 - DNA, 30 bp, Artificial Sequence
  Synthetic oligonucleotide
ggtatctactaccctgtgcataggtgtaaa

SEQ ID NO: 196134 - DNA, 30 bp, Artificial Sequence
  Synthetic oligonucleotide
gtctacaccaagggccactgtctcattaaa

SEQ ID NO: 196135 - DNA, 30 bp, Artificial Sequence
  Synthetic oligonucleotide
gggactactcagctaagtagcgtcattaaa

SEQ ID NO: 196136 - DNA, 30 bp, Artificial Sequence
  Synthetic oligonucleotide
agttcgacgggaatgataagaagtattaaa

SEQ ID NO: 196137 - DNA, 30 bp, Artificial Sequence
  Synthetic oligonucleotide
gtgaggatcgcgagaaacgagagacttaaa

SEQ ID NO: 196138 - DNA, 30 bp, Artificial Sequence
  Synthetic oligonucleotide
gctggaaacgacctacgattctgacttaaa

SEQ ID NO: 196139 - DNA, 30 bp, Artificial Sequence
  Synthetic oligonucleotide
gtcgacctggacagcattgtataccttaaa

SEQ ID NO: 196140 - DNA, 30 bp, Artificial Sequence
  Synthetic oligonucleotide
ccagggtgcaccgggattttatcccttaaa

SEQ ID NO: 196141 - DNA, 30 bp, Artificial Sequence
  Synthetic oligonucleotide
gcggattgtttgtcccagacagtccttaaa

SEQ ID NO: 196142 - DNA, 30 bp, Artificial Sequence
  Synthetic oligonucleotide
cctttcgtaatatcatataatttgcttaaa

SEQ ID NO: 196143 - DNA, 30 bp, Artificial Sequence
  Synthetic oligonucleotide
tcgaccgttacacggagccacgttcttaaa

SEQ ID NO: 196144 - DNA, 30 bp, Artificial Sequence
  Synthetic oligonucleotide
ctgtaggttataggggcgcctcaggttaaa

SEQ ID NO: 196145 - DNA, 30 bp, Artificial Sequence
  Synthetic oligonucleotide
tgccgccgtcgcttcggaggccaatttaaa

SEQ ID NO: 196146 - DNA, 30 bp, Artificial Sequence
  Synthetic oligonucleotide
aaccgaactctctactgaccgagatttaaa

SEQ ID NO: 196147 - DNA, 30 bp, Artificial Sequence
  Synthetic oligonucleotide
tgtgatccggataatattgggggatttaaa

SEQ ID NO: 196148 - DNA, 30 bp, Artificial Sequence
  Synthetic oligonucleotide
aggcctaggcatcttcgcaaccgctttaaa

SEQ ID NO: 196149 - DNA, 30 bp, Artificial Sequence
  Synthetic oligonucleotide
tctgtcagaagctatatccggaaaaaacaa

SEQ ID NO: 196150 - DNA, 30 bp, Artificial Sequence
  Synthetic oligonucleotide
ttcgatggaattcatcgcttaccaaaacaa

SEQ ID NO: 196151 - DNA, 30 bp, Artificial Sequence
  Synthetic oligonucleotide
tgtggagaaatctatgcttaaggcaaacaa

SEQ ID NO: 196152 - DNA, 30 bp, Artificial Sequence
  Synthetic oligonucleotide
gtggtagcagcacataatgaccagaaacaa

SEQ ID NO: 196153 - DNA, 30 bp, Artificial Sequence
  Synthetic oligonucleotide
aagggaatgaatagctggttctagaaacaa

SEQ ID NO: 196154 - DNA, 30 bp, Artificial Sequence
  Synthetic oligonucleotide
ggccgcttgagaaattaggggacgaaacaa

SEQ ID NO: 196155 - DNA, 30 bp, Artificial Sequence
  Synthetic oligonucleotide
cagcccaagaggactttggaatcgaaacaa

SEQ ID NO: 196156 - DNA, 30 bp, Artificial Sequence
  Synthetic oligonucleotide
cgaatcgattatgcgagagacattaaacaa

SEQ ID NO: 196157 - DNA, 30 bp, Artificial Sequence
  Synthetic oligonucleotide
aggggatggattatagcaattcttaaacaa

SEQ ID NO: 196158 - DNA, 30 bp, Artificial Sequence
  Synthetic oligonucleotide
ccgcccgacattgcatacccgaaccaacaa

SEQ ID NO: 196159 - DNA, 30 bp, Artificial Sequence
  Synthetic oligonucleotide
caaagcaaagacggtcgtcatgcccaacaa

SEQ ID NO: 196160 - DNA, 30 bp, Artificial Sequence
  Synthetic oligonucleotide
aaaaattccaccataattaaatcccaacaa

SEQ ID NO: 196161 - DNA, 30 bp, Artificial Sequence
  Synthetic oligonucleotide
ataaagaggggaagaacctaatgccaacaa

SEQ ID NO: 196162 - DNA, 30 bp, Artificial Sequence
  Synthetic oligonucleotide
gcgacctatagattaacaagcatccaacaa

SEQ ID NO: 196163 - DNA, 30 bp, Artificial Sequence
  Synthetic oligonucleotide
ataccgtatgagggtcacttagagcaacaa

SEQ ID NO: 196164 - DNA, 30 bp, Artificial Sequence
  Synthetic oligonucleotide
ccgtgaacgcacccttccatacctcaacaa

SEQ ID NO: 196165 - DNA, 30 bp, Artificial Sequence
  Synthetic oligonucleotide
ggcggtaatttcttatatgcattagaacaa

SEQ ID NO: 196166 - DNA, 30 bp, Artificial Sequence
  Synthetic oligonucleotide
ggtacctgattccgcatggaagccgaacaa

SEQ ID NO: 196167 - DNA, 30 bp, Artificial Sequence
  Synthetic oligonucleotide
taggtaccccccctgtaatgtgccgaacaa

SEQ ID NO: 196168 - DNA, 30 bp, Artificial Sequence
  Synthetic oligonucleotide
ggcggtaaggtctctaaaccggaggaacaa

SEQ ID NO: 196169 - DNA, 30 bp, Artificial Sequence
  Synthetic oligonucleotide
gagaagcgaactggagttttttgggaacaa

SEQ ID NO: 196170 - DNA, 30 bp, Artificial Sequence
  Synthetic oligonucleotide
ggttactcctgccaactatagacataacaa

SEQ ID NO: 196171 - DNA, 30 bp, Artificial Sequence
  Synthetic oligonucleotide
aggaatctaactggggcatgaatataacaa

SEQ ID NO: 196172 - DNA, 30 bp, Artificial Sequence
  Synthetic oligonucleotide
taaacacctaccggccgtcggccctaacaa

SEQ ID NO: 196173 - DNA, 30 bp, Artificial Sequence
  Synthetic oligonucleotide
gaacataccgcagacgccatcgagtaacaa

SEQ ID NO: 196174 - DNA, 30 bp, Artificial Sequence
  Synthetic oligonucleotide
cacgagccaagggatacagcagcgtaacaa

SEQ ID NO: 196175 - DNA, 30 bp, Artificial Sequence
  Synthetic oligonucleotide
tctccagtaggcaatcttatacattaacaa

SEQ ID NO: 196176 - DNA, 30 bp, Artificial Sequence
  Synthetic oligonucleotide
gacagcagatgagcacggccaccttaacaa

SEQ ID NO: 196177 - DNA, 30 bp, Artificial Sequence
  Synthetic oligonucleotide
agagtaccggtagtcctctcgatttaacaa

SEQ ID NO: 196178 - DNA, 30 bp, Artificial Sequence
  Synthetic oligonucleotide
aattagaccgggtgctaaatcccaacacaa

SEQ ID NO: 196179 - DNA, 30 bp, Artificial Sequence
  Synthetic oligonucleotide
gactgaggtgaacatcaacgcatcacacaa

SEQ ID NO: 196180 - DNA, 30 bp, Artificial Sequence
  Synthetic oligonucleotide
gactagtaaccttatctgacgttcacacaa

SEQ ID NO: 196181 - DNA, 30 bp, Artificial Sequence
  Synthetic oligonucleotide
tttgagcaaatgggataatagacgacacaa

SEQ ID NO: 196182 - DNA, 30 bp, Artificial Sequence
  Synthetic oligonucleotide
ggatggagagttcggtgataatcgacacaa

SEQ ID NO: 196183 - DNA, 30 bp, Artificial Sequence
  Synthetic oligonucleotide
atgacgcacgtgctttctagccctacacaa

SEQ ID NO: 196184 - DNA, 30 bp, Artificial Sequence
  Synthetic oligonucleotide
gtcaatctctcaagataaaagtgtacacaa

SEQ ID NO: 196185 - DNA, 30 bp, Artificial Sequence
  Synthetic oligonucleotide
gcatcttgccagtcaatctgcgttacacaa

SEQ ID NO: 196186 - DNA, 30 bp, Artificial Sequence
  Synthetic oligonucleotide
tcgttcctcttcatggttcatgccccacaa

SEQ ID NO: 196187 - DNA, 30 bp, Artificial Sequence
  Synthetic oligonucleotide
gataatatgtactctccgagaaaagcacaa

SEQ ID NO: 196188 - DNA, 30 bp, Artificial Sequence
  Synthetic oligonucleotide
gagccagctcatcggtccggttcagcacaa

SEQ ID NO: 196189 - DNA, 30 bp, Artificial Sequence
  Synthetic oligonucleotide
gatcgatcatcgcagataacgtgagcacaa

SEQ ID NO: 196190 - DNA, 30 bp, Artificial Sequence
  Synthetic oligonucleotide
atccaaatgggaatcttccctcacgcacaa

SEQ ID NO: 196191 - DNA, 30 bp, Artificial Sequence
  Synthetic oligonucleotide
attagctgacatagcgagcaaggcgcacaa

SEQ ID NO: 196192 - DNA, 30 bp, Artificial Sequence
  Synthetic oligonucleotide
gggaatccgctcaaccgtttactcgcacaa

SEQ ID NO: 196193 - DNA, 30 bp, Artificial Sequence
  Synthetic oligonucleotide
tcgccggcactggacttgtcttatgcacaa

SEQ ID NO: 196194 - DNA, 30 bp, Artificial Sequence
  Synthetic oligonucleotide
agccatacagtatcgttatacagtgcacaa

SEQ ID NO: 196195 - DNA, 30 bp, Artificial Sequence
  Synthetic oligonucleotide
attgacagagaaagcaggtagcgatcacaa

SEQ ID NO: 196196 - DNA, 30 bp, Artificial Sequence
  Synthetic oligonucleotide
tggaaccactgtaagatgtccgcgtcacaa

SEQ ID NO: 196197 - DNA, 30 bp, Artificial Sequence
  Synthetic oligonucleotide
tgattggaaggagtaggctcgcaaagacaa

SEQ ID NO: 196198 - DNA, 30 bp, Artificial Sequence
  Synthetic oligonucleotide
ggcaatggaggaagctgacgctgaagacaa

SEQ ID NO: 196199 - DNA, 30 bp, Artificial Sequence
  Synthetic oligonucleotide
gtaagattccttgtagacactcacagacaa

SEQ ID NO: 196200 - DNA, 30 bp, Artificial Sequence
  Synthetic oligonucleotide
tgctggatcaatcttgccaaaatcagacaa

SEQ ID NO: 196201 - DNA, 30 bp, Artificial Sequence
  Synthetic oligonucleotide
ggacggtgtaaggaagcgccccagagacaa

SEQ ID NO: 196202 - DNA, 30 bp, Artificial Sequence
  Synthetic oligonucleotide
aatactgatttttaggcgggacggagacaa

SEQ ID NO: 196203 - DNA, 30 bp, Artificial Sequence
  Synthetic oligonucleotide
agctttcaaggagtcggggaactgagacaa

SEQ ID NO: 196204 - DNA, 30 bp, Artificial Sequence
  Synthetic oligonucleotide
tggatttacaatacggtacctattagacaa

SEQ ID NO: 196205 - DNA, 30 bp, Artificial Sequence
  Synthetic oligonucleotide
cacgaagtaaagccgtttcggatccgacaa

SEQ ID NO: 196206 - DNA, 30 bp, Artificial Sequence
  Synthetic oligonucleotide
ctcatttggattttgtttagtctccgacaa

SEQ ID NO: 196207 - DNA, 30 bp, Artificial Sequence
  Synthetic oligonucleotide
tacggtcaacttctgtacgtgagtcgacaa

SEQ ID NO: 196208 - DNA, 30 bp, Artificial Sequence
  Synthetic oligonucleotide
agatggctttattgttgagctgttcgacaa

SEQ ID NO: 196209 - DNA, 30 bp, Artificial Sequence
  Synthetic oligonucleotide
tgtccctggcctgcaaatcacaaaggacaa

SEQ ID NO: 196210 - DNA, 30 bp, Artificial Sequence
  Synthetic oligonucleotide
acttatcgcacctacaagaccgccggacaa

SEQ ID NO: 196211 - DNA, 30 bp, Artificial Sequence
  Synthetic oligonucleotide
gtcgagacctggaaggcggaacgcggacaa

SEQ ID NO: 196212 - DNA, 30 bp, Artificial Sequence
  Synthetic oligonucleotide
ataggagggctcatccaagtccgcggacaa

SEQ ID NO: 196213 - DNA, 30 bp, Artificial Sequence
  Synthetic oligonucleotide
ttcgtgggatccaagttgagcctcggacaa

SEQ ID NO: 196214 - DNA, 30 bp, Artificial Sequence
  Synthetic oligonucleotide
ataggaagggttactattcctgcgggacaa

SEQ ID NO: 196215 - DNA, 30 bp, Artificial Sequence
  Synthetic oligonucleotide
agtgctatgcaccaaccacggttgggacaa

SEQ ID NO: 196216 - DNA, 30 bp, Artificial Sequence
  Synthetic oligonucleotide
gtgttggggcgtctttttcggttgggacaa

SEQ ID NO: 196217 - DNA, 30 bp, Artificial Sequence
  Synthetic oligonucleotide
cgagctcacatgttggctctcgctggacaa

SEQ ID NO: 196218 - DNA, 30 bp, Artificial Sequence
  Synthetic oligonucleotide
tcatttcggcgacattgggtatgtggacaa

SEQ ID NO: 196219 - DNA, 30 bp, Artificial Sequence
  Synthetic oligonucleotide
atcgtaagtgttattgattccaaatgacaa

SEQ ID NO: 196220 - DNA, 30 bp, Artificial Sequence
  Synthetic oligonucleotide
ttgaccacgaccaaccttatatgatgacaa

SEQ ID NO: 196221 - DNA, 30 bp, Artificial Sequence
  Synthetic oligonucleotide
gactacaaattaaattaacgtatatgacaa

SEQ ID NO: 196222 - DNA, 30 bp, Artificial Sequence
  Synthetic oligonucleotide
atcaaagaacagggaccggttgtgtgacaa

SEQ ID NO: 196223 - DNA, 30 bp, Artificial Sequence
  Synthetic oligonucleotide
ggatgcttctcaggtaaaggtatttgacaa

SEQ ID NO: 196224 - DNA, 30 bp, Artificial Sequence
  Synthetic oligonucleotide
acacgattataagtgagcttccgaatacaa

SEQ ID NO: 196225 - DNA, 31 bp, Artificial Sequence
  Synthetic oligonucleotide
tggttatcgccgtatcaagccgggcatacaa

SEQ ID NO: 196226 - DNA, 30 bp, Artificial Sequence
  Synthetic oligonucleotide
atcaggccaggttagccgtcatagatacaa

SEQ ID NO: 196227 - DNA, 30 bp, Artificial Sequence
  Synthetic oligonucleotide
tcgactaagctgcctgcaacacgtatacaa

SEQ ID NO: 196228 - DNA, 31 bp, Artificial Sequence
  Synthetic oligonucleotide
ggcaccggactctgacctaacgcttatacaa

SEQ ID NO: 196229 - DNA, 30 bp, Artificial Sequence
  Synthetic oligonucleotide
tacggtccgtcaaatagttttgtactacaa

SEQ ID NO: 196230 - DNA, 30 bp, Artificial Sequence
  Synthetic oligonucleotide
ggaaatgtcttaccaaatttagatctacaa

SEQ ID NO: 196231 - DNA, 30 bp, Artificial Sequence
  Synthetic oligonucleotide
agcgtcgatccgacgaaatggctcgtacaa

SEQ ID NO: 196232 - DNA, 30 bp, Artificial Sequence
  Synthetic oligonucleotide
tatgcttcatccctctgggcacaggtacaa

SEQ ID NO: 196233 - DNA, 30 bp, Artificial Sequence
  Synthetic oligonucleotide
aagattaccgctcttaattagtgggtacaa

SEQ ID NO: 196234 - DNA, 30 bp, Artificial Sequence
  Synthetic oligonucleotide
agcttcggggttataaggataatggtacaa

SEQ ID NO: 196235 - DNA, 31 bp, Artificial Sequence
  Synthetic oligonucleotide
aagatgagaaccattgataagtcctgtacaa

SEQ ID NO: 196236 - DNA, 30 bp, Artificial Sequence
  Synthetic oligonucleotide
gcagagctcagctagtctcgtagtgtacaa

SEQ ID NO: 196237 - DNA, 30 bp, Artificial Sequence
  Synthetic oligonucleotide
agctatccatcacgtctcacgcgtgtacaa

SEQ ID NO: 196238 - DNA, 30 bp, Artificial Sequence
  Synthetic oligonucleotide
aaaaaaccaaaggaaccgcgagaattacaa

SEQ ID NO: 196239 - DNA, 30 bp, Artificial Sequence
  Synthetic oligonucleotide
gtgacgactggggtttaagcgtgattacaa

SEQ ID NO: 196240 - DNA, 30 bp, Artificial Sequence
  Synthetic oligonucleotide
gcgtcggcatcgaaagagcactgcttacaa

SEQ ID NO: 196241 - DNA, 30 bp, Artificial Sequence
  Synthetic oligonucleotide
taagccggtgagtcagttaaatagttacaa

SEQ ID NO: 196242 - DNA, 30 bp, Artificial Sequence
  Synthetic oligonucleotide
aaattgtcggtgtggccgagaccgttacaa

SEQ ID NO: 196243 - DNA, 30 bp, Artificial Sequence
  Synthetic oligonucleotide
gggccgaaactagggccacggaggttacaa

SEQ ID NO: 196244 - DNA, 30 bp, Artificial Sequence
  Synthetic oligonucleotide
ccataactaggctctcccgggggtttacaa

SEQ ID NO: 196245 - DNA, 30 bp, Artificial Sequence
  Synthetic oligonucleotide
ataagcagttgtggctgggtaacaaaccaa

SEQ ID NO: 196246 - DNA, 30 bp, Artificial Sequence
  Synthetic oligonucleotide
acttcccgagcccgcctcatcttaaaccaa

SEQ ID NO: 196247 - DNA, 30 bp, Artificial Sequence
  Synthetic oligonucleotide
attacttacagatccaaagagcacaaccaa

SEQ ID NO: 196248 - DNA, 30 bp, Artificial Sequence
  Synthetic oligonucleotide
tggatccgggttcgattgaatatcaaccaa

SEQ ID NO: 196249 - DNA, 30 bp, Artificial Sequence
  Synthetic oligonucleotide
tgaaacaaaattacgattgttcggaaccaa

SEQ ID NO: 196250 - DNA, 30 bp, Artificial Sequence
  Synthetic oligonucleotide
tctcgataacctggggtctgtggtaaccaa

SEQ ID NO: 196251 - DNA, 30 bp, Artificial Sequence
  Synthetic oligonucleotide
gaagtgtcttgcatggagactacacaccaa

SEQ ID NO: 196252 - DNA, 30 bp, Artificial Sequence
  Synthetic oligonucleotide
ggaaccgccttgggaaagtgggcgcaccaa

SEQ ID NO: 196253 - DNA, 30 bp, Artificial Sequence
  Synthetic oligonucleotide
actgtgaaccactgatatattcggcaccaa

SEQ ID NO: 196254 - DNA, 30 bp, Artificial Sequence
  Synthetic oligonucleotide
tacttagaaatttccaccggacttcaccaa

SEQ ID NO: 196255 - DNA, 30 bp, Artificial Sequence
  Synthetic oligonucleotide
gagagcggtcggatggcagtcgcagaccaa

SEQ ID NO: 196256 - DNA, 30 bp, Artificial Sequence
  Synthetic oligonucleotide
gggtgtatggtgtgaggcagtagagaccaa

SEQ ID NO: 196257 - DNA, 29 bp, Artificial Sequence
  Synthetic oligonucleotide
gtgcagtaattcactggaattctgaccaa

SEQ ID NO: 196258 - DNA, 30 bp, Artificial Sequence
  Synthetic oligonucleotide
gtagtccagtgatgtttttgttttgaccaa

SEQ ID NO: 196259 - DNA, 30 bp, Artificial Sequence
  Synthetic oligonucleotide
tttttgaagtgactgacaaattattaccaa

SEQ ID NO: 196260 - DNA, 30 bp, Artificial Sequence
  Synthetic oligonucleotide
caaccatatctcatacatggatcttaccaa

SEQ ID NO: 196261 - DNA, 30 bp, Artificial Sequence
  Synthetic oligonucleotide
tagggtgcgtatcgtttggggcgttaccaa

SEQ ID NO: 196262 - DNA, 30 bp, Artificial Sequence
  Synthetic oligonucleotide
ccgggtccggaggaccttaaaagaacccaa

SEQ ID NO: 196263 - DNA, 30 bp, Artificial Sequence
  Synthetic oligonucleotide
gtgttggcgaaattaggaccggacacccaa

SEQ ID NO: 196264 - DNA, 30 bp, Artificial Sequence
  Synthetic oligonucleotide
ccactcgggatctcgaggacttagacccaa

SEQ ID NO: 196265 - DNA, 30 bp, Artificial Sequence
  Synthetic oligonucleotide
ggattacgatactggactgcttacccccaa

SEQ ID NO: 196266 - DNA, 30 bp, Artificial Sequence
  Synthetic oligonucleotide
atacggtcaatgtaacatgattgcccccaa

SEQ ID NO: 196267 - DNA, 30 bp, Artificial Sequence
  Synthetic oligonucleotide
acgagtcaccgtgattaacctcagccccaa

SEQ ID NO: 196268 - DNA, 30 bp, Artificial Sequence
  Synthetic oligonucleotide
cagtgatcagtaggaatgaggtcgccccaa

SEQ ID NO: 196269 - DNA, 30 bp, Artificial Sequence
  Synthetic oligonucleotide
ggtgaaggcataccactgctcgaggcccaa

SEQ ID NO: 196270 - DNA, 30 bp, Artificial Sequence
  Synthetic oligonucleotide
ggatgtttaaactgtgcgtccggtgcccaa

SEQ ID NO: 196271 - DNA, 30 bp, Artificial Sequence
  Synthetic oligonucleotide
aatctcgggtgatcagcaagagttgcccaa

SEQ ID NO: 196272 - DNA, 30 bp, Artificial Sequence
  Synthetic oligonucleotide
gctctggattgagaaagggctagctcccaa

SEQ ID NO: 196273 - DNA, 30 bp, Artificial Sequence
  Synthetic oligonucleotide
atgtggaagtaattttggcacatcagccaa

SEQ ID NO: 196274 - DNA, 30 bp, Artificial Sequence
  Synthetic oligonucleotide
acagtatccctcgggtgaaaccggagccaa

SEQ ID NO: 196275 - DNA, 30 bp, Artificial Sequence
  Synthetic oligonucleotide
gacaaaacctgtacgagaccgccacgccaa

SEQ ID NO: 196276 - DNA, 30 bp, Artificial Sequence
  Synthetic oligonucleotide
aacctggtatgaggaggtattaaccgccaa

SEQ ID NO: 196277 - DNA, 30 bp, Artificial Sequence
  Synthetic oligonucleotide
gcggggcactcaggagccgaatgccgccaa

SEQ ID NO: 196278 - DNA, 30 bp, Artificial Sequence
  Synthetic oligonucleotide
gcaatagttaagcgagcagttttccgccaa

SEQ ID NO: 196279 - DNA, 30 bp, Artificial Sequence
  Synthetic oligonucleotide
tcaatggttgggaaactgcacgcgggccaa

SEQ ID NO: 196280 - DNA, 30 bp, Artificial Sequence
  Synthetic oligonucleotide
ccgttatttctacgaaaggggctgggccaa

SEQ ID NO: 196281 - DNA, 30 bp, Artificial Sequence
  Synthetic oligonucleotide
ggggaagagccgcgcctgtcccatggccaa

SEQ ID NO: 196282 - DNA, 30 bp, Artificial Sequence
  Synthetic oligonucleotide
aagtagcgcttgactgaggtctaatgccaa

SEQ ID NO: 196283 - DNA, 30 bp, Artificial Sequence
  Synthetic oligonucleotide
atattcgggaagccaattccaggatgccaa

SEQ ID NO: 196284 - DNA, 30 bp, Artificial Sequence
  Synthetic oligonucleotide
tagtatctataacggagaagttagtgccaa

SEQ ID NO: 196285 - DNA, 30 bp, Artificial Sequence
  Synthetic oligonucleotide
ggcgacaggtgtctgtcggcattgtgccaa

SEQ ID NO: 196286 - DNA, 30 bp, Artificial Sequence
  Synthetic oligonucleotide
ctatggccgtaaaggcttagcccttgccaa

SEQ ID NO: 196287 - DNA, 30 bp, Artificial Sequence
  Synthetic oligonucleotide
gggctcgttgccacagggacacaaatccaa

SEQ ID NO: 196288 - DNA, 30 bp, Artificial Sequence
  Synthetic oligonucleotide
agagtacaatccgcaccgggctgaatccaa

SEQ ID NO: 196289 - DNA, 30 bp, Artificial Sequence
  Synthetic oligonucleotide
gacaacgctgcaggctagatatggatccaa

SEQ ID NO: 196290 - DNA, 30 bp, Artificial Sequence
  Synthetic oligonucleotide
aacataggcaatatggtcggctatctccaa

SEQ ID NO: 196291 - DNA, 30 bp, Artificial Sequence
  Synthetic oligonucleotide
ctgcgatgaatgcgaagagcctaggtccaa

SEQ ID NO: 196292 - DNA, 30 bp, Artificial Sequence
  Synthetic oligonucleotide
ggagcttaaaattacctacccctggtccaa

SEQ ID NO: 196293 - DNA, 30 bp, Artificial Sequence
  Synthetic oligonucleotide
tcaattaggccggtaaagttaagtgtccaa

SEQ ID NO: 196294 - DNA, 30 bp, Artificial Sequence
  Synthetic oligonucleotide
gggacaataacaatcatacgtgttgtccaa

SEQ ID NO: 196295 - DNA, 30 bp, Artificial Sequence
  Synthetic oligonucleotide
tcctgacaggactcgctcccgtttgtccaa

SEQ ID NO: 196296 - DNA, 30 bp, Artificial Sequence
  Synthetic oligonucleotide
ggtagatagtgcccggcgtagaccttccaa

SEQ ID NO: 196297 - DNA, 30 bp, Artificial Sequence
  Synthetic oligonucleotide
acttggagaacatcactgatacccttccaa

SEQ ID NO: 196298 - DNA, 30 bp, Artificial Sequence
  Synthetic oligonucleotide
tgtgtggccaggatgtatattaagttccaa

SEQ ID NO: 196299 - DNA, 30 bp, Artificial Sequence
  Synthetic oligonucleotide
gggaaagctccgcaatgatgttatttccaa

SEQ ID NO: 196300 - DNA, 30 bp, Artificial Sequence
  Synthetic oligonucleotide
ccggtaaataggccacgcggtgcaaagcaa

SEQ ID NO: 196301 - DNA, 30 bp, Artificial Sequence
  Synthetic oligonucleotide
cctgtcggaaagcaaccgcacttgaagcaa

SEQ ID NO: 196302 - DNA, 30 bp, Artificial Sequence
  Synthetic oligonucleotide
taaagcaatttgattatcggcttgaagcaa

SEQ ID NO: 196303 - DNA, 30 bp, Artificial Sequence
  Synthetic oligonucleotide
aagtacggaatttatttcgatgttaagcaa

SEQ ID NO: 196304 - DNA, 30 bp, Artificial Sequence
  Synthetic oligonucleotide
tgggaattgcactgttaaccactacagcaa

SEQ ID NO: 196305 - DNA, 30 bp, Artificial Sequence
  Synthetic oligonucleotide
aatcaggctcgaatgatcgaatcccagcaa

SEQ ID NO: 196306 - DNA, 30 bp, Artificial Sequence
  Synthetic oligonucleotide
catgagttgatactaggagttatgcagcaa

SEQ ID NO: 196307 - DNA, 30 bp, Artificial Sequence
  Synthetic oligonucleotide
aatggttgtatatggtcgtgcattcagcaa

SEQ ID NO: 196308 - DNA, 30 bp, Artificial Sequence
  Synthetic oligonucleotide
cggactgtggttttccgaaaagtagagcaa

SEQ ID NO: 196309 - DNA, 30 bp, Artificial Sequence
  Synthetic oligonucleotide
acattggacgggccgctccttgtcgagcaa

SEQ ID NO: 196310 - DNA, 30 bp, Artificial Sequence
  Synthetic oligonucleotide
ggcagtgtcgggcgctaattaaatgagcaa

SEQ ID NO: 196311 - DNA, 30 bp, Artificial Sequence
  Synthetic oligonucleotide
aactctctactcacggcgtgtagatagcaa

SEQ ID NO: 196312 - DNA, 30 bp, Artificial Sequence
  Synthetic oligonucleotide
atctcacgaaaacagaagtaggacacgcaa

SEQ ID NO: 196313 - DNA, 30 bp, Artificial Sequence
  Synthetic oligonucleotide
ccacgctgccagatatatgaatccacgcaa

SEQ ID NO: 196314 - DNA, 30 bp, Artificial Sequence
  Synthetic oligonucleotide
atgctgcgcacaaaatccacgtgcacgcaa

SEQ ID NO: 196315 - DNA, 30 bp, Artificial Sequence
  Synthetic oligonucleotide
ttcgttacgatacaagatcctggtacgcaa

SEQ ID NO: 196316 - DNA, 30 bp, Artificial Sequence
  Synthetic oligonucleotide
cgaactctgactaagtgctacaacccgcaa

SEQ ID NO: 196317 - DNA, 30 bp, Artificial Sequence
  Synthetic oligonucleotide
atgcaatatccactaatcatgcgcccgcaa

SEQ ID NO: 196318 - DNA, 30 bp, Artificial Sequence
  Synthetic oligonucleotide
ggagaggggtctccacgggatgtcccgcaa

SEQ ID NO: 196319 - DNA, 30 bp, Artificial Sequence
  Synthetic oligonucleotide
gccggtgttcgatggatggattagccgcaa

SEQ ID NO: 196320 - DNA, 30 bp, Artificial Sequence
  Synthetic oligonucleotide
ttcgcaatcgttaactccgaagcgccgcaa

SEQ ID NO: 196321 - DNA, 30 bp, Artificial Sequence
  Synthetic oligonucleotide
ctggcagcgcacagccccctgcctccgcaa

SEQ ID NO: 196322 - DNA, 30 bp, Artificial Sequence
  Synthetic oligonucleotide
tcgcctcccataagacaagcgttagcgcaa

SEQ ID NO: 196323 - DNA, 30 bp, Artificial Sequence
  Synthetic oligonucleotide
agatgttagtataagggtgaccacgcgcaa

SEQ ID NO: 196324 - DNA, 30 bp, Artificial Sequence
  Synthetic oligonucleotide
gcacgaagggggaggagcaattacgcgcaa

SEQ ID NO: 196325 - DNA, 30 bp, Artificial Sequence
  Synthetic oligonucleotide
acacagtatacgttcgcggtcaccgcgcaa

SEQ ID NO: 196326 - DNA, 30 bp, Artificial Sequence
  Synthetic oligonucleotide
tttagctagtaatcaaatgtaagcgcgcaa

SEQ ID NO: 196327 - DNA, 30 bp, Artificial Sequence
  Synthetic oligonucleotide
gagcccaccacgttaatgttaaaatcgcaa

SEQ ID NO: 196328 - DNA, 30 bp, Artificial Sequence
  Synthetic oligonucleotide
acaatctcggttctcaggaagtcatcgcaa

SEQ ID NO: 196329 - DNA, 30 bp, Artificial Sequence
  Synthetic oligonucleotide
acacacagaggagggaatggatcgtcgcaa

SEQ ID NO: 196330 - DNA, 30 bp, Artificial Sequence
  Synthetic oligonucleotide
cagggacaagactgcagggatagttcgcaa

SEQ ID NO: 196331 - DNA, 30 bp, Artificial Sequence
  Synthetic oligonucleotide
tctggggtagattacaaaggaaccaggcaa

SEQ ID NO: 196332 - DNA, 30 bp, Artificial Sequence
  Synthetic oligonucleotide
gaaatgacactggcatggatagtcaggcaa

SEQ ID NO: 196333 - DNA, 30 bp, Artificial Sequence
  Synthetic oligonucleotide
acgtataacttctgggacctctagaggcaa

SEQ ID NO: 196334 - DNA, 30 bp, Artificial Sequence
  Synthetic oligonucleotide
aggacaccgcaaaattatgcaacgaggcaa

SEQ ID NO: 196335 - DNA, 30 bp, Artificial Sequence
  Synthetic oligonucleotide
cggactcgagggggaggacatcggaggcaa

SEQ ID NO: 196336 - DNA, 30 bp, Artificial Sequence
  Synthetic oligonucleotide
acggtagtcttcgtcgaacatctgaggcaa

SEQ ID NO: 196337 - DNA, 30 bp, Artificial Sequence
  Synthetic oligonucleotide
cgcttcaactgagaaagtaacgaacggcaa

SEQ ID NO: 196338 - DNA, 30 bp, Artificial Sequence
  Synthetic oligonucleotide
gaggcacatattagtgtctagtgccggcaa

SEQ ID NO: 196339 - DNA, 30 bp, Artificial Sequence
  Synthetic oligonucleotide
ccaaccaaagaaaggatgtatgtgcggcaa

SEQ ID NO: 196340 - DNA, 30 bp, Artificial Sequence
  Synthetic oligonucleotide
atctaaaatattctaagtcgccatcggcaa

SEQ ID NO: 196341 - DNA, 30 bp, Artificial Sequence
  Synthetic oligonucleotide
tcctttcgcccacaaaacgcgtttcggcaa

SEQ ID NO: 196342 - DNA, 30 bp, Artificial Sequence
  Synthetic oligonucleotide
cggataaagcatacgccacgtaaagggcaa

SEQ ID NO: 196343 - DNA, 30 bp, Artificial Sequence
  Synthetic oligonucleotide
atgattgatgtagtcaattatcaagggcaa

SEQ ID NO: 196344 - DNA, 30 bp, Artificial Sequence
  Synthetic oligonucleotide
ctatcagtagtccatactatatgcgggcaa

SEQ ID NO: 196345 - DNA, 30 bp, Artificial Sequence
  Synthetic oligonucleotide
tgggactttgtccaccgttacattgggcaa

SEQ ID NO: 196346 - DNA, 30 bp, Artificial Sequence
  Synthetic oligonucleotide
accaagatcagaaactagcagcaatggcaa

SEQ ID NO: 196347 - DNA, 30 bp, Artificial Sequence
  Synthetic oligonucleotide
atggggtagcggcagcaggcggaatggcaa

SEQ ID NO: 196348 - DNA, 30 bp, Artificial Sequence
  Synthetic oligonucleotide
agaccagaactatacctattttcatggcaa

SEQ ID NO: 196349 - DNA, 30 bp, Artificial Sequence
  Synthetic oligonucleotide
gtaacggcatgggtacatttcttatggcaa

SEQ ID NO: 196350 - DNA, 30 bp, Artificial Sequence
  Synthetic oligonucleotide
tcgtaagtcactatttgtaaagggtggcaa

SEQ ID NO: 196351 - DNA, 30 bp, Artificial Sequence
  Synthetic oligonucleotide
gcttcagaggatatgcttaccaattggcaa

SEQ ID NO: 196352 - DNA, 30 bp, Artificial Sequence
  Synthetic oligonucleotide
tgggccattctagaacgtacgaattggcaa

SEQ ID NO: 196353 - DNA, 30 bp, Artificial Sequence
  Synthetic oligonucleotide
tcactgatctgtaaaataaaccgttggcaa

SEQ ID NO: 196354 - DNA, 30 bp, Artificial Sequence
  Synthetic oligonucleotide
atgcttcggggggacagaagaatttggcaa

SEQ ID NO: 196355 - DNA, 30 bp, Artificial Sequence
  Synthetic oligonucleotide
aagacctttgggggtaggggcaaaatgcaa

SEQ ID NO: 196356 - DNA, 30 bp, Artificial Sequence
  Synthetic oligonucleotide
agcttgcacatcataatcttctccatgcaa

SEQ ID NO: 196357 - DNA, 30 bp, Artificial Sequence
  Synthetic oligonucleotide
gggggggactgccacaataatcctatgcaa

SEQ ID NO: 196358 - DNA, 30 bp, Artificial Sequence
  Synthetic oligonucleotide
aggtttggctctacgaatacagctatgcaa

SEQ ID NO: 196359 - DNA, 30 bp, Artificial Sequence
  Synthetic oligonucleotide
gggagactcgagcgggccaacatactgcaa

SEQ ID NO: 196360 - DNA, 30 bp, Artificial Sequence
  Synthetic oligonucleotide
acctgcttcgtccgatcgggtgtactgcaa

SEQ ID NO: 196361 - DNA, 30 bp, Artificial Sequence
  Synthetic oligonucleotide
gcgtgagtagaacgttattctctcctgcaa

SEQ ID NO: 196362 - DNA, 30 bp, Artificial Sequence
  Synthetic oligonucleotide
gccgtgtaccacgatttgcccgggctgcaa

SEQ ID NO: 196363 - DNA, 30 bp, Artificial Sequence
  Synthetic oligonucleotide
taggcttaagtcggtgcctacttgctgcaa

SEQ ID NO: 196364 - DNA, 30 bp, Artificial Sequence
  Synthetic oligonucleotide
tgcaaaattcctcagcgataatctctgcaa

SEQ ID NO: 196365 - DNA, 30 bp, Artificial Sequence
  Synthetic oligonucleotide
ccttattggcgtcgcagacaaaaagtgcaa

SEQ ID NO: 196366 - DNA, 30 bp, Artificial Sequence
  Synthetic oligonucleotide
tagcgttaattaaactctcaataagtgcaa

SEQ ID NO: 196367 - DNA, 30 bp, Artificial Sequence
  Synthetic oligonucleotide
aatcaacgatgtacagaggttcgagtgcaa

SEQ ID NO: 196368 - DNA, 30 bp, Artificial Sequence
  Synthetic oligonucleotide
tagacgactacctgatacaatatagtgcaa

SEQ ID NO: 196369 - DNA, 30 bp, Artificial Sequence
  Synthetic oligonucleotide
tatttccggaagcgtaccgactacgtgcaa

SEQ ID NO: 196370 - DNA, 30 bp, Artificial Sequence
  Synthetic oligonucleotide
agtgggctagataggtcagtagatgtgcaa

SEQ ID NO: 196371 - DNA, 30 bp, Artificial Sequence
  Synthetic oligonucleotide
atagaggagaacgtaatctagtgattgcaa

SEQ ID NO: 196372 - DNA, 29 bp, Artificial Sequence
  Synthetic oligonucleotide
gctttgaccgagatataagcttattgcaa

SEQ ID NO: 196373 - DNA, 30 bp, Artificial Sequence
  Synthetic oligonucleotide
gcgcgctggattaaattttaccatttgcaa

SEQ ID NO: 196374 - DNA, 30 bp, Artificial Sequence
  Synthetic oligonucleotide
caagtgtggctaacgtcgcgtcgcaatcaa

SEQ ID NO: 196375 - DNA, 30 bp, Artificial Sequence
  Synthetic oligonucleotide
actgtggcgaacatgagaagagagaatcaa

SEQ ID NO: 196376 - DNA, 30 bp, Artificial Sequence
  Synthetic oligonucleotide
agggttcaaggacagttttggtagaatcaa

SEQ ID NO: 196377 - DNA, 30 bp, Artificial Sequence
  Synthetic oligonucleotide
gaccagtcaagaggttcttaaactaatcaa

SEQ ID NO: 196378 - DNA, 30 bp, Artificial Sequence
  Synthetic oligonucleotide
atcagcggtgtacatttttgctaacatcaa

SEQ ID NO: 196379 - DNA, 30 bp, Artificial Sequence
  Synthetic oligonucleotide
tgaactgaaagcccggatgtcttccatcaa

SEQ ID NO: 196380 - DNA, 30 bp, Artificial Sequence
  Synthetic oligonucleotide
tctaaaggggaagtgtcgatgaggcatcaa

SEQ ID NO: 196381 - DNA, 30 bp, Artificial Sequence
  Synthetic oligonucleotide
atctgtgccagtagaaatcgcgggcatcaa

SEQ ID NO: 196382 - DNA, 30 bp, Artificial Sequence
  Synthetic oligonucleotide
ggcctgaatgtacaacatgcattgcatcaa

SEQ ID NO: 196383 - DNA, 30 bp, Artificial Sequence
  Synthetic oligonucleotide
ggtactactttgtagaatactccagatcaa

SEQ ID NO: 196384 - DNA, 30 bp, Artificial Sequence
  Synthetic oligonucleotide
agcgagcctcattaattgagaagcgatcaa

SEQ ID NO: 196385 - DNA, 30 bp, Artificial Sequence
  Synthetic oligonucleotide
atagcgccaacatccctgtaatctgatcaa

SEQ ID NO: 196386 - DNA, 30 bp, Artificial Sequence
  Synthetic oligonucleotide
ggaatgccgacgtaaagtgtcggatatcaa

SEQ ID NO: 196387 - DNA, 29 bp, Artificial Sequence
  Synthetic oligonucleotide
aacagggtggcaatgtgttctgatatcaa

SEQ ID NO: 196388 - DNA, 30 bp, Artificial Sequence
  Synthetic oligonucleotide
ccacgttatcgttgtgggcgtacctatcaa

SEQ ID NO: 196389 - DNA, 30 bp, Artificial Sequence
  Synthetic oligonucleotide
cgcgtgaggattattacaggattgtatcaa

SEQ ID NO: 196390 - DNA, 30 bp, Artificial Sequence
  Synthetic oligonucleotide
cttacttcttatttgaaggtcggcactcaa

SEQ ID NO: 196391 - DNA, 30 bp, Artificial Sequence
  Synthetic oligonucleotide
aagtcataacgctgtactagccagactcaa

SEQ ID NO: 196392 - DNA, 30 bp, Artificial Sequence
  Synthetic oligonucleotide
acgtaaataagcgtccgagttgagactcaa

SEQ ID NO: 196393 - DNA, 30 bp, Artificial Sequence
  Synthetic oligonucleotide
cattaacagtcggaatcacggcggactcaa

SEQ ID NO: 196394 - DNA, 30 bp, Artificial Sequence
  Synthetic oligonucleotide
agctgccggatttttctgagggtgactcaa

SEQ ID NO: 196395 - DNA, 30 bp, Artificial Sequence
  Synthetic oligonucleotide
cgctgaccctctcggaagaaacatactcaa

SEQ ID NO: 196396 - DNA, 30 bp, Artificial Sequence
  Synthetic oligonucleotide
gcactagtcgaagacatctgagaacctcaa

SEQ ID NO: 196397 - DNA, 30 bp, Artificial Sequence
  Synthetic oligonucleotide
taggcgcgtatgttagcaggtatacctcaa

SEQ ID NO: 196398 - DNA, 30 bp, Artificial Sequence
  Synthetic oligonucleotide
cacgttcggtgtccgtaccgggaccctcaa

SEQ ID NO: 196399 - DNA, 30 bp, Artificial Sequence
  Synthetic oligonucleotide
agtaaatggctcacgcactaactcgctcaa

SEQ ID NO: 196400 - DNA, 30 bp, Artificial Sequence
  Synthetic oligonucleotide
ttaggggagcttacaggatgagtcgctcaa

SEQ ID NO: 196401 - DNA, 30 bp, Artificial Sequence
  Synthetic oligonucleotide
acgctagagcgaaagtagcttcatgctcaa

SEQ ID NO: 196402 - DNA, 30 bp, Artificial Sequence
  Synthetic oligonucleotide
gggcccatcctgagccttggcacatctcaa

SEQ ID NO: 196403 - DNA, 30 bp, Artificial Sequence
  Synthetic oligonucleotide
ggcaaaccaagctatgatagatgatctcaa

SEQ ID NO: 196404 - DNA, 30 bp, Artificial Sequence
  Synthetic oligonucleotide
gtccggaccacaggctagaacgtatctcaa

SEQ ID NO: 196405 - DNA, 30 bp, Artificial Sequence
  Synthetic oligonucleotide
actgctcagttggatataaacaattctcaa

SEQ ID NO: 196406 - DNA, 30 bp, Artificial Sequence
  Synthetic oligonucleotide
gattaggcacgcccgtaattggtaagtcaa

SEQ ID NO: 196407 - DNA, 30 bp, Artificial Sequence
  Synthetic oligonucleotide
acggtgggaaggaggactctgtacagtcaa

SEQ ID NO: 196408 - DNA, 30 bp, Artificial Sequence
  Synthetic oligonucleotide
agacgagataatccaacttcaaccagtcaa

SEQ ID NO: 196409 - DNA, 30 bp, Artificial Sequence
  Synthetic oligonucleotide
acagtcgggagctcgttattatccagtcaa

SEQ ID NO: 196410 - DNA, 30 bp, Artificial Sequence
  Synthetic oligonucleotide
aagcttcgacagggcagggccccccgtcaa

SEQ ID NO: 196411 - DNA, 30 bp, Artificial Sequence
  Synthetic oligonucleotide
ggcgggctaacgctattccttatccgtcaa

SEQ ID NO: 196412 - DNA, 27 bp, Artificial Sequence
  Synthetic oligonucleotide
aatattagggcacgaaggatgcgtcaa

SEQ ID NO: 196413 - DNA, 30 bp, Artificial Sequence
  Synthetic oligonucleotide
gcttcggtctagagaccattttcaggtcaa

SEQ ID NO: 196414 - DNA, 31 bp, Artificial Sequence
  Synthetic oligonucleotide
aagatcacgggctgtcgccatgtacggtcaa

SEQ ID NO: 196415 - DNA, 30 bp, Artificial Sequence
  Synthetic oligonucleotide
tgcagtgactactatgcactttacggtcaa

SEQ ID NO: 196416 - DNA, 30 bp, Artificial Sequence
  Synthetic oligonucleotide
agggcgttggttacacacctactgggtcaa

SEQ ID NO: 196417 - DNA, 30 bp, Artificial Sequence
  Synthetic oligonucleotide
atacccacggggcaaaaggagaatggtcaa

SEQ ID NO: 196418 - DNA, 30 bp, Artificial Sequence
  Synthetic oligonucleotide
taggattacgggggatatcttgcatgtcaa

SEQ ID NO: 196419 - DNA, 30 bp, Artificial Sequence
  Synthetic oligonucleotide
gatttcgccgaggggtccagagtatgtcaa

SEQ ID NO: 196420 - DNA, 30 bp, Artificial Sequence
  Synthetic oligonucleotide
gctccaagatagtcgtcggtttgctgtcaa

SEQ ID NO: 196421 - DNA, 30 bp, Artificial Sequence
  Synthetic oligonucleotide
cggcagaatcataaataccccacgtgtcaa

SEQ ID NO: 196422 - DNA, 30 bp, Artificial Sequence
  Synthetic oligonucleotide
cactttgctataacgaagatgtccattcaa

SEQ ID NO: 196423 - DNA, 30 bp, Artificial Sequence
  Synthetic oligonucleotide
tccttagatggaggagaaaggaagattcaa

SEQ ID NO: 196424 - DNA, 30 bp, Artificial Sequence
  Synthetic oligonucleotide
gagtcggccatcggggctagatggattcaa

SEQ ID NO: 196425 - DNA, 30 bp, Artificial Sequence
  Synthetic oligonucleotide
gagactagcagggacactgcttgacttcaa

SEQ ID NO: 196426 - DNA, 30 bp, Artificial Sequence
  Synthetic oligonucleotide
tagcgggtgtttagctcaacgtatcttcaa

SEQ ID NO: 196427 - DNA, 30 bp, Artificial Sequence
  Synthetic oligonucleotide
gttcaggctacatccatcgatcgagttcaa

SEQ ID NO: 196428 - DNA, 30 bp, Artificial Sequence
  Synthetic oligonucleotide
agtccgccagtccacagtgctccggttcaa

SEQ ID NO: 196429 - DNA, 30 bp, Artificial Sequence
  Synthetic oligonucleotide
aaataccgggcgaaggataatagatttcaa

SEQ ID NO: 196430 - DNA, 30 bp, Artificial Sequence
  Synthetic oligonucleotide
ataatgttctatgaaacggcgagctttcaa

SEQ ID NO: 196431 - DNA, 30 bp, Artificial Sequence
  Synthetic oligonucleotide
taacgatcgtgcgtggtgcccatctttcaa

SEQ ID NO: 196432 - DNA, 30 bp, Artificial Sequence
  Synthetic oligonucleotide
tctcgcaatccgattcaatatgcttttcaa

SEQ ID NO: 196433 - DNA, 30 bp, Artificial Sequence
  Synthetic oligonucleotide
gcgttaggaagtgcggtccaatcttttcaa

SEQ ID NO: 196434 - DNA, 30 bp, Artificial Sequence
  Synthetic oligonucleotide
ggatagacccactttattagctgaaaagaa

SEQ ID NO: 196435 - DNA, 30 bp, Artificial Sequence
  Synthetic oligonucleotide
ggtctcggactgttcaaacaagacaaagaa

SEQ ID NO: 196436 - DNA, 30 bp, Artificial Sequence
  Synthetic oligonucleotide
aatcagagcttttacgagaatagcaaagaa

SEQ ID NO: 196437 - DNA, 30 bp, Artificial Sequence
  Synthetic oligonucleotide
cccgtatgggtaatagataacggcaaagaa

SEQ ID NO: 196438 - DNA, 30 bp, Artificial Sequence
  Synthetic oligonucleotide
taggtcagtgcagaaattaaaatcaaagaa

SEQ ID NO: 196439 - DNA, 30 bp, Artificial Sequence
  Synthetic oligonucleotide
agggtcgggttgctggatatgcagaaagaa

SEQ ID NO: 196440 - DNA, 30 bp, Artificial Sequence
  Synthetic oligonucleotide
gtatctacctatatcttgggatagaaagaa

SEQ ID NO: 196441 - DNA, 30 bp, Artificial Sequence
  Synthetic oligonucleotide
cctctcatggtagttcaagccatgaaagaa

SEQ ID NO: 196442 - DNA, 30 bp, Artificial Sequence
  Synthetic oligonucleotide
taatcagaaggtgggtaaccgctgaaagaa

SEQ ID NO: 196443 - DNA, 30 bp, Artificial Sequence
  Synthetic oligonucleotide
ccgaacgatttggacgctctatgtaaagaa

SEQ ID NO: 196444 - DNA, 30 bp, Artificial Sequence
  Synthetic oligonucleotide
atagcgcccggactagagtaaccacaagaa

SEQ ID NO: 196445 - DNA, 30 bp, Artificial Sequence
  Synthetic oligonucleotide
atggcaccgtggggcttccactaccaagaa

SEQ ID NO: 196446 - DNA, 30 bp, Artificial Sequence
  Synthetic oligonucleotide
gatgccaaagtccctcgaaaattccaagaa

SEQ ID NO: 196447 - DNA, 30 bp, Artificial Sequence
  Synthetic oligonucleotide
gtccggtctgagaaattacagactcaagaa

SEQ ID NO: 196448 - DNA, 30 bp, Artificial Sequence
  Synthetic oligonucleotide
tggccgaatcgctggaacgattgggaagaa

SEQ ID NO: 196449 - DNA, 30 bp, Artificial Sequence
  Synthetic oligonucleotide
aagtcaacggtccgcaatgaagttgaagaa

SEQ ID NO: 196450 - DNA, 30 bp, Artificial Sequence
  Synthetic oligonucleotide
acggaaatgcagcctcgacgcaaataagaa

SEQ ID NO: 196451 - DNA, 30 bp, Artificial Sequence
  Synthetic oligonucleotide
ccgtgcccgtccttttccacaacataagaa

SEQ ID NO: 196452 - DNA, 30 bp, Artificial Sequence
  Synthetic oligonucleotide
caagctctgggaaagcacgctacctaagaa

SEQ ID NO: 196453 - DNA, 29 bp, Artificial Sequence
  Synthetic oligonucleotide
atcggtcaatagctaaaatctcgtaagaa

SEQ ID NO: 196454 - DNA, 30 bp, Artificial Sequence
  Synthetic oligonucleotide
atgcagctaacgttgggtgacaggtaagaa

SEQ ID NO: 196455 - DNA, 30 bp, Artificial Sequence
  Synthetic oligonucleotide
ggctggtttgaaaacgatcttaggtaagaa

SEQ ID NO: 196456 - DNA, 30 bp, Artificial Sequence
  Synthetic oligonucleotide
gggagtgtgcagccctgcactaattaagaa

SEQ ID NO: 196457 - DNA, 30 bp, Artificial Sequence
  Synthetic oligonucleotide
agttcccgcatatagattcagcgttaagaa

SEQ ID NO: 196458 - DNA, 30 bp, Artificial Sequence
  Synthetic oligonucleotide
tatagaacgggagttagttgccccacagaa

SEQ ID NO: 196459 - DNA, 30 bp, Artificial Sequence
  Synthetic oligonucleotide
ccacggtcatggataggttgcctcacagaa

SEQ ID NO: 196460 - DNA, 30 bp, Artificial Sequence
  Synthetic oligonucleotide
tccagcttgcgaagtcgacctcctacagaa

SEQ ID NO: 196461 - DNA, 30 bp, Artificial Sequence
  Synthetic oligonucleotide
cgggggtaaatccaggcaggtcctacagaa

SEQ ID NO: 196462 - DNA, 30 bp, Artificial Sequence
  Synthetic oligonucleotide
gtgatttatcttctagccggtaaaccagaa

SEQ ID NO: 196463 - DNA, 30 bp, Artificial Sequence
  Synthetic oligonucleotide
ccgcatgtcaatagatacagggtcccagaa

SEQ ID NO: 196464 - DNA, 30 bp, Artificial Sequence
  Synthetic oligonucleotide
cgggccagtggtgtggagcccttcccagaa

SEQ ID NO: 196465 - DNA, 30 bp, Artificial Sequence
  Synthetic oligonucleotide
attcaagatgattattcaagggggccagaa

SEQ ID NO: 196466 - DNA, 30 bp, Artificial Sequence
  Synthetic oligonucleotide
gtgccagtgtcgaagtaggccagcgcagaa

SEQ ID NO: 196467 - DNA, 30 bp, Artificial Sequence
  Synthetic oligonucleotide
atccttacgcaaggcggtggagttgcagaa

SEQ ID NO: 196468 - DNA, 30 bp, Artificial Sequence
  Synthetic oligonucleotide
atcgtcggttaggcgaggtccacatcagaa

SEQ ID NO: 196469 - DNA, 30 bp, Artificial Sequence
  Synthetic oligonucleotide
tgaagcagtgcgtgcctctagttgtcagaa

SEQ ID NO: 196470 - DNA, 30 bp, Artificial Sequence
  Synthetic oligonucleotide
ttttaacgatggtaggtcatcaattcagaa

SEQ ID NO: 196471 - DNA, 30 bp, Artificial Sequence
  Synthetic oligonucleotide
attggtccagtggggagcgcccacagagaa

SEQ ID NO: 196472 - DNA, 30 bp, Artificial Sequence
  Synthetic oligonucleotide
tcgaacggcggaatgtacacgtccagagaa

SEQ ID NO: 196473 - DNA, 30 bp, Artificial Sequence
  Synthetic oligonucleotide
gcaaatttcctatgaaaggaataacgagaa

SEQ ID NO: 196474 - DNA, 30 bp, Artificial Sequence
  Synthetic oligonucleotide
cgagtaacagttattcttatcacacgagaa

SEQ ID NO: 196475 - DNA, 30 bp, Artificial Sequence
  Synthetic oligonucleotide
ttgtcacagggaagaatctggggacgagaa

SEQ ID NO: 196476 - DNA, 30 bp, Artificial Sequence
  Synthetic oligonucleotide
ggaacaagcgccccaccatataaccgagaa

SEQ ID NO: 196477 - DNA, 30 bp, Artificial Sequence
  Synthetic oligonucleotide
cgcacgttcggcaaccgtcgctcgcgagaa

SEQ ID NO: 196478 - DNA, 30 bp, Artificial Sequence
  Synthetic oligonucleotide
gtacaaaacgtcatcgtgtgatatcgagaa

SEQ ID NO: 196479 - DNA, 30 bp, Artificial Sequence
  Synthetic oligonucleotide
aagaatacacacaaaagcctttatcgagaa

SEQ ID NO: 196480 - DNA, 30 bp, Artificial Sequence
  Synthetic oligonucleotide
gaaacaggttcaaagtgttagtttcgagaa

SEQ ID NO: 196481 - DNA, 30 bp, Artificial Sequence
  Synthetic oligonucleotide
actcatggaatcccccgggcgcaaggagaa

SEQ ID NO: 196482 - DNA, 30 bp, Artificial Sequence
  Synthetic oligonucleotide
tcgggttcaaggatcttattatgaggagaa

SEQ ID NO: 196483 - DNA, 30 bp, Artificial Sequence
  Synthetic oligonucleotide
tgcctaaatgtaggagtcactaacggagaa

SEQ ID NO: 196484 - DNA, 30 bp, Artificial Sequence
  Synthetic oligonucleotide
ggtaacgaccgcatagtgtgggccggagaa

SEQ ID NO: 196485 - DNA, 30 bp, Artificial Sequence
  Synthetic oligonucleotide
attagctctcgtccgctatctggcggagaa

SEQ ID NO: 196486 - DNA, 30 bp, Artificial Sequence
  Synthetic oligonucleotide
acgcccttctggattcgtaatggtggagaa

SEQ ID NO: 196487 - DNA, 30 bp, Artificial Sequence
  Synthetic oligonucleotide
tcccagcccatgttaccataatgtggagaa

SEQ ID NO: 196488 - DNA, 30 bp, Artificial Sequence
  Synthetic oligonucleotide
cgcctcgtggcgtcgcctagtacgtgagaa

SEQ ID NO: 196489 - DNA, 30 bp, Artificial Sequence
  Synthetic oligonucleotide
agataatagctagcgccctcggggtgagaa

SEQ ID NO: 196490 - DNA, 29 bp, Artificial Sequence
  Synthetic oligonucleotide
tacacgtcaccgggcctgcatcaatagaa

SEQ ID NO: 196491 - DNA, 30 bp, Artificial Sequence
  Synthetic oligonucleotide
tcgatttttaaacgggttactcgaatagaa

SEQ ID NO: 196492 - DNA, 30 bp, Artificial Sequence
  Synthetic oligonucleotide
tctaagaaacacgagcagatatctatagaa

SEQ ID NO: 196493 - DNA, 30 bp, Artificial Sequence
  Synthetic oligonucleotide
gcgttggtagtaaacgctagcgaactagaa

SEQ ID NO: 196494 - DNA, 30 bp, Artificial Sequence
  Synthetic oligonucleotide
aatccgtcgggcatagcgagggaactagaa

SEQ ID NO: 196495 - DNA, 30 bp, Artificial Sequence
  Synthetic oligonucleotide
gttgaccacagctcaggggagaagctagaa

SEQ ID NO: 196496 - DNA, 30 bp, Artificial Sequence
  Synthetic oligonucleotide
cagatatccggaggcacgggatagctagaa

SEQ ID NO: 196497 - DNA, 30 bp, Artificial Sequence
  Synthetic oligonucleotide
attgtagcgagctaattagcttgtctagaa

SEQ ID NO: 196498 - DNA, 30 bp, Artificial Sequence
  Synthetic oligonucleotide
agatgcagcgggtagagtaaaaaggtagaa

SEQ ID NO: 196499 - DNA, 30 bp, Artificial Sequence
  Synthetic oligonucleotide
tcgaggtataagaccattaccaaggtagaa

SEQ ID NO: 196500 - DNA, 30 bp, Artificial Sequence
  Synthetic oligonucleotide
ctaccgtgggcccccgatacgtcggtagaa

SEQ ID NO: 196501 - DNA, 30 bp, Artificial Sequence
  Synthetic oligonucleotide
ggttcgtatgaatccttaggtcttgtagaa

SEQ ID NO: 196502 - DNA, 30 bp, Artificial Sequence
  Synthetic oligonucleotide
gcccaatgtaatccatcgatggcattagaa

SEQ ID NO: 196503 - DNA, 30 bp, Artificial Sequence
  Synthetic oligonucleotide
atcactgcggtataagccgctagattagaa

SEQ ID NO: 196504 - DNA, 30 bp, Artificial Sequence
  Synthetic oligonucleotide
acccatactacatccaaggtgcgattagaa

SEQ ID NO: 196505 - DNA, 30 bp, Artificial Sequence
  Synthetic oligonucleotide
acttatctgtgtgcactgttagtattagaa

SEQ ID NO: 196506 - DNA, 30 bp, Artificial Sequence
  Synthetic oligonucleotide
atcgctcaatcaaggagcacatgcttagaa

SEQ ID NO: 196507 - DNA, 30 bp, Artificial Sequence
  Synthetic oligonucleotide
cgatactctatttctcccgtaacgttagaa

SEQ ID NO: 196508 - DNA, 30 bp, Artificial Sequence
  Synthetic oligonucleotide
acaactttagttacgtgaatagtgttagaa

SEQ ID NO: 196509 - DNA, 30 bp, Artificial Sequence
  Synthetic oligonucleotide
ggatagtaggaacggggttttcatttagaa

SEQ ID NO: 196510 - DNA, 30 bp, Artificial Sequence
  Synthetic oligonucleotide
ttgttatacagagaaaaaatttctttagaa

SEQ ID NO: 196511 - DNA, 30 bp, Artificial Sequence
  Synthetic oligonucleotide
attgaactggggcatggcaccgccaacgaa

SEQ ID NO: 196512 - DNA, 30 bp, Artificial Sequence
  Synthetic oligonucleotide
cccgttaagtagtgaggcacgcggaacgaa

SEQ ID NO: 196513 - DNA, 30 bp, Artificial Sequence
  Synthetic oligonucleotide
gtggtaaaccgggagggtaacactaacgaa

SEQ ID NO: 196514 - DNA, 30 bp, Artificial Sequence
  Synthetic oligonucleotide
actgccagattcgcttatggaggtaacgaa

SEQ ID NO: 196515 - DNA, 30 bp, Artificial Sequence
  Synthetic oligonucleotide
actgtgtaacatgtgataactgtacacgaa

SEQ ID NO: 196516 - DNA, 30 bp, Artificial Sequence
  Synthetic oligonucleotide
ggcactaacgggttagcaggggaccacgaa

SEQ ID NO: 196517 - DNA, 30 bp, Artificial Sequence
  Synthetic oligonucleotide
ttcgggataacggcctggatcagccacgaa

SEQ ID NO: 196518 - DNA, 30 bp, Artificial Sequence
  Synthetic oligonucleotide
tccgctatagaatccccgcggctgcacgaa

SEQ ID NO: 196519 - DNA, 30 bp, Artificial Sequence
  Synthetic oligonucleotide
agctcagtatgtcgccaatcggtgcacgaa

SEQ ID NO: 196520 - DNA, 30 bp, Artificial Sequence
  Synthetic oligonucleotide
ccgggagaatcgcagtaatcggtgcacgaa

SEQ ID NO: 196521 - DNA, 30 bp, Artificial Sequence
  Synthetic oligonucleotide
atgagctctaaaagtgagctagatcacgaa

SEQ ID NO: 196522 - DNA, 30 bp, Artificial Sequence
  Synthetic oligonucleotide
cgaagactgtgcgactcggtctctcacgaa

SEQ ID NO: 196523 - DNA, 30 bp, Artificial Sequence
  Synthetic oligonucleotide
taggggtcattgcccagttgtacagacgaa

SEQ ID NO: 196524 - DNA, 30 bp, Artificial Sequence
  Synthetic oligonucleotide
attcgcggtggcgtcctgggaggagacgaa

SEQ ID NO: 196525 - DNA, 30 bp, Artificial Sequence
  Synthetic oligonucleotide
cgtccctggcccaactggtacggagacgaa

SEQ ID NO: 196526 - DNA, 30 bp, Artificial Sequence
  Synthetic oligonucleotide
tcgtcagggggatatttttgcaacgacgaa

SEQ ID NO: 196527 - DNA, 30 bp, Artificial Sequence
  Synthetic oligonucleotide
ctgcgaggcttgaccagactaatcgacgaa

SEQ ID NO: 196528 - DNA, 30 bp, Artificial Sequence
  Synthetic oligonucleotide
tcgagagactgatccgcgcctccatacgaa

SEQ ID NO: 196529 - DNA, 30 bp, Artificial Sequence
  Synthetic oligonucleotide
cgactcgtctctgttcctcctgcctacgaa

SEQ ID NO: 196530 - DNA, 30 bp, Artificial Sequence
  Synthetic oligonucleotide
actggtaatgttggaacaatttagtacgaa

SEQ ID NO: 196531 - DNA, 30 bp, Artificial Sequence
  Synthetic oligonucleotide
taataagacagctgtgagttaaggtacgaa

SEQ ID NO: 196532 - DNA, 30 bp, Artificial Sequence
  Synthetic oligonucleotide
atggcgcagatcatagagccctttaccgaa

SEQ ID NO: 196533 - DNA, 30 bp, Artificial Sequence
  Synthetic oligonucleotide
gatgggaaacccggtgaccgcgcacccgaa

SEQ ID NO: 196534 - DNA, 30 bp, Artificial Sequence
  Synthetic oligonucleotide
gtatggaactgtcattccgtctcccccgaa

SEQ ID NO: 196535 - DNA, 30 bp, Artificial Sequence
  Synthetic oligonucleotide
ctaatggttcttggctaggggctccccgaa

SEQ ID NO: 196536 - DNA, 30 bp, Artificial Sequence
  Synthetic oligonucleotide
gcggggataaatcttcagtattggcccgaa

SEQ ID NO: 196537 - DNA, 30 bp, Artificial Sequence
  Synthetic oligonucleotide
gtaagtgcgacagtgggctgctaagccgaa

SEQ ID NO: 196538 - DNA, 30 bp, Artificial Sequence
  Synthetic oligonucleotide
taaaaagtggagccgaaaccaaccgccgaa

SEQ ID NO: 196539 - DNA, 30 bp, Artificial Sequence
  Synthetic oligonucleotide
cttgaatggatcctccccacaccggccgaa

SEQ ID NO: 196540 - DNA, 30 bp, Artificial Sequence
  Synthetic oligonucleotide
tcccagccgttagtactccgttgggccgaa

SEQ ID NO: 196541 - DNA, 30 bp, Artificial Sequence
  Synthetic oligonucleotide
aaccacgtcatctggtacaaaatggccgaa

SEQ ID NO: 196542 - DNA, 30 bp, Artificial Sequence
  Synthetic oligonucleotide
ctagtaaagaataccgggatggttgccgaa

SEQ ID NO: 196543 - DNA, 30 bp, Artificial Sequence
  Synthetic oligonucleotide
cgtattgaagctgcccatcaggattccgaa

SEQ ID NO: 196544 - DNA, 30 bp, Artificial Sequence
  Synthetic oligonucleotide
tccaatcagtatatactcgatccttccgaa

SEQ ID NO: 196545 - DNA, 30 bp, Artificial Sequence
  Synthetic oligonucleotide
ctgctggataagtatcgcgataccagcgaa

SEQ ID NO: 196546 - DNA, 30 bp, Artificial Sequence
  Synthetic oligonucleotide
ggagttttaactccagggctaaagagcgaa

SEQ ID NO: 196547 - DNA, 31 bp, Artificial Sequence
  Synthetic oligonucleotide
cggacaaatctgtagcgtaatcgggagcgaa

SEQ ID NO: 196548 - DNA, 30 bp, Artificial Sequence
  Synthetic oligonucleotide
cgtcaatctgtactgctggcctggagcgaa

SEQ ID NO: 196549 - DNA, 30 bp, Artificial Sequence
  Synthetic oligonucleotide
ggttgtatagaagcatatgatttgagcgaa

SEQ ID NO: 196550 - DNA, 30 bp, Artificial Sequence
  Synthetic oligonucleotide
gacttggcggcagagcgttcaactagcgaa

SEQ ID NO: 196551 - DNA, 30 bp, Artificial Sequence
  Synthetic oligonucleotide
tcaaggtgtgcccgatgtcagccccgcgaa

SEQ ID NO: 196552 - DNA, 30 bp, Artificial Sequence
  Synthetic oligonucleotide
atataggatcggatgcaatgccggcgcgaa

SEQ ID NO: 196553 - DNA, 30 bp, Artificial Sequence
  Synthetic oligonucleotide
agaatgaagggctgatatacgactcgcgaa

SEQ ID NO: 196554 - DNA, 30 bp, Artificial Sequence
  Synthetic oligonucleotide
ctccctccggcgaggaattccgctcgcgaa

SEQ ID NO: 196555 - DNA, 30 bp, Artificial Sequence
  Synthetic oligonucleotide
gcaaagtacggttgaagcggaccaggcgaa

SEQ ID NO: 196556 - DNA, 30 bp, Artificial Sequence
  Synthetic oligonucleotide
cctcataaatcatttgaccctccaggcgaa

SEQ ID NO: 196557 - DNA, 30 bp, Artificial Sequence
  Synthetic oligonucleotide
ttcgcgtccgacgagccgcatgccggcgaa

SEQ ID NO: 196558 - DNA, 30 bp, Artificial Sequence
  Synthetic oligonucleotide
aatgtccgctcgcgtggtggatcgggcgaa

SEQ ID NO: 196559 - DNA, 30 bp, Artificial Sequence
  Synthetic oligonucleotide
agccgccttcacgttattcgagggggcgaa

SEQ ID NO: 196560 - DNA, 30 bp, Artificial Sequence
  Synthetic oligonucleotide
ggttataacctaatgaacggtattggcgaa

SEQ ID NO: 196561 - DNA, 30 bp, Artificial Sequence
  Synthetic oligonucleotide
gcacacatggcataagtcgcgcaatgcgaa

SEQ ID NO: 196562 - DNA, 30 bp, Artificial Sequence
  Synthetic oligonucleotide
atgaagataacgttaccagcgccatgcgaa

SEQ ID NO: 196563 - DNA, 30 bp, Artificial Sequence
  Synthetic oligonucleotide
ctccgaggtccgggacccgtaccctgcgaa

SEQ ID NO: 196564 - DNA, 30 bp, Artificial Sequence
  Synthetic oligonucleotide
ctgaggaatcaggcgggctaagcctgcgaa

SEQ ID NO: 196565 - DNA, 30 bp, Artificial Sequence
  Synthetic oligonucleotide
tcgaatactgtggaccgattaatctgcgaa

SEQ ID NO: 196566 - DNA, 30 bp, Artificial Sequence
  Synthetic oligonucleotide
tcctgactcggcgctgtgtatcggtgcgaa

SEQ ID NO: 196567 - DNA, 30 bp, Artificial Sequence
  Synthetic oligonucleotide
ggcttcgaactgtcgcgcaaccattgcgaa

SEQ ID NO: 196568 - DNA, 30 bp, Artificial Sequence
  Synthetic oligonucleotide
cgtggatcgattcatcctgatcacatcgaa

SEQ ID NO: 196569 - DNA, 31 bp, Artificial Sequence
  Synthetic oligonucleotide
gcttcgagcgcgagtcgtactttgcatcgaa

SEQ ID NO: 196570 - DNA, 30 bp, Artificial Sequence
  Synthetic oligonucleotide
gtagatgaaagcgtcgaaattgtcatcgaa

SEQ ID NO: 196571 - DNA, 30 bp, Artificial Sequence
  Synthetic oligonucleotide
ccgctaggcgcacaccctctaaagctcgaa

SEQ ID NO: 196572 - DNA, 30 bp, Artificial Sequence
  Synthetic oligonucleotide
tcgtgataaggactcggactgacagtcgaa

SEQ ID NO: 196573 - DNA, 30 bp, Artificial Sequence
  Synthetic oligonucleotide
taatcactgagacagcctgcatgagtcgaa

SEQ ID NO: 196574 - DNA, 30 bp, Artificial Sequence
  Synthetic oligonucleotide
gcgcaccaggggcaccccccataggtcgaa

SEQ ID NO: 196575 - DNA, 30 bp, Artificial Sequence
  Synthetic oligonucleotide
acctttcgtatgcccccaatcggggtcgaa

SEQ ID NO: 196576 - DNA, 30 bp, Artificial Sequence
  Synthetic oligonucleotide
gctcccaaactccatgtattgctattcgaa

SEQ ID NO: 196577 - DNA, 30 bp, Artificial Sequence
  Synthetic oligonucleotide
tatgaatatctccggcgggtgacgttcgaa

SEQ ID NO: 196578 - DNA, 30 bp, Artificial Sequence
  Synthetic oligonucleotide
taacagggcttgattggtagaatgttcgaa

SEQ ID NO: 196579 - DNA, 30 bp, Artificial Sequence
  Synthetic oligonucleotide
gacgaggccatcgaatttacacctttcgaa

SEQ ID NO: 196580 - DNA, 30 bp, Artificial Sequence
  Synthetic oligonucleotide
tggactactaatgatagagattgaaaggaa

SEQ ID NO: 196581 - DNA, 30 bp, Artificial Sequence
  Synthetic oligonucleotide
atcacgcatctagtttgatataataaggaa

SEQ ID NO: 196582 - DNA, 30 bp, Artificial Sequence
  Synthetic oligonucleotide
aaaagtgaaccgccaacaccgactaaggaa

SEQ ID NO: 196583 - DNA, 30 bp, Artificial Sequence
  Synthetic oligonucleotide
gcagggccggcgacgtgtgtgcgccaggaa

SEQ ID NO: 196584 - DNA, 30 bp, Artificial Sequence
  Synthetic oligonucleotide
agtggtcgaaaccgcagcgccgagcaggaa

SEQ ID NO: 196585 - DNA, 30 bp, Artificial Sequence
  Synthetic oligonucleotide
gtgtggccagaccaggcggcatggcaggaa

SEQ ID NO: 196586 - DNA, 30 bp, Artificial Sequence
  Synthetic oligonucleotide
agcggcggaaaggtactcctacctcaggaa

SEQ ID NO: 196587 - DNA, 30 bp, Artificial Sequence
  Synthetic oligonucleotide
agtagttgaaagtattaatgtgttcaggaa

SEQ ID NO: 196588 - DNA, 30 bp, Artificial Sequence
  Synthetic oligonucleotide
tctagtttttcgacctcggtcatagaggaa

SEQ ID NO: 196589 - DNA, 30 bp, Artificial Sequence
  Synthetic oligonucleotide
gtcctcataaggggtatagcattagaggaa

SEQ ID NO: 196590 - DNA, 30 bp, Artificial Sequence
  Synthetic oligonucleotide
tcatacacaaaattactgtcgcacgaggaa

SEQ ID NO: 196591 - DNA, 30 bp, Artificial Sequence
  Synthetic oligonucleotide
cgtggtcacatacaaggtgtgttcgaggaa

SEQ ID NO: 196592 - DNA, 30 bp, Artificial Sequence
  Synthetic oligonucleotide
ttaggctgataggtgacaatgggataggaa

SEQ ID NO: 196593 - DNA, 29 bp, Artificial Sequence
  Synthetic oligonucleotide
cagtgatatattcagcacccgtataggaa

SEQ ID NO: 196594 - DNA, 30 bp, Artificial Sequence
  Synthetic oligonucleotide
agtgtggcccagattagacgctgctaggaa

SEQ ID NO: 196595 - DNA, 30 bp, Artificial Sequence
  Synthetic oligonucleotide
aagcgttatcacagcttaagaccgtaggaa

SEQ ID NO: 196596 - DNA, 30 bp, Artificial Sequence
  Synthetic oligonucleotide
aactactaagcagcagtagagctgtaggaa

SEQ ID NO: 196597 - DNA, 30 bp, Artificial Sequence
  Synthetic oligonucleotide
ttaggctaatgcgtctctggacattaggaa

SEQ ID NO: 196598 - DNA, 30 bp, Artificial Sequence
  Synthetic oligonucleotide
aaccgaacattacgctggctcgcttaggaa

SEQ ID NO: 196599 - DNA, 30 bp, Artificial Sequence
  Synthetic oligonucleotide
tcttctaagattcgagagtttccaacggaa

SEQ ID NO: 196600 - DNA, 30 bp, Artificial Sequence
  Synthetic oligonucleotide
tcgcggacgcaacggttagagcatacggaa

SEQ ID NO: 196601 - DNA, 30 bp, Artificial Sequence
  Synthetic oligonucleotide
ggatgggctagtagatgcgcaagtacggaa

SEQ ID NO: 196602 - DNA, 30 bp, Artificial Sequence
  Synthetic oligonucleotide
ccaccctgtcaatgcgaccagttaccggaa

SEQ ID NO: 196603 - DNA, 30 bp, Artificial Sequence
  Synthetic oligonucleotide
atatcatacacctcaagttgacagccggaa

SEQ ID NO: 196604 - DNA, 30 bp, Artificial Sequence
  Synthetic oligonucleotide
gccacgctcgaaaggcgagcccggccggaa

SEQ ID NO: 196605 - DNA, 30 bp, Artificial Sequence
  Synthetic oligonucleotide
gtatgaaggacagagttttttgggccggaa

SEQ ID NO: 196606 - DNA, 30 bp, Artificial Sequence
  Synthetic oligonucleotide
atggtcatcaattagttgtaaatgccggaa

SEQ ID NO: 196607 - DNA, 30 bp, Artificial Sequence
  Synthetic oligonucleotide
ccaaaaatcgtggttcgaatgcttccggaa

SEQ ID NO: 196608 - DNA, 30 bp, Artificial Sequence
  Synthetic oligonucleotide
tgcggtataaatgaaccgttatccgcggaa

SEQ ID NO: 196609 - DNA, 30 bp, Artificial Sequence
  Synthetic oligonucleotide
tctagtcaccccgcggtcggcaaggcggaa

SEQ ID NO: 196610 - DNA, 30 bp, Artificial Sequence
  Synthetic oligonucleotide
agacaatccgcaaaactatcagaggcggaa

SEQ ID NO: 196611 - DNA, 30 bp, Artificial Sequence
  Synthetic oligonucleotide
agtgggcatcgtcgcccattggaggcggaa

SEQ ID NO: 196612 - DNA, 30 bp, Artificial Sequence
  Synthetic oligonucleotide
tagtaagctctcgagaatctagcggcggaa

SEQ ID NO: 196613 - DNA, 30 bp, Artificial Sequence
  Synthetic oligonucleotide
agtgccctgaccctaacgagtcatgcggaa

SEQ ID NO: 196614 - DNA, 30 bp, Artificial Sequence
  Synthetic oligonucleotide
gcacgcccgacagggtcttgtcatgcggaa

SEQ ID NO: 196615 - DNA, 30 bp, Artificial Sequence
  Synthetic oligonucleotide
aaatatatagcacgtcccacatgtgcggaa

SEQ ID NO: 196616 - DNA, 30 bp, Artificial Sequence
  Synthetic oligonucleotide
ttatctcggactcgtttgggagggtcggaa

SEQ ID NO: 196617 - DNA, 30 bp, Artificial Sequence
  Synthetic oligonucleotide
gcaatattacgcagtcggagtgagagggaa

SEQ ID NO: 196618 - DNA, 30 bp, Artificial Sequence
  Synthetic oligonucleotide
catccgcgtatcacgtaggagtcgagggaa

SEQ ID NO: 196619 - DNA, 30 bp, Artificial Sequence
  Synthetic oligonucleotide
tgccgacaaacggcgaaatccgggagggaa

SEQ ID NO: 196620 - DNA, 30 bp, Artificial Sequence
  Synthetic oligonucleotide
gtctttgggacgatggggaatcaccgggaa

SEQ ID NO: 196621 - DNA, 30 bp, Artificial Sequence
  Synthetic oligonucleotide
tgcccagccatggagcgtcgacatcgggaa

SEQ ID NO: 196622 - DNA, 30 bp, Artificial Sequence
  Synthetic oligonucleotide
taacgtgtcaaggatatcagccttcgggaa

SEQ ID NO: 196623 - DNA, 30 bp, Artificial Sequence
  Synthetic oligonucleotide
gtgcgtaagctaggtgtagccccaggggaa

SEQ ID NO: 196624 - DNA, 30 bp, Artificial Sequence
  Synthetic oligonucleotide
tgtaatggtgctctcctaacgcgcggggaa

SEQ ID NO: 196625 - DNA, 30 bp, Artificial Sequence
  Synthetic oligonucleotide
catcctcccgttttttatcggcatggggaa

SEQ ID NO: 196626 - DNA, 30 bp, Artificial Sequence
  Synthetic oligonucleotide
ggacctgggcccgtgcatcacggatgggaa

SEQ ID NO: 196627 - DNA, 30 bp, Artificial Sequence
  Synthetic oligonucleotide
gtatagggattgtagactatttgctgggaa

SEQ ID NO: 196628 - DNA, 30 bp, Artificial Sequence
  Synthetic oligonucleotide
gcccacttcctaacttctaacttctgggaa

SEQ ID NO: 196629 - DNA, 30 bp, Artificial Sequence
  Synthetic oligonucleotide
ctattgctaagactggaggggtggtgggaa

SEQ ID NO: 196630 - DNA, 30 bp, Artificial Sequence
  Synthetic oligonucleotide
acaaatatttcaattgcgaaggtgtgggaa

SEQ ID NO: 196631 - DNA, 30 bp, Artificial Sequence
  Synthetic oligonucleotide
gacgaccttacttcgtctagaagttgggaa

SEQ ID NO: 196632 - DNA, 30 bp, Artificial Sequence
  Synthetic oligonucleotide
tgtgtgaacacttagctatgggtttgggaa

SEQ ID NO: 196633 - DNA, 30 bp, Artificial Sequence
  Synthetic oligonucleotide
acttcattgatgatgtcgcgaaaaatggaa

SEQ ID NO: 196634 - DNA, 30 bp, Artificial Sequence
  Synthetic oligonucleotide
tagtagggcctttcttacaaagaaatggaa

SEQ ID NO: 196635 - DNA, 30 bp, Artificial Sequence
  Synthetic oligonucleotide
cacattttatgcgcgtgagagtcaatggaa

SEQ ID NO: 196636 - DNA, 30 bp, Artificial Sequence
  Synthetic oligonucleotide
cgataccaatccgggtttctacacatggaa

SEQ ID NO: 196637 - DNA, 30 bp, Artificial Sequence
  Synthetic oligonucleotide
taggaacgatcgtctcccacccgtatggaa

SEQ ID NO: 196638 - DNA, 30 bp, Artificial Sequence
  Synthetic oligonucleotide
acagcataatcatgccagtgtgaactggaa

SEQ ID NO: 196639 - DNA, 30 bp, Artificial Sequence
  Synthetic oligonucleotide
caactccacagagcatcgtcataactggaa

SEQ ID NO: 196640 - DNA, 30 bp, Artificial Sequence
  Synthetic oligonucleotide
gaagaggaggtagtcagtaatgcactggaa

SEQ ID NO: 196641 - DNA, 30 bp, Artificial Sequence
  Synthetic oligonucleotide
gcctggagttgatgttcgtggcccctggaa

SEQ ID NO: 196642 - DNA, 30 bp, Artificial Sequence
  Synthetic oligonucleotide
ttaggaacttctgatatctctgcgctggaa

SEQ ID NO: 196643 - DNA, 30 bp, Artificial Sequence
  Synthetic oligonucleotide
aacacagccagcgtagaccactcgctggaa

SEQ ID NO: 196644 - DNA, 30 bp, Artificial Sequence
  Synthetic oligonucleotide
ggggagctgacgccctaatcatgagtggaa

SEQ ID NO: 196645 - DNA, 30 bp, Artificial Sequence
  Synthetic oligonucleotide
ggggatctacacttgcattcccacgtggaa

SEQ ID NO: 196646 - DNA, 30 bp, Artificial Sequence
  Synthetic oligonucleotide
aagggtggaagtgtttaacacgcggtggaa

SEQ ID NO: 196647 - DNA, 30 bp, Artificial Sequence
  Synthetic oligonucleotide
gggtggatatagagaacagacgcggtggaa

SEQ ID NO: 196648 - DNA, 30 bp, Artificial Sequence
  Synthetic oligonucleotide
aggctggattcacagaaacgaagggtggaa

SEQ ID NO: 196649 - DNA, 30 bp, Artificial Sequence
  Synthetic oligonucleotide
gaggccaattgaattaggtaacgggtggaa

SEQ ID NO: 196650 - DNA, 30 bp, Artificial Sequence
  Synthetic oligonucleotide
atccagcagagaagggttcagttggtggaa

SEQ ID NO: 196651 - DNA, 30 bp, Artificial Sequence
  Synthetic oligonucleotide
atataaaggcgactgagcaaacatgtggaa

SEQ ID NO: 196652 - DNA, 30 bp, Artificial Sequence
  Synthetic oligonucleotide
cgatattaattcgctcatcttcgtgtggaa

SEQ ID NO: 196653 - DNA, 30 bp, Artificial Sequence
  Synthetic oligonucleotide
tagtggccgaggaaggattaaaaattggaa

SEQ ID NO: 196654 - DNA, 30 bp, Artificial Sequence
  Synthetic oligonucleotide
tttcaatcggccttggctagcgcattggaa

SEQ ID NO: 196655 - DNA, 30 bp, Artificial Sequence
  Synthetic oligonucleotide
cataaaatcacgctgtaggggcgattggaa

SEQ ID NO: 196656 - DNA, 30 bp, Artificial Sequence
  Synthetic oligonucleotide
atgcgtaccgattagtaatctggattggaa

SEQ ID NO: 196657 - DNA, 30 bp, Artificial Sequence
  Synthetic oligonucleotide
tcgccaagtcgtggattgtaagccttggaa

SEQ ID NO: 196658 - DNA, 30 bp, Artificial Sequence
  Synthetic oligonucleotide
tcggaaggggcaacatctctgggcttggaa

SEQ ID NO: 196659 - DNA, 30 bp, Artificial Sequence
  Synthetic oligonucleotide
tccccgttctcatgcagaacgaagttggaa

SEQ ID NO: 196660 - DNA, 30 bp, Artificial Sequence
  Synthetic oligonucleotide
tcgtgcatggaccacgaaggttatttggaa

SEQ ID NO: 196661 - DNA, 30 bp, Artificial Sequence
  Synthetic oligonucleotide
gagggaggcttgatcattatgagtttggaa

SEQ ID NO: 196662 - DNA, 30 bp, Artificial Sequence
  Synthetic oligonucleotide
ttggagacctagttgaatttccttttggaa

SEQ ID NO: 196663 - DNA, 30 bp, Artificial Sequence
  Synthetic oligonucleotide
ggcgagtctacttcgaaattcaaaaatgaa

SEQ ID NO: 196664 - DNA, 30 bp, Artificial Sequence
  Synthetic oligonucleotide
aatgcgggccaaggaagccggagaaatgaa

SEQ ID NO: 196665 - DNA, 30 bp, Artificial Sequence
  Synthetic oligonucleotide
caattctcccggagagatagagtaaatgaa

SEQ ID NO: 196666 - DNA, 30 bp, Artificial Sequence
  Synthetic oligonucleotide
ccccgtttcaactccaatatcagcaatgaa

SEQ ID NO: 196667 - DNA, 30 bp, Artificial Sequence
  Synthetic oligonucleotide
ggtgaatgggctcctgcggtccggaatgaa

SEQ ID NO: 196668 - DNA, 30 bp, Artificial Sequence
  Synthetic oligonucleotide
ggggtttccgatatgtgtgagcaacatgaa

SEQ ID NO: 196669 - DNA, 31 bp, Artificial Sequence
  Synthetic oligonucleotide
actagaataaagcgagaccggggcacatgaa

SEQ ID NO: 196670 - DNA, 30 bp, Artificial Sequence
  Synthetic oligonucleotide
aggacattgaaattctgcgccaggcatgaa

SEQ ID NO: 196671 - DNA, 30 bp, Artificial Sequence
  Synthetic oligonucleotide
agaaaaccgcgtcgagagagattgcatgaa

SEQ ID NO: 196672 - DNA, 30 bp, Artificial Sequence
  Synthetic oligonucleotide
agacaatcttagacactgaacgatcatgaa

SEQ ID NO: 196673 - DNA, 30 bp, Artificial Sequence
  Synthetic oligonucleotide
cacattaggacgtctatgtgtaaagatgaa

SEQ ID NO: 196674 - DNA, 30 bp, Artificial Sequence
  Synthetic oligonucleotide
cagttgtgaagagaccgtaaggcagatgaa

SEQ ID NO: 196675 - DNA, 30 bp, Artificial Sequence
  Synthetic oligonucleotide
gttggcctacttatcgcgctttcagatgaa

SEQ ID NO: 196676 - DNA, 30 bp, Artificial Sequence
  Synthetic oligonucleotide
atcgtagtccaaggcccaatacccgatgaa

SEQ ID NO: 196677 - DNA, 30 bp, Artificial Sequence
  Synthetic oligonucleotide
ggtctaaattgaccacacgcggccgatgaa

SEQ ID NO: 196678 - DNA, 30 bp, Artificial Sequence
  Synthetic oligonucleotide
ggtcgtaatttggaaactactaatgatgaa

SEQ ID NO: 196679 - DNA, 30 bp, Artificial Sequence
  Synthetic oligonucleotide
gcaccgaaaatgctcgaaaggtaatatgaa

SEQ ID NO: 196680 - DNA, 30 bp, Artificial Sequence
  Synthetic oligonucleotide
tcggtgacgagcatgtactgtgtatatgaa

SEQ ID NO: 196681 - DNA, 30 bp, Artificial Sequence
  Synthetic oligonucleotide
agtacgagagataatgagcgaagctatgaa

SEQ ID NO: 196682 - DNA, 30 bp, Artificial Sequence
  Synthetic oligonucleotide
aagtattgtacggtccccgggtcttatgaa

SEQ ID NO: 196683 - DNA, 30 bp, Artificial Sequence
  Synthetic oligonucleotide
ggggtaaggcccgaaggcactgtgactgaa

SEQ ID NO: 196684 - DNA, 30 bp, Artificial Sequence
  Synthetic oligonucleotide
tcgagttggctacgtttggtaactactgaa

SEQ ID NO: 196685 - DNA, 30 bp, Artificial Sequence
  Synthetic oligonucleotide
aatggtgcgttgaaattcatcttacctgaa

SEQ ID NO: 196686 - DNA, 30 bp, Artificial Sequence
  Synthetic oligonucleotide
tacattttaggtccatcaagtccccctgaa

SEQ ID NO: 196687 - DNA, 30 bp, Artificial Sequence
  Synthetic oligonucleotide
atgggggcacatcaatagcgggcccctgaa

SEQ ID NO: 196688 - DNA, 30 bp, Artificial Sequence
  Synthetic oligonucleotide
acgccattatttaatggatatgcgcctgaa

SEQ ID NO: 196689 - DNA, 30 bp, Artificial Sequence
  Synthetic oligonucleotide
ctcctcgattcagtatgctttcggcctgaa

SEQ ID NO: 196690 - DNA, 30 bp, Artificial Sequence
  Synthetic oligonucleotide
acggtacgctgcaaggcaaatggagctgaa

SEQ ID NO: 196691 - DNA, 30 bp, Artificial Sequence
  Synthetic oligonucleotide
cggacattgaatgtcatctttggggctgaa

SEQ ID NO: 196692 - DNA, 30 bp, Artificial Sequence
  Synthetic oligonucleotide
ccatccgcggagaaaattgattgggctgaa

SEQ ID NO: 196693 - DNA, 30 bp, Artificial Sequence
  Synthetic oligonucleotide
catggactgatactatcgagtcttgctgaa

SEQ ID NO: 196694 - DNA, 30 bp, Artificial Sequence
  Synthetic oligonucleotide
gacaagagccgaatcatcgaaaaatctgaa

SEQ ID NO: 196695 - DNA, 30 bp, Artificial Sequence
  Synthetic oligonucleotide
cacgcgtttcgtctagcggctacctctgaa

SEQ ID NO: 196696 - DNA, 30 bp, Artificial Sequence
  Synthetic oligonucleotide
atcaggatacgttggtcgctgccctctgaa

SEQ ID NO: 196697 - DNA, 30 bp, Artificial Sequence
  Synthetic oligonucleotide
agatacaagtgtaacttcgatgtctctgaa

SEQ ID NO: 196698 - DNA, 30 bp, Artificial Sequence
  Synthetic oligonucleotide
cccagactgttgtaacagatcgcgtctgaa

SEQ ID NO: 196699 - DNA, 30 bp, Artificial Sequence
  Synthetic oligonucleotide
atcatatcagtaccagaggacaattctgaa

SEQ ID NO: 196700 - DNA, 30 bp, Artificial Sequence
  Synthetic oligonucleotide
cctagttcacgatttctcttaccttctgaa

SEQ ID NO: 196701 - DNA, 30 bp, Artificial Sequence
  Synthetic oligonucleotide
cttgtgcacgctggataggtgcgttctgaa

SEQ ID NO: 196702 - DNA, 30 bp, Artificial Sequence
  Synthetic oligonucleotide
ggttgtcatgctactatatcgctttctgaa

SEQ ID NO: 196703 - DNA, 30 bp, Artificial Sequence
  Synthetic oligonucleotide
taggcagcgggtttaggtgagagaagtgaa

SEQ ID NO: 196704 - DNA, 30 bp, Artificial Sequence
  Synthetic oligonucleotide
gggtccgttagtgacaaaaacgggagtgaa

SEQ ID NO: 196705 - DNA, 30 bp, Artificial Sequence
  Synthetic oligonucleotide
gaagagattaatacgttctgtcatagtgaa

SEQ ID NO: 196706 - DNA, 30 bp, Artificial Sequence
  Synthetic oligonucleotide
tgatatcaagcgtcacattggtctagtgaa

SEQ ID NO: 196707 - DNA, 30 bp, Artificial Sequence
  Synthetic oligonucleotide
tggggagtggttagccctatagttagtgaa

SEQ ID NO: 196708 - DNA, 30 bp, Artificial Sequence
  Synthetic oligonucleotide
cctggattgggggcgaacggggggcgtgaa

SEQ ID NO: 196709 - DNA, 30 bp, Artificial Sequence
  Synthetic oligonucleotide
gtctggtgcataatggcacacgtgcgtgaa

SEQ ID NO: 196710 - DNA, 30 bp, Artificial Sequence
  Synthetic oligonucleotide
tagtataggcctgcttggtcagaaggtgaa

SEQ ID NO: 196711 - DNA, 30 bp, Artificial Sequence
  Synthetic oligonucleotide
ggtgagttgacggagggaacgaccggtgaa

SEQ ID NO: 196712 - DNA, 30 bp, Artificial Sequence
  Synthetic oligonucleotide
gtcgcggattcaaaactgatggtcggtgaa

SEQ ID NO: 196713 - DNA, 30 bp, Artificial Sequence
  Synthetic oligonucleotide
ggaagcgatctagccacgtgtttcggtgaa

SEQ ID NO: 196714 - DNA, 30 bp, Artificial Sequence
  Synthetic oligonucleotide
tgaaacactcgaacaaagtcgaggggtgaa

SEQ ID NO: 196715 - DNA, 30 bp, Artificial Sequence
  Synthetic oligonucleotide
ccggcctgacaaggtccacctcttggtgaa

SEQ ID NO: 196716 - DNA, 30 bp, Artificial Sequence
  Synthetic oligonucleotide
caggactgtggggcgctgttagactgtgaa

SEQ ID NO: 196717 - DNA, 30 bp, Artificial Sequence
  Synthetic oligonucleotide
cgttcttccatggcttacagaaattgtgaa

SEQ ID NO: 196718 - DNA, 30 bp, Artificial Sequence
  Synthetic oligonucleotide
ggaatgcgtcgacctaaccgtaaaattgaa

SEQ ID NO: 196719 - DNA, 30 bp, Artificial Sequence
  Synthetic oligonucleotide
gaaaagatatggccacagaatggaattgaa

SEQ ID NO: 196720 - DNA, 30 bp, Artificial Sequence
  Synthetic oligonucleotide
cggagaaattgtataattggtggaattgaa

SEQ ID NO: 196721 - DNA, 30 bp, Artificial Sequence
  Synthetic oligonucleotide
gagccagattgtgaggccatgcagattgaa

SEQ ID NO: 196722 - DNA, 31 bp, Artificial Sequence
  Synthetic oligonucleotide
tgagtcgcagagaaatgttgatacgattgaa

SEQ ID NO: 196723 - DNA, 30 bp, Artificial Sequence
  Synthetic oligonucleotide
ctatggagaatttcatacttactgattgaa

SEQ ID NO: 196724 - DNA, 30 bp, Artificial Sequence
  Synthetic oligonucleotide
gcggcgacgcaacctcattccgtgattgaa

SEQ ID NO: 196725 - DNA, 30 bp, Artificial Sequence
  Synthetic oligonucleotide
cggaatcttcgctggatcgattgtattgaa

SEQ ID NO: 196726 - DNA, 30 bp, Artificial Sequence
  Synthetic oligonucleotide
attatcacaaacgcgaatccgaggcttgaa

SEQ ID NO: 196727 - DNA, 30 bp, Artificial Sequence
  Synthetic oligonucleotide
agcacttaacaggcttgaccagatcttgaa

SEQ ID NO: 196728 - DNA, 30 bp, Artificial Sequence
  Synthetic oligonucleotide
gcggacgacggagaatcgacccgtcttgaa

SEQ ID NO: 196729 - DNA, 30 bp, Artificial Sequence
  Synthetic oligonucleotide
atatcacccacatcgtaacgatgtcttgaa

SEQ ID NO: 196730 - DNA, 30 bp, Artificial Sequence
  Synthetic oligonucleotide
tcgagcgttactaacggttcatttcttgaa

SEQ ID NO: 196731 - DNA, 30 bp, Artificial Sequence
  Synthetic oligonucleotide
gggattaaaatgcctgaggcgcaagttgaa

SEQ ID NO: 196732 - DNA, 30 bp, Artificial Sequence
  Synthetic oligonucleotide
ctgactcgtgcaaaaagttcgacagttgaa

SEQ ID NO: 196733 - DNA, 30 bp, Artificial Sequence
  Synthetic oligonucleotide
gacaagggtttgactccggccgacgttgaa

SEQ ID NO: 196734 - DNA, 30 bp, Artificial Sequence
  Synthetic oligonucleotide
actattatgatggtctgtgtgtctgttgaa

SEQ ID NO: 196735 - DNA, 30 bp, Artificial Sequence
  Synthetic oligonucleotide
gagacatccaggtatacaaaagcatttgaa

SEQ ID NO: 196736 - DNA, 30 bp, Artificial Sequence
  Synthetic oligonucleotide
aggaatggtttagagacgtctctatttgaa

SEQ ID NO: 196737 - DNA, 30 bp, Artificial Sequence
  Synthetic oligonucleotide
ctacaaaggggagcaagaagtctatttgaa

SEQ ID NO: 196738 - DNA, 30 bp, Artificial Sequence
  Synthetic oligonucleotide
accggaagcaggtggctatagacctttgaa

SEQ ID NO: 196739 - DNA, 30 bp, Artificial Sequence
  Synthetic oligonucleotide
tacaggctctttgccgcttgagagtttgaa

SEQ ID NO: 196740 - DNA, 30 bp, Artificial Sequence
  Synthetic oligonucleotide
atcgccagtgtgtattgcctacgttttgaa

SEQ ID NO: 196741 - DNA, 30 bp, Artificial Sequence
  Synthetic oligonucleotide
cagctgtaaggtcgcgagttcggttttgaa

SEQ ID NO: 196742 - DNA, 30 bp, Artificial Sequence
  Synthetic oligonucleotide
aacatagagctcggcaagatgccaaaataa

SEQ ID NO: 196743 - DNA, 30 bp, Artificial Sequence
  Synthetic oligonucleotide
ttgccgaaacatcaagcgtagaagaaataa

SEQ ID NO: 196744 - DNA, 30 bp, Artificial Sequence
  Synthetic oligonucleotide
ggggacctggctcggtcgttgtgtaaataa

SEQ ID NO: 196745 - DNA, 30 bp, Artificial Sequence
  Synthetic oligonucleotide
tggcaactaatcaaaacaagtgaccaataa

SEQ ID NO: 196746 - DNA, 30 bp, Artificial Sequence
  Synthetic oligonucleotide
tcgatatttgaaaagattacccgccaataa

SEQ ID NO: 196747 - DNA, 30 bp, Artificial Sequence
  Synthetic oligonucleotide
gaatcgtgccccctggagattcagcaataa

SEQ ID NO: 196748 - DNA, 30 bp, Artificial Sequence
  Synthetic oligonucleotide
tcggcgaaattagccaggctgtatcaataa

SEQ ID NO: 196749 - DNA, 30 bp, Artificial Sequence
  Synthetic oligonucleotide
gatgatgtccgcctcggtgatggtcaataa

SEQ ID NO: 196750 - DNA, 30 bp, Artificial Sequence
  Synthetic oligonucleotide
cttaccagtcatcatcccatgattcaataa

SEQ ID NO: 196751 - DNA, 30 bp, Artificial Sequence
  Synthetic oligonucleotide
aaaccctactgtagtaaaccacttcaataa

SEQ ID NO: 196752 - DNA, 30 bp, Artificial Sequence
  Synthetic oligonucleotide
gcgcgtcacaaagcgacgggcacagaataa

SEQ ID NO: 196753 - DNA, 30 bp, Artificial Sequence
  Synthetic oligonucleotide
caagctggttctgtcgaaaagttagaataa

SEQ ID NO: 196754 - DNA, 30 bp, Artificial Sequence
  Synthetic oligonucleotide
tctagacgtcggacggccagcgaggaataa

SEQ ID NO: 196755 - DNA, 30 bp, Artificial Sequence
  Synthetic oligonucleotide
aaatacatgcgaggacgtgaggttgaataa

SEQ ID NO: 196756 - DNA, 30 bp, Artificial Sequence
  Synthetic oligonucleotide
cttagaagttacaaggatgcggaataataa

SEQ ID NO: 196757 - DNA, 30 bp, Artificial Sequence
  Synthetic oligonucleotide
tgccatcggtaaccaaagcatgtataataa

SEQ ID NO: 196758 - DNA, 30 bp, Artificial Sequence
  Synthetic oligonucleotide
cctggtgcgcaccgtcacaacaactaataa

SEQ ID NO: 196759 - DNA, 30 bp, Artificial Sequence
  Synthetic oligonucleotide
gaacaaagacgttgtcatagcctctaataa

SEQ ID NO: 196760 - DNA, 30 bp, Artificial Sequence
  Synthetic oligonucleotide
ctaacgagatgccttagggtagggtaataa

SEQ ID NO: 196761 - DNA, 30 bp, Artificial Sequence
  Synthetic oligonucleotide
tctggaagctaatccagataaaattaataa

SEQ ID NO: 196762 - DNA, 30 bp, Artificial Sequence
  Synthetic oligonucleotide
tcgttcaaattcccgctagttcattaataa

SEQ ID NO: 196763 - DNA, 30 bp, Artificial Sequence
  Synthetic oligonucleotide
tactcgggcgtcttaaacgcacaaacataa

SEQ ID NO: 196764 - DNA, 30 bp, Artificial Sequence
  Synthetic oligonucleotide
aatagtcaccgattaaataatcccacataa

SEQ ID NO: 196765 - DNA, 30 bp, Artificial Sequence
  Synthetic oligonucleotide
tatagctgtctaagaccaccccggacataa

SEQ ID NO: 196766 - DNA, 30 bp, Artificial Sequence
  Synthetic oligonucleotide
taaagacggtccggctcatgatacccataa

SEQ ID NO: 196767 - DNA, 30 bp, Artificial Sequence
  Synthetic oligonucleotide
gaaaggcttacggttcggtaggatccataa

SEQ ID NO: 196768 - DNA, 30 bp, Artificial Sequence
  Synthetic oligonucleotide
cgcactgcgatttcaaccgttgaagcataa

SEQ ID NO: 196769 - DNA, 30 bp, Artificial Sequence
  Synthetic oligonucleotide
cgcattcgtgggaaatcagaagcagcataa

SEQ ID NO: 196770 - DNA, 30 bp, Artificial Sequence
  Synthetic oligonucleotide
tttaagttacagcctaccaacagcgcataa

SEQ ID NO: 196771 - DNA, 30 bp, Artificial Sequence
  Synthetic oligonucleotide
gtgtatacacgtgcgattgcagaatcataa

SEQ ID NO: 196772 - DNA, 30 bp, Artificial Sequence
  Synthetic oligonucleotide
atggtcagcggcacactgaattaatcataa

SEQ ID NO: 196773 - DNA, 30 bp, Artificial Sequence
  Synthetic oligonucleotide
cggaggtacatggcccttaaaaagtcataa

SEQ ID NO: 196774 - DNA, 30 bp, Artificial Sequence
  Synthetic oligonucleotide
atatcgctgtcctgagatcgacagtcataa

SEQ ID NO: 196775 - DNA, 30 bp, Artificial Sequence
  Synthetic oligonucleotide
agaggggtcacgtagactggctacagataa

SEQ ID NO: 196776 - DNA, 30 bp, Artificial Sequence
  Synthetic oligonucleotide
gcctctggcattgcagacgtaaagagataa

SEQ ID NO: 196777 - DNA, 30 bp, Artificial Sequence
  Synthetic oligonucleotide
ccaagtaacaattgggcgagcgagagataa

SEQ ID NO: 196778 - DNA, 30 bp, Artificial Sequence
  Synthetic oligonucleotide
atgtaggactacatggtacctcggagataa

SEQ ID NO: 196779 - DNA, 30 bp, Artificial Sequence
  Synthetic oligonucleotide
tatacagccaaagcccattgaagacgataa

SEQ ID NO: 196780 - DNA, 30 bp, Artificial Sequence
  Synthetic oligonucleotide
agaccgcaaagggtcttcgatagtcgataa

SEQ ID NO: 196781 - DNA, 30 bp, Artificial Sequence
  Synthetic oligonucleotide
ggcagagactgcatttattgcaatggataa

SEQ ID NO: 196782 - DNA, 30 bp, Artificial Sequence
  Synthetic oligonucleotide
atcaatagtagtagtggacccgcatgataa

SEQ ID NO: 196783 - DNA, 30 bp, Artificial Sequence
  Synthetic oligonucleotide
ctctcgcatccttgcagggcgtcatgataa

SEQ ID NO: 196784 - DNA, 30 bp, Artificial Sequence
  Synthetic oligonucleotide
agaacgggatgccgttgtatgtcatgataa

SEQ ID NO: 196785 - DNA, 30 bp, Artificial Sequence
  Synthetic oligonucleotide
cacagtcggccacgacgactcgtatgataa

SEQ ID NO: 196786 - DNA, 30 bp, Artificial Sequence
  Synthetic oligonucleotide
atacagaaaggctcagaaccgcactgataa

SEQ ID NO: 196787 - DNA, 30 bp, Artificial Sequence
  Synthetic oligonucleotide
gtcgaacgagctggaagattaggttgataa

SEQ ID NO: 196788 - DNA, 30 bp, Artificial Sequence
  Synthetic oligonucleotide
tagaaaacaggcactacacgtctcatataa

SEQ ID NO: 196789 - DNA, 30 bp, Artificial Sequence
  Synthetic oligonucleotide
agatgcttgccaagtaactccgtcatataa

SEQ ID NO: 196790 - DNA, 30 bp, Artificial Sequence
  Synthetic oligonucleotide
gtcgggtagtttaactgggtggtcatataa

SEQ ID NO: 196791 - DNA, 30 bp, Artificial Sequence
  Synthetic oligonucleotide
gaaatagaccgcacgtggcccaggatataa

SEQ ID NO: 196792 - DNA, 30 bp, Artificial Sequence
  Synthetic oligonucleotide
ctgcgacagacaatcctaaaccggatataa

SEQ ID NO: 196793 - DNA, 30 bp, Artificial Sequence
  Synthetic oligonucleotide
agccagcgtgacttggtcagcttactataa

SEQ ID NO: 196794 - DNA, 30 bp, Artificial Sequence
  Synthetic oligonucleotide
tgggcttcgcgacgtgggggaggcctataa

SEQ ID NO: 196795 - DNA, 30 bp, Artificial Sequence
  Synthetic oligonucleotide
ggactttgcgacagtcataccggcctataa

SEQ ID NO: 196796 - DNA, 30 bp, Artificial Sequence
  Synthetic oligonucleotide
acggttaaatgaacacacgatggcctataa

SEQ ID NO: 196797 - DNA, 30 bp, Artificial Sequence
  Synthetic oligonucleotide
ggacacacgttttgatattgtggcctataa

SEQ ID NO: 196798 - DNA, 30 bp, Artificial Sequence
  Synthetic oligonucleotide
cattagcgaatcagcccccgaaacgtataa

SEQ ID NO: 196799 - DNA, 30 bp, Artificial Sequence
  Synthetic oligonucleotide
aaacgacatgaatttcacgacaacgtataa

SEQ ID NO: 196800 - DNA, 29 bp, Artificial Sequence
  Synthetic oligonucleotide
ataactaatcataaggtgagaatgtataa

SEQ ID NO: 196801 - DNA, 30 bp, Artificial Sequence
  Synthetic oligonucleotide
ttagagtgctcaacatcaatacatgtataa

SEQ ID NO: 196802 - DNA, 30 bp, Artificial Sequence
  Synthetic oligonucleotide
aggcgtttgatcgtacctccacacttataa

SEQ ID NO: 196803 - DNA, 30 bp, Artificial Sequence
  Synthetic oligonucleotide
cgggatcttgtggtccaacttaagttataa

SEQ ID NO: 196804 - DNA, 30 bp, Artificial Sequence
  Synthetic oligonucleotide
ataggtagaaaaagtctattgcggttataa

SEQ ID NO: 196805 - DNA, 30 bp, Artificial Sequence
  Synthetic oligonucleotide
gaaggcgatcagaacacccgacgtttataa

SEQ ID NO: 196806 - DNA, 30 bp, Artificial Sequence
  Synthetic oligonucleotide
cggccaaatatattgctaggtttgaactaa

SEQ ID NO: 196807 - DNA, 30 bp, Artificial Sequence
  Synthetic oligonucleotide
caccaaccaatgacgcgttcacaacactaa

SEQ ID NO: 196808 - DNA, 30 bp, Artificial Sequence
  Synthetic oligonucleotide
cgacggttgagtaatggtaatccacactaa

SEQ ID NO: 196809 - DNA, 30 bp, Artificial Sequence
  Synthetic oligonucleotide
gcaatggaacaggtaagtgactaagactaa

SEQ ID NO: 196810 - DNA, 30 bp, Artificial Sequence
  Synthetic oligonucleotide
aggtgtcatccggtgtatagtccagactaa

SEQ ID NO: 196811 - DNA, 30 bp, Artificial Sequence
  Synthetic oligonucleotide
ttcccttgggtaggagtgaaatcagactaa

SEQ ID NO: 196812 - DNA, 30 bp, Artificial Sequence
  Synthetic oligonucleotide
gcaagtaaatccccagtaatacccgactaa

SEQ ID NO: 196813 - DNA, 30 bp, Artificial Sequence
  Synthetic oligonucleotide
ctgggtctacggcggattggggaggactaa

SEQ ID NO: 196814 - DNA, 30 bp, Artificial Sequence
  Synthetic oligonucleotide
ggattgaactcgtcagagactgcatactaa

SEQ ID NO: 196815 - DNA, 30 bp, Artificial Sequence
  Synthetic oligonucleotide
ctgcactactagcgctcaatgtcatactaa

SEQ ID NO: 196816 - DNA, 30 bp, Artificial Sequence
  Synthetic oligonucleotide
gacgcagtctaggtagaaacgagatactaa

SEQ ID NO: 196817 - DNA, 30 bp, Artificial Sequence
  Synthetic oligonucleotide
ggctctaggtctgcagagatactgtactaa

SEQ ID NO: 196818 - DNA, 30 bp, Artificial Sequence
  Synthetic oligonucleotide
tcaaggcttgccttatggggacattactaa

SEQ ID NO: 196819 - DNA, 30 bp, Artificial Sequence
  Synthetic oligonucleotide
aatccgcaaaacaaggagggtggttactaa

SEQ ID NO: 196820 - DNA, 30 bp, Artificial Sequence
  Synthetic oligonucleotide
atacacgtcgatgggaaccgcgtttactaa

SEQ ID NO: 196821 - DNA, 30 bp, Artificial Sequence
  Synthetic oligonucleotide
aagcgctatatcgcgcacattagaacctaa

SEQ ID NO: 196822 - DNA, 30 bp, Artificial Sequence
  Synthetic oligonucleotide
tcacagggtgttatatagggaaggacctaa

SEQ ID NO: 196823 - DNA, 30 bp, Artificial Sequence
  Synthetic oligonucleotide
caaagagcggtacccgaccaggctacctaa

SEQ ID NO: 196824 - DNA, 30 bp, Artificial Sequence
  Synthetic oligonucleotide
ttatgacaatatggccccgtttcaccctaa

SEQ ID NO: 196825 - DNA, 30 bp, Artificial Sequence
  Synthetic oligonucleotide
tgtaaaactaaccgggttctacagccctaa

SEQ ID NO: 196826 - DNA, 30 bp, Artificial Sequence
  Synthetic oligonucleotide
gtgggcctcagcaataacagtcttccctaa

SEQ ID NO: 196827 - DNA, 30 bp, Artificial Sequence
  Synthetic oligonucleotide
taagaactggaagtgacacgtaaagcctaa

SEQ ID NO: 196828 - DNA, 30 bp, Artificial Sequence
  Synthetic oligonucleotide
ataggatacattagcacctgtcaagcctaa

SEQ ID NO: 196829 - DNA, 30 bp, Artificial Sequence
  Synthetic oligonucleotide
ttaagaagtgttgcgaccttaagagcctaa

SEQ ID NO: 196830 - DNA, 30 bp, Artificial Sequence
  Synthetic oligonucleotide
ttaatagaaagtgccgcgaaggtcgcctaa

SEQ ID NO: 196831 - DNA, 30 bp, Artificial Sequence
  Synthetic oligonucleotide
gacgcccagagcaccccacaagaggcctaa

SEQ ID NO: 196832 - DNA, 30 bp, Artificial Sequence
  Synthetic oligonucleotide
tcgtcgttagaaaatgattacaatgcctaa

SEQ ID NO: 196833 - DNA, 30 bp, Artificial Sequence
  Synthetic oligonucleotide
caataggaagatactccagctggtgcctaa

SEQ ID NO: 196834 - DNA, 30 bp, Artificial Sequence
  Synthetic oligonucleotide
tcccaaggtattgcctacgccccatcctaa

SEQ ID NO: 196835 - DNA, 30 bp, Artificial Sequence
  Synthetic oligonucleotide
ccgaaagtataactagcagcatagtcctaa

SEQ ID NO: 196836 - DNA, 30 bp, Artificial Sequence
  Synthetic oligonucleotide
tggccgtcaggagaaatcactcggtcctaa

SEQ ID NO: 196837 - DNA, 30 bp, Artificial Sequence
  Synthetic oligonucleotide
ggcgaccagtcctgttattcagcttcctaa

SEQ ID NO: 196838 - DNA, 30 bp, Artificial Sequence
  Synthetic oligonucleotide
gcttgtctaggtgttatagagttttcctaa

SEQ ID NO: 196839 - DNA, 30 bp, Artificial Sequence
  Synthetic oligonucleotide
cagagggccccgattcactcgaaaagctaa

SEQ ID NO: 196840 - DNA, 30 bp, Artificial Sequence
  Synthetic oligonucleotide
agcctccggccttgggagtggaccagctaa

SEQ ID NO: 196841 - DNA, 30 bp, Artificial Sequence
  Synthetic oligonucleotide
cggcggtggaaacacccagtaacacgctaa

SEQ ID NO: 196842 - DNA, 30 bp, Artificial Sequence
  Synthetic oligonucleotide
aactaacttcttgtcccgtccagccgctaa

SEQ ID NO: 196843 - DNA, 30 bp, Artificial Sequence
  Synthetic oligonucleotide
gttcgcgaaccatgcattatcggccgctaa

SEQ ID NO: 196844 - DNA, 30 bp, Artificial Sequence
  Synthetic oligonucleotide
ggtagactggtgtagggaaagtagcgctaa

SEQ ID NO: 196845 - DNA, 30 bp, Artificial Sequence
  Synthetic oligonucleotide
gggtaacggtatcacagttgggcaggctaa

SEQ ID NO: 196846 - DNA, 30 bp, Artificial Sequence
  Synthetic oligonucleotide
aaaagcggataaccatttttcataggctaa

SEQ ID NO: 196847 - DNA, 30 bp, Artificial Sequence
  Synthetic oligonucleotide
ccgtcacgccactacgctaagaaatgctaa

SEQ ID NO: 196848 - DNA, 30 bp, Artificial Sequence
  Synthetic oligonucleotide
caaggtgttccagtgagcttcagatgctaa

SEQ ID NO: 196849 - DNA, 30 bp, Artificial Sequence
  Synthetic oligonucleotide
ggggggtgaacattcggtccactatgctaa

SEQ ID NO: 196850 - DNA, 30 bp, Artificial Sequence
  Synthetic oligonucleotide
aaggataaagcacacaattatacgtgctaa

SEQ ID NO: 196851 - DNA, 30 bp, Artificial Sequence
  Synthetic oligonucleotide
gtatgcgagtacgtactagaatattgctaa

SEQ ID NO: 196852 - DNA, 30 bp, Artificial Sequence
  Synthetic oligonucleotide
cacggggggtcaggctctctccaaatctaa

SEQ ID NO: 196853 - DNA, 30 bp, Artificial Sequence
  Synthetic oligonucleotide
cggcgatttaggccatccgaagcgatctaa

SEQ ID NO: 196854 - DNA, 30 bp, Artificial Sequence
  Synthetic oligonucleotide
ttaccaagaaaggtcggccaatctatctaa

SEQ ID NO: 196855 - DNA, 30 bp, Artificial Sequence
  Synthetic oligonucleotide
ccaacgcttaatattgcctccgcactctaa

SEQ ID NO: 196856 - DNA, 30 bp, Artificial Sequence
  Synthetic oligonucleotide
gggggctgaccagtgatttaatcactctaa

SEQ ID NO: 196857 - DNA, 30 bp, Artificial Sequence
  Synthetic oligonucleotide
gttatactacggtctaacacctccctctaa

SEQ ID NO: 196858 - DNA, 30 bp, Artificial Sequence
  Synthetic oligonucleotide
tgcgaaaaaattgtcttatgagggctctaa

SEQ ID NO: 196859 - DNA, 30 bp, Artificial Sequence
  Synthetic oligonucleotide
ctagaactgacaaccgccctacctctctaa

SEQ ID NO: 196860 - DNA, 30 bp, Artificial Sequence
  Synthetic oligonucleotide
ccgacaagagtcgtaaaaataaaagtctaa

SEQ ID NO: 196861 - DNA, 30 bp, Artificial Sequence
  Synthetic oligonucleotide
tagtagaggggttagtttgagacagtctaa

SEQ ID NO: 196862 - DNA, 30 bp, Artificial Sequence
  Synthetic oligonucleotide
gggatcgtgttacatgagtggcgagtctaa

SEQ ID NO: 196863 - DNA, 30 bp, Artificial Sequence
  Synthetic oligonucleotide
atgaagatacgatacctttcgggcgtctaa

SEQ ID NO: 196864 - DNA, 30 bp, Artificial Sequence
  Synthetic oligonucleotide
ggttctgccctaaggctagaagatgtctaa

SEQ ID NO: 196865 - DNA, 30 bp, Artificial Sequence
  Synthetic oligonucleotide
gtcgaccaatatcatagtccgacattctaa

SEQ ID NO: 196866 - DNA, 30 bp, Artificial Sequence
  Synthetic oligonucleotide
ggcacgccgtagggttattggcatttctaa

SEQ ID NO: 196867 - DNA, 30 bp, Artificial Sequence
  Synthetic oligonucleotide
gggggaggtacgtctggaggtggtttctaa

SEQ ID NO: 196868 - DNA, 30 bp, Artificial Sequence
  Synthetic oligonucleotide
gccaaatttcgggattgttcgtttttctaa

SEQ ID NO: 196869 - DNA, 30 bp, Artificial Sequence
  Synthetic oligonucleotide
taggatcttacagcatgctagcaaaagtaa

SEQ ID NO: 196870 - DNA, 30 bp, Artificial Sequence
  Synthetic oligonucleotide
tgggtctgcggcctggggtgataaaagtaa

SEQ ID NO: 196871 - DNA, 30 bp, Artificial Sequence
  Synthetic oligonucleotide
ccatgcatgtgtggccatacgtcaaagtaa

SEQ ID NO: 196872 - DNA, 30 bp, Artificial Sequence
  Synthetic oligonucleotide
agttacgcctcggggggcattgacaagtaa

SEQ ID NO: 196873 - DNA, 30 bp, Artificial Sequence
  Synthetic oligonucleotide
ttcgggtccttggcggagtgagtcaagtaa

SEQ ID NO: 196874 - DNA, 30 bp, Artificial Sequence
  Synthetic oligonucleotide
ggtcgcaatgggtgctctcagccgaagtaa

SEQ ID NO: 196875 - DNA, 30 bp, Artificial Sequence
  Synthetic oligonucleotide
atataatattggtccatctaatcgaagtaa

SEQ ID NO: 196876 - DNA, 30 bp, Artificial Sequence
  Synthetic oligonucleotide
gcatagtagccagatataactcggaagtaa

SEQ ID NO: 196877 - DNA, 30 bp, Artificial Sequence
  Synthetic oligonucleotide
tgttaacgtcgtaggggttgtcgccagtaa

SEQ ID NO: 196878 - DNA, 30 bp, Artificial Sequence
  Synthetic oligonucleotide
cctgaagaaggtcgagcagctagtcagtaa

SEQ ID NO: 196879 - DNA, 30 bp, Artificial Sequence
  Synthetic oligonucleotide
ggcccaatatacggcacgtgtcgtcagtaa

SEQ ID NO: 196880 - DNA, 30 bp, Artificial Sequence
  Synthetic oligonucleotide
ttcctagaccaaacaatcggtcccgagtaa

SEQ ID NO: 196881 - DNA, 30 bp, Artificial Sequence
  Synthetic oligonucleotide
gcagactggtgcctaggaggtcgcgagtaa

SEQ ID NO: 196882 - DNA, 30 bp, Artificial Sequence
  Synthetic oligonucleotide
catcacttaacgccgaaatggtcggagtaa

SEQ ID NO: 196883 - DNA, 30 bp, Artificial Sequence
  Synthetic oligonucleotide
tgcttggatgtgatatacatcgtggagtaa

SEQ ID NO: 196884 - DNA, 30 bp, Artificial Sequence
  Synthetic oligonucleotide
ttcgaggtggtacgcgagttatatgagtaa

SEQ ID NO: 196885 - DNA, 30 bp, Artificial Sequence
  Synthetic oligonucleotide
gcacacaaattttgaactcgttaatagtaa

SEQ ID NO: 196886 - DNA, 30 bp, Artificial Sequence
  Synthetic oligonucleotide
acgaggccgagctgtacaccagcatagtaa

SEQ ID NO: 196887 - DNA, 30 bp, Artificial Sequence
  Synthetic oligonucleotide
gtgcgtcggccaggaataacgaggtagtaa

SEQ ID NO: 196888 - DNA, 30 bp, Artificial Sequence
  Synthetic oligonucleotide
ggggtcagtgccatcatgtggatgtagtaa

SEQ ID NO: 196889 - DNA, 30 bp, Artificial Sequence
  Synthetic oligonucleotide
agaaactaacgcgaaaagcggatttagtaa

SEQ ID NO: 196890 - DNA, 30 bp, Artificial Sequence
  Synthetic oligonucleotide
agacttgcccggagcaagaatccaacgtaa

SEQ ID NO: 196891 - DNA, 30 bp, Artificial Sequence
  Synthetic oligonucleotide
gaattgcgaggaagtttctaaaacacgtaa

SEQ ID NO: 196892 - DNA, 30 bp, Artificial Sequence
  Synthetic oligonucleotide
atcagactaaggcatcttagaccgacgtaa

SEQ ID NO: 196893 - DNA, 30 bp, Artificial Sequence
  Synthetic oligonucleotide
caactttcgggaagttaaaaatcgacgtaa

SEQ ID NO: 196894 - DNA, 30 bp, Artificial Sequence
  Synthetic oligonucleotide
aggtaacatcgggcagcacaccatacgtaa

SEQ ID NO: 196895 - DNA, 30 bp, Artificial Sequence
  Synthetic oligonucleotide
tcgcgggcatgcggagccgctgatacgtaa

SEQ ID NO: 196896 - DNA, 30 bp, Artificial Sequence
  Synthetic oligonucleotide
ttcgatcgatttcgaagagtgaaaccgtaa

SEQ ID NO: 196897 - DNA, 30 bp, Artificial Sequence
  Synthetic oligonucleotide
tacagggtccaagcggacgaacagccgtaa

SEQ ID NO: 196898 - DNA, 30 bp, Artificial Sequence
  Synthetic oligonucleotide
ctttaggtcggagacgcgtcgcagccgtaa

SEQ ID NO: 196899 - DNA, 30 bp, Artificial Sequence
  Synthetic oligonucleotide
acccccggcatatatccctacactccgtaa

SEQ ID NO: 196900 - DNA, 30 bp, Artificial Sequence
  Synthetic oligonucleotide
tcatccaatacaagagcttacggtccgtaa

SEQ ID NO: 196901 - DNA, 30 bp, Artificial Sequence
  Synthetic oligonucleotide
tagaatacgggatggtcactcaaagcgtaa

SEQ ID NO: 196902 - DNA, 30 bp, Artificial Sequence
  Synthetic oligonucleotide
ccggtcctaatagtcttaataaaggcgtaa

SEQ ID NO: 196903 - DNA, 30 bp, Artificial Sequence
  Synthetic oligonucleotide
tggcaggttgaggacgtttgaccggcgtaa

SEQ ID NO: 196904 - DNA, 30 bp, Artificial Sequence
  Synthetic oligonucleotide
tataacatctacggtgcgcacaaatcgtaa

SEQ ID NO: 196905 - DNA, 30 bp, Artificial Sequence
  Synthetic oligonucleotide
tggactaatattaagcagccctaatcgtaa

SEQ ID NO: 196906 - DNA, 30 bp, Artificial Sequence
  Synthetic oligonucleotide
aacatggagtgattgctcccgtaatcgtaa

SEQ ID NO: 196907 - DNA, 31 bp, Artificial Sequence
  Synthetic oligonucleotide
aacgctcagatcgggggccctggtatcgtaa

SEQ ID NO: 196908 - DNA, 30 bp, Artificial Sequence
  Synthetic oligonucleotide
acttttgctcttaattaatgttcctcgtaa

SEQ ID NO: 196909 - DNA, 30 bp, Artificial Sequence
  Synthetic oligonucleotide
tttgctaagaagcaacctgggagctcgtaa

SEQ ID NO: 196910 - DNA, 30 bp, Artificial Sequence
  Synthetic oligonucleotide
taacaggtgtgtatcccgtcgtgctcgtaa

SEQ ID NO: 196911 - DNA, 30 bp, Artificial Sequence
  Synthetic oligonucleotide
gattaaattttaagtaacagaggaaggtaa

SEQ ID NO: 196912 - DNA, 30 bp, Artificial Sequence
  Synthetic oligonucleotide
taccacggctggtaggtacggataaggtaa

SEQ ID NO: 196913 - DNA, 30 bp, Artificial Sequence
  Synthetic oligonucleotide
agaccctagaccaaccatacagacaggtaa

SEQ ID NO: 196914 - DNA, 30 bp, Artificial Sequence
  Synthetic oligonucleotide
gaatggaaaatgcttctatgaacgaggtaa

SEQ ID NO: 196915 - DNA, 30 bp, Artificial Sequence
  Synthetic oligonucleotide
gataagctaccagtatttttgagtaggtaa

SEQ ID NO: 196916 - DNA, 30 bp, Artificial Sequence
  Synthetic oligonucleotide
gaacgtgttggcgtctgcctcccacggtaa

SEQ ID NO: 196917 - DNA, 30 bp, Artificial Sequence
  Synthetic oligonucleotide
gtacgtcttacctagtgttcggcacggtaa

SEQ ID NO: 196918 - DNA, 30 bp, Artificial Sequence
  Synthetic oligonucleotide
tcatccaccggcagtgaagggggacggtaa

SEQ ID NO: 196919 - DNA, 30 bp, Artificial Sequence
  Synthetic oligonucleotide
atgcgcctggaggagacgttgccccggtaa

SEQ ID NO: 196920 - DNA, 30 bp, Artificial Sequence
  Synthetic oligonucleotide
aacggacacctcgagtgtaactcccggtaa

SEQ ID NO: 196921 - DNA, 30 bp, Artificial Sequence
  Synthetic oligonucleotide
gtaaagaattctgtataactgaagcggtaa

SEQ ID NO: 196922 - DNA, 30 bp, Artificial Sequence
  Synthetic oligonucleotide
aagtgtctatgttgcctgagtaggcggtaa

SEQ ID NO: 196923 - DNA, 30 bp, Artificial Sequence
  Synthetic oligonucleotide
ataagtccatttagggcccaagttcggtaa

SEQ ID NO: 196924 - DNA, 30 bp, Artificial Sequence
  Synthetic oligonucleotide
ccgtgtggtaaatatccggcttcagggtaa

SEQ ID NO: 196925 - DNA, 30 bp, Artificial Sequence
  Synthetic oligonucleotide
tagagttattatatggtccactgagggtaa

SEQ ID NO: 196926 - DNA, 30 bp, Artificial Sequence
  Synthetic oligonucleotide
tgaaggcagcagcaagcacgtggcgggtaa

SEQ ID NO: 196927 - DNA, 28 bp, Artificial Sequence
  Synthetic oligonucleotide
gattgataacattcgcacaatcgggtaa

SEQ ID NO: 196928 - DNA, 30 bp, Artificial Sequence
  Synthetic oligonucleotide
ctaacgaccaatattgtattggaggggtaa

SEQ ID NO: 196929 - DNA, 30 bp, Artificial Sequence
  Synthetic oligonucleotide
atgtagtgctcgtaggaaacataggggtaa

SEQ ID NO: 196930 - DNA, 30 bp, Artificial Sequence
  Synthetic oligonucleotide
acataacatgacaccggactagcggggtaa

SEQ ID NO: 196931 - DNA, 30 bp, Artificial Sequence
  Synthetic oligonucleotide
cggcaaatcgcaaagacgcggatggggtaa

SEQ ID NO: 196932 - DNA, 30 bp, Artificial Sequence
  Synthetic oligonucleotide
tcttatgaggagggccaatgatctgggtaa

SEQ ID NO: 196933 - DNA, 30 bp, Artificial Sequence
  Synthetic oligonucleotide
gggagggacggattccaatatctgtggtaa

SEQ ID NO: 196934 - DNA, 30 bp, Artificial Sequence
  Synthetic oligonucleotide
accgattttatcagtccgaacccttggtaa

SEQ ID NO: 196935 - DNA, 30 bp, Artificial Sequence
  Synthetic oligonucleotide
gatggctcgtaggaatgatggcgttggtaa

SEQ ID NO: 196936 - DNA, 30 bp, Artificial Sequence
  Synthetic oligonucleotide
tcactcgtgaaagtcgactcaatttggtaa

SEQ ID NO: 196937 - DNA, 30 bp, Artificial Sequence
  Synthetic oligonucleotide
ctgacaatcacgggatgcgtaaaaatgtaa

SEQ ID NO: 196938 - DNA, 30 bp, Artificial Sequence
  Synthetic oligonucleotide
tctggatacaaagaaacagcttcaatgtaa

SEQ ID NO: 196939 - DNA, 30 bp, Artificial Sequence
  Synthetic oligonucleotide
gcgctattgggcgggtcccaaagaatgtaa

SEQ ID NO: 196940 - DNA, 30 bp, Artificial Sequence
  Synthetic oligonucleotide
cgagcctccggataaaggaggagcatgtaa

SEQ ID NO: 196941 - DNA, 30 bp, Artificial Sequence
  Synthetic oligonucleotide
cagacctatctaaagtcatacattatgtaa

SEQ ID NO: 196942 - DNA, 30 bp, Artificial Sequence
  Synthetic oligonucleotide
aaccttgaacggttgaggagtctactgtaa

SEQ ID NO: 196943 - DNA, 30 bp, Artificial Sequence
  Synthetic oligonucleotide
gggccatagagtcgtctaaacgagctgtaa

SEQ ID NO: 196944 - DNA, 30 bp, Artificial Sequence
  Synthetic oligonucleotide
tcggatttaaataaatgtggggagctgtaa

SEQ ID NO: 196945 - DNA, 30 bp, Artificial Sequence
  Synthetic oligonucleotide
ggttgaagttgaaatcgaccgcctctgtaa

SEQ ID NO: 196946 - DNA, 30 bp, Artificial Sequence
  Synthetic oligonucleotide
ccgagctacacggtacatcaaatcgtgtaa

SEQ ID NO: 196947 - DNA, 30 bp, Artificial Sequence
  Synthetic oligonucleotide
ggaacatcggtgctacctccaatcgtgtaa

SEQ ID NO: 196948 - DNA, 30 bp, Artificial Sequence
  Synthetic oligonucleotide
tccctggaatacggacctcgtggggtgtaa

SEQ ID NO: 196949 - DNA, 30 bp, Artificial Sequence
  Synthetic oligonucleotide
ccaggcaaaccgttctatcctttggtgtaa

SEQ ID NO: 196950 - DNA, 30 bp, Artificial Sequence
  Synthetic oligonucleotide
cccgtgtggtccgcgatcgcctgtgtgtaa

SEQ ID NO: 196951 - DNA, 30 bp, Artificial Sequence
  Synthetic oligonucleotide
gtgggagagtagggtttgtttattgtgtaa

SEQ ID NO: 196952 - DNA, 30 bp, Artificial Sequence
  Synthetic oligonucleotide
ggaaagggccataggtactgaacattgtaa

SEQ ID NO: 196953 - DNA, 30 bp, Artificial Sequence
  Synthetic oligonucleotide
aaatatcggagtagacggcttggattgtaa

SEQ ID NO: 196954 - DNA, 30 bp, Artificial Sequence
  Synthetic oligonucleotide
gggtccccggtgcaaatgatcgacttgtaa

SEQ ID NO: 196955 - DNA, 30 bp, Artificial Sequence
  Synthetic oligonucleotide
gcacgcatactggggcaatggcgcttgtaa

SEQ ID NO: 196956 - DNA, 30 bp, Artificial Sequence
  Synthetic oligonucleotide
agtaaacctgcgtccgcctcactcttgtaa

SEQ ID NO: 196957 - DNA, 30 bp, Artificial Sequence
  Synthetic oligonucleotide
cgcggagcccctagacggcgggggttgtaa

SEQ ID NO: 196958 - DNA, 31 bp, Artificial Sequence
  Synthetic oligonucleotide
attaggttatcatgtggaagttgggttgtaa

SEQ ID NO: 196959 - DNA, 30 bp, Artificial Sequence
  Synthetic oligonucleotide
cgagtgcctcgaatctgcaatcatttgtaa

SEQ ID NO: 196960 - DNA, 30 bp, Artificial Sequence
  Synthetic oligonucleotide
ctgcacttggtctgagcaagtttaaattaa

SEQ ID NO: 196961 - DNA, 30 bp, Artificial Sequence
  Synthetic oligonucleotide
tcaacagtaggttatgaacggcccaattaa

SEQ ID NO: 196962 - DNA, 30 bp, Artificial Sequence
  Synthetic oligonucleotide
acatcactgaggggacggactcgcaattaa

SEQ ID NO: 196963 - DNA, 30 bp, Artificial Sequence
  Synthetic oligonucleotide
gtccatgtcagttagaaacctcataattaa

SEQ ID NO: 196964 - DNA, 27 bp, Artificial Sequence
  Synthetic oligonucleotide
agacgatgagtatacatagaacattaa

SEQ ID NO: 196965 - DNA, 30 bp, Artificial Sequence
  Synthetic oligonucleotide
aataggccgtacgctcaggacaaccattaa

SEQ ID NO: 196966 - DNA, 30 bp, Artificial Sequence
  Synthetic oligonucleotide
tgcttagatcacgttcataagcggcattaa

SEQ ID NO: 196967 - DNA, 30 bp, Artificial Sequence
  Synthetic oligonucleotide
ctagttgcagagcatatccaagggcattaa

SEQ ID NO: 196968 - DNA, 30 bp, Artificial Sequence
  Synthetic oligonucleotide
caggataagtttcgatcgtacgggcattaa

SEQ ID NO: 196969 - DNA, 30 bp, Artificial Sequence
  Synthetic oligonucleotide
ccagttcagcaggcctcccagagtcattaa

SEQ ID NO: 196970 - DNA, 30 bp, Artificial Sequence
  Synthetic oligonucleotide
ggaatagtgggttgttcatagcgcgattaa

SEQ ID NO: 196971 - DNA, 30 bp, Artificial Sequence
  Synthetic oligonucleotide
gaggttccaggagctgcattcgcggattaa

SEQ ID NO: 196972 - DNA, 30 bp, Artificial Sequence
  Synthetic oligonucleotide
agtcacgttttcatggtttttctggattaa

SEQ ID NO: 196973 - DNA, 30 bp, Artificial Sequence
  Synthetic oligonucleotide
gggggtactgcgtaggaataacctgattaa

SEQ ID NO: 196974 - DNA, 30 bp, Artificial Sequence
  Synthetic oligonucleotide
agtagtgggtacggggtgtgacaatattaa

SEQ ID NO: 196975 - DNA, 31 bp, Artificial Sequence
  Synthetic oligonucleotide
caagcttagatgacggatgtttaactattaa

SEQ ID NO: 196976 - DNA, 30 bp, Artificial Sequence
  Synthetic oligonucleotide
taaaggcggctacttgtgagaggctattaa

SEQ ID NO: 196977 - DNA, 30 bp, Artificial Sequence
  Synthetic oligonucleotide
caaattacaagtggtgtgttgccgtattaa

SEQ ID NO: 196978 - DNA, 30 bp, Artificial Sequence
  Synthetic oligonucleotide
agttggacatggttacagctcccttattaa

SEQ ID NO: 196979 - DNA, 30 bp, Artificial Sequence
  Synthetic oligonucleotide
gctacatacagtgagttgcttcgttattaa

SEQ ID NO: 196980 - DNA, 30 bp, Artificial Sequence
  Synthetic oligonucleotide
aggatttgagcgaccgaaaagttttattaa

SEQ ID NO: 196981 - DNA, 30 bp, Artificial Sequence
  Synthetic oligonucleotide
ggaagacctttaatgtatagtagcacttaa

SEQ ID NO: 196982 - DNA, 30 bp, Artificial Sequence
  Synthetic oligonucleotide
taagtcaacgaacaagtatgctagacttaa

SEQ ID NO: 196983 - DNA, 30 bp, Artificial Sequence
  Synthetic oligonucleotide
ggataggttattgtaacaattcgaccttaa

SEQ ID NO: 196984 - DNA, 30 bp, Artificial Sequence
  Synthetic oligonucleotide
aaaagatcaaaatgcttatccctagcttaa

SEQ ID NO: 196985 - DNA, 30 bp, Artificial Sequence
  Synthetic oligonucleotide
gaaggtaaagacgtcatcccgacggcttaa

SEQ ID NO: 196986 - DNA, 30 bp, Artificial Sequence
  Synthetic oligonucleotide
cgctctcgtagactacctttgctggcttaa

SEQ ID NO: 196987 - DNA, 30 bp, Artificial Sequence
  Synthetic oligonucleotide
ggtctgtatcagcagactcgctttgcttaa

SEQ ID NO: 196988 - DNA, 30 bp, Artificial Sequence
  Synthetic oligonucleotide
tcacgagtgttagcaagtatcgaatcttaa

SEQ ID NO: 196989 - DNA, 30 bp, Artificial Sequence
  Synthetic oligonucleotide
ggacgacgatacgttcggcgaggctcttaa

SEQ ID NO: 196990 - DNA, 30 bp, Artificial Sequence
  Synthetic oligonucleotide
tgtagaggcaaagaatggtattaaagttaa

SEQ ID NO: 196991 - DNA, 30 bp, Artificial Sequence
  Synthetic oligonucleotide
gaaccaacgaggcaccggatttacagttaa

SEQ ID NO: 196992 - DNA, 30 bp, Artificial Sequence
  Synthetic oligonucleotide
caaccggtccgacgatggagttgcagttaa

SEQ ID NO: 196993 - DNA, 30 bp, Artificial Sequence
  Synthetic oligonucleotide
accgggagaacgcccccggtcaagagttaa

SEQ ID NO: 196994 - DNA, 30 bp, Artificial Sequence
  Synthetic oligonucleotide
agctttgagtaaccggggtcagaacgttaa

SEQ ID NO: 196995 - DNA, 30 bp, Artificial Sequence
  Synthetic oligonucleotide
tcgtgtggagtcgggtacggccgacgttaa

SEQ ID NO: 196996 - DNA, 30 bp, Artificial Sequence
  Synthetic oligonucleotide
ctcagcaagagtgcctccggacagcgttaa

SEQ ID NO: 196997 - DNA, 30 bp, Artificial Sequence
  Synthetic oligonucleotide
ggataacaccatctaacttaatggcgttaa

SEQ ID NO: 196998 - DNA, 30 bp, Artificial Sequence
  Synthetic oligonucleotide
agcactgtggctgacccttcttcgggttaa

SEQ ID NO: 196999 - DNA, 30 bp, Artificial Sequence
  Synthetic oligonucleotide
ggcgagcaagaagagagtcctaggggttaa

SEQ ID NO: 197000 - DNA, 30 bp, Artificial Sequence
  Synthetic oligonucleotide
taagggtgggttgtcccgacggcatgttaa

SEQ ID NO: 197001 - DNA, 30 bp, Artificial Sequence
  Synthetic oligonucleotide
aatcggtagatgcggcgtcgcgtgtgttaa

SEQ ID NO: 197002 - DNA, 30 bp, Artificial Sequence
  Synthetic oligonucleotide
cgacatcctaacactgctaaaacttgttaa

SEQ ID NO: 197003 - DNA, 30 bp, Artificial Sequence
  Synthetic oligonucleotide
ggagtactacacgtactggcccaactttaa

SEQ ID NO: 197004 - DNA, 30 bp, Artificial Sequence
  Synthetic oligonucleotide
aaacaatgccttcgaatgtgggacctttaa

SEQ ID NO: 197005 - DNA, 30 bp, Artificial Sequence
  Synthetic oligonucleotide
aatggtaatcagtaacctactcaagtttaa

SEQ ID NO: 197006 - DNA, 30 bp, Artificial Sequence
  Synthetic oligonucleotide
acggcatataacccgcatggatcagtttaa

SEQ ID NO: 197007 - DNA, 30 bp, Artificial Sequence
  Synthetic oligonucleotide
gttcggtaggccccatggtaagtagtttaa

SEQ ID NO: 197008 - DNA, 30 bp, Artificial Sequence
  Synthetic oligonucleotide
gaacaccatctaggattcggcatcgtttaa

SEQ ID NO: 197009 - DNA, 30 bp, Artificial Sequence
  Synthetic oligonucleotide
atgtctagatagaaaatgtgaggggtttaa

SEQ ID NO: 197010 - DNA, 30 bp, Artificial Sequence
  Synthetic oligonucleotide
caagtacagggcatacacagtcatgtttaa

SEQ ID NO: 197011 - DNA, 30 bp, Artificial Sequence
  Synthetic oligonucleotide
acgttcacaacagcagcaacatctgtttaa

SEQ ID NO: 197012 - DNA, 30 bp, Artificial Sequence
  Synthetic oligonucleotide
taacgtctcaccggaacggattctgtttaa

SEQ ID NO: 197013 - DNA, 30 bp, Artificial Sequence
  Synthetic oligonucleotide
gaaagatctgtcgagtttgaagaattttaa

SEQ ID NO: 197014 - DNA, 30 bp, Artificial Sequence
  Synthetic oligonucleotide
ggtcagacactttaagtaatctaattttaa

SEQ ID NO: 197015 - DNA, 30 bp, Artificial Sequence
  Synthetic oligonucleotide
cttgttgtaaactcgctggtaaacttttaa

SEQ ID NO: 197016 - DNA, 30 bp, Artificial Sequence
  Synthetic oligonucleotide
ccaggtaagaccggggactgatacttttaa

SEQ ID NO: 197017 - DNA, 30 bp, Artificial Sequence
  Synthetic oligonucleotide
ctcttggccaagcggttgagggtcttttaa

SEQ ID NO: 197018 - DNA, 30 bp, Artificial Sequence
  Synthetic oligonucleotide
aaggtgtgcatgcttgacagcaagttttaa

SEQ ID NO: 197019 - DNA, 30 bp, Artificial Sequence
  Synthetic oligonucleotide
gataatcaggtccgagaaatcccgttttaa

SEQ ID NO: 197020 - DNA, 30 bp, Artificial Sequence
  Synthetic oligonucleotide
cgcggccccatatttcatacacatttttaa

SEQ ID NO: 197021 - DNA, 30 bp, Artificial Sequence
  Synthetic oligonucleotide
taacgccgggagtcatcagccccaaaaaca

SEQ ID NO: 197022 - DNA, 30 bp, Artificial Sequence
  Synthetic oligonucleotide
aaaggatgcgtcattcatgccgcaaaaaca

SEQ ID NO: 197023 - DNA, 30 bp, Artificial Sequence
  Synthetic oligonucleotide
gatgcaagcagctggtggcttgagaaaaca

SEQ ID NO: 197024 - DNA, 30 bp, Artificial Sequence
  Synthetic oligonucleotide
atccttagtagcccggatggctggaaaaca

SEQ ID NO: 197025 - DNA, 30 bp, Artificial Sequence
  Synthetic oligonucleotide
attgccccggccgtggtagagagtaaaaca

SEQ ID NO: 197026 - DNA, 30 bp, Artificial Sequence
  Synthetic oligonucleotide
tattagtccctcaccacaacacgacaaaca

SEQ ID NO: 197027 - DNA, 30 bp, Artificial Sequence
  Synthetic oligonucleotide
acagggtctcaggttattcaaatacaaaca

SEQ ID NO: 197028 - DNA, 30 bp, Artificial Sequence
  Synthetic oligonucleotide
tcaacgggctatggtgtttttccccaaaca

SEQ ID NO: 197029 - DNA, 30 bp, Artificial Sequence
  Synthetic oligonucleotide
catgcgatacccgtcggcaaatcgcaaaca

SEQ ID NO: 197030 - DNA, 30 bp, Artificial Sequence
  Synthetic oligonucleotide
tggtcgtcggctactgtacgggggcaaaca

SEQ ID NO: 197031 - DNA, 30 bp, Artificial Sequence
  Synthetic oligonucleotide
catcattagtgcatgcgagaagttcaaaca

SEQ ID NO: 197032 - DNA, 30 bp, Artificial Sequence
  Synthetic oligonucleotide
atcctagggggatcaggtacacgcgaaaca

SEQ ID NO: 197033 - DNA, 30 bp, Artificial Sequence
  Synthetic oligonucleotide
ctcaaggagacatcgtgcacttcggaaaca

SEQ ID NO: 197034 - DNA, 30 bp, Artificial Sequence
  Synthetic oligonucleotide
gagtcaaacaaacgatagtacgtggaaaca

SEQ ID NO: 197035 - DNA, 30 bp, Artificial Sequence
  Synthetic oligonucleotide
ccctggcggggagacgttacttgtgaaaca

SEQ ID NO: 197036 - DNA, 30 bp, Artificial Sequence
  Synthetic oligonucleotide
gggcagtcgtacaaagtcacgacataaaca

SEQ ID NO: 197037 - DNA, 30 bp, Artificial Sequence
  Synthetic oligonucleotide
cttcagctcaggaggggaattgtctaaaca

SEQ ID NO: 197038 - DNA, 30 bp, Artificial Sequence
  Synthetic oligonucleotide
gcgaaattaaagtctagttggttttaaaca

SEQ ID NO: 197039 - DNA, 30 bp, Artificial Sequence
  Synthetic oligonucleotide
tgattagtaggaacagcacatgcaacaaca

SEQ ID NO: 197040 - DNA, 30 bp, Artificial Sequence
  Synthetic oligonucleotide
gcacacatggttcggacgtcccgaacaaca

SEQ ID NO: 197041 - DNA, 30 bp, Artificial Sequence
  Synthetic oligonucleotide
tcttctatcacaggctctccggagacaaca

SEQ ID NO: 197042 - DNA, 30 bp, Artificial Sequence
  Synthetic oligonucleotide
gcagtggggtgaacatacaattttacaaca

SEQ ID NO: 197043 - DNA, 30 bp, Artificial Sequence
  Synthetic oligonucleotide
ccgggacgtttggatctttgttgcccaaca

SEQ ID NO: 197044 - DNA, 30 bp, Artificial Sequence
  Synthetic oligonucleotide
tgacaggctgaacaatgccgtaggccaaca

SEQ ID NO: 197045 - DNA, 30 bp, Artificial Sequence
  Synthetic oligonucleotide
ttggaatttccggtaatgccaatgccaaca

SEQ ID NO: 197046 - DNA, 30 bp, Artificial Sequence
  Synthetic oligonucleotide
acttccgtcacactcaagcatcctccaaca

SEQ ID NO: 197047 - DNA, 30 bp, Artificial Sequence
  Synthetic oligonucleotide
cttcaaggttcactctagagaagtccaaca

SEQ ID NO: 197048 - DNA, 30 bp, Artificial Sequence
  Synthetic oligonucleotide
cgtgtgccacacaagttacgcgccgcaaca

SEQ ID NO: 197049 - DNA, 30 bp, Artificial Sequence
  Synthetic oligonucleotide
ctcaagtgacaaacccacaatagcgcaaca

SEQ ID NO: 197050 - DNA, 30 bp, Artificial Sequence
  Synthetic oligonucleotide
cgaacgagggccctagaacaatgggcaaca

SEQ ID NO: 197051 - DNA, 30 bp, Artificial Sequence
  Synthetic oligonucleotide
tctgccggcgcttctggctcaatggcaaca

SEQ ID NO: 197052 - DNA, 30 bp, Artificial Sequence
  Synthetic oligonucleotide
tgctgaatctatcagcatgtacctgcaaca

SEQ ID NO: 197053 - DNA, 30 bp, Artificial Sequence
  Synthetic oligonucleotide
gtcggttcaagcaagagtcgaggatcaaca

SEQ ID NO: 197054 - DNA, 30 bp, Artificial Sequence
  Synthetic oligonucleotide
tacagaagttgagctacggacgacagaaca

SEQ ID NO: 197055 - DNA, 30 bp, Artificial Sequence
  Synthetic oligonucleotide
aatgcacctgtacggtgtcaattgagaaca

SEQ ID NO: 197056 - DNA, 30 bp, Artificial Sequence
  Synthetic oligonucleotide
tgttaacctcacgaaagcactgcacgaaca

SEQ ID NO: 197057 - DNA, 30 bp, Artificial Sequence
  Synthetic oligonucleotide
taagagagcgtgtctaaaatgtgacgaaca

SEQ ID NO: 197058 - DNA, 30 bp, Artificial Sequence
  Synthetic oligonucleotide
gctagggctacggcacgttcggcccgaaca

SEQ ID NO: 197059 - DNA, 30 bp, Artificial Sequence
  Synthetic oligonucleotide
ttctgatagtgacgttatagattgcgaaca

SEQ ID NO: 197060 - DNA, 30 bp, Artificial Sequence
  Synthetic oligonucleotide
gaagcatcttgcatgtaatggtaaggaaca

SEQ ID NO: 197061 - DNA, 30 bp, Artificial Sequence
  Synthetic oligonucleotide
gtctccaaagttgcgtggagtcggggaaca

SEQ ID NO: 197062 - DNA, 30 bp, Artificial Sequence
  Synthetic oligonucleotide
gtaaaggcgatctactcaaccggtggaaca

SEQ ID NO: 197063 - DNA, 30 bp, Artificial Sequence
  Synthetic oligonucleotide
tgtgcaacatatgggcatgctaattgaaca

SEQ ID NO: 197064 - DNA, 30 bp, Artificial Sequence
  Synthetic oligonucleotide
tgctaggtgttagagtgctaacattgaaca

SEQ ID NO: 197065 - DNA, 30 bp, Artificial Sequence
  Synthetic oligonucleotide
gaggaaacgacgcgtctatgcggaataaca

SEQ ID NO: 197066 - DNA, 30 bp, Artificial Sequence
  Synthetic oligonucleotide
cgcaatgttgggagttacatacacataaca

SEQ ID NO: 197067 - DNA, 30 bp, Artificial Sequence
  Synthetic oligonucleotide
tcgccgataaaggaaattataaggataaca

SEQ ID NO: 197068 - DNA, 30 bp, Artificial Sequence
  Synthetic oligonucleotide
tttggtaggtacagagttaatgggataaca

SEQ ID NO: 197069 - DNA, 30 bp, Artificial Sequence
  Synthetic oligonucleotide
tggggacccagctaaagagttaatataaca

SEQ ID NO: 197070 - DNA, 30 bp, Artificial Sequence
  Synthetic oligonucleotide
ccgctttccatacggggtaggagactaaca

SEQ ID NO: 197071 - DNA, 30 bp, Artificial Sequence
  Synthetic oligonucleotide
accaggttgtgatcaacggtctgactaaca

SEQ ID NO: 197072 - DNA, 30 bp, Artificial Sequence
  Synthetic oligonucleotide
ggtgcaattagcgttctccattgactaaca

SEQ ID NO: 197073 - DNA, 30 bp, Artificial Sequence
  Synthetic oligonucleotide
tcgtatgcatgtcatcgatcagacctaaca

SEQ ID NO: 197074 - DNA, 30 bp, Artificial Sequence
  Synthetic oligonucleotide
aaggcggaggtaattccaaggcagctaaca

SEQ ID NO: 197075 - DNA, 30 bp, Artificial Sequence
  Synthetic oligonucleotide
gacttgccccgcaacgaagagactctaaca

SEQ ID NO: 197076 - DNA, 30 bp, Artificial Sequence
  Synthetic oligonucleotide
aggcggtcttaagatatactctaagtaaca

SEQ ID NO: 197077 - DNA, 30 bp, Artificial Sequence
  Synthetic oligonucleotide
ggagttacataggccggcggtaccgtaaca

SEQ ID NO: 197078 - DNA, 31 bp, Artificial Sequence
  Synthetic oligonucleotide
gggctgtgtgcggcatctagggcgcgtaaca

SEQ ID NO: 197079 - DNA, 30 bp, Artificial Sequence
  Synthetic oligonucleotide
gcgcatctgttagaaaggcataaggtaaca

SEQ ID NO: 197080 - DNA, 30 bp, Artificial Sequence
  Synthetic oligonucleotide
taccatatggaggaggtggctatggtaaca

SEQ ID NO: 197081 - DNA, 30 bp, Artificial Sequence
  Synthetic oligonucleotide
gatacgcgggtggtcgtatctaatgtaaca

SEQ ID NO: 197082 - DNA, 30 bp, Artificial Sequence
  Synthetic oligonucleotide
taccgcacctccaacaatacagaattaaca

SEQ ID NO: 197083 - DNA, 30 bp, Artificial Sequence
  Synthetic oligonucleotide
cgtgggtgtgtgcggactctgataaacaca

SEQ ID NO: 197084 - DNA, 30 bp, Artificial Sequence
  Synthetic oligonucleotide
ggacccgtgactagagtgtcacgcaacaca

SEQ ID NO: 197085 - DNA, 30 bp, Artificial Sequence
  Synthetic oligonucleotide
cggttgggaagcattatgtagttcaacaca

SEQ ID NO: 197086 - DNA, 30 bp, Artificial Sequence
  Synthetic oligonucleotide
gaaagtcgacacaattgcctgattaacaca

SEQ ID NO: 197087 - DNA, 30 bp, Artificial Sequence
  Synthetic oligonucleotide
tagcaaaaacgttgcatcgcgcaacacaca

SEQ ID NO: 197088 - DNA, 30 bp, Artificial Sequence
  Synthetic oligonucleotide
agttatacggtgctaagtgacgtgcacaca

SEQ ID NO: 197089 - DNA, 30 bp, Artificial Sequence
  Synthetic oligonucleotide
acgagtcattccacatattcgtacgacaca

SEQ ID NO: 197090 - DNA, 30 bp, Artificial Sequence
  Synthetic oligonucleotide
acgttacatagatcgccatttaaatacaca

SEQ ID NO: 197091 - DNA, 30 bp, Artificial Sequence
  Synthetic oligonucleotide
tccggagagctattgcaaggcgcatacaca

SEQ ID NO: 197092 - DNA, 30 bp, Artificial Sequence
  Synthetic oligonucleotide
aacgaagaataaaaggcgtatatatacaca

SEQ ID NO: 197093 - DNA, 30 bp, Artificial Sequence
  Synthetic oligonucleotide
aaaaccggtagggagcaaccggcctacaca

SEQ ID NO: 197094 - DNA, 30 bp, Artificial Sequence
  Synthetic oligonucleotide
atgtacccgtccaacacgttcacgaccaca

SEQ ID NO: 197095 - DNA, 30 bp, Artificial Sequence
  Synthetic oligonucleotide
ttggacgcggatttgctaagtgtgaccaca

SEQ ID NO: 197096 - DNA, 30 bp, Artificial Sequence
  Synthetic oligonucleotide
ccaatgcatgtcaaagtacatggtaccaca

SEQ ID NO: 197097 - DNA, 30 bp, Artificial Sequence
  Synthetic oligonucleotide
gccaactggcactacggggttggtaccaca

SEQ ID NO: 197098 - DNA, 30 bp, Artificial Sequence
  Synthetic oligonucleotide
tataacgaagcctggcgatactaccccaca

SEQ ID NO: 197099 - DNA, 30 bp, Artificial Sequence
  Synthetic oligonucleotide
gacaccgccaactccgccgacaaagccaca

SEQ ID NO: 197100 - DNA, 30 bp, Artificial Sequence
  Synthetic oligonucleotide
cttgttggtctcgggacctcttaagccaca

SEQ ID NO: 197101 - DNA, 30 bp, Artificial Sequence
  Synthetic oligonucleotide
gttgaatctattggacaataagcagccaca

SEQ ID NO: 197102 - DNA, 30 bp, Artificial Sequence
  Synthetic oligonucleotide
ataccagagcgtcagacaagatctgccaca

SEQ ID NO: 197103 - DNA, 30 bp, Artificial Sequence
  Synthetic oligonucleotide
aagactaacaagcattgaagtagctccaca

SEQ ID NO: 197104 - DNA, 30 bp, Artificial Sequence
  Synthetic oligonucleotide
caaggccgtctggggtctcaaacgtccaca

SEQ ID NO: 197105 - DNA, 30 bp, Artificial Sequence
  Synthetic oligonucleotide
acctacctcggacttacaaactcgtccaca

SEQ ID NO: 197106 - DNA, 30 bp, Artificial Sequence
  Synthetic oligonucleotide
taacatactgtgagtagccccggttccaca

SEQ ID NO: 197107 - DNA, 30 bp, Artificial Sequence
  Synthetic oligonucleotide
ccgatggtgctacaaggtaacctaagcaca

SEQ ID NO: 197108 - DNA, 30 bp, Artificial Sequence
  Synthetic oligonucleotide
cgtatgcctatagggaactttcgcagcaca

SEQ ID NO: 197109 - DNA, 30 bp, Artificial Sequence
  Synthetic oligonucleotide
ctcaacggaggtagtaggtttcctagcaca

SEQ ID NO: 197110 - DNA, 30 bp, Artificial Sequence
  Synthetic oligonucleotide
ttcaacaacgcgaacggcataattagcaca

SEQ ID NO: 197111 - DNA, 30 bp, Artificial Sequence
  Synthetic oligonucleotide
cacagaattaaagggcttaaggaacgcaca

SEQ ID NO: 197112 - DNA, 30 bp, Artificial Sequence
  Synthetic oligonucleotide
cagctagatctgccaggagtactacgcaca

SEQ ID NO: 197113 - DNA, 30 bp, Artificial Sequence
  Synthetic oligonucleotide
tattcgtaagaagtccaacagttacgcaca

SEQ ID NO: 197114 - DNA, 30 bp, Artificial Sequence
  Synthetic oligonucleotide
tccatgtgactgcgcactcccgtccgcaca

SEQ ID NO: 197115 - DNA, 30 bp, Artificial Sequence
  Synthetic oligonucleotide
cgttagagtatgcagtaagtaccgcgcaca

SEQ ID NO: 197116 - DNA, 31 bp, Artificial Sequence
  Synthetic oligonucleotide
tgtacttgcgacgttgagctagactcgcaca

SEQ ID NO: 197117 - DNA, 30 bp, Artificial Sequence
  Synthetic oligonucleotide
tctaagtctcgggcttagaaatgtcgcaca

SEQ ID NO: 197118 - DNA, 30 bp, Artificial Sequence
  Synthetic oligonucleotide
atgaatacagctttgtagaactcaggcaca

SEQ ID NO: 197119 - DNA, 30 bp, Artificial Sequence
  Synthetic oligonucleotide
gcagacttgagataaaaactccacggcaca

SEQ ID NO: 197120 - DNA, 30 bp, Artificial Sequence
  Synthetic oligonucleotide
cttactccaacatgatagaatcacggcaca

SEQ ID NO: 197121 - DNA, 30 bp, Artificial Sequence
  Synthetic oligonucleotide
gggtccggaagctgagccgagcagggcaca

SEQ ID NO: 197122 - DNA, 30 bp, Artificial Sequence
  Synthetic oligonucleotide
aagcaatagctggtgtattttgagggcaca

SEQ ID NO: 197123 - DNA, 30 bp, Artificial Sequence
  Synthetic oligonucleotide
gggtggtcttcgtgttttagcacgggcaca

SEQ ID NO: 197124 - DNA, 29 bp, Artificial Sequence
  Synthetic oligonucleotide
tacaatcagggctcgcatttaggggcaca

SEQ ID NO: 197125 - DNA, 30 bp, Artificial Sequence
  Synthetic oligonucleotide
ctatgggcaacttctgtgaagaatggcaca

SEQ ID NO: 197126 - DNA, 30 bp, Artificial Sequence
  Synthetic oligonucleotide
tgcccgggggggtgctaggacgtatgcaca

SEQ ID NO: 197127 - DNA, 30 bp, Artificial Sequence
  Synthetic oligonucleotide
gctgaagtcatataagaaaaccactgcaca

SEQ ID NO: 197128 - DNA, 30 bp, Artificial Sequence
  Synthetic oligonucleotide
tccaagggaagggcgggtgctgcttgcaca

SEQ ID NO: 197129 - DNA, 30 bp, Artificial Sequence
  Synthetic oligonucleotide
tcagactgaatcggccctaggagttgcaca

SEQ ID NO: 197130 - DNA, 30 bp, Artificial Sequence
  Synthetic oligonucleotide
acggttcaacatctcgagagggctatcaca

SEQ ID NO: 197131 - DNA, 30 bp, Artificial Sequence
  Synthetic oligonucleotide
attggggatgagaagaggcgttgtatcaca

SEQ ID NO: 197132 - DNA, 30 bp, Artificial Sequence
  Synthetic oligonucleotide
ataaaggcgaattagggcgacggcctcaca

SEQ ID NO: 197133 - DNA, 30 bp, Artificial Sequence
  Synthetic oligonucleotide
agaatgtgattgacgcaaggccggctcaca

SEQ ID NO: 197134 - DNA, 30 bp, Artificial Sequence
  Synthetic oligonucleotide
aaagaaatgcggaccacccacatgctcaca

SEQ ID NO: 197135 - DNA, 30 bp, Artificial Sequence
  Synthetic oligonucleotide
ggctccttttcctgagagagaaacgtcaca

SEQ ID NO: 197136 - DNA, 30 bp, Artificial Sequence
  Synthetic oligonucleotide
ccgttaatagttgggcaaagggccgtcaca

SEQ ID NO: 197137 - DNA, 30 bp, Artificial Sequence
  Synthetic oligonucleotide
gggggctaatttcgccccgggggtgtcaca

SEQ ID NO: 197138 - DNA, 30 bp, Artificial Sequence
  Synthetic oligonucleotide
aaataatgggcgaacgatcgaaaattcaca

SEQ ID NO: 197139 - DNA, 30 bp, Artificial Sequence
  Synthetic oligonucleotide
gcacaacgacttcagcggaccaagttcaca

SEQ ID NO: 197140 - DNA, 30 bp, Artificial Sequence
  Synthetic oligonucleotide
acctattaaggatgaccacttagtttcaca

SEQ ID NO: 197141 - DNA, 30 bp, Artificial Sequence
  Synthetic oligonucleotide
aagatcctgaactcccagtgcataaagaca

SEQ ID NO: 197142 - DNA, 30 bp, Artificial Sequence
  Synthetic oligonucleotide
tacctgggcccaccacgcgataagaagaca

SEQ ID NO: 197143 - DNA, 30 bp, Artificial Sequence
  Synthetic oligonucleotide
caggataactataacgcgttggctaagaca

SEQ ID NO: 197144 - DNA, 30 bp, Artificial Sequence
  Synthetic oligonucleotide
tcagcagtaggtgctcttggtagtaagaca

SEQ ID NO: 197145 - DNA, 30 bp, Artificial Sequence
  Synthetic oligonucleotide
ccggaaggcgttcggaaccccaagcagaca

SEQ ID NO: 197146 - DNA, 30 bp, Artificial Sequence
  Synthetic oligonucleotide
attacgcgatgtgacacaggttagcagaca

SEQ ID NO: 197147 - DNA, 30 bp, Artificial Sequence
  Synthetic oligonucleotide
gccacccgattagttaagagagcgcagaca

SEQ ID NO: 197148 - DNA, 30 bp, Artificial Sequence
  Synthetic oligonucleotide
tgggtatcgagtgcttcacaagttcagaca

SEQ ID NO: 197149 - DNA, 30 bp, Artificial Sequence
  Synthetic oligonucleotide
tctataaaggagaattgtcataaagagaca

SEQ ID NO: 197150 - DNA, 30 bp, Artificial Sequence
  Synthetic oligonucleotide
cagcttacatgacggtaggtacgagagaca

SEQ ID NO: 197151 - DNA, 30 bp, Artificial Sequence
  Synthetic oligonucleotide
aatcggttcgggttagcgtcatacgagaca

SEQ ID NO: 197152 - DNA, 30 bp, Artificial Sequence
  Synthetic oligonucleotide
taagctgggatgaagtcctccccggagaca

SEQ ID NO: 197153 - DNA, 30 bp, Artificial Sequence
  Synthetic oligonucleotide
gtgtggtgtcctaccttttagctggagaca

SEQ ID NO: 197154 - DNA, 30 bp, Artificial Sequence
  Synthetic oligonucleotide
tagtactaagccgaccgggaacatgagaca

SEQ ID NO: 197155 - DNA, 30 bp, Artificial Sequence
  Synthetic oligonucleotide
cgtgagtaggttttagtgtcttatgagaca

SEQ ID NO: 197156 - DNA, 30 bp, Artificial Sequence
  Synthetic oligonucleotide
tagattctgttgcatccataaacatagaca

SEQ ID NO: 197157 - DNA, 30 bp, Artificial Sequence
  Synthetic oligonucleotide
gctcacgactatcggcataacgactagaca

SEQ ID NO: 197158 - DNA, 30 bp, Artificial Sequence
  Synthetic oligonucleotide
atatcgctagacgggtaggtgtactagaca

SEQ ID NO: 197159 - DNA, 30 bp, Artificial Sequence
  Synthetic oligonucleotide
ctaaccttggcagataatacctagtagaca

SEQ ID NO: 197160 - DNA, 30 bp, Artificial Sequence
  Synthetic oligonucleotide
gtaccacgggcactcggtgccgcttagaca

SEQ ID NO: 197161 - DNA, 30 bp, Artificial Sequence
  Synthetic oligonucleotide
aaaggtttgaaacagcatccataaacgaca

SEQ ID NO: 197162 - DNA, 30 bp, Artificial Sequence
  Synthetic oligonucleotide
ggacaaaaccgcgatgtggataggacgaca

SEQ ID NO: 197163 - DNA, 30 bp, Artificial Sequence
  Synthetic oligonucleotide
gagctgcccattcgaccagatgatacgaca

SEQ ID NO: 197164 - DNA, 30 bp, Artificial Sequence
  Synthetic oligonucleotide
gtactgcaagtttcaatgcagcgtacgaca

SEQ ID NO: 197165 - DNA, 30 bp, Artificial Sequence
  Synthetic oligonucleotide
agtatagactgcgacctataccgaccgaca

SEQ ID NO: 197166 - DNA, 30 bp, Artificial Sequence
  Synthetic oligonucleotide
ttggatgggtctccacgacacataccgaca

SEQ ID NO: 197167 - DNA, 30 bp, Artificial Sequence
  Synthetic oligonucleotide
tggggctaaacttattagggagggccgaca

SEQ ID NO: 197168 - DNA, 30 bp, Artificial Sequence
  Synthetic oligonucleotide
tccaatagagtgggaccacataacgcgaca

SEQ ID NO: 197169 - DNA, 30 bp, Artificial Sequence
  Synthetic oligonucleotide
ctagacgacctgggttttagtgccgcgaca

SEQ ID NO: 197170 - DNA, 30 bp, Artificial Sequence
  Synthetic oligonucleotide
caggatggacttggtgcagacggggcgaca

SEQ ID NO: 197171 - DNA, 29 bp, Artificial Sequence
  Synthetic oligonucleotide
cattctgatgcaaaggtcgggtggcgaca

SEQ ID NO: 197172 - DNA, 30 bp, Artificial Sequence
  Synthetic oligonucleotide
caagttaaaccaggagttcaaattgcgaca

SEQ ID NO: 197173 - DNA, 30 bp, Artificial Sequence
  Synthetic oligonucleotide
atcgcgatttgtctattgggcgcatcgaca

SEQ ID NO: 197174 - DNA, 30 bp, Artificial Sequence
  Synthetic oligonucleotide
aaacgaccatgttaaacgtggctatcgaca

SEQ ID NO: 197175 - DNA, 30 bp, Artificial Sequence
  Synthetic oligonucleotide
gggtttaaaactaccgcgtcactctcgaca

SEQ ID NO: 197176 - DNA, 30 bp, Artificial Sequence
  Synthetic oligonucleotide
ccaagtagcagccgcgtaacttggtcgaca

SEQ ID NO: 197177 - DNA, 30 bp, Artificial Sequence
  Synthetic oligonucleotide
ggactaatatcaacattcaaggcaaggaca

SEQ ID NO: 197178 - DNA, 29 bp, Artificial Sequence
  Synthetic oligonucleotide
taagaaatgcgggtagagcattgaggaca

SEQ ID NO: 197179 - DNA, 30 bp, Artificial Sequence
  Synthetic oligonucleotide
atgcgcaacaaattccaacatgtacggaca

SEQ ID NO: 197180 - DNA, 30 bp, Artificial Sequence
  Synthetic oligonucleotide
aagtttagtgtggttaacatacaccggaca

SEQ ID NO: 197181 - DNA, 30 bp, Artificial Sequence
  Synthetic oligonucleotide
cctaccttaggttacggtgacattcggaca

SEQ ID NO: 197182 - DNA, 30 bp, Artificial Sequence
  Synthetic oligonucleotide
agagaaagcatatagtcacagacggggaca

SEQ ID NO: 197183 - DNA, 30 bp, Artificial Sequence
  Synthetic oligonucleotide
gttctgggttaaactcacgtttcggggaca

SEQ ID NO: 197184 - DNA, 30 bp, Artificial Sequence
  Synthetic oligonucleotide
gggaaccgtgtgacaaatcagggggggaca

SEQ ID NO: 197185 - DNA, 30 bp, Artificial Sequence
  Synthetic oligonucleotide
tcaagagtgttccggacgccattggggaca

SEQ ID NO: 197186 - DNA, 30 bp, Artificial Sequence
  Synthetic oligonucleotide
tgcgcctcaggcgtatgagttttggggaca

SEQ ID NO: 197187 - DNA, 30 bp, Artificial Sequence
  Synthetic oligonucleotide
cctttccctattcgtggaattcatgggaca

SEQ ID NO: 197188 - DNA, 30 bp, Artificial Sequence
  Synthetic oligonucleotide
aaggtaggagttctttgggacgttgggaca

SEQ ID NO: 197189 - DNA, 30 bp, Artificial Sequence
  Synthetic oligonucleotide
tatatagccggtgacgaatgggcatggaca

SEQ ID NO: 197190 - DNA, 30 bp, Artificial Sequence
  Synthetic oligonucleotide
caagctcaggcttaatgtggaggatggaca

SEQ ID NO: 197191 - DNA, 30 bp, Artificial Sequence
  Synthetic oligonucleotide
catcccgggccgtcaagtgaaaagtggaca

SEQ ID NO: 197192 - DNA, 30 bp, Artificial Sequence
  Synthetic oligonucleotide
cgagatatgaatgtgagtgctcagtggaca

SEQ ID NO: 197193 - DNA, 30 bp, Artificial Sequence
  Synthetic oligonucleotide
tacgggtgctgagagctccttccaatgaca

SEQ ID NO: 197194 - DNA, 30 bp, Artificial Sequence
  Synthetic oligonucleotide
ttcagggggaattcgagtatccgaatgaca

SEQ ID NO: 197195 - DNA, 30 bp, Artificial Sequence
  Synthetic oligonucleotide
aaaagatttcaaaccgcaatcgacatgaca

SEQ ID NO: 197196 - DNA, 30 bp, Artificial Sequence
  Synthetic oligonucleotide
gggataaacgtttatctttggggcatgaca

SEQ ID NO: 197197 - DNA, 29 bp, Artificial Sequence
  Synthetic oligonucleotide
gggcccttccgtgttcgggaaagatgaca

SEQ ID NO: 197198 - DNA, 30 bp, Artificial Sequence
  Synthetic oligonucleotide
gtagtaacatatccaaagaaactgatgaca

SEQ ID NO: 197199 - DNA, 30 bp, Artificial Sequence
  Synthetic oligonucleotide
caataacgcggaataacaaggacgctgaca

SEQ ID NO: 197200 - DNA, 30 bp, Artificial Sequence
  Synthetic oligonucleotide
tgggatttggcagtcccaccaaatctgaca

SEQ ID NO: 197201 - DNA, 30 bp, Artificial Sequence
  Synthetic oligonucleotide
ccggtctactaaggacttgttgaagtgaca

SEQ ID NO: 197202 - DNA, 30 bp, Artificial Sequence
  Synthetic oligonucleotide
gtagacatgcgacattgagttgtcgtgaca

SEQ ID NO: 197203 - DNA, 30 bp, Artificial Sequence
  Synthetic oligonucleotide
gagaatttaataggacagtggggcttgaca

SEQ ID NO: 197204 - DNA, 30 bp, Artificial Sequence
  Synthetic oligonucleotide
aactaagaacagcctctaccactcttgaca

SEQ ID NO: 197205 - DNA, 30 bp, Artificial Sequence
  Synthetic oligonucleotide
tcacactaacatgtagatattttcttgaca

SEQ ID NO: 197206 - DNA, 30 bp, Artificial Sequence
  Synthetic oligonucleotide
cagcgtccacacatttgggtgcggttgaca

SEQ ID NO: 197207 - DNA, 30 bp, Artificial Sequence
  Synthetic oligonucleotide
ggggccaaaatcgctcttagtgatttgaca

SEQ ID NO: 197208 - DNA, 30 bp, Artificial Sequence
  Synthetic oligonucleotide
agatacctaaaccattctctgtaaaataca

SEQ ID NO: 197209 - DNA, 29 bp, Artificial Sequence
  Synthetic oligonucleotide
gcttaaaacctccagactaccgcaataca

SEQ ID NO: 197210 - DNA, 30 bp, Artificial Sequence
  Synthetic oligonucleotide
tagaccttggtgctgctcacgcgcaataca

SEQ ID NO: 197211 - DNA, 30 bp, Artificial Sequence
  Synthetic oligonucleotide
tgaaagtacgacatgtaacctatcaataca

SEQ ID NO: 197212 - DNA, 30 bp, Artificial Sequence
  Synthetic oligonucleotide
atagctcgcgtagggctctctcataataca

SEQ ID NO: 197213 - DNA, 30 bp, Artificial Sequence
  Synthetic oligonucleotide
gcttaatctataggtaataaacgtaataca

SEQ ID NO: 197214 - DNA, 30 bp, Artificial Sequence
  Synthetic oligonucleotide
acagacagttgaacagcgcaaggacataca

SEQ ID NO: 197215 - DNA, 30 bp, Artificial Sequence
  Synthetic oligonucleotide
atagctgtggaagcccacgaccaccataca

SEQ ID NO: 197216 - DNA, 30 bp, Artificial Sequence
  Synthetic oligonucleotide
caagcactgactgggaccgtgcgccataca

SEQ ID NO: 197217 - DNA, 30 bp, Artificial Sequence
  Synthetic oligonucleotide
ctcgggaatataaataaaggggcgcataca

SEQ ID NO: 197218 - DNA, 30 bp, Artificial Sequence
  Synthetic oligonucleotide
acgccgtaccgtgtcagtagaaggcataca

SEQ ID NO: 197219 - DNA, 30 bp, Artificial Sequence
  Synthetic oligonucleotide
atcattaacgaggtaggcctttttcataca

SEQ ID NO: 197220 - DNA, 30 bp, Artificial Sequence
  Synthetic oligonucleotide
catggtacatcctagagtttgaaggataca

SEQ ID NO: 197221 - DNA, 30 bp, Artificial Sequence
  Synthetic oligonucleotide
aattcggcgcacgctttcgcctgggataca

SEQ ID NO: 197222 - DNA, 30 bp, Artificial Sequence
  Synthetic oligonucleotide
ccctgatccactaaaatgcccatggataca

SEQ ID NO: 197223 - DNA, 30 bp, Artificial Sequence
  Synthetic oligonucleotide
aaagtcatcccgccttgccctctggataca

SEQ ID NO: 197224 - DNA, 30 bp, Artificial Sequence
  Synthetic oligonucleotide
atgggaatcaagagactcacggagtataca

SEQ ID NO: 197225 - DNA, 30 bp, Artificial Sequence
  Synthetic oligonucleotide
ggaaatctaataatcttaactgctactaca

SEQ ID NO: 197226 - DNA, 30 bp, Artificial Sequence
  Synthetic oligonucleotide
ccatactagacgttacaaaacgcacctaca

SEQ ID NO: 197227 - DNA, 30 bp, Artificial Sequence
  Synthetic oligonucleotide
gagtaagccgtaactgcaggcggacctaca

SEQ ID NO: 197228 - DNA, 30 bp, Artificial Sequence
  Synthetic oligonucleotide
agttccgccgtgcacactaggctcgctaca

SEQ ID NO: 197229 - DNA, 30 bp, Artificial Sequence
  Synthetic oligonucleotide
ccgctgggacataatgacccaagggctaca

SEQ ID NO: 197230 - DNA, 30 bp, Artificial Sequence
  Synthetic oligonucleotide
gtcaaggatcaggacggataacctgctaca

SEQ ID NO: 197231 - DNA, 30 bp, Artificial Sequence
  Synthetic oligonucleotide
tgttagaattgacacgcgagagttgctaca

SEQ ID NO: 197232 - DNA, 30 bp, Artificial Sequence
  Synthetic oligonucleotide
gtggtgtgaccagaaagtggggttgctaca

SEQ ID NO: 197233 - DNA, 30 bp, Artificial Sequence
  Synthetic oligonucleotide
agatgcgctcataattgatcccaatctaca

SEQ ID NO: 197234 - DNA, 30 bp, Artificial Sequence
  Synthetic oligonucleotide
cgtccgtcgaagcagacaatgaggtctaca

SEQ ID NO: 197235 - DNA, 30 bp, Artificial Sequence
  Synthetic oligonucleotide
tagtgtaatctaagcgcgcttgaaagtaca

SEQ ID NO: 197236 - DNA, 30 bp, Artificial Sequence
  Synthetic oligonucleotide
ttccgcaatgtattcgtgctaataagtaca

SEQ ID NO: 197237 - DNA, 30 bp, Artificial Sequence
  Synthetic oligonucleotide
cataccgctacaaatgataatctcagtaca

SEQ ID NO: 197238 - DNA, 30 bp, Artificial Sequence
  Synthetic oligonucleotide
tggagcataggagtcataacgctgagtaca

SEQ ID NO: 197239 - DNA, 31 bp, Artificial Sequence
  Synthetic oligonucleotide
tcattgtcgacaagaacgtgctgtgagtaca

SEQ ID NO: 197240 - DNA, 30 bp, Artificial Sequence
  Synthetic oligonucleotide
tcagcatgtggacaacaggcgcatagtaca

SEQ ID NO: 197241 - DNA, 30 bp, Artificial Sequence
  Synthetic oligonucleotide
tgtggccgatcaagttattgtcgtagtaca

SEQ ID NO: 197242 - DNA, 30 bp, Artificial Sequence
  Synthetic oligonucleotide
acaagatcattgtccgcgccacttagtaca

SEQ ID NO: 197243 - DNA, 30 bp, Artificial Sequence
  Synthetic oligonucleotide
gtctgagcagtgcaaggctgagaacgtaca

SEQ ID NO: 197244 - DNA, 30 bp, Artificial Sequence
  Synthetic oligonucleotide
agacagttacgtgtttggatttgacgtaca

SEQ ID NO: 197245 - DNA, 30 bp, Artificial Sequence
  Synthetic oligonucleotide
actctgtctcagggtcgctgcggaggtaca

SEQ ID NO: 197246 - DNA, 30 bp, Artificial Sequence
  Synthetic oligonucleotide
tctgcatgatgttaaacaaggataggtaca

SEQ ID NO: 197247 - DNA, 30 bp, Artificial Sequence
  Synthetic oligonucleotide
atgacgggctggtaagcactaaggggtaca

SEQ ID NO: 197248 - DNA, 30 bp, Artificial Sequence
  Synthetic oligonucleotide
tttggtatcttcgtcgaggcgatgggtaca

SEQ ID NO: 197249 - DNA, 30 bp, Artificial Sequence
  Synthetic oligonucleotide
acctggatagggaggagtatattgggtaca

SEQ ID NO: 197250 - DNA, 30 bp, Artificial Sequence
  Synthetic oligonucleotide
tactcagagcgataatctctgtatggtaca

SEQ ID NO: 197251 - DNA, 30 bp, Artificial Sequence
  Synthetic oligonucleotide
ggattgaactcgtagtaatatgctggtaca

SEQ ID NO: 197252 - DNA, 30 bp, Artificial Sequence
  Synthetic oligonucleotide
gtggtgcaaaatacctaaattgcatgtaca

SEQ ID NO: 197253 - DNA, 30 bp, Artificial Sequence
  Synthetic oligonucleotide
gcgcgacctgatctcttcacagcctgtaca

SEQ ID NO: 197254 - DNA, 30 bp, Artificial Sequence
  Synthetic oligonucleotide
aaactcgaagtaagagcagactccattaca

SEQ ID NO: 197255 - DNA, 31 bp, Artificial Sequence
  Synthetic oligonucleotide
gagaaatcctgctcttcagatagcacttaca

SEQ ID NO: 197256 - DNA, 30 bp, Artificial Sequence
  Synthetic oligonucleotide
gtgctcaaagtttcgctgtttctccttaca

SEQ ID NO: 197257 - DNA, 30 bp, Artificial Sequence
  Synthetic oligonucleotide
tcacgtcctgcggggagccaatagcttaca

SEQ ID NO: 197258 - DNA, 30 bp, Artificial Sequence
  Synthetic oligonucleotide
gcacgattcgatgacgagaggcggcttaca

SEQ ID NO: 197259 - DNA, 30 bp, Artificial Sequence
  Synthetic oligonucleotide
gatgggttatcagttcaagtgcatcttaca

SEQ ID NO: 197260 - DNA, 30 bp, Artificial Sequence
  Synthetic oligonucleotide
gtagagcatcaaaaaccccactatcttaca

SEQ ID NO: 197261 - DNA, 30 bp, Artificial Sequence
  Synthetic oligonucleotide
accggcttgtgagatgtattgatagttaca

SEQ ID NO: 197262 - DNA, 30 bp, Artificial Sequence
  Synthetic oligonucleotide
ccgcattgcatatggaaaaatgacgttaca

SEQ ID NO: 197263 - DNA, 30 bp, Artificial Sequence
  Synthetic oligonucleotide
ccatttctactcgagagacgggtggttaca

SEQ ID NO: 197264 - DNA, 30 bp, Artificial Sequence
  Synthetic oligonucleotide
agtgtacctcgtacgtgaggtaatgttaca

SEQ ID NO: 197265 - DNA, 30 bp, Artificial Sequence
  Synthetic oligonucleotide
attccaggtccccccaggactcctgttaca

SEQ ID NO: 197266 - DNA, 30 bp, Artificial Sequence
  Synthetic oligonucleotide
ggtggcgaatattttcttcattgctttaca

SEQ ID NO: 197267 - DNA, 30 bp, Artificial Sequence
  Synthetic oligonucleotide
catagaaatgctcgtttttagtcaaaacca

SEQ ID NO: 197268 - DNA, 30 bp, Artificial Sequence
  Synthetic oligonucleotide
taaacagtgttcgggagtgacctaaaacca

SEQ ID NO: 197269 - DNA, 30 bp, Artificial Sequence
  Synthetic oligonucleotide
gcaagtctgggatttcattttggcaaacca

SEQ ID NO: 197270 - DNA, 30 bp, Artificial Sequence
  Synthetic oligonucleotide
tggacccagtaagtccagcatatcaaacca

SEQ ID NO: 197271 - DNA, 30 bp, Artificial Sequence
  Synthetic oligonucleotide
aggctgcaacagctgccgtatatcaaacca

SEQ ID NO: 197272 - DNA, 30 bp, Artificial Sequence
  Synthetic oligonucleotide
gtcactggttgttaaggtgaggtcaaacca

SEQ ID NO: 197273 - DNA, 30 bp, Artificial Sequence
  Synthetic oligonucleotide
tgatcggcggtgagaggcacgcggaaacca

SEQ ID NO: 197274 - DNA, 30 bp, Artificial Sequence
  Synthetic oligonucleotide
cgcgtactttgagcaaagtatgggaaacca

SEQ ID NO: 197275 - DNA, 30 bp, Artificial Sequence
  Synthetic oligonucleotide
cagagcagtagtattaaggtaactaaacca

SEQ ID NO: 197276 - DNA, 30 bp, Artificial Sequence
  Synthetic oligonucleotide
tcatcgtactcggccgtgcatcctaaacca

SEQ ID NO: 197277 - DNA, 30 bp, Artificial Sequence
  Synthetic oligonucleotide
attcgggatacccaggagaaacgtaaacca

SEQ ID NO: 197278 - DNA, 30 bp, Artificial Sequence
  Synthetic oligonucleotide
aggctgatccaacattgaatgggacaacca

SEQ ID NO: 197279 - DNA, 30 bp, Artificial Sequence
  Synthetic oligonucleotide
tcttattacagaagtgggcacaaccaacca

SEQ ID NO: 197280 - DNA, 30 bp, Artificial Sequence
  Synthetic oligonucleotide
ggtctaagatgctggcccctgtaagaacca

SEQ ID NO: 197281 - DNA, 30 bp, Artificial Sequence
  Synthetic oligonucleotide
ttacaattagtaaacgatatataggaacca

SEQ ID NO: 197282 - DNA, 30 bp, Artificial Sequence
  Synthetic oligonucleotide
aggggtaggggttgcgcaggatatgaacca

SEQ ID NO: 197283 - DNA, 30 bp, Artificial Sequence
  Synthetic oligonucleotide
agtactccgggaggggctacgcaataacca

SEQ ID NO: 197284 - DNA, 30 bp, Artificial Sequence
  Synthetic oligonucleotide
gtaacagtagcagcttagtagtcataacca

SEQ ID NO: 197285 - DNA, 30 bp, Artificial Sequence
  Synthetic oligonucleotide
cctttcacgggtactgcgctagtataacca

SEQ ID NO: 197286 - DNA, 30 bp, Artificial Sequence
  Synthetic oligonucleotide
gacaatacagatagaactggtgagacacca

SEQ ID NO: 197287 - DNA, 30 bp, Artificial Sequence
  Synthetic oligonucleotide
gccatgcgggaaactcagaccgcgacacca

SEQ ID NO: 197288 - DNA, 30 bp, Artificial Sequence
  Synthetic oligonucleotide
gctacgttcatcgacacactcacgccacca

SEQ ID NO: 197289 - DNA, 30 bp, Artificial Sequence
  Synthetic oligonucleotide
tgacgaacaaaccctacgtactcgccacca

SEQ ID NO: 197290 - DNA, 30 bp, Artificial Sequence
  Synthetic oligonucleotide
gctataatagttgagccgagaaggccacca

SEQ ID NO: 197291 - DNA, 30 bp, Artificial Sequence
  Synthetic oligonucleotide
ctcaccggatgcggggttatgctgccacca

SEQ ID NO: 197292 - DNA, 30 bp, Artificial Sequence
  Synthetic oligonucleotide
ctactaatctaatatctccgcagagcacca

SEQ ID NO: 197293 - DNA, 30 bp, Artificial Sequence
  Synthetic oligonucleotide
gcacagtttaggagggcttgcgccgcacca

SEQ ID NO: 197294 - DNA, 30 bp, Artificial Sequence
  Synthetic oligonucleotide
acagcgtatgccgtatagcgcggcgcacca

SEQ ID NO: 197295 - DNA, 30 bp, Artificial Sequence
  Synthetic oligonucleotide
gaatagggcatatatctcggggaatcacca

SEQ ID NO: 197296 - DNA, 30 bp, Artificial Sequence
  Synthetic oligonucleotide
ggagtggggcctcatcattgtagatcacca

SEQ ID NO: 197297 - DNA, 30 bp, Artificial Sequence
  Synthetic oligonucleotide
ggccatacttatacagtcggaccctcacca

SEQ ID NO: 197298 - DNA, 30 bp, Artificial Sequence
  Synthetic oligonucleotide
ctgtgacaacttccaggcgtaccctcacca

SEQ ID NO: 197299 - DNA, 30 bp, Artificial Sequence
  Synthetic oligonucleotide
attgctttagcgtagtctgttagttcacca

SEQ ID NO: 197300 - DNA, 30 bp, Artificial Sequence
  Synthetic oligonucleotide
tcgtcgacacacggcagtttttaaagacca

SEQ ID NO: 197301 - DNA, 30 bp, Artificial Sequence
  Synthetic oligonucleotide
agagcgacgcacgacgttcagcgaagacca

SEQ ID NO: 197302 - DNA, 30 bp, Artificial Sequence
  Synthetic oligonucleotide
tgtagtattcgacgtcttaggccgagacca

SEQ ID NO: 197303 - DNA, 30 bp, Artificial Sequence
  Synthetic oligonucleotide
ttcacaatgacgttcagagccgggagacca

SEQ ID NO: 197304 - DNA, 30 bp, Artificial Sequence
  Synthetic oligonucleotide
taagcacaggtcgagtatttagtgagacca

SEQ ID NO: 197305 - DNA, 30 bp, Artificial Sequence
  Synthetic oligonucleotide
tggtgacatagaaggcgtattgtgagacca

SEQ ID NO: 197306 - DNA, 30 bp, Artificial Sequence
  Synthetic oligonucleotide
cttatacaatgtgtccgtacccatagacca

SEQ ID NO: 197307 - DNA, 30 bp, Artificial Sequence
  Synthetic oligonucleotide
tagatatcggggtgttgttatgctagacca

SEQ ID NO: 197308 - DNA, 30 bp, Artificial Sequence
  Synthetic oligonucleotide
caactgagcattattgccgatggccgacca

SEQ ID NO: 197309 - DNA, 30 bp, Artificial Sequence
  Synthetic oligonucleotide
agagtttaactcagcttaaacctccgacca

SEQ ID NO: 197310 - DNA, 30 bp, Artificial Sequence
  Synthetic oligonucleotide
ccatgaagccgtcaattccactttcgacca

SEQ ID NO: 197311 - DNA, 30 bp, Artificial Sequence
  Synthetic oligonucleotide
tggatcgaacgaaagctcacgtgaggacca

SEQ ID NO: 197312 - DNA, 30 bp, Artificial Sequence
  Synthetic oligonucleotide
catatgtattcgcattacgccaacggacca

SEQ ID NO: 197313 - DNA, 30 bp, Artificial Sequence
  Synthetic oligonucleotide
catcggtcttgggaaggtttcaccggacca

SEQ ID NO: 197314 - DNA, 30 bp, Artificial Sequence
  Synthetic oligonucleotide
cggcaacctatcggctacggggatggacca

SEQ ID NO: 197315 - DNA, 30 bp, Artificial Sequence
  Synthetic oligonucleotide
gcttctgggtcggagagggatagtggacca

SEQ ID NO: 197316 - DNA, 30 bp, Artificial Sequence
  Synthetic oligonucleotide
actgagtggatccttcattcacactgacca

SEQ ID NO: 197317 - DNA, 30 bp, Artificial Sequence
  Synthetic oligonucleotide
cataaagttaggtcacggagagtgtgacca

SEQ ID NO: 197318 - DNA, 30 bp, Artificial Sequence
  Synthetic oligonucleotide
gttgtacgggtcgcgggttcgataatacca

SEQ ID NO: 197319 - DNA, 30 bp, Artificial Sequence
  Synthetic oligonucleotide
tgagcacagcccgtgtgatttctaatacca

SEQ ID NO: 197320 - DNA, 30 bp, Artificial Sequence
  Synthetic oligonucleotide
agcgctgtagctcccctgtcattaatacca

SEQ ID NO: 197321 - DNA, 30 bp, Artificial Sequence
  Synthetic oligonucleotide
ctgagattcactattatagtctgcctacca

SEQ ID NO: 197322 - DNA, 30 bp, Artificial Sequence
  Synthetic oligonucleotide
tgcaacgatttgaaaatgtgactcctacca

SEQ ID NO: 197323 - DNA, 30 bp, Artificial Sequence
  Synthetic oligonucleotide
gaataaggccattagtctaaatatctacca

SEQ ID NO: 197324 - DNA, 30 bp, Artificial Sequence
  Synthetic oligonucleotide
gcttcggtacagtgttcgaatactctacca

SEQ ID NO: 197325 - DNA, 30 bp, Artificial Sequence
  Synthetic oligonucleotide
tcgaaattccctatacaatagcacgtacca

SEQ ID NO: 197326 - DNA, 30 bp, Artificial Sequence
  Synthetic oligonucleotide
gtcggagaagaaagcgaaagctacgtacca

SEQ ID NO: 197327 - DNA, 30 bp, Artificial Sequence
  Synthetic oligonucleotide
ttgttcaacaggtagttggacctggtacca

SEQ ID NO: 197328 - DNA, 30 bp, Artificial Sequence
  Synthetic oligonucleotide
ttaagacctgaaacctgttgcaaattacca

SEQ ID NO: 197329 - DNA, 30 bp, Artificial Sequence
  Synthetic oligonucleotide
agggggttcaaaattcgcaaaagcttacca

SEQ ID NO: 197330 - DNA, 30 bp, Artificial Sequence
  Synthetic oligonucleotide
tacgacgagcagttcgctcagcggttacca

SEQ ID NO: 197331 - DNA, 30 bp, Artificial Sequence
  Synthetic oligonucleotide
aacgggctccgaggtgttgcctttttacca

SEQ ID NO: 197332 - DNA, 30 bp, Artificial Sequence
  Synthetic oligonucleotide
gaacgcgcctctccggtacgtgccaaccca

SEQ ID NO: 197333 - DNA, 30 bp, Artificial Sequence
  Synthetic oligonucleotide
gtcgaatagcctaacgacgggatcaaccca

SEQ ID NO: 197334 - DNA, 30 bp, Artificial Sequence
  Synthetic oligonucleotide
tggagctgcacgctacacacggagaaccca

SEQ ID NO: 197335 - DNA, 30 bp, Artificial Sequence
  Synthetic oligonucleotide
tcattgtccatcgattctgcttaagaccca

SEQ ID NO: 197336 - DNA, 30 bp, Artificial Sequence
  Synthetic oligonucleotide
gcggacagcgggccaaaggcaaaggaccca

SEQ ID NO: 197337 - DNA, 30 bp, Artificial Sequence
  Synthetic oligonucleotide
tggagtaaaatagtgggcgtagctgaccca

SEQ ID NO: 197338 - DNA, 30 bp, Artificial Sequence
  Synthetic oligonucleotide
cgattgtccaggaaaagtgtgtaataccca

SEQ ID NO: 197339 - DNA, 30 bp, Artificial Sequence
  Synthetic oligonucleotide
catcggtttaaggctttagtctagtaccca

SEQ ID NO: 197340 - DNA, 30 bp, Artificial Sequence
  Synthetic oligonucleotide
gtgtaagaaatgcttggttatcaaacccca

SEQ ID NO: 197341 - DNA, 30 bp, Artificial Sequence
  Synthetic oligonucleotide
ggagttgatagagcaccacttgaaacccca

SEQ ID NO: 197342 - DNA, 31 bp, Artificial Sequence
  Synthetic oligonucleotide
tcattctccagaatgacaagccgcaacccca

SEQ ID NO: 197343 - DNA, 30 bp, Artificial Sequence
  Synthetic oligonucleotide
gcgggagcccggtggaagcttgcaacccca

SEQ ID NO: 197344 - DNA, 30 bp, Artificial Sequence
  Synthetic oligonucleotide
tcaaacacaaaagttcacggaagaacccca

SEQ ID NO: 197345 - DNA, 30 bp, Artificial Sequence
  Synthetic oligonucleotide
tcgtcgcgtgtccctctcaaccgaacccca

SEQ ID NO: 197346 - DNA, 30 bp, Artificial Sequence
  Synthetic oligonucleotide
ctgaatggcacttatacataaggcacccca

SEQ ID NO: 197347 - DNA, 30 bp, Artificial Sequence
  Synthetic oligonucleotide
tgacgatgggaagctacgattcctacccca

SEQ ID NO: 197348 - DNA, 30 bp, Artificial Sequence
  Synthetic oligonucleotide
tactggcaagaccaaacggagacgccccca

SEQ ID NO: 197349 - DNA, 30 bp, Artificial Sequence
  Synthetic oligonucleotide
gatcatttcagttaagactagtcgccccca

SEQ ID NO: 197350 - DNA, 30 bp, Artificial Sequence
  Synthetic oligonucleotide
ccagttcgtgtgtggtcgcaatctccccca

SEQ ID NO: 197351 - DNA, 30 bp, Artificial Sequence
  Synthetic oligonucleotide
actcagagctggattcttggggacgcccca

SEQ ID NO: 197352 - DNA, 30 bp, Artificial Sequence
  Synthetic oligonucleotide
tcacaggaacagtctaagcgaggggcccca

SEQ ID NO: 197353 - DNA, 30 bp, Artificial Sequence
  Synthetic oligonucleotide
actgagagtgaagaagagcaaattgcccca

SEQ ID NO: 197354 - DNA, 30 bp, Artificial Sequence
  Synthetic oligonucleotide
cgagggaaagctactttcggagactcccca

SEQ ID NO: 197355 - DNA, 30 bp, Artificial Sequence
  Synthetic oligonucleotide
ggggttaaaggttacgagcagcattcccca

SEQ ID NO: 197356 - DNA, 30 bp, Artificial Sequence
  Synthetic oligonucleotide
ttcggagttgcatacggacaaaacagccca

SEQ ID NO: 197357 - DNA, 30 bp, Artificial Sequence
  Synthetic oligonucleotide
tcataagtgtcggagattcaggccagccca

SEQ ID NO: 197358 - DNA, 30 bp, Artificial Sequence
  Synthetic oligonucleotide
ataatcgtaattgagaaaaacggcagccca

SEQ ID NO: 197359 - DNA, 30 bp, Artificial Sequence
  Synthetic oligonucleotide
agaggcctgacggtacttcggaagagccca

SEQ ID NO: 197360 - DNA, 30 bp, Artificial Sequence
  Synthetic oligonucleotide
gccgaaagggttggttctatccagagccca

SEQ ID NO: 197361 - DNA, 30 bp, Artificial Sequence
  Synthetic oligonucleotide
tcagcaaatatatggtaagcatcacgccca

SEQ ID NO: 197362 - DNA, 30 bp, Artificial Sequence
  Synthetic oligonucleotide
gagcagccagcttggaagtacagacgccca

SEQ ID NO: 197363 - DNA, 30 bp, Artificial Sequence
  Synthetic oligonucleotide
cgatcgtaactcgtcgtgaagggacgccca

SEQ ID NO: 197364 - DNA, 30 bp, Artificial Sequence
  Synthetic oligonucleotide
ggccggattaagtatcaataggtacgccca

SEQ ID NO: 197365 - DNA, 30 bp, Artificial Sequence
  Synthetic oligonucleotide
ttgcgaatctgaagatgacgttggcgccca

SEQ ID NO: 197366 - DNA, 30 bp, Artificial Sequence
  Synthetic oligonucleotide
catgcagaacgccgatcgaggtatcgccca

SEQ ID NO: 197367 - DNA, 30 bp, Artificial Sequence
  Synthetic oligonucleotide
catcaatgacgacttggttaaattcgccca

SEQ ID NO: 197368 - DNA, 30 bp, Artificial Sequence
  Synthetic oligonucleotide
aagagccgcaaagttagttttcttcgccca

SEQ ID NO: 197369 - DNA, 30 bp, Artificial Sequence
  Synthetic oligonucleotide
aggatgaagccctggaatgtctttcgccca

SEQ ID NO: 197370 - DNA, 30 bp, Artificial Sequence
  Synthetic oligonucleotide
caagtttaaaatgggcgtgctgtaggccca

SEQ ID NO: 197371 - DNA, 30 bp, Artificial Sequence
  Synthetic oligonucleotide
atgacccaacagcgatgagcacggggccca

SEQ ID NO: 197372 - DNA, 30 bp, Artificial Sequence
  Synthetic oligonucleotide
cggtactaaaccacctggtcatttggccca

SEQ ID NO: 197373 - DNA, 30 bp, Artificial Sequence
  Synthetic oligonucleotide
aggcctcccatgcgtacggtacaatgccca

SEQ ID NO: 197374 - DNA, 30 bp, Artificial Sequence
  Synthetic oligonucleotide
caaccaagcgcgaaactggcgcgctgccca

SEQ ID NO: 197375 - DNA, 30 bp, Artificial Sequence
  Synthetic oligonucleotide
tattcatctgtaaaatagagtctgtgccca

SEQ ID NO: 197376 - DNA, 30 bp, Artificial Sequence
  Synthetic oligonucleotide
atgataagtgatcgatgtaaaaaaatccca

SEQ ID NO: 197377 - DNA, 30 bp, Artificial Sequence
  Synthetic oligonucleotide
aaaagcatctgattacacgggaaaatccca

SEQ ID NO: 197378 - DNA, 30 bp, Artificial Sequence
  Synthetic oligonucleotide
ggtcatcaccgagacgggaacataatccca

SEQ ID NO: 197379 - DNA, 30 bp, Artificial Sequence
  Synthetic oligonucleotide
gttagctgtcgatgctcatccctcatccca

SEQ ID NO: 197380 - DNA, 30 bp, Artificial Sequence
  Synthetic oligonucleotide
tagagtgtcgggtggcccaacgaagtccca

SEQ ID NO: 197381 - DNA, 30 bp, Artificial Sequence
  Synthetic oligonucleotide
gttacacattagggtaaatatagggtccca

SEQ ID NO: 197382 - DNA, 30 bp, Artificial Sequence
  Synthetic oligonucleotide
gccgggtgaagcaactccacaatggtccca

SEQ ID NO: 197383 - DNA, 30 bp, Artificial Sequence
  Synthetic oligonucleotide
ctcgaatctgcgtaccaacagtatgtccca

SEQ ID NO: 197384 - DNA, 30 bp, Artificial Sequence
  Synthetic oligonucleotide
catgggtgcattcaggattctggcttccca

SEQ ID NO: 197385 - DNA, 30 bp, Artificial Sequence
  Synthetic oligonucleotide
tgagggaccagataaccgtagatcttccca

SEQ ID NO: 197386 - DNA, 30 bp, Artificial Sequence
  Synthetic oligonucleotide
ttcacacgcgatcgtactctatggttccca

SEQ ID NO: 197387 - DNA, 30 bp, Artificial Sequence
  Synthetic oligonucleotide
tcgcaccgacggcgaaagggcgcaaagcca

SEQ ID NO: 197388 - DNA, 30 bp, Artificial Sequence
  Synthetic oligonucleotide
ctgtattctttcacatgaaaactaaagcca

SEQ ID NO: 197389 - DNA, 30 bp, Artificial Sequence
  Synthetic oligonucleotide
catacggagccgacatattgtaacaagcca

SEQ ID NO: 197390 - DNA, 30 bp, Artificial Sequence
  Synthetic oligonucleotide
aagcaaacagcatcccgagctcacaagcca

SEQ ID NO: 197391 - DNA, 30 bp, Artificial Sequence
  Synthetic oligonucleotide
ccctcatacggctgtgcgtgaccacagcca

SEQ ID NO: 197392 - DNA, 30 bp, Artificial Sequence
  Synthetic oligonucleotide
gcagatatgaaagggagaacgtgtcagcca

SEQ ID NO: 197393 - DNA, 30 bp, Artificial Sequence
  Synthetic oligonucleotide
tttaagattgtcaggaggacgaacgagcca

SEQ ID NO: 197394 - DNA, 30 bp, Artificial Sequence
  Synthetic oligonucleotide
ctctggagagttaaaccatgtagcgagcca

SEQ ID NO: 197395 - DNA, 30 bp, Artificial Sequence
  Synthetic oligonucleotide
ggcatggataccttcggaggattcgagcca

SEQ ID NO: 197396 - DNA, 30 bp, Artificial Sequence
  Synthetic oligonucleotide
tcagaattcagttctaaaccataggagcca

SEQ ID NO: 197397 - DNA, 30 bp, Artificial Sequence
  Synthetic oligonucleotide
ttgagagcggatgaagcgctatcggagcca

SEQ ID NO: 197398 - DNA, 30 bp, Artificial Sequence
  Synthetic oligonucleotide
ggatcgtgtttatatcgggattcggagcca

SEQ ID NO: 197399 - DNA, 30 bp, Artificial Sequence
  Synthetic oligonucleotide
gaaatatgcctcgggagagtgggtgagcca

SEQ ID NO: 197400 - DNA, 30 bp, Artificial Sequence
  Synthetic oligonucleotide
aggggccctacgcgcctgcgaattgagcca

SEQ ID NO: 197401 - DNA, 30 bp, Artificial Sequence
  Synthetic oligonucleotide
ctgcgacgcgggcccgttgggttctagcca

SEQ ID NO: 197402 - DNA, 30 bp, Artificial Sequence
  Synthetic oligonucleotide
acacccattgtacatgacccgccttagcca

SEQ ID NO: 197403 - DNA, 30 bp, Artificial Sequence
  Synthetic oligonucleotide
gggttcgggaggggtaataagtgttagcca

SEQ ID NO: 197404 - DNA, 30 bp, Artificial Sequence
  Synthetic oligonucleotide
tcctgcgactgttatcgctccgtaacgcca

SEQ ID NO: 197405 - DNA, 30 bp, Artificial Sequence
  Synthetic oligonucleotide
acgctttgtctctaaaacttcctcacgcca

SEQ ID NO: 197406 - DNA, 30 bp, Artificial Sequence
  Synthetic oligonucleotide
gatgcccgaacagaatttcaaaagacgcca

SEQ ID NO: 197407 - DNA, 30 bp, Artificial Sequence
  Synthetic oligonucleotide
cactgttacacttcgtcgactgcgacgcca

SEQ ID NO: 197408 - DNA, 30 bp, Artificial Sequence
  Synthetic oligonucleotide
acaaaagcaaggtacttccttgctacgcca

SEQ ID NO: 197409 - DNA, 30 bp, Artificial Sequence
  Synthetic oligonucleotide
cccacggaggttttatgaacttctacgcca

SEQ ID NO: 197410 - DNA, 30 bp, Artificial Sequence
  Synthetic oligonucleotide
ctgggaagttcacggttatggagtacgcca

SEQ ID NO: 197411 - DNA, 30 bp, Artificial Sequence
  Synthetic oligonucleotide
gcggcacacggaggcaggaacagaccgcca

SEQ ID NO: 197412 - DNA, 30 bp, Artificial Sequence
  Synthetic oligonucleotide
taggtgatgttatgtgaactctacccgcca

SEQ ID NO: 197413 - DNA, 30 bp, Artificial Sequence
  Synthetic oligonucleotide
tccgaccctattgtaagattaattccgcca

SEQ ID NO: 197414 - DNA, 30 bp, Artificial Sequence
  Synthetic oligonucleotide
taccacggctcgggttgccgaaaagcgcca

SEQ ID NO: 197415 - DNA, 30 bp, Artificial Sequence
  Synthetic oligonucleotide
tcaggtggtttgaccatgccctcagcgcca

SEQ ID NO: 197416 - DNA, 30 bp, Artificial Sequence
  Synthetic oligonucleotide
tgtgataatcatttttcaagtctagcgcca

SEQ ID NO: 197417 - DNA, 30 bp, Artificial Sequence
  Synthetic oligonucleotide
gatccgacccatcggcacggccaggcgcca

SEQ ID NO: 197418 - DNA, 30 bp, Artificial Sequence
  Synthetic oligonucleotide
gcagtatgatacaggcggttccatgcgcca

SEQ ID NO: 197419 - DNA, 30 bp, Artificial Sequence
  Synthetic oligonucleotide
aaacaccatcccgggtccacacaatcgcca

SEQ ID NO: 197420 - DNA, 30 bp, Artificial Sequence
  Synthetic oligonucleotide
gcacgcgtgaataatgctcctggttcgcca

SEQ ID NO: 197421 - DNA, 30 bp, Artificial Sequence
  Synthetic oligonucleotide
gtagggcatggagcagcatttggttcgcca

SEQ ID NO: 197422 - DNA, 30 bp, Artificial Sequence
  Synthetic oligonucleotide
atgggcaaagtagtctttgagttttcgcca

SEQ ID NO: 197423 - DNA, 30 bp, Artificial Sequence
  Synthetic oligonucleotide
tatcgcgctccgttaaccgtcctaaggcca

SEQ ID NO: 197424 - DNA, 30 bp, Artificial Sequence
  Synthetic oligonucleotide
gtgaaagtttgattgacagaacacaggcca

SEQ ID NO: 197425 - DNA, 30 bp, Artificial Sequence
  Synthetic oligonucleotide
atagcctcaaatttaatagagaagaggcca

SEQ ID NO: 197426 - DNA, 30 bp, Artificial Sequence
  Synthetic oligonucleotide
ccgggtgtgtctaccaactgcgataggcca

SEQ ID NO: 197427 - DNA, 30 bp, Artificial Sequence
  Synthetic oligonucleotide
gcctgtgattgctaggtaacaggtaggcca

SEQ ID NO: 197428 - DNA, 30 bp, Artificial Sequence
  Synthetic oligonucleotide
gcgttagaccggacaaagggcggtaggcca

SEQ ID NO: 197429 - DNA, 30 bp, Artificial Sequence
  Synthetic oligonucleotide
tgatcatttaagtcattaaggttacggcca

SEQ ID NO: 197430 - DNA, 30 bp, Artificial Sequence
  Synthetic oligonucleotide
gttgttcgcatacgatacaggactcggcca

SEQ ID NO: 197431 - DNA, 30 bp, Artificial Sequence
  Synthetic oligonucleotide
cctggtcatttggtatatggtatagggcca

SEQ ID NO: 197432 - DNA, 31 bp, Artificial Sequence
  Synthetic oligonucleotide
ggtggaccgggagatacctcatctagggcca

SEQ ID NO: 197433 - DNA, 30 bp, Artificial Sequence
  Synthetic oligonucleotide
ggatgatgtgctaccacgccctccgggcca

SEQ ID NO: 197434 - DNA, 30 bp, Artificial Sequence
  Synthetic oligonucleotide
ataactctcttcaactgtgtggaggggcca

SEQ ID NO: 197435 - DNA, 30 bp, Artificial Sequence
  Synthetic oligonucleotide
gttaccgcgaaaaggagtatttaggggcca

SEQ ID NO: 197436 - DNA, 30 bp, Artificial Sequence
  Synthetic oligonucleotide
ggtagggctgcgggtgtgtatttggggcca

SEQ ID NO: 197437 - DNA, 30 bp, Artificial Sequence
  Synthetic oligonucleotide
tagcggattccgattgcggtagttgggcca

SEQ ID NO: 197438 - DNA, 30 bp, Artificial Sequence
  Synthetic oligonucleotide
ggtttgccgaaaaccggtcgcgttgggcca

SEQ ID NO: 197439 - DNA, 30 bp, Artificial Sequence
  Synthetic oligonucleotide
cgcgaggaagctacacttaaataatggcca

SEQ ID NO: 197440 - DNA, 30 bp, Artificial Sequence
  Synthetic oligonucleotide
tgctggtcaggtgttttcaagatatggcca

SEQ ID NO: 197441 - DNA, 30 bp, Artificial Sequence
  Synthetic oligonucleotide
atacatgtaaaggaactaattagctggcca

SEQ ID NO: 197442 - DNA, 30 bp, Artificial Sequence
  Synthetic oligonucleotide
ctgcttcgagccatacggcttcgctggcca

SEQ ID NO: 197443 - DNA, 30 bp, Artificial Sequence
  Synthetic oligonucleotide
tatacaggaatatacagagaaacaatgcca

SEQ ID NO: 197444 - DNA, 30 bp, Artificial Sequence
  Synthetic oligonucleotide
tctacgcagtgaggttcagcaccaatgcca

SEQ ID NO: 197445 - DNA, 30 bp, Artificial Sequence
  Synthetic oligonucleotide
tagtacggagcagttcacaagatgatgcca

SEQ ID NO: 197446 - DNA, 30 bp, Artificial Sequence
  Synthetic oligonucleotide
ccagcaaatacggcattgcgaggactgcca

SEQ ID NO: 197447 - DNA, 30 bp, Artificial Sequence
  Synthetic oligonucleotide
aaacgatagccgaaaatgtgcatcctgcca

SEQ ID NO: 197448 - DNA, 30 bp, Artificial Sequence
  Synthetic oligonucleotide
gccaaacgacgagtgaatttgcagctgcca

SEQ ID NO: 197449 - DNA, 30 bp, Artificial Sequence
  Synthetic oligonucleotide
gcatcgtcttgagaaggcgacttgctgcca

SEQ ID NO: 197450 - DNA, 30 bp, Artificial Sequence
  Synthetic oligonucleotide
tgtgcacaactattactggtcttgctgcca

SEQ ID NO: 197451 - DNA, 30 bp, Artificial Sequence
  Synthetic oligonucleotide
cggttgggccaagcattcaatactctgcca

SEQ ID NO: 197452 - DNA, 35 bp, Artificial Sequence
  Synthetic oligonucleotide
gggcacgccactaggagggacggataaacgtgcca

SEQ ID NO: 197453 - DNA, 30 bp, Artificial Sequence
  Synthetic oligonucleotide
acagaacgtgcaggtggaccctccgtgcca

SEQ ID NO: 197454 - DNA, 30 bp, Artificial Sequence
  Synthetic oligonucleotide
caccccgaggagcagacattccgcgtgcca

SEQ ID NO: 197455 - DNA, 30 bp, Artificial Sequence
  Synthetic oligonucleotide
agaatgatctttgggccctagaaggtgcca

SEQ ID NO: 197456 - DNA, 30 bp, Artificial Sequence
  Synthetic oligonucleotide
cactccgaggatgcataccattaggtgcca

SEQ ID NO: 197457 - DNA, 30 bp, Artificial Sequence
  Synthetic oligonucleotide
ggtgtatgccaaggtttgcagagggtgcca

SEQ ID NO: 197458 - DNA, 30 bp, Artificial Sequence
  Synthetic oligonucleotide
agacaggtatttaaggaacaagctgtgcca

SEQ ID NO: 197459 - DNA, 30 bp, Artificial Sequence
  Synthetic oligonucleotide
cggagagcttctcatcagttttaattgcca

SEQ ID NO: 197460 - DNA, 30 bp, Artificial Sequence
  Synthetic oligonucleotide
tttacataatcacatgatatgcacttgcca

SEQ ID NO: 197461 - DNA, 30 bp, Artificial Sequence
  Synthetic oligonucleotide
atcacatagatccgataatatttgttgcca

SEQ ID NO: 197462 - DNA, 30 bp, Artificial Sequence
  Synthetic oligonucleotide
ggagatcgaatctcacgaccatatttgcca

SEQ ID NO: 197463 - DNA, 30 bp, Artificial Sequence
  Synthetic oligonucleotide
tggtgcttcgctgaggtgtggtatttgcca

SEQ ID NO: 197464 - DNA, 31 bp, Artificial Sequence
  Synthetic oligonucleotide
agggttctgttcccatgtgcgttatttgcca

SEQ ID NO: 197465 - DNA, 30 bp, Artificial Sequence
  Synthetic oligonucleotide
acaagtgtggacatctcgtgtacaaatcca

SEQ ID NO: 197466 - DNA, 30 bp, Artificial Sequence
  Synthetic oligonucleotide
gcacacaactgattaggagaatccaatcca

SEQ ID NO: 197467 - DNA, 30 bp, Artificial Sequence
  Synthetic oligonucleotide
tagtgcgcctagcgattcggatagaatcca

SEQ ID NO: 197468 - DNA, 30 bp, Artificial Sequence
  Synthetic oligonucleotide
tgaaactacccgcgagcaatttaccatcca

SEQ ID NO: 197469 - DNA, 30 bp, Artificial Sequence
  Synthetic oligonucleotide
actcagtctcacatagtcactccgcatcca

SEQ ID NO: 197470 - DNA, 30 bp, Artificial Sequence
  Synthetic oligonucleotide
tccgaagccctggggatactcgcagatcca

SEQ ID NO: 197471 - DNA, 30 bp, Artificial Sequence
  Synthetic oligonucleotide
catgctgcggggacatgcttttgagatcca

SEQ ID NO: 197472 - DNA, 30 bp, Artificial Sequence
  Synthetic oligonucleotide
ggtgtcgtaacaatttgatcgggggatcca

SEQ ID NO: 197473 - DNA, 30 bp, Artificial Sequence
  Synthetic oligonucleotide
atgaggcatatcgacgacgcctatgatcca

SEQ ID NO: 197474 - DNA, 30 bp, Artificial Sequence
  Synthetic oligonucleotide
gagcgggcaattagagatggtggctatcca

SEQ ID NO: 197475 - DNA, 30 bp, Artificial Sequence
  Synthetic oligonucleotide
ggttgatggcaatgccgccacaagtatcca

SEQ ID NO: 197476 - DNA, 30 bp, Artificial Sequence
  Synthetic oligonucleotide
ggccgccttgaggtttcgaattagtatcca

SEQ ID NO: 197477 - DNA, 30 bp, Artificial Sequence
  Synthetic oligonucleotide
gctgctgaggacttcccggggtcgtatcca

SEQ ID NO: 197478 - DNA, 30 bp, Artificial Sequence
  Synthetic oligonucleotide
aagatagcttggacccaatcggaaactcca

SEQ ID NO: 197479 - DNA, 30 bp, Artificial Sequence
  Synthetic oligonucleotide
tgattcgacttccccattgccggaactcca

SEQ ID NO: 197480 - DNA, 30 bp, Artificial Sequence
  Synthetic oligonucleotide
tgaagggaaaaacgtgacgcatacactcca

SEQ ID NO: 197481 - DNA, 30 bp, Artificial Sequence
  Synthetic oligonucleotide
cggagaattggtgcggcgacgatcactcca

SEQ ID NO: 197482 - DNA, 30 bp, Artificial Sequence
  Synthetic oligonucleotide
gtaactgttggcaaaaggttagggactcca

SEQ ID NO: 197483 - DNA, 30 bp, Artificial Sequence
  Synthetic oligonucleotide
cttatcttgcacgataagtcgtgtactcca

SEQ ID NO: 197484 - DNA, 30 bp, Artificial Sequence
  Synthetic oligonucleotide
cgaaggccaatacctggcagctagtctcca

SEQ ID NO: 197485 - DNA, 30 bp, Artificial Sequence
  Synthetic oligonucleotide
gtaagagttgaggtctgcttctgaagtcca

SEQ ID NO: 197486 - DNA, 30 bp, Artificial Sequence
  Synthetic oligonucleotide
gtcgttccggcatcagcgataaacagtcca

SEQ ID NO: 197487 - DNA, 30 bp, Artificial Sequence
  Synthetic oligonucleotide
gcatctcggcggatgaatagcaacagtcca

SEQ ID NO: 197488 - DNA, 30 bp, Artificial Sequence
  Synthetic oligonucleotide
gcatccaacctatgaagtgaggatagtcca

SEQ ID NO: 197489 - DNA, 30 bp, Artificial Sequence
  Synthetic oligonucleotide
tcgaatcttaacacataaaaaagtagtcca

SEQ ID NO: 197490 - DNA, 30 bp, Artificial Sequence
  Synthetic oligonucleotide
ggcacgcgttgcaaatacgcccaacgtcca

SEQ ID NO: 197491 - DNA, 30 bp, Artificial Sequence
  Synthetic oligonucleotide
agccccattcgtaggtgtccatcacgtcca

SEQ ID NO: 197492 - DNA, 30 bp, Artificial Sequence
  Synthetic oligonucleotide
cccaagtccacaaacacctaccgacgtcca

SEQ ID NO: 197493 - DNA, 30 bp, Artificial Sequence
  Synthetic oligonucleotide
caattgggataaaatggacgttaccgtcca

SEQ ID NO: 197494 - DNA, 30 bp, Artificial Sequence
  Synthetic oligonucleotide
cccagattcacgacgtatgtgtccggtcca

SEQ ID NO: 197495 - DNA, 30 bp, Artificial Sequence
  Synthetic oligonucleotide
gcaagggtaattcaatttcgtatgggtcca

SEQ ID NO: 197496 - DNA, 30 bp, Artificial Sequence
  Synthetic oligonucleotide
tgcttggtcatgggcaggatgttgggtcca

SEQ ID NO: 197497 - DNA, 30 bp, Artificial Sequence
  Synthetic oligonucleotide
tttgtcaaaaggtcgccggaacttggtcca

SEQ ID NO: 197498 - DNA, 30 bp, Artificial Sequence
  Synthetic oligonucleotide
ggctacgcactggggtatatgaattgtcca

SEQ ID NO: 197499 - DNA, 30 bp, Artificial Sequence
  Synthetic oligonucleotide
aagtcgtgagggtgccgattatattgtcca

SEQ ID NO: 197500 - DNA, 30 bp, Artificial Sequence
  Synthetic oligonucleotide
gctcaaatatggagggataacaaaattcca

SEQ ID NO: 197501 - DNA, 30 bp, Artificial Sequence
  Synthetic oligonucleotide
ccggcaaacacgcagatcgacaggattcca

SEQ ID NO: 197502 - DNA, 30 bp, Artificial Sequence
  Synthetic oligonucleotide
aatggattctaggacagatcgacccttcca

SEQ ID NO: 197503 - DNA, 30 bp, Artificial Sequence
  Synthetic oligonucleotide
cggcaagtatatagaacacattgccttcca

SEQ ID NO: 197504 - DNA, 30 bp, Artificial Sequence
  Synthetic oligonucleotide
tagtagtgctatcaggtctaggcgcttcca

SEQ ID NO: 197505 - DNA, 30 bp, Artificial Sequence
  Synthetic oligonucleotide
acgtcagtagttgaaggttgaggagttcca

SEQ ID NO: 197506 - DNA, 30 bp, Artificial Sequence
  Synthetic oligonucleotide
ggtggccactcaggcgacggggtagttcca

SEQ ID NO: 197507 - DNA, 30 bp, Artificial Sequence
  Synthetic oligonucleotide
gcagaactagggtccctcatcaccgttcca

SEQ ID NO: 197508 - DNA, 30 bp, Artificial Sequence
  Synthetic oligonucleotide
gggtagaactgtcgctcgtccagcgttcca

SEQ ID NO: 197509 - DNA, 30 bp, Artificial Sequence
  Synthetic oligonucleotide
tttaggacttcgagttaaattggcgttcca

SEQ ID NO: 197510 - DNA, 30 bp, Artificial Sequence
  Synthetic oligonucleotide
ctttggacctatgcattagggctcgttcca

SEQ ID NO: 197511 - DNA, 30 bp, Artificial Sequence
  Synthetic oligonucleotide
gctgacgggtggcgtctagtcaaatttcca

SEQ ID NO: 197512 - DNA, 30 bp, Artificial Sequence
  Synthetic oligonucleotide
gagagcaatctgggtctcaggccttttcca

SEQ ID NO: 197513 - DNA, 30 bp, Artificial Sequence
  Synthetic oligonucleotide
ctgcacaagggtttgcgtgcaagaaaagca

SEQ ID NO: 197514 - DNA, 31 bp, Artificial Sequence
  Synthetic oligonucleotide
tcgagcatgtgcgctgtgcggcgtgaaagca

SEQ ID NO: 197515 - DNA, 30 bp, Artificial Sequence
  Synthetic oligonucleotide
ccaggccagctgtgagtgctgtgtaaagca

SEQ ID NO: 197516 - DNA, 30 bp, Artificial Sequence
  Synthetic oligonucleotide
catagccgaccgacgtgacggcgacaagca

SEQ ID NO: 197517 - DNA, 30 bp, Artificial Sequence
  Synthetic oligonucleotide
aatgagagggtcatgctgttggaccaagca

SEQ ID NO: 197518 - DNA, 30 bp, Artificial Sequence
  Synthetic oligonucleotide
taccgggccgttatactacatccccaagca

SEQ ID NO: 197519 - DNA, 30 bp, Artificial Sequence
  Synthetic oligonucleotide
tagactccatcggggatacgtcgccaagca

SEQ ID NO: 197520 - DNA, 30 bp, Artificial Sequence
  Synthetic oligonucleotide
ggtacctatgcctttgaaaaagcgcaagca

SEQ ID NO: 197521 - DNA, 30 bp, Artificial Sequence
  Synthetic oligonucleotide
gtatcaaagctaggccaatgtgtgcaagca

SEQ ID NO: 197522 - DNA, 30 bp, Artificial Sequence
  Synthetic oligonucleotide
cacaattcaaattgtataaatactcaagca

SEQ ID NO: 197523 - DNA, 30 bp, Artificial Sequence
  Synthetic oligonucleotide
gcaaggttcatacacctaggtattcaagca

SEQ ID NO: 197524 - DNA, 30 bp, Artificial Sequence
  Synthetic oligonucleotide
gggttgggtaaaaatgctgatgaagaagca

SEQ ID NO: 197525 - DNA, 30 bp, Artificial Sequence
  Synthetic oligonucleotide
atatataaatagcacaaaggcggcgaagca

SEQ ID NO: 197526 - DNA, 31 bp, Artificial Sequence
  Synthetic oligonucleotide
tattcacacccaccgtaatccccaataagca

SEQ ID NO: 197527 - DNA, 30 bp, Artificial Sequence
  Synthetic oligonucleotide
atcgctcccgacgaagagggccaataagca

SEQ ID NO: 197528 - DNA, 30 bp, Artificial Sequence
  Synthetic oligonucleotide
gcgcggctggttttacgtaagctataagca

SEQ ID NO: 197529 - DNA, 30 bp, Artificial Sequence
  Synthetic oligonucleotide
aggaatttttcgactgagaaggcctaagca

SEQ ID NO: 197530 - DNA, 30 bp, Artificial Sequence
  Synthetic oligonucleotide
ccaccggggggtgctccccttacgtaagca

SEQ ID NO: 197531 - DNA, 30 bp, Artificial Sequence
  Synthetic oligonucleotide
acttttgctcatgatgggagtaggtaagca

SEQ ID NO: 197532 - DNA, 30 bp, Artificial Sequence
  Synthetic oligonucleotide
acgaattgtcgagtatctttcgtttaagca

SEQ ID NO: 197533 - DNA, 30 bp, Artificial Sequence
  Synthetic oligonucleotide
tcgaaggctgggatgaatccattttaagca

SEQ ID NO: 197534 - DNA, 30 bp, Artificial Sequence
  Synthetic oligonucleotide
accaatatcaaatcatcctctctaacagca

SEQ ID NO: 197535 - DNA, 30 bp, Artificial Sequence
  Synthetic oligonucleotide
taaggaagagacccttgcctggggacagca

SEQ ID NO: 197536 - DNA, 30 bp, Artificial Sequence
  Synthetic oligonucleotide
ttgggtctccagtgctacagaaccccagca

SEQ ID NO: 197537 - DNA, 30 bp, Artificial Sequence
  Synthetic oligonucleotide
gcccttttaagcaaattcggtcgtccagca

SEQ ID NO: 197538 - DNA, 30 bp, Artificial Sequence
  Synthetic oligonucleotide
ggagttaagttgccgtccggaccagcagca

SEQ ID NO: 197539 - DNA, 30 bp, Artificial Sequence
  Synthetic oligonucleotide
gccgggagatcactgctgtgtaaggcagca

SEQ ID NO: 197540 - DNA, 30 bp, Artificial Sequence
  Synthetic oligonucleotide
ctgggaattcgggttcgcgaatatgcagca

SEQ ID NO: 197541 - DNA, 30 bp, Artificial Sequence
  Synthetic oligonucleotide
ggcgttcgttgacttagtggaatatcagca

SEQ ID NO: 197542 - DNA, 30 bp, Artificial Sequence
  Synthetic oligonucleotide
tgcgcaccaacgagatatatgcactcagca

SEQ ID NO: 197543 - DNA, 30 bp, Artificial Sequence
  Synthetic oligonucleotide
tgggacgtccgagcaaaggcatgctcagca

SEQ ID NO: 197544 - DNA, 30 bp, Artificial Sequence
  Synthetic oligonucleotide
tcccgacaacgctgtggcgtcatctcagca

SEQ ID NO: 197545 - DNA, 30 bp, Artificial Sequence
  Synthetic oligonucleotide
gcgctgaaagatgccctttagcggtcagca

SEQ ID NO: 197546 - DNA, 30 bp, Artificial Sequence
  Synthetic oligonucleotide
ctctgcagtctaacagacacattgtcagca

SEQ ID NO: 197547 - DNA, 30 bp, Artificial Sequence
  Synthetic oligonucleotide
ttcggttgtgaacaggaagtaagttcagca

SEQ ID NO: 197548 - DNA, 30 bp, Artificial Sequence
  Synthetic oligonucleotide
cccttagacaaccgccttaccataagagca

SEQ ID NO: 197549 - DNA, 30 bp, Artificial Sequence
  Synthetic oligonucleotide
tacggactttcaggccaaaaggacagagca

SEQ ID NO: 197550 - DNA, 30 bp, Artificial Sequence
  Synthetic oligonucleotide
aagaagtacggtagattagtgtacagagca

SEQ ID NO: 197551 - DNA, 30 bp, Artificial Sequence
  Synthetic oligonucleotide
tataacttgccgtagggggaccccagagca

SEQ ID NO: 197552 - DNA, 30 bp, Artificial Sequence
  Synthetic oligonucleotide
cgtaagatattgttaagtgtgtcacgagca

SEQ ID NO: 197553 - DNA, 30 bp, Artificial Sequence
  Synthetic oligonucleotide
ttagtcagaactcactttgaaggacgagca

SEQ ID NO: 197554 - DNA, 30 bp, Artificial Sequence
  Synthetic oligonucleotide
tactggcagggcatgttgtcatagcgagca

SEQ ID NO: 197555 - DNA, 30 bp, Artificial Sequence
  Synthetic oligonucleotide
gatgagccagcgtatagtgatacgcgagca

SEQ ID NO: 197556 - DNA, 28 bp, Artificial Sequence
  Synthetic oligonucleotide
actaaatatttagaactcatttcgagca

SEQ ID NO: 197557 - DNA, 30 bp, Artificial Sequence
  Synthetic oligonucleotide
agacccacttctacgattgattccggagca

SEQ ID NO: 197558 - DNA, 30 bp, Artificial Sequence
  Synthetic oligonucleotide
tgtcactggggcacggagggtcagggagca

SEQ ID NO: 197559 - DNA, 30 bp, Artificial Sequence
  Synthetic oligonucleotide
caccttgaccttgtggctgacgggggagca

SEQ ID NO: 197560 - DNA, 30 bp, Artificial Sequence
  Synthetic oligonucleotide
gggccctagtggagagagtttatgggagca

SEQ ID NO: 197561 - DNA, 30 bp, Artificial Sequence
  Synthetic oligonucleotide
aaccggccaatcacagcggcttgatgagca

SEQ ID NO: 197562 - DNA, 30 bp, Artificial Sequence
  Synthetic oligonucleotide
actctgtccgtgtaccgttatagctgagca

SEQ ID NO: 197563 - DNA, 30 bp, Artificial Sequence
  Synthetic oligonucleotide
ttgtcctcactccgtatctctccgtgagca

SEQ ID NO: 197564 - DNA, 30 bp, Artificial Sequence
  Synthetic oligonucleotide
tatcgcattcacatgagccagtcaatagca

SEQ ID NO: 197565 - DNA, 30 bp, Artificial Sequence
  Synthetic oligonucleotide
tggaggctatctgtctatcgaagaatagca

SEQ ID NO: 197566 - DNA, 30 bp, Artificial Sequence
  Synthetic oligonucleotide
tagtatttggaagaaccattgcacatagca

SEQ ID NO: 197567 - DNA, 30 bp, Artificial Sequence
  Synthetic oligonucleotide
cacgtgtgtcgcgccgatgggaagatagca

SEQ ID NO: 197568 - DNA, 30 bp, Artificial Sequence
  Synthetic oligonucleotide
cgacaattgctctcgtagtcgtatatagca

SEQ ID NO: 197569 - DNA, 30 bp, Artificial Sequence
  Synthetic oligonucleotide
cccgtcagatgtccggtaatcaacctagca

SEQ ID NO: 197570 - DNA, 30 bp, Artificial Sequence
  Synthetic oligonucleotide
caacaaataattatgactgattatctagca

SEQ ID NO: 197571 - DNA, 30 bp, Artificial Sequence
  Synthetic oligonucleotide
caatccggtgttcgacaaaccgttctagca

SEQ ID NO: 197572 - DNA, 30 bp, Artificial Sequence
  Synthetic oligonucleotide
aagtgagaacctgggctgggagtagtagca

SEQ ID NO: 197573 - DNA, 30 bp, Artificial Sequence
  Synthetic oligonucleotide
aacaacgcttttctgcaactaaacgtagca

SEQ ID NO: 197574 - DNA, 30 bp, Artificial Sequence
  Synthetic oligonucleotide
cggtggagagacaggacttgcaccgtagca

SEQ ID NO: 197575 - DNA, 30 bp, Artificial Sequence
  Synthetic oligonucleotide
aatgacactactctggtcttctaggtagca

SEQ ID NO: 197576 - DNA, 30 bp, Artificial Sequence
  Synthetic oligonucleotide
tgatgtagttacggtagggttgaattagca

SEQ ID NO: 197577 - DNA, 30 bp, Artificial Sequence
  Synthetic oligonucleotide
cccaaaactaagctatcgtcgatattagca

SEQ ID NO: 197578 - DNA, 30 bp, Artificial Sequence
  Synthetic oligonucleotide
cgcaaggttccgcgtccgcccgtattagca

SEQ ID NO: 197579 - DNA, 30 bp, Artificial Sequence
  Synthetic oligonucleotide
ctaggttgttcgttcatcgataacttagca

SEQ ID NO: 197580 - DNA, 30 bp, Artificial Sequence
  Synthetic oligonucleotide
acattaacgatgatcatttggtagttagca

SEQ ID NO: 197581 - DNA, 30 bp, Artificial Sequence
  Synthetic oligonucleotide
agaatggctagacagttagtatatttagca

SEQ ID NO: 197582 - DNA, 30 bp, Artificial Sequence
  Synthetic oligonucleotide
ggcgagtttgctattacccacggaaacgca

SEQ ID NO: 197583 - DNA, 30 bp, Artificial Sequence
  Synthetic oligonucleotide
atcctatgcagtcggaaatatcggaacgca

SEQ ID NO: 197584 - DNA, 30 bp, Artificial Sequence
  Synthetic oligonucleotide
tgaagaaagatagttaacgaatggaacgca

SEQ ID NO: 197585 - DNA, 30 bp, Artificial Sequence
  Synthetic oligonucleotide
acgtactggggctgttagcagatgaacgca

SEQ ID NO: 197586 - DNA, 30 bp, Artificial Sequence
  Synthetic oligonucleotide
tcttgtcgaggctccagcaatgataacgca

SEQ ID NO: 197587 - DNA, 30 bp, Artificial Sequence
  Synthetic oligonucleotide
tggacagagggtcatgtaatgggtaacgca

SEQ ID NO: 197588 - DNA, 30 bp, Artificial Sequence
  Synthetic oligonucleotide
atacccacgaggcggggaccaccccacgca

SEQ ID NO: 197589 - DNA, 30 bp, Artificial Sequence
  Synthetic oligonucleotide
ttcagaacctggacgcggttgctccacgca

SEQ ID NO: 197590 - DNA, 30 bp, Artificial Sequence
  Synthetic oligonucleotide
cgcaagtgctgtaaagtaaatttagacgca

SEQ ID NO: 197591 - DNA, 30 bp, Artificial Sequence
  Synthetic oligonucleotide
tgtcggagaaaggctataacagaggacgca

SEQ ID NO: 197592 - DNA, 30 bp, Artificial Sequence
  Synthetic oligonucleotide
gcctcgactatcatcgatagagcggacgca

SEQ ID NO: 197593 - DNA, 30 bp, Artificial Sequence
  Synthetic oligonucleotide
agtatcagcgattaccaattcgctgacgca

SEQ ID NO: 197594 - DNA, 30 bp, Artificial Sequence
  Synthetic oligonucleotide
cgaaccaagtaccattcgctgagatacgca

SEQ ID NO: 197595 - DNA, 30 bp, Artificial Sequence
  Synthetic oligonucleotide
ttgtggtaggactgagcactctgctacgca

SEQ ID NO: 197596 - DNA, 30 bp, Artificial Sequence
  Synthetic oligonucleotide
gaaagaatcctgaaagcgtgattctacgca

SEQ ID NO: 197597 - DNA, 30 bp, Artificial Sequence
  Synthetic oligonucleotide
actcggtcgcacgttgagtggaagtacgca

SEQ ID NO: 197598 - DNA, 30 bp, Artificial Sequence
  Synthetic oligonucleotide
tcgtgacagtttgaatatcagacgtacgca

SEQ ID NO: 197599 - DNA, 30 bp, Artificial Sequence
  Synthetic oligonucleotide
tgaggagagaacctaacgggggcgtacgca

SEQ ID NO: 197600 - DNA, 30 bp, Artificial Sequence
  Synthetic oligonucleotide
tcaacgttaggtgtacatcttaggtacgca

SEQ ID NO: 197601 - DNA, 30 bp, Artificial Sequence
  Synthetic oligonucleotide
ccaaaaagattctgcgaaatcaaaaccgca

SEQ ID NO: 197602 - DNA, 30 bp, Artificial Sequence
  Synthetic oligonucleotide
tctgacggttgccggtagtgtcggaccgca

SEQ ID NO: 197603 - DNA, 30 bp, Artificial Sequence
  Synthetic oligonucleotide
gctacacgataacaaatagctcaacccgca

SEQ ID NO: 197604 - DNA, 30 bp, Artificial Sequence
  Synthetic oligonucleotide
cagcaatttagaatttagaatcgacccgca

SEQ ID NO: 197605 - DNA, 30 bp, Artificial Sequence
  Synthetic oligonucleotide
accttgcacagaagactttacacccccgca

SEQ ID NO: 197606 - DNA, 30 bp, Artificial Sequence
  Synthetic oligonucleotide
ttgtccctgatgtcaccatcttggcccgca

SEQ ID NO: 197607 - DNA, 30 bp, Artificial Sequence
  Synthetic oligonucleotide
tgggttctccacgactcgtggccagccgca

SEQ ID NO: 197608 - DNA, 30 bp, Artificial Sequence
  Synthetic oligonucleotide
tgagaaataaacgtgggtgtgatagccgca

SEQ ID NO: 197609 - DNA, 30 bp, Artificial Sequence
  Synthetic oligonucleotide
gcttcgacgctcaaaaaatgaggcgccgca

SEQ ID NO: 197610 - DNA, 30 bp, Artificial Sequence
  Synthetic oligonucleotide
tccaggtaattggcacgacatttcgccgca

SEQ ID NO: 197611 - DNA, 30 bp, Artificial Sequence
  Synthetic oligonucleotide
aagaaaactacgaacccgaacgtggccgca

SEQ ID NO: 197612 - DNA, 30 bp, Artificial Sequence
  Synthetic oligonucleotide
gactgcgatacaccgtagataacatccgca

SEQ ID NO: 197613 - DNA, 30 bp, Artificial Sequence
  Synthetic oligonucleotide
cctacgaaaggattagatcttacctccgca

SEQ ID NO: 197614 - DNA, 30 bp, Artificial Sequence
  Synthetic oligonucleotide
taaaacatattacgatttctggtttccgca

SEQ ID NO: 197615 - DNA, 30 bp, Artificial Sequence
  Synthetic oligonucleotide
actccatagcaacaaaggtaattttccgca

SEQ ID NO: 197616 - DNA, 30 bp, Artificial Sequence
  Synthetic oligonucleotide
gacggcattgacattcttggattttccgca

SEQ ID NO: 197617 - DNA, 30 bp, Artificial Sequence
  Synthetic oligonucleotide
attcgctatcagtgaagaacgttttccgca

SEQ ID NO: 197618 - DNA, 30 bp, Artificial Sequence
  Synthetic oligonucleotide
ggccagatttaaaatcggagatgaagcgca

SEQ ID NO: 197619 - DNA, 30 bp, Artificial Sequence
  Synthetic oligonucleotide
gtacaagggagtgtactaagctgaagcgca

SEQ ID NO: 197620 - DNA, 30 bp, Artificial Sequence
  Synthetic oligonucleotide
acgggaaattaggcctcgtggtcgagcgca

SEQ ID NO: 197621 - DNA, 30 bp, Artificial Sequence
  Synthetic oligonucleotide
tggtgcgttaacgtatgggatcatagcgca

SEQ ID NO: 197622 - DNA, 30 bp, Artificial Sequence
  Synthetic oligonucleotide
ggaaaaggggttgagagcgctgatagcgca

SEQ ID NO: 197623 - DNA, 30 bp, Artificial Sequence
  Synthetic oligonucleotide
gaaaaaccatcgtgtatttagcaccgcgca

SEQ ID NO: 197624 - DNA, 30 bp, Artificial Sequence
  Synthetic oligonucleotide
gatggcaggatgaacccgattgcccgcgca

SEQ ID NO: 197625 - DNA, 30 bp, Artificial Sequence
  Synthetic oligonucleotide
tactatgaagtaattcatcccgcgcgcgca

SEQ ID NO: 197626 - DNA, 30 bp, Artificial Sequence
  Synthetic oligonucleotide
cagccgagtagaatctctcccggaggcgca

SEQ ID NO: 197627 - DNA, 30 bp, Artificial Sequence
  Synthetic oligonucleotide
actacaccatcttgacacacaaacggcgca

SEQ ID NO: 197628 - DNA, 30 bp, Artificial Sequence
  Synthetic oligonucleotide
gactggatgaaggttacgcatctgggcgca

SEQ ID NO: 197629 - DNA, 30 bp, Artificial Sequence
  Synthetic oligonucleotide
aggtcagtacaaggaaccttgttgggcgca

SEQ ID NO: 197630 - DNA, 30 bp, Artificial Sequence
  Synthetic oligonucleotide
tggtgtccggtctgtcgttcggtatgcgca

SEQ ID NO: 197631 - DNA, 30 bp, Artificial Sequence
  Synthetic oligonucleotide
gaccgtcgatttgattgcactggctgcgca

SEQ ID NO: 197632 - DNA, 30 bp, Artificial Sequence
  Synthetic oligonucleotide
tctgcgtttgatagccaccttacgtgcgca

SEQ ID NO: 197633 - DNA, 30 bp, Artificial Sequence
  Synthetic oligonucleotide
gacctcgcgccataatgacattgttgcgca

SEQ ID NO: 197634 - DNA, 30 bp, Artificial Sequence
  Synthetic oligonucleotide
agacgagagtgactggattagaaaatcgca

SEQ ID NO: 197635 - DNA, 30 bp, Artificial Sequence
  Synthetic oligonucleotide
acaagaaaacacccatccctcacaatcgca

SEQ ID NO: 197636 - DNA, 30 bp, Artificial Sequence
  Synthetic oligonucleotide
tcattggccagtgaaggtgaccccatcgca

SEQ ID NO: 197637 - DNA, 30 bp, Artificial Sequence
  Synthetic oligonucleotide
ttagccacgcatagtgagcggtacgtcgca

SEQ ID NO: 197638 - DNA, 30 bp, Artificial Sequence
  Synthetic oligonucleotide
agcgaattgaccttcgaaggtagcgtcgca

SEQ ID NO: 197639 - DNA, 30 bp, Artificial Sequence
  Synthetic oligonucleotide
ttatgacgacgatacctgtacagattcgca

SEQ ID NO: 197640 - DNA, 30 bp, Artificial Sequence
  Synthetic oligonucleotide
ttctagcgatatatcctgaggacgttcgca

SEQ ID NO: 197641 - DNA, 30 bp, Artificial Sequence
  Synthetic oligonucleotide
gtacgcatcgtctagcataaagggttcgca

SEQ ID NO: 197642 - DNA, 30 bp, Artificial Sequence
  Synthetic oligonucleotide
atttggatagggtggggtgagaatttcgca

SEQ ID NO: 197643 - DNA, 30 bp, Artificial Sequence
  Synthetic oligonucleotide
taccctgctcaaactagtgatgatttcgca

SEQ ID NO: 197644 - DNA, 30 bp, Artificial Sequence
  Synthetic oligonucleotide
atttgtaaatcaggggaggggactttcgca

SEQ ID NO: 197645 - DNA, 30 bp, Artificial Sequence
  Synthetic oligonucleotide
aaggcgactcctcgtaacaaaggtttcgca

SEQ ID NO: 197646 - DNA, 30 bp, Artificial Sequence
  Synthetic oligonucleotide
gcttactcgcgtgctgctccgtacaaggca

SEQ ID NO: 197647 - DNA, 30 bp, Artificial Sequence
  Synthetic oligonucleotide
tcatgttggttagtcgttagcatcaaggca

SEQ ID NO: 197648 - DNA, 30 bp, Artificial Sequence
  Synthetic oligonucleotide
tcgatgcccgggaacaactatgataaggca

SEQ ID NO: 197649 - DNA, 30 bp, Artificial Sequence
  Synthetic oligonucleotide
ttaggttgtatagcgcgaatcggtaaggca

SEQ ID NO: 197650 - DNA, 30 bp, Artificial Sequence
  Synthetic oligonucleotide
gcagctgagggaacaaacggattgcaggca

SEQ ID NO: 197651 - DNA, 30 bp, Artificial Sequence
  Synthetic oligonucleotide
aacttatgtctttcgaaccaaagcgaggca

SEQ ID NO: 197652 - DNA, 30 bp, Artificial Sequence
  Synthetic oligonucleotide
aactcgagaaccagtgcaaaatgcgaggca

SEQ ID NO: 197653 - DNA, 30 bp, Artificial Sequence
  Synthetic oligonucleotide
tacaccattggtcagaataatggggaggca

SEQ ID NO: 197654 - DNA, 30 bp, Artificial Sequence
  Synthetic oligonucleotide
catcctgcatgtcgttccgtcggtgaggca

SEQ ID NO: 197655 - DNA, 30 bp, Artificial Sequence
  Synthetic oligonucleotide
gctcacgccaggcatttacattcataggca

SEQ ID NO: 197656 - DNA, 30 bp, Artificial Sequence
  Synthetic oligonucleotide
attaacgcgctagagtttaagagataggca

SEQ ID NO: 197657 - DNA, 30 bp, Artificial Sequence
  Synthetic oligonucleotide
acaagaaaaacatagattactctataggca

SEQ ID NO: 197658 - DNA, 30 bp, Artificial Sequence
  Synthetic oligonucleotide
atcgtaccccggtacaagaccctctaggca

SEQ ID NO: 197659 - DNA, 30 bp, Artificial Sequence
  Synthetic oligonucleotide
ctgtgttgtacacaaaacgctgagtaggca

SEQ ID NO: 197660 - DNA, 30 bp, Artificial Sequence
  Synthetic oligonucleotide
aacagcaattcgtgggcttgtgcgtaggca

SEQ ID NO: 197661 - DNA, 30 bp, Artificial Sequence
  Synthetic oligonucleotide
tccgaccaatatgaaagggttgcgtaggca

SEQ ID NO: 197662 - DNA, 30 bp, Artificial Sequence
  Synthetic oligonucleotide
acaacaggcatgacccttgtatcttaggca

SEQ ID NO: 197663 - DNA, 30 bp, Artificial Sequence
  Synthetic oligonucleotide
attctcgaacgataattgaaattttaggca

SEQ ID NO: 197664 - DNA, 30 bp, Artificial Sequence
  Synthetic oligonucleotide
acctcgagggggagtgttacattttaggca

SEQ ID NO: 197665 - DNA, 30 bp, Artificial Sequence
  Synthetic oligonucleotide
tacgcagattcgacgattgtcttttaggca

SEQ ID NO: 197666 - DNA, 30 bp, Artificial Sequence
  Synthetic oligonucleotide
agataattaccggggttgcaatcaacggca

SEQ ID NO: 197667 - DNA, 30 bp, Artificial Sequence
  Synthetic oligonucleotide
cgacctattgtgccggtcatatagacggca

SEQ ID NO: 197668 - DNA, 30 bp, Artificial Sequence
  Synthetic oligonucleotide
ggcggatggtagtcgctctcaaatacggca

SEQ ID NO: 197669 - DNA, 30 bp, Artificial Sequence
  Synthetic oligonucleotide
ggcagttccatgatgtgtccgggaccggca

SEQ ID NO: 197670 - DNA, 30 bp, Artificial Sequence
  Synthetic oligonucleotide
ttactaatacgattgcactggggaccggca

SEQ ID NO: 197671 - DNA, 30 bp, Artificial Sequence
  Synthetic oligonucleotide
ctattcgcccaattaaaatagtggccggca

SEQ ID NO: 197672 - DNA, 30 bp, Artificial Sequence
  Synthetic oligonucleotide
acggacaagcgtggtacctattatccggca

SEQ ID NO: 197673 - DNA, 30 bp, Artificial Sequence
  Synthetic oligonucleotide
agtgccgatcatggcgtgcccctagcggca

SEQ ID NO: 197674 - DNA, 30 bp, Artificial Sequence
  Synthetic oligonucleotide
tccgccagtataagtataatcagggcggca

SEQ ID NO: 197675 - DNA, 30 bp, Artificial Sequence
  Synthetic oligonucleotide
tttgttataggttcgagtaagcgggcggca

SEQ ID NO: 197676 - DNA, 30 bp, Artificial Sequence
  Synthetic oligonucleotide
gctctagcgaagaccccgttgttggcggca

SEQ ID NO: 197677 - DNA, 30 bp, Artificial Sequence
  Synthetic oligonucleotide
cggtaatgctgagactaatgccctgcggca

SEQ ID NO: 197678 - DNA, 30 bp, Artificial Sequence
  Synthetic oligonucleotide
agccagaccgttctccgagcagactcggca

SEQ ID NO: 197679 - DNA, 30 bp, Artificial Sequence
  Synthetic oligonucleotide
gctgacggtagattgtcattggagtcggca

SEQ ID NO: 197680 - DNA, 30 bp, Artificial Sequence
  Synthetic oligonucleotide
cgggctgtcgattcggggcaagggtcggca

SEQ ID NO: 197681 - DNA, 30 bp, Artificial Sequence
  Synthetic oligonucleotide
gtctgagagccggggaatcacaattcggca

SEQ ID NO: 197682 - DNA, 30 bp, Artificial Sequence
  Synthetic oligonucleotide
atgatttagagggggatgatagaaagggca

SEQ ID NO: 197683 - DNA, 30 bp, Artificial Sequence
  Synthetic oligonucleotide
gggagtaattacggacggcctgcgagggca

SEQ ID NO: 197684 - DNA, 30 bp, Artificial Sequence
  Synthetic oligonucleotide
tggccaggggattagcgggagcggagggca

SEQ ID NO: 197685 - DNA, 30 bp, Artificial Sequence
  Synthetic oligonucleotide
gtactctgtaaacgaattgactatagggca

SEQ ID NO: 197686 - DNA, 30 bp, Artificial Sequence
  Synthetic oligonucleotide
gtggactggcaaggactatggagtagggca

SEQ ID NO: 197687 - DNA, 30 bp, Artificial Sequence
  Synthetic oligonucleotide
actgggggttttgactagacggttagggca

SEQ ID NO: 197688 - DNA, 30 bp, Artificial Sequence
  Synthetic oligonucleotide
ttacggatatgttagaacactgaacgggca

SEQ ID NO: 197689 - DNA, 30 bp, Artificial Sequence
  Synthetic oligonucleotide
cgagtgatgattttgtaaaccttgcgggca

SEQ ID NO: 197690 - DNA, 30 bp, Artificial Sequence
  Synthetic oligonucleotide
taattggggaacatatctaaatttcgggca

SEQ ID NO: 197691 - DNA, 30 bp, Artificial Sequence
  Synthetic oligonucleotide
cttgcatgggatagggtatgttgaggggca

SEQ ID NO: 197692 - DNA, 30 bp, Artificial Sequence
  Synthetic oligonucleotide
cacagcgagtggccctcatagataggggca

SEQ ID NO: 197693 - DNA, 30 bp, Artificial Sequence
  Synthetic oligonucleotide
ggaatggctgggcaactcggagccggggca

SEQ ID NO: 197694 - DNA, 30 bp, Artificial Sequence
  Synthetic oligonucleotide
ggttcggttagtggacctcccttgggggca

SEQ ID NO: 197695 - DNA, 30 bp, Artificial Sequence
  Synthetic oligonucleotide
tctagccggccattctgcttggatggggca

SEQ ID NO: 197696 - DNA, 30 bp, Artificial Sequence
  Synthetic oligonucleotide
tccactccgtcgacacacccatctggggca

SEQ ID NO: 197697 - DNA, 30 bp, Artificial Sequence
  Synthetic oligonucleotide
agactgctagcctattatttaattggggca

SEQ ID NO: 197698 - DNA, 30 bp, Artificial Sequence
  Synthetic oligonucleotide
taagatacacgttcaagacatacctgggca

SEQ ID NO: 197699 - DNA, 30 bp, Artificial Sequence
  Synthetic oligonucleotide
tctcgaaacactcacctgtggcgctgggca

SEQ ID NO: 197700 - DNA, 30 bp, Artificial Sequence
  Synthetic oligonucleotide
gatagtgccaactaactcagtctctgggca

SEQ ID NO: 197701 - DNA, 30 bp, Artificial Sequence
  Synthetic oligonucleotide
ataatgtcaaagaacaatttaccgtgggca

SEQ ID NO: 197702 - DNA, 30 bp, Artificial Sequence
  Synthetic oligonucleotide
cacgctaccgtgggtctcgtaaggtgggca

SEQ ID NO: 197703 - DNA, 30 bp, Artificial Sequence
  Synthetic oligonucleotide
tcaattctgcgaggcgtaaaggggtgggca

SEQ ID NO: 197704 - DNA, 30 bp, Artificial Sequence
  Synthetic oligonucleotide
cagtgtacgggctccgcgacggccatggca

SEQ ID NO: 197705 - DNA, 30 bp, Artificial Sequence
  Synthetic oligonucleotide
gtcaatccactatggagttcggtcatggca

SEQ ID NO: 197706 - DNA, 30 bp, Artificial Sequence
  Synthetic oligonucleotide
gcattttggcagaaccctgatgtcatggca

SEQ ID NO: 197707 - DNA, 30 bp, Artificial Sequence
  Synthetic oligonucleotide
ccgctagagtctgaatcgcggaagatggca

SEQ ID NO: 197708 - DNA, 30 bp, Artificial Sequence
  Synthetic oligonucleotide
tatagacaatatcgatcagggcctctggca

SEQ ID NO: 197709 - DNA, 30 bp, Artificial Sequence
  Synthetic oligonucleotide
caggatatcgggatgactctaggagtggca

SEQ ID NO: 197710 - DNA, 30 bp, Artificial Sequence
  Synthetic oligonucleotide
caagggggggaaccctactgtagcgtggca

SEQ ID NO: 197711 - DNA, 30 bp, Artificial Sequence
  Synthetic oligonucleotide
ccgatgactatggaaagtcggaaggtggca

SEQ ID NO: 197712 - DNA, 30 bp, Artificial Sequence
  Synthetic oligonucleotide
tgcttgtgagttctatctgttagggtggca

SEQ ID NO: 197713 - DNA, 30 bp, Artificial Sequence
  Synthetic oligonucleotide
actcacgtaatgcccctgtgcggggtggca

SEQ ID NO: 197714 - DNA, 30 bp, Artificial Sequence
  Synthetic oligonucleotide
tcagctgccactaccgaaaatggggtggca

SEQ ID NO: 197715 - DNA, 30 bp, Artificial Sequence
  Synthetic oligonucleotide
caaatccgagacggacaccgataattggca

SEQ ID NO: 197716 - DNA, 30 bp, Artificial Sequence
  Synthetic oligonucleotide
acggtgggaaaatttgagtaaagattggca

SEQ ID NO: 197717 - DNA, 30 bp, Artificial Sequence
  Synthetic oligonucleotide
agaagttgtcggtggagcctcacgttggca

SEQ ID NO: 197718 - DNA, 30 bp, Artificial Sequence
  Synthetic oligonucleotide
aggggggagcgagtcatcgggtttttggca

SEQ ID NO: 197719 - DNA, 30 bp, Artificial Sequence
  Synthetic oligonucleotide
tgcacatcttaatttgttcgtagaaatgca

SEQ ID NO: 197720 - DNA, 30 bp, Artificial Sequence
  Synthetic oligonucleotide
ctaggaaatgccctggactgcttcaatgca

SEQ ID NO: 197721 - DNA, 30 bp, Artificial Sequence
  Synthetic oligonucleotide
taatagccagcgccattgggacggaatgca

SEQ ID NO: 197722 - DNA, 30 bp, Artificial Sequence
  Synthetic oligonucleotide
ttaaacataatttagcctgagaataatgca

SEQ ID NO: 197723 - DNA, 30 bp, Artificial Sequence
  Synthetic oligonucleotide
gatcagccgtcgagcgactcagttaatgca

SEQ ID NO: 197724 - DNA, 30 bp, Artificial Sequence
  Synthetic oligonucleotide
cgtccgtgagctataaatgttgaacatgca

SEQ ID NO: 197725 - DNA, 30 bp, Artificial Sequence
  Synthetic oligonucleotide
tcgttgcccacgcacctatctgcacatgca

SEQ ID NO: 197726 - DNA, 30 bp, Artificial Sequence
  Synthetic oligonucleotide
ggcatatctgaatcgcgaataggacatgca

SEQ ID NO: 197727 - DNA, 30 bp, Artificial Sequence
  Synthetic oligonucleotide
aggtggtaataaaaaagctccatacatgca

SEQ ID NO: 197728 - DNA, 30 bp, Artificial Sequence
  Synthetic oligonucleotide
atagacgacaagtctctaacagtacatgca

SEQ ID NO: 197729 - DNA, 30 bp, Artificial Sequence
  Synthetic oligonucleotide
aactatacgtggtttgtcgatacccatgca

SEQ ID NO: 197730 - DNA, 30 bp, Artificial Sequence
  Synthetic oligonucleotide
agacgatctaggagtaattggggccatgca

SEQ ID NO: 197731 - DNA, 30 bp, Artificial Sequence
  Synthetic oligonucleotide
attgcgagcatcttcaaaacaatgcatgca

SEQ ID NO: 197732 - DNA, 30 bp, Artificial Sequence
  Synthetic oligonucleotide
cttccaacgggtcgttgtcggaatcatgca

SEQ ID NO: 197733 - DNA, 30 bp, Artificial Sequence
  Synthetic oligonucleotide
catacccgctgcccgaggtctgatcatgca

SEQ ID NO: 197734 - DNA, 30 bp, Artificial Sequence
  Synthetic oligonucleotide
aggtgattctaatattttagcgaagatgca

SEQ ID NO: 197735 - DNA, 30 bp, Artificial Sequence
  Synthetic oligonucleotide
agtcatgaaatgcggttatatatggatgca

SEQ ID NO: 197736 - DNA, 30 bp, Artificial Sequence
  Synthetic oligonucleotide
gagaagaattagactacccgtaatgatgca

SEQ ID NO: 197737 - DNA, 30 bp, Artificial Sequence
  Synthetic oligonucleotide
atgggcgaaattagaacccgttgtgatgca

SEQ ID NO: 197738 - DNA, 30 bp, Artificial Sequence
  Synthetic oligonucleotide
attattgatctcgttcgaccgtcctatgca

SEQ ID NO: 197739 - DNA, 30 bp, Artificial Sequence
  Synthetic oligonucleotide
accatattaggagatacagatataactgca

SEQ ID NO: 197740 - DNA, 30 bp, Artificial Sequence
  Synthetic oligonucleotide
tcatcaacccttcgtcaacagttaactgca

SEQ ID NO: 197741 - DNA, 30 bp, Artificial Sequence
  Synthetic oligonucleotide
taaagggttatcgtgaggatggtcactgca

SEQ ID NO: 197742 - DNA, 30 bp, Artificial Sequence
  Synthetic oligonucleotide
tcagaccgtcatggttcacttgtcactgca

SEQ ID NO: 197743 - DNA, 30 bp, Artificial Sequence
  Synthetic oligonucleotide
ggatacgaagcgtccagtttgacgactgca

SEQ ID NO: 197744 - DNA, 30 bp, Artificial Sequence
  Synthetic oligonucleotide
gtagtgcctctccgattacacgcgactgca

SEQ ID NO: 197745 - DNA, 30 bp, Artificial Sequence
  Synthetic oligonucleotide
aggtgggggctgtaacgctttaggactgca

SEQ ID NO: 197746 - DNA, 30 bp, Artificial Sequence
  Synthetic oligonucleotide
tgaaatgcaaaggacaactgctgtactgca

SEQ ID NO: 197747 - DNA, 30 bp, Artificial Sequence
  Synthetic oligonucleotide
aggtctaggcgtagcacgtcccttactgca

SEQ ID NO: 197748 - DNA, 30 bp, Artificial Sequence
  Synthetic oligonucleotide
gctttggatcggactctttagtgacctgca

SEQ ID NO: 197749 - DNA, 30 bp, Artificial Sequence
  Synthetic oligonucleotide
agcacattatcgtgataggaggtacctgca

SEQ ID NO: 197750 - DNA, 30 bp, Artificial Sequence
  Synthetic oligonucleotide
gccaaatgggcgaggtacttaagccctgca

SEQ ID NO: 197751 - DNA, 30 bp, Artificial Sequence
  Synthetic oligonucleotide
taaaggacgtaccctcgggggcagcctgca

SEQ ID NO: 197752 - DNA, 30 bp, Artificial Sequence
  Synthetic oligonucleotide
attgccagcgacaatttccacacgcctgca

SEQ ID NO: 197753 - DNA, 30 bp, Artificial Sequence
  Synthetic oligonucleotide
cgctaactgtagaacgcttgatatcctgca

SEQ ID NO: 197754 - DNA, 30 bp, Artificial Sequence
  Synthetic oligonucleotide
atgatacgcacgcgccatccgtatcctgca

SEQ ID NO: 197755 - DNA, 30 bp, Artificial Sequence
  Synthetic oligonucleotide
tggatgctataatgtcaaacttatcctgca

SEQ ID NO: 197756 - DNA, 30 bp, Artificial Sequence
  Synthetic oligonucleotide
gaggagagcgcgcctttagacccagctgca

SEQ ID NO: 197757 - DNA, 30 bp, Artificial Sequence
  Synthetic oligonucleotide
ggcaccttcagttgacgatccatggctgca

SEQ ID NO: 197758 - DNA, 30 bp, Artificial Sequence
  Synthetic oligonucleotide
cagtgatgataataataaatatctgctgca

SEQ ID NO: 197759 - DNA, 30 bp, Artificial Sequence
  Synthetic oligonucleotide
gatccttagcgttaaagtagcattgctgca

SEQ ID NO: 197760 - DNA, 30 bp, Artificial Sequence
  Synthetic oligonucleotide
gacagacacagacagctaacaacatctgca

SEQ ID NO: 197761 - DNA, 30 bp, Artificial Sequence
  Synthetic oligonucleotide
tggatttcgatcacatcaatctgatctgca

SEQ ID NO: 197762 - DNA, 30 bp, Artificial Sequence
  Synthetic oligonucleotide
tgatacggtcagtttgtccataactctgca

SEQ ID NO: 197763 - DNA, 30 bp, Artificial Sequence
  Synthetic oligonucleotide
tctgttagtctttcgtccacatattctgca

SEQ ID NO: 197764 - DNA, 30 bp, Artificial Sequence
  Synthetic oligonucleotide
ccgtacatgtcttgctcgcaacgttctgca

SEQ ID NO: 197765 - DNA, 30 bp, Artificial Sequence
  Synthetic oligonucleotide
taaaaaaaagaatcttgcgtttggagtgca

SEQ ID NO: 197766 - DNA, 29 bp, Artificial Sequence
  Synthetic oligonucleotide
ggtggtgccccttgtagtccagtagtgca

SEQ ID NO: 197767 - DNA, 30 bp, Artificial Sequence
  Synthetic oligonucleotide
gggggacaagaaccattaaggtttagtgca

SEQ ID NO: 197768 - DNA, 30 bp, Artificial Sequence
  Synthetic oligonucleotide
gattggacgaatgcgtgtagtaaacgtgca

SEQ ID NO: 197769 - DNA, 30 bp, Artificial Sequence
  Synthetic oligonucleotide
agctccgcaagggcaaaagcgcaacgtgca

SEQ ID NO: 197770 - DNA, 30 bp, Artificial Sequence
  Synthetic oligonucleotide
gtaccagtaacggggccattgtgccgtgca

SEQ ID NO: 197771 - DNA, 30 bp, Artificial Sequence
  Synthetic oligonucleotide
attaccagttaagatagaataaggcgtgca

SEQ ID NO: 197772 - DNA, 30 bp, Artificial Sequence
  Synthetic oligonucleotide
gcccaaatgatctctggctgtcttcgtgca

SEQ ID NO: 197773 - DNA, 30 bp, Artificial Sequence
  Synthetic oligonucleotide
ttgagaataagatgaacataaaacggtgca

SEQ ID NO: 197774 - DNA, 30 bp, Artificial Sequence
  Synthetic oligonucleotide
gccgtcgattctcataacaggcagggtgca

SEQ ID NO: 197775 - DNA, 30 bp, Artificial Sequence
  Synthetic oligonucleotide
tctacccacccggagtataactggggtgca

SEQ ID NO: 197776 - DNA, 30 bp, Artificial Sequence
  Synthetic oligonucleotide
gcggacgtgcgtactacgacctggggtgca

SEQ ID NO: 197777 - DNA, 30 bp, Artificial Sequence
  Synthetic oligonucleotide
acgccaaaatatcgggctcattttggtgca

SEQ ID NO: 197778 - DNA, 30 bp, Artificial Sequence
  Synthetic oligonucleotide
tctcaggagctgatatctttgcgatgtgca

SEQ ID NO: 197779 - DNA, 30 bp, Artificial Sequence
  Synthetic oligonucleotide
tactaagtcatcatgtaagtacactgtgca

SEQ ID NO: 197780 - DNA, 30 bp, Artificial Sequence
  Synthetic oligonucleotide
tgaagactcacacgactgtgtaagtgtgca

SEQ ID NO: 197781 - DNA, 30 bp, Artificial Sequence
  Synthetic oligonucleotide
tagttactctgtgatagctcgctgtgtgca

SEQ ID NO: 197782 - DNA, 30 bp, Artificial Sequence
  Synthetic oligonucleotide
gacgcgcgctatccagtgtgcataattgca

SEQ ID NO: 197783 - DNA, 30 bp, Artificial Sequence
  Synthetic oligonucleotide
ccgtgacttctgtgtaagttactaattgca

SEQ ID NO: 197784 - DNA, 30 bp, Artificial Sequence
  Synthetic oligonucleotide
atgccggtccaagctgaatccgatcttgca

SEQ ID NO: 197785 - DNA, 30 bp, Artificial Sequence
  Synthetic oligonucleotide
tctaagattggagtggtgactactcttgca

SEQ ID NO: 197786 - DNA, 30 bp, Artificial Sequence
  Synthetic oligonucleotide
gcgggaagcatgcgccctgaaattcttgca

SEQ ID NO: 197787 - DNA, 30 bp, Artificial Sequence
  Synthetic oligonucleotide
gcacttgatatcccgatgtgacaagttgca

SEQ ID NO: 197788 - DNA, 30 bp, Artificial Sequence
  Synthetic oligonucleotide
ccaggggtcatgacacgacccgtagttgca

SEQ ID NO: 197789 - DNA, 30 bp, Artificial Sequence
  Synthetic oligonucleotide
cgaaacctaagaataactcgcagtgttgca

SEQ ID NO: 197790 - DNA, 30 bp, Artificial Sequence
  Synthetic oligonucleotide
tgaatgagccacgaagcgcgcgaatttgca

SEQ ID NO: 197791 - DNA, 30 bp, Artificial Sequence
  Synthetic oligonucleotide
ggtcaaacacggacctaactttgctttgca

SEQ ID NO: 197792 - DNA, 30 bp, Artificial Sequence
  Synthetic oligonucleotide
gccatcgatgcaagtaccagcgcttttgca

SEQ ID NO: 197793 - DNA, 30 bp, Artificial Sequence
  Synthetic oligonucleotide
cgtttgagcggtaagggtccttaaaaatca

SEQ ID NO: 197794 - DNA, 30 bp, Artificial Sequence
  Synthetic oligonucleotide
cggttaaaccttcgaagtgaaataaaatca

SEQ ID NO: 197795 - DNA, 30 bp, Artificial Sequence
  Synthetic oligonucleotide
atgaggagcagggttgtttcgttaaaatca

SEQ ID NO: 197796 - DNA, 30 bp, Artificial Sequence
  Synthetic oligonucleotide
ccactggctatcggcgccattcccaaatca

SEQ ID NO: 197797 - DNA, 30 bp, Artificial Sequence
  Synthetic oligonucleotide
gtggagcgaacatcgaaactttagaaatca

SEQ ID NO: 197798 - DNA, 30 bp, Artificial Sequence
  Synthetic oligonucleotide
aacgtagccctgaccgtctacttgaaatca

SEQ ID NO: 197799 - DNA, 30 bp, Artificial Sequence
  Synthetic oligonucleotide
cttctgctccgatcccaaacacctaaatca

SEQ ID NO: 197800 - DNA, 30 bp, Artificial Sequence
  Synthetic oligonucleotide
tggggtgtgtagaatgcaagttaacaatca

SEQ ID NO: 197801 - DNA, 30 bp, Artificial Sequence
  Synthetic oligonucleotide
catcctacattatggtggaagccacaatca

SEQ ID NO: 197802 - DNA, 30 bp, Artificial Sequence
  Synthetic oligonucleotide
tccagtcgctcacgaccttggatacaatca

SEQ ID NO: 197803 - DNA, 30 bp, Artificial Sequence
  Synthetic oligonucleotide
acttgcgttggcgacataaatcgccaatca

SEQ ID NO: 197804 - DNA, 30 bp, Artificial Sequence
  Synthetic oligonucleotide
cagtgactcatgacgcattccgttcaatca

SEQ ID NO: 197805 - DNA, 30 bp, Artificial Sequence
  Synthetic oligonucleotide
cattgttagcataaacggtatgttcaatca

SEQ ID NO: 197806 - DNA, 30 bp, Artificial Sequence
  Synthetic oligonucleotide
ctcgctaccttagatcagagagcagaatca

SEQ ID NO: 197807 - DNA, 30 bp, Artificial Sequence
  Synthetic oligonucleotide
aacctatttaaacgaggccggagagaatca

SEQ ID NO: 197808 - DNA, 30 bp, Artificial Sequence
  Synthetic oligonucleotide
agaggcacgtcctattcacagggcgaatca

SEQ ID NO: 197809 - DNA, 30 bp, Artificial Sequence
  Synthetic oligonucleotide
gacacgtattttacgagggtcatcgaatca

SEQ ID NO: 197810 - DNA, 30 bp, Artificial Sequence
  Synthetic oligonucleotide
atgctggtacgctcacggtagagggaatca

SEQ ID NO: 197811 - DNA, 30 bp, Artificial Sequence
  Synthetic oligonucleotide
gtccatgtaaactaagcttaatgtgaatca

SEQ ID NO: 197812 - DNA, 30 bp, Artificial Sequence
  Synthetic oligonucleotide
acaacctaaaaaaaggtcggctaataatca

SEQ ID NO: 197813 - DNA, 30 bp, Artificial Sequence
  Synthetic oligonucleotide
gggcatataacacctgatgttatctaatca

SEQ ID NO: 197814 - DNA, 30 bp, Artificial Sequence
  Synthetic oligonucleotide
caagagccctcaatataaggctgttaatca

SEQ ID NO: 197815 - DNA, 30 bp, Artificial Sequence
  Synthetic oligonucleotide
cgacccacacaatgctcggacgcaacatca

SEQ ID NO: 197816 - DNA, 30 bp, Artificial Sequence
  Synthetic oligonucleotide
tcattggtcgtttaggtacttttaacatca

SEQ ID NO: 197817 - DNA, 30 bp, Artificial Sequence
  Synthetic oligonucleotide
acgaacgccggtaattatgaatacacatca

SEQ ID NO: 197818 - DNA, 30 bp, Artificial Sequence
  Synthetic oligonucleotide
tcaatcgtttctgatctccggatcacatca

SEQ ID NO: 197819 - DNA, 30 bp, Artificial Sequence
  Synthetic oligonucleotide
tatagcggaaaaccgcctgtatcgacatca

SEQ ID NO: 197820 - DNA, 30 bp, Artificial Sequence
  Synthetic oligonucleotide
agtgtcttgggttaagttaagtggacatca

SEQ ID NO: 197821 - DNA, 30 bp, Artificial Sequence
  Synthetic oligonucleotide
caggaggttcaggagcaatcagatacatca

SEQ ID NO: 197822 - DNA, 30 bp, Artificial Sequence
  Synthetic oligonucleotide
gcaatccgaaatcgactttccgctacatca

SEQ ID NO: 197823 - DNA, 30 bp, Artificial Sequence
  Synthetic oligonucleotide
acttgaatggacgatgccgtatctacatca

SEQ ID NO: 197824 - DNA, 30 bp, Artificial Sequence
  Synthetic oligonucleotide
aggggcgttgggtaggtgttcgttacatca

SEQ ID NO: 197825 - DNA, 30 bp, Artificial Sequence
  Synthetic oligonucleotide
acaatatacacacgaatggccaaaccatca

SEQ ID NO: 197826 - DNA, 30 bp, Artificial Sequence
  Synthetic oligonucleotide
tcatttactttactgtgcggatccccatca

SEQ ID NO: 197827 - DNA, 30 bp, Artificial Sequence
  Synthetic oligonucleotide
gatcgatgtgcgattacaaataagccatca

SEQ ID NO: 197828 - DNA, 30 bp, Artificial Sequence
  Synthetic oligonucleotide
tttaacaggacgttcaatatggagccatca

SEQ ID NO: 197829 - DNA, 30 bp, Artificial Sequence
  Synthetic oligonucleotide
ccgcttctaggtcaggagtccactccatca

SEQ ID NO: 197830 - DNA, 30 bp, Artificial Sequence
  Synthetic oligonucleotide
tcgggtccaatttagcgggtatcagcatca

SEQ ID NO: 197831 - DNA, 30 bp, Artificial Sequence
  Synthetic oligonucleotide
ccgttgaaaccagaaaatgacaccgcatca

SEQ ID NO: 197832 - DNA, 30 bp, Artificial Sequence
  Synthetic oligonucleotide
acccgggacccgaaagtaacccgcgcatca

SEQ ID NO: 197833 - DNA, 30 bp, Artificial Sequence
  Synthetic oligonucleotide
ccagacttaggttgggatatgacggcatca

SEQ ID NO: 197834 - DNA, 30 bp, Artificial Sequence
  Synthetic oligonucleotide
agtttgatccgcacgtcgtcatcggcatca

SEQ ID NO: 197835 - DNA, 30 bp, Artificial Sequence
  Synthetic oligonucleotide
acgtcttaagggttcggggggtttgcatca

SEQ ID NO: 197836 - DNA, 30 bp, Artificial Sequence
  Synthetic oligonucleotide
caaggaacggaagtttgaacttcctcatca

SEQ ID NO: 197837 - DNA, 29 bp, Artificial Sequence
  Synthetic oligonucleotide
agtctctgagtagtcgagccagctcatca

SEQ ID NO: 197838 - DNA, 30 bp, Artificial Sequence
  Synthetic oligonucleotide
cgttgtctgtggttgaggcctatttcatca

SEQ ID NO: 197839 - DNA, 30 bp, Artificial Sequence
  Synthetic oligonucleotide
ttgagcagatagagcacgtcgcacagatca

SEQ ID NO: 197840 - DNA, 30 bp, Artificial Sequence
  Synthetic oligonucleotide
ctggtaggcaaaggtctggacaccagatca

SEQ ID NO: 197841 - DNA, 30 bp, Artificial Sequence
  Synthetic oligonucleotide
gcgctacgcttgaaatatgtttgcagatca

SEQ ID NO: 197842 - DNA, 30 bp, Artificial Sequence
  Synthetic oligonucleotide
aatgcctatctggtaggtcgagcgagatca

SEQ ID NO: 197843 - DNA, 30 bp, Artificial Sequence
  Synthetic oligonucleotide
aatacccgcgtgcagttaaaagatagatca

SEQ ID NO: 197844 - DNA, 30 bp, Artificial Sequence
  Synthetic oligonucleotide
tacttaccagccaatccgaaaagacgatca

SEQ ID NO: 197845 - DNA, 30 bp, Artificial Sequence
  Synthetic oligonucleotide
agattggaaataccaagataatgacgatca

SEQ ID NO: 197846 - DNA, 30 bp, Artificial Sequence
  Synthetic oligonucleotide
tgcgcgattctgcgcccgccgttacgatca

SEQ ID NO: 197847 - DNA, 30 bp, Artificial Sequence
  Synthetic oligonucleotide
ttactgattgccatggataagcgccgatca

SEQ ID NO: 197848 - DNA, 30 bp, Artificial Sequence
  Synthetic oligonucleotide
acgcgtatggttatttttcgtcgtcgatca

SEQ ID NO: 197849 - DNA, 30 bp, Artificial Sequence
  Synthetic oligonucleotide
agctagagtccgattctctcgaccggatca

SEQ ID NO: 197850 - DNA, 30 bp, Artificial Sequence
  Synthetic oligonucleotide
acgttgctgttatagcaactaggtggatca

SEQ ID NO: 197851 - DNA, 30 bp, Artificial Sequence
  Synthetic oligonucleotide
gcatacaacaggggttaagtaggctgatca

SEQ ID NO: 197852 - DNA, 30 bp, Artificial Sequence
  Synthetic oligonucleotide
caattgactatgactgctgctaagtgatca

SEQ ID NO: 197853 - DNA, 30 bp, Artificial Sequence
  Synthetic oligonucleotide
tttcggtagttaggtcaagttcggtgatca

SEQ ID NO: 197854 - DNA, 30 bp, Artificial Sequence
  Synthetic oligonucleotide
cggttcgtggtatgcaacgtttggtgatca

SEQ ID NO: 197855 - DNA, 30 bp, Artificial Sequence
  Synthetic oligonucleotide
tgttataacagttaatagaaagaaatatca

SEQ ID NO: 197856 - DNA, 30 bp, Artificial Sequence
  Synthetic oligonucleotide
aatgcgagggcccggacgtatggcatatca

SEQ ID NO: 197857 - DNA, 30 bp, Artificial Sequence
  Synthetic oligonucleotide
gattggggtcgacatggcgcatagatatca

SEQ ID NO: 197858 - DNA, 30 bp, Artificial Sequence
  Synthetic oligonucleotide
aacgttagtaatagaccctggacgatatca

SEQ ID NO: 197859 - DNA, 30 bp, Artificial Sequence
  Synthetic oligonucleotide
gtaggactgtacattggtggagcgatatca

SEQ ID NO: 197860 - DNA, 30 bp, Artificial Sequence
  Synthetic oligonucleotide
catagccctttgcgtacttgcgaagtatca

SEQ ID NO: 197861 - DNA, 30 bp, Artificial Sequence
  Synthetic oligonucleotide
ttaagcaagcggcgattaagcccagtatca

SEQ ID NO: 197862 - DNA, 30 bp, Artificial Sequence
  Synthetic oligonucleotide
gtcaaaaagcattatactttgactgtatca

SEQ ID NO: 197863 - DNA, 30 bp, Artificial Sequence
  Synthetic oligonucleotide
agtgcggcgcaaataaaggggcaaaactca

SEQ ID NO: 197864 - DNA, 30 bp, Artificial Sequence
  Synthetic oligonucleotide
gggaccaccttactcggcacgccaaactca

SEQ ID NO: 197865 - DNA, 30 bp, Artificial Sequence
  Synthetic oligonucleotide
ctacggtggtgaccggcttcgctaaactca

SEQ ID NO: 197866 - DNA, 30 bp, Artificial Sequence
  Synthetic oligonucleotide
taagatgcaggtgaaatcgcccacaactca

SEQ ID NO: 197867 - DNA, 30 bp, Artificial Sequence
  Synthetic oligonucleotide
gcgttgtgtcattaggtgtgtgggcactca

SEQ ID NO: 197868 - DNA, 30 bp, Artificial Sequence
  Synthetic oligonucleotide
gaacgagggcggcaagtcgttcaagactca

SEQ ID NO: 197869 - DNA, 30 bp, Artificial Sequence
  Synthetic oligonucleotide
taacccgcgtaagacacgagtacagactca

SEQ ID NO: 197870 - DNA, 30 bp, Artificial Sequence
  Synthetic oligonucleotide
aaaccagtatagcacgtaaagtcagactca

SEQ ID NO: 197871 - DNA, 30 bp, Artificial Sequence
  Synthetic oligonucleotide
ttggtgttaccactagtttccaatgactca

SEQ ID NO: 197872 - DNA, 30 bp, Artificial Sequence
  Synthetic oligonucleotide
aggaaaatctagtgtttgctgcatgactca

SEQ ID NO: 197873 - DNA, 30 bp, Artificial Sequence
  Synthetic oligonucleotide
agtgagctgggtacagggttagatgactca

SEQ ID NO: 197874 - DNA, 30 bp, Artificial Sequence
  Synthetic oligonucleotide
tggacatactatgtacgattccgtgactca

SEQ ID NO: 197875 - DNA, 30 bp, Artificial Sequence
  Synthetic oligonucleotide
aggacagttacttagacgccggactactca

SEQ ID NO: 197876 - DNA, 30 bp, Artificial Sequence
  Synthetic oligonucleotide
aaccatgtcggagttcataaaagttactca

SEQ ID NO: 197877 - DNA, 30 bp, Artificial Sequence
  Synthetic oligonucleotide
ctctgtgtttagagatacaactcaacctca

SEQ ID NO: 197878 - DNA, 30 bp, Artificial Sequence
  Synthetic oligonucleotide
atcgtagactgcggaacgatgtgaacctca

SEQ ID NO: 197879 - DNA, 30 bp, Artificial Sequence
  Synthetic oligonucleotide
cttaattaagtggtcgctaatgttacctca

SEQ ID NO: 197880 - DNA, 30 bp, Artificial Sequence
  Synthetic oligonucleotide
gattaccctgaaaaagcaaaggcaccctca

SEQ ID NO: 197881 - DNA, 30 bp, Artificial Sequence
  Synthetic oligonucleotide
tcgacgaaaacgtacagtttaggtccctca

SEQ ID NO: 197882 - DNA, 30 bp, Artificial Sequence
  Synthetic oligonucleotide
gttaaacgcagtgggacattcggatcctca

SEQ ID NO: 197883 - DNA, 30 bp, Artificial Sequence
  Synthetic oligonucleotide
cttgcaccaacgtgcgtatggcaaagctca

SEQ ID NO: 197884 - DNA, 30 bp, Artificial Sequence
  Synthetic oligonucleotide
ccttaaataatgtgattcatggggagctca

SEQ ID NO: 197885 - DNA, 30 bp, Artificial Sequence
  Synthetic oligonucleotide
caagctccgtgaatcgacggttatagctca

SEQ ID NO: 197886 - DNA, 30 bp, Artificial Sequence
  Synthetic oligonucleotide
ttggagtggcaattagtcccgctacgctca

SEQ ID NO: 197887 - DNA, 30 bp, Artificial Sequence
  Synthetic oligonucleotide
ccgcgcgttcccaatgggggtgtacgctca

SEQ ID NO: 197888 - DNA, 30 bp, Artificial Sequence
  Synthetic oligonucleotide
cgtactgacccattgtcaagtacaggctca

SEQ ID NO: 197889 - DNA, 30 bp, Artificial Sequence
  Synthetic oligonucleotide
cgataggaaaatgatctcagcgttggctca

SEQ ID NO: 197890 - DNA, 30 bp, Artificial Sequence
  Synthetic oligonucleotide
tgtatggagacaagacttgtgtgatgctca

SEQ ID NO: 197891 - DNA, 30 bp, Artificial Sequence
  Synthetic oligonucleotide
caccaggccgagggctacccggtctgctca

SEQ ID NO: 197892 - DNA, 30 bp, Artificial Sequence
  Synthetic oligonucleotide
tatcagccggggctatctggaaacatctca

SEQ ID NO: 197893 - DNA, 30 bp, Artificial Sequence
  Synthetic oligonucleotide
ttatatggccgcaggtacatcgccatctca

SEQ ID NO: 197894 - DNA, 31 bp, Artificial Sequence
  Synthetic oligonucleotide
aggagtgggatcccccagtaactccatctca

SEQ ID NO: 197895 - DNA, 30 bp, Artificial Sequence
  Synthetic oligonucleotide
agaactccagatttcgagaataagatctca

SEQ ID NO: 197896 - DNA, 30 bp, Artificial Sequence
  Synthetic oligonucleotide
gcactagaactgctcactaatgtgatctca

SEQ ID NO: 197897 - DNA, 30 bp, Artificial Sequence
  Synthetic oligonucleotide
tcgacttcaatttgttaattacgtatctca

SEQ ID NO: 197898 - DNA, 30 bp, Artificial Sequence
  Synthetic oligonucleotide
actggcccccctgcggcgagaaccctctca

SEQ ID NO: 197899 - DNA, 30 bp, Artificial Sequence
  Synthetic oligonucleotide
ttaggagtctagacaccatgacccctctca

SEQ ID NO: 197900 - DNA, 30 bp, Artificial Sequence
  Synthetic oligonucleotide
taaaagatgcgtgtttggatgaatctctca

SEQ ID NO: 197901 - DNA, 30 bp, Artificial Sequence
  Synthetic oligonucleotide
cactaccgcccagctcgcgacggtctctca

SEQ ID NO: 197902 - DNA, 30 bp, Artificial Sequence
  Synthetic oligonucleotide
agtgaaagagagcaggttgggtgtctctca

SEQ ID NO: 197903 - DNA, 30 bp, Artificial Sequence
  Synthetic oligonucleotide
actgaaaaagtgctcaactcgccagtctca

SEQ ID NO: 197904 - DNA, 30 bp, Artificial Sequence
  Synthetic oligonucleotide
caaactaaggaatgaactagagaattctca

SEQ ID NO: 197905 - DNA, 30 bp, Artificial Sequence
  Synthetic oligonucleotide
gcaagaattcttgagggaataccattctca

SEQ ID NO: 197906 - DNA, 30 bp, Artificial Sequence
  Synthetic oligonucleotide
agaatcttagaaggaggattctgcttctca

SEQ ID NO: 197907 - DNA, 30 bp, Artificial Sequence
  Synthetic oligonucleotide
atggcttgcgtcggcgctacaccgttctca

SEQ ID NO: 197908 - DNA, 30 bp, Artificial Sequence
  Synthetic oligonucleotide
aaaaggggcaaacgagtatcgactttctca

SEQ ID NO: 197909 - DNA, 30 bp, Artificial Sequence
  Synthetic oligonucleotide
tggtagcaaggatgaagcttccgtttctca

SEQ ID NO: 197910 - DNA, 30 bp, Artificial Sequence
  Synthetic oligonucleotide
gcccaattatcgatgtcggaaggtttctca

SEQ ID NO: 197911 - DNA, 30 bp, Artificial Sequence
  Synthetic oligonucleotide
tcgaaaccaataatcacgtgggttttctca

SEQ ID NO: 197912 - DNA, 30 bp, Artificial Sequence
  Synthetic oligonucleotide
ataacctgttacccgttcccggcacagtca

SEQ ID NO: 197913 - DNA, 30 bp, Artificial Sequence
  Synthetic oligonucleotide
ttcgggggttgccgaaagcgatcacagtca

SEQ ID NO: 197914 - DNA, 30 bp, Artificial Sequence
  Synthetic oligonucleotide
tgcgtgaggcagccggaaggaggccagtca

SEQ ID NO: 197915 - DNA, 30 bp, Artificial Sequence
  Synthetic oligonucleotide
atgagaatcgcgttctgttatggccagtca

SEQ ID NO: 197916 - DNA, 30 bp, Artificial Sequence
  Synthetic oligonucleotide
caggccgggatctggtcctattcagagtca

SEQ ID NO: 197917 - DNA, 30 bp, Artificial Sequence
  Synthetic oligonucleotide
acgccaacgtcttgcatgagtcgagagtca

SEQ ID NO: 197918 - DNA, 30 bp, Artificial Sequence
  Synthetic oligonucleotide
taagctcgagaaggatttagaccggagtca

SEQ ID NO: 197919 - DNA, 30 bp, Artificial Sequence
  Synthetic oligonucleotide
gccacttgcattagttggatcccggagtca

SEQ ID NO: 197920 - DNA, 30 bp, Artificial Sequence
  Synthetic oligonucleotide
gggggaaaacagtattatcggggtgagtca

SEQ ID NO: 197921 - DNA, 30 bp, Artificial Sequence
  Synthetic oligonucleotide
cgggcgtacttgacaacgacttgatagtca

SEQ ID NO: 197922 - DNA, 30 bp, Artificial Sequence
  Synthetic oligonucleotide
gcgggcaggttttgacagcccatatagtca

SEQ ID NO: 197923 - DNA, 30 bp, Artificial Sequence
  Synthetic oligonucleotide
caaggggtagctcttcagattgagtagtca

SEQ ID NO: 197924 - DNA, 30 bp, Artificial Sequence
  Synthetic oligonucleotide
aaaccgagaactggataaccaataacgtca

SEQ ID NO: 197925 - DNA, 30 bp, Artificial Sequence
  Synthetic oligonucleotide
tcccacagcatagaggtttgcgacacgtca

SEQ ID NO: 197926 - DNA, 30 bp, Artificial Sequence
  Synthetic oligonucleotide
ttgcgtaaggtatcgtataaggtcacgtca

SEQ ID NO: 197927 - DNA, 30 bp, Artificial Sequence
  Synthetic oligonucleotide
gtagataaaacactgttgggcgaaccgtca

SEQ ID NO: 197928 - DNA, 30 bp, Artificial Sequence
  Synthetic oligonucleotide
gatttcacacactgcaaaagcccaccgtca

SEQ ID NO: 197929 - DNA, 30 bp, Artificial Sequence
  Synthetic oligonucleotide
tggttctatccgtcgtccacagggccgtca

SEQ ID NO: 197930 - DNA, 30 bp, Artificial Sequence
  Synthetic oligonucleotide
agtgtatggctgcagatcagcagtccgtca

SEQ ID NO: 197931 - DNA, 30 bp, Artificial Sequence
  Synthetic oligonucleotide
gatgtcactggccggccatcctgtccgtca

SEQ ID NO: 197932 - DNA, 30 bp, Artificial Sequence
  Synthetic oligonucleotide
ggctgaaatgatacaattgtggcagcgtca

SEQ ID NO: 197933 - DNA, 30 bp, Artificial Sequence
  Synthetic oligonucleotide
aatggaagggtgaggcttaatggagcgtca

SEQ ID NO: 197934 - DNA, 30 bp, Artificial Sequence
  Synthetic oligonucleotide
gaacctagggctggctataccgccgcgtca

SEQ ID NO: 197935 - DNA, 30 bp, Artificial Sequence
  Synthetic oligonucleotide
gggagtgttcgggccatctcaggcgcgtca

SEQ ID NO: 197936 - DNA, 30 bp, Artificial Sequence
  Synthetic oligonucleotide
ggctacaggttcaggcgcagagtcgcgtca

SEQ ID NO: 197937 - DNA, 30 bp, Artificial Sequence
  Synthetic oligonucleotide
agtacgggttgctctgagtcctaggcgtca

SEQ ID NO: 197938 - DNA, 30 bp, Artificial Sequence
  Synthetic oligonucleotide
tgagggggaagcctaaattcggtggcgtca

SEQ ID NO: 197939 - DNA, 30 bp, Artificial Sequence
  Synthetic oligonucleotide
gactggatgtgtcgtagtttcaatgcgtca

SEQ ID NO: 197940 - DNA, 30 bp, Artificial Sequence
  Synthetic oligonucleotide
actgtatggccgcctaaataggatgcgtca

SEQ ID NO: 197941 - DNA, 30 bp, Artificial Sequence
  Synthetic oligonucleotide
gccgtttcgtacaatcgctttgtatcgtca

SEQ ID NO: 197942 - DNA, 30 bp, Artificial Sequence
  Synthetic oligonucleotide
attgttaggtttgcctttagcggaaggtca

SEQ ID NO: 197943 - DNA, 30 bp, Artificial Sequence
  Synthetic oligonucleotide
tattacgtggcaacgctattaaacaggtca

SEQ ID NO: 197944 - DNA, 30 bp, Artificial Sequence
  Synthetic oligonucleotide
aactaccggaacattcttcgcagtaggtca

SEQ ID NO: 197945 - DNA, 30 bp, Artificial Sequence
  Synthetic oligonucleotide
cttaattctgaacttcgaaggcgtaggtca

SEQ ID NO: 197946 - DNA, 30 bp, Artificial Sequence
  Synthetic oligonucleotide
ggacatgccatgtatccggaaggacggtca

SEQ ID NO: 197947 - DNA, 30 bp, Artificial Sequence
  Synthetic oligonucleotide
tggatccagggcagggcggttacgcggtca

SEQ ID NO: 197948 - DNA, 30 bp, Artificial Sequence
  Synthetic oligonucleotide
ttgcatagcaaatgtcagcacggtcggtca

SEQ ID NO: 197949 - DNA, 30 bp, Artificial Sequence
  Synthetic oligonucleotide
aaattttggtacgagggcacgtcagggtca

SEQ ID NO: 197950 - DNA, 30 bp, Artificial Sequence
  Synthetic oligonucleotide
cacggaccaaaagttggtatgtcagggtca

SEQ ID NO: 197951 - DNA, 30 bp, Artificial Sequence
  Synthetic oligonucleotide
accattcaagaagaatcaattcgagggtca

SEQ ID NO: 197952 - DNA, 30 bp, Artificial Sequence
  Synthetic oligonucleotide
tatagggaccatgcgacgacgcccgggtca

SEQ ID NO: 197953 - DNA, 30 bp, Artificial Sequence
  Synthetic oligonucleotide
caaaggattctataattggggaaggggtca

SEQ ID NO: 197954 - DNA, 30 bp, Artificial Sequence
  Synthetic oligonucleotide
ggatataggcgagagttaaaaattgggtca

SEQ ID NO: 197955 - DNA, 30 bp, Artificial Sequence
  Synthetic oligonucleotide
ataaaccgaatatagcttgactttgggtca

SEQ ID NO: 197956 - DNA, 30 bp, Artificial Sequence
  Synthetic oligonucleotide
cttacgaaggtgtgtactttcgcatggtca

SEQ ID NO: 197957 - DNA, 30 bp, Artificial Sequence
  Synthetic oligonucleotide
acttcacatatttgttaggcgggatggtca

SEQ ID NO: 197958 - DNA, 30 bp, Artificial Sequence
  Synthetic oligonucleotide
gtacgtgtgatcattacagggtactggtca

SEQ ID NO: 197959 - DNA, 30 bp, Artificial Sequence
  Synthetic oligonucleotide
atgtgaagatcttatgtgtgtcgctggtca

SEQ ID NO: 197960 - DNA, 30 bp, Artificial Sequence
  Synthetic oligonucleotide
cgactggatgatgcatctccagcttggtca

SEQ ID NO: 197961 - DNA, 30 bp, Artificial Sequence
  Synthetic oligonucleotide
gaatgacagatatggtacaattcaatgtca

SEQ ID NO: 197962 - DNA, 30 bp, Artificial Sequence
  Synthetic oligonucleotide
tgatactacctaggcagaataggaatgtca

SEQ ID NO: 197963 - DNA, 30 bp, Artificial Sequence
  Synthetic oligonucleotide
gagatcaacacctcacttcgctccatgtca

SEQ ID NO: 197964 - DNA, 30 bp, Artificial Sequence
  Synthetic oligonucleotide
gggccgcgcacgtgcgtggtgcagatgtca

SEQ ID NO: 197965 - DNA, 30 bp, Artificial Sequence
  Synthetic oligonucleotide
gtgtgttcttacaggtaaccaaagctgtca

SEQ ID NO: 197966 - DNA, 30 bp, Artificial Sequence
  Synthetic oligonucleotide
tgggggtcagatcgaggggtttatctgtca

SEQ ID NO: 197967 - DNA, 30 bp, Artificial Sequence
  Synthetic oligonucleotide
gaaacgcacttcggacactggttggtgtca

SEQ ID NO: 197968 - DNA, 30 bp, Artificial Sequence
  Synthetic oligonucleotide
gagagaggacttaaacagtggttggtgtca

SEQ ID NO: 197969 - DNA, 30 bp, Artificial Sequence
  Synthetic oligonucleotide
cactagccaaattagtgagattatgtgtca

SEQ ID NO: 197970 - DNA, 30 bp, Artificial Sequence
  Synthetic oligonucleotide
atctaacaaatatttaaagggattgtgtca

SEQ ID NO: 197971 - DNA, 30 bp, Artificial Sequence
  Synthetic oligonucleotide
tcacctgttctcgtccggatctttgtgtca

SEQ ID NO: 197972 - DNA, 30 bp, Artificial Sequence
  Synthetic oligonucleotide
tgagaaacacgcccccgcgcggacttgtca

SEQ ID NO: 197973 - DNA, 30 bp, Artificial Sequence
  Synthetic oligonucleotide
cggccgcccataagaacgatttggttgtca

SEQ ID NO: 197974 - DNA, 30 bp, Artificial Sequence
  Synthetic oligonucleotide
catgagtaacatcatatgagcgtgttgtca

SEQ ID NO: 197975 - DNA, 30 bp, Artificial Sequence
  Synthetic oligonucleotide
ggggatgcccgctatcaacactctttgtca

SEQ ID NO: 197976 - DNA, 30 bp, Artificial Sequence
  Synthetic oligonucleotide
aagggcgggggacagtacacttgtttgtca

SEQ ID NO: 197977 - DNA, 30 bp, Artificial Sequence
  Synthetic oligonucleotide
ttgtgcaccagtatgctacgcgccaattca

SEQ ID NO: 197978 - DNA, 30 bp, Artificial Sequence
  Synthetic oligonucleotide
gactccgatgaaggcaaactgaggaattca

SEQ ID NO: 197979 - DNA, 30 bp, Artificial Sequence
  Synthetic oligonucleotide
agcagattgagtcctgatgccgggaattca

SEQ ID NO: 197980 - DNA, 30 bp, Artificial Sequence
  Synthetic oligonucleotide
gatgatacagaacacattcatcctaattca

SEQ ID NO: 197981 - DNA, 30 bp, Artificial Sequence
  Synthetic oligonucleotide
atctcacgttcgagtcgtggctgtaattca

SEQ ID NO: 197982 - DNA, 30 bp, Artificial Sequence
  Synthetic oligonucleotide
gggggcaataagttggtgcgcagacattca

SEQ ID NO: 197983 - DNA, 30 bp, Artificial Sequence
  Synthetic oligonucleotide
tggaccataaaatcagtacgtgtacattca

SEQ ID NO: 197984 - DNA, 30 bp, Artificial Sequence
  Synthetic oligonucleotide
catatgtcgggcctaggggagggccattca

SEQ ID NO: 197985 - DNA, 30 bp, Artificial Sequence
  Synthetic oligonucleotide
tgtcgggtctcgtccacaagcatagattca

SEQ ID NO: 197986 - DNA, 30 bp, Artificial Sequence
  Synthetic oligonucleotide
cacatggccaatgtcccgccttgcgattca

SEQ ID NO: 197987 - DNA, 30 bp, Artificial Sequence
  Synthetic oligonucleotide
aggcctcggaatatggagtctgactattca

SEQ ID NO: 197988 - DNA, 30 bp, Artificial Sequence
  Synthetic oligonucleotide
gaaccagtggatatgaagaacgattattca

SEQ ID NO: 197989 - DNA, 30 bp, Artificial Sequence
  Synthetic oligonucleotide
ggcaagcgctggacctttacgacttattca

SEQ ID NO: 197990 - DNA, 30 bp, Artificial Sequence
  Synthetic oligonucleotide
aagtggccgttcaatatggtaagttattca

SEQ ID NO: 197991 - DNA, 30 bp, Artificial Sequence
  Synthetic oligonucleotide
gcgataacctaaaagaactatggttattca

SEQ ID NO: 197992 - DNA, 30 bp, Artificial Sequence
  Synthetic oligonucleotide
tctcagacataactcgcaaatttaacttca

SEQ ID NO: 197993 - DNA, 30 bp, Artificial Sequence
  Synthetic oligonucleotide
ccagggcacgcgttatcctccgccacttca

SEQ ID NO: 197994 - DNA, 30 bp, Artificial Sequence
  Synthetic oligonucleotide
aaacgaatcctgcacgtcctcggcacttca

SEQ ID NO: 197995 - DNA, 30 bp, Artificial Sequence
  Synthetic oligonucleotide
cacaaacaaggtctgaatttgaaaccttca

SEQ ID NO: 197996 - DNA, 31 bp, Artificial Sequence
  Synthetic oligonucleotide
tgctgctccggtgggttttgttacgccttca

SEQ ID NO: 197997 - DNA, 30 bp, Artificial Sequence
  Synthetic oligonucleotide
agtcgtttttcagtagcatatcggccttca

SEQ ID NO: 197998 - DNA, 30 bp, Artificial Sequence
  Synthetic oligonucleotide
caatcggtcgtagacggtgttcaagcttca

SEQ ID NO: 197999 - DNA, 30 bp, Artificial Sequence
  Synthetic oligonucleotide
gtaccgtacggttataggacaatagcttca

SEQ ID NO: 198000 - DNA, 30 bp, Artificial Sequence
  Synthetic oligonucleotide
ccaaaggacattatagggtatgaggcttca

SEQ ID NO: 198001 - DNA, 30 bp, Artificial Sequence
  Synthetic oligonucleotide
atccatgttagggaacctctatttgcttca

SEQ ID NO: 198002 - DNA, 30 bp, Artificial Sequence
  Synthetic oligonucleotide
taaaaggtgagaagctgggattcgtcttca

SEQ ID NO: 198003 - DNA, 30 bp, Artificial Sequence
  Synthetic oligonucleotide
tagaagctaacgggaataaactggtcttca

SEQ ID NO: 198004 - DNA, 30 bp, Artificial Sequence
  Synthetic oligonucleotide
catcgcaagtggacatacgagtggtcttca

SEQ ID NO: 198005 - DNA, 30 bp, Artificial Sequence
  Synthetic oligonucleotide
gaccgtccataaagagtatgtccttcttca

SEQ ID NO: 198006 - DNA, 30 bp, Artificial Sequence
  Synthetic oligonucleotide
agcatacataccttaacagagtcttcttca

SEQ ID NO: 198007 - DNA, 30 bp, Artificial Sequence
  Synthetic oligonucleotide
ggatagggaaaacagggcacacgttcttca

SEQ ID NO: 198008 - DNA, 30 bp, Artificial Sequence
  Synthetic oligonucleotide
gtgaattgccaacgtcgcgctagaagttca

SEQ ID NO: 198009 - DNA, 30 bp, Artificial Sequence
  Synthetic oligonucleotide
gcactaagaacctgtattcagttaagttca

SEQ ID NO: 198010 - DNA, 30 bp, Artificial Sequence
  Synthetic oligonucleotide
acacggtattcaagggcagttttaagttca

SEQ ID NO: 198011 - DNA, 30 bp, Artificial Sequence
  Synthetic oligonucleotide
gtacgtaggtactttacccagtccagttca

SEQ ID NO: 198012 - DNA, 30 bp, Artificial Sequence
  Synthetic oligonucleotide
caccacggttcatctaaggtctagagttca

SEQ ID NO: 198013 - DNA, 30 bp, Artificial Sequence
  Synthetic oligonucleotide
aagcccgactaaaaaattagcccaggttca

SEQ ID NO: 198014 - DNA, 30 bp, Artificial Sequence
  Synthetic oligonucleotide
agggcaaaatacccagaggcgcgctgttca

SEQ ID NO: 198015 - DNA, 30 bp, Artificial Sequence
  Synthetic oligonucleotide
actgtcaaccggctgatctcgttctgttca

SEQ ID NO: 198016 - DNA, 30 bp, Artificial Sequence
  Synthetic oligonucleotide
actaaagccgtactgccgttaccgtgttca

SEQ ID NO: 198017 - DNA, 30 bp, Artificial Sequence
  Synthetic oligonucleotide
cgattatgggtcaataagtaagctatttca

SEQ ID NO: 198018 - DNA, 30 bp, Artificial Sequence
  Synthetic oligonucleotide
cagtaccatgtccgagatgtatacctttca

SEQ ID NO: 198019 - DNA, 30 bp, Artificial Sequence
  Synthetic oligonucleotide
aacgcatcaatactcggctccaccctttca

SEQ ID NO: 198020 - DNA, 30 bp, Artificial Sequence
  Synthetic oligonucleotide
ggaatggcgaccttgatgtaatatctttca

SEQ ID NO: 198021 - DNA, 30 bp, Artificial Sequence
  Synthetic oligonucleotide
gagaccgtagaacttcgcacgaccgtttca

SEQ ID NO: 198022 - DNA, 30 bp, Artificial Sequence
  Synthetic oligonucleotide
ggcaaaagattcttaagggtggcggtttca

SEQ ID NO: 198023 - DNA, 30 bp, Artificial Sequence
  Synthetic oligonucleotide
gcagcgcattcggcataaggaaatgtttca

SEQ ID NO: 198024 - DNA, 30 bp, Artificial Sequence
  Synthetic oligonucleotide
gcaggttgccattggttgagctctgtttca

SEQ ID NO: 198025 - DNA, 30 bp, Artificial Sequence
  Synthetic oligonucleotide
cgtgcaccaagtaatggggagagattttca

SEQ ID NO: 198026 - DNA, 30 bp, Artificial Sequence
  Synthetic oligonucleotide
cgcctaatgaaccgttctggctgattttca

SEQ ID NO: 198027 - DNA, 30 bp, Artificial Sequence
  Synthetic oligonucleotide
cgagctactttagtcaaaacggagttttca

SEQ ID NO: 198028 - DNA, 30 bp, Artificial Sequence
  Synthetic oligonucleotide
aattggcgtgaacacgtgctgtcgttttca

SEQ ID NO: 198029 - DNA, 30 bp, Artificial Sequence
  Synthetic oligonucleotide
gcagcagttcctagtaagtcctgaaaaaga

SEQ ID NO: 198030 - DNA, 30 bp, Artificial Sequence
  Synthetic oligonucleotide
gggtatattattagaagaacggccaaaaga

SEQ ID NO: 198031 - DNA, 30 bp, Artificial Sequence
  Synthetic oligonucleotide
gaggatctctagcttgattggtccaaaaga

SEQ ID NO: 198032 - DNA, 30 bp, Artificial Sequence
  Synthetic oligonucleotide
actgatctcgtgcggtcagagatcaaaaga

SEQ ID NO: 198033 - DNA, 30 bp, Artificial Sequence
  Synthetic oligonucleotide
agcgccacctagggcgcaacgatcaaaaga

SEQ ID NO: 198034 - DNA, 30 bp, Artificial Sequence
  Synthetic oligonucleotide
cggtcgtatttgctaccaacgttcaaaaga

SEQ ID NO: 198035 - DNA, 30 bp, Artificial Sequence
  Synthetic oligonucleotide
aaagcctgagccttactgtgttagaaaaga

SEQ ID NO: 198036 - DNA, 30 bp, Artificial Sequence
  Synthetic oligonucleotide
atctcaaaccaggcagactaggcacaaaga

SEQ ID NO: 198037 - DNA, 30 bp, Artificial Sequence
  Synthetic oligonucleotide
gtcacgggcgatccagtatctggacaaaga

SEQ ID NO: 198038 - DNA, 30 bp, Artificial Sequence
  Synthetic oligonucleotide
taaccgaaagtcagtgaacttttccaaaga

SEQ ID NO: 198039 - DNA, 30 bp, Artificial Sequence
  Synthetic oligonucleotide
aataaatcctcaaggtagcgaatgcaaaga

SEQ ID NO: 198040 - DNA, 30 bp, Artificial Sequence
  Synthetic oligonucleotide
gagcggtgccgcttagtgagttccgaaaga

SEQ ID NO: 198041 - DNA, 30 bp, Artificial Sequence
  Synthetic oligonucleotide
gttgaaagccatgaaatgactagcgaaaga

SEQ ID NO: 198042 - DNA, 30 bp, Artificial Sequence
  Synthetic oligonucleotide
ggtaatctcacattgacactgcgcgaaaga

SEQ ID NO: 198043 - DNA, 30 bp, Artificial Sequence
  Synthetic oligonucleotide
caatagctgaagactccgggtgcggaaaga

SEQ ID NO: 198044 - DNA, 30 bp, Artificial Sequence
  Synthetic oligonucleotide
agatcatcatggcaagactgctgggaaaga

SEQ ID NO: 198045 - DNA, 30 bp, Artificial Sequence
  Synthetic oligonucleotide
gacatggagtcccagctcagctgtgaaaga

SEQ ID NO: 198046 - DNA, 30 bp, Artificial Sequence
  Synthetic oligonucleotide
gcgttcaatgtgaccccatctcaataaaga

SEQ ID NO: 198047 - DNA, 30 bp, Artificial Sequence
  Synthetic oligonucleotide
tgtctctctcgacatgaaacagtataaaga

SEQ ID NO: 198048 - DNA, 30 bp, Artificial Sequence
  Synthetic oligonucleotide
atatcactgttcgaccgcgtgtactaaaga

SEQ ID NO: 198049 - DNA, 30 bp, Artificial Sequence
  Synthetic oligonucleotide
ggctgcggtttcagttgagaggcctaaaga

SEQ ID NO: 198050 - DNA, 30 bp, Artificial Sequence
  Synthetic oligonucleotide
attagaatgcgtactgaagttacgtaaaga

SEQ ID NO: 198051 - DNA, 30 bp, Artificial Sequence
  Synthetic oligonucleotide
aataggtagccagggtggcgttcgtaaaga

SEQ ID NO: 198052 - DNA, 30 bp, Artificial Sequence
  Synthetic oligonucleotide
atgctttaagctcgtgttaacgggtaaaga

SEQ ID NO: 198053 - DNA, 30 bp, Artificial Sequence
  Synthetic oligonucleotide
tatatcatctcagaaacacccgggtaaaga

SEQ ID NO: 198054 - DNA, 30 bp, Artificial Sequence
  Synthetic oligonucleotide
gagcaccgttgacatgtcgatacttaaaga

SEQ ID NO: 198055 - DNA, 30 bp, Artificial Sequence
  Synthetic oligonucleotide
actgtagcacaggagatcctgctttaaaga

SEQ ID NO: 198056 - DNA, 30 bp, Artificial Sequence
  Synthetic oligonucleotide
gcagatactccgagagagaccgtaacaaga

SEQ ID NO: 198057 - DNA, 30 bp, Artificial Sequence
  Synthetic oligonucleotide
ctgtgccttcccactttgagaatgacaaga

SEQ ID NO: 198058 - DNA, 30 bp, Artificial Sequence
  Synthetic oligonucleotide
tgtctagatcacagggtcggaatgacaaga

SEQ ID NO: 198059 - DNA, 30 bp, Artificial Sequence
  Synthetic oligonucleotide
aatggccgagcatcgtcagagattacaaga

SEQ ID NO: 198060 - DNA, 30 bp, Artificial Sequence
  Synthetic oligonucleotide
aatacccgtaaagcgtatgaaataccaaga

SEQ ID NO: 198061 - DNA, 30 bp, Artificial Sequence
  Synthetic oligonucleotide
cgcttcgtgtccatagcataccggccaaga

SEQ ID NO: 198062 - DNA, 30 bp, Artificial Sequence
  Synthetic oligonucleotide
gcgcacgatcttattggcgtagaagcaaga

SEQ ID NO: 198063 - DNA, 30 bp, Artificial Sequence
  Synthetic oligonucleotide
cccgtatgggtgcgggaaaatcccgcaaga

SEQ ID NO: 198064 - DNA, 30 bp, Artificial Sequence
  Synthetic oligonucleotide
gctgcgatattaaccaatgttagggcaaga

SEQ ID NO: 198065 - DNA, 30 bp, Artificial Sequence
  Synthetic oligonucleotide
tgcactttatctacggtaggaaatgcaaga

SEQ ID NO: 198066 - DNA, 30 bp, Artificial Sequence
  Synthetic oligonucleotide
agccccacgtctcaggatgaggctgcaaga

SEQ ID NO: 198067 - DNA, 30 bp, Artificial Sequence
  Synthetic oligonucleotide
atcgactaatagggccaatcaaattcaaga

SEQ ID NO: 198068 - DNA, 30 bp, Artificial Sequence
  Synthetic oligonucleotide
tatcctgatggattcagtggagattcaaga

SEQ ID NO: 198069 - DNA, 30 bp, Artificial Sequence
  Synthetic oligonucleotide
cggcagaggaagcggctttaaaaaagaaga

SEQ ID NO: 198070 - DNA, 30 bp, Artificial Sequence
  Synthetic oligonucleotide
tagaatctagcagacaggtcgataagaaga

SEQ ID NO: 198071 - DNA, 30 bp, Artificial Sequence
  Synthetic oligonucleotide
tgagcggcccgtgctgccgttctaagaaga

SEQ ID NO: 198072 - DNA, 30 bp, Artificial Sequence
  Synthetic oligonucleotide
ctccccacagaacagagctttgggagaaga

SEQ ID NO: 198073 - DNA, 30 bp, Artificial Sequence
  Synthetic oligonucleotide
cctgggctcctaggcccttttgaccgaaga

SEQ ID NO: 198074 - DNA, 30 bp, Artificial Sequence
  Synthetic oligonucleotide
tagagggatgacagtctacccaagcgaaga

SEQ ID NO: 198075 - DNA, 30 bp, Artificial Sequence
  Synthetic oligonucleotide
ggttctgtaacgctacgtcccgagcgaaga

SEQ ID NO: 198076 - DNA, 30 bp, Artificial Sequence
  Synthetic oligonucleotide
ggtccgctgcagaacatacatgcaggaaga

SEQ ID NO: 198077 - DNA, 31 bp, Artificial Sequence
  Synthetic oligonucleotide
ctcgtgggctactatcagcgaccatggaaga

SEQ ID NO: 198078 - DNA, 30 bp, Artificial Sequence
  Synthetic oligonucleotide
agtgcacctgggctcgcgtcgcagtgaaga

SEQ ID NO: 198079 - DNA, 30 bp, Artificial Sequence
  Synthetic oligonucleotide
taatgcagagactaggctagtaggtgaaga

SEQ ID NO: 198080 - DNA, 30 bp, Artificial Sequence
  Synthetic oligonucleotide
agcactaccatcatgcggaatctgtgaaga

SEQ ID NO: 198081 - DNA, 30 bp, Artificial Sequence
  Synthetic oligonucleotide
tgaccccgtaagtttgaggctggaataaga

SEQ ID NO: 198082 - DNA, 30 bp, Artificial Sequence
  Synthetic oligonucleotide
cccccacagcggtgtaaaaattgaataaga

SEQ ID NO: 198083 - DNA, 30 bp, Artificial Sequence
  Synthetic oligonucleotide
tagtatgcggtttcccgagaaataataaga

SEQ ID NO: 198084 - DNA, 30 bp, Artificial Sequence
  Synthetic oligonucleotide
ctaggcacgctagtccagctcgggataaga

SEQ ID NO: 198085 - DNA, 30 bp, Artificial Sequence
  Synthetic oligonucleotide
gctgttgaaattcacgaattagctataaga

SEQ ID NO: 198086 - DNA, 30 bp, Artificial Sequence
  Synthetic oligonucleotide
ctgatttttgcaagtactctataactaaga

SEQ ID NO: 198087 - DNA, 30 bp, Artificial Sequence
  Synthetic oligonucleotide
cctaatcggttagaggggacaccactaaga

SEQ ID NO: 198088 - DNA, 30 bp, Artificial Sequence
  Synthetic oligonucleotide
atagtaaaatcagtaggccaatcactaaga

SEQ ID NO: 198089 - DNA, 30 bp, Artificial Sequence
  Synthetic oligonucleotide
accgcaagcaccaaggcacattagctaaga

SEQ ID NO: 198090 - DNA, 30 bp, Artificial Sequence
  Synthetic oligonucleotide
agcccgccacctactctaaggggtctaaga

SEQ ID NO: 198091 - DNA, 30 bp, Artificial Sequence
  Synthetic oligonucleotide
cggcacgagtgcctttcacgaggagtaaga

SEQ ID NO: 198092 - DNA, 30 bp, Artificial Sequence
  Synthetic oligonucleotide
gaccagacctctggctgcgggtcggtaaga

SEQ ID NO: 198093 - DNA, 30 bp, Artificial Sequence
  Synthetic oligonucleotide
agataagatgttaagtcactgattgtaaga

SEQ ID NO: 198094 - DNA, 30 bp, Artificial Sequence
  Synthetic oligonucleotide
tccagccaagtatatcaatgttttgtaaga

SEQ ID NO: 198095 - DNA, 30 bp, Artificial Sequence
  Synthetic oligonucleotide
tggtggtttaaatcacgggcacaattaaga

SEQ ID NO: 198096 - DNA, 30 bp, Artificial Sequence
  Synthetic oligonucleotide
ggagagtccgtctagggtcatgaattaaga

SEQ ID NO: 198097 - DNA, 30 bp, Artificial Sequence
  Synthetic oligonucleotide
aagtgatgaacatggtagttgtcattaaga

SEQ ID NO: 198098 - DNA, 30 bp, Artificial Sequence
  Synthetic oligonucleotide
tgagcagttgtgacgtaaatccacttaaga

SEQ ID NO: 198099 - DNA, 30 bp, Artificial Sequence
  Synthetic oligonucleotide
agatggcgtgaaggtgtgaggttcttaaga

SEQ ID NO: 198100 - DNA, 30 bp, Artificial Sequence
  Synthetic oligonucleotide
gacgggatacacaagtccaactagttaaga

SEQ ID NO: 198101 - DNA, 30 bp, Artificial Sequence
  Synthetic oligonucleotide
gaaacatgtgagcaaccaacagggttaaga

SEQ ID NO: 198102 - DNA, 30 bp, Artificial Sequence
  Synthetic oligonucleotide
tcacgcttctaatctggcataataaacaga

SEQ ID NO: 198103 - DNA, 30 bp, Artificial Sequence
  Synthetic oligonucleotide
atcacctcaatcttaatgtgctccaacaga

SEQ ID NO: 198104 - DNA, 30 bp, Artificial Sequence
  Synthetic oligonucleotide
gataggtacagtacccggtatcttaacaga

SEQ ID NO: 198105 - DNA, 30 bp, Artificial Sequence
  Synthetic oligonucleotide
tagtattgcgccatttcaaatgcacacaga

SEQ ID NO: 198106 - DNA, 30 bp, Artificial Sequence
  Synthetic oligonucleotide
atagtttatagagtaatgacctcacacaga

SEQ ID NO: 198107 - DNA, 30 bp, Artificial Sequence
  Synthetic oligonucleotide
taggtaggcttcagtggattggcgcacaga

SEQ ID NO: 198108 - DNA, 30 bp, Artificial Sequence
  Synthetic oligonucleotide
caagctgcaacccctgactcctcgcacaga

SEQ ID NO: 198109 - DNA, 30 bp, Artificial Sequence
  Synthetic oligonucleotide
ccggaaatgtcattgctgtcttcgcacaga

SEQ ID NO: 198110 - DNA, 30 bp, Artificial Sequence
  Synthetic oligonucleotide
aaataaaacgcgatgacgaaacttcacaga

SEQ ID NO: 198111 - DNA, 30 bp, Artificial Sequence
  Synthetic oligonucleotide
aaggatccgtttgtctcatcttcagacaga

SEQ ID NO: 198112 - DNA, 30 bp, Artificial Sequence
  Synthetic oligonucleotide
caaattgtttagaggcccaatgtagacaga

SEQ ID NO: 198113 - DNA, 30 bp, Artificial Sequence
  Synthetic oligonucleotide
tcgtatatttatgcggaactgatcgacaga

SEQ ID NO: 198114 - DNA, 30 bp, Artificial Sequence
  Synthetic oligonucleotide
gctgcgtaggggaaatataagttcgacaga

SEQ ID NO: 198115 - DNA, 30 bp, Artificial Sequence
  Synthetic oligonucleotide
gaatccttcgcgatcgaacttttcgacaga

SEQ ID NO: 198116 - DNA, 31 bp, Artificial Sequence
  Synthetic oligonucleotide
attgaacgttctctcaactctataggacaga

SEQ ID NO: 198117 - DNA, 30 bp, Artificial Sequence
  Synthetic oligonucleotide
ttactgagggaacacggtcgatcatacaga

SEQ ID NO: 198118 - DNA, 30 bp, Artificial Sequence
  Synthetic oligonucleotide
tgtcaattgtttgggccccagaactacaga

SEQ ID NO: 198119 - DNA, 30 bp, Artificial Sequence
  Synthetic oligonucleotide
ttggtgtatgggttgttgttttcctacaga

SEQ ID NO: 198120 - DNA, 30 bp, Artificial Sequence
  Synthetic oligonucleotide
ttgacaggacactgccgggaactctacaga

SEQ ID NO: 198121 - DNA, 30 bp, Artificial Sequence
  Synthetic oligonucleotide
ataagcagaccgaggaccgcagagtacaga

SEQ ID NO: 198122 - DNA, 30 bp, Artificial Sequence
  Synthetic oligonucleotide
caactcgtcaagtgaatcgacacgtacaga

SEQ ID NO: 198123 - DNA, 30 bp, Artificial Sequence
  Synthetic oligonucleotide
attaagaaaggtacggacactctgtacaga

SEQ ID NO: 198124 - DNA, 30 bp, Artificial Sequence
  Synthetic oligonucleotide
aaacaccgggtcaaacgctagggttacaga

SEQ ID NO: 198125 - DNA, 30 bp, Artificial Sequence
  Synthetic oligonucleotide
tatgttagaacgttagggcacccaaccaga

SEQ ID NO: 198126 - DNA, 30 bp, Artificial Sequence
  Synthetic oligonucleotide
taacgactggagcaaacgggccgtaccaga

SEQ ID NO: 198127 - DNA, 30 bp, Artificial Sequence
  Synthetic oligonucleotide
ccctaagaacggtgcccgcgatcccccaga

SEQ ID NO: 198128 - DNA, 30 bp, Artificial Sequence
  Synthetic oligonucleotide
accagcatggtctcgcgacagcggcccaga

SEQ ID NO: 198129 - DNA, 30 bp, Artificial Sequence
  Synthetic oligonucleotide
ttgcattagatcgttcacattcgtcccaga

SEQ ID NO: 198130 - DNA, 30 bp, Artificial Sequence
  Synthetic oligonucleotide
gttaggaccctgatcccgggcagggccaga

SEQ ID NO: 198131 - DNA, 30 bp, Artificial Sequence
  Synthetic oligonucleotide
cggtagcgtgcctctcaaagcttggccaga

SEQ ID NO: 198132 - DNA, 30 bp, Artificial Sequence
  Synthetic oligonucleotide
gcaagtattggcttcgagcacaatgccaga

SEQ ID NO: 198133 - DNA, 30 bp, Artificial Sequence
  Synthetic oligonucleotide
aatgctggtctgaagtatccccgtgccaga

SEQ ID NO: 198134 - DNA, 30 bp, Artificial Sequence
  Synthetic oligonucleotide
acggtcatacgccgcgggcagggatccaga

SEQ ID NO: 198135 - DNA, 30 bp, Artificial Sequence
  Synthetic oligonucleotide
aagtagtcaattttgatgcgctgatccaga

SEQ ID NO: 198136 - DNA, 30 bp, Artificial Sequence
  Synthetic oligonucleotide
aagcattccccgcagattacgtgatccaga

SEQ ID NO: 198137 - DNA, 30 bp, Artificial Sequence
  Synthetic oligonucleotide
acttgtacaacagccgcctcagcctccaga

SEQ ID NO: 198138 - DNA, 30 bp, Artificial Sequence
  Synthetic oligonucleotide
aaaagaactatcaatatgaaaaagtccaga

SEQ ID NO: 198139 - DNA, 30 bp, Artificial Sequence
  Synthetic oligonucleotide
ttttgcacattcattctatatgagtccaga

SEQ ID NO: 198140 - DNA, 30 bp, Artificial Sequence
  Synthetic oligonucleotide
agatggcggcccggtcaggcgctaagcaga

SEQ ID NO: 198141 - DNA, 30 bp, Artificial Sequence
  Synthetic oligonucleotide
tgtctcaaccgcacgatcaggtacagcaga

SEQ ID NO: 198142 - DNA, 30 bp, Artificial Sequence
  Synthetic oligonucleotide
gttactatctcgtcgtggagatagagcaga

SEQ ID NO: 198143 - DNA, 30 bp, Artificial Sequence
  Synthetic oligonucleotide
tgaaagaagctgacgataaaaacgagcaga

SEQ ID NO: 198144 - DNA, 30 bp, Artificial Sequence
  Synthetic oligonucleotide
tgcagaatcaccctagtgttcaggagcaga

SEQ ID NO: 198145 - DNA, 30 bp, Artificial Sequence
  Synthetic oligonucleotide
ggatcctctagcccgtctctcatgagcaga

SEQ ID NO: 198146 - DNA, 30 bp, Artificial Sequence
  Synthetic oligonucleotide
ggtaggcatataactggttgtcatagcaga

SEQ ID NO: 198147 - DNA, 30 bp, Artificial Sequence
  Synthetic oligonucleotide
tgcaagcttagataattttcgaaacgcaga

SEQ ID NO: 198148 - DNA, 30 bp, Artificial Sequence
  Synthetic oligonucleotide
ttcgttcttagaagatagcggataggcaga

SEQ ID NO: 198149 - DNA, 30 bp, Artificial Sequence
  Synthetic oligonucleotide
agggcgcattagtgcagctctacgggcaga

SEQ ID NO: 198150 - DNA, 30 bp, Artificial Sequence
  Synthetic oligonucleotide
tgtaattagcagaatttcgaaactggcaga

SEQ ID NO: 198151 - DNA, 30 bp, Artificial Sequence
  Synthetic oligonucleotide
aagggactcatagtttcggcgaaatgcaga

SEQ ID NO: 198152 - DNA, 30 bp, Artificial Sequence
  Synthetic oligonucleotide
tgatgacgaggaagtaccgcaagatgcaga

SEQ ID NO: 198153 - DNA, 30 bp, Artificial Sequence
  Synthetic oligonucleotide
atgcacgcagacaagccacaaagctgcaga

SEQ ID NO: 198154 - DNA, 30 bp, Artificial Sequence
  Synthetic oligonucleotide
gtgatgagcggcaacccgctgagttgcaga

SEQ ID NO: 198155 - DNA, 30 bp, Artificial Sequence
  Synthetic oligonucleotide
ccgaaaactgtcgctattaatctttgcaga

SEQ ID NO: 198156 - DNA, 30 bp, Artificial Sequence
  Synthetic oligonucleotide
cgacacccggaatatcccgggcaaatcaga

SEQ ID NO: 198157 - DNA, 30 bp, Artificial Sequence
  Synthetic oligonucleotide
gtatcgggtcgtgctgctcggtgaatcaga

SEQ ID NO: 198158 - DNA, 30 bp, Artificial Sequence
  Synthetic oligonucleotide
cgctttgccggcactatgtggtccatcaga

SEQ ID NO: 198159 - DNA, 30 bp, Artificial Sequence
  Synthetic oligonucleotide
cagatgtggcctggattctgtagcatcaga

SEQ ID NO: 198160 - DNA, 30 bp, Artificial Sequence
  Synthetic oligonucleotide
gcggcgtgcgtctatacgatatatatcaga

SEQ ID NO: 198161 - DNA, 30 bp, Artificial Sequence
  Synthetic oligonucleotide
tgtgaaaatggagagctgaggctactcaga

SEQ ID NO: 198162 - DNA, 30 bp, Artificial Sequence
  Synthetic oligonucleotide
gcataatcccggagtcaccggttactcaga

SEQ ID NO: 198163 - DNA, 30 bp, Artificial Sequence
  Synthetic oligonucleotide
ccataaaagttggcggaacattctctcaga

SEQ ID NO: 198164 - DNA, 30 bp, Artificial Sequence
  Synthetic oligonucleotide
ggacttccatgcaaggtgtaaggtctcaga

SEQ ID NO: 198165 - DNA, 30 bp, Artificial Sequence
  Synthetic oligonucleotide
cttgagacaagtgactggtaaccagtcaga

SEQ ID NO: 198166 - DNA, 30 bp, Artificial Sequence
  Synthetic oligonucleotide
taatgctatcaatgggcatctaacgtcaga

SEQ ID NO: 198167 - DNA, 30 bp, Artificial Sequence
  Synthetic oligonucleotide
atgtaagattatattgaccctaccgtcaga

SEQ ID NO: 198168 - DNA, 30 bp, Artificial Sequence
  Synthetic oligonucleotide
gtactttcaagtgtgacttcgcgcgtcaga

SEQ ID NO: 198169 - DNA, 30 bp, Artificial Sequence
  Synthetic oligonucleotide
cacccgcaggctagggacgactaggtcaga

SEQ ID NO: 198170 - DNA, 30 bp, Artificial Sequence
  Synthetic oligonucleotide
cgccgggggcctaatttgtaatttgtcaga

SEQ ID NO: 198171 - DNA, 30 bp, Artificial Sequence
  Synthetic oligonucleotide
cggaatcgccccacaggttgaaaattcaga

SEQ ID NO: 198172 - DNA, 30 bp, Artificial Sequence
  Synthetic oligonucleotide
cgtagtagctcgtacagctggcacttcaga

SEQ ID NO: 198173 - DNA, 30 bp, Artificial Sequence
  Synthetic oligonucleotide
tcatcgcccaccaacgttgaaaagttcaga

SEQ ID NO: 198174 - DNA, 30 bp, Artificial Sequence
  Synthetic oligonucleotide
aacaggtccccgagttatagttcgttcaga

SEQ ID NO: 198175 - DNA, 30 bp, Artificial Sequence
  Synthetic oligonucleotide
tgggtaactcatgtattacacctgttcaga

SEQ ID NO: 198176 - DNA, 30 bp, Artificial Sequence
  Synthetic oligonucleotide
gagtcccaagacacagtaaacgatttcaga

SEQ ID NO: 198177 - DNA, 30 bp, Artificial Sequence
  Synthetic oligonucleotide
cgcctaccgcgaaatccagcttatttcaga

SEQ ID NO: 198178 - DNA, 30 bp, Artificial Sequence
  Synthetic oligonucleotide
cacggggttgtttgcaacgtcaaaaagaga

SEQ ID NO: 198179 - DNA, 30 bp, Artificial Sequence
  Synthetic oligonucleotide
ggcccccgcatttgcgcgaggcaaaagaga

SEQ ID NO: 198180 - DNA, 30 bp, Artificial Sequence
  Synthetic oligonucleotide
gcgcacgatgttttttgaccggtcaagaga

SEQ ID NO: 198181 - DNA, 30 bp, Artificial Sequence
  Synthetic oligonucleotide
attaaggcctgccctcagagtaagaagaga

SEQ ID NO: 198182 - DNA, 30 bp, Artificial Sequence
  Synthetic oligonucleotide
gattgatggcctcctaacattcagaagaga

SEQ ID NO: 198183 - DNA, 30 bp, Artificial Sequence
  Synthetic oligonucleotide
ggcctacttcccggccgattcacgaagaga

SEQ ID NO: 198184 - DNA, 30 bp, Artificial Sequence
  Synthetic oligonucleotide
aatacgaatttttggataggggcgaagaga

SEQ ID NO: 198185 - DNA, 30 bp, Artificial Sequence
  Synthetic oligonucleotide
ttagttcgagctacgagggttcataagaga

SEQ ID NO: 198186 - DNA, 30 bp, Artificial Sequence
  Synthetic oligonucleotide
ttagtgtgcgtacgcgccggagataagaga

SEQ ID NO: 198187 - DNA, 30 bp, Artificial Sequence
  Synthetic oligonucleotide
ggtttccgaagggtttgacctatccagaga

SEQ ID NO: 198188 - DNA, 30 bp, Artificial Sequence
  Synthetic oligonucleotide
aagctcaatacacattatgtgttccagaga

SEQ ID NO: 198189 - DNA, 30 bp, Artificial Sequence
  Synthetic oligonucleotide
actgaaggaataagtgtgcgctatcagaga

SEQ ID NO: 198190 - DNA, 30 bp, Artificial Sequence
  Synthetic oligonucleotide
ggactcgttgccacataaaggtctcagaga

SEQ ID NO: 198191 - DNA, 30 bp, Artificial Sequence
  Synthetic oligonucleotide
ggcgacgtcgaactcatgtgggttcagaga

SEQ ID NO: 198192 - DNA, 30 bp, Artificial Sequence
  Synthetic oligonucleotide
agcttcatattgtggtggtcatttcagaga

SEQ ID NO: 198193 - DNA, 30 bp, Artificial Sequence
  Synthetic oligonucleotide
tcacggtgtcacgagtgtactccagagaga

SEQ ID NO: 198194 - DNA, 30 bp, Artificial Sequence
  Synthetic oligonucleotide
tgcttgctaaggggtcgctgtcccgagaga

SEQ ID NO: 198195 - DNA, 30 bp, Artificial Sequence
  Synthetic oligonucleotide
ccatttgtttggataagtgcgttcgagaga

SEQ ID NO: 198196 - DNA, 30 bp, Artificial Sequence
  Synthetic oligonucleotide
tgaattggtcgatgaacgagcaaggagaga

SEQ ID NO: 198197 - DNA, 30 bp, Artificial Sequence
  Synthetic oligonucleotide
caagcaccgtgtagtacccggtaggagaga

SEQ ID NO: 198198 - DNA, 30 bp, Artificial Sequence
  Synthetic oligonucleotide
atgcgggacggcagagcgctaggggagaga

SEQ ID NO: 198199 - DNA, 30 bp, Artificial Sequence
  Synthetic oligonucleotide
aatgcacgtttacgattatcaattgagaga

SEQ ID NO: 198200 - DNA, 30 bp, Artificial Sequence
  Synthetic oligonucleotide
gctctggaacacaagctgtgcccatagaga

SEQ ID NO: 198201 - DNA, 30 bp, Artificial Sequence
  Synthetic oligonucleotide
gggtagcgtgtgagatatattatatagaga

SEQ ID NO: 198202 - DNA, 28 bp, Artificial Sequence
  Synthetic oligonucleotide
ggtagtcgtcccggacgagttatagaga

SEQ ID NO: 198203 - DNA, 30 bp, Artificial Sequence
  Synthetic oligonucleotide
ggtggccgtgaagccgcatcctactagaga

SEQ ID NO: 198204 - DNA, 30 bp, Artificial Sequence
  Synthetic oligonucleotide
tagagtctcaaatgacttgatgcttagaga

SEQ ID NO: 198205 - DNA, 30 bp, Artificial Sequence
  Synthetic oligonucleotide
ccgtgtaaccggtccggtgctctttagaga

SEQ ID NO: 198206 - DNA, 30 bp, Artificial Sequence
  Synthetic oligonucleotide
gacacggatatatgaaactaattaacgaga

SEQ ID NO: 198207 - DNA, 30 bp, Artificial Sequence
  Synthetic oligonucleotide
ctatagtttcacacgcaaagagtcacgaga

SEQ ID NO: 198208 - DNA, 30 bp, Artificial Sequence
  Synthetic oligonucleotide
ggctcgcgatcctggattcgttcgacgaga

SEQ ID NO: 198209 - DNA, 30 bp, Artificial Sequence
  Synthetic oligonucleotide
gttaaaggtacaccgtggaaaatgacgaga

SEQ ID NO: 198210 - DNA, 30 bp, Artificial Sequence
  Synthetic oligonucleotide
attgtttccacgtaacagcgagtgccgaga

SEQ ID NO: 198211 - DNA, 27 bp, Artificial Sequence
  Synthetic oligonucleotide
aacacggatcgtcgggtcggtccgaga

SEQ ID NO: 198212 - DNA, 30 bp, Artificial Sequence
  Synthetic oligonucleotide
gtccggacagccaatcacctataagcgaga

SEQ ID NO: 198213 - DNA, 30 bp, Artificial Sequence
  Synthetic oligonucleotide
cgacggtttgatcgaacacggtcagcgaga

SEQ ID NO: 198214 - DNA, 30 bp, Artificial Sequence
  Synthetic oligonucleotide
gggccgactattcattggacttcagcgaga

SEQ ID NO: 198215 - DNA, 30 bp, Artificial Sequence
  Synthetic oligonucleotide
caaacgacgcgaagttggcccgacgcgaga

SEQ ID NO: 198216 - DNA, 30 bp, Artificial Sequence
  Synthetic oligonucleotide
aggtgggggttactctagcccagcgcgaga

SEQ ID NO: 198217 - DNA, 30 bp, Artificial Sequence
  Synthetic oligonucleotide
ccttcaaccagactggaccccgaggcgaga

SEQ ID NO: 198218 - DNA, 30 bp, Artificial Sequence
  Synthetic oligonucleotide
tatcatttattaatccgaacttctgcgaga

SEQ ID NO: 198219 - DNA, 30 bp, Artificial Sequence
  Synthetic oligonucleotide
agttaacaatttgcggatgtcacctcgaga

SEQ ID NO: 198220 - DNA, 28 bp, Artificial Sequence
  Synthetic oligonucleotide
agcactatgctcttgggacaaaaggaga

SEQ ID NO: 198221 - DNA, 30 bp, Artificial Sequence
  Synthetic oligonucleotide
gcaagaatacaataactctgtataaggaga

SEQ ID NO: 198222 - DNA, 29 bp, Artificial Sequence
  Synthetic oligonucleotide
gggcagcatcataaccagcaaacaggaga

SEQ ID NO: 198223 - DNA, 30 bp, Artificial Sequence
  Synthetic oligonucleotide
taatacattcagtctccataaaccaggaga

SEQ ID NO: 198224 - DNA, 30 bp, Artificial Sequence
  Synthetic oligonucleotide
ccttctacggtggatcgtgggggcaggaga

SEQ ID NO: 198225 - DNA, 30 bp, Artificial Sequence
  Synthetic oligonucleotide
gaacaagctcaaacatgcagaaataggaga

SEQ ID NO: 198226 - DNA, 30 bp, Artificial Sequence
  Synthetic oligonucleotide
aaaatcgtggtcgatatgcgtcataggaga

SEQ ID NO: 198227 - DNA, 30 bp, Artificial Sequence
  Synthetic oligonucleotide
cgcgcaatagcggacgtccggcctaggaga

SEQ ID NO: 198228 - DNA, 30 bp, Artificial Sequence
  Synthetic oligonucleotide
tggatcgagacaacttcgcggcttcggaga

SEQ ID NO: 198229 - DNA, 30 bp, Artificial Sequence
  Synthetic oligonucleotide
gtttgttcgggaacaacaagaggagggaga

SEQ ID NO: 198230 - DNA, 30 bp, Artificial Sequence
  Synthetic oligonucleotide
gcacagggactcaaaacccgattcgggaga

SEQ ID NO: 198231 - DNA, 31 bp, Artificial Sequence
  Synthetic oligonucleotide
atgagagccaattgtaaccgcgcctgggaga

SEQ ID NO: 198232 - DNA, 30 bp, Artificial Sequence
  Synthetic oligonucleotide
aactgtacggttgagactgccattgggaga

SEQ ID NO: 198233 - DNA, 30 bp, Artificial Sequence
  Synthetic oligonucleotide
tactagtgggtcgaaccgcaatgatggaga

SEQ ID NO: 198234 - DNA, 30 bp, Artificial Sequence
  Synthetic oligonucleotide
ctgagtatgcaacccgggtacaagtggaga

SEQ ID NO: 198235 - DNA, 30 bp, Artificial Sequence
  Synthetic oligonucleotide
tatatggtcctcctgaacatcttgtggaga

SEQ ID NO: 198236 - DNA, 30 bp, Artificial Sequence
  Synthetic oligonucleotide
tctccagcccgcgtgccttgaacttggaga

SEQ ID NO: 198237 - DNA, 30 bp, Artificial Sequence
  Synthetic oligonucleotide
tagtcagggcgtcggcgcccgggttggaga

SEQ ID NO: 198238 - DNA, 30 bp, Artificial Sequence
  Synthetic oligonucleotide
attccaacaaaaccctcgagtctgatgaga

SEQ ID NO: 198239 - DNA, 30 bp, Artificial Sequence
  Synthetic oligonucleotide
cttgaataatgcagatatggaaatatgaga

SEQ ID NO: 198240 - DNA, 30 bp, Artificial Sequence
  Synthetic oligonucleotide
ggcgggatatagtaactcaatcacctgaga

SEQ ID NO: 198241 - DNA, 30 bp, Artificial Sequence
  Synthetic oligonucleotide
caaatggagtcaattgcgtatctcctgaga

SEQ ID NO: 198242 - DNA, 30 bp, Artificial Sequence
  Synthetic oligonucleotide
tcgttcgcgagctaatacgcgtcgctgaga

SEQ ID NO: 198243 - DNA, 30 bp, Artificial Sequence
  Synthetic oligonucleotide
ctacattacattcagtatgtgtttctgaga

SEQ ID NO: 198244 - DNA, 30 bp, Artificial Sequence
  Synthetic oligonucleotide
acatcatccgattaagctcgacccgtgaga

SEQ ID NO: 198245 - DNA, 30 bp, Artificial Sequence
  Synthetic oligonucleotide
gcgccagatgagtccttggggtgcgtgaga

SEQ ID NO: 198246 - DNA, 30 bp, Artificial Sequence
  Synthetic oligonucleotide
taattatgagggatacgaattgcggtgaga

SEQ ID NO: 198247 - DNA, 30 bp, Artificial Sequence
  Synthetic oligonucleotide
tatctatatgaccactggatggtattgaga

SEQ ID NO: 198248 - DNA, 30 bp, Artificial Sequence
  Synthetic oligonucleotide
ttactttatcagaggaatggagtcttgaga

SEQ ID NO: 198249 - DNA, 30 bp, Artificial Sequence
  Synthetic oligonucleotide
acttaaatctacctttggtaagagttgaga

SEQ ID NO: 198250 - DNA, 30 bp, Artificial Sequence
  Synthetic oligonucleotide
tcttgatggtttagctgcagtgttttgaga

SEQ ID NO: 198251 - DNA, 30 bp, Artificial Sequence
  Synthetic oligonucleotide
tcgtcggatacgattggaaccaaaaataga

SEQ ID NO: 198252 - DNA, 30 bp, Artificial Sequence
  Synthetic oligonucleotide
tccatgaaggaaaacgttagtttaaataga

SEQ ID NO: 198253 - DNA, 30 bp, Artificial Sequence
  Synthetic oligonucleotide
taacagcaactttctcaggtaacacataga

SEQ ID NO: 198254 - DNA, 30 bp, Artificial Sequence
  Synthetic oligonucleotide
aagcgaggtttcttgagcgcaggacataga

SEQ ID NO: 198255 - DNA, 30 bp, Artificial Sequence
  Synthetic oligonucleotide
taacaaggatgacaatcctacatacataga

SEQ ID NO: 198256 - DNA, 30 bp, Artificial Sequence
  Synthetic oligonucleotide
aggttgtttaacagccccaccggccataga

SEQ ID NO: 198257 - DNA, 30 bp, Artificial Sequence
  Synthetic oligonucleotide
atccacagcgatgacgacaccaagcataga

SEQ ID NO: 198258 - DNA, 30 bp, Artificial Sequence
  Synthetic oligonucleotide
ggtttcttgaatcgcaagagcgcgcataga

SEQ ID NO: 198259 - DNA, 30 bp, Artificial Sequence
  Synthetic oligonucleotide
ggcataacagactgaccgagaagtcataga

SEQ ID NO: 198260 - DNA, 30 bp, Artificial Sequence
  Synthetic oligonucleotide
aaccgcgcgggagacgccgaaagagataga

SEQ ID NO: 198261 - DNA, 30 bp, Artificial Sequence
  Synthetic oligonucleotide
tggtagaccgagagcctcatgcgagataga

SEQ ID NO: 198262 - DNA, 30 bp, Artificial Sequence
  Synthetic oligonucleotide
attggtcagcaccggttcaaattagataga

SEQ ID NO: 198263 - DNA, 30 bp, Artificial Sequence
  Synthetic oligonucleotide
gtacgactgataaaggacggcaacgataga

SEQ ID NO: 198264 - DNA, 30 bp, Artificial Sequence
  Synthetic oligonucleotide
agcctctacgtttaggagggggtcgataga

SEQ ID NO: 198265 - DNA, 30 bp, Artificial Sequence
  Synthetic oligonucleotide
gcttctacgtaagtcattgaagaggataga

SEQ ID NO: 198266 - DNA, 30 bp, Artificial Sequence
  Synthetic oligonucleotide
gtggagcagagggtatacccatgggataga

SEQ ID NO: 198267 - DNA, 30 bp, Artificial Sequence
  Synthetic oligonucleotide
aacttattaggggtacacgtgtgtgataga

SEQ ID NO: 198268 - DNA, 30 bp, Artificial Sequence
  Synthetic oligonucleotide
aggcacaaaactccgtaaccaaaatataga

SEQ ID NO: 198269 - DNA, 30 bp, Artificial Sequence
  Synthetic oligonucleotide
gtaaaaagactgagttcggtctgatataga

SEQ ID NO: 198270 - DNA, 30 bp, Artificial Sequence
  Synthetic oligonucleotide
ggctgaagagttcgaccaccgctgtataga

SEQ ID NO: 198271 - DNA, 30 bp, Artificial Sequence
  Synthetic oligonucleotide
ggatcagtgtgccccgttttcgtgtataga

SEQ ID NO: 198272 - DNA, 30 bp, Artificial Sequence
  Synthetic oligonucleotide
ggccactatccacaagcttgaaattataga

SEQ ID NO: 198273 - DNA, 30 bp, Artificial Sequence
  Synthetic oligonucleotide
actggcaaggactacctggttggaactaga

SEQ ID NO: 198274 - DNA, 30 bp, Artificial Sequence
  Synthetic oligonucleotide
gcagtagtgtccagaaattacgtaactaga

SEQ ID NO: 198275 - DNA, 30 bp, Artificial Sequence
  Synthetic oligonucleotide
atttgaggcaacaatgaaggcggcactaga

SEQ ID NO: 198276 - DNA, 30 bp, Artificial Sequence
  Synthetic oligonucleotide
gaaggaacggaccgcctatcgatgactaga

SEQ ID NO: 198277 - DNA, 30 bp, Artificial Sequence
  Synthetic oligonucleotide
tgatccagggacgatgcgctcttccctaga

SEQ ID NO: 198278 - DNA, 30 bp, Artificial Sequence
  Synthetic oligonucleotide
ggacaccactctcggtcggccagcgctaga

SEQ ID NO: 198279 - DNA, 30 bp, Artificial Sequence
  Synthetic oligonucleotide
ccggaagtgggatgttcctagtgcgctaga

SEQ ID NO: 198280 - DNA, 30 bp, Artificial Sequence
  Synthetic oligonucleotide
tcgagttaaaaacgggccgagatcgctaga

SEQ ID NO: 198281 - DNA, 30 bp, Artificial Sequence
  Synthetic oligonucleotide
ttttggatgcggtcttgacgattctctaga

SEQ ID NO: 198282 - DNA, 30 bp, Artificial Sequence
  Synthetic oligonucleotide
taggtatcatccttatacaactattctaga

SEQ ID NO: 198283 - DNA, 30 bp, Artificial Sequence
  Synthetic oligonucleotide
ggttggatcgtgttgtgcggggtaagtaga

SEQ ID NO: 198284 - DNA, 30 bp, Artificial Sequence
  Synthetic oligonucleotide
agcagttcgataacgagggataggagtaga

SEQ ID NO: 198285 - DNA, 30 bp, Artificial Sequence
  Synthetic oligonucleotide
ctgagaataaatcgcagtgacctgagtaga

SEQ ID NO: 198286 - DNA, 30 bp, Artificial Sequence
  Synthetic oligonucleotide
cagtagtgaggtatagggccggaacgtaga

SEQ ID NO: 198287 - DNA, 30 bp, Artificial Sequence
  Synthetic oligonucleotide
gggggatctgaaactacgataacacgtaga

SEQ ID NO: 198288 - DNA, 30 bp, Artificial Sequence
  Synthetic oligonucleotide
gccaggacctgtgattatcccatacgtaga

SEQ ID NO: 198289 - DNA, 30 bp, Artificial Sequence
  Synthetic oligonucleotide
tgacaacacccgtaggagaccgctcgtaga

SEQ ID NO: 198290 - DNA, 30 bp, Artificial Sequence
  Synthetic oligonucleotide
ccggggcccatcttactacgaccaggtaga

SEQ ID NO: 198291 - DNA, 30 bp, Artificial Sequence
  Synthetic oligonucleotide
gcggaatgggatcgggaagcggtaggtaga

SEQ ID NO: 198292 - DNA, 30 bp, Artificial Sequence
  Synthetic oligonucleotide
tacagtagacggttgtcgggtcatggtaga

SEQ ID NO: 198293 - DNA, 30 bp, Artificial Sequence
  Synthetic oligonucleotide
gtgaggcttagcgacttacgttctggtaga

SEQ ID NO: 198294 - DNA, 30 bp, Artificial Sequence
  Synthetic oligonucleotide
cacaagccgtgcgccggagatgttggtaga

SEQ ID NO: 198295 - DNA, 30 bp, Artificial Sequence
  Synthetic oligonucleotide
tcgactgtttgtagataacaatttggtaga

SEQ ID NO: 198296 - DNA, 30 bp, Artificial Sequence
  Synthetic oligonucleotide
tacgtttagccagtatagtcaggatgtaga

SEQ ID NO: 198297 - DNA, 30 bp, Artificial Sequence
  Synthetic oligonucleotide
atccttgagcaggggcgcggacaaattaga

SEQ ID NO: 198298 - DNA, 30 bp, Artificial Sequence
  Synthetic oligonucleotide
tacattgaacttttttaagaaaacattaga

SEQ ID NO: 198299 - DNA, 30 bp, Artificial Sequence
  Synthetic oligonucleotide
aaaggacggtaccagttgaacggcattaga

SEQ ID NO: 198300 - DNA, 30 bp, Artificial Sequence
  Synthetic oligonucleotide
tcggtttcatctacggtggacaaacttaga

SEQ ID NO: 198301 - DNA, 30 bp, Artificial Sequence
  Synthetic oligonucleotide
gtcaggaagaacgccatgtgagggcttaga

SEQ ID NO: 198302 - DNA, 30 bp, Artificial Sequence
  Synthetic oligonucleotide
cggatggtaaatggtttgttccatcttaga

SEQ ID NO: 198303 - DNA, 30 bp, Artificial Sequence
  Synthetic oligonucleotide
ttagttcagttgctcggtgtgggtcttaga

SEQ ID NO: 198304 - DNA, 30 bp, Artificial Sequence
  Synthetic oligonucleotide
ggctagaatattgtggattttagagttaga

SEQ ID NO: 198305 - DNA, 30 bp, Artificial Sequence
  Synthetic oligonucleotide
gagcggctgaaccttttgacgagggttaga

SEQ ID NO: 198306 - DNA, 30 bp, Artificial Sequence
  Synthetic oligonucleotide
gtccatagctacccgttgaacaatgttaga

SEQ ID NO: 198307 - DNA, 30 bp, Artificial Sequence
  Synthetic oligonucleotide
gtccatgaccgacactccatatatgttaga

SEQ ID NO: 198308 - DNA, 30 bp, Artificial Sequence
  Synthetic oligonucleotide
gcgacgcgggagaggattgaaactgttaga

SEQ ID NO: 198309 - DNA, 30 bp, Artificial Sequence
  Synthetic oligonucleotide
agttgccaggggggcgagcatgaatttaga

SEQ ID NO: 198310 - DNA, 30 bp, Artificial Sequence
  Synthetic oligonucleotide
tcaggacatgacatactaaatagctttaga

SEQ ID NO: 198311 - DNA, 30 bp, Artificial Sequence
  Synthetic oligonucleotide
tcatacgggactttaggcgccatctttaga

SEQ ID NO: 198312 - DNA, 30 bp, Artificial Sequence
  Synthetic oligonucleotide
gcggcgaggctcgtatggaatggttttaga

SEQ ID NO: 198313 - DNA, 30 bp, Artificial Sequence
  Synthetic oligonucleotide
aaacactaccactcgacagggtgttttaga

SEQ ID NO: 198314 - DNA, 30 bp, Artificial Sequence
  Synthetic oligonucleotide
gtaagtcatgggatactgtagccaaaacga

SEQ ID NO: 198315 - DNA, 30 bp, Artificial Sequence
  Synthetic oligonucleotide
aatacgattataaaccacaaaggaaaacga

SEQ ID NO: 198316 - DNA, 30 bp, Artificial Sequence
  Synthetic oligonucleotide
caccactgcggaggtccggagcacaaacga

SEQ ID NO: 198317 - DNA, 30 bp, Artificial Sequence
  Synthetic oligonucleotide
caagtatgcatgagataaattttcaaacga

SEQ ID NO: 198318 - DNA, 30 bp, Artificial Sequence
  Synthetic oligonucleotide
ggccgccaaggtaacccttaaatgaaacga

SEQ ID NO: 198319 - DNA, 30 bp, Artificial Sequence
  Synthetic oligonucleotide
cgcggctagtaggggggtttggataaacga

SEQ ID NO: 198320 - DNA, 30 bp, Artificial Sequence
  Synthetic oligonucleotide
acgttcggtgcgccggacgcaagtaaacga

SEQ ID NO: 198321 - DNA, 30 bp, Artificial Sequence
  Synthetic oligonucleotide
tgactatagtttcctgagcgacttaaacga

SEQ ID NO: 198322 - DNA, 30 bp, Artificial Sequence
  Synthetic oligonucleotide
tcaaaatgctttgatggaattcttaaacga

SEQ ID NO: 198323 - DNA, 30 bp, Artificial Sequence
  Synthetic oligonucleotide
tttggtgtaggcaagagggacaaccaacga

SEQ ID NO: 198324 - DNA, 30 bp, Artificial Sequence
  Synthetic oligonucleotide
acagtatgtgagcgcaaattggtccaacga

SEQ ID NO: 198325 - DNA, 30 bp, Artificial Sequence
  Synthetic oligonucleotide
aaacgtatcaatctatacccgggggaacga

SEQ ID NO: 198326 - DNA, 30 bp, Artificial Sequence
  Synthetic oligonucleotide
gttggggatgtaggatccgggggggaacga

SEQ ID NO: 198327 - DNA, 30 bp, Artificial Sequence
  Synthetic oligonucleotide
ctttggaatattgtttaggcctgggaacga

SEQ ID NO: 198328 - DNA, 30 bp, Artificial Sequence
  Synthetic oligonucleotide
gacttattacatcaatgagctgtggaacga

SEQ ID NO: 198329 - DNA, 30 bp, Artificial Sequence
  Synthetic oligonucleotide
gcagatgcataatggaacgtaaatgaacga

SEQ ID NO: 198330 - DNA, 30 bp, Artificial Sequence
  Synthetic oligonucleotide
tgaacagtgcattacatgcggtctgaacga

SEQ ID NO: 198331 - DNA, 30 bp, Artificial Sequence
  Synthetic oligonucleotide
tagatctgtaaagcactgcgagcgtaacga

SEQ ID NO: 198332 - DNA, 30 bp, Artificial Sequence
  Synthetic oligonucleotide
acacttggatgcgtttcccgatgttaacga

SEQ ID NO: 198333 - DNA, 30 bp, Artificial Sequence
  Synthetic oligonucleotide
tacggacttagcggtcactgtaagacacga

SEQ ID NO: 198334 - DNA, 30 bp, Artificial Sequence
  Synthetic oligonucleotide
ggcttcgtgcatcaacgcgggaagccacga

SEQ ID NO: 198335 - DNA, 30 bp, Artificial Sequence
  Synthetic oligonucleotide
ggtgggatcaggccgagaactaagccacga

SEQ ID NO: 198336 - DNA, 30 bp, Artificial Sequence
  Synthetic oligonucleotide
attggccatataaagtctgtccgtccacga

SEQ ID NO: 198337 - DNA, 30 bp, Artificial Sequence
  Synthetic oligonucleotide
tggaaaatctcaactcctacgcaagcacga

SEQ ID NO: 198338 - DNA, 30 bp, Artificial Sequence
  Synthetic oligonucleotide
ctggcgtggtagatcaggtagacagcacga

SEQ ID NO: 198339 - DNA, 30 bp, Artificial Sequence
  Synthetic oligonucleotide
ttagctaactaatcacatgtgtgagcacga

SEQ ID NO: 198340 - DNA, 30 bp, Artificial Sequence
  Synthetic oligonucleotide
acctgtgtatcagccatgagcatcgcacga

SEQ ID NO: 198341 - DNA, 30 bp, Artificial Sequence
  Synthetic oligonucleotide
caccactacggcttctgcctctaatcacga

SEQ ID NO: 198342 - DNA, 30 bp, Artificial Sequence
  Synthetic oligonucleotide
tggaaggcgagggctacggtcgaccgacga

SEQ ID NO: 198343 - DNA, 30 bp, Artificial Sequence
  Synthetic oligonucleotide
tacggaacaaattctatatggcgtggacga

SEQ ID NO: 198344 - DNA, 30 bp, Artificial Sequence
  Synthetic oligonucleotide
cgggggaatctccaggttttaaaatgacga

SEQ ID NO: 198345 - DNA, 30 bp, Artificial Sequence
  Synthetic oligonucleotide
ggacaccttgatcgtcgggggaagtgacga

SEQ ID NO: 198346 - DNA, 30 bp, Artificial Sequence
  Synthetic oligonucleotide
gtgggagactccaacccgtacgctatacga

SEQ ID NO: 198347 - DNA, 30 bp, Artificial Sequence
  Synthetic oligonucleotide
acacactctaggaaatcggtctttatacga

SEQ ID NO: 198348 - DNA, 30 bp, Artificial Sequence
  Synthetic oligonucleotide
agctctagctggcagatttccaaactacga

SEQ ID NO: 198349 - DNA, 30 bp, Artificial Sequence
  Synthetic oligonucleotide
tgagcgtcttttcgccactaaacactacga

SEQ ID NO: 198350 - DNA, 30 bp, Artificial Sequence
  Synthetic oligonucleotide
tggaagtccgggactaatgatgtactacga

SEQ ID NO: 198351 - DNA, 30 bp, Artificial Sequence
  Synthetic oligonucleotide
ggtggagaactatagagtcttatgctacga

SEQ ID NO: 198352 - DNA, 30 bp, Artificial Sequence
  Synthetic oligonucleotide
ctaggttgtggtagtggcaatggtctacga

SEQ ID NO: 198353 - DNA, 30 bp, Artificial Sequence
  Synthetic oligonucleotide
gaccgtactcaaaccgtataagacgtacga

SEQ ID NO: 198354 - DNA, 30 bp, Artificial Sequence
  Synthetic oligonucleotide
cgcgatgacgcggggcgcattagcgtacga

SEQ ID NO: 198355 - DNA, 30 bp, Artificial Sequence
  Synthetic oligonucleotide
acattgtttccaaaggcaggctgcgtacga

SEQ ID NO: 198356 - DNA, 30 bp, Artificial Sequence
  Synthetic oligonucleotide
cgacactccactatggtttcggtcgtacga

SEQ ID NO: 198357 - DNA, 30 bp, Artificial Sequence
  Synthetic oligonucleotide
ttacagtgtgagattgcgtaccaggtacga

SEQ ID NO: 198358 - DNA, 30 bp, Artificial Sequence
  Synthetic oligonucleotide
aaggattgttcggtagatccagcattacga

SEQ ID NO: 198359 - DNA, 30 bp, Artificial Sequence
  Synthetic oligonucleotide
aggaagatgttggccgcgtcactattacga

SEQ ID NO: 198360 - DNA, 30 bp, Artificial Sequence
  Synthetic oligonucleotide
agcccgggtacggcaatgaaggacttacga

SEQ ID NO: 198361 - DNA, 30 bp, Artificial Sequence
  Synthetic oligonucleotide
ttacacgtccgagcccgactggtcttacga

SEQ ID NO: 198362 - DNA, 30 bp, Artificial Sequence
  Synthetic oligonucleotide
gttagagagcacaatacgtgcaatttacga

SEQ ID NO: 198363 - DNA, 30 bp, Artificial Sequence
  Synthetic oligonucleotide
acgcggttcgagtgacagttcggtttacga

SEQ ID NO: 198364 - DNA, 30 bp, Artificial Sequence
  Synthetic oligonucleotide
ggtggtcacgatggtttggaggcaaaccga

SEQ ID NO: 198365 - DNA, 30 bp, Artificial Sequence
  Synthetic oligonucleotide
atctgggcgacaataagctgaaagaaccga

SEQ ID NO: 198366 - DNA, 30 bp, Artificial Sequence
  Synthetic oligonucleotide
ctaataaggatatatataggtgagaaccga

SEQ ID NO: 198367 - DNA, 30 bp, Artificial Sequence
  Synthetic oligonucleotide
ggtggttttatgggttgatagtggaaccga

SEQ ID NO: 198368 - DNA, 30 bp, Artificial Sequence
  Synthetic oligonucleotide
aagtgtggctgaaagtaataaactaaccga

SEQ ID NO: 198369 - DNA, 30 bp, Artificial Sequence
  Synthetic oligonucleotide
gggacggacttatatgccacctctaaccga

SEQ ID NO: 198370 - DNA, 30 bp, Artificial Sequence
  Synthetic oligonucleotide
gggactcataactggcacgtggtacaccga

SEQ ID NO: 198371 - DNA, 30 bp, Artificial Sequence
  Synthetic oligonucleotide
aatcgagattacttcgagtttaggcaccga

SEQ ID NO: 198372 - DNA, 30 bp, Artificial Sequence
  Synthetic oligonucleotide
actgatatcacagagggggaattgcaccga

SEQ ID NO: 198373 - DNA, 30 bp, Artificial Sequence
  Synthetic oligonucleotide
aatcacgattaacaggggcttgctgaccga

SEQ ID NO: 198374 - DNA, 30 bp, Artificial Sequence
  Synthetic oligonucleotide
ccggtgcctcaatgcgcgggcagtgaccga

SEQ ID NO: 198375 - DNA, 30 bp, Artificial Sequence
  Synthetic oligonucleotide
ggtaagtatctttctctgggccgtgaccga

SEQ ID NO: 198376 - DNA, 30 bp, Artificial Sequence
  Synthetic oligonucleotide
tgacgcgaagtccggccgggttttgaccga

SEQ ID NO: 198377 - DNA, 30 bp, Artificial Sequence
  Synthetic oligonucleotide
gcagtgggcgggtgcacaagggaataccga

SEQ ID NO: 198378 - DNA, 30 bp, Artificial Sequence
  Synthetic oligonucleotide
cgcttcgatatcttactaatgtactaccga

SEQ ID NO: 198379 - DNA, 30 bp, Artificial Sequence
  Synthetic oligonucleotide
gaacacccgaatttccgacggaattaccga

SEQ ID NO: 198380 - DNA, 30 bp, Artificial Sequence
  Synthetic oligonucleotide
caggaggaaacctcattccttgaaacccga

SEQ ID NO: 198381 - DNA, 30 bp, Artificial Sequence
  Synthetic oligonucleotide
ggaaccaccctcctcagtaattaaccccga

SEQ ID NO: 198382 - DNA, 30 bp, Artificial Sequence
  Synthetic oligonucleotide
cagggccacattaggaaatgccccccccga

SEQ ID NO: 198383 - DNA, 30 bp, Artificial Sequence
  Synthetic oligonucleotide
ggtatgtttggacacttcgcacaagcccga

SEQ ID NO: 198384 - DNA, 30 bp, Artificial Sequence
  Synthetic oligonucleotide
accctacattgtatatactggccagcccga

SEQ ID NO: 198385 - DNA, 30 bp, Artificial Sequence
  Synthetic oligonucleotide
gggtgatttaaactgctataatgcgcccga

SEQ ID NO: 198386 - DNA, 30 bp, Artificial Sequence
  Synthetic oligonucleotide
gaacgcgtactcagatagcgttgtgcccga

SEQ ID NO: 198387 - DNA, 30 bp, Artificial Sequence
  Synthetic oligonucleotide
gttattgatacgcctaacgcgggatcccga

SEQ ID NO: 198388 - DNA, 30 bp, Artificial Sequence
  Synthetic oligonucleotide
agccctaggccatgaggatcggcaagccga

SEQ ID NO: 198389 - DNA, 30 bp, Artificial Sequence
  Synthetic oligonucleotide
ggtcaggctgacaccctgcacggaagccga

SEQ ID NO: 198390 - DNA, 30 bp, Artificial Sequence
  Synthetic oligonucleotide
ataggcatcgtgatgctcgatgtcagccga

SEQ ID NO: 198391 - DNA, 30 bp, Artificial Sequence
  Synthetic oligonucleotide
ctctataggtacacggtagtaaagagccga

SEQ ID NO: 198392 - DNA, 30 bp, Artificial Sequence
  Synthetic oligonucleotide
taactgtcgtgaaatttcgttgttagccga

SEQ ID NO: 198393 - DNA, 30 bp, Artificial Sequence
  Synthetic oligonucleotide
ttgctagagcgaggaagccggaaccgccga

SEQ ID NO: 198394 - DNA, 30 bp, Artificial Sequence
  Synthetic oligonucleotide
tcttgcgtctcgctcgggatagatcgccga

SEQ ID NO: 198395 - DNA, 30 bp, Artificial Sequence
  Synthetic oligonucleotide
atgaaatacgaagattagattggaggccga

SEQ ID NO: 198396 - DNA, 30 bp, Artificial Sequence
  Synthetic oligonucleotide
cctaaagttcgcaaagaattattcggccga

SEQ ID NO: 198397 - DNA, 30 bp, Artificial Sequence
  Synthetic oligonucleotide
acctatagcaaggcgacggttgggggccga

SEQ ID NO: 198398 - DNA, 30 bp, Artificial Sequence
  Synthetic oligonucleotide
cattaatgcattctgtctcttaatggccga

SEQ ID NO: 198399 - DNA, 30 bp, Artificial Sequence
  Synthetic oligonucleotide
gcctctgaaaagtttaactgctttggccga

SEQ ID NO: 198400 - DNA, 30 bp, Artificial Sequence
  Synthetic oligonucleotide
accaacttttaatggagagtaacttgccga

SEQ ID NO: 198401 - DNA, 30 bp, Artificial Sequence
  Synthetic oligonucleotide
taaaaaactaggaaagatgacttttgccga

SEQ ID NO: 198402 - DNA, 30 bp, Artificial Sequence
  Synthetic oligonucleotide
tatgcgagcccaagaccggtgacaatccga

SEQ ID NO: 198403 - DNA, 30 bp, Artificial Sequence
  Synthetic oligonucleotide
aggcgttggcaattcgtaaaaggaatccga

SEQ ID NO: 198404 - DNA, 30 bp, Artificial Sequence
  Synthetic oligonucleotide
atggctcccgatgagagacatgtaatccga

SEQ ID NO: 198405 - DNA, 30 bp, Artificial Sequence
  Synthetic oligonucleotide
cctagcctgacaaggtgagtttagatccga

SEQ ID NO: 198406 - DNA, 30 bp, Artificial Sequence
  Synthetic oligonucleotide
caccgggacgtgcttatatctaaactccga

SEQ ID NO: 198407 - DNA, 30 bp, Artificial Sequence
  Synthetic oligonucleotide
cttagaagggtgtaccattggaatctccga

SEQ ID NO: 198408 - DNA, 30 bp, Artificial Sequence
  Synthetic oligonucleotide
cttatcgtcatccggcttacgcatctccga

SEQ ID NO: 198409 - DNA, 30 bp, Artificial Sequence
  Synthetic oligonucleotide
aatgggcatcaactcacaggcagcttccga

SEQ ID NO: 198410 - DNA, 30 bp, Artificial Sequence
  Synthetic oligonucleotide
tgggatcgtcggtatgctggcgcgaagcga

SEQ ID NO: 198411 - DNA, 30 bp, Artificial Sequence
  Synthetic oligonucleotide
aaagaactgagttttcttcagtttaagcga

SEQ ID NO: 198412 - DNA, 30 bp, Artificial Sequence
  Synthetic oligonucleotide
gccggcaaccagtggtcaccgaaccagcga

SEQ ID NO: 198413 - DNA, 30 bp, Artificial Sequence
  Synthetic oligonucleotide
ggcgtactgataacctagctgaaccagcga

SEQ ID NO: 198414 - DNA, 30 bp, Artificial Sequence
  Synthetic oligonucleotide
ttgtgccttgcgggagagagtcagcagcga

SEQ ID NO: 198415 - DNA, 30 bp, Artificial Sequence
  Synthetic oligonucleotide
gtgtgtatgaaaggaggggggaatcagcga

SEQ ID NO: 198416 - DNA, 30 bp, Artificial Sequence
  Synthetic oligonucleotide
accaggatcgccacgaacctgtgtcagcga

SEQ ID NO: 198417 - DNA, 30 bp, Artificial Sequence
  Synthetic oligonucleotide
gatacacttgaagtgcactggtcagagcga

SEQ ID NO: 198418 - DNA, 30 bp, Artificial Sequence
  Synthetic oligonucleotide
atccgtaattgtgatccgcgacgggagcga

SEQ ID NO: 198419 - DNA, 30 bp, Artificial Sequence
  Synthetic oligonucleotide
aatcggaatattgttggttagacctagcga

SEQ ID NO: 198420 - DNA, 30 bp, Artificial Sequence
  Synthetic oligonucleotide
agtgggcgttttgagggacgggtgtagcga

SEQ ID NO: 198421 - DNA, 30 bp, Artificial Sequence
  Synthetic oligonucleotide
gccgaagcttgaatgttgagaaccacgcga

SEQ ID NO: 198422 - DNA, 30 bp, Artificial Sequence
  Synthetic oligonucleotide
cgaaaagcgcagggatccgattatacgcga

SEQ ID NO: 198423 - DNA, 30 bp, Artificial Sequence
  Synthetic oligonucleotide
tggtcagtgggctggcctaaggttacgcga

SEQ ID NO: 198424 - DNA, 30 bp, Artificial Sequence
  Synthetic oligonucleotide
ctggcgggcagtacccaatctcacccgcga

SEQ ID NO: 198425 - DNA, 30 bp, Artificial Sequence
  Synthetic oligonucleotide
gccaagagacttcgggcggttagtccgcga

SEQ ID NO: 198426 - DNA, 30 bp, Artificial Sequence
  Synthetic oligonucleotide
gagacccgttcttgtgggttgtttccgcga

SEQ ID NO: 198427 - DNA, 30 bp, Artificial Sequence
  Synthetic oligonucleotide
aaaataaacaatagtgccgcgttatcgcga

SEQ ID NO: 198428 - DNA, 30 bp, Artificial Sequence
  Synthetic oligonucleotide
aagctgagcaacagcacgcaacgctcgcga

SEQ ID NO: 198429 - DNA, 30 bp, Artificial Sequence
  Synthetic oligonucleotide
aaccctatcgagccgagggagatttcgcga

SEQ ID NO: 198430 - DNA, 30 bp, Artificial Sequence
  Synthetic oligonucleotide
tctcgagggatagctggtttgttaaggcga

SEQ ID NO: 198431 - DNA, 30 bp, Artificial Sequence
  Synthetic oligonucleotide
atgagtccggctaattaatcagccaggcga

SEQ ID NO: 198432 - DNA, 30 bp, Artificial Sequence
  Synthetic oligonucleotide
gaagtggggcactcggtggcactgaggcga

SEQ ID NO: 198433 - DNA, 30 bp, Artificial Sequence
  Synthetic oligonucleotide
ccttagctgttcttgtgagaagaccggcga

SEQ ID NO: 198434 - DNA, 30 bp, Artificial Sequence
  Synthetic oligonucleotide
ggtaaaggactaacttcacacttccggcga

SEQ ID NO: 198435 - DNA, 30 bp, Artificial Sequence
  Synthetic oligonucleotide
gacagcgggccaaattttgtgaagcggcga

SEQ ID NO: 198436 - DNA, 30 bp, Artificial Sequence
  Synthetic oligonucleotide
gtttggcataaccgctaagtaagagggcga

SEQ ID NO: 198437 - DNA, 30 bp, Artificial Sequence
  Synthetic oligonucleotide
catttaataatgtaccagtagtacgggcga

SEQ ID NO: 198438 - DNA, 30 bp, Artificial Sequence
  Synthetic oligonucleotide
gtgcaggttgacaggcacctaccatggcga

SEQ ID NO: 198439 - DNA, 30 bp, Artificial Sequence
  Synthetic oligonucleotide
ggaaacaaacggctgcggacagattggcga

SEQ ID NO: 198440 - DNA, 30 bp, Artificial Sequence
  Synthetic oligonucleotide
acacacaccagaaaatttttgtgttggcga

SEQ ID NO: 198441 - DNA, 30 bp, Artificial Sequence
  Synthetic oligonucleotide
gggatcacatcgtatacactagacgtgcga

SEQ ID NO: 198442 - DNA, 30 bp, Artificial Sequence
  Synthetic oligonucleotide
actaaggtcgcttgacaaaaaccggtgcga

SEQ ID NO: 198443 - DNA, 30 bp, Artificial Sequence
  Synthetic oligonucleotide
gtagaacccctcacggctgtcgcggtgcga

SEQ ID NO: 198444 - DNA, 30 bp, Artificial Sequence
  Synthetic oligonucleotide
taagtagaatctgtgcaaaagagattgcga

SEQ ID NO: 198445 - DNA, 30 bp, Artificial Sequence
  Synthetic oligonucleotide
cacgacttaagggtagtcgctgtcttgcga

SEQ ID NO: 198446 - DNA, 30 bp, Artificial Sequence
  Synthetic oligonucleotide
agagtgctagcatgtctaaaagggttgcga

SEQ ID NO: 198447 - DNA, 30 bp, Artificial Sequence
  Synthetic oligonucleotide
tatccagcggccatgacaaggagaaatcga

SEQ ID NO: 198448 - DNA, 29 bp, Artificial Sequence
  Synthetic oligonucleotide
caaagatccaacgcggccggagaaatcga

SEQ ID NO: 198449 - DNA, 30 bp, Artificial Sequence
  Synthetic oligonucleotide
gatcgaaagcagtgaagtaaaatgaatcga

SEQ ID NO: 198450 - DNA, 30 bp, Artificial Sequence
  Synthetic oligonucleotide
atttctgcggactgcggggcaggtaatcga

SEQ ID NO: 198451 - DNA, 30 bp, Artificial Sequence
  Synthetic oligonucleotide
ctgttgttttcgtatccttgttttaatcga

SEQ ID NO: 198452 - DNA, 30 bp, Artificial Sequence
  Synthetic oligonucleotide
gctcgttggggaaaaatccatcaacatcga

SEQ ID NO: 198453 - DNA, 30 bp, Artificial Sequence
  Synthetic oligonucleotide
gctcatgggtatcccggattgccacatcga

SEQ ID NO: 198454 - DNA, 30 bp, Artificial Sequence
  Synthetic oligonucleotide
cctggtaccttagctcgccaggaccatcga

SEQ ID NO: 198455 - DNA, 30 bp, Artificial Sequence
  Synthetic oligonucleotide
tttccctacagagggtcgagctgccatcga

SEQ ID NO: 198456 - DNA, 30 bp, Artificial Sequence
  Synthetic oligonucleotide
gtacatgtgaacacgcaagcctagcatcga

SEQ ID NO: 198457 - DNA, 30 bp, Artificial Sequence
  Synthetic oligonucleotide
gtgcgccatgtgcaatatgttaggcatcga

SEQ ID NO: 198458 - DNA, 30 bp, Artificial Sequence
  Synthetic oligonucleotide
caaagatagcgagcggtcatatggcatcga

SEQ ID NO: 198459 - DNA, 30 bp, Artificial Sequence
  Synthetic oligonucleotide
cggctagtcgccttctgtatccctcatcga

SEQ ID NO: 198460 - DNA, 30 bp, Artificial Sequence
  Synthetic oligonucleotide
aggtttgtagaattcatcgcgatggatcga

SEQ ID NO: 198461 - DNA, 30 bp, Artificial Sequence
  Synthetic oligonucleotide
tgtctactaagttcaatgtaatggtatcga

SEQ ID NO: 198462 - DNA, 30 bp, Artificial Sequence
  Synthetic oligonucleotide
agatttcgggacgaaatgtaggtgtatcga

SEQ ID NO: 198463 - DNA, 30 bp, Artificial Sequence
  Synthetic oligonucleotide
gcgtcgggtgtgagtgctactagcactcga

SEQ ID NO: 198464 - DNA, 30 bp, Artificial Sequence
  Synthetic oligonucleotide
gttcacaggacttggacggcgagtactcga

SEQ ID NO: 198465 - DNA, 30 bp, Artificial Sequence
  Synthetic oligonucleotide
caaactgtattatgggctcattaagctcga

SEQ ID NO: 198466 - DNA, 30 bp, Artificial Sequence
  Synthetic oligonucleotide
gcataacccagtttcgaatacagcgctcga

SEQ ID NO: 198467 - DNA, 30 bp, Artificial Sequence
  Synthetic oligonucleotide
ctatcggtcataaaaccgacttaggctcga

SEQ ID NO: 198468 - DNA, 30 bp, Artificial Sequence
  Synthetic oligonucleotide
cgcacaactgagatgaatctgtgggctcga

SEQ ID NO: 198469 - DNA, 30 bp, Artificial Sequence
  Synthetic oligonucleotide
acatcgattgatcgactcacttgggctcga

SEQ ID NO: 198470 - DNA, 30 bp, Artificial Sequence
  Synthetic oligonucleotide
cgaataaggacacttagcccttgggctcga

SEQ ID NO: 198471 - DNA, 30 bp, Artificial Sequence
  Synthetic oligonucleotide
tgccatcggggacgttaatcccttgctcga

SEQ ID NO: 198472 - DNA, 30 bp, Artificial Sequence
  Synthetic oligonucleotide
tcaagcggtgctattccaaacaaatctcga

SEQ ID NO: 198473 - DNA, 30 bp, Artificial Sequence
  Synthetic oligonucleotide
gcatcgaccccggaatacgcaccctctcga

SEQ ID NO: 198474 - DNA, 30 bp, Artificial Sequence
  Synthetic oligonucleotide
tggtgactactacgtccgcacccctctcga

SEQ ID NO: 198475 - DNA, 30 bp, Artificial Sequence
  Synthetic oligonucleotide
tgggtaccaaccctatcctctcagtctcga

SEQ ID NO: 198476 - DNA, 30 bp, Artificial Sequence
  Synthetic oligonucleotide
ggacgtgatgtacgcatctttaattctcga

SEQ ID NO: 198477 - DNA, 30 bp, Artificial Sequence
  Synthetic oligonucleotide
ccgagagagtttaccaaaacgtgttctcga

SEQ ID NO: 198478 - DNA, 30 bp, Artificial Sequence
  Synthetic oligonucleotide
atctaaaggtggcgtgtaacctaaagtcga

SEQ ID NO: 198479 - DNA, 30 bp, Artificial Sequence
  Synthetic oligonucleotide
aagatttgtggtaactgtcgctaaagtcga

SEQ ID NO: 198480 - DNA, 30 bp, Artificial Sequence
  Synthetic oligonucleotide
taatcgaaaataagtccgaaaccaagtcga

SEQ ID NO: 198481 - DNA, 30 bp, Artificial Sequence
  Synthetic oligonucleotide
gtggtggtagaagggggacgcatcagtcga

SEQ ID NO: 198482 - DNA, 30 bp, Artificial Sequence
  Synthetic oligonucleotide
gagtccgcttgtaacgcaaaagggagtcga

SEQ ID NO: 198483 - DNA, 30 bp, Artificial Sequence
  Synthetic oligonucleotide
gtaggcatctcgtcacggggcaatagtcga

SEQ ID NO: 198484 - DNA, 30 bp, Artificial Sequence
  Synthetic oligonucleotide
aatacgataacctcgatacctagtagtcga

SEQ ID NO: 198485 - DNA, 30 bp, Artificial Sequence
  Synthetic oligonucleotide
gattgatcgtgttagacattcggtagtcga

SEQ ID NO: 198486 - DNA, 31 bp, Artificial Sequence
  Synthetic oligonucleotide
gtctgccacagagatactgattacacgtcga

SEQ ID NO: 198487 - DNA, 30 bp, Artificial Sequence
  Synthetic oligonucleotide
cggcacgcctacgcccccggctaccgtcga

SEQ ID NO: 198488 - DNA, 30 bp, Artificial Sequence
  Synthetic oligonucleotide
cggaggtgtcaggctcgactgggccgtcga

SEQ ID NO: 198489 - DNA, 30 bp, Artificial Sequence
  Synthetic oligonucleotide
ctcggttggggttagcacggatctcgtcga

SEQ ID NO: 198490 - DNA, 30 bp, Artificial Sequence
  Synthetic oligonucleotide
cggatgaagcgtgcgatccgtagaggtcga

SEQ ID NO: 198491 - DNA, 30 bp, Artificial Sequence
  Synthetic oligonucleotide
acatagtcgtaatgacacaaccggggtcga

SEQ ID NO: 198492 - DNA, 30 bp, Artificial Sequence
  Synthetic oligonucleotide
gccgcggattggtgagaatagcggggtcga

SEQ ID NO: 198493 - DNA, 30 bp, Artificial Sequence
  Synthetic oligonucleotide
tgggacgtcttggcattgtgtattggtcga

SEQ ID NO: 198494 - DNA, 30 bp, Artificial Sequence
  Synthetic oligonucleotide
cttatgggattgtgaccagtatttggtcga

SEQ ID NO: 198495 - DNA, 30 bp, Artificial Sequence
  Synthetic oligonucleotide
ggcccttatcgttatcttgtcaaaattcga

SEQ ID NO: 198496 - DNA, 30 bp, Artificial Sequence
  Synthetic oligonucleotide
ccctgtttgaagtgcttattaacaattcga

SEQ ID NO: 198497 - DNA, 30 bp, Artificial Sequence
  Synthetic oligonucleotide
tagctatagctaatgtaatacccaattcga

SEQ ID NO: 198498 - DNA, 30 bp, Artificial Sequence
  Synthetic oligonucleotide
caaggcaacgccgttccgaatagaattcga

SEQ ID NO: 198499 - DNA, 30 bp, Artificial Sequence
  Synthetic oligonucleotide
ccactcggagagttttaatgcatcattcga

SEQ ID NO: 198500 - DNA, 30 bp, Artificial Sequence
  Synthetic oligonucleotide
ttaacacatagcataaggccacctattcga

SEQ ID NO: 198501 - DNA, 30 bp, Artificial Sequence
  Synthetic oligonucleotide
ggcatgtatctttgattagttcgtattcga

SEQ ID NO: 198502 - DNA, 30 bp, Artificial Sequence
  Synthetic oligonucleotide
gagcaaagcccagagcattttgagcttcga

SEQ ID NO: 198503 - DNA, 30 bp, Artificial Sequence
  Synthetic oligonucleotide
tgtatctacgcgttccatatatagcttcga

SEQ ID NO: 198504 - DNA, 30 bp, Artificial Sequence
  Synthetic oligonucleotide
aaaactgacagtacattatagccgcttcga

SEQ ID NO: 198505 - DNA, 30 bp, Artificial Sequence
  Synthetic oligonucleotide
atacgacaattttttacattgacagttcga

SEQ ID NO: 198506 - DNA, 30 bp, Artificial Sequence
  Synthetic oligonucleotide
gctcatgcgtaacaacggcctgacgttcga

SEQ ID NO: 198507 - DNA, 30 bp, Artificial Sequence
  Synthetic oligonucleotide
gcggagacacgcaatggcggcggcgttcga

SEQ ID NO: 198508 - DNA, 30 bp, Artificial Sequence
  Synthetic oligonucleotide
ggttggccgccctcccatcatcaggttcga

SEQ ID NO: 198509 - DNA, 30 bp, Artificial Sequence
  Synthetic oligonucleotide
atgtggtacgaatgagtcgcggctgttcga

SEQ ID NO: 198510 - DNA, 30 bp, Artificial Sequence
  Synthetic oligonucleotide
tacgtagcggtatggtacactaggtttcga

SEQ ID NO: 198511 - DNA, 30 bp, Artificial Sequence
  Synthetic oligonucleotide
ctttggcgcactaatgtgaacgattttcga

SEQ ID NO: 198512 - DNA, 30 bp, Artificial Sequence
  Synthetic oligonucleotide
ttaatgagaagtagaagaattgcttttcga

SEQ ID NO: 198513 - DNA, 30 bp, Artificial Sequence
  Synthetic oligonucleotide
cgtgctgggacaactgttcggtgttttcga

SEQ ID NO: 198514 - DNA, 30 bp, Artificial Sequence
  Synthetic oligonucleotide
gaccgaaggactctcagttaagtttttcga

SEQ ID NO: 198515 - DNA, 29 bp, Artificial Sequence
  Synthetic oligonucleotide
caaaagcccggcaccccccgcaaaaagga

SEQ ID NO: 198516 - DNA, 30 bp, Artificial Sequence
  Synthetic oligonucleotide
cggttttgtacgggatacggcgaaaaagga

SEQ ID NO: 198517 - DNA, 30 bp, Artificial Sequence
  Synthetic oligonucleotide
tcggatgttaacaggataaaggacaaagga

SEQ ID NO: 198518 - DNA, 30 bp, Artificial Sequence
  Synthetic oligonucleotide
acagaacgtaaatgtcgttcttccaaagga

SEQ ID NO: 198519 - DNA, 30 bp, Artificial Sequence
  Synthetic oligonucleotide
tagatgaaaggagtccaggtcaagaaagga

SEQ ID NO: 198520 - DNA, 30 bp, Artificial Sequence
  Synthetic oligonucleotide
ggtcagtgagaaccgctgcttccgaaagga

SEQ ID NO: 198521 - DNA, 30 bp, Artificial Sequence
  Synthetic oligonucleotide
gatatcatacggtgataccagggacaagga

SEQ ID NO: 198522 - DNA, 30 bp, Artificial Sequence
  Synthetic oligonucleotide
gctagcgctgtatcgaagaagcggcaagga

SEQ ID NO: 198523 - DNA, 30 bp, Artificial Sequence
  Synthetic oligonucleotide
gtgcggggctgttttctgtaggatcaagga

SEQ ID NO: 198524 - DNA, 30 bp, Artificial Sequence
  Synthetic oligonucleotide
cgagacaatggtacggtgatgcctcaagga

SEQ ID NO: 198525 - DNA, 30 bp, Artificial Sequence
  Synthetic oligonucleotide
ccaatcaaggggaggcggcaatgtcaagga

SEQ ID NO: 198526 - DNA, 30 bp, Artificial Sequence
  Synthetic oligonucleotide
gtacttgacaaaacagctcccaaagaagga

SEQ ID NO: 198527 - DNA, 30 bp, Artificial Sequence
  Synthetic oligonucleotide
tttaacaaaggcattatagcagccgaagga

SEQ ID NO: 198528 - DNA, 30 bp, Artificial Sequence
  Synthetic oligonucleotide
tgcatgaggttgcaatcccaacggtaagga

SEQ ID NO: 198529 - DNA, 30 bp, Artificial Sequence
  Synthetic oligonucleotide
ttatcgtatgaattcccggataaaacagga

SEQ ID NO: 198530 - DNA, 30 bp, Artificial Sequence
  Synthetic oligonucleotide
cagactcatccataaaggtttaaaacagga

SEQ ID NO: 198531 - DNA, 30 bp, Artificial Sequence
  Synthetic oligonucleotide
cgaatttagtccttagagacgcgaacagga

SEQ ID NO: 198532 - DNA, 30 bp, Artificial Sequence
  Synthetic oligonucleotide
ggtcggtgagtaatgaatcggcgaacagga

SEQ ID NO: 198533 - DNA, 28 bp, Artificial Sequence
  Synthetic oligonucleotide
gggcatgtagtcctattgcctcacagga

SEQ ID NO: 198534 - DNA, 30 bp, Artificial Sequence
  Synthetic oligonucleotide
gagcaattagaagagctgggctatacagga

SEQ ID NO: 198535 - DNA, 30 bp, Artificial Sequence
  Synthetic oligonucleotide
aaaaacaggtccattcctcgagttacagga

SEQ ID NO: 198536 - DNA, 30 bp, Artificial Sequence
  Synthetic oligonucleotide
cggtgatattgtgaataacagctaccagga

SEQ ID NO: 198537 - DNA, 30 bp, Artificial Sequence
  Synthetic oligonucleotide
ggttataaggcagagatggattacccagga

SEQ ID NO: 198538 - DNA, 30 bp, Artificial Sequence
  Synthetic oligonucleotide
cttaagagcatcttaataaaaagtccagga

SEQ ID NO: 198539 - DNA, 30 bp, Artificial Sequence
  Synthetic oligonucleotide
atgaacgaccatgaaatggtcccagcagga

SEQ ID NO: 198540 - DNA, 30 bp, Artificial Sequence
  Synthetic oligonucleotide
cgtcatatgtcttaaaaggtcagcgcagga

SEQ ID NO: 198541 - DNA, 30 bp, Artificial Sequence
  Synthetic oligonucleotide
atggcgaaatttgcgaaggtccgcgcagga

SEQ ID NO: 198542 - DNA, 30 bp, Artificial Sequence
  Synthetic oligonucleotide
ttgagatctacatgattatccgaggcagga

SEQ ID NO: 198543 - DNA, 30 bp, Artificial Sequence
  Synthetic oligonucleotide
taggacaatcgcccgcagggtacggcagga

SEQ ID NO: 198544 - DNA, 31 bp, Artificial Sequence
  Synthetic oligonucleotide
gaatcggttaatggtagaataagcggcagga

SEQ ID NO: 198545 - DNA, 30 bp, Artificial Sequence
  Synthetic oligonucleotide
gcaggcagatgtacgaaggataaatcagga

SEQ ID NO: 198546 - DNA, 30 bp, Artificial Sequence
  Synthetic oligonucleotide
tggtaggcgtgggaatttcttaaatcagga

SEQ ID NO: 198547 - DNA, 30 bp, Artificial Sequence
  Synthetic oligonucleotide
gaggtcgccagaccaagcgtactatcagga

SEQ ID NO: 198548 - DNA, 30 bp, Artificial Sequence
  Synthetic oligonucleotide
tgccttgaagtcacagaagggcactcagga

SEQ ID NO: 198549 - DNA, 30 bp, Artificial Sequence
  Synthetic oligonucleotide
cgaaaagtgacgtagggagctttctcagga

SEQ ID NO: 198550 - DNA, 30 bp, Artificial Sequence
  Synthetic oligonucleotide
cctaaaggggcataataaccatcgtcagga

SEQ ID NO: 198551 - DNA, 30 bp, Artificial Sequence
  Synthetic oligonucleotide
aaaacaccgctacagtcagactattcagga

SEQ ID NO: 198552 - DNA, 30 bp, Artificial Sequence
  Synthetic oligonucleotide
tataaggatcctagcctggggacttcagga

SEQ ID NO: 198553 - DNA, 30 bp, Artificial Sequence
  Synthetic oligonucleotide
taccgcgtcaggggctaatggagcagagga

SEQ ID NO: 198554 - DNA, 30 bp, Artificial Sequence
  Synthetic oligonucleotide
acgacggcaagcgggcgcggtaagagagga

SEQ ID NO: 198555 - DNA, 30 bp, Artificial Sequence
  Synthetic oligonucleotide
ggacgagccgcagattcatgaaggagagga

SEQ ID NO: 198556 - DNA, 30 bp, Artificial Sequence
  Synthetic oligonucleotide
tcttcccatcgtcgtctaacgaggagagga

SEQ ID NO: 198557 - DNA, 30 bp, Artificial Sequence
  Synthetic oligonucleotide
ataataagcgcaccggataaaatgagagga

SEQ ID NO: 198558 - DNA, 30 bp, Artificial Sequence
  Synthetic oligonucleotide
tgacgttccaagaatacctgtgtgagagga

SEQ ID NO: 198559 - DNA, 30 bp, Artificial Sequence
  Synthetic oligonucleotide
tggtacatattgtacttagcacaacgagga

SEQ ID NO: 198560 - DNA, 30 bp, Artificial Sequence
  Synthetic oligonucleotide
cactcgcggaggacgcccttggagcgagga

SEQ ID NO: 198561 - DNA, 30 bp, Artificial Sequence
  Synthetic oligonucleotide
aatctgctccgcgtgatcatatggcgagga

SEQ ID NO: 198562 - DNA, 30 bp, Artificial Sequence
  Synthetic oligonucleotide
acctaagggctcaggataccggatcgagga

SEQ ID NO: 198563 - DNA, 30 bp, Artificial Sequence
  Synthetic oligonucleotide
ttccggccatacgtatcggtcgctcgagga

SEQ ID NO: 198564 - DNA, 30 bp, Artificial Sequence
  Synthetic oligonucleotide
actagcaacatcaacaacgcagaaggagga

SEQ ID NO: 198565 - DNA, 30 bp, Artificial Sequence
  Synthetic oligonucleotide
ctcgggtccggcctccgtgtaagaggagga

SEQ ID NO: 198566 - DNA, 30 bp, Artificial Sequence
  Synthetic oligonucleotide
cgctaccatacgagctgccttcggggagga

SEQ ID NO: 198567 - DNA, 30 bp, Artificial Sequence
  Synthetic oligonucleotide
gatgcgtttcagttcttaagtaatggagga

SEQ ID NO: 198568 - DNA, 30 bp, Artificial Sequence
  Synthetic oligonucleotide
actatgtatacttgcaactatcgatgagga

SEQ ID NO: 198569 - DNA, 30 bp, Artificial Sequence
  Synthetic oligonucleotide
ggcctgcgatttgtaaatcccggatgagga

SEQ ID NO: 198570 - DNA, 30 bp, Artificial Sequence
  Synthetic oligonucleotide
caccgcgagttcacagctgctacctgagga

SEQ ID NO: 198571 - DNA, 30 bp, Artificial Sequence
  Synthetic oligonucleotide
cattcagtggggcccgagtggttctgagga

SEQ ID NO: 198572 - DNA, 30 bp, Artificial Sequence
  Synthetic oligonucleotide
tcgcgcatatcaaatgtgtgagtgtgagga

SEQ ID NO: 198573 - DNA, 30 bp, Artificial Sequence
  Synthetic oligonucleotide
caaagggtgtcctgtcggcgtgcttgagga

SEQ ID NO: 198574 - DNA, 30 bp, Artificial Sequence
  Synthetic oligonucleotide
aactgggagtctgtattcccgcaaatagga

SEQ ID NO: 198575 - DNA, 30 bp, Artificial Sequence
  Synthetic oligonucleotide
tgatcacagagagttcgcctttgaatagga

SEQ ID NO: 198576 - DNA, 30 bp, Artificial Sequence
  Synthetic oligonucleotide
cagctggaattcctagggcccctaatagga

SEQ ID NO: 198577 - DNA, 30 bp, Artificial Sequence
  Synthetic oligonucleotide
atggtacggtcagttgcatacggcatagga

SEQ ID NO: 198578 - DNA, 30 bp, Artificial Sequence
  Synthetic oligonucleotide
ataagttcctagaagcatctcgtgatagga

SEQ ID NO: 198579 - DNA, 30 bp, Artificial Sequence
  Synthetic oligonucleotide
cgaccaatcgtatgaggtaattatatagga

SEQ ID NO: 198580 - DNA, 30 bp, Artificial Sequence
  Synthetic oligonucleotide
actgacatctcaacgcacagttcactagga

SEQ ID NO: 198581 - DNA, 30 bp, Artificial Sequence
  Synthetic oligonucleotide
agggtcattagttaatgacagcgactagga

SEQ ID NO: 198582 - DNA, 30 bp, Artificial Sequence
  Synthetic oligonucleotide
agggagtgggatgtccgagtcaagctagga

SEQ ID NO: 198583 - DNA, 30 bp, Artificial Sequence
  Synthetic oligonucleotide
ccacacttacaaggcggctgacagctagga

SEQ ID NO: 198584 - DNA, 30 bp, Artificial Sequence
  Synthetic oligonucleotide
tagtagaaggcgttagcggctactctagga

SEQ ID NO: 198585 - DNA, 30 bp, Artificial Sequence
  Synthetic oligonucleotide
gataagcctgaaggatgggccagagtagga

SEQ ID NO: 198586 - DNA, 30 bp, Artificial Sequence
  Synthetic oligonucleotide
ctgtgtaggtgggacccgaggcgagtagga

SEQ ID NO: 198587 - DNA, 30 bp, Artificial Sequence
  Synthetic oligonucleotide
tagccgggagggttggtctctaccgtagga

SEQ ID NO: 198588 - DNA, 30 bp, Artificial Sequence
  Synthetic oligonucleotide
caccccaaatgtattaagtgccgggtagga

SEQ ID NO: 198589 - DNA, 30 bp, Artificial Sequence
  Synthetic oligonucleotide
ctcacgagtttataccattcgattgtagga

SEQ ID NO: 198590 - DNA, 30 bp, Artificial Sequence
  Synthetic oligonucleotide
caatcaaaagctttgcaagtaatattagga

SEQ ID NO: 198591 - DNA, 30 bp, Artificial Sequence
  Synthetic oligonucleotide
ccggtggggctagaactacgggacttagga

SEQ ID NO: 198592 - DNA, 30 bp, Artificial Sequence
  Synthetic oligonucleotide
agcctcgatattatcgtatatctgttagga

SEQ ID NO: 198593 - DNA, 30 bp, Artificial Sequence
  Synthetic oligonucleotide
aacgggcgccggtgtattattattttagga

SEQ ID NO: 198594 - DNA, 30 bp, Artificial Sequence
  Synthetic oligonucleotide
tttgcgtaaacgtaagactgggtaaacgga

SEQ ID NO: 198595 - DNA, 30 bp, Artificial Sequence
  Synthetic oligonucleotide
aatagaaaccccttcgcgtaattaaacgga

SEQ ID NO: 198596 - DNA, 30 bp, Artificial Sequence
  Synthetic oligonucleotide
tgagtgggcgcagtctgagtcttaaacgga

SEQ ID NO: 198597 - DNA, 30 bp, Artificial Sequence
  Synthetic oligonucleotide
acgccctttgattaaaccaacatcaacgga

SEQ ID NO: 198598 - DNA, 30 bp, Artificial Sequence
  Synthetic oligonucleotide
gacagcgggtacacagttcggcggaacgga

SEQ ID NO: 198599 - DNA, 30 bp, Artificial Sequence
  Synthetic oligonucleotide
agtagctagatcccgctgtgcagtaacgga

SEQ ID NO: 198600 - DNA, 30 bp, Artificial Sequence
  Synthetic oligonucleotide
tccactcctaatcggccaaacagccacgga

SEQ ID NO: 198601 - DNA, 30 bp, Artificial Sequence
  Synthetic oligonucleotide
aggcggagtgcggtagcacgcaagcacgga

SEQ ID NO: 198602 - DNA, 30 bp, Artificial Sequence
  Synthetic oligonucleotide
cagagtacgatagacgtaccatttcacgga

SEQ ID NO: 198603 - DNA, 30 bp, Artificial Sequence
  Synthetic oligonucleotide
ctaagtgtgtgtccattcggtcgagacgga

SEQ ID NO: 198604 - DNA, 30 bp, Artificial Sequence
  Synthetic oligonucleotide
gtgtggtaatctctctccctgaccgacgga

SEQ ID NO: 198605 - DNA, 30 bp, Artificial Sequence
  Synthetic oligonucleotide
taaccgccacactttaaaacgctcgacgga

SEQ ID NO: 198606 - DNA, 30 bp, Artificial Sequence
  Synthetic oligonucleotide
gcaataatgatcatacctgtggtcgacgga

SEQ ID NO: 198607 - DNA, 30 bp, Artificial Sequence
  Synthetic oligonucleotide
cggggacccgcttacccttcgatggacgga

SEQ ID NO: 198608 - DNA, 30 bp, Artificial Sequence
  Synthetic oligonucleotide
aagggttaagaagataaacatgatgacgga

SEQ ID NO: 198609 - DNA, 30 bp, Artificial Sequence
  Synthetic oligonucleotide
gggagtcgttttgagtagtcatatgacgga

SEQ ID NO: 198610 - DNA, 30 bp, Artificial Sequence
  Synthetic oligonucleotide
ccggggtgctggccgtccagcgcatacgga

SEQ ID NO: 198611 - DNA, 30 bp, Artificial Sequence
  Synthetic oligonucleotide
gataggttgagtgaatagtagtcctacgga

SEQ ID NO: 198612 - DNA, 30 bp, Artificial Sequence
  Synthetic oligonucleotide
tcgaggcgcctagataaactccgctacgga

SEQ ID NO: 198613 - DNA, 30 bp, Artificial Sequence
  Synthetic oligonucleotide
atatactctaacagggaacgatagtacgga

SEQ ID NO: 198614 - DNA, 30 bp, Artificial Sequence
  Synthetic oligonucleotide
aaatgtgggcaatgcgtactaatttacgga

SEQ ID NO: 198615 - DNA, 30 bp, Artificial Sequence
  Synthetic oligonucleotide
tatgcgtacaaacggtgataataaaccgga

SEQ ID NO: 198616 - DNA, 30 bp, Artificial Sequence
  Synthetic oligonucleotide
atttaaataagacaaaggatttaaaccgga

SEQ ID NO: 198617 - DNA, 30 bp, Artificial Sequence
  Synthetic oligonucleotide
gatctgtcctaaggaagtaaacgaaccgga

SEQ ID NO: 198618 - DNA, 30 bp, Artificial Sequence
  Synthetic oligonucleotide
aatggggtatcattagggggtaacaccgga

SEQ ID NO: 198619 - DNA, 30 bp, Artificial Sequence
  Synthetic oligonucleotide
gcaggagggcgcgcctgagacagcaccgga

SEQ ID NO: 198620 - DNA, 30 bp, Artificial Sequence
  Synthetic oligonucleotide
ccacgatgggcgcaatctaagcggaccgga

SEQ ID NO: 198621 - DNA, 30 bp, Artificial Sequence
  Synthetic oligonucleotide
gggtcagaaaagcccagtttgatgaccgga

SEQ ID NO: 198622 - DNA, 30 bp, Artificial Sequence
  Synthetic oligonucleotide
gcgcagttcaagcaagggtctacacccgga

SEQ ID NO: 198623 - DNA, 30 bp, Artificial Sequence
  Synthetic oligonucleotide
attaaagaactaaaactaagggcgcccgga

SEQ ID NO: 198624 - DNA, 30 bp, Artificial Sequence
  Synthetic oligonucleotide
aactgaggtagatggctctatcaagccgga

SEQ ID NO: 198625 - DNA, 30 bp, Artificial Sequence
  Synthetic oligonucleotide
gctaaaacaaagtggtcggtttcagccgga

SEQ ID NO: 198626 - DNA, 30 bp, Artificial Sequence
  Synthetic oligonucleotide
tggccgtttccatctgaaagatacgccgga

SEQ ID NO: 198627 - DNA, 30 bp, Artificial Sequence
  Synthetic oligonucleotide
gtggatcacattcaagcgttctatgccgga

SEQ ID NO: 198628 - DNA, 30 bp, Artificial Sequence
  Synthetic oligonucleotide
agggaaagaaggggaggcgacagtgccgga

SEQ ID NO: 198629 - DNA, 30 bp, Artificial Sequence
  Synthetic oligonucleotide
cgtacggtttggcggtcccatcaatccgga

SEQ ID NO: 198630 - DNA, 30 bp, Artificial Sequence
  Synthetic oligonucleotide
gaggaatggtggtgtaagttcgtatccgga

SEQ ID NO: 198631 - DNA, 30 bp, Artificial Sequence
  Synthetic oligonucleotide
ctagcgatttagtataatataacgtccgga

SEQ ID NO: 198632 - DNA, 30 bp, Artificial Sequence
  Synthetic oligonucleotide
gaaggattgatagcttgacagtcgtccgga

SEQ ID NO: 198633 - DNA, 30 bp, Artificial Sequence
  Synthetic oligonucleotide
ctaaaatgtgcctcataaaaagtgtccgga

SEQ ID NO: 198634 - DNA, 30 bp, Artificial Sequence
  Synthetic oligonucleotide
taattgggggatgaagccacacgttccgga

SEQ ID NO: 198635 - DNA, 30 bp, Artificial Sequence
  Synthetic oligonucleotide
atagatcatggcgggcgtggcatttccgga

SEQ ID NO: 198636 - DNA, 30 bp, Artificial Sequence
  Synthetic oligonucleotide
tttagtggtctaattagtagctaaagcgga

SEQ ID NO: 198637 - DNA, 30 bp, Artificial Sequence
  Synthetic oligonucleotide
attaaggtaccaacgaaactggccagcgga

SEQ ID NO: 198638 - DNA, 30 bp, Artificial Sequence
  Synthetic oligonucleotide
ttcggatagcaggttgctgactccagcgga

SEQ ID NO: 198639 - DNA, 30 bp, Artificial Sequence
  Synthetic oligonucleotide
aaggtacggtatagtgagtggcctagcgga

SEQ ID NO: 198640 - DNA, 30 bp, Artificial Sequence
  Synthetic oligonucleotide
aatgggtgtctccctgcgaaaagtagcgga

SEQ ID NO: 198641 - DNA, 30 bp, Artificial Sequence
  Synthetic oligonucleotide
ggtaccatccgtgatcaggctacacgcgga

SEQ ID NO: 198642 - DNA, 30 bp, Artificial Sequence
  Synthetic oligonucleotide
aaggcctgacgagcgcatgtgttacgcgga

SEQ ID NO: 198643 - DNA, 30 bp, Artificial Sequence
  Synthetic oligonucleotide
ttcatcatagcgatgatggggtcaggcgga

SEQ ID NO: 198644 - DNA, 30 bp, Artificial Sequence
  Synthetic oligonucleotide
cgggcctacgtttgcgacactagaggcgga

SEQ ID NO: 198645 - DNA, 30 bp, Artificial Sequence
  Synthetic oligonucleotide
tagcaggattccagttgtaaaggcggcgga

SEQ ID NO: 198646 - DNA, 30 bp, Artificial Sequence
  Synthetic oligonucleotide
atactattatgcataatgcataagggcgga

SEQ ID NO: 198647 - DNA, 30 bp, Artificial Sequence
  Synthetic oligonucleotide
acccgcacaggactgagctaatcgggcgga

SEQ ID NO: 198648 - DNA, 30 bp, Artificial Sequence
  Synthetic oligonucleotide
agggctagctatttgcgcggggcatgcgga

SEQ ID NO: 198649 - DNA, 30 bp, Artificial Sequence
  Synthetic oligonucleotide
ctataagcctttagcaaccgttgctgcgga

SEQ ID NO: 198650 - DNA, 30 bp, Artificial Sequence
  Synthetic oligonucleotide
ttcgaaatcccgttaacagaactttgcgga

SEQ ID NO: 198651 - DNA, 30 bp, Artificial Sequence
  Synthetic oligonucleotide
tgttcgtaaaataacacaccagcaatcgga

SEQ ID NO: 198652 - DNA, 30 bp, Artificial Sequence
  Synthetic oligonucleotide
actgtatgacgactagtgcgggcgatcgga

SEQ ID NO: 198653 - DNA, 30 bp, Artificial Sequence
  Synthetic oligonucleotide
cgcttccagccgggactcatatggatcgga

SEQ ID NO: 198654 - DNA, 30 bp, Artificial Sequence
  Synthetic oligonucleotide
gctaaatatggttctgaattcatgatcgga

SEQ ID NO: 198655 - DNA, 30 bp, Artificial Sequence
  Synthetic oligonucleotide
ttgacgatgtcttcccattcagctatcgga

SEQ ID NO: 198656 - DNA, 30 bp, Artificial Sequence
  Synthetic oligonucleotide
accctttcaccgtggaaaccatctatcgga

SEQ ID NO: 198657 - DNA, 30 bp, Artificial Sequence
  Synthetic oligonucleotide
cgggcacttcattttatccccggtatcgga

SEQ ID NO: 198658 - DNA, 30 bp, Artificial Sequence
  Synthetic oligonucleotide
agcgaacacgctcacatatatattatcgga

SEQ ID NO: 198659 - DNA, 30 bp, Artificial Sequence
  Synthetic oligonucleotide
acagaacccgttaacttaccgacactcgga

SEQ ID NO: 198660 - DNA, 30 bp, Artificial Sequence
  Synthetic oligonucleotide
aagacagtaagtggcgtggggccactcgga

SEQ ID NO: 198661 - DNA, 30 bp, Artificial Sequence
  Synthetic oligonucleotide
ttatcccagggacgaacggccggactcgga

SEQ ID NO: 198662 - DNA, 30 bp, Artificial Sequence
  Synthetic oligonucleotide
agacgttccgacattaggaagacgctcgga

SEQ ID NO: 198663 - DNA, 30 bp, Artificial Sequence
  Synthetic oligonucleotide
gttgagttggaccccggcaaattgctcgga

SEQ ID NO: 198664 - DNA, 30 bp, Artificial Sequence
  Synthetic oligonucleotide
atacattcttagctatcgccatgggtcgga

SEQ ID NO: 198665 - DNA, 30 bp, Artificial Sequence
  Synthetic oligonucleotide
gacataaggatacgatttaaatctgtcgga

SEQ ID NO: 198666 - DNA, 30 bp, Artificial Sequence
  Synthetic oligonucleotide
tcgggacgctgtggagaaggtattgtcgga

SEQ ID NO: 198667 - DNA, 30 bp, Artificial Sequence
  Synthetic oligonucleotide
atacgtagcgtggatagtcactcattcgga

SEQ ID NO: 198668 - DNA, 30 bp, Artificial Sequence
  Synthetic oligonucleotide
ccggagtatctacgtcagcagaagttcgga

SEQ ID NO: 198669 - DNA, 31 bp, Artificial Sequence
  Synthetic oligonucleotide
ggactaacaagtccaacatcggttgttcgga

SEQ ID NO: 198670 - DNA, 30 bp, Artificial Sequence
  Synthetic oligonucleotide
gtgactcattcacatacgaggttaaaggga

SEQ ID NO: 198671 - DNA, 30 bp, Artificial Sequence
  Synthetic oligonucleotide
atatgaatttaaagggattactgcaaggga

SEQ ID NO: 198672 - DNA, 30 bp, Artificial Sequence
  Synthetic oligonucleotide
agaggggaccaggtcggtacctggaaggga

SEQ ID NO: 198673 - DNA, 30 bp, Artificial Sequence
  Synthetic oligonucleotide
cggttggaacggccactcatcagtaaggga

SEQ ID NO: 198674 - DNA, 30 bp, Artificial Sequence
  Synthetic oligonucleotide
agtgtttaaaacattgggatcttacaggga

SEQ ID NO: 198675 - DNA, 30 bp, Artificial Sequence
  Synthetic oligonucleotide
ggaatgtttgagcatccagaggtccaggga

SEQ ID NO: 198676 - DNA, 30 bp, Artificial Sequence
  Synthetic oligonucleotide
cgcctgttacaggaaataggattgcaggga

SEQ ID NO: 198677 - DNA, 30 bp, Artificial Sequence
  Synthetic oligonucleotide
caaaactcatctttcatctaatctcaggga

SEQ ID NO: 198678 - DNA, 30 bp, Artificial Sequence
  Synthetic oligonucleotide
agaggtcatccaatagatagaggtcaggga

SEQ ID NO: 198679 - DNA, 30 bp, Artificial Sequence
  Synthetic oligonucleotide
acaacttacccagtgtacttgggtcaggga

SEQ ID NO: 198680 - DNA, 30 bp, Artificial Sequence
  Synthetic oligonucleotide
gagcccgtaagctttagcaattgtcaggga

SEQ ID NO: 198681 - DNA, 30 bp, Artificial Sequence
  Synthetic oligonucleotide
cacagtgttgtgacaacaggtatagaggga

SEQ ID NO: 198682 - DNA, 30 bp, Artificial Sequence
  Synthetic oligonucleotide
tcagactatcaagacaagctcgcggaggga

SEQ ID NO: 198683 - DNA, 30 bp, Artificial Sequence
  Synthetic oligonucleotide
cccggccggcgtactgaaatctcataggga

SEQ ID NO: 198684 - DNA, 30 bp, Artificial Sequence
  Synthetic oligonucleotide
ggcgcgactcgcttgtattacggataggga

SEQ ID NO: 198685 - DNA, 30 bp, Artificial Sequence
  Synthetic oligonucleotide
gaagcttaactagtaatagccagctaggga

SEQ ID NO: 198686 - DNA, 30 bp, Artificial Sequence
  Synthetic oligonucleotide
tctgcatatattgtcgactcatcgtaggga

SEQ ID NO: 198687 - DNA, 30 bp, Artificial Sequence
  Synthetic oligonucleotide
cccgagccggcgtgggataagtcgtaggga

SEQ ID NO: 198688 - DNA, 30 bp, Artificial Sequence
  Synthetic oligonucleotide
cactgatagaacacctactgaaggtaggga

SEQ ID NO: 198689 - DNA, 30 bp, Artificial Sequence
  Synthetic oligonucleotide
gtgcagcaacatcattggtgcgtttaggga

SEQ ID NO: 198690 - DNA, 31 bp, Artificial Sequence
  Synthetic oligonucleotide
tcagtgctccagggttgcgtgtgagacggga

SEQ ID NO: 198691 - DNA, 30 bp, Artificial Sequence
  Synthetic oligonucleotide
tacaccagacggactaggtatgttacggga

SEQ ID NO: 198692 - DNA, 30 bp, Artificial Sequence
  Synthetic oligonucleotide
agctaattctgcccgatttgggaaccggga

SEQ ID NO: 198693 - DNA, 30 bp, Artificial Sequence
  Synthetic oligonucleotide
gggataacttactagtagagggcaccggga

SEQ ID NO: 198694 - DNA, 30 bp, Artificial Sequence
  Synthetic oligonucleotide
aggccgctttctaagtgagcttcaccggga

SEQ ID NO: 198695 - DNA, 30 bp, Artificial Sequence
  Synthetic oligonucleotide
tgctaaaaccactcatagccggatccggga

SEQ ID NO: 198696 - DNA, 30 bp, Artificial Sequence
  Synthetic oligonucleotide
tttagaggtttcgcctcgaagtaagcggga

SEQ ID NO: 198697 - DNA, 30 bp, Artificial Sequence
  Synthetic oligonucleotide
gcaactatagcattccaaaaatccgcggga

SEQ ID NO: 198698 - DNA, 30 bp, Artificial Sequence
  Synthetic oligonucleotide
ttcacattcaaggaatcggttaatgcggga

SEQ ID NO: 198699 - DNA, 30 bp, Artificial Sequence
  Synthetic oligonucleotide
acttgagtaacacgtacgccccctgcggga

SEQ ID NO: 198700 - DNA, 30 bp, Artificial Sequence
  Synthetic oligonucleotide
ggatgtcgttgtaatgcccagtgatcggga

SEQ ID NO: 198701 - DNA, 30 bp, Artificial Sequence
  Synthetic oligonucleotide
acctgagcagattcggggacactctcggga

SEQ ID NO: 198702 - DNA, 30 bp, Artificial Sequence
  Synthetic oligonucleotide
ttaacgagaggccctgtgccaaggtcggga

SEQ ID NO: 198703 - DNA, 30 bp, Artificial Sequence
  Synthetic oligonucleotide
gggaagaatttcgacacaatcgggtcggga

SEQ ID NO: 198704 - DNA, 30 bp, Artificial Sequence
  Synthetic oligonucleotide
tgcaatccatatcgacacatcgggtcggga

SEQ ID NO: 198705 - DNA, 30 bp, Artificial Sequence
  Synthetic oligonucleotide
tacagtaatgatgaattaatatattcggga

SEQ ID NO: 198706 - DNA, 30 bp, Artificial Sequence
  Synthetic oligonucleotide
tagttgaagcaaccgctgttaagttcggga

SEQ ID NO: 198707 - DNA, 30 bp, Artificial Sequence
  Synthetic oligonucleotide
cgtcagttcagtattctagtgttttcggga

SEQ ID NO: 198708 - DNA, 30 bp, Artificial Sequence
  Synthetic oligonucleotide
ttgtacagcagcgtagtactttaaagggga

SEQ ID NO: 198709 - DNA, 30 bp, Artificial Sequence
  Synthetic oligonucleotide
catgttcacgactttctggtgggaagggga

SEQ ID NO: 198710 - DNA, 30 bp, Artificial Sequence
  Synthetic oligonucleotide
ggagatgaaagacaaattgatttaagggga

SEQ ID NO: 198711 - DNA, 30 bp, Artificial Sequence
  Synthetic oligonucleotide
aaaatcgtaactctgccgtagaagagggga

SEQ ID NO: 198712 - DNA, 30 bp, Artificial Sequence
  Synthetic oligonucleotide
ttccaaagactacatcccgcaccgagggga

SEQ ID NO: 198713 - DNA, 30 bp, Artificial Sequence
  Synthetic oligonucleotide
cattgggcttggggatattctaggagggga

SEQ ID NO: 198714 - DNA, 30 bp, Artificial Sequence
  Synthetic oligonucleotide
acccgaagtctattaaatcatagtagggga

SEQ ID NO: 198715 - DNA, 30 bp, Artificial Sequence
  Synthetic oligonucleotide
gtggataccgaaggtgttcattgtagggga

SEQ ID NO: 198716 - DNA, 30 bp, Artificial Sequence
  Synthetic oligonucleotide
agtcctagtgcacgccatctcgttagggga

SEQ ID NO: 198717 - DNA, 30 bp, Artificial Sequence
  Synthetic oligonucleotide
gtcagctggggtcaaggggattttagggga

SEQ ID NO: 198718 - DNA, 28 bp, Artificial Sequence
  Synthetic oligonucleotide
tattttagcagctcatatgggacgggga

SEQ ID NO: 198719 - DNA, 30 bp, Artificial Sequence
  Synthetic oligonucleotide
acggttaggtgaaggtacggcgcccgggga

SEQ ID NO: 198720 - DNA, 30 bp, Artificial Sequence
  Synthetic oligonucleotide
tgccgtaatgtgtattcccagaagcgggga

SEQ ID NO: 198721 - DNA, 30 bp, Artificial Sequence
  Synthetic oligonucleotide
aggaatcctgtgcgcaccaataagcgggga

SEQ ID NO: 198722 - DNA, 30 bp, Artificial Sequence
  Synthetic oligonucleotide
taagctccggagtgcgtaatcttgcgggga

SEQ ID NO: 198723 - DNA, 30 bp, Artificial Sequence
  Synthetic oligonucleotide
gataaatccggcgcgagacccccaggggga

SEQ ID NO: 198724 - DNA, 30 bp, Artificial Sequence
  Synthetic oligonucleotide
aaaaaaatggagcctagaccttcaggggga

SEQ ID NO: 198725 - DNA, 30 bp, Artificial Sequence
  Synthetic oligonucleotide
tctcaggagcatgagggtggttgaggggga

SEQ ID NO: 198726 - DNA, 30 bp, Artificial Sequence
  Synthetic oligonucleotide
ctcacctgaggcacgagccaacacggggga

SEQ ID NO: 198727 - DNA, 40 bp, Artificial Sequence
  Synthetic oligonucleotide
aagatagtacattcatggtatggtcggggatcggggggga

SEQ ID NO: 198728 - DNA, 38 bp, Artificial Sequence
  Synthetic oligonucleotide
aagataatacattcatggtggtcggggatcggggggga

SEQ ID NO: 198729 - DNA, 34 bp, Artificial Sequence
  Synthetic oligonucleotide
aagataatacattcatggtatggtcgggggggga

SEQ ID NO: 198730 - DNA, 30 bp, Artificial Sequence
  Synthetic oligonucleotide
atatgaggtactgagagcacaagtggggga

SEQ ID NO: 198731 - DNA, 30 bp, Artificial Sequence
  Synthetic oligonucleotide
gtggcatgaatatgacgagtgcttggggga

SEQ ID NO: 198732 - DNA, 30 bp, Artificial Sequence
  Synthetic oligonucleotide
ttccgtccgccgtattggagccgatgggga

SEQ ID NO: 198733 - DNA, 30 bp, Artificial Sequence
  Synthetic oligonucleotide
gaagtgcgcacgtttttatacccgtgggga

SEQ ID NO: 198734 - DNA, 30 bp, Artificial Sequence
  Synthetic oligonucleotide
aacacatatattggtaaatggccgtgggga

SEQ ID NO: 198735 - DNA, 31 bp, Artificial Sequence
  Synthetic oligonucleotide
acatccatgcggtgtaagttatgcgtgggga

SEQ ID NO: 198736 - DNA, 30 bp, Artificial Sequence
  Synthetic oligonucleotide
gacctattcagagagaacagtccttgggga

SEQ ID NO: 198737 - DNA, 30 bp, Artificial Sequence
  Synthetic oligonucleotide
gtggtcagtgcaagccgagtgaaaatggga

SEQ ID NO: 198738 - DNA, 30 bp, Artificial Sequence
  Synthetic oligonucleotide
cccgaggtttcagaactatcggcaatggga

SEQ ID NO: 198739 - DNA, 30 bp, Artificial Sequence
  Synthetic oligonucleotide
actcgctctaagtaatgagtaagaatggga

SEQ ID NO: 198740 - DNA, 30 bp, Artificial Sequence
  Synthetic oligonucleotide
cggcagctcagtaaagcgtctagaatggga

SEQ ID NO: 198741 - DNA, 30 bp, Artificial Sequence
  Synthetic oligonucleotide
agaattcggcaacgaacgagaataatggga

SEQ ID NO: 198742 - DNA, 30 bp, Artificial Sequence
  Synthetic oligonucleotide
ttgaacggcccgtagcgggggcctatggga

SEQ ID NO: 198743 - DNA, 30 bp, Artificial Sequence
  Synthetic oligonucleotide
tgtgctagagtgaagtgcgtacagctggga

SEQ ID NO: 198744 - DNA, 30 bp, Artificial Sequence
  Synthetic oligonucleotide
gcggatcggatgctacagaatgtagtggga

SEQ ID NO: 198745 - DNA, 30 bp, Artificial Sequence
  Synthetic oligonucleotide
gcataagtcatctctacgggacgcgtggga

SEQ ID NO: 198746 - DNA, 30 bp, Artificial Sequence
  Synthetic oligonucleotide
acaaagtggagatgttgccaaaaggtggga

SEQ ID NO: 198747 - DNA, 30 bp, Artificial Sequence
  Synthetic oligonucleotide
cagttcaaaccaggagcgccataggtggga

SEQ ID NO: 198748 - DNA, 30 bp, Artificial Sequence
  Synthetic oligonucleotide
taggctgtttctcgcgttgtgcgggtggga

SEQ ID NO: 198749 - DNA, 30 bp, Artificial Sequence
  Synthetic oligonucleotide
aagattggacagacgtgtgggctggtggga

SEQ ID NO: 198750 - DNA, 30 bp, Artificial Sequence
  Synthetic oligonucleotide
tcctaacgcgaagtgtcgcaaagtgtggga

SEQ ID NO: 198751 - DNA, 30 bp, Artificial Sequence
  Synthetic oligonucleotide
ggcgatgcgaagcacttcccgtacttggga

SEQ ID NO: 198752 - DNA, 30 bp, Artificial Sequence
  Synthetic oligonucleotide
tgctgtacaattgtttgagggtacttggga

SEQ ID NO: 198753 - DNA, 30 bp, Artificial Sequence
  Synthetic oligonucleotide
taatctcgcatcatgtgtaacggcttggga

SEQ ID NO: 198754 - DNA, 30 bp, Artificial Sequence
  Synthetic oligonucleotide
ctgggaatgggcataaggttacatttggga

SEQ ID NO: 198755 - DNA, 30 bp, Artificial Sequence
  Synthetic oligonucleotide
aacgatgcacttttagtcagatctttggga

SEQ ID NO: 198756 - DNA, 30 bp, Artificial Sequence
  Synthetic oligonucleotide
ttaggagttatgctcctggggccaaatgga

SEQ ID NO: 198757 - DNA, 30 bp, Artificial Sequence
  Synthetic oligonucleotide
aacacgtctgaccgcggagggggcaatgga

SEQ ID NO: 198758 - DNA, 29 bp, Artificial Sequence
  Synthetic oligonucleotide
ggtcatcagacaggagggaatggaatgga

SEQ ID NO: 198759 - DNA, 30 bp, Artificial Sequence
  Synthetic oligonucleotide
agaaggatgcgttctgtaactttgaatgga

SEQ ID NO: 198760 - DNA, 30 bp, Artificial Sequence
  Synthetic oligonucleotide
aggaagcagctaccacaatgggataatgga

SEQ ID NO: 198761 - DNA, 30 bp, Artificial Sequence
  Synthetic oligonucleotide
ggtccaggatggggacgagaccgtaatgga

SEQ ID NO: 198762 - DNA, 30 bp, Artificial Sequence
  Synthetic oligonucleotide
atacagacgccctggactccaggtaatgga

SEQ ID NO: 198763 - DNA, 30 bp, Artificial Sequence
  Synthetic oligonucleotide
gagcatataaaacaattcgtcacacatgga

SEQ ID NO: 198764 - DNA, 30 bp, Artificial Sequence
  Synthetic oligonucleotide
agaaccatgcagtgattttaagtccatgga

SEQ ID NO: 198765 - DNA, 30 bp, Artificial Sequence
  Synthetic oligonucleotide
gagacgggaagcctcccacagtcgcatgga

SEQ ID NO: 198766 - DNA, 30 bp, Artificial Sequence
  Synthetic oligonucleotide
ggtggactggcacccgaaccaagtcatgga

SEQ ID NO: 198767 - DNA, 30 bp, Artificial Sequence
  Synthetic oligonucleotide
aactgtgttgaaatgccatttaaagatgga

SEQ ID NO: 198768 - DNA, 30 bp, Artificial Sequence
  Synthetic oligonucleotide
gcagaagctgtaacatggcagagagatgga

SEQ ID NO: 198769 - DNA, 30 bp, Artificial Sequence
  Synthetic oligonucleotide
cctttacccccggtcattgactccgatgga

SEQ ID NO: 198770 - DNA, 30 bp, Artificial Sequence
  Synthetic oligonucleotide
tatagatgtaccacgtttttcgatgatgga

SEQ ID NO: 198771 - DNA, 30 bp, Artificial Sequence
  Synthetic oligonucleotide
ggaacgtatgcattcgaacccactgatgga

SEQ ID NO: 198772 - DNA, 30 bp, Artificial Sequence
  Synthetic oligonucleotide
caaagcgtccggatgagacatgcatatgga

SEQ ID NO: 198773 - DNA, 31 bp, Artificial Sequence
  Synthetic oligonucleotide
atctgtgcataccattaagtgtggatatgga

SEQ ID NO: 198774 - DNA, 30 bp, Artificial Sequence
  Synthetic oligonucleotide
aagtgtgcaaggtcaagaccgatatatgga

SEQ ID NO: 198775 - DNA, 30 bp, Artificial Sequence
  Synthetic oligonucleotide
gcagcagctgatcattttcaggactatgga

SEQ ID NO: 198776 - DNA, 30 bp, Artificial Sequence
  Synthetic oligonucleotide
gataggatctaggatagaatgtattatgga

SEQ ID NO: 198777 - DNA, 30 bp, Artificial Sequence
  Synthetic oligonucleotide
tccagcttaggagttatgagttcttatgga

SEQ ID NO: 198778 - DNA, 30 bp, Artificial Sequence
  Synthetic oligonucleotide
agaccggtgtgagttctgcaaatttatgga

SEQ ID NO: 198779 - DNA, 30 bp, Artificial Sequence
  Synthetic oligonucleotide
gactcaataactgttcataatatttatgga

SEQ ID NO: 198780 - DNA, 30 bp, Artificial Sequence
  Synthetic oligonucleotide
tcgtctccttatgggggacgtctttatgga

SEQ ID NO: 198781 - DNA, 30 bp, Artificial Sequence
  Synthetic oligonucleotide
gttgtgcctgtagacgaccaaaaaactgga

SEQ ID NO: 198782 - DNA, 30 bp, Artificial Sequence
  Synthetic oligonucleotide
gttaagggataaaagactggcataactgga

SEQ ID NO: 198783 - DNA, 30 bp, Artificial Sequence
  Synthetic oligonucleotide
ggagaatgtgcctaggtaatgtcgactgga

SEQ ID NO: 198784 - DNA, 30 bp, Artificial Sequence
  Synthetic oligonucleotide
cttatggacttacccgtatcccggactgga

SEQ ID NO: 198785 - DNA, 30 bp, Artificial Sequence
  Synthetic oligonucleotide
ctcgcatgatgtccacatataaatactgga

SEQ ID NO: 198786 - DNA, 30 bp, Artificial Sequence
  Synthetic oligonucleotide
cacttcctgagtagcgcaggaagtactgga

SEQ ID NO: 198787 - DNA, 30 bp, Artificial Sequence
  Synthetic oligonucleotide
aaatacacctccgttagttcacgtactgga

SEQ ID NO: 198788 - DNA, 30 bp, Artificial Sequence
  Synthetic oligonucleotide
cgtcttggtaccatgacagccagacctgga

SEQ ID NO: 198789 - DNA, 30 bp, Artificial Sequence
  Synthetic oligonucleotide
agggtgcagctattagttttgtgacctgga

SEQ ID NO: 198790 - DNA, 30 bp, Artificial Sequence
  Synthetic oligonucleotide
agggcaacgagtacacgcggctgccctgga

SEQ ID NO: 198791 - DNA, 30 bp, Artificial Sequence
  Synthetic oligonucleotide
tcgtgagcatcagaacgcgcgctccctgga

SEQ ID NO: 198792 - DNA, 30 bp, Artificial Sequence
  Synthetic oligonucleotide
acgaaaaaaccattttgcatctgtcctgga

SEQ ID NO: 198793 - DNA, 30 bp, Artificial Sequence
  Synthetic oligonucleotide
gcacagtacgtaatcgttcacgctgctgga

SEQ ID NO: 198794 - DNA, 30 bp, Artificial Sequence
  Synthetic oligonucleotide
agtaaccgtgggatagcattgtgtgctgga

SEQ ID NO: 198795 - DNA, 30 bp, Artificial Sequence
  Synthetic oligonucleotide
attcgagaggcaacgctcgggcttgctgga

SEQ ID NO: 198796 - DNA, 30 bp, Artificial Sequence
  Synthetic oligonucleotide
ttggaccaaaggtacaagtgtacatctgga

SEQ ID NO: 198797 - DNA, 30 bp, Artificial Sequence
  Synthetic oligonucleotide
aatagggtgcaccatagctgcttctctgga

SEQ ID NO: 198798 - DNA, 30 bp, Artificial Sequence
  Synthetic oligonucleotide
gatacttcgtcaaatgaagctcggtctgga

SEQ ID NO: 198799 - DNA, 30 bp, Artificial Sequence
  Synthetic oligonucleotide
gaatataaacgacattggaaccgttctgga

SEQ ID NO: 198800 - DNA, 30 bp, Artificial Sequence
  Synthetic oligonucleotide
actcaacttgtatctccaagaataagtgga

SEQ ID NO: 198801 - DNA, 30 bp, Artificial Sequence
  Synthetic oligonucleotide
cattcacacgcacatcaatggataagtgga

SEQ ID NO: 198802 - DNA, 31 bp, Artificial Sequence
  Synthetic oligonucleotide
cctacgcataagcgcccctgatctaagtgga

SEQ ID NO: 198803 - DNA, 30 bp, Artificial Sequence
  Synthetic oligonucleotide
aaccggattgtgttcggtcccgctagtgga

SEQ ID NO: 198804 - DNA, 30 bp, Artificial Sequence
  Synthetic oligonucleotide
gggcgcaggggatattgcgaccgtagtgga

SEQ ID NO: 198805 - DNA, 30 bp, Artificial Sequence
  Synthetic oligonucleotide
taaattgtggttttaaccatagttagtgga

SEQ ID NO: 198806 - DNA, 30 bp, Artificial Sequence
  Synthetic oligonucleotide
tcgtttggaggtatccatcaccgacgtgga

SEQ ID NO: 198807 - DNA, 30 bp, Artificial Sequence
  Synthetic oligonucleotide
aacgattcgtagaatctagttacccgtgga

SEQ ID NO: 198808 - DNA, 30 bp, Artificial Sequence
  Synthetic oligonucleotide
cggctagaagtgggcggaatgttccgtgga

SEQ ID NO: 198809 - DNA, 30 bp, Artificial Sequence
  Synthetic oligonucleotide
cctagtcgctcacaatcccaaactcgtgga

SEQ ID NO: 198810 - DNA, 30 bp, Artificial Sequence
  Synthetic oligonucleotide
cctcagtgtccggtccatgtgcgcggtgga

SEQ ID NO: 198811 - DNA, 30 bp, Artificial Sequence
  Synthetic oligonucleotide
aaagtgggtctccgcataaactgcggtgga

SEQ ID NO: 198812 - DNA, 30 bp, Artificial Sequence
  Synthetic oligonucleotide
attcaagagaagagtatcattcagggtgga

SEQ ID NO: 198813 - DNA, 30 bp, Artificial Sequence
  Synthetic oligonucleotide
gggggataattaaacctggtatctggtgga

SEQ ID NO: 198814 - DNA, 30 bp, Artificial Sequence
  Synthetic oligonucleotide
gacacgtgcgcccggggctgataatgtgga

SEQ ID NO: 198815 - DNA, 30 bp, Artificial Sequence
  Synthetic oligonucleotide
cggagggaattattttcggacatatgtgga

SEQ ID NO: 198816 - DNA, 30 bp, Artificial Sequence
  Synthetic oligonucleotide
agggtccttgtgtagggccagcactgtgga

SEQ ID NO: 198817 - DNA, 30 bp, Artificial Sequence
  Synthetic oligonucleotide
ctatagttctccgcacagtatgggtgtgga

SEQ ID NO: 198818 - DNA, 30 bp, Artificial Sequence
  Synthetic oligonucleotide
gccggacaagcatatcacttcttgtgtgga

SEQ ID NO: 198819 - DNA, 30 bp, Artificial Sequence
  Synthetic oligonucleotide
gatatgcttcaactacggactaattgtgga

SEQ ID NO: 198820 - DNA, 30 bp, Artificial Sequence
  Synthetic oligonucleotide
agcctgccagccaacgtcatcgattgtgga

SEQ ID NO: 198821 - DNA, 30 bp, Artificial Sequence
  Synthetic oligonucleotide
accaatagagataggtccgccggttgtgga

SEQ ID NO: 198822 - DNA, 30 bp, Artificial Sequence
  Synthetic oligonucleotide
tgtctggagaatgacttggtctgttgtgga

SEQ ID NO: 198823 - DNA, 29 bp, Artificial Sequence
  Synthetic oligonucleotide
ctgacgcacgccacctcgggcaaattgga

SEQ ID NO: 198824 - DNA, 28 bp, Artificial Sequence
  Synthetic oligonucleotide
cttgactaggccgtaatgggaaattgga

SEQ ID NO: 198825 - DNA, 30 bp, Artificial Sequence
  Synthetic oligonucleotide
gactgacaataagcttcagtgtccattgga

SEQ ID NO: 198826 - DNA, 30 bp, Artificial Sequence
  Synthetic oligonucleotide
cgttgttttaagaggaaaacctatattgga

SEQ ID NO: 198827 - DNA, 30 bp, Artificial Sequence
  Synthetic oligonucleotide
ggaaatagctcctgtgtagcgagtattgga

SEQ ID NO: 198828 - DNA, 30 bp, Artificial Sequence
  Synthetic oligonucleotide
agatcctcattcaaggaaacccaacttgga

SEQ ID NO: 198829 - DNA, 30 bp, Artificial Sequence
  Synthetic oligonucleotide
atgcatagaaaggccgaattcatacttgga

SEQ ID NO: 198830 - DNA, 30 bp, Artificial Sequence
  Synthetic oligonucleotide
gtgggtagtcttctcgaaaacccccttgga

SEQ ID NO: 198831 - DNA, 30 bp, Artificial Sequence
  Synthetic oligonucleotide
tatagaaagcagcggacaatgtcccttgga

SEQ ID NO: 198832 - DNA, 30 bp, Artificial Sequence
  Synthetic oligonucleotide
gatctcaacgatctacaccttgtccttgga

SEQ ID NO: 198833 - DNA, 30 bp, Artificial Sequence
  Synthetic oligonucleotide
tgtatacaccgctctggagacggtcttgga

SEQ ID NO: 198834 - DNA, 30 bp, Artificial Sequence
  Synthetic oligonucleotide
catacgcttagggaaactggcggtcttgga

SEQ ID NO: 198835 - DNA, 30 bp, Artificial Sequence
  Synthetic oligonucleotide
gcatatgattcgcgatgttactgtcttgga

SEQ ID NO: 198836 - DNA, 30 bp, Artificial Sequence
  Synthetic oligonucleotide
tcggtctttcagcctataccaaaagttgga

SEQ ID NO: 198837 - DNA, 30 bp, Artificial Sequence
  Synthetic oligonucleotide
gaactgaaaaggtccacgaactaagttgga

SEQ ID NO: 198838 - DNA, 30 bp, Artificial Sequence
  Synthetic oligonucleotide
accgatattcggctcccccagtcagttgga

SEQ ID NO: 198839 - DNA, 30 bp, Artificial Sequence
  Synthetic oligonucleotide
cttgtcggagtcgactcatgaaacgttgga

SEQ ID NO: 198840 - DNA, 30 bp, Artificial Sequence
  Synthetic oligonucleotide
gaccccgagaataatttcgactccgttgga

SEQ ID NO: 198841 - DNA, 30 bp, Artificial Sequence
  Synthetic oligonucleotide
gagatgaaagcggatgcccggactgttgga

SEQ ID NO: 198842 - DNA, 30 bp, Artificial Sequence
  Synthetic oligonucleotide
tgccttgaggaactcccataccctgttgga

SEQ ID NO: 198843 - DNA, 30 bp, Artificial Sequence
  Synthetic oligonucleotide
gcttatggtccacaaaccgtgcttgttgga

SEQ ID NO: 198844 - DNA, 30 bp, Artificial Sequence
  Synthetic oligonucleotide
ttgatcacgattggaatacccaaatttgga

SEQ ID NO: 198845 - DNA, 30 bp, Artificial Sequence
  Synthetic oligonucleotide
aagggaacattaccatgctgagcatttgga

SEQ ID NO: 198846 - DNA, 30 bp, Artificial Sequence
  Synthetic oligonucleotide
cgcggtagagatatttgtcggatgtttgga

SEQ ID NO: 198847 - DNA, 30 bp, Artificial Sequence
  Synthetic oligonucleotide
tgacggggaaaacgggtgagttgttttgga

SEQ ID NO: 198848 - DNA, 30 bp, Artificial Sequence
  Synthetic oligonucleotide
aatccggaacgtatcattgaggcaaaatga

SEQ ID NO: 198849 - DNA, 30 bp, Artificial Sequence
  Synthetic oligonucleotide
agccgtctctaactcctatagagaaaatga

SEQ ID NO: 198850 - DNA, 30 bp, Artificial Sequence
  Synthetic oligonucleotide
acgtgttttctgcgttgattgagcaaatga

SEQ ID NO: 198851 - DNA, 30 bp, Artificial Sequence
  Synthetic oligonucleotide
tagctacccttgatcaagcagccgaaatga

SEQ ID NO: 198852 - DNA, 30 bp, Artificial Sequence
  Synthetic oligonucleotide
cacttgtttcgtgtagggaaacgtaaatga

SEQ ID NO: 198853 - DNA, 30 bp, Artificial Sequence
  Synthetic oligonucleotide
gtcggctgggcagcctataatcgtaaatga

SEQ ID NO: 198854 - DNA, 30 bp, Artificial Sequence
  Synthetic oligonucleotide
ggggcgactatgaatcctcagcttaaatga

SEQ ID NO: 198855 - DNA, 30 bp, Artificial Sequence
  Synthetic oligonucleotide
cacacattctgcgtcgtgatatttaaatga

SEQ ID NO: 198856 - DNA, 30 bp, Artificial Sequence
  Synthetic oligonucleotide
aaggcgccggcaggatcgggcaaacaatga

SEQ ID NO: 198857 - DNA, 30 bp, Artificial Sequence
  Synthetic oligonucleotide
cagggcagattgctgttctcaggccaatga

SEQ ID NO: 198858 - DNA, 30 bp, Artificial Sequence
  Synthetic oligonucleotide
gtccgaatgaagtttgtgcacgggcaatga

SEQ ID NO: 198859 - DNA, 30 bp, Artificial Sequence
  Synthetic oligonucleotide
cttacaggatgaaagaattgggctcaatga

SEQ ID NO: 198860 - DNA, 30 bp, Artificial Sequence
  Synthetic oligonucleotide
cgtaatattcagtggatacatcgagaatga

SEQ ID NO: 198861 - DNA, 30 bp, Artificial Sequence
  Synthetic oligonucleotide
ctaacttactttctgctttgtattgaatga

SEQ ID NO: 198862 - DNA, 30 bp, Artificial Sequence
  Synthetic oligonucleotide
ataacatgggcacaggattttatataatga

SEQ ID NO: 198863 - DNA, 30 bp, Artificial Sequence
  Synthetic oligonucleotide
gggcggtcgtatgcccggcccagctaatga

SEQ ID NO: 198864 - DNA, 30 bp, Artificial Sequence
  Synthetic oligonucleotide
tgctttagtcagaagctaaagatctaatga

SEQ ID NO: 198865 - DNA, 30 bp, Artificial Sequence
  Synthetic oligonucleotide
gtggagatgtgcatcttgacctggtaatga

SEQ ID NO: 198866 - DNA, 30 bp, Artificial Sequence
  Synthetic oligonucleotide
cagaggcttgcgcgcatataagtgtaatga

SEQ ID NO: 198867 - DNA, 30 bp, Artificial Sequence
  Synthetic oligonucleotide
cacccgctgaagaaggggggcgattaatga

SEQ ID NO: 198868 - DNA, 30 bp, Artificial Sequence
  Synthetic oligonucleotide
agaacaaaaaaaccggaagtaacttaatga

SEQ ID NO: 198869 - DNA, 30 bp, Artificial Sequence
  Synthetic oligonucleotide
taggaccgtcttatgcggcctagttaatga

SEQ ID NO: 198870 - DNA, 28 bp, Artificial Sequence
  Synthetic oligonucleotide
atggtcattgcttaaacactttacatga

SEQ ID NO: 198871 - DNA, 30 bp, Artificial Sequence
  Synthetic oligonucleotide
gacaaattaggctactatgttcacccatga

SEQ ID NO: 198872 - DNA, 30 bp, Artificial Sequence
  Synthetic oligonucleotide
aaagtatgagtaatttcctccaagccatga

SEQ ID NO: 198873 - DNA, 30 bp, Artificial Sequence
  Synthetic oligonucleotide
ggtgcagacgcataacataaggtgccatga

SEQ ID NO: 198874 - DNA, 30 bp, Artificial Sequence
  Synthetic oligonucleotide
tatcggatagtaaaggtgtccgctccatga

SEQ ID NO: 198875 - DNA, 30 bp, Artificial Sequence
  Synthetic oligonucleotide
caagcggcaagattgtcaggcagtccatga

SEQ ID NO: 198876 - DNA, 30 bp, Artificial Sequence
  Synthetic oligonucleotide
ccagtaaagtgagacggctttacagcatga

SEQ ID NO: 198877 - DNA, 30 bp, Artificial Sequence
  Synthetic oligonucleotide
ggaccgcgtaatgaaggagcttcagcatga

SEQ ID NO: 198878 - DNA, 30 bp, Artificial Sequence
  Synthetic oligonucleotide
agtgaaaaatattgtgaaggttcagcatga

SEQ ID NO: 198879 - DNA, 30 bp, Artificial Sequence
  Synthetic oligonucleotide
gacttgttaccgatactggtcatggcatga

SEQ ID NO: 198880 - DNA, 30 bp, Artificial Sequence
  Synthetic oligonucleotide
aacacttgtgttacatttactaatgcatga

SEQ ID NO: 198881 - DNA, 31 bp, Artificial Sequence
  Synthetic oligonucleotide
gaaatggacattataaccatgcggtgcatga

SEQ ID NO: 198882 - DNA, 30 bp, Artificial Sequence
  Synthetic oligonucleotide
aaatcaggtggcgtccgaatgacatcatga

SEQ ID NO: 198883 - DNA, 30 bp, Artificial Sequence
  Synthetic oligonucleotide
caacgagatcttgataaaaccggatcatga

SEQ ID NO: 198884 - DNA, 30 bp, Artificial Sequence
  Synthetic oligonucleotide
tattagaatggaggaaggtccctatcatga

SEQ ID NO: 198885 - DNA, 30 bp, Artificial Sequence
  Synthetic oligonucleotide
gttgaggacatattccggagcacctcatga

SEQ ID NO: 198886 - DNA, 30 bp, Artificial Sequence
  Synthetic oligonucleotide
gaacggttctaccgctcgtctgcctcatga

SEQ ID NO: 198887 - DNA, 30 bp, Artificial Sequence
  Synthetic oligonucleotide
tgtcaccaatcatatacccggccgtcatga

SEQ ID NO: 198888 - DNA, 30 bp, Artificial Sequence
  Synthetic oligonucleotide
agtccgtcaggggctttgggatcgtcatga

SEQ ID NO: 198889 - DNA, 30 bp, Artificial Sequence
  Synthetic oligonucleotide
atcctactttcgtaacaaactgggtcatga

SEQ ID NO: 198890 - DNA, 30 bp, Artificial Sequence
  Synthetic oligonucleotide
tgagagactggggttattaaagtgtcatga

SEQ ID NO: 198891 - DNA, 30 bp, Artificial Sequence
  Synthetic oligonucleotide
gggagagtgaagactaaccacgcttcatga

SEQ ID NO: 198892 - DNA, 30 bp, Artificial Sequence
  Synthetic oligonucleotide
tttggagaatagttcaggggtgagagatga

SEQ ID NO: 198893 - DNA, 30 bp, Artificial Sequence
  Synthetic oligonucleotide
gcttagaatagtctgaaaaaaacgagatga

SEQ ID NO: 198894 - DNA, 30 bp, Artificial Sequence
  Synthetic oligonucleotide
gatagcgaatttgcccaaggtctgagatga

SEQ ID NO: 198895 - DNA, 30 bp, Artificial Sequence
  Synthetic oligonucleotide
cgggcctagcgacagttgaccgtacgatga

SEQ ID NO: 198896 - DNA, 30 bp, Artificial Sequence
  Synthetic oligonucleotide
tatgcagttttgaactgtgtcgtccgatga

SEQ ID NO: 198897 - DNA, 30 bp, Artificial Sequence
  Synthetic oligonucleotide
atctatgaaccagtccactacacgcgatga

SEQ ID NO: 198898 - DNA, 30 bp, Artificial Sequence
  Synthetic oligonucleotide
ttcccgcacccccatcttcagctgcgatga

SEQ ID NO: 198899 - DNA, 30 bp, Artificial Sequence
  Synthetic oligonucleotide
gagtagttgtaatctcagtcaccaggatga

SEQ ID NO: 198900 - DNA, 30 bp, Artificial Sequence
  Synthetic oligonucleotide
ccgttgggaccttagcacttgataggatga

SEQ ID NO: 198901 - DNA, 30 bp, Artificial Sequence
  Synthetic oligonucleotide
cacacatcggaggattaactgtacggatga

SEQ ID NO: 198902 - DNA, 30 bp, Artificial Sequence
  Synthetic oligonucleotide
cgttcgtcaattaagtcccccttgggatga

SEQ ID NO: 198903 - DNA, 30 bp, Artificial Sequence
  Synthetic oligonucleotide
ctaaaatagctttgcacaccggatggatga

SEQ ID NO: 198904 - DNA, 30 bp, Artificial Sequence
  Synthetic oligonucleotide
attcgacagggtgccatgagacctggatga

SEQ ID NO: 198905 - DNA, 30 bp, Artificial Sequence
  Synthetic oligonucleotide
accgctttaggggaattctgaggtggatga

SEQ ID NO: 198906 - DNA, 30 bp, Artificial Sequence
  Synthetic oligonucleotide
cgtcagggcctggaaaacattcttggatga

SEQ ID NO: 198907 - DNA, 30 bp, Artificial Sequence
  Synthetic oligonucleotide
agaggttaagggacggagaattttggatga

SEQ ID NO: 198908 - DNA, 30 bp, Artificial Sequence
  Synthetic oligonucleotide
tgtcggtgggtatatctcgggaattgatga

SEQ ID NO: 198909 - DNA, 30 bp, Artificial Sequence
  Synthetic oligonucleotide
tatagacggacagggtccctcataatatga

SEQ ID NO: 198910 - DNA, 30 bp, Artificial Sequence
  Synthetic oligonucleotide
tctaggattcgttgcacaaagttaatatga

SEQ ID NO: 198911 - DNA, 30 bp, Artificial Sequence
  Synthetic oligonucleotide
gaattccctcccgtggataagaccatatga

SEQ ID NO: 198912 - DNA, 30 bp, Artificial Sequence
  Synthetic oligonucleotide
aagcggtactgggttccccagtggatatga

SEQ ID NO: 198913 - DNA, 30 bp, Artificial Sequence
  Synthetic oligonucleotide
acacggatttgtaccatccctcatatatga

SEQ ID NO: 198914 - DNA, 30 bp, Artificial Sequence
  Synthetic oligonucleotide
taatacaggcgaaatatagtacgtatatga

SEQ ID NO: 198915 - DNA, 30 bp, Artificial Sequence
  Synthetic oligonucleotide
ccaaacgatcctatccaggttggtatatga

SEQ ID NO: 198916 - DNA, 30 bp, Artificial Sequence
  Synthetic oligonucleotide
ccaatggtacgatagctgtaaatactatga

SEQ ID NO: 198917 - DNA, 30 bp, Artificial Sequence
  Synthetic oligonucleotide
tggcacattgtgaatgtgctttcagtatga

SEQ ID NO: 198918 - DNA, 30 bp, Artificial Sequence
  Synthetic oligonucleotide
tgtatgttaaggattaggacaatcgtatga

SEQ ID NO: 198919 - DNA, 30 bp, Artificial Sequence
  Synthetic oligonucleotide
cattacgaagccgtagtggaagaggtatga

SEQ ID NO: 198920 - DNA, 30 bp, Artificial Sequence
  Synthetic oligonucleotide
gatgtaagattcgtaggggcggcggtatga

SEQ ID NO: 198921 - DNA, 30 bp, Artificial Sequence
  Synthetic oligonucleotide
tcctaaccgagaccggcgcggaaattatga

SEQ ID NO: 198922 - DNA, 30 bp, Artificial Sequence
  Synthetic oligonucleotide
aggcaacctgtttttgcattcgaattatga

SEQ ID NO: 198923 - DNA, 30 bp, Artificial Sequence
  Synthetic oligonucleotide
ggtggtctcgggactgtggtgcgattatga

SEQ ID NO: 198924 - DNA, 30 bp, Artificial Sequence
  Synthetic oligonucleotide
gctcaagtgtcatctagagtgagcttatga

SEQ ID NO: 198925 - DNA, 30 bp, Artificial Sequence
  Synthetic oligonucleotide
tgcacgtcgcattggtgaagtggcttatga

SEQ ID NO: 198926 - DNA, 30 bp, Artificial Sequence
  Synthetic oligonucleotide
caattactataatgaaggaatttcttatga

SEQ ID NO: 198927 - DNA, 30 bp, Artificial Sequence
  Synthetic oligonucleotide
gcagcgtgcctgtgaggaacagatttatga

SEQ ID NO: 198928 - DNA, 30 bp, Artificial Sequence
  Synthetic oligonucleotide
gaagaggacgctcgctgatgccttttatga

SEQ ID NO: 198929 - DNA, 30 bp, Artificial Sequence
  Synthetic oligonucleotide
cgtgtcgatgatgtccttgtacaaaactga

SEQ ID NO: 198930 - DNA, 30 bp, Artificial Sequence
  Synthetic oligonucleotide
gcgcataagtttagataagatataaactga

SEQ ID NO: 198931 - DNA, 30 bp, Artificial Sequence
  Synthetic oligonucleotide
gttacttttgcagaaagaggattaaactga

SEQ ID NO: 198932 - DNA, 30 bp, Artificial Sequence
  Synthetic oligonucleotide
taacccccttagaattacatttaacactga

SEQ ID NO: 198933 - DNA, 30 bp, Artificial Sequence
  Synthetic oligonucleotide
cagacacattaggggtgatgcgcacactga

SEQ ID NO: 198934 - DNA, 30 bp, Artificial Sequence
  Synthetic oligonucleotide
ccaggacagcacaagtaatatatacactga

SEQ ID NO: 198935 - DNA, 30 bp, Artificial Sequence
  Synthetic oligonucleotide
cgcgccctaaacggtgaagcgcagcactga

SEQ ID NO: 198936 - DNA, 30 bp, Artificial Sequence
  Synthetic oligonucleotide
cccgaagtccagttttcaatattgcactga

SEQ ID NO: 198937 - DNA, 30 bp, Artificial Sequence
  Synthetic oligonucleotide
ttattgcgttagttcactgtctatcactga

SEQ ID NO: 198938 - DNA, 30 bp, Artificial Sequence
  Synthetic oligonucleotide
aacccaataggtgtaaccgagggagactga

SEQ ID NO: 198939 - DNA, 31 bp, Artificial Sequence
  Synthetic oligonucleotide
gtcatgctgccagtccggcacacgcgactga

SEQ ID NO: 198940 - DNA, 30 bp, Artificial Sequence
  Synthetic oligonucleotide
gtaggctggaaattgtgccgtggcgactga

SEQ ID NO: 198941 - DNA, 30 bp, Artificial Sequence
  Synthetic oligonucleotide
tcacttgcctcctatcgccgaaaggactga

SEQ ID NO: 198942 - DNA, 30 bp, Artificial Sequence
  Synthetic oligonucleotide
gagagtaagcttactcgacaacaggactga

SEQ ID NO: 198943 - DNA, 30 bp, Artificial Sequence
  Synthetic oligonucleotide
cggaaggggtgcttgtatcgcctggactga

SEQ ID NO: 198944 - DNA, 30 bp, Artificial Sequence
  Synthetic oligonucleotide
agctcggagttacgcgaaaagactgactga

SEQ ID NO: 198945 - DNA, 30 bp, Artificial Sequence
  Synthetic oligonucleotide
catagtcattgtcctggggatccctactga

SEQ ID NO: 198946 - DNA, 30 bp, Artificial Sequence
  Synthetic oligonucleotide
tagtcgaggcacctgcttcggcccacctga

SEQ ID NO: 198947 - DNA, 30 bp, Artificial Sequence
  Synthetic oligonucleotide
gctggccccatgcgcattaaaaagacctga

SEQ ID NO: 198948 - DNA, 30 bp, Artificial Sequence
  Synthetic oligonucleotide
tatcacacggatcactcggatacgacctga

SEQ ID NO: 198949 - DNA, 30 bp, Artificial Sequence
  Synthetic oligonucleotide
taagtttgaaccgccaggaaatcgacctga

SEQ ID NO: 198950 - DNA, 30 bp, Artificial Sequence
  Synthetic oligonucleotide
tccaatgatgggctttgagacaggacctga

SEQ ID NO: 198951 - DNA, 30 bp, Artificial Sequence
  Synthetic oligonucleotide
ttggggaccgtgcggaggcatcggacctga

SEQ ID NO: 198952 - DNA, 30 bp, Artificial Sequence
  Synthetic oligonucleotide
ccacggaaactggcggaagacctgccctga

SEQ ID NO: 198953 - DNA, 30 bp, Artificial Sequence
  Synthetic oligonucleotide
gagcgagaccacatcggaattcctccctga

SEQ ID NO: 198954 - DNA, 30 bp, Artificial Sequence
  Synthetic oligonucleotide
tttacttgggtgccccatgagcgagcctga

SEQ ID NO: 198955 - DNA, 30 bp, Artificial Sequence
  Synthetic oligonucleotide
ttccacgtacacccacacaccctcgcctga

SEQ ID NO: 198956 - DNA, 30 bp, Artificial Sequence
  Synthetic oligonucleotide
gcgggaggggaccggaggaatgtcgcctga

SEQ ID NO: 198957 - DNA, 30 bp, Artificial Sequence
  Synthetic oligonucleotide
gacagcgaagtgttcgatagtgaggcctga

SEQ ID NO: 198958 - DNA, 30 bp, Artificial Sequence
  Synthetic oligonucleotide
aatgggcaaagcaaagcaccatgatcctga

SEQ ID NO: 198959 - DNA, 30 bp, Artificial Sequence
  Synthetic oligonucleotide
agtgtcggtaaacagtggcgactatcctga

SEQ ID NO: 198960 - DNA, 30 bp, Artificial Sequence
  Synthetic oligonucleotide
caatttatctcgaattcataccgctcctga

SEQ ID NO: 198961 - DNA, 30 bp, Artificial Sequence
  Synthetic oligonucleotide
taagcgcgaaggggtgtaactaaaagctga

SEQ ID NO: 198962 - DNA, 30 bp, Artificial Sequence
  Synthetic oligonucleotide
gagagcaaggggtcgcactattcaagctga

SEQ ID NO: 198963 - DNA, 30 bp, Artificial Sequence
  Synthetic oligonucleotide
accaacagaaatgctatatccgtaagctga

SEQ ID NO: 198964 - DNA, 30 bp, Artificial Sequence
  Synthetic oligonucleotide
tcatttcctagagggtgtatacccagctga

SEQ ID NO: 198965 - DNA, 30 bp, Artificial Sequence
  Synthetic oligonucleotide
acttagaccggttagcacggcgagagctga

SEQ ID NO: 198966 - DNA, 30 bp, Artificial Sequence
  Synthetic oligonucleotide
ttatacccagccaaggttcggacgagctga

SEQ ID NO: 198967 - DNA, 30 bp, Artificial Sequence
  Synthetic oligonucleotide
ccacgatcaagtagaccataccggagctga

SEQ ID NO: 198968 - DNA, 30 bp, Artificial Sequence
  Synthetic oligonucleotide
tgtatggtgacatttacgttggctagctga

SEQ ID NO: 198969 - DNA, 30 bp, Artificial Sequence
  Synthetic oligonucleotide
gtaacagcgtcacgtgtaagtgcgcgctga

SEQ ID NO: 198970 - DNA, 30 bp, Artificial Sequence
  Synthetic oligonucleotide
gttgataagactacgtttgactttcgctga

SEQ ID NO: 198971 - DNA, 30 bp, Artificial Sequence
  Synthetic oligonucleotide
gacgccacaacaagggtgtcaccgggctga

SEQ ID NO: 198972 - DNA, 30 bp, Artificial Sequence
  Synthetic oligonucleotide
aatgtccatgttgagcggtaatatggctga

SEQ ID NO: 198973 - DNA, 30 bp, Artificial Sequence
  Synthetic oligonucleotide
gattatgtgctagacactaagtgtggctga

SEQ ID NO: 198974 - DNA, 30 bp, Artificial Sequence
  Synthetic oligonucleotide
ctcgcgctggcatactaaaggattggctga

SEQ ID NO: 198975 - DNA, 30 bp, Artificial Sequence
  Synthetic oligonucleotide
agtctgagtaaatagcgccggattggctga

SEQ ID NO: 198976 - DNA, 30 bp, Artificial Sequence
  Synthetic oligonucleotide
gttggtagaggatgtttttaggttggctga

SEQ ID NO: 198977 - DNA, 30 bp, Artificial Sequence
  Synthetic oligonucleotide
tggcagatacctggacctaaccgatgctga

SEQ ID NO: 198978 - DNA, 30 bp, Artificial Sequence
  Synthetic oligonucleotide
acatccgtaagttgaaaagctgtatgctga

SEQ ID NO: 198979 - DNA, 30 bp, Artificial Sequence
  Synthetic oligonucleotide
gtattaatgggcgtggctcgtggctgctga

SEQ ID NO: 198980 - DNA, 30 bp, Artificial Sequence
  Synthetic oligonucleotide
aagatcgacataatcagaccagtctgctga

SEQ ID NO: 198981 - DNA, 30 bp, Artificial Sequence
  Synthetic oligonucleotide
gtgtccacttatgccatggtttcgtgctga

SEQ ID NO: 198982 - DNA, 30 bp, Artificial Sequence
  Synthetic oligonucleotide
aagagcaagatgtcacaacaaagttgctga

SEQ ID NO: 198983 - DNA, 30 bp, Artificial Sequence
  Synthetic oligonucleotide
catgtggattttgtccgaaccctttgctga

SEQ ID NO: 198984 - DNA, 30 bp, Artificial Sequence
  Synthetic oligonucleotide
ccaaataaccgagtgtccggttaaatctga

SEQ ID NO: 198985 - DNA, 30 bp, Artificial Sequence
  Synthetic oligonucleotide
atattgatcgtgaaatcctctgcaatctga

SEQ ID NO: 198986 - DNA, 30 bp, Artificial Sequence
  Synthetic oligonucleotide
cagagctccgaatttgtgctgttgatctga

SEQ ID NO: 198987 - DNA, 30 bp, Artificial Sequence
  Synthetic oligonucleotide
ggctgaactagcggaaatgtgtatatctga

SEQ ID NO: 198988 - DNA, 30 bp, Artificial Sequence
  Synthetic oligonucleotide
tagactggagaattgttgagcttactctga

SEQ ID NO: 198989 - DNA, 30 bp, Artificial Sequence
  Synthetic oligonucleotide
aggtgcacgttgacacataggccgctctga

SEQ ID NO: 198990 - DNA, 30 bp, Artificial Sequence
  Synthetic oligonucleotide
atccacggatatggccccgagagggtctga

SEQ ID NO: 198991 - DNA, 30 bp, Artificial Sequence
  Synthetic oligonucleotide
gagacttgagttcgctctacgatggtctga

SEQ ID NO: 198992 - DNA, 30 bp, Artificial Sequence
  Synthetic oligonucleotide
gacgttatcacaggtgagagatgattctga

SEQ ID NO: 198993 - DNA, 30 bp, Artificial Sequence
  Synthetic oligonucleotide
gcaggcgacctggtatccgagcacttctga

SEQ ID NO: 198994 - DNA, 30 bp, Artificial Sequence
  Synthetic oligonucleotide
gacttgtgtgttcttcagagacccttctga

SEQ ID NO: 198995 - DNA, 30 bp, Artificial Sequence
  Synthetic oligonucleotide
taagttactaacgagatcggacgcttctga

SEQ ID NO: 198996 - DNA, 30 bp, Artificial Sequence
  Synthetic oligonucleotide
ggatacgtgctgaacatccgcattttctga

SEQ ID NO: 198997 - DNA, 30 bp, Artificial Sequence
  Synthetic oligonucleotide
cagttacagtaagctggcccaagcaagtga

SEQ ID NO: 198998 - DNA, 30 bp, Artificial Sequence
  Synthetic oligonucleotide
aatgtggtcgctcgaatggacatcaagtga

SEQ ID NO: 198999 - DNA, 30 bp, Artificial Sequence
  Synthetic oligonucleotide
gagagcctataattcgacccaaggaagtga

SEQ ID NO: 199000 - DNA, 30 bp, Artificial Sequence
  Synthetic oligonucleotide
agtgctaagacgatgcggtcaggtaagtga

SEQ ID NO: 199001 - DNA, 30 bp, Artificial Sequence
  Synthetic oligonucleotide
tcgttttcattgcgattgatatttaagtga

SEQ ID NO: 199002 - DNA, 30 bp, Artificial Sequence
  Synthetic oligonucleotide
gaacccggaacaagtattgcgggacagtga

SEQ ID NO: 199003 - DNA, 30 bp, Artificial Sequence
  Synthetic oligonucleotide
aggcgacgagaactgggtcgcttacagtga

SEQ ID NO: 199004 - DNA, 30 bp, Artificial Sequence
  Synthetic oligonucleotide
cacactgtggcgcgaacccttcctcagtga

SEQ ID NO: 199005 - DNA, 30 bp, Artificial Sequence
  Synthetic oligonucleotide
aaagggtagtgtcgcttagtgtgagagtga

SEQ ID NO: 199006 - DNA, 30 bp, Artificial Sequence
  Synthetic oligonucleotide
cccatgctgacattatgtgaggccgagtga

SEQ ID NO: 199007 - DNA, 30 bp, Artificial Sequence
  Synthetic oligonucleotide
gctcagtggtacgacgcccacgatgagtga

SEQ ID NO: 199008 - DNA, 30 bp, Artificial Sequence
  Synthetic oligonucleotide
ttataaactaacggaataccgactgagtga

SEQ ID NO: 199009 - DNA, 30 bp, Artificial Sequence
  Synthetic oligonucleotide
tacgacatactcatatttgtgtaatagtga

SEQ ID NO: 199010 - DNA, 30 bp, Artificial Sequence
  Synthetic oligonucleotide
ggcactcgaccccatacaggtcgctagtga

SEQ ID NO: 199011 - DNA, 30 bp, Artificial Sequence
  Synthetic oligonucleotide
tcatcctcggttaaggttcaatgctagtga

SEQ ID NO: 199012 - DNA, 30 bp, Artificial Sequence
  Synthetic oligonucleotide
gacgacaggtgcactgcaatgccgtagtga

SEQ ID NO: 199013 - DNA, 30 bp, Artificial Sequence
  Synthetic oligonucleotide
ctggccttggtgagtgtacgtgattagtga

SEQ ID NO: 199014 - DNA, 30 bp, Artificial Sequence
  Synthetic oligonucleotide
cgtatcataggtaaatcaatagtaacgtga

SEQ ID NO: 199015 - DNA, 30 bp, Artificial Sequence
  Synthetic oligonucleotide
tcacgatagattccaccctgcggcacgtga

SEQ ID NO: 199016 - DNA, 30 bp, Artificial Sequence
  Synthetic oligonucleotide
ccttcgatggggcctacggtgcagacgtga

SEQ ID NO: 199017 - DNA, 30 bp, Artificial Sequence
  Synthetic oligonucleotide
ggtgagccagccccgactttgccgacgtga

SEQ ID NO: 199018 - DNA, 30 bp, Artificial Sequence
  Synthetic oligonucleotide
atacttcgctcagcgcagcgtgggacgtga

SEQ ID NO: 199019 - DNA, 30 bp, Artificial Sequence
  Synthetic oligonucleotide
gattatcgatagggtgtgcggctgacgtga

SEQ ID NO: 199020 - DNA, 30 bp, Artificial Sequence
  Synthetic oligonucleotide
ctagtcctaaaggggcgaagaaacccgtga

SEQ ID NO: 199021 - DNA, 30 bp, Artificial Sequence
  Synthetic oligonucleotide
gcatcctgtcttgtcaaacattaagcgtga

SEQ ID NO: 199022 - DNA, 30 bp, Artificial Sequence
  Synthetic oligonucleotide
acctacatgaacactcgcagccgagcgtga

SEQ ID NO: 199023 - DNA, 30 bp, Artificial Sequence
  Synthetic oligonucleotide
ctggtaagtataatgcttcccatagcgtga

SEQ ID NO: 199024 - DNA, 30 bp, Artificial Sequence
  Synthetic oligonucleotide
acgactatgtagtgtatgccagttgcgtga

SEQ ID NO: 199025 - DNA, 30 bp, Artificial Sequence
  Synthetic oligonucleotide
gaccaaggaatctgaacaatttttgcgtga

SEQ ID NO: 199026 - DNA, 30 bp, Artificial Sequence
  Synthetic oligonucleotide
gcagtctaattggaaagtaattgctcgtga

SEQ ID NO: 199027 - DNA, 30 bp, Artificial Sequence
  Synthetic oligonucleotide
cagggtaaatatcgagggctgcagtcgtga

SEQ ID NO: 199028 - DNA, 30 bp, Artificial Sequence
  Synthetic oligonucleotide
gcattagtccataagacacctccgtcgtga

SEQ ID NO: 199029 - DNA, 30 bp, Artificial Sequence
  Synthetic oligonucleotide
cagcattccgagggcggcgtgtcaaggtga

SEQ ID NO: 199030 - DNA, 30 bp, Artificial Sequence
  Synthetic oligonucleotide
catcgccgattagaataacgaccgaggtga

SEQ ID NO: 199031 - DNA, 30 bp, Artificial Sequence
  Synthetic oligonucleotide
tcaaacgcccaccgcgcgtcactgaggtga

SEQ ID NO: 199032 - DNA, 30 bp, Artificial Sequence
  Synthetic oligonucleotide
gtaggtatcttgactgcgcggagtaggtga

SEQ ID NO: 199033 - DNA, 30 bp, Artificial Sequence
  Synthetic oligonucleotide
agaaatataggccccagcgggggtcggtga

SEQ ID NO: 199034 - DNA, 30 bp, Artificial Sequence
  Synthetic oligonucleotide
ctagtgttcttcgggtatgttgcagggtga

SEQ ID NO: 199035 - DNA, 30 bp, Artificial Sequence
  Synthetic oligonucleotide
tgtggtgcgcgttgcacaacattcgggtga

SEQ ID NO: 199036 - DNA, 30 bp, Artificial Sequence
  Synthetic oligonucleotide
acaagggtaacaggcagttggtttgggtga

SEQ ID NO: 199037 - DNA, 30 bp, Artificial Sequence
  Synthetic oligonucleotide
aactgcccattttccgacaaggaatggtga

SEQ ID NO: 199038 - DNA, 30 bp, Artificial Sequence
  Synthetic oligonucleotide
gcccgtgcaaaggtccactgatgatggtga

SEQ ID NO: 199039 - DNA, 30 bp, Artificial Sequence
  Synthetic oligonucleotide
atgggggagcttgagcatgcgctatggtga

SEQ ID NO: 199040 - DNA, 30 bp, Artificial Sequence
  Synthetic oligonucleotide
acaccgcataggggtgatctcagctggtga

SEQ ID NO: 199041 - DNA, 30 bp, Artificial Sequence
  Synthetic oligonucleotide
tagtggggctctgttaccccatgctggtga

SEQ ID NO: 199042 - DNA, 30 bp, Artificial Sequence
  Synthetic oligonucleotide
ctctgtagatctcaactgctgtagtggtga

SEQ ID NO: 199043 - DNA, 30 bp, Artificial Sequence
  Synthetic oligonucleotide
ttagaactagctgcgagtagcacgtggtga

SEQ ID NO: 199044 - DNA, 30 bp, Artificial Sequence
  Synthetic oligonucleotide
tccgctggagcagagcgcggatcaatgtga

SEQ ID NO: 199045 - DNA, 30 bp, Artificial Sequence
  Synthetic oligonucleotide
gtggggaggtctcgggcaaaggtcatgtga

SEQ ID NO: 199046 - DNA, 30 bp, Artificial Sequence
  Synthetic oligonucleotide
cacatgagcaaagctgttggcgctatgtga

SEQ ID NO: 199047 - DNA, 30 bp, Artificial Sequence
  Synthetic oligonucleotide
ggcacgcgcgcaagaatcctctctatgtga

SEQ ID NO: 199048 - DNA, 30 bp, Artificial Sequence
  Synthetic oligonucleotide
ggacgtaacgataacctcacggcgctgtga

SEQ ID NO: 199049 - DNA, 30 bp, Artificial Sequence
  Synthetic oligonucleotide
gtcagttaggtgtcgggaacgaatctgtga

SEQ ID NO: 199050 - DNA, 30 bp, Artificial Sequence
  Synthetic oligonucleotide
tcaaaatgatggttagcagtgtatctgtga

SEQ ID NO: 199051 - DNA, 30 bp, Artificial Sequence
  Synthetic oligonucleotide
gttagggaagtattacggcctattctgtga

SEQ ID NO: 199052 - DNA, 30 bp, Artificial Sequence
  Synthetic oligonucleotide
cgtttcggacgctatgaaagggttctgtga

SEQ ID NO: 199053 - DNA, 30 bp, Artificial Sequence
  Synthetic oligonucleotide
tcgctgcagtcctgaggttagaaagtgtga

SEQ ID NO: 199054 - DNA, 30 bp, Artificial Sequence
  Synthetic oligonucleotide
ttgagccctgtgagtctacacagggtgtga

SEQ ID NO: 199055 - DNA, 30 bp, Artificial Sequence
  Synthetic oligonucleotide
acttacgtaattgtgactcccgagttgtga

SEQ ID NO: 199056 - DNA, 30 bp, Artificial Sequence
  Synthetic oligonucleotide
tagatagctcagctcgtacacgggttgtga

SEQ ID NO: 199057 - DNA, 30 bp, Artificial Sequence
  Synthetic oligonucleotide
tcgtgtaatccagcgtatcagtcaaattga

SEQ ID NO: 199058 - DNA, 30 bp, Artificial Sequence
  Synthetic oligonucleotide
caccgtcagcacggtacgccgagaaattga

SEQ ID NO: 199059 - DNA, 30 bp, Artificial Sequence
  Synthetic oligonucleotide
gcatcaggctgatgcctatcaggaaattga

SEQ ID NO: 199060 - DNA, 30 bp, Artificial Sequence
  Synthetic oligonucleotide
atgagctgatcctttacagtacacaattga

SEQ ID NO: 199061 - DNA, 30 bp, Artificial Sequence
  Synthetic oligonucleotide
tgaggataaggggagacgggtgggaattga

SEQ ID NO: 199062 - DNA, 30 bp, Artificial Sequence
  Synthetic oligonucleotide
ccgggaatgacactcgcgaggagtaattga

SEQ ID NO: 199063 - DNA, 30 bp, Artificial Sequence
  Synthetic oligonucleotide
tgcgttcgagcagcaaatccgcgtaattga

SEQ ID NO: 199064 - DNA, 30 bp, Artificial Sequence
  Synthetic oligonucleotide
tcgaaatggtcacattgagaagcacattga

SEQ ID NO: 199065 - DNA, 30 bp, Artificial Sequence
  Synthetic oligonucleotide
gagaatatacatttccaatcggcccattga

SEQ ID NO: 199066 - DNA, 30 bp, Artificial Sequence
  Synthetic oligonucleotide
gaacagtcaaagcgtgaccgcgcgcattga

SEQ ID NO: 199067 - DNA, 30 bp, Artificial Sequence
  Synthetic oligonucleotide
ccacgatcgcgggcctacatcggtcattga

SEQ ID NO: 199068 - DNA, 30 bp, Artificial Sequence
  Synthetic oligonucleotide
aggattaatatagtggaggtccgagattga

SEQ ID NO: 199069 - DNA, 30 bp, Artificial Sequence
  Synthetic oligonucleotide
tcgaagagttaatatggacaaggagattga

SEQ ID NO: 199070 - DNA, 30 bp, Artificial Sequence
  Synthetic oligonucleotide
ttagcacgtgtgcacgaagggcgggattga

SEQ ID NO: 199071 - DNA, 30 bp, Artificial Sequence
  Synthetic oligonucleotide
ctcagttgagaataatcaaggacatattga

SEQ ID NO: 199072 - DNA, 30 bp, Artificial Sequence
  Synthetic oligonucleotide
gaacaaggcttgcgcgggagggcctattga

SEQ ID NO: 199073 - DNA, 30 bp, Artificial Sequence
  Synthetic oligonucleotide
tcactatttggcccgttatgttagtattga

SEQ ID NO: 199074 - DNA, 30 bp, Artificial Sequence
  Synthetic oligonucleotide
acaagaacacctcccataaattattattga

SEQ ID NO: 199075 - DNA, 30 bp, Artificial Sequence
  Synthetic oligonucleotide
agatggggcgtcagcgtaggtttgacttga

SEQ ID NO: 199076 - DNA, 30 bp, Artificial Sequence
  Synthetic oligonucleotide
ggatggtgtctctgatgggcattaccttga

SEQ ID NO: 199077 - DNA, 30 bp, Artificial Sequence
  Synthetic oligonucleotide
tgtcagggagtagaagggaggtccccttga

SEQ ID NO: 199078 - DNA, 30 bp, Artificial Sequence
  Synthetic oligonucleotide
aaactagtcacgtccacaacgtcagcttga

SEQ ID NO: 199079 - DNA, 30 bp, Artificial Sequence
  Synthetic oligonucleotide
tggagtgacatgtactttagggtggcttga

SEQ ID NO: 199080 - DNA, 30 bp, Artificial Sequence
  Synthetic oligonucleotide
aggtagctgagtatgtccccagctgcttga

SEQ ID NO: 199081 - DNA, 30 bp, Artificial Sequence
  Synthetic oligonucleotide
gtccgttcgaggtaagctaggagtgcttga

SEQ ID NO: 199082 - DNA, 30 bp, Artificial Sequence
  Synthetic oligonucleotide
gtcggtatacgtatttctgctccatcttga

SEQ ID NO: 199083 - DNA, 30 bp, Artificial Sequence
  Synthetic oligonucleotide
tagttataagcaagtaccggaggttcttga

SEQ ID NO: 199084 - DNA, 30 bp, Artificial Sequence
  Synthetic oligonucleotide
tattaaaattcctgattgtgccagagttga

SEQ ID NO: 199085 - DNA, 30 bp, Artificial Sequence
  Synthetic oligonucleotide
ggagaacgtctgtgtagaggtgggagttga

SEQ ID NO: 199086 - DNA, 30 bp, Artificial Sequence
  Synthetic oligonucleotide
agtggcgcttatgaacactcactgagttga

SEQ ID NO: 199087 - DNA, 30 bp, Artificial Sequence
  Synthetic oligonucleotide
ctgtccgtggcaccttgcgcttaacgttga

SEQ ID NO: 199088 - DNA, 30 bp, Artificial Sequence
  Synthetic oligonucleotide
cagcaagggggtcagctcgctgcacgttga

SEQ ID NO: 199089 - DNA, 30 bp, Artificial Sequence
  Synthetic oligonucleotide
ggacgccggctggtttagcggtttcgttga

SEQ ID NO: 199090 - DNA, 30 bp, Artificial Sequence
  Synthetic oligonucleotide
acttactcattaccgaatgttttaggttga

SEQ ID NO: 199091 - DNA, 30 bp, Artificial Sequence
  Synthetic oligonucleotide
agcacaggtgggtgtcgtttacatggttga

SEQ ID NO: 199092 - DNA, 30 bp, Artificial Sequence
  Synthetic oligonucleotide
gattgcattcgtaacggaattgatggttga

SEQ ID NO: 199093 - DNA, 30 bp, Artificial Sequence
  Synthetic oligonucleotide
acttgttagcagatgacaagtgaatgttga

SEQ ID NO: 199094 - DNA, 30 bp, Artificial Sequence
  Synthetic oligonucleotide
catgtgtagtgcgcggtggattgatgttga

SEQ ID NO: 199095 - DNA, 30 bp, Artificial Sequence
  Synthetic oligonucleotide
tcgagaggcgagattgaaggggcctgttga

SEQ ID NO: 199096 - DNA, 30 bp, Artificial Sequence
  Synthetic oligonucleotide
acaaaaggcgctaatcacactgattgttga

SEQ ID NO: 199097 - DNA, 30 bp, Artificial Sequence
  Synthetic oligonucleotide
tgtgccctatgtggaagtaattattgttga

SEQ ID NO: 199098 - DNA, 30 bp, Artificial Sequence
  Synthetic oligonucleotide
cgttcacgacccgccttgcttgaaatttga

SEQ ID NO: 199099 - DNA, 30 bp, Artificial Sequence
  Synthetic oligonucleotide
ctcgtcatgatagtgtattccagaatttga

SEQ ID NO: 199100 - DNA, 30 bp, Artificial Sequence
  Synthetic oligonucleotide
ggtggcccgttagcaggttgctgaatttga

SEQ ID NO: 199101 - DNA, 30 bp, Artificial Sequence
  Synthetic oligonucleotide
cgcgagcagtcagtgacaaggtgaatttga

SEQ ID NO: 199102 - DNA, 30 bp, Artificial Sequence
  Synthetic oligonucleotide
ggatctacaaagaagaagtttttaatttga

SEQ ID NO: 199103 - DNA, 30 bp, Artificial Sequence
  Synthetic oligonucleotide
ttcggtgttgttccgggtcgggagatttga

SEQ ID NO: 199104 - DNA, 30 bp, Artificial Sequence
  Synthetic oligonucleotide
cgggtgtcctccaaggtgtgttcgatttga

SEQ ID NO: 199105 - DNA, 30 bp, Artificial Sequence
  Synthetic oligonucleotide
acagactgaaaggttgagttatgtatttga

SEQ ID NO: 199106 - DNA, 31 bp, Artificial Sequence
  Synthetic oligonucleotide
caagactcggtctccaggatcatgagtttga

SEQ ID NO: 199107 - DNA, 30 bp, Artificial Sequence
  Synthetic oligonucleotide
tggaattatgaagaacggcaggacgtttga

SEQ ID NO: 199108 - DNA, 30 bp, Artificial Sequence
  Synthetic oligonucleotide
gaaaatcctaagagtcaggcaaccgtttga

SEQ ID NO: 199109 - DNA, 30 bp, Artificial Sequence
  Synthetic oligonucleotide
actaataaagggtgataacctttggtttga

SEQ ID NO: 199110 - DNA, 30 bp, Artificial Sequence
  Synthetic oligonucleotide
gacagtcgcgggtgagtgcagtgtgtttga

SEQ ID NO: 199111 - DNA, 30 bp, Artificial Sequence
  Synthetic oligonucleotide
tctttttgcatcgaagcgagtttgttttga

SEQ ID NO: 199112 - DNA, 30 bp, Artificial Sequence
  Synthetic oligonucleotide
acagtaggggctagaagacatacaaaaata

SEQ ID NO: 199113 - DNA, 30 bp, Artificial Sequence
  Synthetic oligonucleotide
acctgtcggtccggggttacagcaaaaata

SEQ ID NO: 199114 - DNA, 30 bp, Artificial Sequence
  Synthetic oligonucleotide
tcaacacatggtataacgacctgcaaaata

SEQ ID NO: 199115 - DNA, 30 bp, Artificial Sequence
  Synthetic oligonucleotide
actcgtgacccgacctaagggaagaaaata

SEQ ID NO: 199116 - DNA, 30 bp, Artificial Sequence
  Synthetic oligonucleotide
gccagagctcctactcctctggtgaaaata

SEQ ID NO: 199117 - DNA, 30 bp, Artificial Sequence
  Synthetic oligonucleotide
tgagcaacgggtatgacttgaggtaaaata

SEQ ID NO: 199118 - DNA, 30 bp, Artificial Sequence
  Synthetic oligonucleotide
gccttaattagtcatgtcataagccaaata

SEQ ID NO: 199119 - DNA, 30 bp, Artificial Sequence
  Synthetic oligonucleotide
catacgatggacagtttggcgcctcaaata

SEQ ID NO: 199120 - DNA, 30 bp, Artificial Sequence
  Synthetic oligonucleotide
tcacgtatgatttttacgtgcgctcaaata

SEQ ID NO: 199121 - DNA, 30 bp, Artificial Sequence
  Synthetic oligonucleotide
acggtttaatgagccggactcattcaaata

SEQ ID NO: 199122 - DNA, 30 bp, Artificial Sequence
  Synthetic oligonucleotide
tcacgctcttgcgattctaattgcgaaata

SEQ ID NO: 199123 - DNA, 30 bp, Artificial Sequence
  Synthetic oligonucleotide
ttgttcgtaatcgtgggtttactcgaaata

SEQ ID NO: 199124 - DNA, 30 bp, Artificial Sequence
  Synthetic oligonucleotide
tcgtttggtgaggctgtattagaggaaata

SEQ ID NO: 199125 - DNA, 30 bp, Artificial Sequence
  Synthetic oligonucleotide
cagtgtttaaagattagtgcctgggaaata

SEQ ID NO: 199126 - DNA, 30 bp, Artificial Sequence
  Synthetic oligonucleotide
cggtactaatatggcctgcatgtggaaata

SEQ ID NO: 199127 - DNA, 30 bp, Artificial Sequence
  Synthetic oligonucleotide
gagccctatatgctgttcggtttggaaata

SEQ ID NO: 199128 - DNA, 30 bp, Artificial Sequence
  Synthetic oligonucleotide
gaaggtaagccagcagaggcggctgaaata

SEQ ID NO: 199129 - DNA, 30 bp, Artificial Sequence
  Synthetic oligonucleotide
gccgtcaagagataggaagacgactaaata

SEQ ID NO: 199130 - DNA, 30 bp, Artificial Sequence
  Synthetic oligonucleotide
gcaggatgtcatggaagtaaaaaaacaata

SEQ ID NO: 199131 - DNA, 30 bp, Artificial Sequence
  Synthetic oligonucleotide
tggtccagatgtgcatcgggttggacaata

SEQ ID NO: 199132 - DNA, 30 bp, Artificial Sequence
  Synthetic oligonucleotide
gaatcgacgatcaaagcatgacaaccaata

SEQ ID NO: 199133 - DNA, 30 bp, Artificial Sequence
  Synthetic oligonucleotide
cacatatgagatattacctcggaaccaata

SEQ ID NO: 199134 - DNA, 30 bp, Artificial Sequence
  Synthetic oligonucleotide
agaagccacagaagggtcgacctaccaata

SEQ ID NO: 199135 - DNA, 30 bp, Artificial Sequence
  Synthetic oligonucleotide
gctggccacccgcggaagctggatccaata

SEQ ID NO: 199136 - DNA, 30 bp, Artificial Sequence
  Synthetic oligonucleotide
aggaaactgttatcagtaagaggagcaata

SEQ ID NO: 199137 - DNA, 30 bp, Artificial Sequence
  Synthetic oligonucleotide
aatcacttccgcgaggcgaaaatagcaata

SEQ ID NO: 199138 - DNA, 30 bp, Artificial Sequence
  Synthetic oligonucleotide
cgaatacggcaggcctacattatcgcaata

SEQ ID NO: 199139 - DNA, 30 bp, Artificial Sequence
  Synthetic oligonucleotide
acgtatccaaggcgacgtataaatgcaata

SEQ ID NO: 199140 - DNA, 30 bp, Artificial Sequence
  Synthetic oligonucleotide
agttaaagttaatggcaatccactgcaata

SEQ ID NO: 199141 - DNA, 30 bp, Artificial Sequence
  Synthetic oligonucleotide
gtgtcagttaagaaggagtttactgcaata

SEQ ID NO: 199142 - DNA, 30 bp, Artificial Sequence
  Synthetic oligonucleotide
agatgggcttggggataatgccttgcaata

SEQ ID NO: 199143 - DNA, 30 bp, Artificial Sequence
  Synthetic oligonucleotide
tctaagaaggggtacaaggaccaatcaata

SEQ ID NO: 199144 - DNA, 30 bp, Artificial Sequence
  Synthetic oligonucleotide
aaagggcagagcccgcttaacccctcaata

SEQ ID NO: 199145 - DNA, 30 bp, Artificial Sequence
  Synthetic oligonucleotide
acacaacgtggagacgctctgcagtcaata

SEQ ID NO: 199146 - DNA, 30 bp, Artificial Sequence
  Synthetic oligonucleotide
aagtcccggtcgaacgacgctacaagaata

SEQ ID NO: 199147 - DNA, 30 bp, Artificial Sequence
  Synthetic oligonucleotide
cctctctgtcaagagtctagcaagagaata

SEQ ID NO: 199148 - DNA, 30 bp, Artificial Sequence
  Synthetic oligonucleotide
cgggttgccaccagtagtcgtgtgagaata

SEQ ID NO: 199149 - DNA, 30 bp, Artificial Sequence
  Synthetic oligonucleotide
ctagcaccacctaattacccgcgtagaata

SEQ ID NO: 199150 - DNA, 30 bp, Artificial Sequence
  Synthetic oligonucleotide
ttaagtgaagtcactacagcagttagaata

SEQ ID NO: 199151 - DNA, 30 bp, Artificial Sequence
  Synthetic oligonucleotide
cgggaaccatagtatgtcgtttttagaata

SEQ ID NO: 199152 - DNA, 30 bp, Artificial Sequence
  Synthetic oligonucleotide
aatgggtatgtttcgtgcgcgttccgaata

SEQ ID NO: 199153 - DNA, 30 bp, Artificial Sequence
  Synthetic oligonucleotide
actaagtgctgcgattcaaactggcgaata

SEQ ID NO: 199154 - DNA, 30 bp, Artificial Sequence
  Synthetic oligonucleotide
gagaagccggacattatgttacttcgaata

SEQ ID NO: 199155 - DNA, 30 bp, Artificial Sequence
  Synthetic oligonucleotide
taataatcaccgagtcactctgttcgaata

SEQ ID NO: 199156 - DNA, 30 bp, Artificial Sequence
  Synthetic oligonucleotide
gcttcggagtccttttaaagcgaaggaata

SEQ ID NO: 199157 - DNA, 30 bp, Artificial Sequence
  Synthetic oligonucleotide
accattcccgactgggcagaaagaggaata

SEQ ID NO: 199158 - DNA, 30 bp, Artificial Sequence
  Synthetic oligonucleotide
cgggatggacaccttgaggtcgtaggaata

SEQ ID NO: 199159 - DNA, 30 bp, Artificial Sequence
  Synthetic oligonucleotide
atcagtaggcagcgagggtgctagggaata

SEQ ID NO: 199160 - DNA, 30 bp, Artificial Sequence
  Synthetic oligonucleotide
agacgtactcgatcgctacgagtgggaata

SEQ ID NO: 199161 - DNA, 30 bp, Artificial Sequence
  Synthetic oligonucleotide
tcatgcggggcacgggggcgaaaatgaata

SEQ ID NO: 199162 - DNA, 30 bp, Artificial Sequence
  Synthetic oligonucleotide
cgagcattaatcggcctgagcgcatgaata

SEQ ID NO: 199163 - DNA, 25 bp, Artificial Sequence
  Synthetic oligonucleotide
gcgcgtcaatggtccggtatgaata

SEQ ID NO: 199164 - DNA, 30 bp, Artificial Sequence
  Synthetic oligonucleotide
gacatgagcatgtgtcgggttgactgaata

SEQ ID NO: 199165 - DNA, 30 bp, Artificial Sequence
  Synthetic oligonucleotide
gtgtacatacgtcgaatcaaagtctgaata

SEQ ID NO: 199166 - DNA, 30 bp, Artificial Sequence
  Synthetic oligonucleotide
gaccagaatgtgcacgcgagacagtgaata

SEQ ID NO: 199167 - DNA, 30 bp, Artificial Sequence
  Synthetic oligonucleotide
tcagagtaatgcgtgagtttgtagtgaata

SEQ ID NO: 199168 - DNA, 30 bp, Artificial Sequence
  Synthetic oligonucleotide
gggctaaggaacgcaagtacctggtgaata

SEQ ID NO: 199169 - DNA, 30 bp, Artificial Sequence
  Synthetic oligonucleotide
aacagtacgataaacagggagttgtgaata

SEQ ID NO: 199170 - DNA, 30 bp, Artificial Sequence
  Synthetic oligonucleotide
ttgtggactaggcaaacttcgtgttgaata

SEQ ID NO: 199171 - DNA, 30 bp, Artificial Sequence
  Synthetic oligonucleotide
agatgttgtatcgaacaggtatcaataata

SEQ ID NO: 199172 - DNA, 30 bp, Artificial Sequence
  Synthetic oligonucleotide
ttcgtacgaaatcgagttaattacataata

SEQ ID NO: 199173 - DNA, 30 bp, Artificial Sequence
  Synthetic oligonucleotide
acgctggtttaatattcacacaccataata

SEQ ID NO: 199174 - DNA, 30 bp, Artificial Sequence
  Synthetic oligonucleotide
tccacaagtaatctgtgttctcagataata

SEQ ID NO: 199175 - DNA, 30 bp, Artificial Sequence
  Synthetic oligonucleotide
ttcaaatagcaccctgcattagagataata

SEQ ID NO: 199176 - DNA, 30 bp, Artificial Sequence
  Synthetic oligonucleotide
ttaaggcgcgctacgctgatccctataata

SEQ ID NO: 199177 - DNA, 30 bp, Artificial Sequence
  Synthetic oligonucleotide
ggttaaaaccgagtgacccgctagctaata

SEQ ID NO: 199178 - DNA, 30 bp, Artificial Sequence
  Synthetic oligonucleotide
gggtcgctccggttaaggtacctgctaata

SEQ ID NO: 199179 - DNA, 30 bp, Artificial Sequence
  Synthetic oligonucleotide
cagggctcacgtcatgtccttcatctaata

SEQ ID NO: 199180 - DNA, 30 bp, Artificial Sequence
  Synthetic oligonucleotide
gatgccaaaggaccaatccgggtagtaata

SEQ ID NO: 199181 - DNA, 30 bp, Artificial Sequence
  Synthetic oligonucleotide
ctttccgaagaaacgcagaggcgcgtaata

SEQ ID NO: 199182 - DNA, 30 bp, Artificial Sequence
  Synthetic oligonucleotide
ccttgtgactcggtgttaaatactgtaata

SEQ ID NO: 199183 - DNA, 30 bp, Artificial Sequence
  Synthetic oligonucleotide
acccgccgacaattaggtcggggattaata

SEQ ID NO: 199184 - DNA, 30 bp, Artificial Sequence
  Synthetic oligonucleotide
ggcgtaatatagtgcggtccggtgttaata

SEQ ID NO: 199185 - DNA, 30 bp, Artificial Sequence
  Synthetic oligonucleotide
acaatatcgggaggaagcaagcgtttaata

SEQ ID NO: 199186 - DNA, 30 bp, Artificial Sequence
  Synthetic oligonucleotide
ggtcaagaatctcaggcgatctttttaata

SEQ ID NO: 199187 - DNA, 30 bp, Artificial Sequence
  Synthetic oligonucleotide
ccttaacggcatcgggttacacgcaacata

SEQ ID NO: 199188 - DNA, 30 bp, Artificial Sequence
  Synthetic oligonucleotide
attaagtgggtgtggactgttaagaacata

SEQ ID NO: 199189 - DNA, 30 bp, Artificial Sequence
  Synthetic oligonucleotide
cctagacggatgttacgtgccatacacata

SEQ ID NO: 199190 - DNA, 30 bp, Artificial Sequence
  Synthetic oligonucleotide
tagttaaacacagacatggtcgctcacata

SEQ ID NO: 199191 - DNA, 30 bp, Artificial Sequence
  Synthetic oligonucleotide
gtacgaggtactcaggcgcccagtcacata

SEQ ID NO: 199192 - DNA, 30 bp, Artificial Sequence
  Synthetic oligonucleotide
atgcgctacattcctggttcgtgagacata

SEQ ID NO: 199193 - DNA, 30 bp, Artificial Sequence
  Synthetic oligonucleotide
tggcagccgactgtgcggattatagacata

SEQ ID NO: 199194 - DNA, 30 bp, Artificial Sequence
  Synthetic oligonucleotide
attacggcgagagcagctccatacgacata

SEQ ID NO: 199195 - DNA, 30 bp, Artificial Sequence
  Synthetic oligonucleotide
gggggacggttggggatggctctcgacata

SEQ ID NO: 199196 - DNA, 30 bp, Artificial Sequence
  Synthetic oligonucleotide
tgccaggatcgacaggtacgcttcgacata

SEQ ID NO: 199197 - DNA, 30 bp, Artificial Sequence
  Synthetic oligonucleotide
gtgtggaggtgttatattcataaggacata

SEQ ID NO: 199198 - DNA, 30 bp, Artificial Sequence
  Synthetic oligonucleotide
caagcatgatcatgtgcaagggagtacata

SEQ ID NO: 199199 - DNA, 30 bp, Artificial Sequence
  Synthetic oligonucleotide
acagcgggaaattttgtcgaagaacccata

SEQ ID NO: 199200 - DNA, 30 bp, Artificial Sequence
  Synthetic oligonucleotide
aggtatgggacccgtcacaagagacccata

SEQ ID NO: 199201 - DNA, 30 bp, Artificial Sequence
  Synthetic oligonucleotide
gcaaacgtacagttgatgaagatacccata

SEQ ID NO: 199202 - DNA, 30 bp, Artificial Sequence
  Synthetic oligonucleotide
tgtccacctgcgttcgaccaagagcccata

SEQ ID NO: 199203 - DNA, 30 bp, Artificial Sequence
  Synthetic oligonucleotide
tagtcggaatggacttggccagaagccata

SEQ ID NO: 199204 - DNA, 31 bp, Artificial Sequence
  Synthetic oligonucleotide
gggttacggtgccgtgtataaaggtgccata

SEQ ID NO: 199205 - DNA, 30 bp, Artificial Sequence
  Synthetic oligonucleotide
cgcggttaagatatgtgaacacttgccata

SEQ ID NO: 199206 - DNA, 30 bp, Artificial Sequence
  Synthetic oligonucleotide
gcaacgtgaaacgaactgatggcatccata

SEQ ID NO: 199207 - DNA, 30 bp, Artificial Sequence
  Synthetic oligonucleotide
gctaggcttggattagttgattcctccata

SEQ ID NO: 199208 - DNA, 30 bp, Artificial Sequence
  Synthetic oligonucleotide
atttcgcgggcagttacaaccagctccata

SEQ ID NO: 199209 - DNA, 30 bp, Artificial Sequence
  Synthetic oligonucleotide
tgcgatatgggtcgtccggcaaggtccata

SEQ ID NO: 199210 - DNA, 30 bp, Artificial Sequence
  Synthetic oligonucleotide
taacataatttcacaggggggcgttccata

SEQ ID NO: 199211 - DNA, 30 bp, Artificial Sequence
  Synthetic oligonucleotide
cgcacctgataagaactgcgcgcaagcata

SEQ ID NO: 199212 - DNA, 30 bp, Artificial Sequence
  Synthetic oligonucleotide
ccacggggtttatcagggtatgcaagcata

SEQ ID NO: 199213 - DNA, 30 bp, Artificial Sequence
  Synthetic oligonucleotide
cggattcagactatattgaaacacagcata

SEQ ID NO: 199214 - DNA, 30 bp, Artificial Sequence
  Synthetic oligonucleotide
gacgcacctaagcggagggcatccagcata

SEQ ID NO: 199215 - DNA, 30 bp, Artificial Sequence
  Synthetic oligonucleotide
tagttattgttcgtaccgtattccagcata

SEQ ID NO: 199216 - DNA, 30 bp, Artificial Sequence
  Synthetic oligonucleotide
ctccattgtccgttaagctcagtcagcata

SEQ ID NO: 199217 - DNA, 30 bp, Artificial Sequence
  Synthetic oligonucleotide
gtcaggggatttatagaccgaacgagcata

SEQ ID NO: 199218 - DNA, 30 bp, Artificial Sequence
  Synthetic oligonucleotide
atagaaacgaattctcagaactgtagcata

SEQ ID NO: 199219 - DNA, 30 bp, Artificial Sequence
  Synthetic oligonucleotide
acccggctcaacgatgagccgagacgcata

SEQ ID NO: 199220 - DNA, 30 bp, Artificial Sequence
  Synthetic oligonucleotide
tgcacgttgaaaagtgggacgggccgcata

SEQ ID NO: 199221 - DNA, 30 bp, Artificial Sequence
  Synthetic oligonucleotide
cttgcccctggagaaatggatgggcgcata

SEQ ID NO: 199222 - DNA, 30 bp, Artificial Sequence
  Synthetic oligonucleotide
cgaggtccctctgaagtaacagtgcgcata

SEQ ID NO: 199223 - DNA, 30 bp, Artificial Sequence
  Synthetic oligonucleotide
ttgctaatatcgacccccaaggtaggcata

SEQ ID NO: 199224 - DNA, 30 bp, Artificial Sequence
  Synthetic oligonucleotide
tcatcaagtacagtttcgatggcgggcata

SEQ ID NO: 199225 - DNA, 30 bp, Artificial Sequence
  Synthetic oligonucleotide
gaacgacgcgcgaaggcgtacctgggcata

SEQ ID NO: 199226 - DNA, 30 bp, Artificial Sequence
  Synthetic oligonucleotide
atcccattggggggagcgcatgtgggcata

SEQ ID NO: 199227 - DNA, 30 bp, Artificial Sequence
  Synthetic oligonucleotide
cagtcgtcatgaatcgaggagttgggcata

SEQ ID NO: 199228 - DNA, 30 bp, Artificial Sequence
  Synthetic oligonucleotide
ccgctaggggtcccggcgcatttgggcata

SEQ ID NO: 199229 - DNA, 30 bp, Artificial Sequence
  Synthetic oligonucleotide
gcgtccttatgcggaggggaagcctgcata

SEQ ID NO: 199230 - DNA, 30 bp, Artificial Sequence
  Synthetic oligonucleotide
gtgcgcgcgtcagccacgttagtctgcata

SEQ ID NO: 199231 - DNA, 30 bp, Artificial Sequence
  Synthetic oligonucleotide
agcctaacttactggtctgccaattgcata

SEQ ID NO: 199232 - DNA, 30 bp, Artificial Sequence
  Synthetic oligonucleotide
tgcaaatcgacagcgacgaggggaatcata

SEQ ID NO: 199233 - DNA, 30 bp, Artificial Sequence
  Synthetic oligonucleotide
actggaccagctaaacaagtacccatcata

SEQ ID NO: 199234 - DNA, 30 bp, Artificial Sequence
  Synthetic oligonucleotide
tggggaatggctgtagctatagcgatcata

SEQ ID NO: 199235 - DNA, 30 bp, Artificial Sequence
  Synthetic oligonucleotide
gtgttgatcagactgtctttgcttatcata

SEQ ID NO: 199236 - DNA, 30 bp, Artificial Sequence
  Synthetic oligonucleotide
cactgtacgggtggcaataaaaaactcata

SEQ ID NO: 199237 - DNA, 30 bp, Artificial Sequence
  Synthetic oligonucleotide
aaccggggtaacgaagccgacatcctcata

SEQ ID NO: 199238 - DNA, 30 bp, Artificial Sequence
  Synthetic oligonucleotide
gccgcgagcatggcatagagtctcctcata

SEQ ID NO: 199239 - DNA, 30 bp, Artificial Sequence
  Synthetic oligonucleotide
gggtatgcaattatttccttgaaagtcata

SEQ ID NO: 199240 - DNA, 30 bp, Artificial Sequence
  Synthetic oligonucleotide
gcgtatatcaaatggcggatacgagtcata

SEQ ID NO: 199241 - DNA, 30 bp, Artificial Sequence
  Synthetic oligonucleotide
caattgggaaacaatgtagttcgagtcata

SEQ ID NO: 199242 - DNA, 30 bp, Artificial Sequence
  Synthetic oligonucleotide
gaagaggctcggccaccggcatgagtcata

SEQ ID NO: 199243 - DNA, 30 bp, Artificial Sequence
  Synthetic oligonucleotide
ttaagacggcatcaaaggtcgagggtcata

SEQ ID NO: 199244 - DNA, 30 bp, Artificial Sequence
  Synthetic oligonucleotide
aagctgcatccacgtgcggcgctggtcata

SEQ ID NO: 199245 - DNA, 30 bp, Artificial Sequence
  Synthetic oligonucleotide
aacgtctggctagccagcaaataattcata

SEQ ID NO: 199246 - DNA, 30 bp, Artificial Sequence
  Synthetic oligonucleotide
tgagctaaacgaagaacccgttaattcata

SEQ ID NO: 199247 - DNA, 30 bp, Artificial Sequence
  Synthetic oligonucleotide
agctgcatcgcaaggttgtctccattcata

SEQ ID NO: 199248 - DNA, 30 bp, Artificial Sequence
  Synthetic oligonucleotide
gttgtggacgttcaaagcttcctcttcata

SEQ ID NO: 199249 - DNA, 30 bp, Artificial Sequence
  Synthetic oligonucleotide
ggttaggggtgggcaagtacccgtttcata

SEQ ID NO: 199250 - DNA, 30 bp, Artificial Sequence
  Synthetic oligonucleotide
attgcgtagatgagggccgatacaaagata

SEQ ID NO: 199251 - DNA, 30 bp, Artificial Sequence
  Synthetic oligonucleotide
agttacagaatgcttcgaccgctaaagata

SEQ ID NO: 199252 - DNA, 30 bp, Artificial Sequence
  Synthetic oligonucleotide
acaggcagggtgggaccagggctaaagata

SEQ ID NO: 199253 - DNA, 30 bp, Artificial Sequence
  Synthetic oligonucleotide
agaatcagacgtccaagttagaccaagata

SEQ ID NO: 199254 - DNA, 30 bp, Artificial Sequence
  Synthetic oligonucleotide
tactgtcgatacaccttaataggcaagata

SEQ ID NO: 199255 - DNA, 30 bp, Artificial Sequence
  Synthetic oligonucleotide
gaagggcacaacttttatgttctcaagata

SEQ ID NO: 199256 - DNA, 30 bp, Artificial Sequence
  Synthetic oligonucleotide
taatttgagagatctagtttcaggaagata

SEQ ID NO: 199257 - DNA, 30 bp, Artificial Sequence
  Synthetic oligonucleotide
cgtctctccatattgtaataatgtaagata

SEQ ID NO: 199258 - DNA, 30 bp, Artificial Sequence
  Synthetic oligonucleotide
ccaagaacgtggggaggatccatacagata

SEQ ID NO: 199259 - DNA, 30 bp, Artificial Sequence
  Synthetic oligonucleotide
ctcactgggcgctgaaagatactacagata

SEQ ID NO: 199260 - DNA, 30 bp, Artificial Sequence
  Synthetic oligonucleotide
tgtaacagcatgttatccacccgccagata

SEQ ID NO: 199261 - DNA, 30 bp, Artificial Sequence
  Synthetic oligonucleotide
agcgtatggttgaacagtttgaagcagata

SEQ ID NO: 199262 - DNA, 30 bp, Artificial Sequence
  Synthetic oligonucleotide
gcacgggcagtaggcgtctcgcaagagata

SEQ ID NO: 199263 - DNA, 30 bp, Artificial Sequence
  Synthetic oligonucleotide
cgtcttgttaatctactggtcaacgagata

SEQ ID NO: 199264 - DNA, 30 bp, Artificial Sequence
  Synthetic oligonucleotide
agtagctagacgtgtgactttacggagata

SEQ ID NO: 199265 - DNA, 30 bp, Artificial Sequence
  Synthetic oligonucleotide
actagtccgagtatgccactcagggagata

SEQ ID NO: 199266 - DNA, 30 bp, Artificial Sequence
  Synthetic oligonucleotide
aaactgaactggcccgcaggaggggagata

SEQ ID NO: 199267 - DNA, 30 bp, Artificial Sequence
  Synthetic oligonucleotide
agaaataagccctcgtgagttaatgagata

SEQ ID NO: 199268 - DNA, 30 bp, Artificial Sequence
  Synthetic oligonucleotide
gtggcctcgctcagaagacatagtgagata

SEQ ID NO: 199269 - DNA, 30 bp, Artificial Sequence
  Synthetic oligonucleotide
aactggggcataaagcagcgaacatagata

SEQ ID NO: 199270 - DNA, 30 bp, Artificial Sequence
  Synthetic oligonucleotide
tcgcagaatacgatcgggtgatcatagata

SEQ ID NO: 199271 - DNA, 30 bp, Artificial Sequence
  Synthetic oligonucleotide
aagcaatgcactacggtaagaatatagata

SEQ ID NO: 199272 - DNA, 30 bp, Artificial Sequence
  Synthetic oligonucleotide
taccacaaccgtccacaaggcagaacgata

SEQ ID NO: 199273 - DNA, 30 bp, Artificial Sequence
  Synthetic oligonucleotide
atggagcggtctctagcgtacaagacgata

SEQ ID NO: 199274 - DNA, 30 bp, Artificial Sequence
  Synthetic oligonucleotide
tgggggcttgtttaaccggccgatacgata

SEQ ID NO: 199275 - DNA, 30 bp, Artificial Sequence
  Synthetic oligonucleotide
ggaaattcgcggtacagggctggtacgata

SEQ ID NO: 199276 - DNA, 30 bp, Artificial Sequence
  Synthetic oligonucleotide
ttcataaatcattagatttcccaaccgata

SEQ ID NO: 199277 - DNA, 30 bp, Artificial Sequence
  Synthetic oligonucleotide
caacggtagcaagccgcttggtctccgata

SEQ ID NO: 199278 - DNA, 30 bp, Artificial Sequence
  Synthetic oligonucleotide
aagtaggcggcagatggcccaaatgcgata

SEQ ID NO: 199279 - DNA, 30 bp, Artificial Sequence
  Synthetic oligonucleotide
agtttaacaaaggacttgacgtctgcgata

SEQ ID NO: 199280 - DNA, 30 bp, Artificial Sequence
  Synthetic oligonucleotide
caggtgtaccgaatgctgttgacctcgata

SEQ ID NO: 199281 - DNA, 30 bp, Artificial Sequence
  Synthetic oligonucleotide
aggcaccattatgtgctgccgaattcgata

SEQ ID NO: 199282 - DNA, 30 bp, Artificial Sequence
  Synthetic oligonucleotide
gtaagcgggagttagaagtgattttcgata

SEQ ID NO: 199283 - DNA, 30 bp, Artificial Sequence
  Synthetic oligonucleotide
cagtatatgggtctgtacgtcataaggata

SEQ ID NO: 199284 - DNA, 30 bp, Artificial Sequence
  Synthetic oligonucleotide
gtaactagcgtggacccctaactaaggata

SEQ ID NO: 199285 - DNA, 30 bp, Artificial Sequence
  Synthetic oligonucleotide
ctcacaagcgttccgtgtgcgtacaggata

SEQ ID NO: 199286 - DNA, 30 bp, Artificial Sequence
  Synthetic oligonucleotide
atacgtggagcatcgagacaacggaggata

SEQ ID NO: 199287 - DNA, 30 bp, Artificial Sequence
  Synthetic oligonucleotide
aaagcgcaatgctctggggttactaggata

SEQ ID NO: 199288 - DNA, 30 bp, Artificial Sequence
  Synthetic oligonucleotide
gtcagatgtttcaaccatgtgattaggata

SEQ ID NO: 199289 - DNA, 30 bp, Artificial Sequence
  Synthetic oligonucleotide
cacatctaacaatgagaactctaccggata

SEQ ID NO: 199290 - DNA, 30 bp, Artificial Sequence
  Synthetic oligonucleotide
aggccagagtagtccaaagaggcgcggata

SEQ ID NO: 199291 - DNA, 30 bp, Artificial Sequence
  Synthetic oligonucleotide
aacacagtgttcaaatgatccgggcggata

SEQ ID NO: 199292 - DNA, 30 bp, Artificial Sequence
  Synthetic oligonucleotide
agggcaatgatagacgtcaagctgcggata

SEQ ID NO: 199293 - DNA, 30 bp, Artificial Sequence
  Synthetic oligonucleotide
taaattcgagcaatcttcagtaatcggata

SEQ ID NO: 199294 - DNA, 30 bp, Artificial Sequence
  Synthetic oligonucleotide
cccttttgcgacaatcacctgcgtcggata

SEQ ID NO: 199295 - DNA, 30 bp, Artificial Sequence
  Synthetic oligonucleotide
aatcccgaacgtctgcgctactgagggata

SEQ ID NO: 199296 - DNA, 30 bp, Artificial Sequence
  Synthetic oligonucleotide
gtacggatcatcttactaggcttagggata

SEQ ID NO: 199297 - DNA, 30 bp, Artificial Sequence
  Synthetic oligonucleotide
aacgtgggtatgctgttgtgctacgggata

SEQ ID NO: 199298 - DNA, 30 bp, Artificial Sequence
  Synthetic oligonucleotide
atacctgggagattcggttataccgggata

SEQ ID NO: 199299 - DNA, 30 bp, Artificial Sequence
  Synthetic oligonucleotide
cttacagatgtgaacgagcagagcgggata

SEQ ID NO: 199300 - DNA, 30 bp, Artificial Sequence
  Synthetic oligonucleotide
ggggtcgcattcgctacaccaatcgggata

SEQ ID NO: 199301 - DNA, 30 bp, Artificial Sequence
  Synthetic oligonucleotide
cgtcggggttaacgtccaagcttcgggata

SEQ ID NO: 199302 - DNA, 30 bp, Artificial Sequence
  Synthetic oligonucleotide
agtgccacggcagaccattacacggggata

SEQ ID NO: 199303 - DNA, 30 bp, Artificial Sequence
  Synthetic oligonucleotide
tatggtgaggattaaacggttcgggggata

SEQ ID NO: 199304 - DNA, 30 bp, Artificial Sequence
  Synthetic oligonucleotide
gcgtatcttctagagggatccgtggggata

SEQ ID NO: 199305 - DNA, 30 bp, Artificial Sequence
  Synthetic oligonucleotide
ttattggaagtgggatcctgtaatgggata

SEQ ID NO: 199306 - DNA, 30 bp, Artificial Sequence
  Synthetic oligonucleotide
gtgcctacccgttatatccgtgatgggata

SEQ ID NO: 199307 - DNA, 30 bp, Artificial Sequence
  Synthetic oligonucleotide
gaccgaatcactaactgacaccctgggata

SEQ ID NO: 199308 - DNA, 30 bp, Artificial Sequence
  Synthetic oligonucleotide
tataaactggcaccgcgatcggctgggata

SEQ ID NO: 199309 - DNA, 30 bp, Artificial Sequence
  Synthetic oligonucleotide
ttgtcttcagcttacggcgaacgctggata

SEQ ID NO: 199310 - DNA, 30 bp, Artificial Sequence
  Synthetic oligonucleotide
ggaagtcagcatggctcctgtatttggata

SEQ ID NO: 199311 - DNA, 30 bp, Artificial Sequence
  Synthetic oligonucleotide
ctttcacgttatgaaatgggagtttggata

SEQ ID NO: 199312 - DNA, 30 bp, Artificial Sequence
  Synthetic oligonucleotide
agtgattaggtagtcgacttagcaatgata

SEQ ID NO: 199313 - DNA, 30 bp, Artificial Sequence
  Synthetic oligonucleotide
aggaactggcggggcgagtggtacatgata

SEQ ID NO: 199314 - DNA, 30 bp, Artificial Sequence
  Synthetic oligonucleotide
ttcccgactatatacagcagaggcatgata

SEQ ID NO: 199315 - DNA, 30 bp, Artificial Sequence
  Synthetic oligonucleotide
cggggatcgagagcgggagatatcatgata

SEQ ID NO: 199316 - DNA, 30 bp, Artificial Sequence
  Synthetic oligonucleotide
taggccccattcgggccagatcagatgata

SEQ ID NO: 199317 - DNA, 30 bp, Artificial Sequence
  Synthetic oligonucleotide
gaatgaggaaaagtctgctctttgatgata

SEQ ID NO: 199318 - DNA, 30 bp, Artificial Sequence
  Synthetic oligonucleotide
gtatggtctaagatatcatggggtatgata

SEQ ID NO: 199319 - DNA, 30 bp, Artificial Sequence
  Synthetic oligonucleotide
tgggttaaatgttggcaccttttactgata

SEQ ID NO: 199320 - DNA, 30 bp, Artificial Sequence
  Synthetic oligonucleotide
ccatagcaaacaaagccccactgcctgata

SEQ ID NO: 199321 - DNA, 30 bp, Artificial Sequence
  Synthetic oligonucleotide
ccgatcatcggcattaaactctgcctgata

SEQ ID NO: 199322 - DNA, 30 bp, Artificial Sequence
  Synthetic oligonucleotide
atgaggttagtgatgggttcttatctgata

SEQ ID NO: 199323 - DNA, 30 bp, Artificial Sequence
  Synthetic oligonucleotide
ttaaatatggattggcattggcaagtgata

SEQ ID NO: 199324 - DNA, 30 bp, Artificial Sequence
  Synthetic oligonucleotide
aagagttcaaccttgactcgcggagtgata

SEQ ID NO: 199325 - DNA, 30 bp, Artificial Sequence
  Synthetic oligonucleotide
acgcatctaggccgcaaattaaaggtgata

SEQ ID NO: 199326 - DNA, 30 bp, Artificial Sequence
  Synthetic oligonucleotide
cgaccagtctggacgactcggcaggtgata

SEQ ID NO: 199327 - DNA, 30 bp, Artificial Sequence
  Synthetic oligonucleotide
tctggtagggggacttgggcagtggtgata

SEQ ID NO: 199328 - DNA, 30 bp, Artificial Sequence
  Synthetic oligonucleotide
tcgatgtctcagtcatctcctcgattgata

SEQ ID NO: 199329 - DNA, 30 bp, Artificial Sequence
  Synthetic oligonucleotide
caaaatagaaaaagaacagagcgcttgata

SEQ ID NO: 199330 - DNA, 30 bp, Artificial Sequence
  Synthetic oligonucleotide
actccattgcctgataaatccaagttgata

SEQ ID NO: 199331 - DNA, 30 bp, Artificial Sequence
  Synthetic oligonucleotide
ctaatggatcggcaaaatttcaggttgata

SEQ ID NO: 199332 - DNA, 30 bp, Artificial Sequence
  Synthetic oligonucleotide
aaatgctgggcgcccattcgtaggttgata

SEQ ID NO: 199333 - DNA, 30 bp, Artificial Sequence
  Synthetic oligonucleotide
atgttagtggccgcgttttgtactttgata

SEQ ID NO: 199334 - DNA, 30 bp, Artificial Sequence
  Synthetic oligonucleotide
gacgatgggctgactggctataacaatata

SEQ ID NO: 199335 - DNA, 30 bp, Artificial Sequence
  Synthetic oligonucleotide
aactcacgggtatagtcaacgacgaatata

SEQ ID NO: 199336 - DNA, 30 bp, Artificial Sequence
  Synthetic oligonucleotide
ccgcagtgcggacggggccaggtacatata

SEQ ID NO: 199337 - DNA, 30 bp, Artificial Sequence
  Synthetic oligonucleotide
aggactcaagcatcccctcaatcccatata

SEQ ID NO: 199338 - DNA, 30 bp, Artificial Sequence
  Synthetic oligonucleotide
ctgtagctcaatagcccggtatagcatata

SEQ ID NO: 199339 - DNA, 30 bp, Artificial Sequence
  Synthetic oligonucleotide
gcagggttggaattatagtaccctcatata

SEQ ID NO: 199340 - DNA, 30 bp, Artificial Sequence
  Synthetic oligonucleotide
tggccaggccacgcgagatatgtcgatata

SEQ ID NO: 199341 - DNA, 30 bp, Artificial Sequence
  Synthetic oligonucleotide
gatggaactgcaatcccattctgggatata

SEQ ID NO: 199342 - DNA, 30 bp, Artificial Sequence
  Synthetic oligonucleotide
gaacaccggattatatccactgttgatata

SEQ ID NO: 199343 - DNA, 30 bp, Artificial Sequence
  Synthetic oligonucleotide
tctaaattacatcgcactacctaatatata

SEQ ID NO: 199344 - DNA, 30 bp, Artificial Sequence
  Synthetic oligonucleotide
cggttcagttataacggttcaacatatata

SEQ ID NO: 199345 - DNA, 30 bp, Artificial Sequence
  Synthetic oligonucleotide
atgagcccatagatcaagaacttgtatata

SEQ ID NO: 199346 - DNA, 30 bp, Artificial Sequence
  Synthetic oligonucleotide
actcagcgctctgtaaagccggtaactata

SEQ ID NO: 199347 - DNA, 30 bp, Artificial Sequence
  Synthetic oligonucleotide
ggactgtacctaggacggaagccgactata

SEQ ID NO: 199348 - DNA, 30 bp, Artificial Sequence
  Synthetic oligonucleotide
aaggttcatagaatattgggagaacctata

SEQ ID NO: 199349 - DNA, 30 bp, Artificial Sequence
  Synthetic oligonucleotide
atgcagtgccgtgcacgagtgatagctata

SEQ ID NO: 199350 - DNA, 30 bp, Artificial Sequence
  Synthetic oligonucleotide
cttatgaaaggtaaacatttatccgctata

SEQ ID NO: 199351 - DNA, 30 bp, Artificial Sequence
  Synthetic oligonucleotide
cagtgtctcctgcctaaaaaatttgctata

SEQ ID NO: 199352 - DNA, 30 bp, Artificial Sequence
  Synthetic oligonucleotide
cggtgttacggtggtttgggcctatctata

SEQ ID NO: 199353 - DNA, 30 bp, Artificial Sequence
  Synthetic oligonucleotide
actgctcgtgtggattgaagtatctctata

SEQ ID NO: 199354 - DNA, 30 bp, Artificial Sequence
  Synthetic oligonucleotide
aggcagaatttaggttatacactctctata

SEQ ID NO: 199355 - DNA, 30 bp, Artificial Sequence
  Synthetic oligonucleotide
atttgggcccgtcagttcacgaggtctata

SEQ ID NO: 199356 - DNA, 30 bp, Artificial Sequence
  Synthetic oligonucleotide
aagatattgaattgccatgggaaaagtata

SEQ ID NO: 199357 - DNA, 30 bp, Artificial Sequence
  Synthetic oligonucleotide
ggatcttaagggtgctcacatgcaagtata

SEQ ID NO: 199358 - DNA, 30 bp, Artificial Sequence
  Synthetic oligonucleotide
gctgaggaagagaagactaccaacagtata

SEQ ID NO: 199359 - DNA, 30 bp, Artificial Sequence
  Synthetic oligonucleotide
ggagggaaggaacttatttctgccagtata

SEQ ID NO: 199360 - DNA, 30 bp, Artificial Sequence
  Synthetic oligonucleotide
cgattcatatatgtgatctactcgcgtata

SEQ ID NO: 199361 - DNA, 30 bp, Artificial Sequence
  Synthetic oligonucleotide
gagggcgtcatgggcctaagctggcgtata

SEQ ID NO: 199362 - DNA, 30 bp, Artificial Sequence
  Synthetic oligonucleotide
ttagccgatagaatagatttacatcgtata

SEQ ID NO: 199363 - DNA, 30 bp, Artificial Sequence
  Synthetic oligonucleotide
cccgtttggaacaggaaccaaccaggtata

SEQ ID NO: 199364 - DNA, 30 bp, Artificial Sequence
  Synthetic oligonucleotide
aggcatatctattttcaacctagaggtata

SEQ ID NO: 199365 - DNA, 30 bp, Artificial Sequence
  Synthetic oligonucleotide
taagatataaggtttgcatagggcggtata

SEQ ID NO: 199366 - DNA, 30 bp, Artificial Sequence
  Synthetic oligonucleotide
agaagagccccatcgccatacttcggtata

SEQ ID NO: 199367 - DNA, 30 bp, Artificial Sequence
  Synthetic oligonucleotide
aacgaacctagccgtaccacaatgggtata

SEQ ID NO: 199368 - DNA, 30 bp, Artificial Sequence
  Synthetic oligonucleotide
tccgaaattcggaacaccaatttgggtata

SEQ ID NO: 199369 - DNA, 30 bp, Artificial Sequence
  Synthetic oligonucleotide
gaactctggccgtaatgaaaccgtggtata

SEQ ID NO: 199370 - DNA, 30 bp, Artificial Sequence
  Synthetic oligonucleotide
tctgatgaatcagtggctaaaaacattata

SEQ ID NO: 199371 - DNA, 30 bp, Artificial Sequence
  Synthetic oligonucleotide
ccaaagtcagatgccccaacctgtattata

SEQ ID NO: 199372 - DNA, 30 bp, Artificial Sequence
  Synthetic oligonucleotide
aaacaggaagttctttctagtaatcttata

SEQ ID NO: 199373 - DNA, 30 bp, Artificial Sequence
  Synthetic oligonucleotide
tggatgctggggtagtgcttggtagttata

SEQ ID NO: 199374 - DNA, 30 bp, Artificial Sequence
  Synthetic oligonucleotide
cttactcattcacctgctgacgacgttata

SEQ ID NO: 199375 - DNA, 30 bp, Artificial Sequence
  Synthetic oligonucleotide
gcgcaatattgacgaacaccaacggttata

SEQ ID NO: 199376 - DNA, 30 bp, Artificial Sequence
  Synthetic oligonucleotide
cgcatacttgcgctggtgggtaactttata

SEQ ID NO: 199377 - DNA, 30 bp, Artificial Sequence
  Synthetic oligonucleotide
gtctgcctgagattgctcgaaccctttata

SEQ ID NO: 199378 - DNA, 30 bp, Artificial Sequence
  Synthetic oligonucleotide
tacaggcaaactaaatatgccagctttata

SEQ ID NO: 199379 - DNA, 30 bp, Artificial Sequence
  Synthetic oligonucleotide
gggaggctgagaagcaccggatgctttata

SEQ ID NO: 199380 - DNA, 30 bp, Artificial Sequence
  Synthetic oligonucleotide
caccgtctactgggaaggtgaaagtttata

SEQ ID NO: 199381 - DNA, 30 bp, Artificial Sequence
  Synthetic oligonucleotide
cctcgacgagtagcggtctgatggaaacta

SEQ ID NO: 199382 - DNA, 30 bp, Artificial Sequence
  Synthetic oligonucleotide
ccattcggtctgctcggtgctgataaacta

SEQ ID NO: 199383 - DNA, 30 bp, Artificial Sequence
  Synthetic oligonucleotide
cagtaagctcctaacaagaagtttaaacta

SEQ ID NO: 199384 - DNA, 30 bp, Artificial Sequence
  Synthetic oligonucleotide
ctaacagtggacagggagcggtaacaacta

SEQ ID NO: 199385 - DNA, 30 bp, Artificial Sequence
  Synthetic oligonucleotide
cttgaagcaaggcgaagactattccaacta

SEQ ID NO: 199386 - DNA, 29 bp, Artificial Sequence
  Synthetic oligonucleotide
aacacgtagaggtttagggagaagaacta

SEQ ID NO: 199387 - DNA, 30 bp, Artificial Sequence
  Synthetic oligonucleotide
agatccagtccagtcccacgcccagaacta

SEQ ID NO: 199388 - DNA, 30 bp, Artificial Sequence
  Synthetic oligonucleotide
agggcaatttggtggttgccgcacgaacta

SEQ ID NO: 199389 - DNA, 30 bp, Artificial Sequence
  Synthetic oligonucleotide
tcgtacgatgggaggaacgcttaggaacta

SEQ ID NO: 199390 - DNA, 30 bp, Artificial Sequence
  Synthetic oligonucleotide
tagttagtaatgtttttcatgagggaacta

SEQ ID NO: 199391 - DNA, 30 bp, Artificial Sequence
  Synthetic oligonucleotide
caaaactagactgggcggccccttgaacta

SEQ ID NO: 199392 - DNA, 30 bp, Artificial Sequence
  Synthetic oligonucleotide
gtgttctgcctacccattttcatctaacta

SEQ ID NO: 199393 - DNA, 30 bp, Artificial Sequence
  Synthetic oligonucleotide
tttacgtaaagcgcgggatacgggtaacta

SEQ ID NO: 199394 - DNA, 30 bp, Artificial Sequence
  Synthetic oligonucleotide
caactagtcatgtcgtcttcattgtaacta

SEQ ID NO: 199395 - DNA, 30 bp, Artificial Sequence
  Synthetic oligonucleotide
gggcgaactactacttggcctttttaacta

SEQ ID NO: 199396 - DNA, 30 bp, Artificial Sequence
  Synthetic oligonucleotide
tcgtcgttatcaatgttgaagcaaacacta

SEQ ID NO: 199397 - DNA, 30 bp, Artificial Sequence
  Synthetic oligonucleotide
gcaatgtgcgacgaaaacttgggaacacta

SEQ ID NO: 199398 - DNA, 30 bp, Artificial Sequence
  Synthetic oligonucleotide
gtcatccctggcggcacgtatttcacacta

SEQ ID NO: 199399 - DNA, 30 bp, Artificial Sequence
  Synthetic oligonucleotide
gaagcgcgcttccgaggcgggtagacacta

SEQ ID NO: 199400 - DNA, 30 bp, Artificial Sequence
  Synthetic oligonucleotide
gagagagaggacgtgaggcaacctacacta

SEQ ID NO: 199401 - DNA, 30 bp, Artificial Sequence
  Synthetic oligonucleotide
gactgaactgtaaatgcacgctcgccacta

SEQ ID NO: 199402 - DNA, 30 bp, Artificial Sequence
  Synthetic oligonucleotide
aagaagcatgccattaagtctctgccacta

SEQ ID NO: 199403 - DNA, 30 bp, Artificial Sequence
  Synthetic oligonucleotide
aagttcagcgaggtattaagtggggcacta

SEQ ID NO: 199404 - DNA, 30 bp, Artificial Sequence
  Synthetic oligonucleotide
agatctagaaatgcaagcagtactgcacta

SEQ ID NO: 199405 - DNA, 30 bp, Artificial Sequence
  Synthetic oligonucleotide
catgatacgcagtcggtatcgtgtgcacta

SEQ ID NO: 199406 - DNA, 30 bp, Artificial Sequence
  Synthetic oligonucleotide
gtgcgaggtatgccgttcgactttgcacta

SEQ ID NO: 199407 - DNA, 30 bp, Artificial Sequence
  Synthetic oligonucleotide
aaactcgtatgtacagggagtgtatcacta

SEQ ID NO: 199408 - DNA, 30 bp, Artificial Sequence
  Synthetic oligonucleotide
tcggtatgcccgggggagggcttatcacta

SEQ ID NO: 199409 - DNA, 30 bp, Artificial Sequence
  Synthetic oligonucleotide
tcaaagcatcgatgtatgcttcactcacta

SEQ ID NO: 199410 - DNA, 30 bp, Artificial Sequence
  Synthetic oligonucleotide
acgccaaggcgtgccgttctgggttcacta

SEQ ID NO: 199411 - DNA, 30 bp, Artificial Sequence
  Synthetic oligonucleotide
gagaggtatgttttcatcccagaaagacta

SEQ ID NO: 199412 - DNA, 30 bp, Artificial Sequence
  Synthetic oligonucleotide
cactcaacatagaaattttagtgaagacta

SEQ ID NO: 199413 - DNA, 30 bp, Artificial Sequence
  Synthetic oligonucleotide
gcaatagctgggccgacactacgcagacta

SEQ ID NO: 199414 - DNA, 30 bp, Artificial Sequence
  Synthetic oligonucleotide
tgggttaaatcagaagggttaggcagacta

SEQ ID NO: 199415 - DNA, 30 bp, Artificial Sequence
  Synthetic oligonucleotide
gcaaacatccagcggggtactactagacta

SEQ ID NO: 199416 - DNA, 30 bp, Artificial Sequence
  Synthetic oligonucleotide
gcgcggttccattcaaagggatttagacta

SEQ ID NO: 199417 - DNA, 30 bp, Artificial Sequence
  Synthetic oligonucleotide
acgcagtctcaaagaattaatgcacgacta

SEQ ID NO: 199418 - DNA, 30 bp, Artificial Sequence
  Synthetic oligonucleotide
ctgctgtaaacacgtaatcatcgaggacta

SEQ ID NO: 199419 - DNA, 30 bp, Artificial Sequence
  Synthetic oligonucleotide
tacttgagcaaaggggataattgaggacta

SEQ ID NO: 199420 - DNA, 30 bp, Artificial Sequence
  Synthetic oligonucleotide
agtcgcatataatacggtaaggacggacta

SEQ ID NO: 199421 - DNA, 30 bp, Artificial Sequence
  Synthetic oligonucleotide
gcgacctagaaggggtttggcagcggacta

SEQ ID NO: 199422 - DNA, 30 bp, Artificial Sequence
  Synthetic oligonucleotide
agcacttcaaaggttcggatcatcggacta

SEQ ID NO: 199423 - DNA, 30 bp, Artificial Sequence
  Synthetic oligonucleotide
acgataatcagaaccgcgtttaggggacta

SEQ ID NO: 199424 - DNA, 30 bp, Artificial Sequence
  Synthetic oligonucleotide
tatgggcttatttacgtgtacgaatgacta

SEQ ID NO: 199425 - DNA, 30 bp, Artificial Sequence
  Synthetic oligonucleotide
tgcgggtcatgtttcagtctgggatgacta

SEQ ID NO: 199426 - DNA, 30 bp, Artificial Sequence
  Synthetic oligonucleotide
tggcgagccatgttgacatctttatgacta

SEQ ID NO: 199427 - DNA, 30 bp, Artificial Sequence
  Synthetic oligonucleotide
ccagaggcccaacactacgttgcttgacta

SEQ ID NO: 199428 - DNA, 30 bp, Artificial Sequence
  Synthetic oligonucleotide
aggcgttacagttcggcgcgagtttgacta

SEQ ID NO: 199429 - DNA, 30 bp, Artificial Sequence
  Synthetic oligonucleotide
ttcgagacggtagaatggatatgaatacta

SEQ ID NO: 199430 - DNA, 30 bp, Artificial Sequence
  Synthetic oligonucleotide
cgattatatccccaggagtggaacatacta

SEQ ID NO: 199431 - DNA, 30 bp, Artificial Sequence
  Synthetic oligonucleotide
aattaggagcccagaaggatcttcatacta

SEQ ID NO: 199432 - DNA, 30 bp, Artificial Sequence
  Synthetic oligonucleotide
gtgacacgtaacgcgcgcttgacgatacta

SEQ ID NO: 199433 - DNA, 30 bp, Artificial Sequence
  Synthetic oligonucleotide
caactgttaagagcatccacaccgatacta

SEQ ID NO: 199434 - DNA, 30 bp, Artificial Sequence
  Synthetic oligonucleotide
tcaagcagtagcacgggagtaaatatacta

SEQ ID NO: 199435 - DNA, 30 bp, Artificial Sequence
  Synthetic oligonucleotide
tacccacgatatcatactcccgatatacta

SEQ ID NO: 199436 - DNA, 30 bp, Artificial Sequence
  Synthetic oligonucleotide
gtcagtacctcgcctcaaaggtcactacta

SEQ ID NO: 199437 - DNA, 30 bp, Artificial Sequence
  Synthetic oligonucleotide
tgtggccgcggggcacaggagacgctacta

SEQ ID NO: 199438 - DNA, 30 bp, Artificial Sequence
  Synthetic oligonucleotide
ggtcctggtgcattatcttttgggctacta

SEQ ID NO: 199439 - DNA, 30 bp, Artificial Sequence
  Synthetic oligonucleotide
ttactagacaatgggtatattgcagtacta

SEQ ID NO: 199440 - DNA, 30 bp, Artificial Sequence
  Synthetic oligonucleotide
tagttgaattaggttgtacacgtagtacta

SEQ ID NO: 199441 - DNA, 30 bp, Artificial Sequence
  Synthetic oligonucleotide
tgttatgtacagctgatttaaatcgtacta

SEQ ID NO: 199442 - DNA, 30 bp, Artificial Sequence
  Synthetic oligonucleotide
gcgcaaaacatggccgcaaagtcggtacta

SEQ ID NO: 199443 - DNA, 30 bp, Artificial Sequence
  Synthetic oligonucleotide
gacagaggagtccctcctcccgatgtacta

SEQ ID NO: 199444 - DNA, 30 bp, Artificial Sequence
  Synthetic oligonucleotide
gctaggaatggcgcgccatgtgatgtacta

SEQ ID NO: 199445 - DNA, 30 bp, Artificial Sequence
  Synthetic oligonucleotide
gaaactacggggatgcataacggtgtacta

SEQ ID NO: 199446 - DNA, 30 bp, Artificial Sequence
  Synthetic oligonucleotide
agaataataggttaaattgcataattacta

SEQ ID NO: 199447 - DNA, 30 bp, Artificial Sequence
  Synthetic oligonucleotide
gcacccgagtatatgagttgacgtttacta

SEQ ID NO: 199448 - DNA, 30 bp, Artificial Sequence
  Synthetic oligonucleotide
actgatcataaaaaccggcgcccaaaccta

SEQ ID NO: 199449 - DNA, 30 bp, Artificial Sequence
  Synthetic oligonucleotide
gtttgagggataccctggatgtacaaccta

SEQ ID NO: 199450 - DNA, 30 bp, Artificial Sequence
  Synthetic oligonucleotide
tacgcgtggtttccaaggtaaagcaaccta

SEQ ID NO: 199451 - DNA, 30 bp, Artificial Sequence
  Synthetic oligonucleotide
agttcaagttttgcatgacgacagaaccta

SEQ ID NO: 199452 - DNA, 30 bp, Artificial Sequence
  Synthetic oligonucleotide
tgacgctgcccaatgaaacattggaaccta

SEQ ID NO: 199453 - DNA, 30 bp, Artificial Sequence
  Synthetic oligonucleotide
tcatgtgagattgggcaagaggataaccta

SEQ ID NO: 199454 - DNA, 30 bp, Artificial Sequence
  Synthetic oligonucleotide
gttccgtaacaccggcgaccacttaaccta

SEQ ID NO: 199455 - DNA, 30 bp, Artificial Sequence
  Synthetic oligonucleotide
gacgagataacctttgtggaccaacaccta

SEQ ID NO: 199456 - DNA, 30 bp, Artificial Sequence
  Synthetic oligonucleotide
agtcgcggaaattcttagcgttaacaccta

SEQ ID NO: 199457 - DNA, 30 bp, Artificial Sequence
  Synthetic oligonucleotide
aggaacgcaaaacgttgtcggaacgaccta

SEQ ID NO: 199458 - DNA, 30 bp, Artificial Sequence
  Synthetic oligonucleotide
tggttaagggaatcaattgcgagggaccta

SEQ ID NO: 199459 - DNA, 29 bp, Artificial Sequence
  Synthetic oligonucleotide
gcagaggtacgagatcaaatgtctaccta

SEQ ID NO: 199460 - DNA, 30 bp, Artificial Sequence
  Synthetic oligonucleotide
ctcgtagaacgaacaagtccggattaccta

SEQ ID NO: 199461 - DNA, 30 bp, Artificial Sequence
  Synthetic oligonucleotide
aagcgacgtcatttacgattcggttaccta

SEQ ID NO: 199462 - DNA, 30 bp, Artificial Sequence
  Synthetic oligonucleotide
tagcttgcatggcacgttgaaaaaacccta

SEQ ID NO: 199463 - DNA, 30 bp, Artificial Sequence
  Synthetic oligonucleotide
taggactgtctccagtacataaacacccta

SEQ ID NO: 199464 - DNA, 30 bp, Artificial Sequence
  Synthetic oligonucleotide
aataggaccaatcagtcctcttcgacccta

SEQ ID NO: 199465 - DNA, 30 bp, Artificial Sequence
  Synthetic oligonucleotide
tggtcgcggccagtcccaagtgctacccta

SEQ ID NO: 199466 - DNA, 30 bp, Artificial Sequence
  Synthetic oligonucleotide
ctaagcggtagggaacagctgcgtacccta

SEQ ID NO: 199467 - DNA, 30 bp, Artificial Sequence
  Synthetic oligonucleotide
tggaaccaccttattaagaaacttacccta

SEQ ID NO: 199468 - DNA, 30 bp, Artificial Sequence
  Synthetic oligonucleotide
gatggtgttttaatgcggggccggccccta

SEQ ID NO: 199469 - DNA, 30 bp, Artificial Sequence
  Synthetic oligonucleotide
ggctccttagtgatgtaaggcgacgcccta

SEQ ID NO: 199470 - DNA, 30 bp, Artificial Sequence
  Synthetic oligonucleotide
gtggaatggttaattgtctaagccgcccta

SEQ ID NO: 199471 - DNA, 30 bp, Artificial Sequence
  Synthetic oligonucleotide
taaaggagacgtcgctgtccataatcccta

SEQ ID NO: 199472 - DNA, 30 bp, Artificial Sequence
  Synthetic oligonucleotide
ggacttgggggacgccccgcagactcccta

SEQ ID NO: 199473 - DNA, 30 bp, Artificial Sequence
  Synthetic oligonucleotide
tcaatggcaggctatatctatttgtcccta

SEQ ID NO: 199474 - DNA, 30 bp, Artificial Sequence
  Synthetic oligonucleotide
aggaagtatgcgtacggacagagcagccta

SEQ ID NO: 199475 - DNA, 30 bp, Artificial Sequence
  Synthetic oligonucleotide
caagaaaccgccagatttacaaagagccta

SEQ ID NO: 199476 - DNA, 30 bp, Artificial Sequence
  Synthetic oligonucleotide
aaagctccgtgttaaccgagtctccgccta

SEQ ID NO: 199477 - DNA, 30 bp, Artificial Sequence
  Synthetic oligonucleotide
tagacagttacatcctcatgttttcgccta

SEQ ID NO: 199478 - DNA, 30 bp, Artificial Sequence
  Synthetic oligonucleotide
aggtagtcacaatgataaaatataggccta

SEQ ID NO: 199479 - DNA, 30 bp, Artificial Sequence
  Synthetic oligonucleotide
ttaccgcttaatctaatgactctaggccta

SEQ ID NO: 199480 - DNA, 30 bp, Artificial Sequence
  Synthetic oligonucleotide
tgggattgacgagttcatgatggcggccta

SEQ ID NO: 199481 - DNA, 30 bp, Artificial Sequence
  Synthetic oligonucleotide
tagcgatccatcataactccaattggccta

SEQ ID NO: 199482 - DNA, 30 bp, Artificial Sequence
  Synthetic oligonucleotide
acaaaaacataggcaaaagaatcgtgccta

SEQ ID NO: 199483 - DNA, 30 bp, Artificial Sequence
  Synthetic oligonucleotide
attgtcgcacagagtgcattcgcttgccta

SEQ ID NO: 199484 - DNA, 30 bp, Artificial Sequence
  Synthetic oligonucleotide
tgggacaggctaagctaaggaatgatccta

SEQ ID NO: 199485 - DNA, 30 bp, Artificial Sequence
  Synthetic oligonucleotide
gtttggcgagctgaccggtccattatccta

SEQ ID NO: 199486 - DNA, 30 bp, Artificial Sequence
  Synthetic oligonucleotide
gcgaatctacgtgcttcacagaacgtccta

SEQ ID NO: 199487 - DNA, 30 bp, Artificial Sequence
  Synthetic oligonucleotide
gagtcttaagaacatcacgatcacttccta

SEQ ID NO: 199488 - DNA, 30 bp, Artificial Sequence
  Synthetic oligonucleotide
catccggctgcaggtccggacgacttccta

SEQ ID NO: 199489 - DNA, 30 bp, Artificial Sequence
  Synthetic oligonucleotide
tagaaaataacgcaatggtgaacgttccta

SEQ ID NO: 199490 - DNA, 30 bp, Artificial Sequence
  Synthetic oligonucleotide
gtctcttaggacaataagtcccaaaagcta

SEQ ID NO: 199491 - DNA, 30 bp, Artificial Sequence
  Synthetic oligonucleotide
cataggcgtgcgctaattgggcgaaagcta

SEQ ID NO: 199492 - DNA, 30 bp, Artificial Sequence
  Synthetic oligonucleotide
attatccattaccagagaattagcaagcta

SEQ ID NO: 199493 - DNA, 30 bp, Artificial Sequence
  Synthetic oligonucleotide
gcgcatgggggcagaaaaatgcgcaagcta

SEQ ID NO: 199494 - DNA, 30 bp, Artificial Sequence
  Synthetic oligonucleotide
cggcaaaaagaaggggattggaagaagcta

SEQ ID NO: 199495 - DNA, 30 bp, Artificial Sequence
  Synthetic oligonucleotide
tgccggtaggttgcttctacatgtaagcta

SEQ ID NO: 199496 - DNA, 30 bp, Artificial Sequence
  Synthetic oligonucleotide
gttatcgtacacgcctcaaaaattaagcta

SEQ ID NO: 199497 - DNA, 30 bp, Artificial Sequence
  Synthetic oligonucleotide
tgtatagaagtgtcatataatcttaagcta

SEQ ID NO: 199498 - DNA, 30 bp, Artificial Sequence
  Synthetic oligonucleotide
tatcagagtagaagagatgtcgaggagcta

SEQ ID NO: 199499 - DNA, 30 bp, Artificial Sequence
  Synthetic oligonucleotide
gtgaccgaatgtatcccactaaatgagcta

SEQ ID NO: 199500 - DNA, 30 bp, Artificial Sequence
  Synthetic oligonucleotide
tgccgtgcggtctgccctgtccatgagcta

SEQ ID NO: 199501 - DNA, 30 bp, Artificial Sequence
  Synthetic oligonucleotide
cggtgatgggagattttaaaagtatagcta

SEQ ID NO: 199502 - DNA, 31 bp, Artificial Sequence
  Synthetic oligonucleotide
aggtggttccagacctatgataaattagcta

SEQ ID NO: 199503 - DNA, 30 bp, Artificial Sequence
  Synthetic oligonucleotide
gcaccttgatcaaagacacgcaaaacgcta

SEQ ID NO: 199504 - DNA, 30 bp, Artificial Sequence
  Synthetic oligonucleotide
aaatgaactggtcggtcgatcggcacgcta

SEQ ID NO: 199505 - DNA, 31 bp, Artificial Sequence
  Synthetic oligonucleotide
cgacggaggcgctgtcgttacgggcacgcta

SEQ ID NO: 199506 - DNA, 30 bp, Artificial Sequence
  Synthetic oligonucleotide
tggccacctggaacgcgataaagtacgcta

SEQ ID NO: 199507 - DNA, 30 bp, Artificial Sequence
  Synthetic oligonucleotide
cgcaatcaattacgacgcgtcagtacgcta

SEQ ID NO: 199508 - DNA, 30 bp, Artificial Sequence
  Synthetic oligonucleotide
caatgagccttcggttctccgcgtacgcta

SEQ ID NO: 199509 - DNA, 30 bp, Artificial Sequence
  Synthetic oligonucleotide
atacaagatgaataaacgaacgcaccgcta

SEQ ID NO: 199510 - DNA, 30 bp, Artificial Sequence
  Synthetic oligonucleotide
ggcatctgggtctttacacagtacccgcta

SEQ ID NO: 199511 - DNA, 30 bp, Artificial Sequence
  Synthetic oligonucleotide
gatgtttatatatcccggcatgccccgcta

SEQ ID NO: 199512 - DNA, 30 bp, Artificial Sequence
  Synthetic oligonucleotide
tacacaaacgtgctatgagtggtcccgcta

SEQ ID NO: 199513 - DNA, 30 bp, Artificial Sequence
  Synthetic oligonucleotide
ctcactgacagactgctggttgtcccgcta

SEQ ID NO: 199514 - DNA, 30 bp, Artificial Sequence
  Synthetic oligonucleotide
tagggcatcctaggtcactatgcgccgcta

SEQ ID NO: 199515 - DNA, 30 bp, Artificial Sequence
  Synthetic oligonucleotide
gcgttgaacggtcatacatcgaatgcgcta

SEQ ID NO: 199516 - DNA, 30 bp, Artificial Sequence
  Synthetic oligonucleotide
gtattgggttgtacgtttccgctatcgcta

SEQ ID NO: 199517 - DNA, 30 bp, Artificial Sequence
  Synthetic oligonucleotide
agcgcggactcgcggagaaaggtctcgcta

SEQ ID NO: 199518 - DNA, 30 bp, Artificial Sequence
  Synthetic oligonucleotide
aaagggtcgcggactgaaataggttcgcta

SEQ ID NO: 199519 - DNA, 30 bp, Artificial Sequence
  Synthetic oligonucleotide
gggtccgcacatatagcatatatttcgcta

SEQ ID NO: 199520 - DNA, 30 bp, Artificial Sequence
  Synthetic oligonucleotide
aatttaaaaagagacggggaatcaaggcta

SEQ ID NO: 199521 - DNA, 30 bp, Artificial Sequence
  Synthetic oligonucleotide
tggagacgtgccgtgagtgagcgaaggcta

SEQ ID NO: 199522 - DNA, 30 bp, Artificial Sequence
  Synthetic oligonucleotide
tccacggggttattcaaaagctacaggcta

SEQ ID NO: 199523 - DNA, 30 bp, Artificial Sequence
  Synthetic oligonucleotide
gctagggggtgtatcagacccgtcaggcta

SEQ ID NO: 199524 - DNA, 30 bp, Artificial Sequence
  Synthetic oligonucleotide
ggggcttatatagctaagggtaataggcta

SEQ ID NO: 199525 - DNA, 30 bp, Artificial Sequence
  Synthetic oligonucleotide
cagaagtagattacacgtgtaaatcggcta

SEQ ID NO: 199526 - DNA, 30 bp, Artificial Sequence
  Synthetic oligonucleotide
caacgaaacgtcagataatgttatcggcta

SEQ ID NO: 199527 - DNA, 30 bp, Artificial Sequence
  Synthetic oligonucleotide
taaattcacgtgcgctactggtccgggcta

SEQ ID NO: 199528 - DNA, 31 bp, Artificial Sequence
  Synthetic oligonucleotide
atcatggtggcgcctacgagctggcgggcta

SEQ ID NO: 199529 - DNA, 30 bp, Artificial Sequence
  Synthetic oligonucleotide
cttaacggcgattcaaggcgtcatgggcta

SEQ ID NO: 199530 - DNA, 30 bp, Artificial Sequence
  Synthetic oligonucleotide
gcctcgacgagggaacgcatcgatgggcta

SEQ ID NO: 199531 - DNA, 30 bp, Artificial Sequence
  Synthetic oligonucleotide
tgtataaggaaacgcataacatcatggcta

SEQ ID NO: 199532 - DNA, 30 bp, Artificial Sequence
  Synthetic oligonucleotide
gtcctggattgtaactcgaggcgatggcta

SEQ ID NO: 199533 - DNA, 30 bp, Artificial Sequence
  Synthetic oligonucleotide
gttacgattgagtaacacagaatatggcta

SEQ ID NO: 199534 - DNA, 30 bp, Artificial Sequence
  Synthetic oligonucleotide
ccgtgttatcgactcggttccccctggcta

SEQ ID NO: 199535 - DNA, 30 bp, Artificial Sequence
  Synthetic oligonucleotide
gcattagggcggtgcaactggatctggcta

SEQ ID NO: 199536 - DNA, 30 bp, Artificial Sequence
  Synthetic oligonucleotide
acgtacttcgttctgttcgaagcgtggcta

SEQ ID NO: 199537 - DNA, 30 bp, Artificial Sequence
  Synthetic oligonucleotide
ggccaggctcactaagaggaccattggcta

SEQ ID NO: 199538 - DNA, 30 bp, Artificial Sequence
  Synthetic oligonucleotide
agtgggattgatggtagtcccctaatgcta

SEQ ID NO: 199539 - DNA, 30 bp, Artificial Sequence
  Synthetic oligonucleotide
tagagctctaaagggacactaaagatgcta

SEQ ID NO: 199540 - DNA, 30 bp, Artificial Sequence
  Synthetic oligonucleotide
tcgccgacggagacgaagcaaaatatgcta

SEQ ID NO: 199541 - DNA, 30 bp, Artificial Sequence
  Synthetic oligonucleotide
acaggtagcggttctctctgtaatatgcta

SEQ ID NO: 199542 - DNA, 30 bp, Artificial Sequence
  Synthetic oligonucleotide
agtgacagcttcgcaggtaattgtatgcta

SEQ ID NO: 199543 - DNA, 30 bp, Artificial Sequence
  Synthetic oligonucleotide
atctgtcacggaaagcgaattcttctgcta

SEQ ID NO: 199544 - DNA, 29 bp, Artificial Sequence
  Synthetic oligonucleotide
agatcgggtccgcttacggtcaagtgcta

SEQ ID NO: 199545 - DNA, 30 bp, Artificial Sequence
  Synthetic oligonucleotide
gtgcaggttctccacattccggaagtgcta

SEQ ID NO: 199546 - DNA, 30 bp, Artificial Sequence
  Synthetic oligonucleotide
aaggccagcccttgggtgtaaaacgtgcta

SEQ ID NO: 199547 - DNA, 30 bp, Artificial Sequence
  Synthetic oligonucleotide
accgggaagctgatactgctttacgtgcta

SEQ ID NO: 199548 - DNA, 30 bp, Artificial Sequence
  Synthetic oligonucleotide
gcagggcagtgaggcgcgatccaggtgcta

SEQ ID NO: 199549 - DNA, 30 bp, Artificial Sequence
  Synthetic oligonucleotide
tccaccgaaaacacgcagttgtctgtgcta

SEQ ID NO: 199550 - DNA, 30 bp, Artificial Sequence
  Synthetic oligonucleotide
ctgagcaggctaaggcaaggcggtgtgcta

SEQ ID NO: 199551 - DNA, 30 bp, Artificial Sequence
  Synthetic oligonucleotide
tgagaagctggattagaaaaggcattgcta

SEQ ID NO: 199552 - DNA, 30 bp, Artificial Sequence
  Synthetic oligonucleotide
gatcaaccgcgaataaggggcttcttgcta

SEQ ID NO: 199553 - DNA, 30 bp, Artificial Sequence
  Synthetic oligonucleotide
tctgggatgagaaggcacaggaaaaatcta

SEQ ID NO: 199554 - DNA, 30 bp, Artificial Sequence
  Synthetic oligonucleotide
ttgtggtagacaaggtttgctccaaatcta

SEQ ID NO: 199555 - DNA, 30 bp, Artificial Sequence
  Synthetic oligonucleotide
ccttaacaagaacggtagcggcataatcta

SEQ ID NO: 199556 - DNA, 30 bp, Artificial Sequence
  Synthetic oligonucleotide
agtgttccccctacataataatgacatcta

SEQ ID NO: 199557 - DNA, 30 bp, Artificial Sequence
  Synthetic oligonucleotide
gtgctgatacaatgaaagtgagtacatcta

SEQ ID NO: 199558 - DNA, 30 bp, Artificial Sequence
  Synthetic oligonucleotide
cctcggtatatagtatcacataggcatcta

SEQ ID NO: 199559 - DNA, 30 bp, Artificial Sequence
  Synthetic oligonucleotide
cgtttatctagtgtgtgcgcgcgtcatcta

SEQ ID NO: 199560 - DNA, 30 bp, Artificial Sequence
  Synthetic oligonucleotide
agtgacattgcggggtatgttgcggatcta

SEQ ID NO: 199561 - DNA, 30 bp, Artificial Sequence
  Synthetic oligonucleotide
tcgggtttactttagatgtgtagggatcta

SEQ ID NO: 199562 - DNA, 30 bp, Artificial Sequence
  Synthetic oligonucleotide
gtggtcacttaagaatgaaagtgggatcta

SEQ ID NO: 199563 - DNA, 30 bp, Artificial Sequence
  Synthetic oligonucleotide
ttctaaccatacgaaaggactactgatcta

SEQ ID NO: 199564 - DNA, 30 bp, Artificial Sequence
  Synthetic oligonucleotide
cgttaacggtgtgcaaagttgaaatatcta

SEQ ID NO: 199565 - DNA, 30 bp, Artificial Sequence
  Synthetic oligonucleotide
gggacatcgagcaactactagccgtatcta

SEQ ID NO: 199566 - DNA, 31 bp, Artificial Sequence
  Synthetic oligonucleotide
acaccaacgggcattggcctgggaaactcta

SEQ ID NO: 199567 - DNA, 30 bp, Artificial Sequence
  Synthetic oligonucleotide
gcttcggattgcatgtggtctgctactcta

SEQ ID NO: 199568 - DNA, 30 bp, Artificial Sequence
  Synthetic oligonucleotide
cagggtatgcctgacggcaacacccctcta

SEQ ID NO: 199569 - DNA, 30 bp, Artificial Sequence
  Synthetic oligonucleotide
ccatatgtctctctaagccaaagagctcta

SEQ ID NO: 199570 - DNA, 30 bp, Artificial Sequence
  Synthetic oligonucleotide
ggtaggaggtgccctccggggtttgctcta

SEQ ID NO: 199571 - DNA, 30 bp, Artificial Sequence
  Synthetic oligonucleotide
aaggggaatgtaatttgtatgccatctcta

SEQ ID NO: 199572 - DNA, 30 bp, Artificial Sequence
  Synthetic oligonucleotide
ggtatgatgggttaaagagtaggaagtcta

SEQ ID NO: 199573 - DNA, 30 bp, Artificial Sequence
  Synthetic oligonucleotide
gaccaattggaatcaaatcagcgcagtcta

SEQ ID NO: 199574 - DNA, 30 bp, Artificial Sequence
  Synthetic oligonucleotide
cggttttccaaaaagagacaggcgagtcta

SEQ ID NO: 199575 - DNA, 30 bp, Artificial Sequence
  Synthetic oligonucleotide
cggtcaagcgcttctcggggcgaccgtcta

SEQ ID NO: 199576 - DNA, 30 bp, Artificial Sequence
  Synthetic oligonucleotide
ggtcactctgttgaatctaggccccgtcta

SEQ ID NO: 199577 - DNA, 30 bp, Artificial Sequence
  Synthetic oligonucleotide
tcatagctcaaggaggtctaacatcgtcta

SEQ ID NO: 199578 - DNA, 30 bp, Artificial Sequence
  Synthetic oligonucleotide
cctgccaatcagcagagtacggatcgtcta

SEQ ID NO: 199579 - DNA, 30 bp, Artificial Sequence
  Synthetic oligonucleotide
atcgacgtcagagtctattcgggtcgtcta

SEQ ID NO: 199580 - DNA, 30 bp, Artificial Sequence
  Synthetic oligonucleotide
tattggcggtgatggtcggaaataggtcta

SEQ ID NO: 199581 - DNA, 30 bp, Artificial Sequence
  Synthetic oligonucleotide
agaatataaccggtcggcaagcagggtcta

SEQ ID NO: 199582 - DNA, 30 bp, Artificial Sequence
  Synthetic oligonucleotide
cgctggaattcctgagcgcaagcgggtcta

SEQ ID NO: 199583 - DNA, 30 bp, Artificial Sequence
  Synthetic oligonucleotide
tcgagcaaattaacgactttacgtggtcta

SEQ ID NO: 199584 - DNA, 30 bp, Artificial Sequence
  Synthetic oligonucleotide
ccgatccgtcggcgacggcctgtatgtcta

SEQ ID NO: 199585 - DNA, 30 bp, Artificial Sequence
  Synthetic oligonucleotide
ggagattccaaagtgtgcgcgggctgtcta

SEQ ID NO: 199586 - DNA, 30 bp, Artificial Sequence
  Synthetic oligonucleotide
ggttaaaagtgtattctacataggattcta

SEQ ID NO: 199587 - DNA, 30 bp, Artificial Sequence
  Synthetic oligonucleotide
tgtccgacgaactgaaacaccctgattcta

SEQ ID NO: 199588 - DNA, 31 bp, Artificial Sequence
  Synthetic oligonucleotide
gaaggaacaactatggcttgtagatattcta

SEQ ID NO: 199589 - DNA, 30 bp, Artificial Sequence
  Synthetic oligonucleotide
aagaactcatgtcaaaagcagcctattcta

SEQ ID NO: 199590 - DNA, 30 bp, Artificial Sequence
  Synthetic oligonucleotide
agagagcaaagaaagtgggaagcacttcta

SEQ ID NO: 199591 - DNA, 30 bp, Artificial Sequence
  Synthetic oligonucleotide
ctcagaagcgcgcggagtacctttcttcta

SEQ ID NO: 199592 - DNA, 30 bp, Artificial Sequence
  Synthetic oligonucleotide
gctgtacgaatcatctggcccttagttcta

SEQ ID NO: 199593 - DNA, 30 bp, Artificial Sequence
  Synthetic oligonucleotide
acggagggataatggctagcccgggttcta

SEQ ID NO: 199594 - DNA, 30 bp, Artificial Sequence
  Synthetic oligonucleotide
taccataaacggatttacaccatggttcta

SEQ ID NO: 199595 - DNA, 30 bp, Artificial Sequence
  Synthetic oligonucleotide
ggagaataatagggattaatgtttgttcta

SEQ ID NO: 199596 - DNA, 30 bp, Artificial Sequence
  Synthetic oligonucleotide
gcagcatcggataaattcacccgaaaagta

SEQ ID NO: 199597 - DNA, 30 bp, Artificial Sequence
  Synthetic oligonucleotide
tgtagacattgtggccctggactgaaagta

SEQ ID NO: 199598 - DNA, 30 bp, Artificial Sequence
  Synthetic oligonucleotide
ttgaacaattttaggtcgaactgacaagta

SEQ ID NO: 199599 - DNA, 30 bp, Artificial Sequence
  Synthetic oligonucleotide
agtgtatttacaagagtcgcgcaagaagta

SEQ ID NO: 199600 - DNA, 30 bp, Artificial Sequence
  Synthetic oligonucleotide
gacctacccgctggggcaccatcagaagta

SEQ ID NO: 199601 - DNA, 30 bp, Artificial Sequence
  Synthetic oligonucleotide
ggcatacattgacacgattcgtgagaagta

SEQ ID NO: 199602 - DNA, 30 bp, Artificial Sequence
  Synthetic oligonucleotide
cgacttgtaaaacgttcaacgagcgaagta

SEQ ID NO: 199603 - DNA, 30 bp, Artificial Sequence
  Synthetic oligonucleotide
tggctgatcagcgggtttggttgtgaagta

SEQ ID NO: 199604 - DNA, 30 bp, Artificial Sequence
  Synthetic oligonucleotide
cactccctcatttgagggcgacttgaagta

SEQ ID NO: 199605 - DNA, 30 bp, Artificial Sequence
  Synthetic oligonucleotide
tactccctccgctcggggtcaggataagta

SEQ ID NO: 199606 - DNA, 30 bp, Artificial Sequence
  Synthetic oligonucleotide
gtgtggttatgctatacgggcaggtaagta

SEQ ID NO: 199607 - DNA, 30 bp, Artificial Sequence
  Synthetic oligonucleotide
gctatgttaacactctgtgtggtgtaagta

SEQ ID NO: 199608 - DNA, 30 bp, Artificial Sequence
  Synthetic oligonucleotide
cctgtggtgagcctgcgtggattttaagta

SEQ ID NO: 199609 - DNA, 30 bp, Artificial Sequence
  Synthetic oligonucleotide
gtgacgtcctacgcatgatcattgacagta

SEQ ID NO: 199610 - DNA, 30 bp, Artificial Sequence
  Synthetic oligonucleotide
catcggacaattacattcgaatgaccagta

SEQ ID NO: 199611 - DNA, 30 bp, Artificial Sequence
  Synthetic oligonucleotide
ccgagacttcagggaacacttcgcccagta

SEQ ID NO: 199612 - DNA, 30 bp, Artificial Sequence
  Synthetic oligonucleotide
agactctcggccgatgaatcagggccagta

SEQ ID NO: 199613 - DNA, 30 bp, Artificial Sequence
  Synthetic oligonucleotide
cgtatacacgtgaacgggggagctccagta

SEQ ID NO: 199614 - DNA, 30 bp, Artificial Sequence
  Synthetic oligonucleotide
aacgtagttgtggtgaaggtggctccagta

SEQ ID NO: 199615 - DNA, 30 bp, Artificial Sequence
  Synthetic oligonucleotide
gcatggaactagaatctgcgtcgtccagta

SEQ ID NO: 199616 - DNA, 30 bp, Artificial Sequence
  Synthetic oligonucleotide
cgaggtatggacgggaagttaggcgcagta

SEQ ID NO: 199617 - DNA, 30 bp, Artificial Sequence
  Synthetic oligonucleotide
tgtattgaagactagtcgtactgcgcagta

SEQ ID NO: 199618 - DNA, 30 bp, Artificial Sequence
  Synthetic oligonucleotide
attgggtttggaatttggacttcggcagta

SEQ ID NO: 199619 - DNA, 30 bp, Artificial Sequence
  Synthetic oligonucleotide
tgcgctataacaagtgtgaaaggtgcagta

SEQ ID NO: 199620 - DNA, 30 bp, Artificial Sequence
  Synthetic oligonucleotide
cctgcgggcataactcaaaacgcatcagta

SEQ ID NO: 199621 - DNA, 30 bp, Artificial Sequence
  Synthetic oligonucleotide
gtagcttagaaccgctgagcgtcatcagta

SEQ ID NO: 199622 - DNA, 30 bp, Artificial Sequence
  Synthetic oligonucleotide
gatccgctttgaaggcgagaaagatcagta

SEQ ID NO: 199623 - DNA, 30 bp, Artificial Sequence
  Synthetic oligonucleotide
gcgctggagatgcaaattattcactcagta

SEQ ID NO: 199624 - DNA, 30 bp, Artificial Sequence
  Synthetic oligonucleotide
tacaccctgacagaggggaggggctcagta

SEQ ID NO: 199625 - DNA, 30 bp, Artificial Sequence
  Synthetic oligonucleotide
gcgcactgtttcagagaaatggtttcagta

SEQ ID NO: 199626 - DNA, 30 bp, Artificial Sequence
  Synthetic oligonucleotide
aatggcggacttgctccacttcgaagagta

SEQ ID NO: 199627 - DNA, 30 bp, Artificial Sequence
  Synthetic oligonucleotide
gcgcctgggaggatgagctttagtagagta

SEQ ID NO: 199628 - DNA, 31 bp, Artificial Sequence
  Synthetic oligonucleotide
gattaccagagaatccaagccgtttagagta

SEQ ID NO: 199629 - DNA, 30 bp, Artificial Sequence
  Synthetic oligonucleotide
tgcatcgggattggtgttgtgagacgagta

SEQ ID NO: 199630 - DNA, 30 bp, Artificial Sequence
  Synthetic oligonucleotide
cattacctatcgtaagtcggagagcgagta

SEQ ID NO: 199631 - DNA, 30 bp, Artificial Sequence
  Synthetic oligonucleotide
cttataacgatcagaactaaatagcgagta

SEQ ID NO: 199632 - DNA, 30 bp, Artificial Sequence
  Synthetic oligonucleotide
gctaatcggtggtttactgacccgcgagta

SEQ ID NO: 199633 - DNA, 30 bp, Artificial Sequence
  Synthetic oligonucleotide
atcaatgtccagcgcgattcggcgcgagta

SEQ ID NO: 199634 - DNA, 31 bp, Artificial Sequence
  Synthetic oligonucleotide
tgacgggcaagtatttcgatcttggcgagta

SEQ ID NO: 199635 - DNA, 30 bp, Artificial Sequence
  Synthetic oligonucleotide
acgtcggaccatgtgggttgcattcgagta

SEQ ID NO: 199636 - DNA, 30 bp, Artificial Sequence
  Synthetic oligonucleotide
ataatcgaggaggggcaaaaccgaggagta

SEQ ID NO: 199637 - DNA, 30 bp, Artificial Sequence
  Synthetic oligonucleotide
gcttcatgaccattagtgcacaacggagta

SEQ ID NO: 199638 - DNA, 30 bp, Artificial Sequence
  Synthetic oligonucleotide
gggcgttggaccgcacggaatcacggagta

SEQ ID NO: 199639 - DNA, 30 bp, Artificial Sequence
  Synthetic oligonucleotide
tctggacctcgtcgggatcaaagcggagta

SEQ ID NO: 199640 - DNA, 30 bp, Artificial Sequence
  Synthetic oligonucleotide
agatctgcttgggataggcgtagcggagta

SEQ ID NO: 199641 - DNA, 30 bp, Artificial Sequence
  Synthetic oligonucleotide
cggcggaatccggctcggtactagggagta

SEQ ID NO: 199642 - DNA, 30 bp, Artificial Sequence
  Synthetic oligonucleotide
ctgccgggtgtgcggagtaaggggggagta

SEQ ID NO: 199643 - DNA, 30 bp, Artificial Sequence
  Synthetic oligonucleotide
aatgtctaactggaaccgacccttggagta

SEQ ID NO: 199644 - DNA, 30 bp, Artificial Sequence
  Synthetic oligonucleotide
tggagtaggcgttggcctccggtatgagta

SEQ ID NO: 199645 - DNA, 30 bp, Artificial Sequence
  Synthetic oligonucleotide
gtgtaaaaacgaggctcaagtgtctgagta

SEQ ID NO: 199646 - DNA, 30 bp, Artificial Sequence
  Synthetic oligonucleotide
gcacacgctagtaacggttagttctgagta

SEQ ID NO: 199647 - DNA, 30 bp, Artificial Sequence
  Synthetic oligonucleotide
gagacatctgcgtatcaacctagttgagta

SEQ ID NO: 199648 - DNA, 30 bp, Artificial Sequence
  Synthetic oligonucleotide
ttgcaatccggctaatagcgttgttgagta

SEQ ID NO: 199649 - DNA, 30 bp, Artificial Sequence
  Synthetic oligonucleotide
ctaggcttagtatgacttaaggaaatagta

SEQ ID NO: 199650 - DNA, 30 bp, Artificial Sequence
  Synthetic oligonucleotide
ctagctatagggctttgtcaatcaatagta

SEQ ID NO: 199651 - DNA, 30 bp, Artificial Sequence
  Synthetic oligonucleotide
gcggtccttccggatttaagtagaatagta

SEQ ID NO: 199652 - DNA, 30 bp, Artificial Sequence
  Synthetic oligonucleotide
gtgtagaggtgataggtattccgaatagta

SEQ ID NO: 199653 - DNA, 30 bp, Artificial Sequence
  Synthetic oligonucleotide
aggtcgccaatatagagctgtgccatagta

SEQ ID NO: 199654 - DNA, 30 bp, Artificial Sequence
  Synthetic oligonucleotide
tcattacggcgccagcgtaggacgatagta

SEQ ID NO: 199655 - DNA, 30 bp, Artificial Sequence
  Synthetic oligonucleotide
ttacgggctatgacaataaaagggatagta

SEQ ID NO: 199656 - DNA, 30 bp, Artificial Sequence
  Synthetic oligonucleotide
tcgtctaaagatacgagtgacgggatagta

SEQ ID NO: 199657 - DNA, 30 bp, Artificial Sequence
  Synthetic oligonucleotide
agtccagatctaggtataaagtggatagta

SEQ ID NO: 199658 - DNA, 30 bp, Artificial Sequence
  Synthetic oligonucleotide
ggtactcagtggcccgggtagttgatagta

SEQ ID NO: 199659 - DNA, 30 bp, Artificial Sequence
  Synthetic oligonucleotide
gggacctcctaaggatagggaagcctagta

SEQ ID NO: 199660 - DNA, 30 bp, Artificial Sequence
  Synthetic oligonucleotide
gcctccgagggcatctctcgttgcctagta

SEQ ID NO: 199661 - DNA, 30 bp, Artificial Sequence
  Synthetic oligonucleotide
ctgatagtatgtttccaatgaaagctagta

SEQ ID NO: 199662 - DNA, 30 bp, Artificial Sequence
  Synthetic oligonucleotide
gggactaatacctaattgaatgggctagta

SEQ ID NO: 199663 - DNA, 30 bp, Artificial Sequence
  Synthetic oligonucleotide
ttgtcggcaaagcacaaagatatgctagta

SEQ ID NO: 199664 - DNA, 30 bp, Artificial Sequence
  Synthetic oligonucleotide
gatggaaccttttagtgctcatgagtagta

SEQ ID NO: 199665 - DNA, 30 bp, Artificial Sequence
  Synthetic oligonucleotide
gcatccacgatgtctgttagggacgtagta

SEQ ID NO: 199666 - DNA, 30 bp, Artificial Sequence
  Synthetic oligonucleotide
tggtcatgaatcaggcacacgcaattagta

SEQ ID NO: 199667 - DNA, 30 bp, Artificial Sequence
  Synthetic oligonucleotide
tcaattgagaaggtgacagggcgattagta

SEQ ID NO: 199668 - DNA, 30 bp, Artificial Sequence
  Synthetic oligonucleotide
aaacaaacgccgttaacatagctattagta

SEQ ID NO: 199669 - DNA, 30 bp, Artificial Sequence
  Synthetic oligonucleotide
agtgagaacgtggggcgtgatcagttagta

SEQ ID NO: 199670 - DNA, 30 bp, Artificial Sequence
  Synthetic oligonucleotide
atctgcgactatgagtgttaagagttagta

SEQ ID NO: 199671 - DNA, 30 bp, Artificial Sequence
  Synthetic oligonucleotide
ctgtgcactcggctagtgaggacgttagta

SEQ ID NO: 199672 - DNA, 30 bp, Artificial Sequence
  Synthetic oligonucleotide
tgcaaaaccgagttgctcttaagtttagta

SEQ ID NO: 199673 - DNA, 30 bp, Artificial Sequence
  Synthetic oligonucleotide
atgacccataagagtattgaaattttagta

SEQ ID NO: 199674 - DNA, 30 bp, Artificial Sequence
  Synthetic oligonucleotide
ggtatgggggctcaaagccaggaaaacgta

SEQ ID NO: 199675 - DNA, 30 bp, Artificial Sequence
  Synthetic oligonucleotide
aaggagggtgtcggagtaactccaaacgta

SEQ ID NO: 199676 - DNA, 30 bp, Artificial Sequence
  Synthetic oligonucleotide
agacgggtagttgacggtgtaggaaacgta

SEQ ID NO: 199677 - DNA, 30 bp, Artificial Sequence
  Synthetic oligonucleotide
ttatgatggagcacgaaaaagcgtaacgta

SEQ ID NO: 199678 - DNA, 30 bp, Artificial Sequence
  Synthetic oligonucleotide
acaattcagcagtccatcggtaaccacgta

SEQ ID NO: 199679 - DNA, 30 bp, Artificial Sequence
  Synthetic oligonucleotide
agtggcaaatagtgttattggcaccacgta

SEQ ID NO: 199680 - DNA, 29 bp, Artificial Sequence
  Synthetic oligonucleotide
ggctaagcctggaatgggtgatgcacgta

SEQ ID NO: 199681 - DNA, 30 bp, Artificial Sequence
  Synthetic oligonucleotide
ttagacttgggtatctggcaggatcacgta

SEQ ID NO: 199682 - DNA, 30 bp, Artificial Sequence
  Synthetic oligonucleotide
agtcctctgcacttcataaattttcacgta

SEQ ID NO: 199683 - DNA, 30 bp, Artificial Sequence
  Synthetic oligonucleotide
atagcaaatacctcaggtcaataagacgta

SEQ ID NO: 199684 - DNA, 30 bp, Artificial Sequence
  Synthetic oligonucleotide
tcctaatccgccaatgaattaggagacgta

SEQ ID NO: 199685 - DNA, 30 bp, Artificial Sequence
  Synthetic oligonucleotide
aatggtgcgcaaacccagcaaccttacgta

SEQ ID NO: 199686 - DNA, 30 bp, Artificial Sequence
  Synthetic oligonucleotide
gatgcgtttagataaagaacgttaaccgta

SEQ ID NO: 199687 - DNA, 30 bp, Artificial Sequence
  Synthetic oligonucleotide
cgtgatgtattttgccgcgcttccaccgta

SEQ ID NO: 199688 - DNA, 30 bp, Artificial Sequence
  Synthetic oligonucleotide
gcaccgaagtgcatgtatcccggcaccgta

SEQ ID NO: 199689 - DNA, 30 bp, Artificial Sequence
  Synthetic oligonucleotide
ctaatctccaacacctccgcagagaccgta

SEQ ID NO: 199690 - DNA, 30 bp, Artificial Sequence
  Synthetic oligonucleotide
tgtcgttctgatgtctgtgaattgaccgta

SEQ ID NO: 199691 - DNA, 30 bp, Artificial Sequence
  Synthetic oligonucleotide
tacgcagtggacaagaatcaaagtaccgta

SEQ ID NO: 199692 - DNA, 30 bp, Artificial Sequence
  Synthetic oligonucleotide
tgtccttgtatcatatttcggcatcccgta

SEQ ID NO: 199693 - DNA, 30 bp, Artificial Sequence
  Synthetic oligonucleotide
gaggtaacctaattagattatagtcccgta

SEQ ID NO: 199694 - DNA, 30 bp, Artificial Sequence
  Synthetic oligonucleotide
tgaggccggctagtttgcactaccgccgta

SEQ ID NO: 199695 - DNA, 30 bp, Artificial Sequence
  Synthetic oligonucleotide
ttcgattattaagaggggtcgtcggccgta

SEQ ID NO: 199696 - DNA, 30 bp, Artificial Sequence
  Synthetic oligonucleotide
tctgattatgatgatcgttttgatgccgta

SEQ ID NO: 199697 - DNA, 30 bp, Artificial Sequence
  Synthetic oligonucleotide
tcaaggggtcaagccaatgcactctccgta

SEQ ID NO: 199698 - DNA, 30 bp, Artificial Sequence
  Synthetic oligonucleotide
cactcaacagcacggatgtaccagtccgta

SEQ ID NO: 199699 - DNA, 30 bp, Artificial Sequence
  Synthetic oligonucleotide
gaatgatttgcaaccacgacgtcgtccgta

SEQ ID NO: 199700 - DNA, 30 bp, Artificial Sequence
  Synthetic oligonucleotide
cgtaccagttttgatatatctgtcagcgta

SEQ ID NO: 199701 - DNA, 30 bp, Artificial Sequence
  Synthetic oligonucleotide
aggttaaaggtgaatagcttcgggagcgta

SEQ ID NO: 199702 - DNA, 30 bp, Artificial Sequence
  Synthetic oligonucleotide
tttagaaaactattcaattagtctagcgta

SEQ ID NO: 199703 - DNA, 30 bp, Artificial Sequence
  Synthetic oligonucleotide
tagttgaggatgcgatcaaggcgacgcgta

SEQ ID NO: 199704 - DNA, 30 bp, Artificial Sequence
  Synthetic oligonucleotide
atctacgcaggtggttcgttagcccgcgta

SEQ ID NO: 199705 - DNA, 30 bp, Artificial Sequence
  Synthetic oligonucleotide
gacgatacccaccttaactaactccgcgta

SEQ ID NO: 199706 - DNA, 30 bp, Artificial Sequence
  Synthetic oligonucleotide
ccaaggatgcatttgtgagattatcgcgta

SEQ ID NO: 199707 - DNA, 30 bp, Artificial Sequence
  Synthetic oligonucleotide
tgatcgcttagggtagtttgatttcgcgta

SEQ ID NO: 199708 - DNA, 30 bp, Artificial Sequence
  Synthetic oligonucleotide
acttactcttaattcgttcaatccggcgta

SEQ ID NO: 199709 - DNA, 30 bp, Artificial Sequence
  Synthetic oligonucleotide
tattcctgggggaggatggtgaagggcgta

SEQ ID NO: 199710 - DNA, 30 bp, Artificial Sequence
  Synthetic oligonucleotide
tttgagacagcaaataggcgctatggcgta

SEQ ID NO: 199711 - DNA, 30 bp, Artificial Sequence
  Synthetic oligonucleotide
ggtgccttcgggcgagaacggaactgcgta

SEQ ID NO: 199712 - DNA, 31 bp, Artificial Sequence
  Synthetic oligonucleotide
aagtaagagagtgtgaccttccaagtgcgta

SEQ ID NO: 199713 - DNA, 30 bp, Artificial Sequence
  Synthetic oligonucleotide
aaaattggcgctacagtctcagcgtgcgta

SEQ ID NO: 199714 - DNA, 30 bp, Artificial Sequence
  Synthetic oligonucleotide
gtacctgataacttcccgcgcagttgcgta

SEQ ID NO: 199715 - DNA, 30 bp, Artificial Sequence
  Synthetic oligonucleotide
atgatttgtcctcgatatactacaatcgta

SEQ ID NO: 199716 - DNA, 30 bp, Artificial Sequence
  Synthetic oligonucleotide
atctgggtgtggttcaggtaaccaatcgta

SEQ ID NO: 199717 - DNA, 30 bp, Artificial Sequence
  Synthetic oligonucleotide
ccttcgatagtaaacgcgaaagtaatcgta

SEQ ID NO: 199718 - DNA, 30 bp, Artificial Sequence
  Synthetic oligonucleotide
cctgcagacaatgtcggttcgcacatcgta

SEQ ID NO: 199719 - DNA, 30 bp, Artificial Sequence
  Synthetic oligonucleotide
gctgagaattggatttaatctgggatcgta

SEQ ID NO: 199720 - DNA, 30 bp, Artificial Sequence
  Synthetic oligonucleotide
gcccttccgttgtagggggggatgatcgta

SEQ ID NO: 199721 - DNA, 30 bp, Artificial Sequence
  Synthetic oligonucleotide
tcgtggccggttccgagctgtgttatcgta

SEQ ID NO: 199722 - DNA, 30 bp, Artificial Sequence
  Synthetic oligonucleotide
ccatcgattagcaagtgatacaaactcgta

SEQ ID NO: 199723 - DNA, 30 bp, Artificial Sequence
  Synthetic oligonucleotide
gggagagatctcggtgggctagtcctcgta

SEQ ID NO: 199724 - DNA, 30 bp, Artificial Sequence
  Synthetic oligonucleotide
tacatcaagagttattttgggcagctcgta

SEQ ID NO: 199725 - DNA, 30 bp, Artificial Sequence
  Synthetic oligonucleotide
gtaacgagaattacccgcatgtccgtcgta

SEQ ID NO: 199726 - DNA, 30 bp, Artificial Sequence
  Synthetic oligonucleotide
gtaccaacttagggctaccaaagcgtcgta

SEQ ID NO: 199727 - DNA, 30 bp, Artificial Sequence
  Synthetic oligonucleotide
ccggtgtggctgactgctgtcgaggtcgta

SEQ ID NO: 199728 - DNA, 30 bp, Artificial Sequence
  Synthetic oligonucleotide
gaagaaaaaccgaatttgaaatgtttcgta

SEQ ID NO: 199729 - DNA, 30 bp, Artificial Sequence
  Synthetic oligonucleotide
ggggtgtgaaccacgcgtcaaccaaaggta

SEQ ID NO: 199730 - DNA, 31 bp, Artificial Sequence
  Synthetic oligonucleotide
aaaatttgatcgtagaaggcacgccaaggta

SEQ ID NO: 199731 - DNA, 30 bp, Artificial Sequence
  Synthetic oligonucleotide
tgtaatttaccatcaagttaaaagaaggta

SEQ ID NO: 199732 - DNA, 30 bp, Artificial Sequence
  Synthetic oligonucleotide
gtattgaggggtcgttcgagctggaaggta

SEQ ID NO: 199733 - DNA, 30 bp, Artificial Sequence
  Synthetic oligonucleotide
actatggttcgaaacgagcgacgtaaggta

SEQ ID NO: 199734 - DNA, 30 bp, Artificial Sequence
  Synthetic oligonucleotide
gggctcgatgaagttggcttcttccaggta

SEQ ID NO: 199735 - DNA, 30 bp, Artificial Sequence
  Synthetic oligonucleotide
agtcacgtcggcggaggaggtcagcaggta

SEQ ID NO: 199736 - DNA, 30 bp, Artificial Sequence
  Synthetic oligonucleotide
tgtgagttacactactcatcctggcaggta

SEQ ID NO: 199737 - DNA, 30 bp, Artificial Sequence
  Synthetic oligonucleotide
atgatgtcgtgccacctatataaagaggta

SEQ ID NO: 199738 - DNA, 30 bp, Artificial Sequence
  Synthetic oligonucleotide
ttgatcctaatgcacttattctcagaggta

SEQ ID NO: 199739 - DNA, 30 bp, Artificial Sequence
  Synthetic oligonucleotide
acgtctcaactgtagtggggacgcgaggta

SEQ ID NO: 199740 - DNA, 30 bp, Artificial Sequence
  Synthetic oligonucleotide
atctatattactggagataaatcggaggta

SEQ ID NO: 199741 - DNA, 30 bp, Artificial Sequence
  Synthetic oligonucleotide
cttaagggcaaaaaaggcaggctggaggta

SEQ ID NO: 199742 - DNA, 30 bp, Artificial Sequence
  Synthetic oligonucleotide
gggccgcggctgacaaagtggaatgaggta

SEQ ID NO: 199743 - DNA, 30 bp, Artificial Sequence
  Synthetic oligonucleotide
cttcggacaacagtcgcgcgaactgaggta

SEQ ID NO: 199744 - DNA, 30 bp, Artificial Sequence
  Synthetic oligonucleotide
taaccttcggcatagccaccgtgataggta

SEQ ID NO: 199745 - DNA, 30 bp, Artificial Sequence
  Synthetic oligonucleotide
caccagctcctgaaatcaccagagtaggta

SEQ ID NO: 199746 - DNA, 30 bp, Artificial Sequence
  Synthetic oligonucleotide
ggcaacaagggcggccggagggagtaggta

SEQ ID NO: 199747 - DNA, 30 bp, Artificial Sequence
  Synthetic oligonucleotide
gagactagtaccccagcacagtagtaggta

SEQ ID NO: 199748 - DNA, 30 bp, Artificial Sequence
  Synthetic oligonucleotide
gcgcgatctctgctatgtactctttaggta

SEQ ID NO: 199749 - DNA, 30 bp, Artificial Sequence
  Synthetic oligonucleotide
cggcgccgtacgtaatacttcaaaacggta

SEQ ID NO: 199750 - DNA, 30 bp, Artificial Sequence
  Synthetic oligonucleotide
cagatccatagggataaccacgtaacggta

SEQ ID NO: 199751 - DNA, 30 bp, Artificial Sequence
  Synthetic oligonucleotide
agagacgggtcacggaatgagcacacggta

SEQ ID NO: 199752 - DNA, 30 bp, Artificial Sequence
  Synthetic oligonucleotide
tagcagcgaatataatgaaccgacacggta

SEQ ID NO: 199753 - DNA, 30 bp, Artificial Sequence
  Synthetic oligonucleotide
agcttcctgacgaattatatgcgcacggta

SEQ ID NO: 199754 - DNA, 30 bp, Artificial Sequence
  Synthetic oligonucleotide
cgtcgctagaatcgaagacaatgcacggta

SEQ ID NO: 199755 - DNA, 30 bp, Artificial Sequence
  Synthetic oligonucleotide
tccgagagccctattccggaggagacggta

SEQ ID NO: 199756 - DNA, 30 bp, Artificial Sequence
  Synthetic oligonucleotide
cacggcatgcttgaacaagggttgacggta

SEQ ID NO: 199757 - DNA, 30 bp, Artificial Sequence
  Synthetic oligonucleotide
gaatacggaggaagatgagtgttgacggta

SEQ ID NO: 199758 - DNA, 30 bp, Artificial Sequence
  Synthetic oligonucleotide
acataggccgcacagcgccacctaccggta

SEQ ID NO: 199759 - DNA, 30 bp, Artificial Sequence
  Synthetic oligonucleotide
aggattggaatccgcagaatctccccggta

SEQ ID NO: 199760 - DNA, 30 bp, Artificial Sequence
  Synthetic oligonucleotide
gacggttatgattatagtgaaggcccggta

SEQ ID NO: 199761 - DNA, 30 bp, Artificial Sequence
  Synthetic oligonucleotide
ccaaagggacataattaacgcactccggta

SEQ ID NO: 199762 - DNA, 30 bp, Artificial Sequence
  Synthetic oligonucleotide
cgtctagagggggagaaggcatctccggta

SEQ ID NO: 199763 - DNA, 29 bp, Artificial Sequence
  Synthetic oligonucleotide
catacgctatggttccgtcaggagcggta

SEQ ID NO: 199764 - DNA, 30 bp, Artificial Sequence
  Synthetic oligonucleotide
tagaggtgactcggataaggggtagcggta

SEQ ID NO: 199765 - DNA, 30 bp, Artificial Sequence
  Synthetic oligonucleotide
aacctctgagaaaagctacaaaacgcggta

SEQ ID NO: 199766 - DNA, 30 bp, Artificial Sequence
  Synthetic oligonucleotide
aagaatctggctcggcttacttaggcggta

SEQ ID NO: 199767 - DNA, 30 bp, Artificial Sequence
  Synthetic oligonucleotide
acgaagttttaaatgaatgcgtcggcggta

SEQ ID NO: 199768 - DNA, 30 bp, Artificial Sequence
  Synthetic oligonucleotide
gttggacatgatgctctcagtaatgcggta

SEQ ID NO: 199769 - DNA, 30 bp, Artificial Sequence
  Synthetic oligonucleotide
gtttgggtatatatcgcgtgccatgcggta

SEQ ID NO: 199770 - DNA, 30 bp, Artificial Sequence
  Synthetic oligonucleotide
aatagcagtcctcgagatgcgttatcggta

SEQ ID NO: 199771 - DNA, 30 bp, Artificial Sequence
  Synthetic oligonucleotide
ggagtacgttggtaatgtgcaaactcggta

SEQ ID NO: 199772 - DNA, 30 bp, Artificial Sequence
  Synthetic oligonucleotide
accgaagatatcaatgcgaggaagtcggta

SEQ ID NO: 199773 - DNA, 30 bp, Artificial Sequence
  Synthetic oligonucleotide
cgcatatttgagtgacttcggttttcggta

SEQ ID NO: 199774 - DNA, 30 bp, Artificial Sequence
  Synthetic oligonucleotide
catgtcttgctgaaacaccccgacagggta

SEQ ID NO: 199775 - DNA, 30 bp, Artificial Sequence
  Synthetic oligonucleotide
actatctgcagcacagtaagacccagggta

SEQ ID NO: 199776 - DNA, 30 bp, Artificial Sequence
  Synthetic oligonucleotide
cattaagtcaggatagtcaatcctagggta

SEQ ID NO: 199777 - DNA, 30 bp, Artificial Sequence
  Synthetic oligonucleotide
cggtatctccctctgcaccgccgtagggta

SEQ ID NO: 199778 - DNA, 30 bp, Artificial Sequence
  Synthetic oligonucleotide
taaaaatggcagtgcagggagcgccgggta

SEQ ID NO: 199779 - DNA, 30 bp, Artificial Sequence
  Synthetic oligonucleotide
ggtataaggtccgccagcgatctgcgggta

SEQ ID NO: 199780 - DNA, 30 bp, Artificial Sequence
  Synthetic oligonucleotide
cctaagcaaggggaaggtttttatcgggta

SEQ ID NO: 199781 - DNA, 30 bp, Artificial Sequence
  Synthetic oligonucleotide
cgaccactcaagataaagtaccctcgggta

SEQ ID NO: 199782 - DNA, 30 bp, Artificial Sequence
  Synthetic oligonucleotide
attcggaagctgtgcaggacctttcgggta

SEQ ID NO: 199783 - DNA, 30 bp, Artificial Sequence
  Synthetic oligonucleotide
caacgtagcgttttgggataccgaggggta

SEQ ID NO: 199784 - DNA, 31 bp, Artificial Sequence
  Synthetic oligonucleotide
ctgtcatcctagagatgcgtttcggggggta

SEQ ID NO: 199785 - DNA, 30 bp, Artificial Sequence
  Synthetic oligonucleotide
cttggcctgtattgcgaacatcatggggta

SEQ ID NO: 199786 - DNA, 30 bp, Artificial Sequence
  Synthetic oligonucleotide
atattagaggaatagtaaacaggtggggta

SEQ ID NO: 199787 - DNA, 30 bp, Artificial Sequence
  Synthetic oligonucleotide
cagatgaggtggatcacaactgcctgggta

SEQ ID NO: 199788 - DNA, 29 bp, Artificial Sequence
  Synthetic oligonucleotide
aggtaaactgcactgtatgaagctgggta

SEQ ID NO: 199789 - DNA, 30 bp, Artificial Sequence
  Synthetic oligonucleotide
actcatatgtatgcacgtccgggctgggta

SEQ ID NO: 199790 - DNA, 30 bp, Artificial Sequence
  Synthetic oligonucleotide
tcaagaggcgcatgttggcatggctgggta

SEQ ID NO: 199791 - DNA, 30 bp, Artificial Sequence
  Synthetic oligonucleotide
ctaacagcaaaacgtagcactaggtgggta

SEQ ID NO: 199792 - DNA, 30 bp, Artificial Sequence
  Synthetic oligonucleotide
attcggtgtgggggatcactgtgttgggta

SEQ ID NO: 199793 - DNA, 30 bp, Artificial Sequence
  Synthetic oligonucleotide
gtaaaatcgcatcctacaaggaatatggta

SEQ ID NO: 199794 - DNA, 30 bp, Artificial Sequence
  Synthetic oligonucleotide
cccgtacgagtagcaccaagaatactggta

SEQ ID NO: 199795 - DNA, 30 bp, Artificial Sequence
  Synthetic oligonucleotide
cttaaacggacctattgggaatccctggta

SEQ ID NO: 199796 - DNA, 30 bp, Artificial Sequence
  Synthetic oligonucleotide
gtttaagacgctgtcaatgtggagctggta

SEQ ID NO: 199797 - DNA, 30 bp, Artificial Sequence
  Synthetic oligonucleotide
aaatcaaggtcttgaacggtctaagtggta

SEQ ID NO: 199798 - DNA, 30 bp, Artificial Sequence
  Synthetic oligonucleotide
tatagaaggtacaaatgtcataacgtggta

SEQ ID NO: 199799 - DNA, 30 bp, Artificial Sequence
  Synthetic oligonucleotide
acccaccgacatatcgtctgacgcgtggta

SEQ ID NO: 199800 - DNA, 30 bp, Artificial Sequence
  Synthetic oligonucleotide
caatactcgggtcaatcgctaggtgtggta

SEQ ID NO: 199801 - DNA, 30 bp, Artificial Sequence
  Synthetic oligonucleotide
cggcaaccgtctccacgaacgcgattggta

SEQ ID NO: 199802 - DNA, 30 bp, Artificial Sequence
  Synthetic oligonucleotide
cggacacattacacagtgccgaagttggta

SEQ ID NO: 199803 - DNA, 30 bp, Artificial Sequence
  Synthetic oligonucleotide
gtgtattgctggaagatccctaagttggta

SEQ ID NO: 199804 - DNA, 30 bp, Artificial Sequence
  Synthetic oligonucleotide
cacgcagaagggcagggttaatagttggta

SEQ ID NO: 199805 - DNA, 30 bp, Artificial Sequence
  Synthetic oligonucleotide
tcaccatgatcatctcaagggactttggta

SEQ ID NO: 199806 - DNA, 30 bp, Artificial Sequence
  Synthetic oligonucleotide
tgtgacggctaatggtgggatccaaatgta

SEQ ID NO: 199807 - DNA, 30 bp, Artificial Sequence
  Synthetic oligonucleotide
ggggcaagccagctgttatagagtaatgta

SEQ ID NO: 199808 - DNA, 30 bp, Artificial Sequence
  Synthetic oligonucleotide
aggaattcaaaaacaccaaagagccatgta

SEQ ID NO: 199809 - DNA, 30 bp, Artificial Sequence
  Synthetic oligonucleotide
gaatcgatacgggagcatgcggtgcatgta

SEQ ID NO: 199810 - DNA, 30 bp, Artificial Sequence
  Synthetic oligonucleotide
gggtacgtcagaaatacgatctatcatgta

SEQ ID NO: 199811 - DNA, 30 bp, Artificial Sequence
  Synthetic oligonucleotide
aggtggatgaatcatgcaaggaaagatgta

SEQ ID NO: 199812 - DNA, 30 bp, Artificial Sequence
  Synthetic oligonucleotide
cccggggtatgagagatgattaaggatgta

SEQ ID NO: 199813 - DNA, 30 bp, Artificial Sequence
  Synthetic oligonucleotide
caaagtgtatccaatgagtccgaggatgta

SEQ ID NO: 199814 - DNA, 30 bp, Artificial Sequence
  Synthetic oligonucleotide
taaggaaggaatgcgagaccgcgggatgta

SEQ ID NO: 199815 - DNA, 30 bp, Artificial Sequence
  Synthetic oligonucleotide
ccagcggagaacaagttggagtgtgatgta

SEQ ID NO: 199816 - DNA, 30 bp, Artificial Sequence
  Synthetic oligonucleotide
ccatcaggagaatggcagcaaaagtatgta

SEQ ID NO: 199817 - DNA, 30 bp, Artificial Sequence
  Synthetic oligonucleotide
caaacattcacgacgacaattgagtatgta

SEQ ID NO: 199818 - DNA, 30 bp, Artificial Sequence
  Synthetic oligonucleotide
tacagcggatagcgttttcgtcgttatgta

SEQ ID NO: 199819 - DNA, 30 bp, Artificial Sequence
  Synthetic oligonucleotide
ggtatgcgcttttagacaaataaaactgta

SEQ ID NO: 199820 - DNA, 30 bp, Artificial Sequence
  Synthetic oligonucleotide
caatcacggaagtaaagatcactcactgta

SEQ ID NO: 199821 - DNA, 30 bp, Artificial Sequence
  Synthetic oligonucleotide
agtaatatctggtggcgctggatgactgta

SEQ ID NO: 199822 - DNA, 30 bp, Artificial Sequence
  Synthetic oligonucleotide
ttgatgagcctgattaaacctatgactgta

SEQ ID NO: 199823 - DNA, 30 bp, Artificial Sequence
  Synthetic oligonucleotide
cgacaaatgtgctcgtacaaccatactgta

SEQ ID NO: 199824 - DNA, 30 bp, Artificial Sequence
  Synthetic oligonucleotide
agttgcgtctaaaccagcattgctactgta

SEQ ID NO: 199825 - DNA, 30 bp, Artificial Sequence
  Synthetic oligonucleotide
aacatgcagatggcagaagcgtaacctgta

SEQ ID NO: 199826 - DNA, 30 bp, Artificial Sequence
  Synthetic oligonucleotide
cacacatcccattctttctgagtacctgta

SEQ ID NO: 199827 - DNA, 30 bp, Artificial Sequence
  Synthetic oligonucleotide
gccttaggcttccgattgtggtgagctgta

SEQ ID NO: 199828 - DNA, 30 bp, Artificial Sequence
  Synthetic oligonucleotide
gggtttattaacggctagcagttagctgta

SEQ ID NO: 199829 - DNA, 30 bp, Artificial Sequence
  Synthetic oligonucleotide
ttagcggtcctcacatttgggtgcgctgta

SEQ ID NO: 199830 - DNA, 30 bp, Artificial Sequence
  Synthetic oligonucleotide
aagccaaagaacagacactccttggctgta

SEQ ID NO: 199831 - DNA, 30 bp, Artificial Sequence
  Synthetic oligonucleotide
ggtatgtagtgttaggggatctaatctgta

SEQ ID NO: 199832 - DNA, 30 bp, Artificial Sequence
  Synthetic oligonucleotide
gtgtagcttaattacgtcatgatatctgta

SEQ ID NO: 199833 - DNA, 30 bp, Artificial Sequence
  Synthetic oligonucleotide
gtataaaaaagtaacaagtaaaactctgta

SEQ ID NO: 199834 - DNA, 30 bp, Artificial Sequence
  Synthetic oligonucleotide
gacaatgagcgggtagaaaaacactctgta

SEQ ID NO: 199835 - DNA, 30 bp, Artificial Sequence
  Synthetic oligonucleotide
aatgtgataaagatagtcctcaggtctgta

SEQ ID NO: 199836 - DNA, 30 bp, Artificial Sequence
  Synthetic oligonucleotide
tcacagggtaaggtgttcgtggtaagtgta

SEQ ID NO: 199837 - DNA, 30 bp, Artificial Sequence
  Synthetic oligonucleotide
acatctatcggtgctcctcgtgtaagtgta

SEQ ID NO: 199838 - DNA, 30 bp, Artificial Sequence
  Synthetic oligonucleotide
tacacgatcaccaacgcgaaaaacagtgta

SEQ ID NO: 199839 - DNA, 30 bp, Artificial Sequence
  Synthetic oligonucleotide
gatagattcggattacgtaaggtcagtgta

SEQ ID NO: 199840 - DNA, 30 bp, Artificial Sequence
  Synthetic oligonucleotide
ataatgaaaagctcactcctcttcagtgta

SEQ ID NO: 199841 - DNA, 30 bp, Artificial Sequence
  Synthetic oligonucleotide
cacaagcgcgaatgtatcccgacgagtgta

SEQ ID NO: 199842 - DNA, 30 bp, Artificial Sequence
  Synthetic oligonucleotide
tccccatgttagtcgacgtggacgagtgta

SEQ ID NO: 199843 - DNA, 30 bp, Artificial Sequence
  Synthetic oligonucleotide
aacgctaagaaggtaccgccgctgagtgta

SEQ ID NO: 199844 - DNA, 30 bp, Artificial Sequence
  Synthetic oligonucleotide
atagcgatagacgctggcaagactagtgta

SEQ ID NO: 199845 - DNA, 30 bp, Artificial Sequence
  Synthetic oligonucleotide
catagacttcatccaatgaatggccgtgta

SEQ ID NO: 199846 - DNA, 30 bp, Artificial Sequence
  Synthetic oligonucleotide
aggacgtgtccgtacaatctgaggcgtgta

SEQ ID NO: 199847 - DNA, 30 bp, Artificial Sequence
  Synthetic oligonucleotide
gtgcgcatacgcatgccagtaataggtgta

SEQ ID NO: 199848 - DNA, 30 bp, Artificial Sequence
  Synthetic oligonucleotide
aatgttcagggtgatgacttgctaggtgta

SEQ ID NO: 199849 - DNA, 30 bp, Artificial Sequence
  Synthetic oligonucleotide
tgggtctaaagagtatacagagtaggtgta

SEQ ID NO: 199850 - DNA, 30 bp, Artificial Sequence
  Synthetic oligonucleotide
gggattcctatagccagatcctacggtgta

SEQ ID NO: 199851 - DNA, 30 bp, Artificial Sequence
  Synthetic oligonucleotide
cgccgttggcggccctgctggatgggtgta

SEQ ID NO: 199852 - DNA, 30 bp, Artificial Sequence
  Synthetic oligonucleotide
aaccatgtaagaatggaaggggctggtgta

SEQ ID NO: 199853 - DNA, 30 bp, Artificial Sequence
  Synthetic oligonucleotide
ggctacagtcgggacgtatactctggtgta

SEQ ID NO: 199854 - DNA, 30 bp, Artificial Sequence
  Synthetic oligonucleotide
aagttctaaaaagtaagacgggttggtgta

SEQ ID NO: 199855 - DNA, 30 bp, Artificial Sequence
  Synthetic oligonucleotide
agccatcaaagccgatttgcacaatgtgta

SEQ ID NO: 199856 - DNA, 30 bp, Artificial Sequence
  Synthetic oligonucleotide
agtctcttcacagcgagactggtatgtgta

SEQ ID NO: 199857 - DNA, 30 bp, Artificial Sequence
  Synthetic oligonucleotide
aagtcgatatagtccgggtaacggtgtgta

SEQ ID NO: 199858 - DNA, 30 bp, Artificial Sequence
  Synthetic oligonucleotide
taacaccacactcaactcgcattgtgtgta

SEQ ID NO: 199859 - DNA, 31 bp, Artificial Sequence
  Synthetic oligonucleotide
tcgattttcggtagatggtcgtgcttgtgta

SEQ ID NO: 199860 - DNA, 30 bp, Artificial Sequence
  Synthetic oligonucleotide
gcaatggtgatttatagcagtcacattgta

SEQ ID NO: 199861 - DNA, 30 bp, Artificial Sequence
  Synthetic oligonucleotide
tgacacgagtctggcatcaccgccattgta

SEQ ID NO: 199862 - DNA, 30 bp, Artificial Sequence
  Synthetic oligonucleotide
gccaagtttgagcgcataacgacgattgta

SEQ ID NO: 199863 - DNA, 30 bp, Artificial Sequence
  Synthetic oligonucleotide
cgacatagccctttgggctaatatattgta

SEQ ID NO: 199864 - DNA, 30 bp, Artificial Sequence
  Synthetic oligonucleotide
cactaagtgtaaccagcacatcttattgta

SEQ ID NO: 199865 - DNA, 30 bp, Artificial Sequence
  Synthetic oligonucleotide
gtgtcgttatatgcgttatgtggtcttgta

SEQ ID NO: 199866 - DNA, 30 bp, Artificial Sequence
  Synthetic oligonucleotide
catttggtttcatataacgtataagttgta

SEQ ID NO: 199867 - DNA, 30 bp, Artificial Sequence
  Synthetic oligonucleotide
agctgcaaatattcattcaagatagttgta

SEQ ID NO: 199868 - DNA, 30 bp, Artificial Sequence
  Synthetic oligonucleotide
cactagtgtcccatggattacgtggttgta

SEQ ID NO: 199869 - DNA, 30 bp, Artificial Sequence
  Synthetic oligonucleotide
cgtgggacggccactgaaaacagctttgta

SEQ ID NO: 199870 - DNA, 30 bp, Artificial Sequence
  Synthetic oligonucleotide
tagagggcctaaatgggtatgacgtttgta

SEQ ID NO: 199871 - DNA, 30 bp, Artificial Sequence
  Synthetic oligonucleotide
gtgtgcgggaccttgatacagcggtttgta

SEQ ID NO: 199872 - DNA, 30 bp, Artificial Sequence
  Synthetic oligonucleotide
ggagtcggcgacatcttagaggtgtttgta

SEQ ID NO: 199873 - DNA, 30 bp, Artificial Sequence
  Synthetic oligonucleotide
ttgggatgaagggcctgttcattgtttgta

SEQ ID NO: 199874 - DNA, 30 bp, Artificial Sequence
  Synthetic oligonucleotide
acaacggccaaatctgtaatggcttttgta

SEQ ID NO: 199875 - DNA, 30 bp, Artificial Sequence
  Synthetic oligonucleotide
acaacgacaatgaacgaccaaggttttgta

SEQ ID NO: 199876 - DNA, 30 bp, Artificial Sequence
  Synthetic oligonucleotide
acaccatcggcgaatatcattttcaaatta

SEQ ID NO: 199877 - DNA, 30 bp, Artificial Sequence
  Synthetic oligonucleotide
ggcccgccctttataaagtgcaagaaatta

SEQ ID NO: 199878 - DNA, 30 bp, Artificial Sequence
  Synthetic oligonucleotide
gagaccttgtactgtttaaaggggaaatta

SEQ ID NO: 199879 - DNA, 30 bp, Artificial Sequence
  Synthetic oligonucleotide
caaggtcaggctaccagggccgagcaatta

SEQ ID NO: 199880 - DNA, 30 bp, Artificial Sequence
  Synthetic oligonucleotide
gtataaagcctagaggtgttatagcaatta

SEQ ID NO: 199881 - DNA, 30 bp, Artificial Sequence
  Synthetic oligonucleotide
aataatagagcgggcaaacggattcaatta

SEQ ID NO: 199882 - DNA, 30 bp, Artificial Sequence
  Synthetic oligonucleotide
ctacgagcaaccatgggtttgaacgaatta

SEQ ID NO: 199883 - DNA, 30 bp, Artificial Sequence
  Synthetic oligonucleotide
aggcttaccgtttctagctaggacgaatta

SEQ ID NO: 199884 - DNA, 30 bp, Artificial Sequence
  Synthetic oligonucleotide
gagcgtctcagcagtcaggacaaggaatta

SEQ ID NO: 199885 - DNA, 30 bp, Artificial Sequence
  Synthetic oligonucleotide
caatcgccagtggcggtaccggaggaatta

SEQ ID NO: 199886 - DNA, 30 bp, Artificial Sequence
  Synthetic oligonucleotide
tcgaagcgccgaagcctaccagatgaatta

SEQ ID NO: 199887 - DNA, 30 bp, Artificial Sequence
  Synthetic oligonucleotide
gaatctgtggggcatcggaaatatgaatta

SEQ ID NO: 199888 - DNA, 30 bp, Artificial Sequence
  Synthetic oligonucleotide
acatttaagatgtcaactaacactgaatta

SEQ ID NO: 199889 - DNA, 30 bp, Artificial Sequence
  Synthetic oligonucleotide
acgcgagacaattgtccaggtgctgaatta

SEQ ID NO: 199890 - DNA, 30 bp, Artificial Sequence
  Synthetic oligonucleotide
tactagagcctaggtgaagaccttgaatta

SEQ ID NO: 199891 - DNA, 30 bp, Artificial Sequence
  Synthetic oligonucleotide
cagggatcaagtgccactagggcataatta

SEQ ID NO: 199892 - DNA, 30 bp, Artificial Sequence
  Synthetic oligonucleotide
ggaatcacagttggggcacaagtataatta

SEQ ID NO: 199893 - DNA, 30 bp, Artificial Sequence
  Synthetic oligonucleotide
catctgagcctgactggcggcggctaatta

SEQ ID NO: 199894 - DNA, 30 bp, Artificial Sequence
  Synthetic oligonucleotide
gctcatacctccagactagataagtaatta

SEQ ID NO: 199895 - DNA, 30 bp, Artificial Sequence
  Synthetic oligonucleotide
agtcaagtctcgtgtctacgtgtgtaatta

SEQ ID NO: 199896 - DNA, 30 bp, Artificial Sequence
  Synthetic oligonucleotide
ccacttgaagactcgggaggtaaaacatta

SEQ ID NO: 199897 - DNA, 30 bp, Artificial Sequence
  Synthetic oligonucleotide
ctctacgttgctaaacaatatttaacatta

SEQ ID NO: 199898 - DNA, 30 bp, Artificial Sequence
  Synthetic oligonucleotide
ggtcgtagaccatgtacggggatcacatta

SEQ ID NO: 199899 - DNA, 30 bp, Artificial Sequence
  Synthetic oligonucleotide
tctaaggaatgatcgaattttgagacatta

SEQ ID NO: 199900 - DNA, 30 bp, Artificial Sequence
  Synthetic oligonucleotide
ctggctagattacctgggggcgggacatta

SEQ ID NO: 199901 - DNA, 30 bp, Artificial Sequence
  Synthetic oligonucleotide
ctagtggacctggggggagttgtgacatta

SEQ ID NO: 199902 - DNA, 30 bp, Artificial Sequence
  Synthetic oligonucleotide
gaaggggcggcagaattgagttatacatta

SEQ ID NO: 199903 - DNA, 30 bp, Artificial Sequence
  Synthetic oligonucleotide
gaagagtcgcaaggtccattaccaccatta

SEQ ID NO: 199904 - DNA, 30 bp, Artificial Sequence
  Synthetic oligonucleotide
tgcgatcggtaggcctaacattcaccatta

SEQ ID NO: 199905 - DNA, 30 bp, Artificial Sequence
  Synthetic oligonucleotide
agttaatcgtggcttccgaaaggaccatta

SEQ ID NO: 199906 - DNA, 30 bp, Artificial Sequence
  Synthetic oligonucleotide
ctcacgatgagtaggggacagctaccatta

SEQ ID NO: 199907 - DNA, 30 bp, Artificial Sequence
  Synthetic oligonucleotide
tcaccccaggtgcagtcaagaggcccatta

SEQ ID NO: 199908 - DNA, 30 bp, Artificial Sequence
  Synthetic oligonucleotide
ggccacgaatcgacaagcaggaagccatta

SEQ ID NO: 199909 - DNA, 30 bp, Artificial Sequence
  Synthetic oligonucleotide
gcaaatactaacgatacaattagtccatta

SEQ ID NO: 199910 - DNA, 30 bp, Artificial Sequence
  Synthetic oligonucleotide
gctggcaatctccgtctagggattccatta

SEQ ID NO: 199911 - DNA, 30 bp, Artificial Sequence
  Synthetic oligonucleotide
cttcttaagttaagaaagcactttccatta

SEQ ID NO: 199912 - DNA, 30 bp, Artificial Sequence
  Synthetic oligonucleotide
tctaaatagggggtttcagatgatgcatta

SEQ ID NO: 199913 - DNA, 30 bp, Artificial Sequence
  Synthetic oligonucleotide
ataccattaagcaaaagcacatcatcatta

SEQ ID NO: 199914 - DNA, 30 bp, Artificial Sequence
  Synthetic oligonucleotide
cggaattcactctactctcccttatcatta

SEQ ID NO: 199915 - DNA, 30 bp, Artificial Sequence
  Synthetic oligonucleotide
cgaggtatcctggggcatggatactcatta

SEQ ID NO: 199916 - DNA, 30 bp, Artificial Sequence
  Synthetic oligonucleotide
aaggagccgggcattttcaagtcgtcatta

SEQ ID NO: 199917 - DNA, 30 bp, Artificial Sequence
  Synthetic oligonucleotide
gaattccaatagtcagggtcagtaagatta

SEQ ID NO: 199918 - DNA, 30 bp, Artificial Sequence
  Synthetic oligonucleotide
taccgtcgctgtataggggaaagtagatta

SEQ ID NO: 199919 - DNA, 30 bp, Artificial Sequence
  Synthetic oligonucleotide
accccgttcgagagattaggcatacgatta

SEQ ID NO: 199920 - DNA, 30 bp, Artificial Sequence
  Synthetic oligonucleotide
ggggcacgcttggagcgagtcgaccgatta

SEQ ID NO: 199921 - DNA, 30 bp, Artificial Sequence
  Synthetic oligonucleotide
cctaagactggctttgccaaacggcgatta

SEQ ID NO: 199922 - DNA, 30 bp, Artificial Sequence
  Synthetic oligonucleotide
cgcattgctgacggaccacagcggcgatta

SEQ ID NO: 199923 - DNA, 30 bp, Artificial Sequence
  Synthetic oligonucleotide
gcgaatagggccaccggatcgtcaggatta

SEQ ID NO: 199924 - DNA, 30 bp, Artificial Sequence
  Synthetic oligonucleotide
tcccctgatcgaagttgaggtggaggatta

SEQ ID NO: 199925 - DNA, 30 bp, Artificial Sequence
  Synthetic oligonucleotide
ggattaggagcacaccgaatcgccggatta

SEQ ID NO: 199926 - DNA, 30 bp, Artificial Sequence
  Synthetic oligonucleotide
cgtatggcccacttaccggcttccggatta

SEQ ID NO: 199927 - DNA, 30 bp, Artificial Sequence
  Synthetic oligonucleotide
cggctggacccgccaactgctatcggatta

SEQ ID NO: 199928 - DNA, 30 bp, Artificial Sequence
  Synthetic oligonucleotide
aacgcaaccaaggcctcagggcatggatta

SEQ ID NO: 199929 - DNA, 30 bp, Artificial Sequence
  Synthetic oligonucleotide
gcaaatgtgtagtttaggattggtggatta

SEQ ID NO: 199930 - DNA, 30 bp, Artificial Sequence
  Synthetic oligonucleotide
atctcctcacccaatgagggtattggatta

SEQ ID NO: 199931 - DNA, 30 bp, Artificial Sequence
  Synthetic oligonucleotide
acatgagtctgagatccactctcgtgatta

SEQ ID NO: 199932 - DNA, 30 bp, Artificial Sequence
  Synthetic oligonucleotide
aaaaatatgggccaatcagcacattgatta

SEQ ID NO: 199933 - DNA, 30 bp, Artificial Sequence
  Synthetic oligonucleotide
tctcggttccactcaggcacctattgatta

SEQ ID NO: 199934 - DNA, 30 bp, Artificial Sequence
  Synthetic oligonucleotide
atgtttgctcctcggggcaaacgttgatta

SEQ ID NO: 199935 - DNA, 30 bp, Artificial Sequence
  Synthetic oligonucleotide
aggagtcgcgggtactaaccggtaatatta

SEQ ID NO: 199936 - DNA, 30 bp, Artificial Sequence
  Synthetic oligonucleotide
agtcgttgggccagcgacggttagatatta

SEQ ID NO: 199937 - DNA, 30 bp, Artificial Sequence
  Synthetic oligonucleotide
tagaggagagctagtttactgtctatatta

SEQ ID NO: 199938 - DNA, 30 bp, Artificial Sequence
  Synthetic oligonucleotide
tcggggatgacagttgaaatcgttatatta

SEQ ID NO: 199939 - DNA, 30 bp, Artificial Sequence
  Synthetic oligonucleotide
acataggtggaatttaagcagcacctatta

SEQ ID NO: 199940 - DNA, 30 bp, Artificial Sequence
  Synthetic oligonucleotide
tgcctagcaatacctcaagggagcctatta

SEQ ID NO: 199941 - DNA, 30 bp, Artificial Sequence
  Synthetic oligonucleotide
gcggtaggaggtggaatctttacgctatta

SEQ ID NO: 199942 - DNA, 30 bp, Artificial Sequence
  Synthetic oligonucleotide
ttacaatgggtaatcagtgaaatgctatta

SEQ ID NO: 199943 - DNA, 30 bp, Artificial Sequence
  Synthetic oligonucleotide
tgctcgcgataggggcatgtgattctatta

SEQ ID NO: 199944 - DNA, 30 bp, Artificial Sequence
  Synthetic oligonucleotide
gtatgggtattggtggatgttacagtatta

SEQ ID NO: 199945 - DNA, 30 bp, Artificial Sequence
  Synthetic oligonucleotide
cacgcttgtgcctcgtttatatcagtatta

SEQ ID NO: 199946 - DNA, 30 bp, Artificial Sequence
  Synthetic oligonucleotide
ggaggattataggaacgcctcgacgtatta

SEQ ID NO: 199947 - DNA, 30 bp, Artificial Sequence
  Synthetic oligonucleotide
tcaaaatctacagtgtttatgactgtatta

SEQ ID NO: 199948 - DNA, 30 bp, Artificial Sequence
  Synthetic oligonucleotide
taatcggttgcacaaaagaggtctgtatta

SEQ ID NO: 199949 - DNA, 30 bp, Artificial Sequence
  Synthetic oligonucleotide
gaaacccgctgagatgaacctcatttatta

SEQ ID NO: 199950 - DNA, 30 bp, Artificial Sequence
  Synthetic oligonucleotide
tcagacaagggctgctacacacacaactta

SEQ ID NO: 199951 - DNA, 30 bp, Artificial Sequence
  Synthetic oligonucleotide
caagccactaagaattggtactgcaactta

SEQ ID NO: 199952 - DNA, 30 bp, Artificial Sequence
  Synthetic oligonucleotide
ccacgtaaccttacccgtcacacgaactta

SEQ ID NO: 199953 - DNA, 30 bp, Artificial Sequence
  Synthetic oligonucleotide
aagaagattgggtatgagtttggtaactta

SEQ ID NO: 199954 - DNA, 30 bp, Artificial Sequence
  Synthetic oligonucleotide
ccggatctgaacggtcagggacttaactta

SEQ ID NO: 199955 - DNA, 30 bp, Artificial Sequence
  Synthetic oligonucleotide
catcgaataagtataaagaagccgcactta

SEQ ID NO: 199956 - DNA, 30 bp, Artificial Sequence
  Synthetic oligonucleotide
agtgggaagaacctgattagagctcactta

SEQ ID NO: 199957 - DNA, 30 bp, Artificial Sequence
  Synthetic oligonucleotide
cgcgggtcatctacgagccgcgctcactta

SEQ ID NO: 199958 - DNA, 30 bp, Artificial Sequence
  Synthetic oligonucleotide
tcggcgcatcgaatcggtctctcggactta

SEQ ID NO: 199959 - DNA, 30 bp, Artificial Sequence
  Synthetic oligonucleotide
cgccccagaaagtcgagctccagggactta

SEQ ID NO: 199960 - DNA, 30 bp, Artificial Sequence
  Synthetic oligonucleotide
cttactcgtatgtaagtgcgggatgactta

SEQ ID NO: 199961 - DNA, 30 bp, Artificial Sequence
  Synthetic oligonucleotide
tctgctgaccgacttagcctaagtgactta

SEQ ID NO: 199962 - DNA, 30 bp, Artificial Sequence
  Synthetic oligonucleotide
ggtggatagtacaagccgcttaaatactta

SEQ ID NO: 199963 - DNA, 30 bp, Artificial Sequence
  Synthetic oligonucleotide
aaccgtctaattaaccaaaggacttactta

SEQ ID NO: 199964 - DNA, 30 bp, Artificial Sequence
  Synthetic oligonucleotide
caggtgtcaccgtgctagatcccaacctta

SEQ ID NO: 199965 - DNA, 30 bp, Artificial Sequence
  Synthetic oligonucleotide
ccgaggccctgcttaaacagacacacctta

SEQ ID NO: 199966 - DNA, 30 bp, Artificial Sequence
  Synthetic oligonucleotide
agccggacgtggttaactttggacacctta

SEQ ID NO: 199967 - DNA, 30 bp, Artificial Sequence
  Synthetic oligonucleotide
gcagaggttaactacataggagggccctta

SEQ ID NO: 199968 - DNA, 30 bp, Artificial Sequence
  Synthetic oligonucleotide
gcggaacaattggcttagtgcctgccctta

SEQ ID NO: 199969 - DNA, 30 bp, Artificial Sequence
  Synthetic oligonucleotide
aatagaattctggggcctgcggatccctta

SEQ ID NO: 199970 - DNA, 30 bp, Artificial Sequence
  Synthetic oligonucleotide
agagattggaaagtagagtgggatccctta

SEQ ID NO: 199971 - DNA, 30 bp, Artificial Sequence
  Synthetic oligonucleotide
attgctgtattccgataacaataagcctta

SEQ ID NO: 199972 - DNA, 28 bp, Artificial Sequence
  Synthetic oligonucleotide
ctaatcattgggtattttagcagcctta

SEQ ID NO: 199973 - DNA, 30 bp, Artificial Sequence
  Synthetic oligonucleotide
agacgtaagtggcgggaacccggagcctta

SEQ ID NO: 199974 - DNA, 30 bp, Artificial Sequence
  Synthetic oligonucleotide
ttgttggctcgtagggcatgaacatcctta

SEQ ID NO: 199975 - DNA, 30 bp, Artificial Sequence
  Synthetic oligonucleotide
gcggaacttctcgctgtctgtctatcctta

SEQ ID NO: 199976 - DNA, 30 bp, Artificial Sequence
  Synthetic oligonucleotide
agcaaattaccaaccactcacagttcctta

SEQ ID NO: 199977 - DNA, 30 bp, Artificial Sequence
  Synthetic oligonucleotide
ctggtgcgacaaatcgggcgtgagagctta

SEQ ID NO: 199978 - DNA, 30 bp, Artificial Sequence
  Synthetic oligonucleotide
cctgagtaatagatggacgcaaggagctta

SEQ ID NO: 199979 - DNA, 30 bp, Artificial Sequence
  Synthetic oligonucleotide
aggatttcagtgggctcactctggagctta

SEQ ID NO: 199980 - DNA, 30 bp, Artificial Sequence
  Synthetic oligonucleotide
taacctgtgtccaagcgattggctagctta

SEQ ID NO: 199981 - DNA, 30 bp, Artificial Sequence
  Synthetic oligonucleotide
cacggatggccgaatgtcggtctacgctta

SEQ ID NO: 199982 - DNA, 30 bp, Artificial Sequence
  Synthetic oligonucleotide
tgatcgatgcacaactcacgataaggctta

SEQ ID NO: 199983 - DNA, 30 bp, Artificial Sequence
  Synthetic oligonucleotide
acccatagatcagttcaggtaggaggctta

SEQ ID NO: 199984 - DNA, 30 bp, Artificial Sequence
  Synthetic oligonucleotide
tgacacgtaaaagtctaatactccggctta

SEQ ID NO: 199985 - DNA, 30 bp, Artificial Sequence
  Synthetic oligonucleotide
agtcgcaagaattcctgctcgaagggctta

SEQ ID NO: 199986 - DNA, 30 bp, Artificial Sequence
  Synthetic oligonucleotide
cagttacagtaaatactacgttgtggctta

SEQ ID NO: 199987 - DNA, 30 bp, Artificial Sequence
  Synthetic oligonucleotide
aggtccaagtcccgtcgggcaggatgctta

SEQ ID NO: 199988 - DNA, 30 bp, Artificial Sequence
  Synthetic oligonucleotide
tcagcgtgttaaatgttgcaatactgctta

SEQ ID NO: 199989 - DNA, 30 bp, Artificial Sequence
  Synthetic oligonucleotide
atattggaggctaacaaagtcgcctgctta

SEQ ID NO: 199990 - DNA, 30 bp, Artificial Sequence
  Synthetic oligonucleotide
ctgggtaatcaaatatgatatgcctgctta

SEQ ID NO: 199991 - DNA, 30 bp, Artificial Sequence
  Synthetic oligonucleotide
ttggacgagtgcaaacatggcaccatctta

SEQ ID NO: 199992 - DNA, 30 bp, Artificial Sequence
  Synthetic oligonucleotide
acgcttcgtttgcaacgggaaacgatctta

SEQ ID NO: 199993 - DNA, 30 bp, Artificial Sequence
  Synthetic oligonucleotide
tatggtggtttaaacgagcccaatctctta

SEQ ID NO: 199994 - DNA, 30 bp, Artificial Sequence
  Synthetic oligonucleotide
gctggaaattaactcttagccgttctctta

SEQ ID NO: 199995 - DNA, 30 bp, Artificial Sequence
  Synthetic oligonucleotide
cagaccagagagggaccctgcgaagtctta

SEQ ID NO: 199996 - DNA, 30 bp, Artificial Sequence
  Synthetic oligonucleotide
aaaggtaaggaggacctagggctagtctta

SEQ ID NO: 199997 - DNA, 30 bp, Artificial Sequence
  Synthetic oligonucleotide
caggcgtaaagtagtaaacaaaacgtctta

SEQ ID NO: 199998 - DNA, 30 bp, Artificial Sequence
  Synthetic oligonucleotide
aggttacggacggtctgacttccggtctta

SEQ ID NO: 199999 - DNA, 30 bp, Artificial Sequence
  Synthetic oligonucleotide
gatatgtagtgagaattgagtaatgtctta

SEQ ID NO: 200000 - DNA, 30 bp, Artificial Sequence
  Synthetic oligonucleotide
ccgatggctagacgctcaaatcctgtctta

SEQ ID NO: 200001 - DNA, 30 bp, Artificial Sequence
  Synthetic oligonucleotide
cgtaatgactaagcgtttgcgttattctta

SEQ ID NO: 200002 - DNA, 30 bp, Artificial Sequence
  Synthetic oligonucleotide
ttggtggcacaaaatagcgtatccttctta

SEQ ID NO: 200003 - DNA, 30 bp, Artificial Sequence
  Synthetic oligonucleotide
ggggctacagacgggagccgtgttttctta

SEQ ID NO: 200004 - DNA, 30 bp, Artificial Sequence
  Synthetic oligonucleotide
tgcgcgattaccaaggtactgcacaagtta

SEQ ID NO: 200005 - DNA, 30 bp, Artificial Sequence
  Synthetic oligonucleotide
tgttcctcggaaccacaatggactaagtta

SEQ ID NO: 200006 - DNA, 30 bp, Artificial Sequence
  Synthetic oligonucleotide
tcagccggtttctcttcagcttcccagtta

SEQ ID NO: 200007 - DNA, 30 bp, Artificial Sequence
  Synthetic oligonucleotide
cgtcggaaaccttgaaagtatagccagtta

SEQ ID NO: 200008 - DNA, 30 bp, Artificial Sequence
  Synthetic oligonucleotide
tagaatatacaccgtttcatgtgccagtta

SEQ ID NO: 200009 - DNA, 30 bp, Artificial Sequence
  Synthetic oligonucleotide
cctgctgcaagtgagaatataagtcagtta

SEQ ID NO: 200010 - DNA, 30 bp, Artificial Sequence
  Synthetic oligonucleotide
acgggctaaacgctgcagttttgagagtta

SEQ ID NO: 200011 - DNA, 30 bp, Artificial Sequence
  Synthetic oligonucleotide
agaggattggaatacgctgtaacggagtta

SEQ ID NO: 200012 - DNA, 30 bp, Artificial Sequence
  Synthetic oligonucleotide
aataacggagtgttagaggacgcggagtta

SEQ ID NO: 200013 - DNA, 30 bp, Artificial Sequence
  Synthetic oligonucleotide
gtaatcgaggtattaacagtgtgggagtta

SEQ ID NO: 200014 - DNA, 30 bp, Artificial Sequence
  Synthetic oligonucleotide
ctgtattattcaggaaagagtgtggagtta

SEQ ID NO: 200015 - DNA, 30 bp, Artificial Sequence
  Synthetic oligonucleotide
cacgtatagtcaaacacggtgtgatagtta

SEQ ID NO: 200016 - DNA, 30 bp, Artificial Sequence
  Synthetic oligonucleotide
tcacccggtaggggagactacgactagtta

SEQ ID NO: 200017 - DNA, 30 bp, Artificial Sequence
  Synthetic oligonucleotide
ttgggtaatcccatatggatggtctagtta

SEQ ID NO: 200018 - DNA, 30 bp, Artificial Sequence
  Synthetic oligonucleotide
taggggggctagaataattaattctagtta

SEQ ID NO: 200019 - DNA, 30 bp, Artificial Sequence
  Synthetic oligonucleotide
ggacagcgcaaatgtggacctaaaacgtta

SEQ ID NO: 200020 - DNA, 30 bp, Artificial Sequence
  Synthetic oligonucleotide
gcgactttgtcgcattaggtccaaacgtta

SEQ ID NO: 200021 - DNA, 30 bp, Artificial Sequence
  Synthetic oligonucleotide
catataaatatactgggtgagccaacgtta

SEQ ID NO: 200022 - DNA, 30 bp, Artificial Sequence
  Synthetic oligonucleotide
tcgaagtctgctgtcaattaggtaacgtta

SEQ ID NO: 200023 - DNA, 30 bp, Artificial Sequence
  Synthetic oligonucleotide
aagcacgaggtcgctctaggtgtaacgtta

SEQ ID NO: 200024 - DNA, 30 bp, Artificial Sequence
  Synthetic oligonucleotide
accatgtaaggttgaacgagtcgtacgtta

SEQ ID NO: 200025 - DNA, 30 bp, Artificial Sequence
  Synthetic oligonucleotide
gcaccaagatggttccccccagcaccgtta

SEQ ID NO: 200026 - DNA, 30 bp, Artificial Sequence
  Synthetic oligonucleotide
taggtagtactgtgtatggaagagccgtta

SEQ ID NO: 200027 - DNA, 30 bp, Artificial Sequence
  Synthetic oligonucleotide
tcaatttagggcgacacagaacggccgtta

SEQ ID NO: 200028 - DNA, 30 bp, Artificial Sequence
  Synthetic oligonucleotide
cctccatgagtggctgagggtggagcgtta

SEQ ID NO: 200029 - DNA, 30 bp, Artificial Sequence
  Synthetic oligonucleotide
cgttatatgttacttgtccgtacggcgtta

SEQ ID NO: 200030 - DNA, 30 bp, Artificial Sequence
  Synthetic oligonucleotide
ttccgaggggaaattcgcggggaatcgtta

SEQ ID NO: 200031 - DNA, 30 bp, Artificial Sequence
  Synthetic oligonucleotide
aagcctaatccggttgcacggcgatcgtta

SEQ ID NO: 200032 - DNA, 30 bp, Artificial Sequence
  Synthetic oligonucleotide
tcgcccattggcatattgggcggctcgtta

SEQ ID NO: 200033 - DNA, 30 bp, Artificial Sequence
  Synthetic oligonucleotide
tggttatcatccaaccgtaactggtcgtta

SEQ ID NO: 200034 - DNA, 30 bp, Artificial Sequence
  Synthetic oligonucleotide
cagagctagcattgtggcatatgttcgtta

SEQ ID NO: 200035 - DNA, 30 bp, Artificial Sequence
  Synthetic oligonucleotide
ggtgggttagggtctaaccacgacaggtta

SEQ ID NO: 200036 - DNA, 30 bp, Artificial Sequence
  Synthetic oligonucleotide
atacggccgttcatgtatgaacccaggtta

SEQ ID NO: 200037 - DNA, 30 bp, Artificial Sequence
  Synthetic oligonucleotide
gacgcgaggcttagaacctagcccaggtta

SEQ ID NO: 200038 - DNA, 30 bp, Artificial Sequence
  Synthetic oligonucleotide
agtcgttaccagggcgccactatcaggtta

SEQ ID NO: 200039 - DNA, 30 bp, Artificial Sequence
  Synthetic oligonucleotide
ggaacccgccacgaattcaaagcgaggtta

SEQ ID NO: 200040 - DNA, 30 bp, Artificial Sequence
  Synthetic oligonucleotide
ctcacgcagggaccgagtagaagtaggtta

SEQ ID NO: 200041 - DNA, 30 bp, Artificial Sequence
  Synthetic oligonucleotide
gcctgtataattcgaaacatcggtaggtta

SEQ ID NO: 200042 - DNA, 30 bp, Artificial Sequence
  Synthetic oligonucleotide
caggatcagattcaggtccatggacggtta

SEQ ID NO: 200043 - DNA, 30 bp, Artificial Sequence
  Synthetic oligonucleotide
tcacgaaagtctacagattcatgacggtta

SEQ ID NO: 200044 - DNA, 30 bp, Artificial Sequence
  Synthetic oligonucleotide
gccacagctgaatccctgataatacggtta

SEQ ID NO: 200045 - DNA, 30 bp, Artificial Sequence
  Synthetic oligonucleotide
cctaagtatatagcgctaggtttacggtta

SEQ ID NO: 200046 - DNA, 30 bp, Artificial Sequence
  Synthetic oligonucleotide
gcttaattccacgagaccaccggccggtta

SEQ ID NO: 200047 - DNA, 30 bp, Artificial Sequence
  Synthetic oligonucleotide
acgaatccttatctgattttggatcggtta

SEQ ID NO: 200048 - DNA, 30 bp, Artificial Sequence
  Synthetic oligonucleotide
gacataatccacaggacacaagaagggtta

SEQ ID NO: 200049 - DNA, 30 bp, Artificial Sequence
  Synthetic oligonucleotide
gatgacaggcttcctggaatcatagggtta

SEQ ID NO: 200050 - DNA, 30 bp, Artificial Sequence
  Synthetic oligonucleotide
gtcctaactataaacctatgcttagggtta

SEQ ID NO: 200051 - DNA, 30 bp, Artificial Sequence
  Synthetic oligonucleotide
taaccatgtatgtaactcagaggggggtta

SEQ ID NO: 200052 - DNA, 30 bp, Artificial Sequence
  Synthetic oligonucleotide
aagaggttgacctcctgataattatggtta

SEQ ID NO: 200053 - DNA, 30 bp, Artificial Sequence
  Synthetic oligonucleotide
agtgagtagacatcgacgatgttgtggtta

SEQ ID NO: 200054 - DNA, 30 bp, Artificial Sequence
  Synthetic oligonucleotide
ggggagattgtctctaattcgtgttggtta

SEQ ID NO: 200055 - DNA, 30 bp, Artificial Sequence
  Synthetic oligonucleotide
caccgttacgggataccttgactttggtta

SEQ ID NO: 200056 - DNA, 30 bp, Artificial Sequence
  Synthetic oligonucleotide
tcacgaccaagtagtgggcagttttggtta

SEQ ID NO: 200057 - DNA, 30 bp, Artificial Sequence
  Synthetic oligonucleotide
acgattcaaagtcagatcagtttaatgtta

SEQ ID NO: 200058 - DNA, 30 bp, Artificial Sequence
  Synthetic oligonucleotide
aacgtccgtacctaaatggcgtccatgtta

SEQ ID NO: 200059 - DNA, 30 bp, Artificial Sequence
  Synthetic oligonucleotide
ataaacagaaaaaggtaagtgtgcatgtta

SEQ ID NO: 200060 - DNA, 30 bp, Artificial Sequence
  Synthetic oligonucleotide
caacatcctggaacattacataggatgtta

SEQ ID NO: 200061 - DNA, 30 bp, Artificial Sequence
  Synthetic oligonucleotide
aggtctgagtaacacatctgggggatgtta

SEQ ID NO: 200062 - DNA, 30 bp, Artificial Sequence
  Synthetic oligonucleotide
aggggcataatgacgcctcgatatatgtta

SEQ ID NO: 200063 - DNA, 30 bp, Artificial Sequence
  Synthetic oligonucleotide
tgatcttcatttcacttaagagttatgtta

SEQ ID NO: 200064 - DNA, 30 bp, Artificial Sequence
  Synthetic oligonucleotide
aagaatcgctattagttcacattgctgtta

SEQ ID NO: 200065 - DNA, 30 bp, Artificial Sequence
  Synthetic oligonucleotide
attataggtggtgtgttactcagtctgtta

SEQ ID NO: 200066 - DNA, 30 bp, Artificial Sequence
  Synthetic oligonucleotide
ggagaggggagtattattggctaagtgtta

SEQ ID NO: 200067 - DNA, 30 bp, Artificial Sequence
  Synthetic oligonucleotide
gctactccagacacttcgcgtcgcgtgtta

SEQ ID NO: 200068 - DNA, 30 bp, Artificial Sequence
  Synthetic oligonucleotide
cgtggtgctgacaaaccatacggcgtgtta

SEQ ID NO: 200069 - DNA, 30 bp, Artificial Sequence
  Synthetic oligonucleotide
gatcacatcctttcggaaacatgcgtgtta

SEQ ID NO: 200070 - DNA, 31 bp, Artificial Sequence
  Synthetic oligonucleotide
atggtaaaagcgccaatgatcaacattgtta

SEQ ID NO: 200071 - DNA, 30 bp, Artificial Sequence
  Synthetic oligonucleotide
aagtggacacatatgaggcaaaccttgtta

SEQ ID NO: 200072 - DNA, 30 bp, Artificial Sequence
  Synthetic oligonucleotide
gaagcgagtagggtcatgatgccgttgtta

SEQ ID NO: 200073 - DNA, 30 bp, Artificial Sequence
  Synthetic oligonucleotide
tcagtttcaaaggaaatgatgattttgtta

SEQ ID NO: 200074 - DNA, 30 bp, Artificial Sequence
  Synthetic oligonucleotide
gtgaagggcgtgacggcgaacacaaattta

SEQ ID NO: 200075 - DNA, 30 bp, Artificial Sequence
  Synthetic oligonucleotide
gcgttgttaaggagatacaaacgaaattta

SEQ ID NO: 200076 - DNA, 30 bp, Artificial Sequence
  Synthetic oligonucleotide
ccaaatggaactatcactatacacaattta

SEQ ID NO: 200077 - DNA, 30 bp, Artificial Sequence
  Synthetic oligonucleotide
actcgtgtggtattattgggtagcaattta

SEQ ID NO: 200078 - DNA, 30 bp, Artificial Sequence
  Synthetic oligonucleotide
acgaacgtttaatcacggggcgataattta

SEQ ID NO: 200079 - DNA, 30 bp, Artificial Sequence
  Synthetic oligonucleotide
cctggtccgcatagcaactagaaccattta

SEQ ID NO: 200080 - DNA, 30 bp, Artificial Sequence
  Synthetic oligonucleotide
gtgctatgacgtgccaataatgagcattta

SEQ ID NO: 200081 - DNA, 30 bp, Artificial Sequence
  Synthetic oligonucleotide
aaagggtagtgtcttggggaccgtcattta

SEQ ID NO: 200082 - DNA, 30 bp, Artificial Sequence
  Synthetic oligonucleotide
atgagcgggatgagcaaagtataatattta

SEQ ID NO: 200083 - DNA, 30 bp, Artificial Sequence
  Synthetic oligonucleotide
cgaaaagaatcagtcagcctacactattta

SEQ ID NO: 200084 - DNA, 30 bp, Artificial Sequence
  Synthetic oligonucleotide
gttggggggcttgctagtagatcttattta

SEQ ID NO: 200085 - DNA, 30 bp, Artificial Sequence
  Synthetic oligonucleotide
cgaccaagaggaccacaagggatgacttta

SEQ ID NO: 200086 - DNA, 30 bp, Artificial Sequence
  Synthetic oligonucleotide
tcgcgagggtgcggagagatggtgacttta

SEQ ID NO: 200087 - DNA, 30 bp, Artificial Sequence
  Synthetic oligonucleotide
caagcgtgatccgggtcggttcaggcttta

SEQ ID NO: 200088 - DNA, 30 bp, Artificial Sequence
  Synthetic oligonucleotide
acgggtggaattttagggcggatttcttta

SEQ ID NO: 200089 - DNA, 30 bp, Artificial Sequence
  Synthetic oligonucleotide
cttgagtagtatagctctgtgaaaagttta

SEQ ID NO: 200090 - DNA, 30 bp, Artificial Sequence
  Synthetic oligonucleotide
cttaccaaatgtctttaccaacaaagttta

SEQ ID NO: 200091 - DNA, 30 bp, Artificial Sequence
  Synthetic oligonucleotide
gtccagtcgaatggtagatttccaagttta

SEQ ID NO: 200092 - DNA, 30 bp, Artificial Sequence
  Synthetic oligonucleotide
tcgcccaacacttgataagttggaagttta

SEQ ID NO: 200093 - DNA, 30 bp, Artificial Sequence
  Synthetic oligonucleotide
cttcagaaaggaaaaccatatcgtagttta

SEQ ID NO: 200094 - DNA, 30 bp, Artificial Sequence
  Synthetic oligonucleotide
aaacagtcttcagacggcagggaccgttta

SEQ ID NO: 200095 - DNA, 30 bp, Artificial Sequence
  Synthetic oligonucleotide
agataaggaaggatcatcacccgccgttta

SEQ ID NO: 200096 - DNA, 30 bp, Artificial Sequence
  Synthetic oligonucleotide
gcagtaaggcttgacaactgaggccgttta

SEQ ID NO: 200097 - DNA, 30 bp, Artificial Sequence
  Synthetic oligonucleotide
agaagtattggccatggttccgagcgttta

SEQ ID NO: 200098 - DNA, 30 bp, Artificial Sequence
  Synthetic oligonucleotide
ttacgaggaataccatgccgactgcgttta

SEQ ID NO: 200099 - DNA, 30 bp, Artificial Sequence
  Synthetic oligonucleotide
aaaaggggcagttacgacatcaaaggttta

SEQ ID NO: 200100 - DNA, 30 bp, Artificial Sequence
  Synthetic oligonucleotide
ggagtactacgagattagcgggaaggttta

SEQ ID NO: 200101 - DNA, 30 bp, Artificial Sequence
  Synthetic oligonucleotide
acgtcttgcggatacggtgcggtaggttta

SEQ ID NO: 200102 - DNA, 30 bp, Artificial Sequence
  Synthetic oligonucleotide
tgaccaagggtgtgcgataaatgcggttta

SEQ ID NO: 200103 - DNA, 30 bp, Artificial Sequence
  Synthetic oligonucleotide
aagtaagcttcgtaacgggttatcggttta

SEQ ID NO: 200104 - DNA, 30 bp, Artificial Sequence
  Synthetic oligonucleotide
cagacactgtatcgatctacgttcggttta

SEQ ID NO: 200105 - DNA, 30 bp, Artificial Sequence
  Synthetic oligonucleotide
cgacggtttagggtctggtggttcggttta

SEQ ID NO: 200106 - DNA, 30 bp, Artificial Sequence
  Synthetic oligonucleotide
cgggagggggaggccgaaagtaagggttta

SEQ ID NO: 200107 - DNA, 30 bp, Artificial Sequence
  Synthetic oligonucleotide
gctcaagatacggacctcaagtggtgttta

SEQ ID NO: 200108 - DNA, 30 bp, Artificial Sequence
  Synthetic oligonucleotide
aagtcaaagtaggtggcgcagttgtgttta

SEQ ID NO: 200109 - DNA, 30 bp, Artificial Sequence
  Synthetic oligonucleotide
gctgaacatgccctccgtagtcgttgttta

SEQ ID NO: 200110 - DNA, 30 bp, Artificial Sequence
  Synthetic oligonucleotide
ccaaacgagagggcagctcctccaatttta

SEQ ID NO: 200111 - DNA, 30 bp, Artificial Sequence
  Synthetic oligonucleotide
ccggctcgcctaacctaaacgatgatttta

SEQ ID NO: 200112 - DNA, 30 bp, Artificial Sequence
  Synthetic oligonucleotide
atacgggcaatgtatgataatgcgctttta

SEQ ID NO: 200113 - DNA, 30 bp, Artificial Sequence
  Synthetic oligonucleotide
atggggagttcagtgctaatgcatctttta

SEQ ID NO: 200114 - DNA, 30 bp, Artificial Sequence
  Synthetic oligonucleotide
gcgaaggacctggcgataagaagtctttta

SEQ ID NO: 200115 - DNA, 30 bp, Artificial Sequence
  Synthetic oligonucleotide
gcccagaccttatagatcagccacgtttta

SEQ ID NO: 200116 - DNA, 30 bp, Artificial Sequence
  Synthetic oligonucleotide
ttcagcacagaacatgtaaattgcgtttta

SEQ ID NO: 200117 - DNA, 30 bp, Artificial Sequence
  Synthetic oligonucleotide
aatcacgaagaagacaacaccgtcgtttta

SEQ ID NO: 200118 - DNA, 30 bp, Artificial Sequence
  Synthetic oligonucleotide
ttgaatatcaatggtgttatggatgtttta

SEQ ID NO: 200119 - DNA, 30 bp, Artificial Sequence
  Synthetic oligonucleotide
aatactgcacaggggaaacgaaccttttta

SEQ ID NO: 200120 - DNA, 30 bp, Artificial Sequence
  Synthetic oligonucleotide
ggacatagcacctccaaaaatcccttttta

SEQ ID NO: 200121 - DNA, 30 bp, Artificial Sequence
  Synthetic oligonucleotide
gcaggagtatcgtccaaggttcgaaaaaac

SEQ ID NO: 200122 - DNA, 30 bp, Artificial Sequence
  Synthetic oligonucleotide
ccgacaacagtatggtaatatgtcaaaaac

SEQ ID NO: 200123 - DNA, 30 bp, Artificial Sequence
  Synthetic oligonucleotide
ttaaggaacccaccgtctgtcaagaaaaac

SEQ ID NO: 200124 - DNA, 30 bp, Artificial Sequence
  Synthetic oligonucleotide
cgttagctgcgaggttatctagcgaaaaac

SEQ ID NO: 200125 - DNA, 30 bp, Artificial Sequence
  Synthetic oligonucleotide
tcgaggctgtgagtcggactggtgaaaaac

SEQ ID NO: 200126 - DNA, 30 bp, Artificial Sequence
  Synthetic oligonucleotide
tcaggggaatattatgattaaggtaaaaac

SEQ ID NO: 200127 - DNA, 30 bp, Artificial Sequence
  Synthetic oligonucleotide
tggactgtcaataggagtaggattaaaaac

SEQ ID NO: 200128 - DNA, 30 bp, Artificial Sequence
  Synthetic oligonucleotide
aaaaggccgtctcgagttcaacttaaaaac

SEQ ID NO: 200129 - DNA, 30 bp, Artificial Sequence
  Synthetic oligonucleotide
cggtgcaacagttcatttataagacaaaac

SEQ ID NO: 200130 - DNA, 30 bp, Artificial Sequence
  Synthetic oligonucleotide
acttagcggccccctatcgcgtgccaaaac

SEQ ID NO: 200131 - DNA, 30 bp, Artificial Sequence
  Synthetic oligonucleotide
agcaagataactcgtggcggacagcaaaac

SEQ ID NO: 200132 - DNA, 30 bp, Artificial Sequence
  Synthetic oligonucleotide
tcttcccattttcttgcggtcactcaaaac

SEQ ID NO: 200133 - DNA, 30 bp, Artificial Sequence
  Synthetic oligonucleotide
agacaataaaaaagactgagacaagaaaac

SEQ ID NO: 200134 - DNA, 30 bp, Artificial Sequence
  Synthetic oligonucleotide
ctgatttgcaacgtggtgtaggccgaaaac

SEQ ID NO: 200135 - DNA, 30 bp, Artificial Sequence
  Synthetic oligonucleotide
cctaagatatgagtctcagacgtcgaaaac

SEQ ID NO: 200136 - DNA, 30 bp, Artificial Sequence
  Synthetic oligonucleotide
cctcatccgcccatgtcaagcggggaaaac

SEQ ID NO: 200137 - DNA, 30 bp, Artificial Sequence
  Synthetic oligonucleotide
aactctgactaaacgccgaatatggaaaac

SEQ ID NO: 200138 - DNA, 30 bp, Artificial Sequence
  Synthetic oligonucleotide
actagggctaaatccacttttagtgaaaac

SEQ ID NO: 200139 - DNA, 30 bp, Artificial Sequence
  Synthetic oligonucleotide
gagtactcgtgagccataaattgtgaaaac

SEQ ID NO: 200140 - DNA, 30 bp, Artificial Sequence
  Synthetic oligonucleotide
ccggtaggtactatgagattacttgaaaac

SEQ ID NO: 200141 - DNA, 30 bp, Artificial Sequence
  Synthetic oligonucleotide
ggcaaatggtacttatgccaatcataaaac

SEQ ID NO: 200142 - DNA, 30 bp, Artificial Sequence
  Synthetic oligonucleotide
acaggtgcgaatcgacaggacttataaaac

SEQ ID NO: 200143 - DNA, 30 bp, Artificial Sequence
  Synthetic oligonucleotide
tatcagtgcgaagtacgaaggatctaaaac

SEQ ID NO: 200144 - DNA, 30 bp, Artificial Sequence
  Synthetic oligonucleotide
tcatagacgccatagtaaaggtaaacaaac

SEQ ID NO: 200145 - DNA, 30 bp, Artificial Sequence
  Synthetic oligonucleotide
gacagtgcggggtagggtagtggaacaaac

SEQ ID NO: 200146 - DNA, 30 bp, Artificial Sequence
  Synthetic oligonucleotide
ctcaatcaccaccaagtcaacctaacaaac

SEQ ID NO: 200147 - DNA, 30 bp, Artificial Sequence
  Synthetic oligonucleotide
ctgggagtactgattcggccattaacaaac

SEQ ID NO: 200148 - DNA, 30 bp, Artificial Sequence
  Synthetic oligonucleotide
cgactgttgctgccgcatggtaccacaaac

SEQ ID NO: 200149 - DNA, 30 bp, Artificial Sequence
  Synthetic oligonucleotide
tatgcattaggagctgagatgatcacaaac

SEQ ID NO: 200150 - DNA, 30 bp, Artificial Sequence
  Synthetic oligonucleotide
gcttcaccacccataccgctagggacaaac

SEQ ID NO: 200151 - DNA, 30 bp, Artificial Sequence
  Synthetic oligonucleotide
aggagactcggtaacatcttaaaaccaaac

SEQ ID NO: 200152 - DNA, 30 bp, Artificial Sequence
  Synthetic oligonucleotide
tatgaacattttgaaggtatagaaccaaac

SEQ ID NO: 200153 - DNA, 30 bp, Artificial Sequence
  Synthetic oligonucleotide
aagaagaacataaatctcgaataaccaaac

SEQ ID NO: 200154 - DNA, 30 bp, Artificial Sequence
  Synthetic oligonucleotide
gtaagtcttgcaagcaaggcggcaccaaac

SEQ ID NO: 200155 - DNA, 30 bp, Artificial Sequence
  Synthetic oligonucleotide
cgcctgttcaacattaagggggatccaaac

SEQ ID NO: 200156 - DNA, 30 bp, Artificial Sequence
  Synthetic oligonucleotide
ggtccggtgaaggggtacatcatagcaaac

SEQ ID NO: 200157 - DNA, 30 bp, Artificial Sequence
  Synthetic oligonucleotide
cgcctcgtcggattgcttatagccgcaaac

SEQ ID NO: 200158 - DNA, 30 bp, Artificial Sequence
  Synthetic oligonucleotide
aggtatggctagtgtgccggtttcgcaaac

SEQ ID NO: 200159 - DNA, 30 bp, Artificial Sequence
  Synthetic oligonucleotide
ccttgtgtaacggctgatgcatgggcaaac

SEQ ID NO: 200160 - DNA, 30 bp, Artificial Sequence
  Synthetic oligonucleotide
aatgctataggtcagactgggtgggcaaac

SEQ ID NO: 200161 - DNA, 30 bp, Artificial Sequence
  Synthetic oligonucleotide
gggtaaggtgtacgatttgatgtggcaaac

SEQ ID NO: 200162 - DNA, 30 bp, Artificial Sequence
  Synthetic oligonucleotide
cgagtgagagtcggaacacggaatgcaaac

SEQ ID NO: 200163 - DNA, 30 bp, Artificial Sequence
  Synthetic oligonucleotide
aagcaaaagccatcctgcatagctgcaaac

SEQ ID NO: 200164 - DNA, 31 bp, Artificial Sequence
  Synthetic oligonucleotide
agttatgcacagcgggggatgggctgcaaac

SEQ ID NO: 200165 - DNA, 30 bp, Artificial Sequence
  Synthetic oligonucleotide
agaaagtaggcattacacatttcgtcaaac

SEQ ID NO: 200166 - DNA, 30 bp, Artificial Sequence
  Synthetic oligonucleotide
gccgattgcaggacgagatatgggtcaaac

SEQ ID NO: 200167 - DNA, 30 bp, Artificial Sequence
  Synthetic oligonucleotide
ttaggatgcgccagtttagccacttcaaac

SEQ ID NO: 200168 - DNA, 30 bp, Artificial Sequence
  Synthetic oligonucleotide
gcaataagatacgatcggccggacagaaac

SEQ ID NO: 200169 - DNA, 30 bp, Artificial Sequence
  Synthetic oligonucleotide
aagtataattcaggtcttcaacgtagaaac

SEQ ID NO: 200170 - DNA, 30 bp, Artificial Sequence
  Synthetic oligonucleotide
acggggagggataggcattctgcacgaaac

SEQ ID NO: 200171 - DNA, 30 bp, Artificial Sequence
  Synthetic oligonucleotide
ggcgctagattcgggaggcgaatccgaaac

SEQ ID NO: 200172 - DNA, 30 bp, Artificial Sequence
  Synthetic oligonucleotide
tacggtattcgagaaatcacaaagcgaaac

SEQ ID NO: 200173 - DNA, 30 bp, Artificial Sequence
  Synthetic oligonucleotide
cctaatagtccccctccctcgatcggaaac

SEQ ID NO: 200174 - DNA, 30 bp, Artificial Sequence
  Synthetic oligonucleotide
ctgaaaaacgttgcgttaaatcagggaaac

SEQ ID NO: 200175 - DNA, 30 bp, Artificial Sequence
  Synthetic oligonucleotide
cgattaacgcctagctggctacggggaaac

SEQ ID NO: 200176 - DNA, 30 bp, Artificial Sequence
  Synthetic oligonucleotide
gccaccattcgacaatccctggtgggaaac

SEQ ID NO: 200177 - DNA, 30 bp, Artificial Sequence
  Synthetic oligonucleotide
cccctcgagatgcaatcaaacttgggaaac

SEQ ID NO: 200178 - DNA, 30 bp, Artificial Sequence
  Synthetic oligonucleotide
cgtataaatactgtggagagagttggaaac

SEQ ID NO: 200179 - DNA, 30 bp, Artificial Sequence
  Synthetic oligonucleotide
tatgcgctgaaggtaagcggtgcctgaaac

SEQ ID NO: 200180 - DNA, 30 bp, Artificial Sequence
  Synthetic oligonucleotide
gtttccgtatcgcagagaggccaaataaac

SEQ ID NO: 200181 - DNA, 30 bp, Artificial Sequence
  Synthetic oligonucleotide
gcgaaaacagatctagccggcgcaataaac

SEQ ID NO: 200182 - DNA, 30 bp, Artificial Sequence
  Synthetic oligonucleotide
cctaaccaaggatgcgtgtagcccataaac

SEQ ID NO: 200183 - DNA, 30 bp, Artificial Sequence
  Synthetic oligonucleotide
aagtgcagtataatgtccggaacgataaac

SEQ ID NO: 200184 - DNA, 30 bp, Artificial Sequence
  Synthetic oligonucleotide
gacgattggccatgtgcacagaggataaac

SEQ ID NO: 200185 - DNA, 30 bp, Artificial Sequence
  Synthetic oligonucleotide
gtttgcaacataacaagtcaatatataaac

SEQ ID NO: 200186 - DNA, 30 bp, Artificial Sequence
  Synthetic oligonucleotide
ggacttcaactttctaattacgctataaac

SEQ ID NO: 200187 - DNA, 30 bp, Artificial Sequence
  Synthetic oligonucleotide
cgagaatgtgagtaggcccattgtataaac

SEQ ID NO: 200188 - DNA, 30 bp, Artificial Sequence
  Synthetic oligonucleotide
gtcagggagccgctcttttgaggcctaaac

SEQ ID NO: 200189 - DNA, 30 bp, Artificial Sequence
  Synthetic oligonucleotide
ctatttagtcagagggctataactctaaac

SEQ ID NO: 200190 - DNA, 30 bp, Artificial Sequence
  Synthetic oligonucleotide
gggcacccaattcttccaggacaagtaaac

SEQ ID NO: 200191 - DNA, 30 bp, Artificial Sequence
  Synthetic oligonucleotide
acgagcaaagtttgtgagctgcgattaaac

SEQ ID NO: 200192 - DNA, 30 bp, Artificial Sequence
  Synthetic oligonucleotide
catccctaccgggaggacactgtattaaac

SEQ ID NO: 200193 - DNA, 30 bp, Artificial Sequence
  Synthetic oligonucleotide
gaaagaactaacgagataaccaccttaaac

SEQ ID NO: 200194 - DNA, 30 bp, Artificial Sequence
  Synthetic oligonucleotide
attggagcgcgttcatttacagaaaacaac

SEQ ID NO: 200195 - DNA, 30 bp, Artificial Sequence
  Synthetic oligonucleotide
tagtgtgaagtccgttaaatggccaacaac

SEQ ID NO: 200196 - DNA, 30 bp, Artificial Sequence
  Synthetic oligonucleotide
cggtgtgcacgcaattcaaagtccaacaac

SEQ ID NO: 200197 - DNA, 30 bp, Artificial Sequence
  Synthetic oligonucleotide
agtagtagtaaggtttggatacataacaac

SEQ ID NO: 200198 - DNA, 30 bp, Artificial Sequence
  Synthetic oligonucleotide
ttggtgagcgcgcgttcaacgagtaacaac

SEQ ID NO: 200199 - DNA, 30 bp, Artificial Sequence
  Synthetic oligonucleotide
ggaaggcgttccgcataagacagacacaac

SEQ ID NO: 200200 - DNA, 30 bp, Artificial Sequence
  Synthetic oligonucleotide
ggggcaacgttgaacaaacgagatcacaac

SEQ ID NO: 200201 - DNA, 30 bp, Artificial Sequence
  Synthetic oligonucleotide
gctacggtacaataccaaatccacgacaac

SEQ ID NO: 200202 - DNA, 30 bp, Artificial Sequence
  Synthetic oligonucleotide
ttaagagtcgcgggggtaggcacggacaac

SEQ ID NO: 200203 - DNA, 30 bp, Artificial Sequence
  Synthetic oligonucleotide
gcatccgctggaagtgaaaaagcggacaac

SEQ ID NO: 200204 - DNA, 30 bp, Artificial Sequence
  Synthetic oligonucleotide
gtgggtgctcctccaaccaactcggacaac

SEQ ID NO: 200205 - DNA, 30 bp, Artificial Sequence
  Synthetic oligonucleotide
gcctaaacctggaccaactgaggggacaac

SEQ ID NO: 200206 - DNA, 30 bp, Artificial Sequence
  Synthetic oligonucleotide
aacacgtcaatacgttgatacatggacaac

SEQ ID NO: 200207 - DNA, 30 bp, Artificial Sequence
  Synthetic oligonucleotide
gggtcgaggggataaaagggtagtgacaac

SEQ ID NO: 200208 - DNA, 30 bp, Artificial Sequence
  Synthetic oligonucleotide
cggaagtacacactataaacattctacaac

SEQ ID NO: 200209 - DNA, 30 bp, Artificial Sequence
  Synthetic oligonucleotide
acagttgacacaatgcttaagcggtacaac

SEQ ID NO: 200210 - DNA, 30 bp, Artificial Sequence
  Synthetic oligonucleotide
caagtagatacattgcttagagccaccaac

SEQ ID NO: 200211 - DNA, 30 bp, Artificial Sequence
  Synthetic oligonucleotide
cggggacgtggtaggtcttgggcgaccaac

SEQ ID NO: 200212 - DNA, 30 bp, Artificial Sequence
  Synthetic oligonucleotide
agaatacagttgggaggacaaggtaccaac

SEQ ID NO: 200213 - DNA, 30 bp, Artificial Sequence
  Synthetic oligonucleotide
cgattgtcggagttctaagacagacccaac

SEQ ID NO: 200214 - DNA, 30 bp, Artificial Sequence
  Synthetic oligonucleotide
tcttacaagacggccctagtttaccccaac

SEQ ID NO: 200215 - DNA, 30 bp, Artificial Sequence
  Synthetic oligonucleotide
cagctctcctcgttgaacatcgtccccaac

SEQ ID NO: 200216 - DNA, 30 bp, Artificial Sequence
  Synthetic oligonucleotide
cataatcgggagatccttggcagcgccaac

SEQ ID NO: 200217 - DNA, 30 bp, Artificial Sequence
  Synthetic oligonucleotide
gcttgcaataggtgtgccaccagatccaac

SEQ ID NO: 200218 - DNA, 30 bp, Artificial Sequence
  Synthetic oligonucleotide
cgtggcggtcactagttacatatatccaac

SEQ ID NO: 200219 - DNA, 30 bp, Artificial Sequence
  Synthetic oligonucleotide
gtcttgagcgaatcatggatcgaaagcaac

SEQ ID NO: 200220 - DNA, 30 bp, Artificial Sequence
  Synthetic oligonucleotide
taaccagtacatcagtcaaatcgcagcaac

SEQ ID NO: 200221 - DNA, 30 bp, Artificial Sequence
  Synthetic oligonucleotide
taggcatgattcagtgtttccaagagcaac

SEQ ID NO: 200222 - DNA, 30 bp, Artificial Sequence
  Synthetic oligonucleotide
acattgttacttggtaaacaaatgagcaac

SEQ ID NO: 200223 - DNA, 30 bp, Artificial Sequence
  Synthetic oligonucleotide
ggaactttagtcaaaaatgcagctagcaac

SEQ ID NO: 200224 - DNA, 30 bp, Artificial Sequence
  Synthetic oligonucleotide
agaatacgaatgtagttctaaacacgcaac

SEQ ID NO: 200225 - DNA, 30 bp, Artificial Sequence
  Synthetic oligonucleotide
tatacgcttactcagaaaaaatcgcgcaac

SEQ ID NO: 200226 - DNA, 30 bp, Artificial Sequence
  Synthetic oligonucleotide
gctgcgggtgttaagcaaattaggcgcaac

SEQ ID NO: 200227 - DNA, 30 bp, Artificial Sequence
  Synthetic oligonucleotide
tcaagaaaaacattgccactgtatcgcaac

SEQ ID NO: 200228 - DNA, 30 bp, Artificial Sequence
  Synthetic oligonucleotide
tcaaaatcagatgacggggttgctcgcaac

SEQ ID NO: 200229 - DNA, 30 bp, Artificial Sequence
  Synthetic oligonucleotide
atacgctttaagacctccgggaaaggcaac

SEQ ID NO: 200230 - DNA, 30 bp, Artificial Sequence
  Synthetic oligonucleotide
aatggtaaacggaaggtaggatcaggcaac

SEQ ID NO: 200231 - DNA, 30 bp, Artificial Sequence
  Synthetic oligonucleotide
gaaacaaatcgacaataatgcataggcaac

SEQ ID NO: 200232 - DNA, 30 bp, Artificial Sequence
  Synthetic oligonucleotide
gcgcccatccggccagaagtggtcggcaac

SEQ ID NO: 200233 - DNA, 30 bp, Artificial Sequence
  Synthetic oligonucleotide
cggaggaccgccgtgggtttacggggcaac

SEQ ID NO: 200234 - DNA, 30 bp, Artificial Sequence
  Synthetic oligonucleotide
gctcgagggtgtcgtatataaggtggcaac

SEQ ID NO: 200235 - DNA, 30 bp, Artificial Sequence
  Synthetic oligonucleotide
ccagtaactggttaaggacagtgtggcaac

SEQ ID NO: 200236 - DNA, 30 bp, Artificial Sequence
  Synthetic oligonucleotide
gatcacttcaaaataggcagaagctgcaac

SEQ ID NO: 200237 - DNA, 30 bp, Artificial Sequence
  Synthetic oligonucleotide
cgatcaaatagcttaaagataacgtgcaac

SEQ ID NO: 200238 - DNA, 30 bp, Artificial Sequence
  Synthetic oligonucleotide
ttcccaggtatattagcagaatcgtgcaac

SEQ ID NO: 200239 - DNA, 30 bp, Artificial Sequence
  Synthetic oligonucleotide
acggtcgaccaagtagtggatgggtgcaac

SEQ ID NO: 200240 - DNA, 30 bp, Artificial Sequence
  Synthetic oligonucleotide
tccttacgatagtagaaaggatggtgcaac

SEQ ID NO: 200241 - DNA, 30 bp, Artificial Sequence
  Synthetic oligonucleotide
tcaacacactgcattgaaaggttgtgcaac

SEQ ID NO: 200242 - DNA, 30 bp, Artificial Sequence
  Synthetic oligonucleotide
tagtgagttattccgcgatagcaaatcaac

SEQ ID NO: 200243 - DNA, 30 bp, Artificial Sequence
  Synthetic oligonucleotide
tcaagctacattccagctttgtaaatcaac

SEQ ID NO: 200244 - DNA, 30 bp, Artificial Sequence
  Synthetic oligonucleotide
tctttcgggcccgtactccccagcatcaac

SEQ ID NO: 200245 - DNA, 30 bp, Artificial Sequence
  Synthetic oligonucleotide
cattatgggagagacagcaacatcatcaac

SEQ ID NO: 200246 - DNA, 30 bp, Artificial Sequence
  Synthetic oligonucleotide
acacttcaaaacgctacttgcaggatcaac

SEQ ID NO: 200247 - DNA, 30 bp, Artificial Sequence
  Synthetic oligonucleotide
ctggaaatgtaaagtccagagactctcaac

SEQ ID NO: 200248 - DNA, 30 bp, Artificial Sequence
  Synthetic oligonucleotide
tatggtttaaatctaacgttgcaagtcaac

SEQ ID NO: 200249 - DNA, 30 bp, Artificial Sequence
  Synthetic oligonucleotide
cagacggagtacactactcgtgtagtcaac

SEQ ID NO: 200250 - DNA, 30 bp, Artificial Sequence
  Synthetic oligonucleotide
cccgagagagaacaggtgcaacccgtcaac

SEQ ID NO: 200251 - DNA, 30 bp, Artificial Sequence
  Synthetic oligonucleotide
tagccgcggatccataacgagtcggtcaac

SEQ ID NO: 200252 - DNA, 30 bp, Artificial Sequence
  Synthetic oligonucleotide
gtagcggaccagaggcgaactcatgtcaac

SEQ ID NO: 200253 - DNA, 30 bp, Artificial Sequence
  Synthetic oligonucleotide
tgctggacgtttgggaccttatatgtcaac

SEQ ID NO: 200254 - DNA, 30 bp, Artificial Sequence
  Synthetic oligonucleotide
agatgtggggctatgcattcggaattcaac

SEQ ID NO: 200255 - DNA, 30 bp, Artificial Sequence
  Synthetic oligonucleotide
ttgccaacatcaattcggagtgctttcaac

SEQ ID NO: 200256 - DNA, 30 bp, Artificial Sequence
  Synthetic oligonucleotide
gtgccaataagacgagctttgtgaaagaac

SEQ ID NO: 200257 - DNA, 30 bp, Artificial Sequence
  Synthetic oligonucleotide
ggtatggtgctgtatcggaaactaaagaac

SEQ ID NO: 200258 - DNA, 30 bp, Artificial Sequence
  Synthetic oligonucleotide
ttagctcttagacggagtagcagcaagaac

SEQ ID NO: 200259 - DNA, 30 bp, Artificial Sequence
  Synthetic oligonucleotide
gggctagtttttactaagtggtctaagaac

SEQ ID NO: 200260 - DNA, 30 bp, Artificial Sequence
  Synthetic oligonucleotide
caaagccgggctccttcacactgtaagaac

SEQ ID NO: 200261 - DNA, 30 bp, Artificial Sequence
  Synthetic oligonucleotide
gtggtacgaggcgcgtcgggaggacagaac

SEQ ID NO: 200262 - DNA, 30 bp, Artificial Sequence
  Synthetic oligonucleotide
ctggacactacgagcatcgcgcaccagaac

SEQ ID NO: 200263 - DNA, 30 bp, Artificial Sequence
  Synthetic oligonucleotide
acgaaggcacggcgcagcaaggcccagaac

SEQ ID NO: 200264 - DNA, 30 bp, Artificial Sequence
  Synthetic oligonucleotide
cttcggcacgggcccgttacctggcagaac

SEQ ID NO: 200265 - DNA, 30 bp, Artificial Sequence
  Synthetic oligonucleotide
taagaaatgcgcaaccttgaacctcagaac

SEQ ID NO: 200266 - DNA, 30 bp, Artificial Sequence
  Synthetic oligonucleotide
gagtgaagtgtcactacacatcgagagaac

SEQ ID NO: 200267 - DNA, 30 bp, Artificial Sequence
  Synthetic oligonucleotide
agaggggaaggtaccgcctggggagagaac

SEQ ID NO: 200268 - DNA, 30 bp, Artificial Sequence
  Synthetic oligonucleotide
aggaatgaactacgtgcgagatcggagaac

SEQ ID NO: 200269 - DNA, 30 bp, Artificial Sequence
  Synthetic oligonucleotide
tacgaacacgctatggtcgttgctgagaac

SEQ ID NO: 200270 - DNA, 30 bp, Artificial Sequence
  Synthetic oligonucleotide
ctgcactaagtcttgagcagacgtgagaac

SEQ ID NO: 200271 - DNA, 30 bp, Artificial Sequence
  Synthetic oligonucleotide
ttgagcgtctgggaagctgacggatagaac

SEQ ID NO: 200272 - DNA, 30 bp, Artificial Sequence
  Synthetic oligonucleotide
agggaactttagcaacaaaatctctagaac

SEQ ID NO: 200273 - DNA, 30 bp, Artificial Sequence
  Synthetic oligonucleotide
ggtgccaggttgaggatgaccaggtagaac

SEQ ID NO: 200274 - DNA, 30 bp, Artificial Sequence
  Synthetic oligonucleotide
ccctttgctggtaccttcaaactgtagaac

SEQ ID NO: 200275 - DNA, 30 bp, Artificial Sequence
  Synthetic oligonucleotide
cagctcgtggaaatggagtcttcaacgaac

SEQ ID NO: 200276 - DNA, 30 bp, Artificial Sequence
  Synthetic oligonucleotide
gcgcaccgtcattcctagaggttaacgaac

SEQ ID NO: 200277 - DNA, 30 bp, Artificial Sequence
  Synthetic oligonucleotide
acgtggtactccatcccacctcggacgaac

SEQ ID NO: 200278 - DNA, 30 bp, Artificial Sequence
  Synthetic oligonucleotide
gaggctaaacccacgcaaaggtttacgaac

SEQ ID NO: 200279 - DNA, 30 bp, Artificial Sequence
  Synthetic oligonucleotide
gttgaatttcgggtacgaccgccaccgaac

SEQ ID NO: 200280 - DNA, 30 bp, Artificial Sequence
  Synthetic oligonucleotide
cgagcagcttgttggcgcctccacccgaac

SEQ ID NO: 200281 - DNA, 30 bp, Artificial Sequence
  Synthetic oligonucleotide
ggaaccatatatgcttttcgtgggccgaac

SEQ ID NO: 200282 - DNA, 30 bp, Artificial Sequence
  Synthetic oligonucleotide
tcatcgtgtttcactggagtggaagcgaac

SEQ ID NO: 200283 - DNA, 30 bp, Artificial Sequence
  Synthetic oligonucleotide
ctgatagtggagacatgtatgtcagcgaac

SEQ ID NO: 200284 - DNA, 30 bp, Artificial Sequence
  Synthetic oligonucleotide
gagaacctcaaatagtgggccgtagcgaac

SEQ ID NO: 200285 - DNA, 30 bp, Artificial Sequence
  Synthetic oligonucleotide
ccgcgtgagacgaagggagtctgtgcgaac

SEQ ID NO: 200286 - DNA, 30 bp, Artificial Sequence
  Synthetic oligonucleotide
ttctccgccacttaaaacaccagatcgaac

SEQ ID NO: 200287 - DNA, 30 bp, Artificial Sequence
  Synthetic oligonucleotide
tttaactgctgaggtcaccactaaaggaac

SEQ ID NO: 200288 - DNA, 31 bp, Artificial Sequence
  Synthetic oligonucleotide
catgacgtggatcagggattacagaaggaac

SEQ ID NO: 200289 - DNA, 30 bp, Artificial Sequence
  Synthetic oligonucleotide
atcgttgtatcagtttgcgatcgaaggaac

SEQ ID NO: 200290 - DNA, 30 bp, Artificial Sequence
  Synthetic oligonucleotide
cctgaataggggcgcccagccttaaggaac

SEQ ID NO: 200291 - DNA, 30 bp, Artificial Sequence
  Synthetic oligonucleotide
gccaggaatctgaactactacagcaggaac

SEQ ID NO: 200292 - DNA, 30 bp, Artificial Sequence
  Synthetic oligonucleotide
ctccaaccgcctatggtctcgaaacggaac

SEQ ID NO: 200293 - DNA, 30 bp, Artificial Sequence
  Synthetic oligonucleotide
tttgtggaggagaattgtggagcacggaac

SEQ ID NO: 200294 - DNA, 30 bp, Artificial Sequence
  Synthetic oligonucleotide
acctataagaaacgtagatcattccggaac

SEQ ID NO: 200295 - DNA, 30 bp, Artificial Sequence
  Synthetic oligonucleotide
ggtcccacaagagccatgtaacagcggaac

SEQ ID NO: 200296 - DNA, 30 bp, Artificial Sequence
  Synthetic oligonucleotide
gaaagtctgaagacccaacctccgcggaac

SEQ ID NO: 200297 - DNA, 30 bp, Artificial Sequence
  Synthetic oligonucleotide
ctgtgcatgtggagtgagaatgggcggaac

SEQ ID NO: 200298 - DNA, 30 bp, Artificial Sequence
  Synthetic oligonucleotide
agggtatatcacaaggaagagattcggaac

SEQ ID NO: 200299 - DNA, 30 bp, Artificial Sequence
  Synthetic oligonucleotide
ggagtagtcatccaatccacgctcgggaac

SEQ ID NO: 200300 - DNA, 30 bp, Artificial Sequence
  Synthetic oligonucleotide
tgtaaaccgggtacccctgatcaggggaac

SEQ ID NO: 200301 - DNA, 30 bp, Artificial Sequence
  Synthetic oligonucleotide
gacgcatgtatgatccgctgtcaggggaac

SEQ ID NO: 200302 - DNA, 30 bp, Artificial Sequence
  Synthetic oligonucleotide
gcgcgaagctcaaggggtgtacctgggaac

SEQ ID NO: 200303 - DNA, 30 bp, Artificial Sequence
  Synthetic oligonucleotide
tccagacagagaactcttggggagtggaac

SEQ ID NO: 200304 - DNA, 30 bp, Artificial Sequence
  Synthetic oligonucleotide
ccgttgacgtaaagggtttccacgtggaac

SEQ ID NO: 200305 - DNA, 30 bp, Artificial Sequence
  Synthetic oligonucleotide
atctccaagccgtgggagatttggtggaac

SEQ ID NO: 200306 - DNA, 30 bp, Artificial Sequence
  Synthetic oligonucleotide
acacgcaggtaacgataccagatgtggaac

SEQ ID NO: 200307 - DNA, 30 bp, Artificial Sequence
  Synthetic oligonucleotide
aattactgccgacatatctaatattggaac

SEQ ID NO: 200308 - DNA, 30 bp, Artificial Sequence
  Synthetic oligonucleotide
tggcaagtggatgtataggaactttggaac

SEQ ID NO: 200309 - DNA, 30 bp, Artificial Sequence
  Synthetic oligonucleotide
gagggtaaaagatggcgacccttttggaac

SEQ ID NO: 200310 - DNA, 30 bp, Artificial Sequence
  Synthetic oligonucleotide
ttggtgttcggtgaaacacgctgaatgaac

SEQ ID NO: 200311 - DNA, 30 bp, Artificial Sequence
  Synthetic oligonucleotide
ccaggttgcaagctgccggcggagatgaac

SEQ ID NO: 200312 - DNA, 30 bp, Artificial Sequence
  Synthetic oligonucleotide
gctaggtttccctttcacttggatatgaac

SEQ ID NO: 200313 - DNA, 30 bp, Artificial Sequence
  Synthetic oligonucleotide
cccacttgctgctcgaccacgattatgaac

SEQ ID NO: 200314 - DNA, 31 bp, Artificial Sequence
  Synthetic oligonucleotide
cgtgagcttgcgttcatgggaatcactgaac

SEQ ID NO: 200315 - DNA, 30 bp, Artificial Sequence
  Synthetic oligonucleotide
aatcgacaagtttaaacccgcgtagtgaac

SEQ ID NO: 200316 - DNA, 30 bp, Artificial Sequence
  Synthetic oligonucleotide
atacaccttccaagtggttttgtagtgaac

SEQ ID NO: 200317 - DNA, 30 bp, Artificial Sequence
  Synthetic oligonucleotide
ctgtccagtttgtttgaaacgcccgtgaac

SEQ ID NO: 200318 - DNA, 30 bp, Artificial Sequence
  Synthetic oligonucleotide
aggtcgtcaggggcacgttgaaatgtgaac

SEQ ID NO: 200319 - DNA, 30 bp, Artificial Sequence
  Synthetic oligonucleotide
acctaagtggattaaatatcctctgtgaac

SEQ ID NO: 200320 - DNA, 30 bp, Artificial Sequence
  Synthetic oligonucleotide
caggtgataatatccctctccgcattgaac

SEQ ID NO: 200321 - DNA, 30 bp, Artificial Sequence
  Synthetic oligonucleotide
cggataagggtataaaggtgggccttgaac

SEQ ID NO: 200322 - DNA, 30 bp, Artificial Sequence
  Synthetic oligonucleotide
tacccatgacccacgcgagagtatttgaac

SEQ ID NO: 200323 - DNA, 30 bp, Artificial Sequence
  Synthetic oligonucleotide
cggcttccggcttttagtacggcaaataac

SEQ ID NO: 200324 - DNA, 30 bp, Artificial Sequence
  Synthetic oligonucleotide
cacgctgacgataacgtcatcgagaataac

SEQ ID NO: 200325 - DNA, 30 bp, Artificial Sequence
  Synthetic oligonucleotide
cactcctccataggtttactatgtaataac

SEQ ID NO: 200326 - DNA, 30 bp, Artificial Sequence
  Synthetic oligonucleotide
gagacttggttaaacactggagcccataac

SEQ ID NO: 200327 - DNA, 30 bp, Artificial Sequence
  Synthetic oligonucleotide
tgaaacactatgactccaacactccataac

SEQ ID NO: 200328 - DNA, 30 bp, Artificial Sequence
  Synthetic oligonucleotide
aaataaggtgtcgttcaatgcacgcataac

SEQ ID NO: 200329 - DNA, 30 bp, Artificial Sequence
  Synthetic oligonucleotide
tcatcgttgactggagttctgtggcataac

SEQ ID NO: 200330 - DNA, 31 bp, Artificial Sequence
  Synthetic oligonucleotide
tcggacgagctacgttaggccggatcataac

SEQ ID NO: 200331 - DNA, 30 bp, Artificial Sequence
  Synthetic oligonucleotide
acactgatggactagtcccacccagataac

SEQ ID NO: 200332 - DNA, 30 bp, Artificial Sequence
  Synthetic oligonucleotide
tgccaagagagtactctgtaacctgataac

SEQ ID NO: 200333 - DNA, 30 bp, Artificial Sequence
  Synthetic oligonucleotide
ttccaagccgacgtttataactaatataac

SEQ ID NO: 200334 - DNA, 30 bp, Artificial Sequence
  Synthetic oligonucleotide
acagggtgaatggacgaccgacgatataac

SEQ ID NO: 200335 - DNA, 30 bp, Artificial Sequence
  Synthetic oligonucleotide
gtcgcgactttgggagcttctgagtataac

SEQ ID NO: 200336 - DNA, 30 bp, Artificial Sequence
  Synthetic oligonucleotide
agtgttcattaaaaaggccaagggtataac

SEQ ID NO: 200337 - DNA, 30 bp, Artificial Sequence
  Synthetic oligonucleotide
accacgagacgtgggatggacatgtataac

SEQ ID NO: 200338 - DNA, 30 bp, Artificial Sequence
  Synthetic oligonucleotide
catatgcatttttatcggtagcattataac

SEQ ID NO: 200339 - DNA, 30 bp, Artificial Sequence
  Synthetic oligonucleotide
gtcgaaacatcaccaatatcgtcttataac

SEQ ID NO: 200340 - DNA, 30 bp, Artificial Sequence
  Synthetic oligonucleotide
aactcgaatatagacacgctaatttataac

SEQ ID NO: 200341 - DNA, 30 bp, Artificial Sequence
  Synthetic oligonucleotide
tctcgagcatcgtgatcagtacaaactaac

SEQ ID NO: 200342 - DNA, 30 bp, Artificial Sequence
  Synthetic oligonucleotide
tagaagagacccccctccgtcataactaac

SEQ ID NO: 200343 - DNA, 30 bp, Artificial Sequence
  Synthetic oligonucleotide
gaatggaaccagacaatgtaatttactaac

SEQ ID NO: 200344 - DNA, 30 bp, Artificial Sequence
  Synthetic oligonucleotide
gtaaaggggataaaataatgcgaacctaac

SEQ ID NO: 200345 - DNA, 30 bp, Artificial Sequence
  Synthetic oligonucleotide
attgatgaatcatacttcgcgcgacctaac

SEQ ID NO: 200346 - DNA, 30 bp, Artificial Sequence
  Synthetic oligonucleotide
tcgatcgatatgcagtgcggctaccctaac

SEQ ID NO: 200347 - DNA, 30 bp, Artificial Sequence
  Synthetic oligonucleotide
gtgatttcttgagcacataagccccctaac

SEQ ID NO: 200348 - DNA, 30 bp, Artificial Sequence
  Synthetic oligonucleotide
ataacgagcaaatagcggaaatggcctaac

SEQ ID NO: 200349 - DNA, 30 bp, Artificial Sequence
  Synthetic oligonucleotide
aacactatgcttaaggtaaaaactcctaac

SEQ ID NO: 200350 - DNA, 30 bp, Artificial Sequence
  Synthetic oligonucleotide
aggcccatacgcggtgatgtttaagctaac

SEQ ID NO: 200351 - DNA, 30 bp, Artificial Sequence
  Synthetic oligonucleotide
acaggggaaggggggaccgctaacgctaac

SEQ ID NO: 200352 - DNA, 30 bp, Artificial Sequence
  Synthetic oligonucleotide
caacaggacttcttaggaagaggcgctaac

SEQ ID NO: 200353 - DNA, 30 bp, Artificial Sequence
  Synthetic oligonucleotide
ttccgcagtgatatcggggaggcatctaac

SEQ ID NO: 200354 - DNA, 30 bp, Artificial Sequence
  Synthetic oligonucleotide
taatggccgatctgcgcgtgcgtctctaac

SEQ ID NO: 200355 - DNA, 30 bp, Artificial Sequence
  Synthetic oligonucleotide
gagatgaagcggaatgcttggttttctaac

SEQ ID NO: 200356 - DNA, 30 bp, Artificial Sequence
  Synthetic oligonucleotide
ccagttttaaggccgtctcaatccagtaac

SEQ ID NO: 200357 - DNA, 30 bp, Artificial Sequence
  Synthetic oligonucleotide
gcgaaggcatctcctcaggtccctagtaac

SEQ ID NO: 200358 - DNA, 30 bp, Artificial Sequence
  Synthetic oligonucleotide
gtgagtgaattagaaagagcaccccgtaac

SEQ ID NO: 200359 - DNA, 30 bp, Artificial Sequence
  Synthetic oligonucleotide
tgttagcatgcatatccgtaccggcgtaac

SEQ ID NO: 200360 - DNA, 30 bp, Artificial Sequence
  Synthetic oligonucleotide
gcactcagattatgagttagtcttcgtaac

SEQ ID NO: 200361 - DNA, 30 bp, Artificial Sequence
  Synthetic oligonucleotide
atcgcgtactaggaaacagcaataggtaac

SEQ ID NO: 200362 - DNA, 30 bp, Artificial Sequence
  Synthetic oligonucleotide
caaagacgagaaggcttccgtctcggtaac

SEQ ID NO: 200363 - DNA, 30 bp, Artificial Sequence
  Synthetic oligonucleotide
cctcccatgattgttatcaagcggggtaac

SEQ ID NO: 200364 - DNA, 30 bp, Artificial Sequence
  Synthetic oligonucleotide
gttaagtagaaagttttaactctgggtaac

SEQ ID NO: 200365 - DNA, 30 bp, Artificial Sequence
  Synthetic oligonucleotide
gactcgaacaaagtgtacttagtgggtaac

SEQ ID NO: 200366 - DNA, 30 bp, Artificial Sequence
  Synthetic oligonucleotide
agctacactcgtctggtgagtgtgggtaac

SEQ ID NO: 200367 - DNA, 30 bp, Artificial Sequence
  Synthetic oligonucleotide
tcgtgtactttcattatgtgtggatgtaac

SEQ ID NO: 200368 - DNA, 30 bp, Artificial Sequence
  Synthetic oligonucleotide
acaggctgaattttcgtgctttgatgtaac

SEQ ID NO: 200369 - DNA, 30 bp, Artificial Sequence
  Synthetic oligonucleotide
aagaaagtgacgtcagtgccgtactgtaac

SEQ ID NO: 200370 - DNA, 30 bp, Artificial Sequence
  Synthetic oligonucleotide
acatcatgcactgactgtctatcctgtaac

SEQ ID NO: 200371 - DNA, 30 bp, Artificial Sequence
  Synthetic oligonucleotide
ctcatagatatggaggtcatagtctgtaac

SEQ ID NO: 200372 - DNA, 30 bp, Artificial Sequence
  Synthetic oligonucleotide
catgttgtgctgctagacgttgtgtgtaac

SEQ ID NO: 200373 - DNA, 30 bp, Artificial Sequence
  Synthetic oligonucleotide
aaacaataccggatagtcaagttgtgtaac

SEQ ID NO: 200374 - DNA, 30 bp, Artificial Sequence
  Synthetic oligonucleotide
ctcgtgcaagctaatggtgctcattgtaac

SEQ ID NO: 200375 - DNA, 30 bp, Artificial Sequence
  Synthetic oligonucleotide
gctcagcagactcagagtcgttgaattaac

SEQ ID NO: 200376 - DNA, 30 bp, Artificial Sequence
  Synthetic oligonucleotide
tagacgtgccaagcgatagggaccattaac

SEQ ID NO: 200377 - DNA, 30 bp, Artificial Sequence
  Synthetic oligonucleotide
atctagcggctaggaggaggacatattaac

SEQ ID NO: 200378 - DNA, 30 bp, Artificial Sequence
  Synthetic oligonucleotide
gtacccacccagaagaagccatcgcttaac

SEQ ID NO: 200379 - DNA, 30 bp, Artificial Sequence
  Synthetic oligonucleotide
gcgaaatgggactaattcttggtgcttaac

SEQ ID NO: 200380 - DNA, 30 bp, Artificial Sequence
  Synthetic oligonucleotide
cgtgtatgccgtaaagttgcgtatcttaac

SEQ ID NO: 200381 - DNA, 30 bp, Artificial Sequence
  Synthetic oligonucleotide
gctttacaagagagtcggacgaacgttaac

SEQ ID NO: 200382 - DNA, 30 bp, Artificial Sequence
  Synthetic oligonucleotide
ccgcacgaagagcaggaaccattcgttaac

SEQ ID NO: 200383 - DNA, 30 bp, Artificial Sequence
  Synthetic oligonucleotide
gacgtgacgtagtgggcattagaggttaac

SEQ ID NO: 200384 - DNA, 30 bp, Artificial Sequence
  Synthetic oligonucleotide
cgcttataacaagtcgagcgcggggttaac

SEQ ID NO: 200385 - DNA, 30 bp, Artificial Sequence
  Synthetic oligonucleotide
tgacgctcatagtagagtggggcatttaac

SEQ ID NO: 200386 - DNA, 30 bp, Artificial Sequence
  Synthetic oligonucleotide
gcagataatctaaattatcacgtatttaac

SEQ ID NO: 200387 - DNA, 30 bp, Artificial Sequence
  Synthetic oligonucleotide
tacgatgtctgtggggaaggtgtatttaac

SEQ ID NO: 200388 - DNA, 30 bp, Artificial Sequence
  Synthetic oligonucleotide
tttagggcgatttcttgcattgaaaaacac

SEQ ID NO: 200389 - DNA, 30 bp, Artificial Sequence
  Synthetic oligonucleotide
cccccccgtatgctgtcgatacctaaacac

SEQ ID NO: 200390 - DNA, 30 bp, Artificial Sequence
  Synthetic oligonucleotide
gtgaataagtcgtgagcaaccgctaaacac

SEQ ID NO: 200391 - DNA, 29 bp, Artificial Sequence
  Synthetic oligonucleotide
agtcggatgtacatgtattgcttaaacac

SEQ ID NO: 200392 - DNA, 30 bp, Artificial Sequence
  Synthetic oligonucleotide
actgctcacaatccaaacaagcaacaacac

SEQ ID NO: 200393 - DNA, 30 bp, Artificial Sequence
  Synthetic oligonucleotide
aagacatgggcatcggcggtgttacaacac

SEQ ID NO: 200394 - DNA, 30 bp, Artificial Sequence
  Synthetic oligonucleotide
ttcgattagcgcgtgcgttaacctcaacac

SEQ ID NO: 200395 - DNA, 30 bp, Artificial Sequence
  Synthetic oligonucleotide
ccaatctggcgatagcggggcgctcaacac

SEQ ID NO: 200396 - DNA, 30 bp, Artificial Sequence
  Synthetic oligonucleotide
tgtgcgcacaccccaagtgaaagtcaacac

SEQ ID NO: 200397 - DNA, 30 bp, Artificial Sequence
  Synthetic oligonucleotide
tggtcagcaagaatcgacgtcatagaacac

SEQ ID NO: 200398 - DNA, 30 bp, Artificial Sequence
  Synthetic oligonucleotide
ctagggggcgtaggggcagccgtagaacac

SEQ ID NO: 200399 - DNA, 30 bp, Artificial Sequence
  Synthetic oligonucleotide
agggggactacaaccgggaacccggaacac

SEQ ID NO: 200400 - DNA, 30 bp, Artificial Sequence
  Synthetic oligonucleotide
cccattcgacattaccaaatgtatgaacac

SEQ ID NO: 200401 - DNA, 30 bp, Artificial Sequence
  Synthetic oligonucleotide
ggtatcgacaaacagcatcgttcataacac

SEQ ID NO: 200402 - DNA, 30 bp, Artificial Sequence
  Synthetic oligonucleotide
atttagagactgcaaatagctggctaacac

SEQ ID NO: 200403 - DNA, 30 bp, Artificial Sequence
  Synthetic oligonucleotide
ggcatcctgacgcctgaaagattctaacac

SEQ ID NO: 200404 - DNA, 30 bp, Artificial Sequence
  Synthetic oligonucleotide
gggtggttagtacaatcgattggcacacac

SEQ ID NO: 200405 - DNA, 30 bp, Artificial Sequence
  Synthetic oligonucleotide
gaaaggggtcaagggtcaaggggaccacac

SEQ ID NO: 200406 - DNA, 30 bp, Artificial Sequence
  Synthetic oligonucleotide
atagtgaaaggtaaacagcctgagccacac

SEQ ID NO: 200407 - DNA, 30 bp, Artificial Sequence
  Synthetic oligonucleotide
gttgggccgggtcttccacatagtccacac

SEQ ID NO: 200408 - DNA, 30 bp, Artificial Sequence
  Synthetic oligonucleotide
ttgtagttcccctccgaatcataagcacac

SEQ ID NO: 200409 - DNA, 30 bp, Artificial Sequence
  Synthetic oligonucleotide
tgcttaggctatcacataactgcagcacac

SEQ ID NO: 200410 - DNA, 30 bp, Artificial Sequence
  Synthetic oligonucleotide
tataggaaggttcgttttgtccgagcacac

SEQ ID NO: 200411 - DNA, 30 bp, Artificial Sequence
  Synthetic oligonucleotide
tgactgcacgagactcgattagtagcacac

SEQ ID NO: 200412 - DNA, 30 bp, Artificial Sequence
  Synthetic oligonucleotide
ttctgcaataatgtcaggtactaggcacac

SEQ ID NO: 200413 - DNA, 30 bp, Artificial Sequence
  Synthetic oligonucleotide
gctcgggaagtaaagataagccgctcacac

SEQ ID NO: 200414 - DNA, 30 bp, Artificial Sequence
  Synthetic oligonucleotide
atcatggttcgccacaagttagtgtcacac

SEQ ID NO: 200415 - DNA, 30 bp, Artificial Sequence
  Synthetic oligonucleotide
cttgacgagttgttaagcgaggaaagacac

SEQ ID NO: 200416 - DNA, 30 bp, Artificial Sequence
  Synthetic oligonucleotide
gaagcagcaggaatgggtttggtaagacac

SEQ ID NO: 200417 - DNA, 30 bp, Artificial Sequence
  Synthetic oligonucleotide
gccgtgcatgagtactaaagtttgagacac

SEQ ID NO: 200418 - DNA, 30 bp, Artificial Sequence
  Synthetic oligonucleotide
gggtaaaaacggatccacctcagtagacac

SEQ ID NO: 200419 - DNA, 30 bp, Artificial Sequence
  Synthetic oligonucleotide
atgtccggacttatataagccaggcgacac

SEQ ID NO: 200420 - DNA, 30 bp, Artificial Sequence
  Synthetic oligonucleotide
aattgcttaggcgagtttgctaggcgacac

SEQ ID NO: 200421 - DNA, 30 bp, Artificial Sequence
  Synthetic oligonucleotide
tacgagcggtacacttaaggatcaggacac

SEQ ID NO: 200422 - DNA, 30 bp, Artificial Sequence
  Synthetic oligonucleotide
ctcaaagtgtttattccatgtcgaggacac

SEQ ID NO: 200423 - DNA, 30 bp, Artificial Sequence
  Synthetic oligonucleotide
ctcgcaggggagacatcgagagccggacac

SEQ ID NO: 200424 - DNA, 30 bp, Artificial Sequence
  Synthetic oligonucleotide
cctgagtggtgcacgaagaagagcggacac

SEQ ID NO: 200425 - DNA, 30 bp, Artificial Sequence
  Synthetic oligonucleotide
aaagggatttagcgtctcggtctgggacac

SEQ ID NO: 200426 - DNA, 30 bp, Artificial Sequence
  Synthetic oligonucleotide
cggcccagaggatactcaaatagatgacac

SEQ ID NO: 200427 - DNA, 30 bp, Artificial Sequence
  Synthetic oligonucleotide
ggcaagacgtatagccggctcatatgacac

SEQ ID NO: 200428 - DNA, 30 bp, Artificial Sequence
  Synthetic oligonucleotide
cgtctgttcaggaaccatggctactgacac

SEQ ID NO: 200429 - DNA, 30 bp, Artificial Sequence
  Synthetic oligonucleotide
gacacatgctgtgggaggtagccgtgacac

SEQ ID NO: 200430 - DNA, 30 bp, Artificial Sequence
  Synthetic oligonucleotide
gctgtcacagcctggctcaaaacaatacac

SEQ ID NO: 200431 - DNA, 30 bp, Artificial Sequence
  Synthetic oligonucleotide
gcggggtaagatcaacgacacccgatacac

SEQ ID NO: 200432 - DNA, 30 bp, Artificial Sequence
  Synthetic oligonucleotide
ccgattttgcccctttccgtcacactacac

SEQ ID NO: 200433 - DNA, 30 bp, Artificial Sequence
  Synthetic oligonucleotide
agcgtggcttaagagtgagggtacctacac

SEQ ID NO: 200434 - DNA, 30 bp, Artificial Sequence
  Synthetic oligonucleotide
ccagatcttggtgcccgttgattcctacac

SEQ ID NO: 200435 - DNA, 30 bp, Artificial Sequence
  Synthetic oligonucleotide
ctgaactcatgcgtagggatcatgctacac

SEQ ID NO: 200436 - DNA, 30 bp, Artificial Sequence
  Synthetic oligonucleotide
tcccgaacaataagagtcacatctctacac

SEQ ID NO: 200437 - DNA, 30 bp, Artificial Sequence
  Synthetic oligonucleotide
gctaactcaaccagatctcgcgttctacac

SEQ ID NO: 200438 - DNA, 30 bp, Artificial Sequence
  Synthetic oligonucleotide
ctacgattaaatcaggtgacctgagtacac

SEQ ID NO: 200439 - DNA, 30 bp, Artificial Sequence
  Synthetic oligonucleotide
tgtgataacaatgccagcacgggcgtacac

SEQ ID NO: 200440 - DNA, 30 bp, Artificial Sequence
  Synthetic oligonucleotide
cgcactcgaacactcacaccttgggtacac

SEQ ID NO: 200441 - DNA, 30 bp, Artificial Sequence
  Synthetic oligonucleotide
actgaatcgtaaatacgatggcagttacac

SEQ ID NO: 200442 - DNA, 30 bp, Artificial Sequence
  Synthetic oligonucleotide
ggccgtggcaccttaacaggtccgttacac

SEQ ID NO: 200443 - DNA, 30 bp, Artificial Sequence
  Synthetic oligonucleotide
gatggggcctgacacatgtcttcgttacac

SEQ ID NO: 200444 - DNA, 30 bp, Artificial Sequence
  Synthetic oligonucleotide
caccgtgacaattatagcacccgtttacac

SEQ ID NO: 200445 - DNA, 31 bp, Artificial Sequence
  Synthetic oligonucleotide
acggttaaataaatgctgcgtgcgaaaccac

SEQ ID NO: 200446 - DNA, 30 bp, Artificial Sequence
  Synthetic oligonucleotide
aggatacacagtcagcattgatgaaaccac

SEQ ID NO: 200447 - DNA, 30 bp, Artificial Sequence
  Synthetic oligonucleotide
ttcagttcggataagcgataccagaaccac

SEQ ID NO: 200448 - DNA, 30 bp, Artificial Sequence
  Synthetic oligonucleotide
atgtaagttcttggaatgggtctacaccac

SEQ ID NO: 200449 - DNA, 30 bp, Artificial Sequence
  Synthetic oligonucleotide
aaggaccctcatgaaaatgcgcatcaccac

SEQ ID NO: 200450 - DNA, 30 bp, Artificial Sequence
  Synthetic oligonucleotide
ggccacgggtaatataacaaggtagaccac

SEQ ID NO: 200451 - DNA, 30 bp, Artificial Sequence
  Synthetic oligonucleotide
caacccagagaggtgatatgagaataccac

SEQ ID NO: 200452 - DNA, 25 bp, Artificial Sequence
  Synthetic oligonucleotide
acttacttggcttatgagcacccac

SEQ ID NO: 200453 - DNA, 30 bp, Artificial Sequence
  Synthetic oligonucleotide
atgcattgttctgtcaccatgttcacccac

SEQ ID NO: 200454 - DNA, 30 bp, Artificial Sequence
  Synthetic oligonucleotide
aacgcgccaacagcgctctatggtacccac

SEQ ID NO: 200455 - DNA, 30 bp, Artificial Sequence
  Synthetic oligonucleotide
ttgaacctcattaagaggatacacccccac

SEQ ID NO: 200456 - DNA, 30 bp, Artificial Sequence
  Synthetic oligonucleotide
acgagtttgctgtaacatcgggttccccac

SEQ ID NO: 200457 - DNA, 30 bp, Artificial Sequence
  Synthetic oligonucleotide
gacccactgtagtgtgatcaagcggcccac

SEQ ID NO: 200458 - DNA, 31 bp, Artificial Sequence
  Synthetic oligonucleotide
cagtatacgagagctacatcagaaatcccac

SEQ ID NO: 200459 - DNA, 30 bp, Artificial Sequence
  Synthetic oligonucleotide
gactgtcaattaagcggatacaaaagccac

SEQ ID NO: 200460 - DNA, 30 bp, Artificial Sequence
  Synthetic oligonucleotide
caagacaattatgcaagcggtgtaagccac

SEQ ID NO: 200461 - DNA, 30 bp, Artificial Sequence
  Synthetic oligonucleotide
ggaggaccatgggcggaatcatacagccac

SEQ ID NO: 200462 - DNA, 30 bp, Artificial Sequence
  Synthetic oligonucleotide
atgtgttggcattgttcaacgggacgccac

SEQ ID NO: 200463 - DNA, 30 bp, Artificial Sequence
  Synthetic oligonucleotide
agagtcgtcagaactgaaagacgccgccac

SEQ ID NO: 200464 - DNA, 30 bp, Artificial Sequence
  Synthetic oligonucleotide
acaaggtctaccgatgacaatatccgccac

SEQ ID NO: 200465 - DNA, 30 bp, Artificial Sequence
  Synthetic oligonucleotide
gtaataggggtatgtgcggtaccgcgccac

SEQ ID NO: 200466 - DNA, 30 bp, Artificial Sequence
  Synthetic oligonucleotide
acacatagagcctcgccgttaaggcgccac

SEQ ID NO: 200467 - DNA, 30 bp, Artificial Sequence
  Synthetic oligonucleotide
aggtgcctgtagttccaacgggcaggccac

SEQ ID NO: 200468 - DNA, 30 bp, Artificial Sequence
  Synthetic oligonucleotide
aggtgcttcttcttgggatccagaggccac

SEQ ID NO: 200469 - DNA, 30 bp, Artificial Sequence
  Synthetic oligonucleotide
gcattaccacggtccatgatttgaggccac

SEQ ID NO: 200470 - DNA, 30 bp, Artificial Sequence
  Synthetic oligonucleotide
gtggtcccgggagtacagtatgctggccac

SEQ ID NO: 200471 - DNA, 30 bp, Artificial Sequence
  Synthetic oligonucleotide
ggctaggcagaaggtacgcactgatgccac

SEQ ID NO: 200472 - DNA, 30 bp, Artificial Sequence
  Synthetic oligonucleotide
gtcgtgttatgacgacgcgtgtcctgccac

SEQ ID NO: 200473 - DNA, 30 bp, Artificial Sequence
  Synthetic oligonucleotide
tccaagagaggtggacaatttctttgccac

SEQ ID NO: 200474 - DNA, 30 bp, Artificial Sequence
  Synthetic oligonucleotide
ctaacggggttagtgatacggacgatccac

SEQ ID NO: 200475 - DNA, 30 bp, Artificial Sequence
  Synthetic oligonucleotide
catgcgaattccacactgtcaccactccac

SEQ ID NO: 200476 - DNA, 30 bp, Artificial Sequence
  Synthetic oligonucleotide
cctgaagatgggattctttcttcactccac

SEQ ID NO: 200477 - DNA, 30 bp, Artificial Sequence
  Synthetic oligonucleotide
gggttttactaaaccgggagaaagctccac

SEQ ID NO: 200478 - DNA, 30 bp, Artificial Sequence
  Synthetic oligonucleotide
tgtctgatggggcactgctactcgctccac

SEQ ID NO: 200479 - DNA, 30 bp, Artificial Sequence
  Synthetic oligonucleotide
gacgtctaacactgcagatagaaagtccac

SEQ ID NO: 200480 - DNA, 30 bp, Artificial Sequence
  Synthetic oligonucleotide
tcaattgatagagcaagtaccagagtccac

SEQ ID NO: 200481 - DNA, 30 bp, Artificial Sequence
  Synthetic oligonucleotide
tccccggaatagctcattgcgcgcgtccac

SEQ ID NO: 200482 - DNA, 30 bp, Artificial Sequence
  Synthetic oligonucleotide
gctggatatactaaagtttggtatgtccac

SEQ ID NO: 200483 - DNA, 30 bp, Artificial Sequence
  Synthetic oligonucleotide
aagtatccaggatagataatacctgtccac

SEQ ID NO: 200484 - DNA, 30 bp, Artificial Sequence
  Synthetic oligonucleotide
cggcttaggttcttgtcaggcggtgtccac

SEQ ID NO: 200485 - DNA, 30 bp, Artificial Sequence
  Synthetic oligonucleotide
acgtccgcgtacctgaggtaagcattccac

SEQ ID NO: 200486 - DNA, 30 bp, Artificial Sequence
  Synthetic oligonucleotide
tgtggcttcaagtgttcgtcaaccttccac

SEQ ID NO: 200487 - DNA, 30 bp, Artificial Sequence
  Synthetic oligonucleotide
acaggatagtagggtgcccttacaaagcac

SEQ ID NO: 200488 - DNA, 30 bp, Artificial Sequence
  Synthetic oligonucleotide
ggttactcttatcctgccagtagaaagcac

SEQ ID NO: 200489 - DNA, 30 bp, Artificial Sequence
  Synthetic oligonucleotide
taccaaagtgttctagtcacacacaagcac

SEQ ID NO: 200490 - DNA, 30 bp, Artificial Sequence
  Synthetic oligonucleotide
atgaactagatgaacgacggatagaagcac

SEQ ID NO: 200491 - DNA, 30 bp, Artificial Sequence
  Synthetic oligonucleotide
acttggtcatatgatcattcttagaagcac

SEQ ID NO: 200492 - DNA, 30 bp, Artificial Sequence
  Synthetic oligonucleotide
ccgttggggcttactggagactataagcac

SEQ ID NO: 200493 - DNA, 30 bp, Artificial Sequence
  Synthetic oligonucleotide
tagtgcgctttgtatcctggtactaagcac

SEQ ID NO: 200494 - DNA, 30 bp, Artificial Sequence
  Synthetic oligonucleotide
cacgaacacacccctccacgacttaagcac

SEQ ID NO: 200495 - DNA, 30 bp, Artificial Sequence
  Synthetic oligonucleotide
gaggttcgtgaatcagtagcggaccagcac

SEQ ID NO: 200496 - DNA, 30 bp, Artificial Sequence
  Synthetic oligonucleotide
agggcgcggctaagattttccatgcagcac

SEQ ID NO: 200497 - DNA, 30 bp, Artificial Sequence
  Synthetic oligonucleotide
tcgggctaatagcattgcccactggagcac

SEQ ID NO: 200498 - DNA, 30 bp, Artificial Sequence
  Synthetic oligonucleotide
cgttggtgagcttgtacaggagagtagcac

SEQ ID NO: 200499 - DNA, 31 bp, Artificial Sequence
  Synthetic oligonucleotide
ataattccggtgtaacacgtctaaaacgcac

SEQ ID NO: 200500 - DNA, 30 bp, Artificial Sequence
  Synthetic oligonucleotide
gggatggtgtagcgtcgtgactcaacgcac

SEQ ID NO: 200501 - DNA, 30 bp, Artificial Sequence
  Synthetic oligonucleotide
aaagggcttgaatgtgggacggacacgcac

SEQ ID NO: 200502 - DNA, 30 bp, Artificial Sequence
  Synthetic oligonucleotide
accagcaaataactaagttacaccacgcac

SEQ ID NO: 200503 - DNA, 30 bp, Artificial Sequence
  Synthetic oligonucleotide
attccggcgactcaagacacttgtccgcac

SEQ ID NO: 200504 - DNA, 30 bp, Artificial Sequence
  Synthetic oligonucleotide
cgcgtgagtacgcactccagtattccgcac

SEQ ID NO: 200505 - DNA, 30 bp, Artificial Sequence
  Synthetic oligonucleotide
cttcgccggattcttacgggggttccgcac

SEQ ID NO: 200506 - DNA, 30 bp, Artificial Sequence
  Synthetic oligonucleotide
gctcacgggtaagaaaaaacggccgcgcac

SEQ ID NO: 200507 - DNA, 30 bp, Artificial Sequence
  Synthetic oligonucleotide
agttcggtcagagtacaaggctccgcgcac

SEQ ID NO: 200508 - DNA, 30 bp, Artificial Sequence
  Synthetic oligonucleotide
cgaatcacgttctggtgtccagaggcgcac

SEQ ID NO: 200509 - DNA, 30 bp, Artificial Sequence
  Synthetic oligonucleotide
ggaattcgtacaattgctgtactggcgcac

SEQ ID NO: 200510 - DNA, 30 bp, Artificial Sequence
  Synthetic oligonucleotide
tgcagtgcaatacaataatgggatgcgcac

SEQ ID NO: 200511 - DNA, 30 bp, Artificial Sequence
  Synthetic oligonucleotide
tggagttgaaaaagcagagtgtatgcgcac

SEQ ID NO: 200512 - DNA, 30 bp, Artificial Sequence
  Synthetic oligonucleotide
cggtcgggctcctaaataaaggtatcgcac

SEQ ID NO: 200513 - DNA, 30 bp, Artificial Sequence
  Synthetic oligonucleotide
tgcctgccggaaaagggcttggcttcgcac

SEQ ID NO: 200514 - DNA, 30 bp, Artificial Sequence
  Synthetic oligonucleotide
agcaaaatgttcaaggtcgcgcgttcgcac

SEQ ID NO: 200515 - DNA, 30 bp, Artificial Sequence
  Synthetic oligonucleotide
aacagaatgagatccacacagtcaaggcac

SEQ ID NO: 200516 - DNA, 30 bp, Artificial Sequence
  Synthetic oligonucleotide
tcgtgatttcttcaataatgtcgaaggcac

SEQ ID NO: 200517 - DNA, 30 bp, Artificial Sequence
  Synthetic oligonucleotide
tgtatgaaaggaccaggggaatggaggcac

SEQ ID NO: 200518 - DNA, 30 bp, Artificial Sequence
  Synthetic oligonucleotide
tgcagggtctgtcttcttacgactaggcac

SEQ ID NO: 200519 - DNA, 30 bp, Artificial Sequence
  Synthetic oligonucleotide
tgtatagaaggggggataaggtctaggcac

SEQ ID NO: 200520 - DNA, 30 bp, Artificial Sequence
  Synthetic oligonucleotide
cccagcgagatagtgaaaaaccgacggcac

SEQ ID NO: 200521 - DNA, 30 bp, Artificial Sequence
  Synthetic oligonucleotide
gtcattagctcggtccgtatgggacggcac

SEQ ID NO: 200522 - DNA, 30 bp, Artificial Sequence
  Synthetic oligonucleotide
cgcaagattgacttagctcggtgtcggcac

SEQ ID NO: 200523 - DNA, 30 bp, Artificial Sequence
  Synthetic oligonucleotide
aaggaggccaatttctcaagaaaagggcac

SEQ ID NO: 200524 - DNA, 30 bp, Artificial Sequence
  Synthetic oligonucleotide
gatctgctacgaaatttagacccagggcac

SEQ ID NO: 200525 - DNA, 30 bp, Artificial Sequence
  Synthetic oligonucleotide
tatgttcgtaagggtgagtaaagagggcac

SEQ ID NO: 200526 - DNA, 30 bp, Artificial Sequence
  Synthetic oligonucleotide
atctcttaagttactcaagaggacgggcac

SEQ ID NO: 200527 - DNA, 30 bp, Artificial Sequence
  Synthetic oligonucleotide
tcgagcgtaactaatcctcgtgtggggcac

SEQ ID NO: 200528 - DNA, 30 bp, Artificial Sequence
  Synthetic oligonucleotide
cacgctacaaccgaattcatcgctgggcac

SEQ ID NO: 200529 - DNA, 30 bp, Artificial Sequence
  Synthetic oligonucleotide
tcgtggatagggaggtagttttcgtggcac

SEQ ID NO: 200530 - DNA, 30 bp, Artificial Sequence
  Synthetic oligonucleotide
acatttgtcacatacaattacatgtggcac

SEQ ID NO: 200531 - DNA, 30 bp, Artificial Sequence
  Synthetic oligonucleotide
actagtcacagcgacgatggcatgtggcac

SEQ ID NO: 200532 - DNA, 30 bp, Artificial Sequence
  Synthetic oligonucleotide
ggacgataagcttctcacccgttttggcac

SEQ ID NO: 200533 - DNA, 30 bp, Artificial Sequence
  Synthetic oligonucleotide
tgtttagtaacaataatattaataatgcac

SEQ ID NO: 200534 - DNA, 30 bp, Artificial Sequence
  Synthetic oligonucleotide
cgaacgacgataacttaaggacccatgcac

SEQ ID NO: 200535 - DNA, 30 bp, Artificial Sequence
  Synthetic oligonucleotide
tcgccaataagtaggaatctatccatgcac

SEQ ID NO: 200536 - DNA, 30 bp, Artificial Sequence
  Synthetic oligonucleotide
accgagcattcgcctataattttcatgcac

SEQ ID NO: 200537 - DNA, 30 bp, Artificial Sequence
  Synthetic oligonucleotide
aggctaatgacttcacagtggcatatgcac

SEQ ID NO: 200538 - DNA, 30 bp, Artificial Sequence
  Synthetic oligonucleotide
cttgctccaccattgtgggaccttctgcac

SEQ ID NO: 200539 - DNA, 30 bp, Artificial Sequence
  Synthetic oligonucleotide
agcaccaggctaagtcacggccatgtgcac

SEQ ID NO: 200540 - DNA, 30 bp, Artificial Sequence
  Synthetic oligonucleotide
gattcagaaaaatgccacatccgtgtgcac

SEQ ID NO: 200541 - DNA, 30 bp, Artificial Sequence
  Synthetic oligonucleotide
aaggagcgtacttccgttaaaggtgtgcac

SEQ ID NO: 200542 - DNA, 30 bp, Artificial Sequence
  Synthetic oligonucleotide
gtaccgtccaagaggtaagatcttgtgcac

SEQ ID NO: 200543 - DNA, 30 bp, Artificial Sequence
  Synthetic oligonucleotide
ggtacggatagaacttatagtggattgcac

SEQ ID NO: 200544 - DNA, 31 bp, Artificial Sequence
  Synthetic oligonucleotide
agtacagtaaggctgcctcccttgattgcac

SEQ ID NO: 200545 - DNA, 30 bp, Artificial Sequence
  Synthetic oligonucleotide
gcgaaagtgtaaacttgtcaaatcttgcac

SEQ ID NO: 200546 - DNA, 30 bp, Artificial Sequence
  Synthetic oligonucleotide
gactaaatgagttgtttctgctagttgcac

SEQ ID NO: 200547 - DNA, 30 bp, Artificial Sequence
  Synthetic oligonucleotide
atattaaatttgataaatcacgggttgcac

SEQ ID NO: 200548 - DNA, 30 bp, Artificial Sequence
  Synthetic oligonucleotide
tggttcatagcagaaggattgcgtttgcac

SEQ ID NO: 200549 - DNA, 30 bp, Artificial Sequence
  Synthetic oligonucleotide
tcatacaaccattgggcctgatacaatcac

SEQ ID NO: 200550 - DNA, 30 bp, Artificial Sequence
  Synthetic oligonucleotide
aagccacagggaaaatccgaaaagaatcac

SEQ ID NO: 200551 - DNA, 30 bp, Artificial Sequence
  Synthetic oligonucleotide
ccagtagattaaacgtgatcttagaatcac

SEQ ID NO: 200552 - DNA, 30 bp, Artificial Sequence
  Synthetic oligonucleotide
cctggagtcgttaaattaaatgcgaatcac

SEQ ID NO: 200553 - DNA, 30 bp, Artificial Sequence
  Synthetic oligonucleotide
atcataagtccctgtttatacgttaatcac

SEQ ID NO: 200554 - DNA, 30 bp, Artificial Sequence
  Synthetic oligonucleotide
cctcgtcattccggccttcttggacatcac

SEQ ID NO: 200555 - DNA, 30 bp, Artificial Sequence
  Synthetic oligonucleotide
gcagcctcagaaggactgtaatgcgatcac

SEQ ID NO: 200556 - DNA, 30 bp, Artificial Sequence
  Synthetic oligonucleotide
tgctgcgcatctctaggaccgtgcgatcac

SEQ ID NO: 200557 - DNA, 30 bp, Artificial Sequence
  Synthetic oligonucleotide
tgcgcgttttgagggggagaagtcgatcac

SEQ ID NO: 200558 - DNA, 30 bp, Artificial Sequence
  Synthetic oligonucleotide
ggcacgcagggccatcagcacgtcgatcac

SEQ ID NO: 200559 - DNA, 29 bp, Artificial Sequence
  Synthetic oligonucleotide
gcggtaccagttgaaaaggggtggatcac

SEQ ID NO: 200560 - DNA, 30 bp, Artificial Sequence
  Synthetic oligonucleotide
ttattgccgtagtcggtaaaattggatcac

SEQ ID NO: 200561 - DNA, 30 bp, Artificial Sequence
  Synthetic oligonucleotide
ctagaaatattgtgacgcctgcaatatcac

SEQ ID NO: 200562 - DNA, 30 bp, Artificial Sequence
  Synthetic oligonucleotide
gacgccaattctgtcggaggtacatatcac

SEQ ID NO: 200563 - DNA, 30 bp, Artificial Sequence
  Synthetic oligonucleotide
atagagtctcgaaaggtgaaacagtatcac

SEQ ID NO: 200564 - DNA, 30 bp, Artificial Sequence
  Synthetic oligonucleotide
ttctcgctctagagcattactgagtatcac

SEQ ID NO: 200565 - DNA, 30 bp, Artificial Sequence
  Synthetic oligonucleotide
gcttcatgcgcgcggtcatagacgtatcac

SEQ ID NO: 200566 - DNA, 30 bp, Artificial Sequence
  Synthetic oligonucleotide
aatgatcgagcaacgagaccgcattatcac

SEQ ID NO: 200567 - DNA, 30 bp, Artificial Sequence
  Synthetic oligonucleotide
tgggagattagctaatttcactattatcac

SEQ ID NO: 200568 - DNA, 30 bp, Artificial Sequence
  Synthetic oligonucleotide
agtgtaaacaccgtcgcctaggcttatcac

SEQ ID NO: 200569 - DNA, 30 bp, Artificial Sequence
  Synthetic oligonucleotide
gtttacttaaccgatggatcaatcactcac

SEQ ID NO: 200570 - DNA, 30 bp, Artificial Sequence
  Synthetic oligonucleotide
cacgtactcctatttctcgctttcactcac

SEQ ID NO: 200571 - DNA, 30 bp, Artificial Sequence
  Synthetic oligonucleotide
tggacatgaaggtgtcgtttaaggactcac

SEQ ID NO: 200572 - DNA, 30 bp, Artificial Sequence
  Synthetic oligonucleotide
accgtataggacttacgtgttcggactcac

SEQ ID NO: 200573 - DNA, 30 bp, Artificial Sequence
  Synthetic oligonucleotide
cgtgcaaggaacgacggcatccgacctcac

SEQ ID NO: 200574 - DNA, 30 bp, Artificial Sequence
  Synthetic oligonucleotide
tgaagtctaattaccacgctactacctcac

SEQ ID NO: 200575 - DNA, 30 bp, Artificial Sequence
  Synthetic oligonucleotide
gccggctgttaagaatcaggtaaccctcac

SEQ ID NO: 200576 - DNA, 30 bp, Artificial Sequence
  Synthetic oligonucleotide
gacttaacatcgatggataagtgccctcac

SEQ ID NO: 200577 - DNA, 30 bp, Artificial Sequence
  Synthetic oligonucleotide
ggggatagttccgtggcgtaagagcctcac

SEQ ID NO: 200578 - DNA, 30 bp, Artificial Sequence
  Synthetic oligonucleotide
cgcgtgtataggacggcaatataagctcac

SEQ ID NO: 200579 - DNA, 30 bp, Artificial Sequence
  Synthetic oligonucleotide
ctcggcaagtctaagaaactacgggctcac

SEQ ID NO: 200580 - DNA, 30 bp, Artificial Sequence
  Synthetic oligonucleotide
ttacgaattcatcacaacgtgcgggctcac

SEQ ID NO: 200581 - DNA, 30 bp, Artificial Sequence
  Synthetic oligonucleotide
cgacggacaacttgtccgttatgggctcac

SEQ ID NO: 200582 - DNA, 30 bp, Artificial Sequence
  Synthetic oligonucleotide
catagaagatgactagtacttgtatctcac

SEQ ID NO: 200583 - DNA, 30 bp, Artificial Sequence
  Synthetic oligonucleotide
ccggggatgttctccgtgcagttatctcac

SEQ ID NO: 200584 - DNA, 30 bp, Artificial Sequence
  Synthetic oligonucleotide
tatggagatgattatcgaactaaaagtcac

SEQ ID NO: 200585 - DNA, 30 bp, Artificial Sequence
  Synthetic oligonucleotide
tgcccagtgatggttgatgagggaagtcac

SEQ ID NO: 200586 - DNA, 30 bp, Artificial Sequence
  Synthetic oligonucleotide
gtcggtttgggaacgtacaggtgaagtcac

SEQ ID NO: 200587 - DNA, 30 bp, Artificial Sequence
  Synthetic oligonucleotide
cgcgaaagaaaccagcgagtctttagtcac

SEQ ID NO: 200588 - DNA, 30 bp, Artificial Sequence
  Synthetic oligonucleotide
ttccatggcattgtcgacatgtcaggtcac

SEQ ID NO: 200589 - DNA, 30 bp, Artificial Sequence
  Synthetic oligonucleotide
gaggataatcgcgaaggattggtcggtcac

SEQ ID NO: 200590 - DNA, 30 bp, Artificial Sequence
  Synthetic oligonucleotide
tgggcgctggggttcgtactgaatggtcac

SEQ ID NO: 200591 - DNA, 30 bp, Artificial Sequence
  Synthetic oligonucleotide
gattaaacttacagaccaaagcatggtcac

SEQ ID NO: 200592 - DNA, 30 bp, Artificial Sequence
  Synthetic oligonucleotide
cgcaattacaatggccgtttaccttgtcac

SEQ ID NO: 200593 - DNA, 30 bp, Artificial Sequence
  Synthetic oligonucleotide
taaccgtgatcagggacaacagtgattcac

SEQ ID NO: 200594 - DNA, 30 bp, Artificial Sequence
  Synthetic oligonucleotide
tcctaatatagcagatccgtcgtgattcac

SEQ ID NO: 200595 - DNA, 30 bp, Artificial Sequence
  Synthetic oligonucleotide
tcccaacaagggtatacgtgggatattcac

SEQ ID NO: 200596 - DNA, 30 bp, Artificial Sequence
  Synthetic oligonucleotide
cggtgtcagcgcacttaccatctccttcac

SEQ ID NO: 200597 - DNA, 30 bp, Artificial Sequence
  Synthetic oligonucleotide
tcccacaaattttgtgatgaaatgcttcac

SEQ ID NO: 200598 - DNA, 30 bp, Artificial Sequence
  Synthetic oligonucleotide
accacgcgcaagctaaaaccctaagttcac

SEQ ID NO: 200599 - DNA, 30 bp, Artificial Sequence
  Synthetic oligonucleotide
tagttgtcctctaggagttggagagttcac

SEQ ID NO: 200600 - DNA, 30 bp, Artificial Sequence
  Synthetic oligonucleotide
gcggatgaactatcagtgtttagagttcac

SEQ ID NO: 200601 - DNA, 30 bp, Artificial Sequence
  Synthetic oligonucleotide
tcgtcagatcgttcggcgcttaacgttcac

SEQ ID NO: 200602 - DNA, 30 bp, Artificial Sequence
  Synthetic oligonucleotide
catctcgtgaaggaaagttggcccgttcac

SEQ ID NO: 200603 - DNA, 30 bp, Artificial Sequence
  Synthetic oligonucleotide
ctcgtgcaacccgttgactgcgctgttcac

SEQ ID NO: 200604 - DNA, 30 bp, Artificial Sequence
  Synthetic oligonucleotide
gggtccgcgggcaagagagacaattttcac

SEQ ID NO: 200605 - DNA, 29 bp, Artificial Sequence
  Synthetic oligonucleotide
gatactaccacgtgtccatcagaaaagac

SEQ ID NO: 200606 - DNA, 30 bp, Artificial Sequence
  Synthetic oligonucleotide
tgctctaaagtggaatttacaaccaaagac

SEQ ID NO: 200607 - DNA, 30 bp, Artificial Sequence
  Synthetic oligonucleotide
ttcggtctgggcatggggttaagcaaagac

SEQ ID NO: 200608 - DNA, 30 bp, Artificial Sequence
  Synthetic oligonucleotide
tcaacaaagtggatgtcagcaacgaaagac

SEQ ID NO: 200609 - DNA, 30 bp, Artificial Sequence
  Synthetic oligonucleotide
cgattatccagaggggcagaatataaagac

SEQ ID NO: 200610 - DNA, 30 bp, Artificial Sequence
  Synthetic oligonucleotide
cggtgggtatcggataaatccaaacaagac

SEQ ID NO: 200611 - DNA, 30 bp, Artificial Sequence
  Synthetic oligonucleotide
gtatgaactcctcacggatacggccaagac

SEQ ID NO: 200612 - DNA, 30 bp, Artificial Sequence
  Synthetic oligonucleotide
ggggtcaagcgataccggactaggcaagac

SEQ ID NO: 200613 - DNA, 30 bp, Artificial Sequence
  Synthetic oligonucleotide
agattcgttggtcaatttatcggtcaagac

SEQ ID NO: 200614 - DNA, 30 bp, Artificial Sequence
  Synthetic oligonucleotide
atgggtttggtggtacccacattagaagac

SEQ ID NO: 200615 - DNA, 30 bp, Artificial Sequence
  Synthetic oligonucleotide
tgcaatccaacatgggaagtcgcggaagac

SEQ ID NO: 200616 - DNA, 30 bp, Artificial Sequence
  Synthetic oligonucleotide
aggtaggcacccgacaagtgtccataagac

SEQ ID NO: 200617 - DNA, 30 bp, Artificial Sequence
  Synthetic oligonucleotide
gcggtgcccaaaacctgttcctgataagac

SEQ ID NO: 200618 - DNA, 30 bp, Artificial Sequence
  Synthetic oligonucleotide
aggtttctcaagagtatccacatctaagac

SEQ ID NO: 200619 - DNA, 30 bp, Artificial Sequence
  Synthetic oligonucleotide
atctggagcattaaaagcggtgagtaagac

SEQ ID NO: 200620 - DNA, 30 bp, Artificial Sequence
  Synthetic oligonucleotide
actcattccaaagtataaccaccgtaagac

SEQ ID NO: 200621 - DNA, 30 bp, Artificial Sequence
  Synthetic oligonucleotide
catgggtgtcccacttcattcgaaacagac

SEQ ID NO: 200622 - DNA, 30 bp, Artificial Sequence
  Synthetic oligonucleotide
acagcaggccactagacttttggaacagac

SEQ ID NO: 200623 - DNA, 30 bp, Artificial Sequence
  Synthetic oligonucleotide
ctcgcttgttcatcggaacaccgcacagac

SEQ ID NO: 200624 - DNA, 30 bp, Artificial Sequence
  Synthetic oligonucleotide
gccaaccgacaggttcagtggtggacagac

SEQ ID NO: 200625 - DNA, 30 bp, Artificial Sequence
  Synthetic oligonucleotide
ttcaagcgggacataggaacaaatacagac

SEQ ID NO: 200626 - DNA, 30 bp, Artificial Sequence
  Synthetic oligonucleotide
cattataggaggacattcgtcattacagac

SEQ ID NO: 200627 - DNA, 30 bp, Artificial Sequence
  Synthetic oligonucleotide
gcaggtgggataggtctttcgattacagac

SEQ ID NO: 200628 - DNA, 30 bp, Artificial Sequence
  Synthetic oligonucleotide
acatcacttgctccggttaattcaccagac

SEQ ID NO: 200629 - DNA, 30 bp, Artificial Sequence
  Synthetic oligonucleotide
gcgcaatgatcgcgtcactcatgaccagac

SEQ ID NO: 200630 - DNA, 30 bp, Artificial Sequence
  Synthetic oligonucleotide
gcgtggtatagacttggaaaaagtccagac

SEQ ID NO: 200631 - DNA, 30 bp, Artificial Sequence
  Synthetic oligonucleotide
ttgcggcgacgggagttcttaatggcagac

SEQ ID NO: 200632 - DNA, 30 bp, Artificial Sequence
  Synthetic oligonucleotide
aagatcatgcgcgcaatgcgatatgcagac

SEQ ID NO: 200633 - DNA, 30 bp, Artificial Sequence
  Synthetic oligonucleotide
aggactagcccgtgtgcagtttgatcagac

SEQ ID NO: 200634 - DNA, 30 bp, Artificial Sequence
  Synthetic oligonucleotide
ctagggatgctgactttaaacccttcagac

SEQ ID NO: 200635 - DNA, 30 bp, Artificial Sequence
  Synthetic oligonucleotide
tattggagagacccgtggagtcaaagagac

SEQ ID NO: 200636 - DNA, 30 bp, Artificial Sequence
  Synthetic oligonucleotide
ccgagcgccggatgacgaagcttgagagac

SEQ ID NO: 200637 - DNA, 30 bp, Artificial Sequence
  Synthetic oligonucleotide
ggcatgaggacctacgttaaagttagagac

SEQ ID NO: 200638 - DNA, 30 bp, Artificial Sequence
  Synthetic oligonucleotide
tgccatattcctatagctacagttagagac

SEQ ID NO: 200639 - DNA, 30 bp, Artificial Sequence
  Synthetic oligonucleotide
ccatcatttacaactctttactcacgagac

SEQ ID NO: 200640 - DNA, 30 bp, Artificial Sequence
  Synthetic oligonucleotide
cccccctcacctgtagataatgtacgagac

SEQ ID NO: 200641 - DNA, 30 bp, Artificial Sequence
  Synthetic oligonucleotide
tcacatgtatccctgatctcgtgaggagac

SEQ ID NO: 200642 - DNA, 30 bp, Artificial Sequence
  Synthetic oligonucleotide
cccaccacatatctgccatgtcagggagac

SEQ ID NO: 200643 - DNA, 30 bp, Artificial Sequence
  Synthetic oligonucleotide
cggattgcgaactggtcaaacaactgagac

SEQ ID NO: 200644 - DNA, 30 bp, Artificial Sequence
  Synthetic oligonucleotide
gaaattacaaacgctccccagtggtgagac

SEQ ID NO: 200645 - DNA, 30 bp, Artificial Sequence
  Synthetic oligonucleotide
gagcgctagtttatagatataaattgagac

SEQ ID NO: 200646 - DNA, 30 bp, Artificial Sequence
  Synthetic oligonucleotide
gaagcggagaccactgggatgtattgagac

SEQ ID NO: 200647 - DNA, 30 bp, Artificial Sequence
  Synthetic oligonucleotide
tcgcacgtgggtctttttaattgttgagac

SEQ ID NO: 200648 - DNA, 30 bp, Artificial Sequence
  Synthetic oligonucleotide
gagcgccaaacgtaatggggccgcatagac

SEQ ID NO: 200649 - DNA, 30 bp, Artificial Sequence
  Synthetic oligonucleotide
cacttcatagaaaactgtctacggatagac

SEQ ID NO: 200650 - DNA, 30 bp, Artificial Sequence
  Synthetic oligonucleotide
acagctttgggcgggccggttgaactagac

SEQ ID NO: 200651 - DNA, 30 bp, Artificial Sequence
  Synthetic oligonucleotide
gacaatggtaagctcgcacgctaactagac

SEQ ID NO: 200652 - DNA, 30 bp, Artificial Sequence
  Synthetic oligonucleotide
gcatgtataattcctaatctcggactagac

SEQ ID NO: 200653 - DNA, 30 bp, Artificial Sequence
  Synthetic oligonucleotide
aagcgatcattagagtcttttcagctagac

SEQ ID NO: 200654 - DNA, 30 bp, Artificial Sequence
  Synthetic oligonucleotide
tttgttcgttggcggctcggggggctagac

SEQ ID NO: 200655 - DNA, 30 bp, Artificial Sequence
  Synthetic oligonucleotide
tgtagtctctgaacaaactggagtctagac

SEQ ID NO: 200656 - DNA, 30 bp, Artificial Sequence
  Synthetic oligonucleotide
atttggcatcgtcgtcggtaaggtctagac

SEQ ID NO: 200657 - DNA, 30 bp, Artificial Sequence
  Synthetic oligonucleotide
aaagaccaaagtggtcagatagcagtagac

SEQ ID NO: 200658 - DNA, 30 bp, Artificial Sequence
  Synthetic oligonucleotide
gctgtttcgcgtgataacgcaagagtagac

SEQ ID NO: 200659 - DNA, 30 bp, Artificial Sequence
  Synthetic oligonucleotide
cgggttgggcgacgattctagggagtagac

SEQ ID NO: 200660 - DNA, 30 bp, Artificial Sequence
  Synthetic oligonucleotide
agggcggccggttgcgcataagccgtagac

SEQ ID NO: 200661 - DNA, 30 bp, Artificial Sequence
  Synthetic oligonucleotide
atgtactttgtaataacgacgagcgtagac

SEQ ID NO: 200662 - DNA, 30 bp, Artificial Sequence
  Synthetic oligonucleotide
acctagaaaatatataaaagtgtggtagac

SEQ ID NO: 200663 - DNA, 30 bp, Artificial Sequence
  Synthetic oligonucleotide
ccttggcataccgaccggagcttggtagac

SEQ ID NO: 200664 - DNA, 30 bp, Artificial Sequence
  Synthetic oligonucleotide
accgtacctcttagatgcctatatgtagac

SEQ ID NO: 200665 - DNA, 30 bp, Artificial Sequence
  Synthetic oligonucleotide
ggttaacgaaggctagtttagtgtgtagac

SEQ ID NO: 200666 - DNA, 30 bp, Artificial Sequence
  Synthetic oligonucleotide
gcgaaagtgttgtttatgagttttgtagac

SEQ ID NO: 200667 - DNA, 30 bp, Artificial Sequence
  Synthetic oligonucleotide
gcatatgcgacgacgtcacatagattagac

SEQ ID NO: 200668 - DNA, 30 bp, Artificial Sequence
  Synthetic oligonucleotide
gatgtgtcaactttggtcaacgacttagac

SEQ ID NO: 200669 - DNA, 30 bp, Artificial Sequence
  Synthetic oligonucleotide
gtacgagtaactctcgttgtgaggttagac

SEQ ID NO: 200670 - DNA, 30 bp, Artificial Sequence
  Synthetic oligonucleotide
agaaagtgaatgcatttctcggggttagac

SEQ ID NO: 200671 - DNA, 30 bp, Artificial Sequence
  Synthetic oligonucleotide
ctctactggataacttaaggtcacaacgac

SEQ ID NO: 200672 - DNA, 30 bp, Artificial Sequence
  Synthetic oligonucleotide
gcaatttatatgcgcagggagtacaacgac

SEQ ID NO: 200673 - DNA, 30 bp, Artificial Sequence
  Synthetic oligonucleotide
agtcttgggaaactagtcggcggcaacgac

SEQ ID NO: 200674 - DNA, 30 bp, Artificial Sequence
  Synthetic oligonucleotide
tgaacggttctagcgatccctgcgaacgac

SEQ ID NO: 200675 - DNA, 30 bp, Artificial Sequence
  Synthetic oligonucleotide
aacagaaagaccgcatttttagctaacgac

SEQ ID NO: 200676 - DNA, 30 bp, Artificial Sequence
  Synthetic oligonucleotide
ttagattaaaaagggagatcggcccacgac

SEQ ID NO: 200677 - DNA, 30 bp, Artificial Sequence
  Synthetic oligonucleotide
tgagcaaaaatcccggcattacagcacgac

SEQ ID NO: 200678 - DNA, 30 bp, Artificial Sequence
  Synthetic oligonucleotide
ctgggaccgttccgggacaaaaatcacgac

SEQ ID NO: 200679 - DNA, 30 bp, Artificial Sequence
  Synthetic oligonucleotide
gagctgtaaagctgtgtgagtagtcacgac

SEQ ID NO: 200680 - DNA, 30 bp, Artificial Sequence
  Synthetic oligonucleotide
atgtgagattgcttaatcttcattcacgac

SEQ ID NO: 200681 - DNA, 30 bp, Artificial Sequence
  Synthetic oligonucleotide
gctaaccgggctcgtcggggccgagacgac

SEQ ID NO: 200682 - DNA, 30 bp, Artificial Sequence
  Synthetic oligonucleotide
ccagtgctagtcattccatcgttagacgac

SEQ ID NO: 200683 - DNA, 30 bp, Artificial Sequence
  Synthetic oligonucleotide
gggaccaagtaagaatcggttttagacgac

SEQ ID NO: 200684 - DNA, 30 bp, Artificial Sequence
  Synthetic oligonucleotide
tgacagcactgccaggttccacagtacgac

SEQ ID NO: 200685 - DNA, 30 bp, Artificial Sequence
  Synthetic oligonucleotide
aaatatagagtaggatccttatggaccgac

SEQ ID NO: 200686 - DNA, 30 bp, Artificial Sequence
  Synthetic oligonucleotide
tatgtcgagtcttcaacatgggataccgac

SEQ ID NO: 200687 - DNA, 30 bp, Artificial Sequence
  Synthetic oligonucleotide
ggaccccttgcattacatcaacaacccgac

SEQ ID NO: 200688 - DNA, 30 bp, Artificial Sequence
  Synthetic oligonucleotide
tggctggagctgcgattaatagagcccgac

SEQ ID NO: 200689 - DNA, 30 bp, Artificial Sequence
  Synthetic oligonucleotide
tatcttcgaaaccacggtaccatgcccgac

SEQ ID NO: 200690 - DNA, 30 bp, Artificial Sequence
  Synthetic oligonucleotide
gacatcgtcggccagtaggaggttcccgac

SEQ ID NO: 200691 - DNA, 30 bp, Artificial Sequence
  Synthetic oligonucleotide
agtaaagagtgtttgaagaggtgagccgac

SEQ ID NO: 200692 - DNA, 30 bp, Artificial Sequence
  Synthetic oligonucleotide
cgatctaggtttgccataatcgccgccgac

SEQ ID NO: 200693 - DNA, 30 bp, Artificial Sequence
  Synthetic oligonucleotide
ggttttacgccacaatataggtgatccgac

SEQ ID NO: 200694 - DNA, 30 bp, Artificial Sequence
  Synthetic oligonucleotide
ccgcgtacgccccagcaggaaaagtccgac

SEQ ID NO: 200695 - DNA, 30 bp, Artificial Sequence
  Synthetic oligonucleotide
gcgggacaattgatgatgataaagtccgac

SEQ ID NO: 200696 - DNA, 30 bp, Artificial Sequence
  Synthetic oligonucleotide
tcgtaatttatttcctcgtatcgttccgac

SEQ ID NO: 200697 - DNA, 30 bp, Artificial Sequence
  Synthetic oligonucleotide
ggcgagaacgtgtatagacgtgtaagcgac

SEQ ID NO: 200698 - DNA, 30 bp, Artificial Sequence
  Synthetic oligonucleotide
agctgttcatcatagaacaagccccgcgac

SEQ ID NO: 200699 - DNA, 30 bp, Artificial Sequence
  Synthetic oligonucleotide
gtcgacgcgctggacgttctagcaggcgac

SEQ ID NO: 200700 - DNA, 30 bp, Artificial Sequence
  Synthetic oligonucleotide
agttccaaagtccacggtagaatcggcgac

SEQ ID NO: 200701 - DNA, 30 bp, Artificial Sequence
  Synthetic oligonucleotide
accacggagtatgtaaggatgaggggcgac

SEQ ID NO: 200702 - DNA, 30 bp, Artificial Sequence
  Synthetic oligonucleotide
gcctgttgagctttaccgtaaattggcgac

SEQ ID NO: 200703 - DNA, 30 bp, Artificial Sequence
  Synthetic oligonucleotide
cttatgtcacctggacatatttcctgcgac

SEQ ID NO: 200704 - DNA, 30 bp, Artificial Sequence
  Synthetic oligonucleotide
gaaaaggctgtgatggcagatatctgcgac

SEQ ID NO: 200705 - DNA, 30 bp, Artificial Sequence
  Synthetic oligonucleotide
gcgacgagcgcttgcaaaatataaatcgac

SEQ ID NO: 200706 - DNA, 30 bp, Artificial Sequence
  Synthetic oligonucleotide
acgaagagcgatggtagcaaaagaatcgac

SEQ ID NO: 200707 - DNA, 30 bp, Artificial Sequence
  Synthetic oligonucleotide
gctctgtgggctgtattcaggaccatcgac

SEQ ID NO: 200708 - DNA, 30 bp, Artificial Sequence
  Synthetic oligonucleotide
tatattaccccaaattggggtcgcatcgac

SEQ ID NO: 200709 - DNA, 30 bp, Artificial Sequence
  Synthetic oligonucleotide
ggtggcacccggagcattccgtagatcgac

SEQ ID NO: 200710 - DNA, 30 bp, Artificial Sequence
  Synthetic oligonucleotide
tcgccaaggagtcattgttgccggatcgac

SEQ ID NO: 200711 - DNA, 30 bp, Artificial Sequence
  Synthetic oligonucleotide
gtctgaaaaaggggaacacgtctgatcgac

SEQ ID NO: 200712 - DNA, 30 bp, Artificial Sequence
  Synthetic oligonucleotide
ggagtacgttcagtggtatacagcctcgac

SEQ ID NO: 200713 - DNA, 30 bp, Artificial Sequence
  Synthetic oligonucleotide
aggctcagctcgattcaccatacgctcgac

SEQ ID NO: 200714 - DNA, 30 bp, Artificial Sequence
  Synthetic oligonucleotide
cacgactaccacgacttcacccggctcgac

SEQ ID NO: 200715 - DNA, 30 bp, Artificial Sequence
  Synthetic oligonucleotide
acaacgtcattacctgtttggcgcgtcgac

SEQ ID NO: 200716 - DNA, 30 bp, Artificial Sequence
  Synthetic oligonucleotide
gcggacatttgtacagactatcaggtcgac

SEQ ID NO: 200717 - DNA, 30 bp, Artificial Sequence
  Synthetic oligonucleotide
cgacgcccccacccatcttgaacgttcgac

SEQ ID NO: 200718 - DNA, 30 bp, Artificial Sequence
  Synthetic oligonucleotide
gtaagcactaagtcacaagtgactttcgac

SEQ ID NO: 200719 - DNA, 30 bp, Artificial Sequence
  Synthetic oligonucleotide
gcgccacccgagtggattggataaaaggac

SEQ ID NO: 200720 - DNA, 30 bp, Artificial Sequence
  Synthetic oligonucleotide
atgaagtcgtcttaagaggtcacaaaggac

SEQ ID NO: 200721 - DNA, 30 bp, Artificial Sequence
  Synthetic oligonucleotide
aagaggaatgaattgccgcaatagaaggac

SEQ ID NO: 200722 - DNA, 31 bp, Artificial Sequence
  Synthetic oligonucleotide
gggtacgactccattcggtgttaataaggac

SEQ ID NO: 200723 - DNA, 30 bp, Artificial Sequence
  Synthetic oligonucleotide
ggtgctttgtcgaaatattcaaaacaggac

SEQ ID NO: 200724 - DNA, 30 bp, Artificial Sequence
  Synthetic oligonucleotide
gggacggtcatgctggagggctaacaggac

SEQ ID NO: 200725 - DNA, 30 bp, Artificial Sequence
  Synthetic oligonucleotide
gcagacacagccgcacatactgcacaggac

SEQ ID NO: 200726 - DNA, 30 bp, Artificial Sequence
  Synthetic oligonucleotide
ggctgtcatacccgaagtggtacccaggac

SEQ ID NO: 200727 - DNA, 30 bp, Artificial Sequence
  Synthetic oligonucleotide
ataacattggaaatccgtctaccgcaggac

SEQ ID NO: 200728 - DNA, 30 bp, Artificial Sequence
  Synthetic oligonucleotide
gtatggatgacataatgcctcgcgcaggac

SEQ ID NO: 200729 - DNA, 30 bp, Artificial Sequence
  Synthetic oligonucleotide
actaggcggctaacatccgccgggcaggac

SEQ ID NO: 200730 - DNA, 30 bp, Artificial Sequence
  Synthetic oligonucleotide
tgaggccagcaacactaatcggtgcaggac

SEQ ID NO: 200731 - DNA, 30 bp, Artificial Sequence
  Synthetic oligonucleotide
agttcaacgcacatgctacatgaagaggac

SEQ ID NO: 200732 - DNA, 30 bp, Artificial Sequence
  Synthetic oligonucleotide
ggattactccgaaatcactacttggaggac

SEQ ID NO: 200733 - DNA, 30 bp, Artificial Sequence
  Synthetic oligonucleotide
gttgaggtccgcccgttttaccactaggac

SEQ ID NO: 200734 - DNA, 30 bp, Artificial Sequence
  Synthetic oligonucleotide
gtggagtcttgaacatagctaagttaggac

SEQ ID NO: 200735 - DNA, 30 bp, Artificial Sequence
  Synthetic oligonucleotide
acatctaaccgagtacaatgttccacggac

SEQ ID NO: 200736 - DNA, 30 bp, Artificial Sequence
  Synthetic oligonucleotide
acataatacctaagcgggccagagacggac

SEQ ID NO: 200737 - DNA, 31 bp, Artificial Sequence
  Synthetic oligonucleotide
agcctgtattgttttcaaaatatagacggac

SEQ ID NO: 200738 - DNA, 30 bp, Artificial Sequence
  Synthetic oligonucleotide
atgaagaggaaggccttcgagaatacggac

SEQ ID NO: 200739 - DNA, 30 bp, Artificial Sequence
  Synthetic oligonucleotide
tcagagaagttgacttggataacgccggac

SEQ ID NO: 200740 - DNA, 30 bp, Artificial Sequence
  Synthetic oligonucleotide
atggcgaggccttgtaggtcccgagcggac

SEQ ID NO: 200741 - DNA, 30 bp, Artificial Sequence
  Synthetic oligonucleotide
caccgacggttaccgcgaatgcgcgcggac

SEQ ID NO: 200742 - DNA, 30 bp, Artificial Sequence
  Synthetic oligonucleotide
tcggggggcccaagccatcactcggcggac

SEQ ID NO: 200743 - DNA, 30 bp, Artificial Sequence
  Synthetic oligonucleotide
ccttggctagaaacgactcagtgggcggac

SEQ ID NO: 200744 - DNA, 30 bp, Artificial Sequence
  Synthetic oligonucleotide
caaaaggatcaggctgcgaactatgcggac

SEQ ID NO: 200745 - DNA, 30 bp, Artificial Sequence
  Synthetic oligonucleotide
acaatttacagttccagtacgtctgcggac

SEQ ID NO: 200746 - DNA, 30 bp, Artificial Sequence
  Synthetic oligonucleotide
gtaacgtcaactaatacttggtctgcggac

SEQ ID NO: 200747 - DNA, 30 bp, Artificial Sequence
  Synthetic oligonucleotide
gaccttctcctactcgggttgtgtgcggac

SEQ ID NO: 200748 - DNA, 30 bp, Artificial Sequence
  Synthetic oligonucleotide
tcttggaacggctttggtctagaatcggac

SEQ ID NO: 200749 - DNA, 30 bp, Artificial Sequence
  Synthetic oligonucleotide
cgtagaaattttttcgacgtgacatcggac

SEQ ID NO: 200750 - DNA, 30 bp, Artificial Sequence
  Synthetic oligonucleotide
acgactaataatcaccttcaggtatcggac

SEQ ID NO: 200751 - DNA, 30 bp, Artificial Sequence
  Synthetic oligonucleotide
tacgagacagtcataatcacgtattcggac

SEQ ID NO: 200752 - DNA, 30 bp, Artificial Sequence
  Synthetic oligonucleotide
cacttcaggactgtttttggcaaaagggac

SEQ ID NO: 200753 - DNA, 30 bp, Artificial Sequence
  Synthetic oligonucleotide
cggaggtgctttagagagtacgccagggac

SEQ ID NO: 200754 - DNA, 30 bp, Artificial Sequence
  Synthetic oligonucleotide
agttcacctatgaacgagtgtctgagggac

SEQ ID NO: 200755 - DNA, 30 bp, Artificial Sequence
  Synthetic oligonucleotide
cctagaatacatctctctaataaccgggac

SEQ ID NO: 200756 - DNA, 30 bp, Artificial Sequence
  Synthetic oligonucleotide
cgacgacgaagggggtaggacggccgggac

SEQ ID NO: 200757 - DNA, 30 bp, Artificial Sequence
  Synthetic oligonucleotide
catccgcgtggttttaggctactgcgggac

SEQ ID NO: 200758 - DNA, 30 bp, Artificial Sequence
  Synthetic oligonucleotide
cgaaagggaaacgaaaacgtttcaggggac

SEQ ID NO: 200759 - DNA, 30 bp, Artificial Sequence
  Synthetic oligonucleotide
agttctgggcaaatgcgccactctggggac

SEQ ID NO: 200760 - DNA, 30 bp, Artificial Sequence
  Synthetic oligonucleotide
gtccgggctaaatggtacagccaatgggac

SEQ ID NO: 200761 - DNA, 30 bp, Artificial Sequence
  Synthetic oligonucleotide
tgatgggacgggctcgggaaaacctgggac

SEQ ID NO: 200762 - DNA, 30 bp, Artificial Sequence
  Synthetic oligonucleotide
gaggaaaatggtataagcgatagttgggac

SEQ ID NO: 200763 - DNA, 30 bp, Artificial Sequence
  Synthetic oligonucleotide
cggtatcgttaatcgtaattgtcaatggac

SEQ ID NO: 200764 - DNA, 30 bp, Artificial Sequence
  Synthetic oligonucleotide
ggtttcatgcataaaaaaaccataatggac

SEQ ID NO: 200765 - DNA, 30 bp, Artificial Sequence
  Synthetic oligonucleotide
cgggtccataggaagtatcaacgcctggac

SEQ ID NO: 200766 - DNA, 30 bp, Artificial Sequence
  Synthetic oligonucleotide
ggataacaagttgacccacgttctctggac

SEQ ID NO: 200767 - DNA, 30 bp, Artificial Sequence
  Synthetic oligonucleotide
acccggagagcatagatctcagttctggac

SEQ ID NO: 200768 - DNA, 30 bp, Artificial Sequence
  Synthetic oligonucleotide
tctacacctgtgtagctatgatcagtggac

SEQ ID NO: 200769 - DNA, 30 bp, Artificial Sequence
  Synthetic oligonucleotide
agccgcgatatatcagcccaggcattggac

SEQ ID NO: 200770 - DNA, 30 bp, Artificial Sequence
  Synthetic oligonucleotide
agctcgcctcgccacaaacggagattggac

SEQ ID NO: 200771 - DNA, 30 bp, Artificial Sequence
  Synthetic oligonucleotide
ccaggaggatgaggacttagctgattggac

SEQ ID NO: 200772 - DNA, 30 bp, Artificial Sequence
  Synthetic oligonucleotide
aaacgacgtctgatcgaaggaagcttggac

SEQ ID NO: 200773 - DNA, 30 bp, Artificial Sequence
  Synthetic oligonucleotide
tctcgactcacttgatgggagaggttggac

SEQ ID NO: 200774 - DNA, 30 bp, Artificial Sequence
  Synthetic oligonucleotide
tagaaaaacattgacggattgctgttggac

SEQ ID NO: 200775 - DNA, 30 bp, Artificial Sequence
  Synthetic oligonucleotide
gtgagttggagctacgacaatcatttggac

SEQ ID NO: 200776 - DNA, 30 bp, Artificial Sequence
  Synthetic oligonucleotide
acggtgttttgccttgatagtagtttggac

SEQ ID NO: 200777 - DNA, 30 bp, Artificial Sequence
  Synthetic oligonucleotide
ggatgatattcctgaatcatacgtttggac

SEQ ID NO: 200778 - DNA, 30 bp, Artificial Sequence
  Synthetic oligonucleotide
ctacggcttagcaagtgtctaattttggac

SEQ ID NO: 200779 - DNA, 30 bp, Artificial Sequence
  Synthetic oligonucleotide
agaggtttggaaaccgtcccgcaaaatgac

SEQ ID NO: 200780 - DNA, 30 bp, Artificial Sequence
  Synthetic oligonucleotide
ttcaccacccacgtaagcaaaagaaatgac

SEQ ID NO: 200781 - DNA, 30 bp, Artificial Sequence
  Synthetic oligonucleotide
gaccgccgcttggagcgatatggaaatgac

SEQ ID NO: 200782 - DNA, 30 bp, Artificial Sequence
  Synthetic oligonucleotide
aagacatattaaaacactcccgacaatgac

SEQ ID NO: 200783 - DNA, 30 bp, Artificial Sequence
  Synthetic oligonucleotide
tggatcgcaaggaacgaggtacgcaatgac

SEQ ID NO: 200784 - DNA, 30 bp, Artificial Sequence
  Synthetic oligonucleotide
tgctagtatcatcatgtggtaggtaatgac

SEQ ID NO: 200785 - DNA, 30 bp, Artificial Sequence
  Synthetic oligonucleotide
cagtcacctgaataccccagggaacatgac

SEQ ID NO: 200786 - DNA, 30 bp, Artificial Sequence
  Synthetic oligonucleotide
atgcaacatagctgtattaaagcacatgac

SEQ ID NO: 200787 - DNA, 30 bp, Artificial Sequence
  Synthetic oligonucleotide
acgttcactgtgacaacgatattccatgac

SEQ ID NO: 200788 - DNA, 30 bp, Artificial Sequence
  Synthetic oligonucleotide
cgacgtaaaatatctatcgtaggtcatgac

SEQ ID NO: 200789 - DNA, 30 bp, Artificial Sequence
  Synthetic oligonucleotide
ataggctcgcgccagtcgcgggttcatgac

SEQ ID NO: 200790 - DNA, 30 bp, Artificial Sequence
  Synthetic oligonucleotide
tgctgacctcctagcaatgctaacgatgac

SEQ ID NO: 200791 - DNA, 30 bp, Artificial Sequence
  Synthetic oligonucleotide
gtcttacaaaggtcgcgacggctcgatgac

SEQ ID NO: 200792 - DNA, 30 bp, Artificial Sequence
  Synthetic oligonucleotide
gtggggaagtggttgagagtcgcggatgac

SEQ ID NO: 200793 - DNA, 30 bp, Artificial Sequence
  Synthetic oligonucleotide
gttcagttatgcctctggcagggggatgac

SEQ ID NO: 200794 - DNA, 30 bp, Artificial Sequence
  Synthetic oligonucleotide
cattaattaatcgcagtaaaatgggatgac

SEQ ID NO: 200795 - DNA, 30 bp, Artificial Sequence
  Synthetic oligonucleotide
cggtccgctcacaaggaggagccgtatgac

SEQ ID NO: 200796 - DNA, 30 bp, Artificial Sequence
  Synthetic oligonucleotide
gtgcgtttggcaccaatgattctcactgac

SEQ ID NO: 200797 - DNA, 30 bp, Artificial Sequence
  Synthetic oligonucleotide
ggtcaggcataatctgcggtccgtactgac

SEQ ID NO: 200798 - DNA, 30 bp, Artificial Sequence
  Synthetic oligonucleotide
actaaatgcccatggaatttacaccctgac

SEQ ID NO: 200799 - DNA, 30 bp, Artificial Sequence
  Synthetic oligonucleotide
taacgaaaacgccgtctacagcaccctgac

SEQ ID NO: 200800 - DNA, 30 bp, Artificial Sequence
  Synthetic oligonucleotide
aagtggttgagctttaccaatcaccctgac

SEQ ID NO: 200801 - DNA, 31 bp, Artificial Sequence
  Synthetic oligonucleotide
cggagttgagctacgattgtactttcctgac

SEQ ID NO: 200802 - DNA, 30 bp, Artificial Sequence
  Synthetic oligonucleotide
cccgtaagaaaagcgcctactccagctgac

SEQ ID NO: 200803 - DNA, 30 bp, Artificial Sequence
  Synthetic oligonucleotide
cgatgttagcaactgaatttttccgctgac

SEQ ID NO: 200804 - DNA, 30 bp, Artificial Sequence
  Synthetic oligonucleotide
aagcgatgaatggagcaagcgtgtgctgac

SEQ ID NO: 200805 - DNA, 30 bp, Artificial Sequence
  Synthetic oligonucleotide
caccatatctgacacggagccgactctgac

SEQ ID NO: 200806 - DNA, 30 bp, Artificial Sequence
  Synthetic oligonucleotide
ggggtgcgtctgccttcgaaagagtctgac

SEQ ID NO: 200807 - DNA, 30 bp, Artificial Sequence
  Synthetic oligonucleotide
gctgaagacttagcgtaagctccgtctgac

SEQ ID NO: 200808 - DNA, 30 bp, Artificial Sequence
  Synthetic oligonucleotide
ttcatcgaaaagtatatggcgaaaagtgac

SEQ ID NO: 200809 - DNA, 30 bp, Artificial Sequence
  Synthetic oligonucleotide
taggcgggccgtaatcggaatcaaagtgac

SEQ ID NO: 200810 - DNA, 30 bp, Artificial Sequence
  Synthetic oligonucleotide
tctaaagcaaagatttgccttctaagtgac

SEQ ID NO: 200811 - DNA, 30 bp, Artificial Sequence
  Synthetic oligonucleotide
aaagcagcacccccaaggaccgtaagtgac

SEQ ID NO: 200812 - DNA, 30 bp, Artificial Sequence
  Synthetic oligonucleotide
gggcgtagttgtccccgtccaagtagtgac

SEQ ID NO: 200813 - DNA, 30 bp, Artificial Sequence
  Synthetic oligonucleotide
catacaagctgaaggcgtggtaaccgtgac

SEQ ID NO: 200814 - DNA, 30 bp, Artificial Sequence
  Synthetic oligonucleotide
tactcgagacataatcaagtatcccgtgac

SEQ ID NO: 200815 - DNA, 30 bp, Artificial Sequence
  Synthetic oligonucleotide
cagtaataggactatatccaccggcgtgac

SEQ ID NO: 200816 - DNA, 30 bp, Artificial Sequence
  Synthetic oligonucleotide
tgcgagagagaataggggcctgctcgtgac

SEQ ID NO: 200817 - DNA, 30 bp, Artificial Sequence
  Synthetic oligonucleotide
ggacttattaatcaagttgttaaaggtgac

SEQ ID NO: 200818 - DNA, 30 bp, Artificial Sequence
  Synthetic oligonucleotide
ggagatatccccgggattatgtcaggtgac

SEQ ID NO: 200819 - DNA, 30 bp, Artificial Sequence
  Synthetic oligonucleotide
ctcgaagccggccacaaacattgaggtgac

SEQ ID NO: 200820 - DNA, 30 bp, Artificial Sequence
  Synthetic oligonucleotide
gatacaatgaggcaaacggcatggggtgac

SEQ ID NO: 200821 - DNA, 30 bp, Artificial Sequence
  Synthetic oligonucleotide
aaaggggcgatagtagtcaaagtgggtgac

SEQ ID NO: 200822 - DNA, 30 bp, Artificial Sequence
  Synthetic oligonucleotide
tgcctcttgacgcgccgctcggtgggtgac

SEQ ID NO: 200823 - DNA, 30 bp, Artificial Sequence
  Synthetic oligonucleotide
atatagcggagggaacggttcgagtgtgac

SEQ ID NO: 200824 - DNA, 30 bp, Artificial Sequence
  Synthetic oligonucleotide
gattaagtatgccaataaatatagtgtgac

SEQ ID NO: 200825 - DNA, 30 bp, Artificial Sequence
  Synthetic oligonucleotide
tttgcgatcagcaccaggagtgcgtgtgac

SEQ ID NO: 200826 - DNA, 30 bp, Artificial Sequence
  Synthetic oligonucleotide
agcgtagcaacgggtgctgactggtgtgac

SEQ ID NO: 200827 - DNA, 30 bp, Artificial Sequence
  Synthetic oligonucleotide
tcatcgtcagttgcaagacgcaattgtgac

SEQ ID NO: 200828 - DNA, 30 bp, Artificial Sequence
  Synthetic oligonucleotide
aacgttagaaatggttaaggcatttgtgac

SEQ ID NO: 200829 - DNA, 30 bp, Artificial Sequence
  Synthetic oligonucleotide
gccacatgtagcatcaaaaatgtttgtgac

SEQ ID NO: 200830 - DNA, 30 bp, Artificial Sequence
  Synthetic oligonucleotide
catcaacaacgggattgaaagttcattgac

SEQ ID NO: 200831 - DNA, 30 bp, Artificial Sequence
  Synthetic oligonucleotide
atatatggcgttgggatattctcgattgac

SEQ ID NO: 200832 - DNA, 30 bp, Artificial Sequence
  Synthetic oligonucleotide
taccactgattagcgccttatgggattgac

SEQ ID NO: 200833 - DNA, 30 bp, Artificial Sequence
  Synthetic oligonucleotide
actagggcaagtaaaacccgacgtattgac

SEQ ID NO: 200834 - DNA, 30 bp, Artificial Sequence
  Synthetic oligonucleotide
gggttgttagccgctcgattgggggttgac

SEQ ID NO: 200835 - DNA, 30 bp, Artificial Sequence
  Synthetic oligonucleotide
tccctggagtatagcccaggtacaaaatac

SEQ ID NO: 200836 - DNA, 34 bp, Artificial Sequence
  Synthetic oligonucleotide
gatactagaccaccacgtgtccatcagaaaatac

SEQ ID NO: 200837 - DNA, 30 bp, Artificial Sequence
  Synthetic oligonucleotide
tcaacgtttaagcgtggcccaggaaaatac

SEQ ID NO: 200838 - DNA, 30 bp, Artificial Sequence
  Synthetic oligonucleotide
atcggccacgcatgtactaggggaaaatac

SEQ ID NO: 200839 - DNA, 30 bp, Artificial Sequence
  Synthetic oligonucleotide
agaaatacgttcagcgttgcaaacaaatac

SEQ ID NO: 200840 - DNA, 30 bp, Artificial Sequence
  Synthetic oligonucleotide
attcacagtcaagaacattgacccaaatac

SEQ ID NO: 200841 - DNA, 30 bp, Artificial Sequence
  Synthetic oligonucleotide
acaaacagatcatgataaggagggaaatac

SEQ ID NO: 200842 - DNA, 30 bp, Artificial Sequence
  Synthetic oligonucleotide
ctgttcagaactagtttctgtatgaaatac

SEQ ID NO: 200843 - DNA, 30 bp, Artificial Sequence
  Synthetic oligonucleotide
ataagccacgtgcacacgtcgttacaatac

SEQ ID NO: 200844 - DNA, 30 bp, Artificial Sequence
  Synthetic oligonucleotide
ttcgatggtgggggatcagaccagcaatac

SEQ ID NO: 200845 - DNA, 30 bp, Artificial Sequence
  Synthetic oligonucleotide
ttatagtggatcggcaaagtccagcaatac

SEQ ID NO: 200846 - DNA, 30 bp, Artificial Sequence
  Synthetic oligonucleotide
agcattagctgaattatcggtaatcaatac

SEQ ID NO: 200847 - DNA, 30 bp, Artificial Sequence
  Synthetic oligonucleotide
tatgtttagtggtggcccagtcatcaatac

SEQ ID NO: 200848 - DNA, 30 bp, Artificial Sequence
  Synthetic oligonucleotide
agtgaagagtaacaatgtggttacgaatac

SEQ ID NO: 200849 - DNA, 30 bp, Artificial Sequence
  Synthetic oligonucleotide
agagcgagtataggagacatctaggaatac

SEQ ID NO: 200850 - DNA, 30 bp, Artificial Sequence
  Synthetic oligonucleotide
tgaaggacttagcggtagtgattggaatac

SEQ ID NO: 200851 - DNA, 30 bp, Artificial Sequence
  Synthetic oligonucleotide
atcgagcatgagaagctcgagacgtaatac

SEQ ID NO: 200852 - DNA, 30 bp, Artificial Sequence
  Synthetic oligonucleotide
gtacagaagtggccgtgtccagggtaatac

SEQ ID NO: 200853 - DNA, 30 bp, Artificial Sequence
  Synthetic oligonucleotide
cccgaaggggctcggcggccgcacacatac

SEQ ID NO: 200854 - DNA, 30 bp, Artificial Sequence
  Synthetic oligonucleotide
ggtctcgtgtgggtacggtttccaccatac

SEQ ID NO: 200855 - DNA, 30 bp, Artificial Sequence
  Synthetic oligonucleotide
tatgaaggagtcaattcatggaccccatac

SEQ ID NO: 200856 - DNA, 30 bp, Artificial Sequence
  Synthetic oligonucleotide
tctcgccagctcgcacaacgagtcccatac

SEQ ID NO: 200857 - DNA, 30 bp, Artificial Sequence
  Synthetic oligonucleotide
gctaggaacgtctttgatataatgccatac

SEQ ID NO: 200858 - DNA, 30 bp, Artificial Sequence
  Synthetic oligonucleotide
agagcgtgtgtctgtttttcggctccatac

SEQ ID NO: 200859 - DNA, 30 bp, Artificial Sequence
  Synthetic oligonucleotide
aggggatgctgggtgttggaacgtccatac

SEQ ID NO: 200860 - DNA, 30 bp, Artificial Sequence
  Synthetic oligonucleotide
cgcgacttacggttggtgggtcgggcatac

SEQ ID NO: 200861 - DNA, 30 bp, Artificial Sequence
  Synthetic oligonucleotide
gaggacaaggatattacatccttggcatac

SEQ ID NO: 200862 - DNA, 30 bp, Artificial Sequence
  Synthetic oligonucleotide
cagcaatcaaaaatggtgtggtctgcatac

SEQ ID NO: 200863 - DNA, 30 bp, Artificial Sequence
  Synthetic oligonucleotide
gtaacacactaaacgcttacctgctcatac

SEQ ID NO: 200864 - DNA, 30 bp, Artificial Sequence
  Synthetic oligonucleotide
ttgtatcagaaattgtccagtatcagatac

SEQ ID NO: 200865 - DNA, 30 bp, Artificial Sequence
  Synthetic oligonucleotide
caacccgctaaccctccaggtgtgagatac

SEQ ID NO: 200866 - DNA, 30 bp, Artificial Sequence
  Synthetic oligonucleotide
ttgaccgggtcaggactatcagatagatac

SEQ ID NO: 200867 - DNA, 30 bp, Artificial Sequence
  Synthetic oligonucleotide
cattgcggcaagtccacggttcgacgatac

SEQ ID NO: 200868 - DNA, 30 bp, Artificial Sequence
  Synthetic oligonucleotide
tactccccaattgcgataccagtccgatac

SEQ ID NO: 200869 - DNA, 30 bp, Artificial Sequence
  Synthetic oligonucleotide
tatgtcgaaggccctttcctgtatcgatac

SEQ ID NO: 200870 - DNA, 30 bp, Artificial Sequence
  Synthetic oligonucleotide
tcggtctttctccataacaatagtcgatac

SEQ ID NO: 200871 - DNA, 30 bp, Artificial Sequence
  Synthetic oligonucleotide
tgtgaggggaggctatcgagatttcgatac

SEQ ID NO: 200872 - DNA, 30 bp, Artificial Sequence
  Synthetic oligonucleotide
cgaacccgataagtagttgatgaaggatac

SEQ ID NO: 200873 - DNA, 30 bp, Artificial Sequence
  Synthetic oligonucleotide
gggaatatcggcgggttgctctgaggatac

SEQ ID NO: 200874 - DNA, 30 bp, Artificial Sequence
  Synthetic oligonucleotide
ttatatttgagattagcacacgtcggatac

SEQ ID NO: 200875 - DNA, 30 bp, Artificial Sequence
  Synthetic oligonucleotide
acgtatccgggagagtataacgttggatac

SEQ ID NO: 200876 - DNA, 30 bp, Artificial Sequence
  Synthetic oligonucleotide
gcccaagcccttaacagtagtgactgatac

SEQ ID NO: 200877 - DNA, 30 bp, Artificial Sequence
  Synthetic oligonucleotide
ctacacaacagggcatgagtaaattgatac

SEQ ID NO: 200878 - DNA, 30 bp, Artificial Sequence
  Synthetic oligonucleotide
agggcccgtaatgtaaaaccggtttgatac

SEQ ID NO: 200879 - DNA, 30 bp, Artificial Sequence
  Synthetic oligonucleotide
tgcttgaacttgtacagttggggaatatac

SEQ ID NO: 200880 - DNA, 30 bp, Artificial Sequence
  Synthetic oligonucleotide
atcgagccgagctccataagtttcatatac

SEQ ID NO: 200881 - DNA, 30 bp, Artificial Sequence
  Synthetic oligonucleotide
tggtgtgggatattgtaacgtgtactatac

SEQ ID NO: 200882 - DNA, 30 bp, Artificial Sequence
  Synthetic oligonucleotide
ccacctcgagtcaattgtgcacggctatac

SEQ ID NO: 200883 - DNA, 30 bp, Artificial Sequence
  Synthetic oligonucleotide
gctaggaaacagcgctgctcatgtctatac

SEQ ID NO: 200884 - DNA, 30 bp, Artificial Sequence
  Synthetic oligonucleotide
cgcctccgctctctgtccttctaagtatac

SEQ ID NO: 200885 - DNA, 30 bp, Artificial Sequence
  Synthetic oligonucleotide
agcttgaagtaaattatagatggcgtatac

SEQ ID NO: 200886 - DNA, 30 bp, Artificial Sequence
  Synthetic oligonucleotide
atgagcgcgactcctccgggtgatgtatac

SEQ ID NO: 200887 - DNA, 30 bp, Artificial Sequence
  Synthetic oligonucleotide
ggacaaatgctagctttagggaacttatac

SEQ ID NO: 200888 - DNA, 30 bp, Artificial Sequence
  Synthetic oligonucleotide
gatgtatgggcgtcctcctcacctttatac

SEQ ID NO: 200889 - DNA, 30 bp, Artificial Sequence
  Synthetic oligonucleotide
tgccatgtcctgggacaaagtgcaaactac

SEQ ID NO: 200890 - DNA, 30 bp, Artificial Sequence
  Synthetic oligonucleotide
tagtcacagttcataaatacgaagaactac

SEQ ID NO: 200891 - DNA, 30 bp, Artificial Sequence
  Synthetic oligonucleotide
ttgtcgtacggcggtttgcgacggaactac

SEQ ID NO: 200892 - DNA, 30 bp, Artificial Sequence
  Synthetic oligonucleotide
aggatcacaaatttgggagtagggaactac

SEQ ID NO: 200893 - DNA, 30 bp, Artificial Sequence
  Synthetic oligonucleotide
cacatgaatccccgtgaaaacttgaactac

SEQ ID NO: 200894 - DNA, 30 bp, Artificial Sequence
  Synthetic oligonucleotide
ttgccggggatggttgtatcaagtcactac

SEQ ID NO: 200895 - DNA, 30 bp, Artificial Sequence
  Synthetic oligonucleotide
gcccgctcaggatccctcccacgtcactac

SEQ ID NO: 200896 - DNA, 30 bp, Artificial Sequence
  Synthetic oligonucleotide
gccgatgtgcatgggctggcgagcgactac

SEQ ID NO: 200897 - DNA, 30 bp, Artificial Sequence
  Synthetic oligonucleotide
taaattcggccagtcaccagcgcggactac

SEQ ID NO: 200898 - DNA, 30 bp, Artificial Sequence
  Synthetic oligonucleotide
gcctaggcagaataaaacagataatactac

SEQ ID NO: 200899 - DNA, 30 bp, Artificial Sequence
  Synthetic oligonucleotide
caaaatgggcagaactgatcgatctactac

SEQ ID NO: 200900 - DNA, 30 bp, Artificial Sequence
  Synthetic oligonucleotide
acccacatctctataaacccgggaacctac

SEQ ID NO: 200901 - DNA, 30 bp, Artificial Sequence
  Synthetic oligonucleotide
tccatctcaagcagtgaaaaaacgacctac

SEQ ID NO: 200902 - DNA, 30 bp, Artificial Sequence
  Synthetic oligonucleotide
caaacgcgggcctagtcgcaggttccctac

SEQ ID NO: 200903 - DNA, 30 bp, Artificial Sequence
  Synthetic oligonucleotide
tgcgacctcgtgtgagcatccctcgcctac

SEQ ID NO: 200904 - DNA, 30 bp, Artificial Sequence
  Synthetic oligonucleotide
gtagtaaattccgtaacgattgtcgcctac

SEQ ID NO: 200905 - DNA, 30 bp, Artificial Sequence
  Synthetic oligonucleotide
ccttaagagaagagacgaatgtgttcctac

SEQ ID NO: 200906 - DNA, 30 bp, Artificial Sequence
  Synthetic oligonucleotide
tgagaaataacgacacgggggcacagctac

SEQ ID NO: 200907 - DNA, 30 bp, Artificial Sequence
  Synthetic oligonucleotide
gcttcgacgggtgagatacctggtagctac

SEQ ID NO: 200908 - DNA, 30 bp, Artificial Sequence
  Synthetic oligonucleotide
ccacaagtctctcactaagacaaacgctac

SEQ ID NO: 200909 - DNA, 30 bp, Artificial Sequence
  Synthetic oligonucleotide
caagctgaatggtacttgtaccgccgctac

SEQ ID NO: 200910 - DNA, 30 bp, Artificial Sequence
  Synthetic oligonucleotide
ggtagaagatatatgtgtgtagcgcgctac

SEQ ID NO: 200911 - DNA, 30 bp, Artificial Sequence
  Synthetic oligonucleotide
aaattcagcggtcgactatcaggaggctac

SEQ ID NO: 200912 - DNA, 30 bp, Artificial Sequence
  Synthetic oligonucleotide
ctaacaccctctctaaaggtgtccggctac

SEQ ID NO: 200913 - DNA, 30 bp, Artificial Sequence
  Synthetic oligonucleotide
gaagcgctcccaggagtaagggcgggctac

SEQ ID NO: 200914 - DNA, 30 bp, Artificial Sequence
  Synthetic oligonucleotide
accacgttctatggaacaatcgggggctac

SEQ ID NO: 200915 - DNA, 30 bp, Artificial Sequence
  Synthetic oligonucleotide
tagacgaccgaccccctgcgacctggctac

SEQ ID NO: 200916 - DNA, 30 bp, Artificial Sequence
  Synthetic oligonucleotide
gatgcggacctctctacaaatacatgctac

SEQ ID NO: 200917 - DNA, 30 bp, Artificial Sequence
  Synthetic oligonucleotide
tgttaccctatgtcgagaagtatatgctac

SEQ ID NO: 200918 - DNA, 30 bp, Artificial Sequence
  Synthetic oligonucleotide
gcgtatagtaacgtcgcgcgtgtctgctac

SEQ ID NO: 200919 - DNA, 30 bp, Artificial Sequence
  Synthetic oligonucleotide
agaaggtctagcggggtttgattctgctac

SEQ ID NO: 200920 - DNA, 30 bp, Artificial Sequence
  Synthetic oligonucleotide
actgcatatacagagcaatcatcgtgctac

SEQ ID NO: 200921 - DNA, 30 bp, Artificial Sequence
  Synthetic oligonucleotide
cttacatacacagcgtgtttactgtgctac

SEQ ID NO: 200922 - DNA, 30 bp, Artificial Sequence
  Synthetic oligonucleotide
tcttcgcgacgcgttaccgtctattgctac

SEQ ID NO: 200923 - DNA, 30 bp, Artificial Sequence
  Synthetic oligonucleotide
gtcagagaaatattcgtggaaatgatctac

SEQ ID NO: 200924 - DNA, 30 bp, Artificial Sequence
  Synthetic oligonucleotide
tagaactggcaggggttgtatggtatctac

SEQ ID NO: 200925 - DNA, 30 bp, Artificial Sequence
  Synthetic oligonucleotide
gatcgagcacgcgatgggagatgactctac

SEQ ID NO: 200926 - DNA, 30 bp, Artificial Sequence
  Synthetic oligonucleotide
ataaggtaatggagaggactttgactctac

SEQ ID NO: 200927 - DNA, 30 bp, Artificial Sequence
  Synthetic oligonucleotide
tggtataaggcaagtataggagccctctac

SEQ ID NO: 200928 - DNA, 30 bp, Artificial Sequence
  Synthetic oligonucleotide
acacgaggcaatttacggtcggagctctac

SEQ ID NO: 200929 - DNA, 30 bp, Artificial Sequence
  Synthetic oligonucleotide
ggcagtgagtgcaaatccgatgaagtctac

SEQ ID NO: 200930 - DNA, 30 bp, Artificial Sequence
  Synthetic oligonucleotide
gactcgtagatagaaacggaggcagtctac

SEQ ID NO: 200931 - DNA, 30 bp, Artificial Sequence
  Synthetic oligonucleotide
cgagttctgccagggaggctttcggtctac

SEQ ID NO: 200932 - DNA, 30 bp, Artificial Sequence
  Synthetic oligonucleotide
ccccaggtgccctaacttccttaattctac

SEQ ID NO: 200933 - DNA, 30 bp, Artificial Sequence
  Synthetic oligonucleotide
ccctataataggaaaatacaaagattctac

SEQ ID NO: 200934 - DNA, 30 bp, Artificial Sequence
  Synthetic oligonucleotide
gtaaaactcgtgacttccgagccgttctac

SEQ ID NO: 200935 - DNA, 30 bp, Artificial Sequence
  Synthetic oligonucleotide
tgtgattgacgactagaaagggggttctac

SEQ ID NO: 200936 - DNA, 30 bp, Artificial Sequence
  Synthetic oligonucleotide
caggactcaaattcgattacgactttctac

SEQ ID NO: 200937 - DNA, 30 bp, Artificial Sequence
  Synthetic oligonucleotide
acttctgtgagcgtacacacaagaaagtac

SEQ ID NO: 200938 - DNA, 30 bp, Artificial Sequence
  Synthetic oligonucleotide
gacttgactaggcaggcacccgtaaagtac

SEQ ID NO: 200939 - DNA, 30 bp, Artificial Sequence
  Synthetic oligonucleotide
agcgcgcgctcgtctaaggtaaccaagtac

SEQ ID NO: 200940 - DNA, 30 bp, Artificial Sequence
  Synthetic oligonucleotide
cgcaagtcagcgctagcgatcaagaagtac

SEQ ID NO: 200941 - DNA, 30 bp, Artificial Sequence
  Synthetic oligonucleotide
gtgggctacacacaaaagttggagcagtac

SEQ ID NO: 200942 - DNA, 30 bp, Artificial Sequence
  Synthetic oligonucleotide
tcgtgagcaatcctgggagcttcgcagtac

SEQ ID NO: 200943 - DNA, 30 bp, Artificial Sequence
  Synthetic oligonucleotide
tgctcataattgttatacgaaaggcagtac

SEQ ID NO: 200944 - DNA, 30 bp, Artificial Sequence
  Synthetic oligonucleotide
gtggagcctaacgacggaacacatcagtac

SEQ ID NO: 200945 - DNA, 30 bp, Artificial Sequence
  Synthetic oligonucleotide
gaacaacttaactcacgactacttcagtac

SEQ ID NO: 200946 - DNA, 30 bp, Artificial Sequence
  Synthetic oligonucleotide
acggataaacgtataatacgcaaagagtac

SEQ ID NO: 200947 - DNA, 30 bp, Artificial Sequence
  Synthetic oligonucleotide
gaatattacataaacggaaggcccgagtac

SEQ ID NO: 200948 - DNA, 29 bp, Artificial Sequence
  Synthetic oligonucleotide
cctaaggccgaataaagcgaagcgagtac

SEQ ID NO: 200949 - DNA, 30 bp, Artificial Sequence
  Synthetic oligonucleotide
ataaacgggatgacgttacagagatagtac

SEQ ID NO: 200950 - DNA, 30 bp, Artificial Sequence
  Synthetic oligonucleotide
ctgtagcggcctaacctggaagcgtagtac

SEQ ID NO: 200951 - DNA, 30 bp, Artificial Sequence
  Synthetic oligonucleotide
cgcgcgttcgtcaccaggcaggtttagtac

SEQ ID NO: 200952 - DNA, 30 bp, Artificial Sequence
  Synthetic oligonucleotide
catcaataccgcaaaaacgctcaaacgtac

SEQ ID NO: 200953 - DNA, 30 bp, Artificial Sequence
  Synthetic oligonucleotide
agtgcctatagatgttccgaattaacgtac

SEQ ID NO: 200954 - DNA, 30 bp, Artificial Sequence
  Synthetic oligonucleotide
gtgacagacctggacattcataagacgtac

SEQ ID NO: 200955 - DNA, 30 bp, Artificial Sequence
  Synthetic oligonucleotide
ccacttacggcgctgtagagggagacgtac

SEQ ID NO: 200956 - DNA, 30 bp, Artificial Sequence
  Synthetic oligonucleotide
cggatgaatgaaaacggagctgcgacgtac

SEQ ID NO: 200957 - DNA, 30 bp, Artificial Sequence
  Synthetic oligonucleotide
aagcactcaaactttaaggagtggacgtac

SEQ ID NO: 200958 - DNA, 30 bp, Artificial Sequence
  Synthetic oligonucleotide
atctaaagttaccaatgtgcatctacgtac

SEQ ID NO: 200959 - DNA, 30 bp, Artificial Sequence
  Synthetic oligonucleotide
gcatcgtgtggcgtataccacacaccgtac

SEQ ID NO: 200960 - DNA, 30 bp, Artificial Sequence
  Synthetic oligonucleotide
gacctggcgcaacatattaggctaccgtac

SEQ ID NO: 200961 - DNA, 30 bp, Artificial Sequence
  Synthetic oligonucleotide
gagtcacgatttggggcttaacacccgtac

SEQ ID NO: 200962 - DNA, 30 bp, Artificial Sequence
  Synthetic oligonucleotide
agcgagatcacccaagtcaggaccccgtac

SEQ ID NO: 200963 - DNA, 30 bp, Artificial Sequence
  Synthetic oligonucleotide
ctggttcagcttatccgacagcgcgcgtac

SEQ ID NO: 200964 - DNA, 30 bp, Artificial Sequence
  Synthetic oligonucleotide
catgtttcgtgtttgcactcaccggcgtac

SEQ ID NO: 200965 - DNA, 30 bp, Artificial Sequence
  Synthetic oligonucleotide
cggtgcagccgacttcttgtaggatcgtac

SEQ ID NO: 200966 - DNA, 30 bp, Artificial Sequence
  Synthetic oligonucleotide
ctacacacgggtatgaggcgaacctcgtac

SEQ ID NO: 200967 - DNA, 30 bp, Artificial Sequence
  Synthetic oligonucleotide
tagcacggttaacagttcaaaatctcgtac

SEQ ID NO: 200968 - DNA, 30 bp, Artificial Sequence
  Synthetic oligonucleotide
caagaatccctgctgaccgctaggtcgtac

SEQ ID NO: 200969 - DNA, 30 bp, Artificial Sequence
  Synthetic oligonucleotide
acagtatacctagagctgtgattttcgtac

SEQ ID NO: 200970 - DNA, 30 bp, Artificial Sequence
  Synthetic oligonucleotide
ttggtatacggcctttttagagaaaggtac

SEQ ID NO: 200971 - DNA, 30 bp, Artificial Sequence
  Synthetic oligonucleotide
gcttaatatcaaaactcaacggggaggtac

SEQ ID NO: 200972 - DNA, 30 bp, Artificial Sequence
  Synthetic oligonucleotide
aaggggtaccgtcccggccagcataggtac

SEQ ID NO: 200973 - DNA, 30 bp, Artificial Sequence
  Synthetic oligonucleotide
atgcgtctcaattactggcactgtaggtac

SEQ ID NO: 200974 - DNA, 30 bp, Artificial Sequence
  Synthetic oligonucleotide
attaaagaagcaggcaaacagagacggtac

SEQ ID NO: 200975 - DNA, 30 bp, Artificial Sequence
  Synthetic oligonucleotide
tcggtgacattagtttgttgtatacggtac

SEQ ID NO: 200976 - DNA, 30 bp, Artificial Sequence
  Synthetic oligonucleotide
gcttggcactgcacgtgtatgagccggtac

SEQ ID NO: 200977 - DNA, 30 bp, Artificial Sequence
  Synthetic oligonucleotide
acaacaggtaatactggtccaatccggtac

SEQ ID NO: 200978 - DNA, 30 bp, Artificial Sequence
  Synthetic oligonucleotide
tcttaacaacaccatacttaaaagcggtac

SEQ ID NO: 200979 - DNA, 30 bp, Artificial Sequence
  Synthetic oligonucleotide
tcgtggttccaccgagtacaacaagggtac

SEQ ID NO: 200980 - DNA, 30 bp, Artificial Sequence
  Synthetic oligonucleotide
gtatgtctctatctcctacggaccgggtac

SEQ ID NO: 200981 - DNA, 30 bp, Artificial Sequence
  Synthetic oligonucleotide
ttcggcccgtagagaatatgatgggggtac

SEQ ID NO: 200982 - DNA, 30 bp, Artificial Sequence
  Synthetic oligonucleotide
aaatcgactaaaaaagcacgttgctggtac

SEQ ID NO: 200983 - DNA, 30 bp, Artificial Sequence
  Synthetic oligonucleotide
actgccactgttccgctggttgcgtggtac

SEQ ID NO: 200984 - DNA, 30 bp, Artificial Sequence
  Synthetic oligonucleotide
tcggacaaaagtaggaggtccgggtggtac

SEQ ID NO: 200985 - DNA, 30 bp, Artificial Sequence
  Synthetic oligonucleotide
gtgataggtcatcattattcatggtggtac

SEQ ID NO: 200986 - DNA, 30 bp, Artificial Sequence
  Synthetic oligonucleotide
ttggttggtactggaccagtgcattggtac

SEQ ID NO: 200987 - DNA, 30 bp, Artificial Sequence
  Synthetic oligonucleotide
gcgtaacgggggtcaccgtcccgttggtac

SEQ ID NO: 200988 - DNA, 30 bp, Artificial Sequence
  Synthetic oligonucleotide
gaagaccaaggattttcagtttgcatgtac

SEQ ID NO: 200989 - DNA, 30 bp, Artificial Sequence
  Synthetic oligonucleotide
attaggtaaagacaatggcaggcgatgtac

SEQ ID NO: 200990 - DNA, 30 bp, Artificial Sequence
  Synthetic oligonucleotide
acgggaccctagggatgcttgcaagtgtac

SEQ ID NO: 200991 - DNA, 30 bp, Artificial Sequence
  Synthetic oligonucleotide
tagtagtcattaacagatcgtgcagtgtac

SEQ ID NO: 200992 - DNA, 30 bp, Artificial Sequence
  Synthetic oligonucleotide
gcaaggtctcgggccatactccacttgtac

SEQ ID NO: 200993 - DNA, 30 bp, Artificial Sequence
  Synthetic oligonucleotide
gacagggagcgagttgtggttaccttgtac

SEQ ID NO: 200994 - DNA, 30 bp, Artificial Sequence
  Synthetic oligonucleotide
cgcttttgatatttagacttgaatttgtac

SEQ ID NO: 200995 - DNA, 30 bp, Artificial Sequence
  Synthetic oligonucleotide
aagacttggagtgggtactcattcaattac

SEQ ID NO: 200996 - DNA, 30 bp, Artificial Sequence
  Synthetic oligonucleotide
taaggggtcgtcacgtctaacgcgaattac

SEQ ID NO: 200997 - DNA, 30 bp, Artificial Sequence
  Synthetic oligonucleotide
aggtttcgattcatacaatcccggaattac

SEQ ID NO: 200998 - DNA, 30 bp, Artificial Sequence
  Synthetic oligonucleotide
gagctagtatacaactttaatagacattac

SEQ ID NO: 200999 - DNA, 30 bp, Artificial Sequence
  Synthetic oligonucleotide
cgtatgtgtcggcaccgagcctgccattac

SEQ ID NO: 201000 - DNA, 30 bp, Artificial Sequence
  Synthetic oligonucleotide
gctcctaaagtcacatttggcggtgattac

SEQ ID NO: 201001 - DNA, 30 bp, Artificial Sequence
  Synthetic oligonucleotide
gtgggaaacagcgtaaacctttttgattac

SEQ ID NO: 201002 - DNA, 30 bp, Artificial Sequence
  Synthetic oligonucleotide
agggacgacggccctaatatatgatattac

SEQ ID NO: 201003 - DNA, 30 bp, Artificial Sequence
  Synthetic oligonucleotide
gggtcttagtcgaggtttctcatatattac

SEQ ID NO: 201004 - DNA, 30 bp, Artificial Sequence
  Synthetic oligonucleotide
tgaccaaccgacttcgcctctacgtattac

SEQ ID NO: 201005 - DNA, 30 bp, Artificial Sequence
  Synthetic oligonucleotide
cgaagcaccctagtaggcgtctcaacttac

SEQ ID NO: 201006 - DNA, 30 bp, Artificial Sequence
  Synthetic oligonucleotide
aacacccctgcggcctggtgcataacttac

SEQ ID NO: 201007 - DNA, 30 bp, Artificial Sequence
  Synthetic oligonucleotide
tcatgttggtcgtggatccctataacttac

SEQ ID NO: 201008 - DNA, 30 bp, Artificial Sequence
  Synthetic oligonucleotide
accccttgtgtcacagggcaatccacttac

SEQ ID NO: 201009 - DNA, 30 bp, Artificial Sequence
  Synthetic oligonucleotide
tgtaagggtattcgacgattgaggacttac

SEQ ID NO: 201010 - DNA, 30 bp, Artificial Sequence
  Synthetic oligonucleotide
cgtgtaacgaaaacgcgcgagtttacttac

SEQ ID NO: 201011 - DNA, 30 bp, Artificial Sequence
  Synthetic oligonucleotide
aacggtgaccgggtggcccgcaaaccttac

SEQ ID NO: 201012 - DNA, 30 bp, Artificial Sequence
  Synthetic oligonucleotide
aacccaagccacatcttagtgtcaccttac

SEQ ID NO: 201013 - DNA, 30 bp, Artificial Sequence
  Synthetic oligonucleotide
gtctgacctttcaacaaaatgctaccttac

SEQ ID NO: 201014 - DNA, 30 bp, Artificial Sequence
  Synthetic oligonucleotide
cgggatgtctaatagttgctagcgccttac

SEQ ID NO: 201015 - DNA, 31 bp, Artificial Sequence
  Synthetic oligonucleotide
gtgtgtggagcgtaatgtaaaaaccgcttac

SEQ ID NO: 201016 - DNA, 30 bp, Artificial Sequence
  Synthetic oligonucleotide
ggtgagacgggtctgtttaacaactcttac

SEQ ID NO: 201017 - DNA, 30 bp, Artificial Sequence
  Synthetic oligonucleotide
aagtaaaggcccgtctgaatttcgagttac

SEQ ID NO: 201018 - DNA, 30 bp, Artificial Sequence
  Synthetic oligonucleotide
catgtagacttaccatgcgtggggagttac

SEQ ID NO: 201019 - DNA, 30 bp, Artificial Sequence
  Synthetic oligonucleotide
tagatagcatagcaactggcattgagttac

SEQ ID NO: 201020 - DNA, 30 bp, Artificial Sequence
  Synthetic oligonucleotide
gcgactactggcgcttaaggaaggggttac

SEQ ID NO: 201021 - DNA, 30 bp, Artificial Sequence
  Synthetic oligonucleotide
caccgataagggtccaatatatatggttac

SEQ ID NO: 201022 - DNA, 30 bp, Artificial Sequence
  Synthetic oligonucleotide
tcggagtttagtacggcttcctactgttac

SEQ ID NO: 201023 - DNA, 30 bp, Artificial Sequence
  Synthetic oligonucleotide
aacggatgattagaatgtaaatgctgttac

SEQ ID NO: 201024 - DNA, 30 bp, Artificial Sequence
  Synthetic oligonucleotide
cttcgaagagatcgatgcaacgagtgttac

SEQ ID NO: 201025 - DNA, 30 bp, Artificial Sequence
  Synthetic oligonucleotide
tgtatcatagtatagaactgttgttgttac

SEQ ID NO: 201026 - DNA, 30 bp, Artificial Sequence
  Synthetic oligonucleotide
ttagggggtccagtctggatgtaaatttac

SEQ ID NO: 201027 - DNA, 30 bp, Artificial Sequence
  Synthetic oligonucleotide
aacgaggatgagccctacccaggaatttac

SEQ ID NO: 201028 - DNA, 30 bp, Artificial Sequence
  Synthetic oligonucleotide
tcccattagatgaatatatccaggatttac

SEQ ID NO: 201029 - DNA, 30 bp, Artificial Sequence
  Synthetic oligonucleotide
ccaccaatggctctctttatgactatttac

SEQ ID NO: 201030 - DNA, 30 bp, Artificial Sequence
  Synthetic oligonucleotide
gcgtagcaagacatatactgtattatttac

SEQ ID NO: 201031 - DNA, 30 bp, Artificial Sequence
  Synthetic oligonucleotide
gctacccgatgtttgagcctagcactttac

SEQ ID NO: 201032 - DNA, 30 bp, Artificial Sequence
  Synthetic oligonucleotide
aatcgcgagttatacgccttaggactttac

SEQ ID NO: 201033 - DNA, 30 bp, Artificial Sequence
  Synthetic oligonucleotide
tgaggtacaccattacgccaaatcctttac

SEQ ID NO: 201034 - DNA, 30 bp, Artificial Sequence
  Synthetic oligonucleotide
caatgagtgggtccagtctatgcgctttac

SEQ ID NO: 201035 - DNA, 30 bp, Artificial Sequence
  Synthetic oligonucleotide
acgtacggtaagcagaacccagtgctttac

SEQ ID NO: 201036 - DNA, 30 bp, Artificial Sequence
  Synthetic oligonucleotide
cagactgttgaacttaagtaagaagtttac

SEQ ID NO: 201037 - DNA, 30 bp, Artificial Sequence
  Synthetic oligonucleotide
gggttcccaagtagtagacaaatagtttac

SEQ ID NO: 201038 - DNA, 30 bp, Artificial Sequence
  Synthetic oligonucleotide
atgttagcgagatacgtttagttcgtttac

SEQ ID NO: 201039 - DNA, 30 bp, Artificial Sequence
  Synthetic oligonucleotide
aaccttatcccgaaatgtaaagcggtttac

SEQ ID NO: 201040 - DNA, 30 bp, Artificial Sequence
  Synthetic oligonucleotide
cacattaggtttagacagaccgttgtttac

SEQ ID NO: 201041 - DNA, 30 bp, Artificial Sequence
  Synthetic oligonucleotide
cgcctggcaaataacagcgcgctattttac

SEQ ID NO: 201042 - DNA, 30 bp, Artificial Sequence
  Synthetic oligonucleotide
cgagctggagtaccacaggctggtttttac

SEQ ID NO: 201043 - DNA, 30 bp, Artificial Sequence
  Synthetic oligonucleotide
acgtataagggtacttgattaaaaaaaacc

SEQ ID NO: 201044 - DNA, 30 bp, Artificial Sequence
  Synthetic oligonucleotide
atgacacgcattcctttgggtttgaaaacc

SEQ ID NO: 201045 - DNA, 30 bp, Artificial Sequence
  Synthetic oligonucleotide
ctctggactcgttatgataaatctaaaacc

SEQ ID NO: 201046 - DNA, 30 bp, Artificial Sequence
  Synthetic oligonucleotide
ccaaaggtgcaatacgggactccacaaacc

SEQ ID NO: 201047 - DNA, 30 bp, Artificial Sequence
  Synthetic oligonucleotide
aaagcgcgaaagtaagatcactcacaaacc

SEQ ID NO: 201048 - DNA, 30 bp, Artificial Sequence
  Synthetic oligonucleotide
ggttggggcaaaacagatttctggcaaacc

SEQ ID NO: 201049 - DNA, 30 bp, Artificial Sequence
  Synthetic oligonucleotide
catctcccgggcgatcggtccaaagaaacc

SEQ ID NO: 201050 - DNA, 30 bp, Artificial Sequence
  Synthetic oligonucleotide
atgcgttggtactctagcgattcagaaacc

SEQ ID NO: 201051 - DNA, 30 bp, Artificial Sequence
  Synthetic oligonucleotide
gaatggcacgctaatagagaacccgaaacc

SEQ ID NO: 201052 - DNA, 30 bp, Artificial Sequence
  Synthetic oligonucleotide
gaggatatagttcgtccaaggccggaaacc

SEQ ID NO: 201053 - DNA, 30 bp, Artificial Sequence
  Synthetic oligonucleotide
cgcttcaaagcctcgatatctttataaacc

SEQ ID NO: 201054 - DNA, 30 bp, Artificial Sequence
  Synthetic oligonucleotide
attacagacagagtctcgctcgggtaaacc

SEQ ID NO: 201055 - DNA, 30 bp, Artificial Sequence
  Synthetic oligonucleotide
gctggcggctagaatgaaaccttgtaaacc

SEQ ID NO: 201056 - DNA, 30 bp, Artificial Sequence
  Synthetic oligonucleotide
acatgagattcattaaccaagcattaaacc

SEQ ID NO: 201057 - DNA, 30 bp, Artificial Sequence
  Synthetic oligonucleotide
tgctcgtatcgatgttaacagtacacaacc

SEQ ID NO: 201058 - DNA, 30 bp, Artificial Sequence
  Synthetic oligonucleotide
tccgggcatatgccttgacagcagacaacc

SEQ ID NO: 201059 - DNA, 30 bp, Artificial Sequence
  Synthetic oligonucleotide
agcgctatgcgcggatacgatatcgcaacc

SEQ ID NO: 201060 - DNA, 30 bp, Artificial Sequence
  Synthetic oligonucleotide
ctacgatccactacatgatgtgatgcaacc

SEQ ID NO: 201061 - DNA, 30 bp, Artificial Sequence
  Synthetic oligonucleotide
gtaattaggcgacctgcaaggtgtgcaacc

SEQ ID NO: 201062 - DNA, 30 bp, Artificial Sequence
  Synthetic oligonucleotide
actactaggtaggcgcatagaggctcaacc

SEQ ID NO: 201063 - DNA, 30 bp, Artificial Sequence
  Synthetic oligonucleotide
ctttgtcggccgaaaggagctgggtcaacc

SEQ ID NO: 201064 - DNA, 30 bp, Artificial Sequence
  Synthetic oligonucleotide
gcgggagtacccccaacgagggtgtcaacc

SEQ ID NO: 201065 - DNA, 30 bp, Artificial Sequence
  Synthetic oligonucleotide
agcctggatgatacaaccgagcgaagaacc

SEQ ID NO: 201066 - DNA, 30 bp, Artificial Sequence
  Synthetic oligonucleotide
agtgtgggtgttcatcacataataagaacc

SEQ ID NO: 201067 - DNA, 30 bp, Artificial Sequence
  Synthetic oligonucleotide
cgtcatgtgtatcgaggactccagagaacc

SEQ ID NO: 201068 - DNA, 30 bp, Artificial Sequence
  Synthetic oligonucleotide
taaagggtcaaaggatagccaccccgaacc

SEQ ID NO: 201069 - DNA, 30 bp, Artificial Sequence
  Synthetic oligonucleotide
cttcgagggacactgggttgaagtcgaacc

SEQ ID NO: 201070 - DNA, 30 bp, Artificial Sequence
  Synthetic oligonucleotide
ctggtcacgcgtcctatgccacttcgaacc

SEQ ID NO: 201071 - DNA, 30 bp, Artificial Sequence
  Synthetic oligonucleotide
ggagggagtcaaagcagctgtcggggaacc

SEQ ID NO: 201072 - DNA, 30 bp, Artificial Sequence
  Synthetic oligonucleotide
cacgttgttgacccatcgcccgatggaacc

SEQ ID NO: 201073 - DNA, 30 bp, Artificial Sequence
  Synthetic oligonucleotide
gacactggatccttacaggtttcatgaacc

SEQ ID NO: 201074 - DNA, 30 bp, Artificial Sequence
  Synthetic oligonucleotide
atacgatagctcgcgcagggagcctgaacc

SEQ ID NO: 201075 - DNA, 30 bp, Artificial Sequence
  Synthetic oligonucleotide
agcgacaacccataggaacggaccataacc

SEQ ID NO: 201076 - DNA, 30 bp, Artificial Sequence
  Synthetic oligonucleotide
tttcaagtcgaggaatatcttggcataacc

SEQ ID NO: 201077 - DNA, 30 bp, Artificial Sequence
  Synthetic oligonucleotide
gggtgcctcaaccacatcgggctcataacc

SEQ ID NO: 201078 - DNA, 30 bp, Artificial Sequence
  Synthetic oligonucleotide
ccccgaaacgtgtgattcgagcagataacc

SEQ ID NO: 201079 - DNA, 30 bp, Artificial Sequence
  Synthetic oligonucleotide
aatctgccgtaagacagacttgcgataacc

SEQ ID NO: 201080 - DNA, 30 bp, Artificial Sequence
  Synthetic oligonucleotide
ggggctctagtaaactttgggcggataacc

SEQ ID NO: 201081 - DNA, 30 bp, Artificial Sequence
  Synthetic oligonucleotide
cgttgtgggagctggcacacgtatataacc

SEQ ID NO: 201082 - DNA, 30 bp, Artificial Sequence
  Synthetic oligonucleotide
acgacagattttaggtacgttgcactaacc

SEQ ID NO: 201083 - DNA, 30 bp, Artificial Sequence
  Synthetic oligonucleotide
ccatagtcacaggatctcgatgctgtaacc

SEQ ID NO: 201084 - DNA, 30 bp, Artificial Sequence
  Synthetic oligonucleotide
tgcgaagttgaacaagagctagaattaacc

SEQ ID NO: 201085 - DNA, 30 bp, Artificial Sequence
  Synthetic oligonucleotide
caagctagctttgccacttttcccttaacc

SEQ ID NO: 201086 - DNA, 30 bp, Artificial Sequence
  Synthetic oligonucleotide
acgggacagacggaacttgcacggttaacc

SEQ ID NO: 201087 - DNA, 30 bp, Artificial Sequence
  Synthetic oligonucleotide
tcgttccaatagaatcgttaacagaacacc

SEQ ID NO: 201088 - DNA, 30 bp, Artificial Sequence
  Synthetic oligonucleotide
cgaatcaagatccggagacggtagaacacc

SEQ ID NO: 201089 - DNA, 30 bp, Artificial Sequence
  Synthetic oligonucleotide
ttcctatctgcgaatatcccgtctaacacc

SEQ ID NO: 201090 - DNA, 30 bp, Artificial Sequence
  Synthetic oligonucleotide
gacaatactttaaaattcgcgcgtaacacc

SEQ ID NO: 201091 - DNA, 30 bp, Artificial Sequence
  Synthetic oligonucleotide
gagaattgcaaccaagttggcgttaacacc

SEQ ID NO: 201092 - DNA, 30 bp, Artificial Sequence
  Synthetic oligonucleotide
catacaataggccctgtacccgtccacacc

SEQ ID NO: 201093 - DNA, 30 bp, Artificial Sequence
  Synthetic oligonucleotide
taaagcactctgggggaacctaaagacacc

SEQ ID NO: 201094 - DNA, 30 bp, Artificial Sequence
  Synthetic oligonucleotide
gggaagatccccatacttgtaatagacacc

SEQ ID NO: 201095 - DNA, 30 bp, Artificial Sequence
  Synthetic oligonucleotide
tagcgctgcctctgattggaaaacgacacc

SEQ ID NO: 201096 - DNA, 30 bp, Artificial Sequence
  Synthetic oligonucleotide
aggtcaaaccggagctctaaagacgacacc

SEQ ID NO: 201097 - DNA, 30 bp, Artificial Sequence
  Synthetic oligonucleotide
gcacacgactagtagattcccgaggacacc

SEQ ID NO: 201098 - DNA, 30 bp, Artificial Sequence
  Synthetic oligonucleotide
gtaacgcctcaaccatcttgaccctacacc

SEQ ID NO: 201099 - DNA, 30 bp, Artificial Sequence
  Synthetic oligonucleotide
tatgtacaactttcacacataaattacacc

SEQ ID NO: 201100 - DNA, 30 bp, Artificial Sequence
  Synthetic oligonucleotide
catctaacgggggtgcgtgtacattacacc

SEQ ID NO: 201101 - DNA, 30 bp, Artificial Sequence
  Synthetic oligonucleotide
cttgaatatataactattatgaggaccacc

SEQ ID NO: 201102 - DNA, 30 bp, Artificial Sequence
  Synthetic oligonucleotide
acggtaatagcgtttaggtgcaataccacc

SEQ ID NO: 201103 - DNA, 30 bp, Artificial Sequence
  Synthetic oligonucleotide
atcaccggcataagttagggaactaccacc

SEQ ID NO: 201104 - DNA, 30 bp, Artificial Sequence
  Synthetic oligonucleotide
tttaacaggaaagatagtctgggccccacc

SEQ ID NO: 201105 - DNA, 31 bp, Artificial Sequence
  Synthetic oligonucleotide
gtcaggcagcctctactagcgtagcgccacc

SEQ ID NO: 201106 - DNA, 29 bp, Artificial Sequence
  Synthetic oligonucleotide
ccttatcgtggtgtacggcgtatgccacc

SEQ ID NO: 201107 - DNA, 30 bp, Artificial Sequence
  Synthetic oligonucleotide
cgtctaaggactcaacactatggctccacc

SEQ ID NO: 201108 - DNA, 30 bp, Artificial Sequence
  Synthetic oligonucleotide
tgatgtctctactagaaccacccgtccacc

SEQ ID NO: 201109 - DNA, 30 bp, Artificial Sequence
  Synthetic oligonucleotide
gcatacactgcgagtggatgcgggagcacc

SEQ ID NO: 201110 - DNA, 30 bp, Artificial Sequence
  Synthetic oligonucleotide
ggatagtcgtaactaagtgcggggagcacc

SEQ ID NO: 201111 - DNA, 30 bp, Artificial Sequence
  Synthetic oligonucleotide
tgcaatctaaaggggcgattcctgcgcacc

SEQ ID NO: 201112 - DNA, 30 bp, Artificial Sequence
  Synthetic oligonucleotide
gaccggaaaatggatatttgagatcgcacc

SEQ ID NO: 201113 - DNA, 30 bp, Artificial Sequence
  Synthetic oligonucleotide
gtgctcaacgggtttgacgtccaatgcacc

SEQ ID NO: 201114 - DNA, 30 bp, Artificial Sequence
  Synthetic oligonucleotide
agaattgggaatgaggctttcgcatgcacc

SEQ ID NO: 201115 - DNA, 30 bp, Artificial Sequence
  Synthetic oligonucleotide
ctgggttaggaactaatcgttcattgcacc

SEQ ID NO: 201116 - DNA, 30 bp, Artificial Sequence
  Synthetic oligonucleotide
aaggatgtggtaagtcactcgttttgcacc

SEQ ID NO: 201117 - DNA, 30 bp, Artificial Sequence
  Synthetic oligonucleotide
taaccgtggaacaatatgatgtcaatcacc

SEQ ID NO: 201118 - DNA, 30 bp, Artificial Sequence
  Synthetic oligonucleotide
gataggtacgtacattatgtcaccatcacc

SEQ ID NO: 201119 - DNA, 30 bp, Artificial Sequence
  Synthetic oligonucleotide
ccgggttgcatcttaaactttgatatcacc

SEQ ID NO: 201120 - DNA, 30 bp, Artificial Sequence
  Synthetic oligonucleotide
gtggcagtggagcatcaactacctctcacc

SEQ ID NO: 201121 - DNA, 30 bp, Artificial Sequence
  Synthetic oligonucleotide
tgctagagaagattcccactaagagtcacc

SEQ ID NO: 201122 - DNA, 30 bp, Artificial Sequence
  Synthetic oligonucleotide
tgcgtgtcaacgaagattaggcccgtcacc

SEQ ID NO: 201123 - DNA, 30 bp, Artificial Sequence
  Synthetic oligonucleotide
catcaggattagctggactgcgccgtcacc

SEQ ID NO: 201124 - DNA, 30 bp, Artificial Sequence
  Synthetic oligonucleotide
caaattctgagcgtgacaaatccattcacc

SEQ ID NO: 201125 - DNA, 30 bp, Artificial Sequence
  Synthetic oligonucleotide
aaacacgaagacgctcaattatcattcacc

SEQ ID NO: 201126 - DNA, 30 bp, Artificial Sequence
  Synthetic oligonucleotide
agctccagtagcccattcatgggattcacc

SEQ ID NO: 201127 - DNA, 30 bp, Artificial Sequence
  Synthetic oligonucleotide
ttaggctaaaccttctccattcccttcacc

SEQ ID NO: 201128 - DNA, 30 bp, Artificial Sequence
  Synthetic oligonucleotide
tgcctttgcaaaggcccggggccgaagacc

SEQ ID NO: 201129 - DNA, 30 bp, Artificial Sequence
  Synthetic oligonucleotide
aagtcgtcctcacagagttctgctaagacc

SEQ ID NO: 201130 - DNA, 30 bp, Artificial Sequence
  Synthetic oligonucleotide
tagtgtgccagtagtgaggaggagcagacc

SEQ ID NO: 201131 - DNA, 30 bp, Artificial Sequence
  Synthetic oligonucleotide
aaagggggcaaccacgttccccggcagacc

SEQ ID NO: 201132 - DNA, 30 bp, Artificial Sequence
  Synthetic oligonucleotide
cggcttgttgcatgatgtcgagatcagacc

SEQ ID NO: 201133 - DNA, 30 bp, Artificial Sequence
  Synthetic oligonucleotide
agacaagagcctgaaagaggatatcagacc

SEQ ID NO: 201134 - DNA, 30 bp, Artificial Sequence
  Synthetic oligonucleotide
gcgagtacagtgcaacttagtattcagacc

SEQ ID NO: 201135 - DNA, 30 bp, Artificial Sequence
  Synthetic oligonucleotide
taaaaatgatacatatcggcctcagagacc

SEQ ID NO: 201136 - DNA, 30 bp, Artificial Sequence
  Synthetic oligonucleotide
ctcctctggtctcgtaagtgaaaggagacc

SEQ ID NO: 201137 - DNA, 30 bp, Artificial Sequence
  Synthetic oligonucleotide
tcgttgcgctgtcaaacatgcgaggagacc

SEQ ID NO: 201138 - DNA, 30 bp, Artificial Sequence
  Synthetic oligonucleotide
cgggaagtttgtgggaatcgaacggagacc

SEQ ID NO: 201139 - DNA, 30 bp, Artificial Sequence
  Synthetic oligonucleotide
taatttggaagggacccaaccctggagacc

SEQ ID NO: 201140 - DNA, 30 bp, Artificial Sequence
  Synthetic oligonucleotide
tgtaattcacaagatattaatccgtagacc

SEQ ID NO: 201141 - DNA, 30 bp, Artificial Sequence
  Synthetic oligonucleotide
tgtttgtggacaaaacggaaactgtagacc

SEQ ID NO: 201142 - DNA, 30 bp, Artificial Sequence
  Synthetic oligonucleotide
cgctctgggaaaagtttgaagttgtagacc

SEQ ID NO: 201143 - DNA, 30 bp, Artificial Sequence
  Synthetic oligonucleotide
tggaacggcggtcccgtttccttaacgacc

SEQ ID NO: 201144 - DNA, 30 bp, Artificial Sequence
  Synthetic oligonucleotide
ataggatcctcctaaatcgccgctacgacc

SEQ ID NO: 201145 - DNA, 30 bp, Artificial Sequence
  Synthetic oligonucleotide
agatcagttttacggccaaagtgtacgacc

SEQ ID NO: 201146 - DNA, 30 bp, Artificial Sequence
  Synthetic oligonucleotide
cgtggcctaagtttccggcctgttccgacc

SEQ ID NO: 201147 - DNA, 30 bp, Artificial Sequence
  Synthetic oligonucleotide
tccgtgggcttacgtaccatttaagcgacc

SEQ ID NO: 201148 - DNA, 30 bp, Artificial Sequence
  Synthetic oligonucleotide
ttaatttctgacatatgtcggctcgcgacc

SEQ ID NO: 201149 - DNA, 30 bp, Artificial Sequence
  Synthetic oligonucleotide
ggcttagtcccatcggggaaatgggcgacc

SEQ ID NO: 201150 - DNA, 30 bp, Artificial Sequence
  Synthetic oligonucleotide
tacagaacaagcgcaggtgtggtggcgacc

SEQ ID NO: 201151 - DNA, 30 bp, Artificial Sequence
  Synthetic oligonucleotide
cctaggaactccactatacaccaatcgacc

SEQ ID NO: 201152 - DNA, 30 bp, Artificial Sequence
  Synthetic oligonucleotide
acatgaggcaagaatatggtgccatcgacc

SEQ ID NO: 201153 - DNA, 30 bp, Artificial Sequence
  Synthetic oligonucleotide
agtccgcaataggaccaaaatggctcgacc

SEQ ID NO: 201154 - DNA, 30 bp, Artificial Sequence
  Synthetic oligonucleotide
aatcatcgcgtgtgaaggcaggggtcgacc

SEQ ID NO: 201155 - DNA, 30 bp, Artificial Sequence
  Synthetic oligonucleotide
ggagatcatactctacgtcttaataggacc

SEQ ID NO: 201156 - DNA, 30 bp, Artificial Sequence
  Synthetic oligonucleotide
ttaggccgatcgcggtctcagcgtaggacc

SEQ ID NO: 201157 - DNA, 30 bp, Artificial Sequence
  Synthetic oligonucleotide
tcaggagtgcggaagcatcaagcacggacc

SEQ ID NO: 201158 - DNA, 30 bp, Artificial Sequence
  Synthetic oligonucleotide
tataacgcgaaggcaagcacgacgcggacc

SEQ ID NO: 201159 - DNA, 30 bp, Artificial Sequence
  Synthetic oligonucleotide
cgtagtgtaagtcgtccggtgattcggacc

SEQ ID NO: 201160 - DNA, 30 bp, Artificial Sequence
  Synthetic oligonucleotide
gtattgcactagctgagccgactcgggacc

SEQ ID NO: 201161 - DNA, 30 bp, Artificial Sequence
  Synthetic oligonucleotide
ccacgttcaagaaatatagcctgggggacc

SEQ ID NO: 201162 - DNA, 30 bp, Artificial Sequence
  Synthetic oligonucleotide
cttgtcgccaacaaggagcgaaatgggacc

SEQ ID NO: 201163 - DNA, 30 bp, Artificial Sequence
  Synthetic oligonucleotide
tgcaacactcaataacgaaagaatgggacc

SEQ ID NO: 201164 - DNA, 30 bp, Artificial Sequence
  Synthetic oligonucleotide
tagcggccaatgcagataacacttgggacc

SEQ ID NO: 201165 - DNA, 30 bp, Artificial Sequence
  Synthetic oligonucleotide
gcgcgtattcaatgcgaatgtcttgggacc

SEQ ID NO: 201166 - DNA, 30 bp, Artificial Sequence
  Synthetic oligonucleotide
ttctaatgcgcagtgggggcgtgatggacc

SEQ ID NO: 201167 - DNA, 30 bp, Artificial Sequence
  Synthetic oligonucleotide
tcaactcatcgatatatgtgttcctggacc

SEQ ID NO: 201168 - DNA, 30 bp, Artificial Sequence
  Synthetic oligonucleotide
ccaaggttgccaccggactattcgtggacc

SEQ ID NO: 201169 - DNA, 30 bp, Artificial Sequence
  Synthetic oligonucleotide
ccaaagcaagttggcaaaaagtgaatgacc

SEQ ID NO: 201170 - DNA, 30 bp, Artificial Sequence
  Synthetic oligonucleotide
cctatccggccaaagtcttgacacatgacc

SEQ ID NO: 201171 - DNA, 30 bp, Artificial Sequence
  Synthetic oligonucleotide
gtatagtggcctttccgggcggccatgacc

SEQ ID NO: 201172 - DNA, 30 bp, Artificial Sequence
  Synthetic oligonucleotide
ggcaggatggagacctgtaagtccatgacc

SEQ ID NO: 201173 - DNA, 30 bp, Artificial Sequence
  Synthetic oligonucleotide
ctacactggtgtgcttcttgaatcatgacc

SEQ ID NO: 201174 - DNA, 30 bp, Artificial Sequence
  Synthetic oligonucleotide
gagtgtgcctcgaacgaaaaaaagatgacc

SEQ ID NO: 201175 - DNA, 30 bp, Artificial Sequence
  Synthetic oligonucleotide
cggggtatctccagcagaacggagatgacc

SEQ ID NO: 201176 - DNA, 30 bp, Artificial Sequence
  Synthetic oligonucleotide
taaggctccacgcttttgagtgcgatgacc

SEQ ID NO: 201177 - DNA, 30 bp, Artificial Sequence
  Synthetic oligonucleotide
gattgaggaaatccactgatagctatgacc

SEQ ID NO: 201178 - DNA, 30 bp, Artificial Sequence
  Synthetic oligonucleotide
cgtgtatataactgtactaacgttatgacc

SEQ ID NO: 201179 - DNA, 30 bp, Artificial Sequence
  Synthetic oligonucleotide
agtacaggcacgggcggtcgtccactgacc

SEQ ID NO: 201180 - DNA, 30 bp, Artificial Sequence
  Synthetic oligonucleotide
tgcttgttcagcggggaaagaaacgtgacc

SEQ ID NO: 201181 - DNA, 30 bp, Artificial Sequence
  Synthetic oligonucleotide
ggattcatgtgcaaaagtcactatgtgacc

SEQ ID NO: 201182 - DNA, 30 bp, Artificial Sequence
  Synthetic oligonucleotide
acggtgccatactggctcggtctattgacc

SEQ ID NO: 201183 - DNA, 30 bp, Artificial Sequence
  Synthetic oligonucleotide
agattagaactggtagggcgtaccttgacc

SEQ ID NO: 201184 - DNA, 30 bp, Artificial Sequence
  Synthetic oligonucleotide
cctgctgcaaggggcgtgcgccgcaatacc

SEQ ID NO: 201185 - DNA, 30 bp, Artificial Sequence
  Synthetic oligonucleotide
aggggcgatcgtgtttggaacagtaatacc

SEQ ID NO: 201186 - DNA, 30 bp, Artificial Sequence
  Synthetic oligonucleotide
acatctcgttccatgtcttcgtaccatacc

SEQ ID NO: 201187 - DNA, 30 bp, Artificial Sequence
  Synthetic oligonucleotide
attcggccagagtacaaacggcacgatacc

SEQ ID NO: 201188 - DNA, 30 bp, Artificial Sequence
  Synthetic oligonucleotide
cgcggcaaaatgacgtttgtgagcgatacc

SEQ ID NO: 201189 - DNA, 30 bp, Artificial Sequence
  Synthetic oligonucleotide
tgaagacttaacggccgtattcatgatacc

SEQ ID NO: 201190 - DNA, 30 bp, Artificial Sequence
  Synthetic oligonucleotide
tggcaagtcatgaagtcaagtgttgatacc

SEQ ID NO: 201191 - DNA, 30 bp, Artificial Sequence
  Synthetic oligonucleotide
ggaaagtgctcagccagcggaaactatacc

SEQ ID NO: 201192 - DNA, 30 bp, Artificial Sequence
  Synthetic oligonucleotide
cctcgtccccttccgtaccctacgtatacc

SEQ ID NO: 201193 - DNA, 30 bp, Artificial Sequence
  Synthetic oligonucleotide
caagatcttctgcacgtgtcggcgtatacc

SEQ ID NO: 201194 - DNA, 30 bp, Artificial Sequence
  Synthetic oligonucleotide
caaggaatgtgatgcgatacctacactacc

SEQ ID NO: 201195 - DNA, 30 bp, Artificial Sequence
  Synthetic oligonucleotide
tggattccagccagccaatgggtcactacc

SEQ ID NO: 201196 - DNA, 30 bp, Artificial Sequence
  Synthetic oligonucleotide
atgcagggggacttgtccggacgacctacc

SEQ ID NO: 201197 - DNA, 30 bp, Artificial Sequence
  Synthetic oligonucleotide
caaataagcgcagacaaccttgcccctacc

SEQ ID NO: 201198 - DNA, 30 bp, Artificial Sequence
  Synthetic oligonucleotide
cgcaacaatattctcagggtcaaagctacc

SEQ ID NO: 201199 - DNA, 30 bp, Artificial Sequence
  Synthetic oligonucleotide
gtcagcaatcttgttcgattccaagctacc

SEQ ID NO: 201200 - DNA, 30 bp, Artificial Sequence
  Synthetic oligonucleotide
cgcctaggctcttcatcaattgtagctacc

SEQ ID NO: 201201 - DNA, 30 bp, Artificial Sequence
  Synthetic oligonucleotide
atatcggcgcataactgttgtgggtctacc

SEQ ID NO: 201202 - DNA, 30 bp, Artificial Sequence
  Synthetic oligonucleotide
ccagtcactcatctcgctgtttcaagtacc

SEQ ID NO: 201203 - DNA, 30 bp, Artificial Sequence
  Synthetic oligonucleotide
aagatagtcgaacagtgagcgctgagtacc

SEQ ID NO: 201204 - DNA, 30 bp, Artificial Sequence
  Synthetic oligonucleotide
attaggttgctcaaggaagagagacgtacc

SEQ ID NO: 201205 - DNA, 30 bp, Artificial Sequence
  Synthetic oligonucleotide
agatggtacaagtagcgctgaagcggtacc

SEQ ID NO: 201206 - DNA, 30 bp, Artificial Sequence
  Synthetic oligonucleotide
tttaggactgtagtagaaataaagggtacc

SEQ ID NO: 201207 - DNA, 30 bp, Artificial Sequence
  Synthetic oligonucleotide
aggaacttggcggcacaggccacgggtacc

SEQ ID NO: 201208 - DNA, 30 bp, Artificial Sequence
  Synthetic oligonucleotide
acaactatagcagctctcctcgcgggtacc

SEQ ID NO: 201209 - DNA, 30 bp, Artificial Sequence
  Synthetic oligonucleotide
cgttaattgtaataagccacattctgtacc

SEQ ID NO: 201210 - DNA, 30 bp, Artificial Sequence
  Synthetic oligonucleotide
acaagcgtcttctaagggggtgggtgtacc

SEQ ID NO: 201211 - DNA, 30 bp, Artificial Sequence
  Synthetic oligonucleotide
atctaataaggcctcaactcggtgtgtacc

SEQ ID NO: 201212 - DNA, 30 bp, Artificial Sequence
  Synthetic oligonucleotide
actgttaaaagtgtccgctggccaattacc

SEQ ID NO: 201213 - DNA, 30 bp, Artificial Sequence
  Synthetic oligonucleotide
tatgttacgatggtccaagagaagattacc

SEQ ID NO: 201214 - DNA, 30 bp, Artificial Sequence
  Synthetic oligonucleotide
gcgcccagtgtggttggcaggcctattacc

SEQ ID NO: 201215 - DNA, 30 bp, Artificial Sequence
  Synthetic oligonucleotide
cagtagcgataaatgaagctaagacttacc

SEQ ID NO: 201216 - DNA, 30 bp, Artificial Sequence
  Synthetic oligonucleotide
taactggtaccaaggtcgagcaaccttacc

SEQ ID NO: 201217 - DNA, 30 bp, Artificial Sequence
  Synthetic oligonucleotide
gtactatagttaattggcacagagcttacc

SEQ ID NO: 201218 - DNA, 30 bp, Artificial Sequence
  Synthetic oligonucleotide
tgctgcccgtcgaattggtcacacgttacc

SEQ ID NO: 201219 - DNA, 30 bp, Artificial Sequence
  Synthetic oligonucleotide
gtgggaagggaaagatctacctcggttacc

SEQ ID NO: 201220 - DNA, 30 bp, Artificial Sequence
  Synthetic oligonucleotide
ttcactggaggaagcaagtgaggggttacc

SEQ ID NO: 201221 - DNA, 30 bp, Artificial Sequence
  Synthetic oligonucleotide
gtatcacgtgtgcatattgaaaccaaaccc

SEQ ID NO: 201222 - DNA, 30 bp, Artificial Sequence
  Synthetic oligonucleotide
cgtgcgctccacaataaataggcgaaaccc

SEQ ID NO: 201223 - DNA, 30 bp, Artificial Sequence
  Synthetic oligonucleotide
tggagcaaatctgctagtcagggacaaccc

SEQ ID NO: 201224 - DNA, 30 bp, Artificial Sequence
  Synthetic oligonucleotide
aggcattctcggtaagctcggcagcaaccc

SEQ ID NO: 201225 - DNA, 30 bp, Artificial Sequence
  Synthetic oligonucleotide
caaaagggatgaggctgccagtcgcaaccc

SEQ ID NO: 201226 - DNA, 30 bp, Artificial Sequence
  Synthetic oligonucleotide
cggatagaggtcctcgcttagggtcaaccc

SEQ ID NO: 201227 - DNA, 30 bp, Artificial Sequence
  Synthetic oligonucleotide
atcgcgaatgctgcggacgtgagggaaccc

SEQ ID NO: 201228 - DNA, 30 bp, Artificial Sequence
  Synthetic oligonucleotide
ctgaatatggaaagttgtcgcaatgaaccc

SEQ ID NO: 201229 - DNA, 30 bp, Artificial Sequence
  Synthetic oligonucleotide
gccccgagcatataaaattaccaaacaccc

SEQ ID NO: 201230 - DNA, 30 bp, Artificial Sequence
  Synthetic oligonucleotide
atatagaacagttcgcgaaattcaacaccc

SEQ ID NO: 201231 - DNA, 30 bp, Artificial Sequence
  Synthetic oligonucleotide
ttaaggggtagtatgaatccgttaacaccc

SEQ ID NO: 201232 - DNA, 30 bp, Artificial Sequence
  Synthetic oligonucleotide
ttccgcacaatccgtaaagtgtgcacaccc

SEQ ID NO: 201233 - DNA, 30 bp, Artificial Sequence
  Synthetic oligonucleotide
gtgacttaacgtgttaatgtgccgacaccc

SEQ ID NO: 201234 - DNA, 30 bp, Artificial Sequence
  Synthetic oligonucleotide
ggccatgtgctaagaggtaggtttacaccc

SEQ ID NO: 201235 - DNA, 30 bp, Artificial Sequence
  Synthetic oligonucleotide
tgacgcctcattctgattgaaaagccaccc

SEQ ID NO: 201236 - DNA, 30 bp, Artificial Sequence
  Synthetic oligonucleotide
gcactggtgcaatgatctttagagccaccc

SEQ ID NO: 201237 - DNA, 30 bp, Artificial Sequence
  Synthetic oligonucleotide
agttctacatagggttacggggggccaccc

SEQ ID NO: 201238 - DNA, 30 bp, Artificial Sequence
  Synthetic oligonucleotide
acctaatagtctccataccgcttgccaccc

SEQ ID NO: 201239 - DNA, 30 bp, Artificial Sequence
  Synthetic oligonucleotide
acatgttcgccaattgaaaaccatccaccc

SEQ ID NO: 201240 - DNA, 30 bp, Artificial Sequence
  Synthetic oligonucleotide
tattgcggtgaaagccatatggttccaccc

SEQ ID NO: 201241 - DNA, 30 bp, Artificial Sequence
  Synthetic oligonucleotide
ataaaccgacttaccgtaaaagcagcaccc

SEQ ID NO: 201242 - DNA, 30 bp, Artificial Sequence
  Synthetic oligonucleotide
ttgggaactcacacaccaatcccatcaccc

SEQ ID NO: 201243 - DNA, 30 bp, Artificial Sequence
  Synthetic oligonucleotide
cggacgcctggctcaaaatccagaagaccc

SEQ ID NO: 201244 - DNA, 30 bp, Artificial Sequence
  Synthetic oligonucleotide
ccacgagtagtaatccgaagtaggagaccc

SEQ ID NO: 201245 - DNA, 30 bp, Artificial Sequence
  Synthetic oligonucleotide
tgcctgggaataaattaaccacggagaccc

SEQ ID NO: 201246 - DNA, 30 bp, Artificial Sequence
  Synthetic oligonucleotide
cgggttcgactcagctatgcaaatagaccc

SEQ ID NO: 201247 - DNA, 30 bp, Artificial Sequence
  Synthetic oligonucleotide
aagggcaaaactcccgaaaaacatagaccc

SEQ ID NO: 201248 - DNA, 30 bp, Artificial Sequence
  Synthetic oligonucleotide
gaccaacaggcgtttagtggggcgcgaccc

SEQ ID NO: 201249 - DNA, 30 bp, Artificial Sequence
  Synthetic oligonucleotide
tacggggctattccagggcactatggaccc

SEQ ID NO: 201250 - DNA, 30 bp, Artificial Sequence
  Synthetic oligonucleotide
ctgcagtcgaaagggaagaaccaatgaccc

SEQ ID NO: 201251 - DNA, 30 bp, Artificial Sequence
  Synthetic oligonucleotide
agagcgatactgtgccggttagtatgaccc

SEQ ID NO: 201252 - DNA, 30 bp, Artificial Sequence
  Synthetic oligonucleotide
gggagcttaggtcgcctcaaccgctgaccc

SEQ ID NO: 201253 - DNA, 30 bp, Artificial Sequence
  Synthetic oligonucleotide
gagaccgaacgagcccgtcctgtctgaccc

SEQ ID NO: 201254 - DNA, 30 bp, Artificial Sequence
  Synthetic oligonucleotide
gcagtggtaacggattatatcgattgaccc

SEQ ID NO: 201255 - DNA, 30 bp, Artificial Sequence
  Synthetic oligonucleotide
gtaaaagatcggaattaacccagtataccc

SEQ ID NO: 201256 - DNA, 30 bp, Artificial Sequence
  Synthetic oligonucleotide
gtcgtaaacgggttggctgatccactaccc

SEQ ID NO: 201257 - DNA, 30 bp, Artificial Sequence
  Synthetic oligonucleotide
gtaagcggttacaggttgctacacctaccc

SEQ ID NO: 201258 - DNA, 30 bp, Artificial Sequence
  Synthetic oligonucleotide
ttctataatagtgtcaacaaatgggtaccc

SEQ ID NO: 201259 - DNA, 30 bp, Artificial Sequence
  Synthetic oligonucleotide
cgccataacgaaaaataaggctatgtaccc

SEQ ID NO: 201260 - DNA, 30 bp, Artificial Sequence
  Synthetic oligonucleotide
agtcggactaataaacaaacgcgtgtaccc

SEQ ID NO: 201261 - DNA, 30 bp, Artificial Sequence
  Synthetic oligonucleotide
cgaaagtccgggagcgtaaacattgtaccc

SEQ ID NO: 201262 - DNA, 30 bp, Artificial Sequence
  Synthetic oligonucleotide
cagtctgttctagataatacactattaccc

SEQ ID NO: 201263 - DNA, 30 bp, Artificial Sequence
  Synthetic oligonucleotide
tgcaagtggactacatctggtagcttaccc

SEQ ID NO: 201264 - DNA, 30 bp, Artificial Sequence
  Synthetic oligonucleotide
actggcgttatcgccttagatctcttaccc

SEQ ID NO: 201265 - DNA, 30 bp, Artificial Sequence
  Synthetic oligonucleotide
cgagcctagttaaattatatcgctttaccc

SEQ ID NO: 201266 - DNA, 30 bp, Artificial Sequence
  Synthetic oligonucleotide
gtggtagtaaggtacgggctataaaacccc

SEQ ID NO: 201267 - DNA, 30 bp, Artificial Sequence
  Synthetic oligonucleotide
acgtccatacgcctaatcccggataacccc

SEQ ID NO: 201268 - DNA, 30 bp, Artificial Sequence
  Synthetic oligonucleotide
ggcggaggaaaggtgggtccaattaacccc

SEQ ID NO: 201269 - DNA, 30 bp, Artificial Sequence
  Synthetic oligonucleotide
actgggtcgacggcgtgaggtggccacccc

SEQ ID NO: 201270 - DNA, 30 bp, Artificial Sequence
  Synthetic oligonucleotide
tctaccttttaccacgactcgctccacccc

SEQ ID NO: 201271 - DNA, 30 bp, Artificial Sequence
  Synthetic oligonucleotide
aggtgtaatccaagtgagacgggtcacccc

SEQ ID NO: 201272 - DNA, 30 bp, Artificial Sequence
  Synthetic oligonucleotide
atgttgagcggggagtagcccgtagacccc

SEQ ID NO: 201273 - DNA, 30 bp, Artificial Sequence
  Synthetic oligonucleotide
acacactattaataggtattaaacgacccc

SEQ ID NO: 201274 - DNA, 30 bp, Artificial Sequence
  Synthetic oligonucleotide
tgagcccaggttcctgtgaagtgcgacccc

SEQ ID NO: 201275 - DNA, 30 bp, Artificial Sequence
  Synthetic oligonucleotide
ggcactgttggctttgttacaccaaccccc

SEQ ID NO: 201276 - DNA, 30 bp, Artificial Sequence
  Synthetic oligonucleotide
taatcacgcctaacttcgcattgaaccccc

SEQ ID NO: 201277 - DNA, 30 bp, Artificial Sequence
  Synthetic oligonucleotide
cagcacatgtgacatcattctagtaccccc

SEQ ID NO: 201278 - DNA, 30 bp, Artificial Sequence
  Synthetic oligonucleotide
agctagtgcattggagctcgcgttaccccc

SEQ ID NO: 201279 - DNA, 30 bp, Artificial Sequence
  Synthetic oligonucleotide
attgagagtacgttactatgttcacccccc

SEQ ID NO: 201280 - DNA, 30 bp, Artificial Sequence
  Synthetic oligonucleotide
cggacaacgttgcattgccattatcccccc

SEQ ID NO: 201281 - DNA, 30 bp, Artificial Sequence
  Synthetic oligonucleotide
aagcgacaaacatagtccgctagtcccccc

SEQ ID NO: 201282 - DNA, 30 bp, Artificial Sequence
  Synthetic oligonucleotide
aacgtgacccgaccctcacagggtcccccc

SEQ ID NO: 201283 - DNA, 30 bp, Artificial Sequence
  Synthetic oligonucleotide
atctacagttcgattggttaaagtgccccc

SEQ ID NO: 201284 - DNA, 30 bp, Artificial Sequence
  Synthetic oligonucleotide
gcgaatctccgcgatagggtaggatccccc

SEQ ID NO: 201285 - DNA, 30 bp, Artificial Sequence
  Synthetic oligonucleotide
tgcgtcgggcgtgctaacgggacttccccc

SEQ ID NO: 201286 - DNA, 30 bp, Artificial Sequence
  Synthetic oligonucleotide
cttaaaaaatattcagtggtcggttccccc

SEQ ID NO: 201287 - DNA, 30 bp, Artificial Sequence
  Synthetic oligonucleotide
caaccgtctcgtgctacctacgtttccccc

SEQ ID NO: 201288 - DNA, 30 bp, Artificial Sequence
  Synthetic oligonucleotide
tttgaagccagaaaaggaaactgcagcccc

SEQ ID NO: 201289 - DNA, 30 bp, Artificial Sequence
  Synthetic oligonucleotide
cgaggatcgacagtgcacgtgatcagcccc

SEQ ID NO: 201290 - DNA, 30 bp, Artificial Sequence
  Synthetic oligonucleotide
aagaggggagttcgatgtaacaggagcccc

SEQ ID NO: 201291 - DNA, 30 bp, Artificial Sequence
  Synthetic oligonucleotide
tagtactagcgacaatggttacgacgcccc

SEQ ID NO: 201292 - DNA, 30 bp, Artificial Sequence
  Synthetic oligonucleotide
agaggtcggaatgcgaagtactcgcgcccc

SEQ ID NO: 201293 - DNA, 30 bp, Artificial Sequence
  Synthetic oligonucleotide
cgagggcagcacgcacggtggaggcgcccc

SEQ ID NO: 201294 - DNA, 30 bp, Artificial Sequence
  Synthetic oligonucleotide
cgcgagtttcgattatatgattaatgcccc

SEQ ID NO: 201295 - DNA, 30 bp, Artificial Sequence
  Synthetic oligonucleotide
tcctaatggcgcgaggataatagctgcccc

SEQ ID NO: 201296 - DNA, 30 bp, Artificial Sequence
  Synthetic oligonucleotide
ggatattcttccacggtaggagacatcccc

SEQ ID NO: 201297 - DNA, 30 bp, Artificial Sequence
  Synthetic oligonucleotide
tggccttagggtaaaatgattcagatcccc

SEQ ID NO: 201298 - DNA, 30 bp, Artificial Sequence
  Synthetic oligonucleotide
gggatccctagtcgaaaccgcgctatcccc

SEQ ID NO: 201299 - DNA, 30 bp, Artificial Sequence
  Synthetic oligonucleotide
caagtatcactgtatttcatgggcgtcccc

SEQ ID NO: 201300 - DNA, 30 bp, Artificial Sequence
  Synthetic oligonucleotide
tacggacaaagagtgcgttgttttgtcccc

SEQ ID NO: 201301 - DNA, 30 bp, Artificial Sequence
  Synthetic oligonucleotide
gcaggagtttgggatcgaactgtcttcccc

SEQ ID NO: 201302 - DNA, 30 bp, Artificial Sequence
  Synthetic oligonucleotide
ggcccatggagatgtgctgccttgttcccc

SEQ ID NO: 201303 - DNA, 30 bp, Artificial Sequence
  Synthetic oligonucleotide
gcagactagcaaaataactggtcgaagccc

SEQ ID NO: 201304 - DNA, 30 bp, Artificial Sequence
  Synthetic oligonucleotide
gggcgaccattaagggacaggaggaagccc

SEQ ID NO: 201305 - DNA, 30 bp, Artificial Sequence
  Synthetic oligonucleotide
caggctcaccaatatgcggcaactaagccc

SEQ ID NO: 201306 - DNA, 30 bp, Artificial Sequence
  Synthetic oligonucleotide
gacgggtcgcgcattcctgccagacagccc

SEQ ID NO: 201307 - DNA, 30 bp, Artificial Sequence
  Synthetic oligonucleotide
gataaaagtagccggaatacacaccagccc

SEQ ID NO: 201308 - DNA, 30 bp, Artificial Sequence
  Synthetic oligonucleotide
cgcacgacgaggttcggccgaagggagccc

SEQ ID NO: 201309 - DNA, 30 bp, Artificial Sequence
  Synthetic oligonucleotide
agaggattttcgcaaaatgtcagggagccc

SEQ ID NO: 201310 - DNA, 30 bp, Artificial Sequence
  Synthetic oligonucleotide
ggctagaatgttcagggcgttaaatagccc

SEQ ID NO: 201311 - DNA, 30 bp, Artificial Sequence
  Synthetic oligonucleotide
taacataccatacaaaaaaccacatagccc

SEQ ID NO: 201312 - DNA, 30 bp, Artificial Sequence
  Synthetic oligonucleotide
tcgggatccggacattgccctgtttagccc

SEQ ID NO: 201313 - DNA, 30 bp, Artificial Sequence
  Synthetic oligonucleotide
aaacctgagatccagtccaataagccgccc

SEQ ID NO: 201314 - DNA, 30 bp, Artificial Sequence
  Synthetic oligonucleotide
tggtaatgataaaccttaacatacgcgccc

SEQ ID NO: 201315 - DNA, 30 bp, Artificial Sequence
  Synthetic oligonucleotide
tcagtagcaacggtccggggagcggcgccc

SEQ ID NO: 201316 - DNA, 30 bp, Artificial Sequence
  Synthetic oligonucleotide
tgaccgaggtaagggggatcttcctcgccc

SEQ ID NO: 201317 - DNA, 30 bp, Artificial Sequence
  Synthetic oligonucleotide
gggagggctcggtacacttcttcgtcgccc

SEQ ID NO: 201318 - DNA, 30 bp, Artificial Sequence
  Synthetic oligonucleotide
cgagcgttgccaatcataaaaaataggccc

SEQ ID NO: 201319 - DNA, 30 bp, Artificial Sequence
  Synthetic oligonucleotide
cacacttgatcaattctaaagaataggccc

SEQ ID NO: 201320 - DNA, 30 bp, Artificial Sequence
  Synthetic oligonucleotide
ccattggcatacgatgattaatccgggccc

SEQ ID NO: 201321 - DNA, 30 bp, Artificial Sequence
  Synthetic oligonucleotide
agggagttccagactgtcatgtctgggccc

SEQ ID NO: 201322 - DNA, 30 bp, Artificial Sequence
  Synthetic oligonucleotide
tgttgccccaacgattcttcgcattggccc

SEQ ID NO: 201323 - DNA, 30 bp, Artificial Sequence
  Synthetic oligonucleotide
gttgggtccatttatagatcgtattggccc

SEQ ID NO: 201324 - DNA, 30 bp, Artificial Sequence
  Synthetic oligonucleotide
atcgtcgtccgtggtgcctaagcaatgccc

SEQ ID NO: 201325 - DNA, 30 bp, Artificial Sequence
  Synthetic oligonucleotide
actgtatactagtaaagtgtcaggctgccc

SEQ ID NO: 201326 - DNA, 30 bp, Artificial Sequence
  Synthetic oligonucleotide
tgcgagatacgcgtgaaacagctcgtgccc

SEQ ID NO: 201327 - DNA, 30 bp, Artificial Sequence
  Synthetic oligonucleotide
tcatgcactagtaagacttgggatgtgccc

SEQ ID NO: 201328 - DNA, 30 bp, Artificial Sequence
  Synthetic oligonucleotide
tggtctggcgtcatgaaagtatacttgccc

SEQ ID NO: 201329 - DNA, 30 bp, Artificial Sequence
  Synthetic oligonucleotide
agacatgctcgatgatgcatgcgcttgccc

SEQ ID NO: 201330 - DNA, 30 bp, Artificial Sequence
  Synthetic oligonucleotide
taagatcagtaccagactgcaaagttgccc

SEQ ID NO: 201331 - DNA, 30 bp, Artificial Sequence
  Synthetic oligonucleotide
caagcgactttcttacaggcgataaatccc

SEQ ID NO: 201332 - DNA, 30 bp, Artificial Sequence
  Synthetic oligonucleotide
ttgtagtagtgcaattggatagaccatccc

SEQ ID NO: 201333 - DNA, 30 bp, Artificial Sequence
  Synthetic oligonucleotide
acttcagcaaaatgcttatttcgccatccc

SEQ ID NO: 201334 - DNA, 30 bp, Artificial Sequence
  Synthetic oligonucleotide
accatcccagtctaaaacgttctccatccc

SEQ ID NO: 201335 - DNA, 30 bp, Artificial Sequence
  Synthetic oligonucleotide
taggtgcatcgtaatagtacaaagcatccc

SEQ ID NO: 201336 - DNA, 30 bp, Artificial Sequence
  Synthetic oligonucleotide
gtggttatcatgcagacgttgtggcatccc

SEQ ID NO: 201337 - DNA, 30 bp, Artificial Sequence
  Synthetic oligonucleotide
gagggtgacctgttgaacttagacgatccc

SEQ ID NO: 201338 - DNA, 30 bp, Artificial Sequence
  Synthetic oligonucleotide
gccagtgcgacccacagaccggacgatccc

SEQ ID NO: 201339 - DNA, 30 bp, Artificial Sequence
  Synthetic oligonucleotide
cccacagccgatatggggggtcccgatccc

SEQ ID NO: 201340 - DNA, 30 bp, Artificial Sequence
  Synthetic oligonucleotide
gagatcgccgtgcggtagtaaaaggatccc

SEQ ID NO: 201341 - DNA, 30 bp, Artificial Sequence
  Synthetic oligonucleotide
tgccgaagaaatcgtacttgttgggatccc

SEQ ID NO: 201342 - DNA, 30 bp, Artificial Sequence
  Synthetic oligonucleotide
gtcggggcagacgtgaacaactgtgatccc

SEQ ID NO: 201343 - DNA, 30 bp, Artificial Sequence
  Synthetic oligonucleotide
gtggacatttagcgaaactaaacatatccc

SEQ ID NO: 201344 - DNA, 30 bp, Artificial Sequence
  Synthetic oligonucleotide
gagagtgctgcaccgttagcctacactccc

SEQ ID NO: 201345 - DNA, 30 bp, Artificial Sequence
  Synthetic oligonucleotide
cctgtgcgctaaagcgggggcgcgactccc

SEQ ID NO: 201346 - DNA, 30 bp, Artificial Sequence
  Synthetic oligonucleotide
tatagacaacatctccagatgtaagctccc

SEQ ID NO: 201347 - DNA, 30 bp, Artificial Sequence
  Synthetic oligonucleotide
gctcgatggcaaaacacgagaactgctccc

SEQ ID NO: 201348 - DNA, 30 bp, Artificial Sequence
  Synthetic oligonucleotide
tccagaggtatgaaatcgggttcgtctccc

SEQ ID NO: 201349 - DNA, 30 bp, Artificial Sequence
  Synthetic oligonucleotide
ggaaggttagctagggcacttcggtctccc

SEQ ID NO: 201350 - DNA, 30 bp, Artificial Sequence
  Synthetic oligonucleotide
atgttccaatgccaggtataaggaagtccc

SEQ ID NO: 201351 - DNA, 30 bp, Artificial Sequence
  Synthetic oligonucleotide
ctcagtgtgaccgtcaatattggaagtccc

SEQ ID NO: 201352 - DNA, 30 bp, Artificial Sequence
  Synthetic oligonucleotide
taccgcgccgcacagaaaatcggcagtccc

SEQ ID NO: 201353 - DNA, 30 bp, Artificial Sequence
  Synthetic oligonucleotide
ggtcttccacggaagttacatacgagtccc

SEQ ID NO: 201354 - DNA, 30 bp, Artificial Sequence
  Synthetic oligonucleotide
aagatggcgcgtcaatctcacgctcgtccc

SEQ ID NO: 201355 - DNA, 30 bp, Artificial Sequence
  Synthetic oligonucleotide
aaggcgtgactgatctaaaggtttcgtccc

SEQ ID NO: 201356 - DNA, 30 bp, Artificial Sequence
  Synthetic oligonucleotide
tgtgccaacgaggtggccttgaacggtccc

SEQ ID NO: 201357 - DNA, 30 bp, Artificial Sequence
  Synthetic oligonucleotide
aggataagcgacagaatcagccactgtccc

SEQ ID NO: 201358 - DNA, 30 bp, Artificial Sequence
  Synthetic oligonucleotide
ctcgcctataacagaaagaaagggtgtccc

SEQ ID NO: 201359 - DNA, 30 bp, Artificial Sequence
  Synthetic oligonucleotide
gatcgtcgaaaatgacgcttgtcttgtccc

SEQ ID NO: 201360 - DNA, 30 bp, Artificial Sequence
  Synthetic oligonucleotide
aggatagccatttcccgcctgagttgtccc

SEQ ID NO: 201361 - DNA, 30 bp, Artificial Sequence
  Synthetic oligonucleotide
gccatccaaacagttgggggtgtgcttccc

SEQ ID NO: 201362 - DNA, 30 bp, Artificial Sequence
  Synthetic oligonucleotide
taggtcatataggtccgggagcctcttccc

SEQ ID NO: 201363 - DNA, 30 bp, Artificial Sequence
  Synthetic oligonucleotide
ttatcaaagcacttaacttctatcgttccc

SEQ ID NO: 201364 - DNA, 30 bp, Artificial Sequence
  Synthetic oligonucleotide
gacggcatgcatagagatcgacgggttccc

SEQ ID NO: 201365 - DNA, 30 bp, Artificial Sequence
  Synthetic oligonucleotide
catcggaagtaaagggttagtctggttccc

SEQ ID NO: 201366 - DNA, 30 bp, Artificial Sequence
  Synthetic oligonucleotide
catagcctaacacactacccctactttccc

SEQ ID NO: 201367 - DNA, 30 bp, Artificial Sequence
  Synthetic oligonucleotide
agccaggtcgccaataattaccattttccc

SEQ ID NO: 201368 - DNA, 30 bp, Artificial Sequence
  Synthetic oligonucleotide
acattttcaaagccacgtatgggaaaagcc

SEQ ID NO: 201369 - DNA, 30 bp, Artificial Sequence
  Synthetic oligonucleotide
tgtaggaaccaacggatcttacgcaaagcc

SEQ ID NO: 201370 - DNA, 30 bp, Artificial Sequence
  Synthetic oligonucleotide
gcgagttaatcgacaacatccaataaagcc

SEQ ID NO: 201371 - DNA, 30 bp, Artificial Sequence
  Synthetic oligonucleotide
tctaataaggggccgtaagaatggcaagcc

SEQ ID NO: 201372 - DNA, 30 bp, Artificial Sequence
  Synthetic oligonucleotide
ggcataaagcgcggcgaataggtgcaagcc

SEQ ID NO: 201373 - DNA, 30 bp, Artificial Sequence
  Synthetic oligonucleotide
gttcacatttgagattaatcccgtcaagcc

SEQ ID NO: 201374 - DNA, 30 bp, Artificial Sequence
  Synthetic oligonucleotide
gtcgaattggattcccgctatgttcaagcc

SEQ ID NO: 201375 - DNA, 30 bp, Artificial Sequence
  Synthetic oligonucleotide
tgagagattttcggcaaataccatgaagcc

SEQ ID NO: 201376 - DNA, 30 bp, Artificial Sequence
  Synthetic oligonucleotide
tcggtccccaggatttttcgtgctgaagcc

SEQ ID NO: 201377 - DNA, 30 bp, Artificial Sequence
  Synthetic oligonucleotide
tctatggaccatagaccagcttctgaagcc

SEQ ID NO: 201378 - DNA, 30 bp, Artificial Sequence
  Synthetic oligonucleotide
cgatatggggaactgttgatccaataagcc

SEQ ID NO: 201379 - DNA, 30 bp, Artificial Sequence
  Synthetic oligonucleotide
catcaaaaccggccactattgccctaagcc

SEQ ID NO: 201380 - DNA, 30 bp, Artificial Sequence
  Synthetic oligonucleotide
tcactatgagaaggttttgcttgctaagcc

SEQ ID NO: 201381 - DNA, 30 bp, Artificial Sequence
  Synthetic oligonucleotide
gtctcgatcccggggaaagattccccagcc

SEQ ID NO: 201382 - DNA, 30 bp, Artificial Sequence
  Synthetic oligonucleotide
atcctgaagttagaaacgtagtcgccagcc

SEQ ID NO: 201383 - DNA, 30 bp, Artificial Sequence
  Synthetic oligonucleotide
gacggtgagcatgtgcctagaaaagcagcc

SEQ ID NO: 201384 - DNA, 30 bp, Artificial Sequence
  Synthetic oligonucleotide
ggaggacctaaagtgcacggaggcgcagcc

SEQ ID NO: 201385 - DNA, 30 bp, Artificial Sequence
  Synthetic oligonucleotide
gtatcagagacagtggctagagtcgcagcc

SEQ ID NO: 201386 - DNA, 30 bp, Artificial Sequence
  Synthetic oligonucleotide
cggcaacaaacatccgcgagaccctcagcc

SEQ ID NO: 201387 - DNA, 30 bp, Artificial Sequence
  Synthetic oligonucleotide
aaggcactgaacgcacgattttagtcagcc

SEQ ID NO: 201388 - DNA, 30 bp, Artificial Sequence
  Synthetic oligonucleotide
gttcaggtacgtgtgggaatgacgtcagcc

SEQ ID NO: 201389 - DNA, 30 bp, Artificial Sequence
  Synthetic oligonucleotide
cgggcgtaatctcacggtatcacttcagcc

SEQ ID NO: 201390 - DNA, 30 bp, Artificial Sequence
  Synthetic oligonucleotide
aattaaagtggcggcaatgaaccaagagcc

SEQ ID NO: 201391 - DNA, 30 bp, Artificial Sequence
  Synthetic oligonucleotide
cacacgcaaaaccagaagtttggcagagcc

SEQ ID NO: 201392 - DNA, 30 bp, Artificial Sequence
  Synthetic oligonucleotide
gtttgggcacgccgttcagatttcagagcc

SEQ ID NO: 201393 - DNA, 30 bp, Artificial Sequence
  Synthetic oligonucleotide
gagtaagctgaggaacatcgttatagagcc

SEQ ID NO: 201394 - DNA, 30 bp, Artificial Sequence
  Synthetic oligonucleotide
tagcaaatacacggggtaagaccaggagcc

SEQ ID NO: 201395 - DNA, 30 bp, Artificial Sequence
  Synthetic oligonucleotide
ctttacagggggctggactaagacggagcc

SEQ ID NO: 201396 - DNA, 30 bp, Artificial Sequence
  Synthetic oligonucleotide
ttgtcggggcaaggaccagatcgatgagcc

SEQ ID NO: 201397 - DNA, 30 bp, Artificial Sequence
  Synthetic oligonucleotide
aattaacagtgcgcacgtggttgcatagcc

SEQ ID NO: 201398 - DNA, 30 bp, Artificial Sequence
  Synthetic oligonucleotide
tcagagattccgatgttaacattactagcc

SEQ ID NO: 201399 - DNA, 30 bp, Artificial Sequence
  Synthetic oligonucleotide
gattgggaaagtcgcctgctcatcctagcc

SEQ ID NO: 201400 - DNA, 30 bp, Artificial Sequence
  Synthetic oligonucleotide
cgtaagcactaggtgagaacccagctagcc

SEQ ID NO: 201401 - DNA, 30 bp, Artificial Sequence
  Synthetic oligonucleotide
agtcagatcacgaggagcacagggctagcc

SEQ ID NO: 201402 - DNA, 30 bp, Artificial Sequence
  Synthetic oligonucleotide
attaagtggctttcgttaagtaaagtagcc

SEQ ID NO: 201403 - DNA, 30 bp, Artificial Sequence
  Synthetic oligonucleotide
ggtggggcgcgatcgtaggttagagtagcc

SEQ ID NO: 201404 - DNA, 30 bp, Artificial Sequence
  Synthetic oligonucleotide
gcggtccgggagaagggacagaacgtagcc

SEQ ID NO: 201405 - DNA, 30 bp, Artificial Sequence
  Synthetic oligonucleotide
tcatcgcaagcattcgatgcatgggtagcc

SEQ ID NO: 201406 - DNA, 30 bp, Artificial Sequence
  Synthetic oligonucleotide
tgactaagggtccgcttagcagtggtagcc

SEQ ID NO: 201407 - DNA, 30 bp, Artificial Sequence
  Synthetic oligonucleotide
ccggatgctaggaatagatgatatgtagcc

SEQ ID NO: 201408 - DNA, 30 bp, Artificial Sequence
  Synthetic oligonucleotide
ccgttggagccgacatgtctcactgtagcc

SEQ ID NO: 201409 - DNA, 30 bp, Artificial Sequence
  Synthetic oligonucleotide
taatcacaatccacctagatactcttagcc

SEQ ID NO: 201410 - DNA, 30 bp, Artificial Sequence
  Synthetic oligonucleotide
tatctaccgagagggctatcagcaaacgcc

SEQ ID NO: 201411 - DNA, 30 bp, Artificial Sequence
  Synthetic oligonucleotide
ccaggaccatgtttacagaacacgaacgcc

SEQ ID NO: 201412 - DNA, 30 bp, Artificial Sequence
  Synthetic oligonucleotide
ctgcattattcggttctaattgtgaacgcc

SEQ ID NO: 201413 - DNA, 30 bp, Artificial Sequence
  Synthetic oligonucleotide
attaaaaggatagtatccgtcaataacgcc

SEQ ID NO: 201414 - DNA, 30 bp, Artificial Sequence
  Synthetic oligonucleotide
gaacgcggcctaatgagattgccacacgcc

SEQ ID NO: 201415 - DNA, 30 bp, Artificial Sequence
  Synthetic oligonucleotide
cataaacgtcggacatgtgtcgcgcacgcc

SEQ ID NO: 201416 - DNA, 30 bp, Artificial Sequence
  Synthetic oligonucleotide
acggtgatccactccagggcaagcgacgcc

SEQ ID NO: 201417 - DNA, 30 bp, Artificial Sequence
  Synthetic oligonucleotide
tcaggctagatcttacatcgtaaatacgcc

SEQ ID NO: 201418 - DNA, 30 bp, Artificial Sequence
  Synthetic oligonucleotide
ctgactaaggcttaaataagtctatacgcc

SEQ ID NO: 201419 - DNA, 30 bp, Artificial Sequence
  Synthetic oligonucleotide
acgacatgcaccgtacggcgtcgctacgcc

SEQ ID NO: 201420 - DNA, 30 bp, Artificial Sequence
  Synthetic oligonucleotide
tgcatgggcacagggcagacgaattacgcc

SEQ ID NO: 201421 - DNA, 30 bp, Artificial Sequence
  Synthetic oligonucleotide
tcccttcggagaccgtaatgagattacgcc

SEQ ID NO: 201422 - DNA, 30 bp, Artificial Sequence
  Synthetic oligonucleotide
ttgtagtgcacccatgtacagagcaccgcc

SEQ ID NO: 201423 - DNA, 30 bp, Artificial Sequence
  Synthetic oligonucleotide
cccgatccactggactcgaacgagaccgcc

SEQ ID NO: 201424 - DNA, 30 bp, Artificial Sequence
  Synthetic oligonucleotide
ggtcgttacagaatagagccatagaccgcc

SEQ ID NO: 201425 - DNA, 30 bp, Artificial Sequence
  Synthetic oligonucleotide
tctgtcagaaacggttctgcggtgaccgcc

SEQ ID NO: 201426 - DNA, 30 bp, Artificial Sequence
  Synthetic oligonucleotide
acatttggtatggggtgttgctcacccgcc

SEQ ID NO: 201427 - DNA, 30 bp, Artificial Sequence
  Synthetic oligonucleotide
ctattggtgtttatgggttgacatcccgcc

SEQ ID NO: 201428 - DNA, 30 bp, Artificial Sequence
  Synthetic oligonucleotide
gataaaactgatatgttaagcaaggccgcc

SEQ ID NO: 201429 - DNA, 30 bp, Artificial Sequence
  Synthetic oligonucleotide
caagccagcgagcaccataagcgtgccgcc

SEQ ID NO: 201430 - DNA, 30 bp, Artificial Sequence
  Synthetic oligonucleotide
cagtactgttcacaaaagttcggatccgcc

SEQ ID NO: 201431 - DNA, 30 bp, Artificial Sequence
  Synthetic oligonucleotide
tcatgagcgggatgtatggctgtatccgcc

SEQ ID NO: 201432 - DNA, 30 bp, Artificial Sequence
  Synthetic oligonucleotide
atcaggaataggaagagaaggggctccgcc

SEQ ID NO: 201433 - DNA, 30 bp, Artificial Sequence
  Synthetic oligonucleotide
ttgtcacgattgggattgtgtctttccgcc

SEQ ID NO: 201434 - DNA, 30 bp, Artificial Sequence
  Synthetic oligonucleotide
ataagggtatctataaccagtccaagcgcc

SEQ ID NO: 201435 - DNA, 30 bp, Artificial Sequence
  Synthetic oligonucleotide
cgaaacccgggtgctcaaatcattagcgcc

SEQ ID NO: 201436 - DNA, 30 bp, Artificial Sequence
  Synthetic oligonucleotide
tctatcaaactgtggagagggattagcgcc

SEQ ID NO: 201437 - DNA, 30 bp, Artificial Sequence
  Synthetic oligonucleotide
acattagggtgcgtacaaactttacgcgcc

SEQ ID NO: 201438 - DNA, 30 bp, Artificial Sequence
  Synthetic oligonucleotide
tgttaaaccattctcaggctcatgcgcgcc

SEQ ID NO: 201439 - DNA, 30 bp, Artificial Sequence
  Synthetic oligonucleotide
tccgccaagacccgttatgccttttgcgcc

SEQ ID NO: 201440 - DNA, 30 bp, Artificial Sequence
  Synthetic oligonucleotide
ataggtctggggtggtccatacaaatcgcc

SEQ ID NO: 201441 - DNA, 30 bp, Artificial Sequence
  Synthetic oligonucleotide
cgcttgggtctactaggaccgatcatcgcc

SEQ ID NO: 201442 - DNA, 30 bp, Artificial Sequence
  Synthetic oligonucleotide
gtcactgtggtttcgtctagcttcctcgcc

SEQ ID NO: 201443 - DNA, 30 bp, Artificial Sequence
  Synthetic oligonucleotide
tttcattggaatggtacggtcgagctcgcc

SEQ ID NO: 201444 - DNA, 30 bp, Artificial Sequence
  Synthetic oligonucleotide
gagcccgcttagtatacgctaaatctcgcc

SEQ ID NO: 201445 - DNA, 30 bp, Artificial Sequence
  Synthetic oligonucleotide
gcttgtgtatccggtaacaagatagtcgcc

SEQ ID NO: 201446 - DNA, 30 bp, Artificial Sequence
  Synthetic oligonucleotide
agaatgactaacaggcgtacgtgcgtcgcc

SEQ ID NO: 201447 - DNA, 30 bp, Artificial Sequence
  Synthetic oligonucleotide
caccccatcccgtcttcacacgtcgtcgcc

SEQ ID NO: 201448 - DNA, 30 bp, Artificial Sequence
  Synthetic oligonucleotide
ttgatcactgacatcagaaatcaggtcgcc

SEQ ID NO: 201449 - DNA, 30 bp, Artificial Sequence
  Synthetic oligonucleotide
gcataggaccgggggagttcacatgtcgcc

SEQ ID NO: 201450 - DNA, 30 bp, Artificial Sequence
  Synthetic oligonucleotide
caacccagctataagtagtggcctgtcgcc

SEQ ID NO: 201451 - DNA, 30 bp, Artificial Sequence
  Synthetic oligonucleotide
acgggagcctagggttgtatacaattcgcc

SEQ ID NO: 201452 - DNA, 30 bp, Artificial Sequence
  Synthetic oligonucleotide
cggctcggtatcccacaatatggattcgcc

SEQ ID NO: 201453 - DNA, 30 bp, Artificial Sequence
  Synthetic oligonucleotide
tactatcgagcgaagttatggcggttcgcc

SEQ ID NO: 201454 - DNA, 30 bp, Artificial Sequence
  Synthetic oligonucleotide
ttacggaacatatggatcgcggtgttcgcc

SEQ ID NO: 201455 - DNA, 30 bp, Artificial Sequence
  Synthetic oligonucleotide
tggtatgaacaatgtcctgccattttcgcc

SEQ ID NO: 201456 - DNA, 30 bp, Artificial Sequence
  Synthetic oligonucleotide
actgggggttgtgcgtccgatattttcgcc

SEQ ID NO: 201457 - DNA, 30 bp, Artificial Sequence
  Synthetic oligonucleotide
tcaagagagccaaattagtagctaaaggcc

SEQ ID NO: 201458 - DNA, 30 bp, Artificial Sequence
  Synthetic oligonucleotide
agtgtgggtccttcagcctctgacaaggcc

SEQ ID NO: 201459 - DNA, 30 bp, Artificial Sequence
  Synthetic oligonucleotide
tagtactggcaatgcacaatatacaaggcc

SEQ ID NO: 201460 - DNA, 30 bp, Artificial Sequence
  Synthetic oligonucleotide
cgacacatcaccataactcctaataaggcc

SEQ ID NO: 201461 - DNA, 30 bp, Artificial Sequence
  Synthetic oligonucleotide
gagggtgatgggggtctctatcttaaggcc

SEQ ID NO: 201462 - DNA, 30 bp, Artificial Sequence
  Synthetic oligonucleotide
gctggtcagcgcctgaagtcagagcaggcc

SEQ ID NO: 201463 - DNA, 30 bp, Artificial Sequence
  Synthetic oligonucleotide
ctgccaagttctagcgtcagatttcaggcc

SEQ ID NO: 201464 - DNA, 30 bp, Artificial Sequence
  Synthetic oligonucleotide
agccttacgtgtggagagtgcacagaggcc

SEQ ID NO: 201465 - DNA, 30 bp, Artificial Sequence
  Synthetic oligonucleotide
agcgcgcacgggtggccgtgagccgaggcc

SEQ ID NO: 201466 - DNA, 30 bp, Artificial Sequence
  Synthetic oligonucleotide
gacatctcgtaggagtgccgtatcgaggcc

SEQ ID NO: 201467 - DNA, 30 bp, Artificial Sequence
  Synthetic oligonucleotide
gctgttaaagggggctagaagaactaggcc

SEQ ID NO: 201468 - DNA, 30 bp, Artificial Sequence
  Synthetic oligonucleotide
cgcgataatgtcgatagttttagctaggcc

SEQ ID NO: 201469 - DNA, 30 bp, Artificial Sequence
  Synthetic oligonucleotide
tgggtattatgtcactcggtctagtaggcc

SEQ ID NO: 201470 - DNA, 30 bp, Artificial Sequence
  Synthetic oligonucleotide
tcattctgatccgggcgcactaggtaggcc

SEQ ID NO: 201471 - DNA, 30 bp, Artificial Sequence
  Synthetic oligonucleotide
acaacatggcaaaaagcttggctttaggcc

SEQ ID NO: 201472 - DNA, 30 bp, Artificial Sequence
  Synthetic oligonucleotide
aaatcagcactaaccgatagaaacacggcc

SEQ ID NO: 201473 - DNA, 30 bp, Artificial Sequence
  Synthetic oligonucleotide
catatagaactggtaaagaaccgcacggcc

SEQ ID NO: 201474 - DNA, 30 bp, Artificial Sequence
  Synthetic oligonucleotide
tatggtgcaagggtcagcagaaggacggcc

SEQ ID NO: 201475 - DNA, 30 bp, Artificial Sequence
  Synthetic oligonucleotide
gtgtcttcataataagttactacaccggcc

SEQ ID NO: 201476 - DNA, 30 bp, Artificial Sequence
  Synthetic oligonucleotide
gatcgacagtatgttcaatgcgatccggcc

SEQ ID NO: 201477 - DNA, 30 bp, Artificial Sequence
  Synthetic oligonucleotide
ctatgctttcctattatcgtttctccggcc

SEQ ID NO: 201478 - DNA, 30 bp, Artificial Sequence
  Synthetic oligonucleotide
cggtagcaggagatcttgatcggtccggcc

SEQ ID NO: 201479 - DNA, 30 bp, Artificial Sequence
  Synthetic oligonucleotide
tggccaaaacttgagagggactgtccggcc

SEQ ID NO: 201480 - DNA, 29 bp, Artificial Sequence
  Synthetic oligonucleotide
ccagccgatgccaaagttcgaaagcggcc

SEQ ID NO: 201481 - DNA, 30 bp, Artificial Sequence
  Synthetic oligonucleotide
gtatcggataggaaggaaactgaagcggcc

SEQ ID NO: 201482 - DNA, 30 bp, Artificial Sequence
  Synthetic oligonucleotide
acgcgagataataaaggaacggcagcggcc

SEQ ID NO: 201483 - DNA, 30 bp, Artificial Sequence
  Synthetic oligonucleotide
actcctcggggttaaacaaggtgagcggcc

SEQ ID NO: 201484 - DNA, 30 bp, Artificial Sequence
  Synthetic oligonucleotide
ctaaggcatgatcaatgggccttcgcggcc

SEQ ID NO: 201485 - DNA, 30 bp, Artificial Sequence
  Synthetic oligonucleotide
tgggacaaatgggctgatttaagggcggcc

SEQ ID NO: 201486 - DNA, 30 bp, Artificial Sequence
  Synthetic oligonucleotide
gttactcctatggggtagcctatggcggcc

SEQ ID NO: 201487 - DNA, 30 bp, Artificial Sequence
  Synthetic oligonucleotide
tagaaaccgatctagaggatgtaatcggcc

SEQ ID NO: 201488 - DNA, 30 bp, Artificial Sequence
  Synthetic oligonucleotide
tttacacagtcccacgtgagtatatcggcc

SEQ ID NO: 201489 - DNA, 30 bp, Artificial Sequence
  Synthetic oligonucleotide
ttaggccctcatcatagcgagacgtcggcc

SEQ ID NO: 201490 - DNA, 30 bp, Artificial Sequence
  Synthetic oligonucleotide
actaatgtcacaagtgtatgccaaagggcc

SEQ ID NO: 201491 - DNA, 30 bp, Artificial Sequence
  Synthetic oligonucleotide
aaagcctggtaaagcccagacactagggcc

SEQ ID NO: 201492 - DNA, 30 bp, Artificial Sequence
  Synthetic oligonucleotide
ataatcgctggtacagagtggcaacgggcc

SEQ ID NO: 201493 - DNA, 30 bp, Artificial Sequence
  Synthetic oligonucleotide
ttagcatatttctacgagtgcgaccgggcc

SEQ ID NO: 201494 - DNA, 30 bp, Artificial Sequence
  Synthetic oligonucleotide
attggaaaattagagagtggctacggggcc

SEQ ID NO: 201495 - DNA, 30 bp, Artificial Sequence
  Synthetic oligonucleotide
acattagggccataccaacaagttggggcc

SEQ ID NO: 201496 - DNA, 30 bp, Artificial Sequence
  Synthetic oligonucleotide
cccgacctaccgtttcagcatcagtgggcc

SEQ ID NO: 201497 - DNA, 30 bp, Artificial Sequence
  Synthetic oligonucleotide
gcgatcgacgttggaaacattggcatggcc

SEQ ID NO: 201498 - DNA, 30 bp, Artificial Sequence
  Synthetic oligonucleotide
gcaaataaaaaaaaattgacggcgatggcc

SEQ ID NO: 201499 - DNA, 30 bp, Artificial Sequence
  Synthetic oligonucleotide
cgcattcgactccttaactacagactggcc

SEQ ID NO: 201500 - DNA, 30 bp, Artificial Sequence
  Synthetic oligonucleotide
catggcggggcaacggttcataacctggcc

SEQ ID NO: 201501 - DNA, 30 bp, Artificial Sequence
  Synthetic oligonucleotide
catagaagagaaaaggagaccctagtggcc

SEQ ID NO: 201502 - DNA, 30 bp, Artificial Sequence
  Synthetic oligonucleotide
tctcgcgctacgctttgcggagacgtggcc

SEQ ID NO: 201503 - DNA, 30 bp, Artificial Sequence
  Synthetic oligonucleotide
tcatgtctctgcatccagcatcgcgtggcc

SEQ ID NO: 201504 - DNA, 30 bp, Artificial Sequence
  Synthetic oligonucleotide
atgacacaagtagaactgatctagttggcc

SEQ ID NO: 201505 - DNA, 30 bp, Artificial Sequence
  Synthetic oligonucleotide
ttatgcatcataataggcacacaaaatgcc

SEQ ID NO: 201506 - DNA, 30 bp, Artificial Sequence
  Synthetic oligonucleotide
tggcgcgagcgattacgctgaggaaatgcc

SEQ ID NO: 201507 - DNA, 30 bp, Artificial Sequence
  Synthetic oligonucleotide
ggaatcacactgaccaacagttcccatgcc

SEQ ID NO: 201508 - DNA, 30 bp, Artificial Sequence
  Synthetic oligonucleotide
ctaaacacgaatcgtgtgggcattcatgcc

SEQ ID NO: 201509 - DNA, 30 bp, Artificial Sequence
  Synthetic oligonucleotide
aggtaggtccctagcctggagatggatgcc

SEQ ID NO: 201510 - DNA, 30 bp, Artificial Sequence
  Synthetic oligonucleotide
tgggctagtcgattctaagaataatatgcc

SEQ ID NO: 201511 - DNA, 30 bp, Artificial Sequence
  Synthetic oligonucleotide
gaccatacacgtacgatttcctcaactgcc

SEQ ID NO: 201512 - DNA, 30 bp, Artificial Sequence
  Synthetic oligonucleotide
gcccgcttggagcccaagattagaactgcc

SEQ ID NO: 201513 - DNA, 30 bp, Artificial Sequence
  Synthetic oligonucleotide
tataagtgtgaaggtagtatggtaactgcc

SEQ ID NO: 201514 - DNA, 30 bp, Artificial Sequence
  Synthetic oligonucleotide
caatgaggtttttcccaagttgacactgcc

SEQ ID NO: 201515 - DNA, 30 bp, Artificial Sequence
  Synthetic oligonucleotide
tgagtcgatgttctgattttagtacctgcc

SEQ ID NO: 201516 - DNA, 30 bp, Artificial Sequence
  Synthetic oligonucleotide
cacacggatttcgtgggggcagcccctgcc

SEQ ID NO: 201517 - DNA, 30 bp, Artificial Sequence
  Synthetic oligonucleotide
ggatcccaacaaggtatgaatgcccctgcc

SEQ ID NO: 201518 - DNA, 30 bp, Artificial Sequence
  Synthetic oligonucleotide
caaacatattgtagagccagggtccctgcc

SEQ ID NO: 201519 - DNA, 30 bp, Artificial Sequence
  Synthetic oligonucleotide
tctagggcactggactcatgaactcctgcc

SEQ ID NO: 201520 - DNA, 30 bp, Artificial Sequence
  Synthetic oligonucleotide
acacccaccctgactgaggcacaagctgcc

SEQ ID NO: 201521 - DNA, 30 bp, Artificial Sequence
  Synthetic oligonucleotide
gtcaccctagcagttgtatcatcagctgcc

SEQ ID NO: 201522 - DNA, 30 bp, Artificial Sequence
  Synthetic oligonucleotide
gcttacaaagccctcaatgagaccgctgcc

SEQ ID NO: 201523 - DNA, 30 bp, Artificial Sequence
  Synthetic oligonucleotide
taaccaaggcccaagtacacggatgctgcc

SEQ ID NO: 201524 - DNA, 30 bp, Artificial Sequence
  Synthetic oligonucleotide
cgaatgcgctatcacattgatactgctgcc

SEQ ID NO: 201525 - DNA, 30 bp, Artificial Sequence
  Synthetic oligonucleotide
tcttgtatttcaaatggacttactgctgcc

SEQ ID NO: 201526 - DNA, 30 bp, Artificial Sequence
  Synthetic oligonucleotide
ttgctcttactggattctaccagtgctgcc

SEQ ID NO: 201527 - DNA, 30 bp, Artificial Sequence
  Synthetic oligonucleotide
aaatgacgcgaagtccgacaagactctgcc

SEQ ID NO: 201528 - DNA, 30 bp, Artificial Sequence
  Synthetic oligonucleotide
gcgccttcgttcgcctcctagtagtctgcc

SEQ ID NO: 201529 - DNA, 30 bp, Artificial Sequence
  Synthetic oligonucleotide
gggcgccctaaagcatgacggatcagtgcc

SEQ ID NO: 201530 - DNA, 30 bp, Artificial Sequence
  Synthetic oligonucleotide
tcccttgcccgaatttgcaggttcagtgcc

SEQ ID NO: 201531 - DNA, 30 bp, Artificial Sequence
  Synthetic oligonucleotide
agttagtgtagtccatagtaaccgagtgcc

SEQ ID NO: 201532 - DNA, 30 bp, Artificial Sequence
  Synthetic oligonucleotide
ataaccccgcacctctacctctggagtgcc

SEQ ID NO: 201533 - DNA, 30 bp, Artificial Sequence
  Synthetic oligonucleotide
acacctgcggtcaagtacgaagctagtgcc

SEQ ID NO: 201534 - DNA, 30 bp, Artificial Sequence
  Synthetic oligonucleotide
cttcggtacagatgttcagtggttagtgcc

SEQ ID NO: 201535 - DNA, 30 bp, Artificial Sequence
  Synthetic oligonucleotide
cacatttcacttaaaatctagtaacgtgcc

SEQ ID NO: 201536 - DNA, 30 bp, Artificial Sequence
  Synthetic oligonucleotide
tgcttgcgtgatttccacagtgcacgtgcc

SEQ ID NO: 201537 - DNA, 30 bp, Artificial Sequence
  Synthetic oligonucleotide
ggaatgctcccagaactaatgtgacgtgcc

SEQ ID NO: 201538 - DNA, 30 bp, Artificial Sequence
  Synthetic oligonucleotide
agagagagttgggcaattcaaagccgtgcc

SEQ ID NO: 201539 - DNA, 30 bp, Artificial Sequence
  Synthetic oligonucleotide
tctagcgatcagaactggcgccagcgtgcc

SEQ ID NO: 201540 - DNA, 30 bp, Artificial Sequence
  Synthetic oligonucleotide
gctggggtatcgtccttcattgttcgtgcc

SEQ ID NO: 201541 - DNA, 30 bp, Artificial Sequence
  Synthetic oligonucleotide
ctttaatttatccgatgaggttcaggtgcc

SEQ ID NO: 201542 - DNA, 30 bp, Artificial Sequence
  Synthetic oligonucleotide
aatgtggttaagttctgcatgggaggtgcc

SEQ ID NO: 201543 - DNA, 30 bp, Artificial Sequence
  Synthetic oligonucleotide
ctacccaggtcgacatcaccaagatgtgcc

SEQ ID NO: 201544 - DNA, 30 bp, Artificial Sequence
  Synthetic oligonucleotide
acattatcctcccggggtgcgatctgtgcc

SEQ ID NO: 201545 - DNA, 30 bp, Artificial Sequence
  Synthetic oligonucleotide
taacgacggggcctcatcaatgtctgtgcc

SEQ ID NO: 201546 - DNA, 30 bp, Artificial Sequence
  Synthetic oligonucleotide
tcaattgctagctcacaatatgattgtgcc

SEQ ID NO: 201547 - DNA, 30 bp, Artificial Sequence
  Synthetic oligonucleotide
gcatatacaggctgccacatcagttgtgcc

SEQ ID NO: 201548 - DNA, 30 bp, Artificial Sequence
  Synthetic oligonucleotide
ggcaggagaatcgccactgtaataattgcc

SEQ ID NO: 201549 - DNA, 30 bp, Artificial Sequence
  Synthetic oligonucleotide
cagggggcatcgacaagagcaaccattgcc

SEQ ID NO: 201550 - DNA, 30 bp, Artificial Sequence
  Synthetic oligonucleotide
catcggcatggaatgttgacagccattgcc

SEQ ID NO: 201551 - DNA, 30 bp, Artificial Sequence
  Synthetic oligonucleotide
ctgtactattgcattcacggagggattgcc

SEQ ID NO: 201552 - DNA, 30 bp, Artificial Sequence
  Synthetic oligonucleotide
taggttagggtcttcctactcctgattgcc

SEQ ID NO: 201553 - DNA, 30 bp, Artificial Sequence
  Synthetic oligonucleotide
atgttgagaagacagtgcggttaacttgcc

SEQ ID NO: 201554 - DNA, 30 bp, Artificial Sequence
  Synthetic oligonucleotide
agtcaccgcgagccatgatgttcacttgcc

SEQ ID NO: 201555 - DNA, 30 bp, Artificial Sequence
  Synthetic oligonucleotide
cagttcggacatctaagacacgcccttgcc

SEQ ID NO: 201556 - DNA, 30 bp, Artificial Sequence
  Synthetic oligonucleotide
gcactatcggtagatacgtattgccttgcc

SEQ ID NO: 201557 - DNA, 30 bp, Artificial Sequence
  Synthetic oligonucleotide
tggcaccaagagaaaaatactgaagttgcc

SEQ ID NO: 201558 - DNA, 30 bp, Artificial Sequence
  Synthetic oligonucleotide
agtgcgccagtgcgcctgacgctagttgcc

SEQ ID NO: 201559 - DNA, 30 bp, Artificial Sequence
  Synthetic oligonucleotide
catcaggatattagaagtaatccatttgcc

SEQ ID NO: 201560 - DNA, 30 bp, Artificial Sequence
  Synthetic oligonucleotide
cgtacattagcaggtctggagcgctttgcc

SEQ ID NO: 201561 - DNA, 30 bp, Artificial Sequence
  Synthetic oligonucleotide
caggagttcgccgagcacccaacgtttgcc

SEQ ID NO: 201562 - DNA, 30 bp, Artificial Sequence
  Synthetic oligonucleotide
caggcaaacaacaggttattaatttttgcc

SEQ ID NO: 201563 - DNA, 30 bp, Artificial Sequence
  Synthetic oligonucleotide
cctcgacagctaccctgtggcacaaaatcc

SEQ ID NO: 201564 - DNA, 30 bp, Artificial Sequence
  Synthetic oligonucleotide
gtgctgataagggctagacccatgcaatcc

SEQ ID NO: 201565 - DNA, 30 bp, Artificial Sequence
  Synthetic oligonucleotide
tcaaccataagttaaaaatatcgtgaatcc

SEQ ID NO: 201566 - DNA, 30 bp, Artificial Sequence
  Synthetic oligonucleotide
gggtttcacaacgcaaagctaagataatcc

SEQ ID NO: 201567 - DNA, 30 bp, Artificial Sequence
  Synthetic oligonucleotide
gatggataatacagctcaaggacctaatcc

SEQ ID NO: 201568 - DNA, 30 bp, Artificial Sequence
  Synthetic oligonucleotide
tggaaaatgagccaccgaaaggtttaatcc

SEQ ID NO: 201569 - DNA, 30 bp, Artificial Sequence
  Synthetic oligonucleotide
aggccgttgattacacacgcaggcacatcc

SEQ ID NO: 201570 - DNA, 30 bp, Artificial Sequence
  Synthetic oligonucleotide
tctccgaatctaaaaggatccggtacatcc

SEQ ID NO: 201571 - DNA, 30 bp, Artificial Sequence
  Synthetic oligonucleotide
cacttccgtatggcgaggccgaacccatcc

SEQ ID NO: 201572 - DNA, 30 bp, Artificial Sequence
  Synthetic oligonucleotide
gggattgaaggagacgtaacccccccatcc

SEQ ID NO: 201573 - DNA, 30 bp, Artificial Sequence
  Synthetic oligonucleotide
gcggacaatccccctgtgagcacgccatcc

SEQ ID NO: 201574 - DNA, 30 bp, Artificial Sequence
  Synthetic oligonucleotide
cgcagggccgttctcctccatacagcatcc

SEQ ID NO: 201575 - DNA, 30 bp, Artificial Sequence
  Synthetic oligonucleotide
tgaaacatcgcacgatcgcgagaggcatcc

SEQ ID NO: 201576 - DNA, 30 bp, Artificial Sequence
  Synthetic oligonucleotide
agggtggatatgaatgtaggaagggcatcc

SEQ ID NO: 201577 - DNA, 30 bp, Artificial Sequence
  Synthetic oligonucleotide
ataaaagaaaattggcatttaggtgcatcc

SEQ ID NO: 201578 - DNA, 30 bp, Artificial Sequence
  Synthetic oligonucleotide
atgtggagtggccatcttcagcttgcatcc

SEQ ID NO: 201579 - DNA, 30 bp, Artificial Sequence
  Synthetic oligonucleotide
caggtccgaggtctgccaagagaatcatcc

SEQ ID NO: 201580 - DNA, 29 bp, Artificial Sequence
  Synthetic oligonucleotide
gatgggtttgactgagtgatgaatcatcc

SEQ ID NO: 201581 - DNA, 30 bp, Artificial Sequence
  Synthetic oligonucleotide
ttacgtctaaggcacacttaaggctcatcc

SEQ ID NO: 201582 - DNA, 30 bp, Artificial Sequence
  Synthetic oligonucleotide
accgtagatcccgtctacgtcggttcatcc

SEQ ID NO: 201583 - DNA, 30 bp, Artificial Sequence
  Synthetic oligonucleotide
agtaggcaacaagggaggacgtacagatcc

SEQ ID NO: 201584 - DNA, 30 bp, Artificial Sequence
  Synthetic oligonucleotide
gggacatgctaatttaaagcttggagatcc

SEQ ID NO: 201585 - DNA, 30 bp, Artificial Sequence
  Synthetic oligonucleotide
ctcgaacaccgtattggcaggtcacgatcc

SEQ ID NO: 201586 - DNA, 30 bp, Artificial Sequence
  Synthetic oligonucleotide
agcgcagaatcgcaaaattgaacccgatcc

SEQ ID NO: 201587 - DNA, 30 bp, Artificial Sequence
  Synthetic oligonucleotide
gtagaagctatgagaagcagccatcgatcc

SEQ ID NO: 201588 - DNA, 30 bp, Artificial Sequence
  Synthetic oligonucleotide
ttagtcaagctgagtggctcgggaggatcc

SEQ ID NO: 201589 - DNA, 30 bp, Artificial Sequence
  Synthetic oligonucleotide
gtacaggtcaggagcctgggcgtaggatcc

SEQ ID NO: 201590 - DNA, 30 bp, Artificial Sequence
  Synthetic oligonucleotide
gccatcaacattcttcatgatcacggatcc

SEQ ID NO: 201591 - DNA, 30 bp, Artificial Sequence
  Synthetic oligonucleotide
aagttcatttaccacagaagagtcggatcc

SEQ ID NO: 201592 - DNA, 30 bp, Artificial Sequence
  Synthetic oligonucleotide
gggaaccgtggcccactcttgcgtggatcc

SEQ ID NO: 201593 - DNA, 30 bp, Artificial Sequence
  Synthetic oligonucleotide
tgggcccttggggtctaagcagcatgatcc

SEQ ID NO: 201594 - DNA, 30 bp, Artificial Sequence
  Synthetic oligonucleotide
agttggacatcgtcctcaagaggatgatcc

SEQ ID NO: 201595 - DNA, 30 bp, Artificial Sequence
  Synthetic oligonucleotide
aatgcgtattctacttgggccttgtgatcc

SEQ ID NO: 201596 - DNA, 30 bp, Artificial Sequence
  Synthetic oligonucleotide
atgacgacgaactggctcacgggttgatcc

SEQ ID NO: 201597 - DNA, 30 bp, Artificial Sequence
  Synthetic oligonucleotide
agggcattacagagtatggcgctttgatcc

SEQ ID NO: 201598 - DNA, 30 bp, Artificial Sequence
  Synthetic oligonucleotide
ccaaaaagatacatgcctccaaggatatcc

SEQ ID NO: 201599 - DNA, 30 bp, Artificial Sequence
  Synthetic oligonucleotide
gctagtacattgcgagtgcgggttatatcc

SEQ ID NO: 201600 - DNA, 30 bp, Artificial Sequence
  Synthetic oligonucleotide
cagaaatgcatagggttccctaaactatcc

SEQ ID NO: 201601 - DNA, 30 bp, Artificial Sequence
  Synthetic oligonucleotide
ctcactgtggcaaaatagagataactatcc

SEQ ID NO: 201602 - DNA, 30 bp, Artificial Sequence
  Synthetic oligonucleotide
tggtacagttatccgccggaaagggtatcc

SEQ ID NO: 201603 - DNA, 30 bp, Artificial Sequence
  Synthetic oligonucleotide
attcgataggagataccatgatgtttatcc

SEQ ID NO: 201604 - DNA, 30 bp, Artificial Sequence
  Synthetic oligonucleotide
taatagggccaatcgtgtgcgtgtttatcc

SEQ ID NO: 201605 - DNA, 30 bp, Artificial Sequence
  Synthetic oligonucleotide
cgatgtgtcccatgccgaacctgaaactcc

SEQ ID NO: 201606 - DNA, 30 bp, Artificial Sequence
  Synthetic oligonucleotide
ttgtcaaaggggtaggggaggtgacactcc

SEQ ID NO: 201607 - DNA, 30 bp, Artificial Sequence
  Synthetic oligonucleotide
cccacgcatttatcttgttccacagactcc

SEQ ID NO: 201608 - DNA, 30 bp, Artificial Sequence
  Synthetic oligonucleotide
atgtcacggtagtatggatatcacgactcc

SEQ ID NO: 201609 - DNA, 30 bp, Artificial Sequence
  Synthetic oligonucleotide
ggggtacacaccggagataaggtatactcc

SEQ ID NO: 201610 - DNA, 30 bp, Artificial Sequence
  Synthetic oligonucleotide
atttggtatgggcggggcacaagctactcc

SEQ ID NO: 201611 - DNA, 30 bp, Artificial Sequence
  Synthetic oligonucleotide
tggtgcattcttcacagcaacggctactcc

SEQ ID NO: 201612 - DNA, 30 bp, Artificial Sequence
  Synthetic oligonucleotide
caatatgtgaccgcaagtgttgattactcc

SEQ ID NO: 201613 - DNA, 30 bp, Artificial Sequence
  Synthetic oligonucleotide
gatatccgacgaccaaatctgtaaacctcc

SEQ ID NO: 201614 - DNA, 30 bp, Artificial Sequence
  Synthetic oligonucleotide
ctggggatttgtgggatgagagatggctcc

SEQ ID NO: 201615 - DNA, 30 bp, Artificial Sequence
  Synthetic oligonucleotide
tatcagctcgtgcgaggacgtgatggctcc

SEQ ID NO: 201616 - DNA, 30 bp, Artificial Sequence
  Synthetic oligonucleotide
ttcacaacaagtaacccacacaactgctcc

SEQ ID NO: 201617 - DNA, 30 bp, Artificial Sequence
  Synthetic oligonucleotide
aaggaggcttcgctggtggactcgtgctcc

SEQ ID NO: 201618 - DNA, 30 bp, Artificial Sequence
  Synthetic oligonucleotide
gaagaacggtgatacgagagaaaaatctcc

SEQ ID NO: 201619 - DNA, 30 bp, Artificial Sequence
  Synthetic oligonucleotide
gatcgctgatctcattgctatataatctcc

SEQ ID NO: 201620 - DNA, 30 bp, Artificial Sequence
  Synthetic oligonucleotide
aacggttcaccgtcagatctgcggatctcc

SEQ ID NO: 201621 - DNA, 30 bp, Artificial Sequence
  Synthetic oligonucleotide
tagagttaataagcaaccgaggatatctcc

SEQ ID NO: 201622 - DNA, 30 bp, Artificial Sequence
  Synthetic oligonucleotide
aacataacaaggatgacagttggcctctcc

SEQ ID NO: 201623 - DNA, 30 bp, Artificial Sequence
  Synthetic oligonucleotide
gcaaggggacatgcttatcacggtgtctcc

SEQ ID NO: 201624 - DNA, 30 bp, Artificial Sequence
  Synthetic oligonucleotide
aacggagaacgaaacgaccggggtgtctcc

SEQ ID NO: 201625 - DNA, 30 bp, Artificial Sequence
  Synthetic oligonucleotide
tagcgtacggtgcgttttcacgtattctcc

SEQ ID NO: 201626 - DNA, 30 bp, Artificial Sequence
  Synthetic oligonucleotide
ggaacttagatgttgctcttgtccttctcc

SEQ ID NO: 201627 - DNA, 30 bp, Artificial Sequence
  Synthetic oligonucleotide
ttaaacgtctagctcctaaatccgttctcc

SEQ ID NO: 201628 - DNA, 30 bp, Artificial Sequence
  Synthetic oligonucleotide
gtaatagagtacattcatgtgcggttctcc

SEQ ID NO: 201629 - DNA, 30 bp, Artificial Sequence
  Synthetic oligonucleotide
tcctaccgcgccgtcgatgcgggaaagtcc

SEQ ID NO: 201630 - DNA, 30 bp, Artificial Sequence
  Synthetic oligonucleotide
aagtagcgcaggctcaatggggtaaagtcc

SEQ ID NO: 201631 - DNA, 30 bp, Artificial Sequence
  Synthetic oligonucleotide
gcgatcgattcgatcagcgtgtgcaagtcc

SEQ ID NO: 201632 - DNA, 30 bp, Artificial Sequence
  Synthetic oligonucleotide
cgcgctccacaacgatcttggcagaagtcc

SEQ ID NO: 201633 - DNA, 30 bp, Artificial Sequence
  Synthetic oligonucleotide
aggtaacaagggcaccatttttaacagtcc

SEQ ID NO: 201634 - DNA, 30 bp, Artificial Sequence
  Synthetic oligonucleotide
caaaattccttgataccctacgtccagtcc

SEQ ID NO: 201635 - DNA, 30 bp, Artificial Sequence
  Synthetic oligonucleotide
aaggtaaaggtatactggccgcaagagtcc

SEQ ID NO: 201636 - DNA, 30 bp, Artificial Sequence
  Synthetic oligonucleotide
cctactactcgtttatgtcattccgagtcc

SEQ ID NO: 201637 - DNA, 30 bp, Artificial Sequence
  Synthetic oligonucleotide
tgaaactaaacagtcgctcaccgggagtcc

SEQ ID NO: 201638 - DNA, 30 bp, Artificial Sequence
  Synthetic oligonucleotide
tcaacgtagacgatagaagtccatgagtcc

SEQ ID NO: 201639 - DNA, 30 bp, Artificial Sequence
  Synthetic oligonucleotide
atggtctaacctgggacgtacccatagtcc

SEQ ID NO: 201640 - DNA, 30 bp, Artificial Sequence
  Synthetic oligonucleotide
tcgagatatctccgatagatggagtagtcc

SEQ ID NO: 201641 - DNA, 30 bp, Artificial Sequence
  Synthetic oligonucleotide
agagtgagagtagaagagttgtgttagtcc

SEQ ID NO: 201642 - DNA, 30 bp, Artificial Sequence
  Synthetic oligonucleotide
agtcatccctataaggcttcgagaacgtcc

SEQ ID NO: 201643 - DNA, 30 bp, Artificial Sequence
  Synthetic oligonucleotide
ccgaggatacggtattgcccgtgaacgtcc

SEQ ID NO: 201644 - DNA, 30 bp, Artificial Sequence
  Synthetic oligonucleotide
ggggttgcgatatagtcaatagacacgtcc

SEQ ID NO: 201645 - DNA, 30 bp, Artificial Sequence
  Synthetic oligonucleotide
ggtaggctaccaggtaacgtgaggacgtcc

SEQ ID NO: 201646 - DNA, 30 bp, Artificial Sequence
  Synthetic oligonucleotide
ttcccagacgaaggaatcttttggacgtcc

SEQ ID NO: 201647 - DNA, 30 bp, Artificial Sequence
  Synthetic oligonucleotide
taggaccagggacacgttcctgatacgtcc

SEQ ID NO: 201648 - DNA, 30 bp, Artificial Sequence
  Synthetic oligonucleotide
ccgcacttgcgctgtccataacacccgtcc

SEQ ID NO: 201649 - DNA, 30 bp, Artificial Sequence
  Synthetic oligonucleotide
atcaacgtaaaagtttgtaggtcagcgtcc

SEQ ID NO: 201650 - DNA, 31 bp, Artificial Sequence
  Synthetic oligonucleotide
cgggcaacgtcaaccgggatcaaatgcgtcc

SEQ ID NO: 201651 - DNA, 30 bp, Artificial Sequence
  Synthetic oligonucleotide
catccagccggtaaaataaatactgcgtcc

SEQ ID NO: 201652 - DNA, 30 bp, Artificial Sequence
  Synthetic oligonucleotide
acgcgagtgacaggtcgccggcaaaggtcc

SEQ ID NO: 201653 - DNA, 30 bp, Artificial Sequence
  Synthetic oligonucleotide
gaaaaaaggggcgacaacaggctaaggtcc

SEQ ID NO: 201654 - DNA, 30 bp, Artificial Sequence
  Synthetic oligonucleotide
cgcgaagagagcaggccaggacacaggtcc

SEQ ID NO: 201655 - DNA, 30 bp, Artificial Sequence
  Synthetic oligonucleotide
ggagtctggtacgcgtgcttcctcaggtcc

SEQ ID NO: 201656 - DNA, 30 bp, Artificial Sequence
  Synthetic oligonucleotide
cattaaggggcacatgcgaccgagaggtcc

SEQ ID NO: 201657 - DNA, 30 bp, Artificial Sequence
  Synthetic oligonucleotide
gttaaggaaaaccacaccttaacgaggtcc

SEQ ID NO: 201658 - DNA, 30 bp, Artificial Sequence
  Synthetic oligonucleotide
ggtgatctttaaaggcgtagcgcgaggtcc

SEQ ID NO: 201659 - DNA, 30 bp, Artificial Sequence
  Synthetic oligonucleotide
gccagtacctgagtacgtttgctgaggtcc

SEQ ID NO: 201660 - DNA, 30 bp, Artificial Sequence
  Synthetic oligonucleotide
aaggtcaaacggtgcaatgcagctaggtcc

SEQ ID NO: 201661 - DNA, 30 bp, Artificial Sequence
  Synthetic oligonucleotide
aatgacgcgctttgacgacttgaccggtcc

SEQ ID NO: 201662 - DNA, 30 bp, Artificial Sequence
  Synthetic oligonucleotide
ggtgctgttacacccacggagcttcggtcc

SEQ ID NO: 201663 - DNA, 30 bp, Artificial Sequence
  Synthetic oligonucleotide
accaaaggcgggaatgacctcttggggtcc

SEQ ID NO: 201664 - DNA, 30 bp, Artificial Sequence
  Synthetic oligonucleotide
cctgacagagtggtgcatcggccatggtcc

SEQ ID NO: 201665 - DNA, 30 bp, Artificial Sequence
  Synthetic oligonucleotide
acggcaagccgcccgtagacgtcgtggtcc

SEQ ID NO: 201666 - DNA, 30 bp, Artificial Sequence
  Synthetic oligonucleotide
aagtacaaacagctgaggccgtcttggtcc

SEQ ID NO: 201667 - DNA, 30 bp, Artificial Sequence
  Synthetic oligonucleotide
ggggcgtatgggctaatgaggttaatgtcc

SEQ ID NO: 201668 - DNA, 30 bp, Artificial Sequence
  Synthetic oligonucleotide
cagtactaatccgagagacccaatatgtcc

SEQ ID NO: 201669 - DNA, 30 bp, Artificial Sequence
  Synthetic oligonucleotide
ctaacaccatagcaacatatgcatatgtcc

SEQ ID NO: 201670 - DNA, 30 bp, Artificial Sequence
  Synthetic oligonucleotide
tgctataatcgcctccgagcaatgctgtcc

SEQ ID NO: 201671 - DNA, 30 bp, Artificial Sequence
  Synthetic oligonucleotide
tctgaacggatcgttcggaggcgcgtgtcc

SEQ ID NO: 201672 - DNA, 30 bp, Artificial Sequence
  Synthetic oligonucleotide
atacgtacctctctgaaggttaaattgtcc

SEQ ID NO: 201673 - DNA, 30 bp, Artificial Sequence
  Synthetic oligonucleotide
gagagatatccgcggctcgcaccgttgtcc

SEQ ID NO: 201674 - DNA, 30 bp, Artificial Sequence
  Synthetic oligonucleotide
gggatggcggtacctgggcgacatttgtcc

SEQ ID NO: 201675 - DNA, 30 bp, Artificial Sequence
  Synthetic oligonucleotide
agtatgggttttactcttctgcatttgtcc

SEQ ID NO: 201676 - DNA, 30 bp, Artificial Sequence
  Synthetic oligonucleotide
acacaccatcgggtaaagagtcttttgtcc

SEQ ID NO: 201677 - DNA, 30 bp, Artificial Sequence
  Synthetic oligonucleotide
cttcttgcctgtctacttgccgaaaattcc

SEQ ID NO: 201678 - DNA, 30 bp, Artificial Sequence
  Synthetic oligonucleotide
cgccgtgtcatgggtgtctataacaattcc

SEQ ID NO: 201679 - DNA, 30 bp, Artificial Sequence
  Synthetic oligonucleotide
gaggccgcggtgcgcgccaagctcaattcc

SEQ ID NO: 201680 - DNA, 30 bp, Artificial Sequence
  Synthetic oligonucleotide
caacccgtatccctcaattcaccacattcc

SEQ ID NO: 201681 - DNA, 30 bp, Artificial Sequence
  Synthetic oligonucleotide
ggtttgaagaaggggactgcaacgcattcc

SEQ ID NO: 201682 - DNA, 30 bp, Artificial Sequence
  Synthetic oligonucleotide
gcggaatcgcagaaagacagagggcattcc

SEQ ID NO: 201683 - DNA, 30 bp, Artificial Sequence
  Synthetic oligonucleotide
attgatgggactaggactgtattagattcc

SEQ ID NO: 201684 - DNA, 30 bp, Artificial Sequence
  Synthetic oligonucleotide
cggtgtatcgattttttgatgaaatattcc

SEQ ID NO: 201685 - DNA, 30 bp, Artificial Sequence
  Synthetic oligonucleotide
aaacctgtggcctgatgacgggaatattcc

SEQ ID NO: 201686 - DNA, 30 bp, Artificial Sequence
  Synthetic oligonucleotide
attggcggaatagagcacgatctatattcc

SEQ ID NO: 201687 - DNA, 30 bp, Artificial Sequence
  Synthetic oligonucleotide
ctgtccctcatggaagaaactggctattcc

SEQ ID NO: 201688 - DNA, 30 bp, Artificial Sequence
  Synthetic oligonucleotide
cattgatttagtaataacgtacggtattcc

SEQ ID NO: 201689 - DNA, 30 bp, Artificial Sequence
  Synthetic oligonucleotide
acgatcatcgtgtttagctccctaccttcc

SEQ ID NO: 201690 - DNA, 30 bp, Artificial Sequence
  Synthetic oligonucleotide
gaaagggtcacacctgaggcgatgccttcc

SEQ ID NO: 201691 - DNA, 30 bp, Artificial Sequence
  Synthetic oligonucleotide
tctgacttggtacgacggggagaagcttcc

SEQ ID NO: 201692 - DNA, 30 bp, Artificial Sequence
  Synthetic oligonucleotide
tggtcgcaaatatatgctatgtcagcttcc

SEQ ID NO: 201693 - DNA, 30 bp, Artificial Sequence
  Synthetic oligonucleotide
ttcctgaagctcggtgttcgggactcttcc

SEQ ID NO: 201694 - DNA, 30 bp, Artificial Sequence
  Synthetic oligonucleotide
ggctcacgtaagaactagggtctctcttcc

SEQ ID NO: 201695 - DNA, 30 bp, Artificial Sequence
  Synthetic oligonucleotide
aacgtttgtaaccgtgtgtgggtgtcttcc

SEQ ID NO: 201696 - DNA, 30 bp, Artificial Sequence
  Synthetic oligonucleotide
gcttagccagacgcggtcgcccaaagttcc

SEQ ID NO: 201697 - DNA, 30 bp, Artificial Sequence
  Synthetic oligonucleotide
agataagccaaaaatatcaattgaagttcc

SEQ ID NO: 201698 - DNA, 30 bp, Artificial Sequence
  Synthetic oligonucleotide
atccctaggcgtgatcgtctggtaagttcc

SEQ ID NO: 201699 - DNA, 30 bp, Artificial Sequence
  Synthetic oligonucleotide
tataatcacggggactaggaacagagttcc

SEQ ID NO: 201700 - DNA, 30 bp, Artificial Sequence
  Synthetic oligonucleotide
aggccgtgctgtgcgtaacagaaacgttcc

SEQ ID NO: 201701 - DNA, 30 bp, Artificial Sequence
  Synthetic oligonucleotide
acatttataaaggactgacggtcccgttcc

SEQ ID NO: 201702 - DNA, 30 bp, Artificial Sequence
  Synthetic oligonucleotide
agttccacactcagactatgggctcgttcc

SEQ ID NO: 201703 - DNA, 30 bp, Artificial Sequence
  Synthetic oligonucleotide
gtgggtgtgtagcctatgcgatgtcgttcc

SEQ ID NO: 201704 - DNA, 30 bp, Artificial Sequence
  Synthetic oligonucleotide
ttaataatgtcagatcaatcatgcggttcc

SEQ ID NO: 201705 - DNA, 30 bp, Artificial Sequence
  Synthetic oligonucleotide
atgtgaacatatagtgttaaaaggggttcc

SEQ ID NO: 201706 - DNA, 30 bp, Artificial Sequence
  Synthetic oligonucleotide
tgaagggtatttaagtttatgtttggttcc

SEQ ID NO: 201707 - DNA, 30 bp, Artificial Sequence
  Synthetic oligonucleotide
ccgggatcagagagtgcaaaggcatgttcc

SEQ ID NO: 201708 - DNA, 30 bp, Artificial Sequence
  Synthetic oligonucleotide
aaggtgattatgggagatctctgctgttcc

SEQ ID NO: 201709 - DNA, 30 bp, Artificial Sequence
  Synthetic oligonucleotide
tcagacgggagtagaaagggtgcaatttcc

SEQ ID NO: 201710 - DNA, 30 bp, Artificial Sequence
  Synthetic oligonucleotide
gacatgaccatgcggttctgccgaatttcc

SEQ ID NO: 201711 - DNA, 30 bp, Artificial Sequence
  Synthetic oligonucleotide
agcttgcgacgtatttaacagactatttcc

SEQ ID NO: 201712 - DNA, 30 bp, Artificial Sequence
  Synthetic oligonucleotide
cacactagttctgacgtccacacactttcc

SEQ ID NO: 201713 - DNA, 30 bp, Artificial Sequence
  Synthetic oligonucleotide
accagaatatctgtaaaagtgctcctttcc

SEQ ID NO: 201714 - DNA, 30 bp, Artificial Sequence
  Synthetic oligonucleotide
gttcgacaaaagaactggggttaagtttcc

SEQ ID NO: 201715 - DNA, 30 bp, Artificial Sequence
  Synthetic oligonucleotide
gtttacagagtgtgtaatagtgtagtttcc

SEQ ID NO: 201716 - DNA, 30 bp, Artificial Sequence
  Synthetic oligonucleotide
agttaaatagagccggtactattcgtttcc

SEQ ID NO: 201717 - DNA, 30 bp, Artificial Sequence
  Synthetic oligonucleotide
ttggaaaaggcactcagttgacgggtttcc

SEQ ID NO: 201718 - DNA, 30 bp, Artificial Sequence
  Synthetic oligonucleotide
actacacttggtactcctaaggcattttcc

SEQ ID NO: 201719 - DNA, 30 bp, Artificial Sequence
  Synthetic oligonucleotide
gcctcacacagggcgtaggacatcttttcc

SEQ ID NO: 201720 - DNA, 30 bp, Artificial Sequence
  Synthetic oligonucleotide
agagaatgcgtgcgatccgtgggtttttcc

SEQ ID NO: 201721 - DNA, 30 bp, Artificial Sequence
  Synthetic oligonucleotide
ggttaaaggtggaccggcaggacaaaaagc

SEQ ID NO: 201722 - DNA, 30 bp, Artificial Sequence
  Synthetic oligonucleotide
cacactgatcagatatgttcagtaaaaagc

SEQ ID NO: 201723 - DNA, 30 bp, Artificial Sequence
  Synthetic oligonucleotide
gggcggaacactctttctctcgacaaaagc

SEQ ID NO: 201724 - DNA, 30 bp, Artificial Sequence
  Synthetic oligonucleotide
ctgcgcgatcgcgtattttcccgcaaaagc

SEQ ID NO: 201725 - DNA, 30 bp, Artificial Sequence
  Synthetic oligonucleotide
actggtctagggcacccacttgtgaaaagc

SEQ ID NO: 201726 - DNA, 30 bp, Artificial Sequence
  Synthetic oligonucleotide
ttcctcgcggtatagacgattaaacaaagc

SEQ ID NO: 201727 - DNA, 30 bp, Artificial Sequence
  Synthetic oligonucleotide
taaatgtaaagtacctctacagaacaaagc

SEQ ID NO: 201728 - DNA, 30 bp, Artificial Sequence
  Synthetic oligonucleotide
attgttgggggaatgggtccaggccaaagc

SEQ ID NO: 201729 - DNA, 30 bp, Artificial Sequence
  Synthetic oligonucleotide
agcactcgctgcaaatggaaatagcaaagc

SEQ ID NO: 201730 - DNA, 30 bp, Artificial Sequence
  Synthetic oligonucleotide
gaacttgtatatgaatggcgggcgcaaagc

SEQ ID NO: 201731 - DNA, 30 bp, Artificial Sequence
  Synthetic oligonucleotide
cggtcccctccgcggaagttgaatcaaagc

SEQ ID NO: 201732 - DNA, 30 bp, Artificial Sequence
  Synthetic oligonucleotide
agaattgatgagtattccccaggtcaaagc

SEQ ID NO: 201733 - DNA, 30 bp, Artificial Sequence
  Synthetic oligonucleotide
agaccatactccctatcatcctgtcaaagc

SEQ ID NO: 201734 - DNA, 30 bp, Artificial Sequence
  Synthetic oligonucleotide
ttcgacatggattgggggcctaaggaaagc

SEQ ID NO: 201735 - DNA, 30 bp, Artificial Sequence
  Synthetic oligonucleotide
catgtcgtaatggaacgacccagggaaagc

SEQ ID NO: 201736 - DNA, 30 bp, Artificial Sequence
  Synthetic oligonucleotide
aggcggaatgagttccgttgattggaaagc

SEQ ID NO: 201737 - DNA, 30 bp, Artificial Sequence
  Synthetic oligonucleotide
gttgaatagctgttgtacctttctgaaagc

SEQ ID NO: 201738 - DNA, 30 bp, Artificial Sequence
  Synthetic oligonucleotide
acgacccgaggaggtctagtcattgaaagc

SEQ ID NO: 201739 - DNA, 30 bp, Artificial Sequence
  Synthetic oligonucleotide
cccgttccaacgaggaaactgattgaaagc

SEQ ID NO: 201740 - DNA, 30 bp, Artificial Sequence
  Synthetic oligonucleotide
ggttcgcttggtttgagccgcccataaagc

SEQ ID NO: 201741 - DNA, 31 bp, Artificial Sequence
  Synthetic oligonucleotide
gttatgagggagtacaccgaagctctaaagc

SEQ ID NO: 201742 - DNA, 30 bp, Artificial Sequence
  Synthetic oligonucleotide
agcaacgcttggtcctaattaaattaaagc

SEQ ID NO: 201743 - DNA, 30 bp, Artificial Sequence
  Synthetic oligonucleotide
agacaaccgtcgttggacgacccttaaagc

SEQ ID NO: 201744 - DNA, 30 bp, Artificial Sequence
  Synthetic oligonucleotide
agaaggcattggccagtcaaaaacacaagc

SEQ ID NO: 201745 - DNA, 30 bp, Artificial Sequence
  Synthetic oligonucleotide
tcccggtgtgattcaatggagtgcacaagc

SEQ ID NO: 201746 - DNA, 30 bp, Artificial Sequence
  Synthetic oligonucleotide
accgagtatgttcttacgaagccgacaagc

SEQ ID NO: 201747 - DNA, 30 bp, Artificial Sequence
  Synthetic oligonucleotide
caatttttgtatgagcgtaagcggacaagc

SEQ ID NO: 201748 - DNA, 30 bp, Artificial Sequence
  Synthetic oligonucleotide
gcggggtgtagaggacggttatatacaagc

SEQ ID NO: 201749 - DNA, 30 bp, Artificial Sequence
  Synthetic oligonucleotide
tgaaagacatgtagagaaacctttacaagc

SEQ ID NO: 201750 - DNA, 30 bp, Artificial Sequence
  Synthetic oligonucleotide
cggatgctcgtaattggactcgtaccaagc

SEQ ID NO: 201751 - DNA, 30 bp, Artificial Sequence
  Synthetic oligonucleotide
aggaagttcacaccttagggaagcccaagc

SEQ ID NO: 201752 - DNA, 30 bp, Artificial Sequence
  Synthetic oligonucleotide
cccgagcgattccttagtccaggcccaagc

SEQ ID NO: 201753 - DNA, 30 bp, Artificial Sequence
  Synthetic oligonucleotide
agcggaaaatattcccgccgcgcgccaagc

SEQ ID NO: 201754 - DNA, 30 bp, Artificial Sequence
  Synthetic oligonucleotide
ttggcgtttcgctaaaataacaccgcaagc

SEQ ID NO: 201755 - DNA, 30 bp, Artificial Sequence
  Synthetic oligonucleotide
gccaatgacattgggatgtcgcgcgcaagc

SEQ ID NO: 201756 - DNA, 30 bp, Artificial Sequence
  Synthetic oligonucleotide
ccagtctagggacgatgcccacctgcaagc

SEQ ID NO: 201757 - DNA, 30 bp, Artificial Sequence
  Synthetic oligonucleotide
catgagatattgttgtggatgctatcaagc

SEQ ID NO: 201758 - DNA, 30 bp, Artificial Sequence
  Synthetic oligonucleotide
taggcgtataacttggatattacctcaagc

SEQ ID NO: 201759 - DNA, 30 bp, Artificial Sequence
  Synthetic oligonucleotide
agcttcacagccccagaagtatggtcaagc

SEQ ID NO: 201760 - DNA, 30 bp, Artificial Sequence
  Synthetic oligonucleotide
tatggcatgttcccgacctcttaaagaagc

SEQ ID NO: 201761 - DNA, 30 bp, Artificial Sequence
  Synthetic oligonucleotide
ggccacgcctgggtaacaggttcaagaagc

SEQ ID NO: 201762 - DNA, 30 bp, Artificial Sequence
  Synthetic oligonucleotide
tacgaacggtcgttcccatgctccagaagc

SEQ ID NO: 201763 - DNA, 30 bp, Artificial Sequence
  Synthetic oligonucleotide
atctccgcgcgtctaaatacgagcagaagc

SEQ ID NO: 201764 - DNA, 30 bp, Artificial Sequence
  Synthetic oligonucleotide
aacgcgggtcagtttcttacacagagaagc

SEQ ID NO: 201765 - DNA, 30 bp, Artificial Sequence
  Synthetic oligonucleotide
acacagaattctgtcggtgctattagaagc

SEQ ID NO: 201766 - DNA, 30 bp, Artificial Sequence
  Synthetic oligonucleotide
cgcgtgcgggggatgccggctgaacgaagc

SEQ ID NO: 201767 - DNA, 30 bp, Artificial Sequence
  Synthetic oligonucleotide
gtttaaaaaccactgacggggagtcgaagc

SEQ ID NO: 201768 - DNA, 30 bp, Artificial Sequence
  Synthetic oligonucleotide
tccaccggccagatctctataaaaggaagc

SEQ ID NO: 201769 - DNA, 30 bp, Artificial Sequence
  Synthetic oligonucleotide
ttcgtcgaggcagattcgataggaggaagc

SEQ ID NO: 201770 - DNA, 30 bp, Artificial Sequence
  Synthetic oligonucleotide
catgcctgactgaactgcagacgtggaagc

SEQ ID NO: 201771 - DNA, 30 bp, Artificial Sequence
  Synthetic oligonucleotide
tgaattaggcgacatggagagattggaagc

SEQ ID NO: 201772 - DNA, 30 bp, Artificial Sequence
  Synthetic oligonucleotide
ttgcactaacaaagctagtgctttggaagc

SEQ ID NO: 201773 - DNA, 30 bp, Artificial Sequence
  Synthetic oligonucleotide
aacgcttcggggtgaagatcccaatgaagc

SEQ ID NO: 201774 - DNA, 30 bp, Artificial Sequence
  Synthetic oligonucleotide
cagtaagaacctccatgcatccagtgaagc

SEQ ID NO: 201775 - DNA, 30 bp, Artificial Sequence
  Synthetic oligonucleotide
acgtatccgaggcccacacaggtttgaagc

SEQ ID NO: 201776 - DNA, 30 bp, Artificial Sequence
  Synthetic oligonucleotide
ttagtgaccagggccagcactatcataagc

SEQ ID NO: 201777 - DNA, 30 bp, Artificial Sequence
  Synthetic oligonucleotide
ggataggcgttaatcaaagcaaagataagc

SEQ ID NO: 201778 - DNA, 30 bp, Artificial Sequence
  Synthetic oligonucleotide
tctctaacaaattcaaaaactaaactaagc

SEQ ID NO: 201779 - DNA, 30 bp, Artificial Sequence
  Synthetic oligonucleotide
agcgctagaacgagagcatccagcctaagc

SEQ ID NO: 201780 - DNA, 30 bp, Artificial Sequence
  Synthetic oligonucleotide
accgcataaattccttaaaggtgcctaagc

SEQ ID NO: 201781 - DNA, 30 bp, Artificial Sequence
  Synthetic oligonucleotide
aacgagtatcttacagtcgtttgcctaagc

SEQ ID NO: 201782 - DNA, 30 bp, Artificial Sequence
  Synthetic oligonucleotide
ctagagagtcataaaagttgtgtcctaagc

SEQ ID NO: 201783 - DNA, 30 bp, Artificial Sequence
  Synthetic oligonucleotide
cgacgcatttgttccagattagggctaagc

SEQ ID NO: 201784 - DNA, 30 bp, Artificial Sequence
  Synthetic oligonucleotide
ccccaagaatattgggaatttctgctaagc

SEQ ID NO: 201785 - DNA, 30 bp, Artificial Sequence
  Synthetic oligonucleotide
tcgatagaagggggtagtaacttgctaagc

SEQ ID NO: 201786 - DNA, 30 bp, Artificial Sequence
  Synthetic oligonucleotide
aactctggaacatcacggatgcaagtaagc

SEQ ID NO: 201787 - DNA, 30 bp, Artificial Sequence
  Synthetic oligonucleotide
tattaggccgagctatgaagtggagtaagc

SEQ ID NO: 201788 - DNA, 30 bp, Artificial Sequence
  Synthetic oligonucleotide
gttagcatcgattcgctctgccatgtaagc

SEQ ID NO: 201789 - DNA, 30 bp, Artificial Sequence
  Synthetic oligonucleotide
atgtcattggtaggacgggagtctgtaagc

SEQ ID NO: 201790 - DNA, 30 bp, Artificial Sequence
  Synthetic oligonucleotide
tagaggtgataatcaggggcgtgtgtaagc

SEQ ID NO: 201791 - DNA, 30 bp, Artificial Sequence
  Synthetic oligonucleotide
tggaacttggtagagacccgatcattaagc

SEQ ID NO: 201792 - DNA, 31 bp, Artificial Sequence
  Synthetic oligonucleotide
taatgcataatggttgattgccggattaagc

SEQ ID NO: 201793 - DNA, 30 bp, Artificial Sequence
  Synthetic oligonucleotide
tacagagtcctcgggaggactaacttaagc

SEQ ID NO: 201794 - DNA, 30 bp, Artificial Sequence
  Synthetic oligonucleotide
cggcagcctatgcgaccatactacttaagc

SEQ ID NO: 201795 - DNA, 30 bp, Artificial Sequence
  Synthetic oligonucleotide
gaaaattagatgtcaactcaaatcttaagc

SEQ ID NO: 201796 - DNA, 30 bp, Artificial Sequence
  Synthetic oligonucleotide
aggtccggtgctaaccaacgtgagttaagc

SEQ ID NO: 201797 - DNA, 30 bp, Artificial Sequence
  Synthetic oligonucleotide
cagaggggttctcgtgcttgttcaaacagc

SEQ ID NO: 201798 - DNA, 30 bp, Artificial Sequence
  Synthetic oligonucleotide
gcaggctttaatcccgcttggaacaacagc

SEQ ID NO: 201799 - DNA, 30 bp, Artificial Sequence
  Synthetic oligonucleotide
atacagtggacaactggcttcgtacacagc

SEQ ID NO: 201800 - DNA, 30 bp, Artificial Sequence
  Synthetic oligonucleotide
acaacgaatggtttccccgacttacacagc

SEQ ID NO: 201801 - DNA, 30 bp, Artificial Sequence
  Synthetic oligonucleotide
tgagcaggacaaaaaatgtccgctcacagc

SEQ ID NO: 201802 - DNA, 30 bp, Artificial Sequence
  Synthetic oligonucleotide
cggaagatcgattaggtcaatcttcacagc

SEQ ID NO: 201803 - DNA, 30 bp, Artificial Sequence
  Synthetic oligonucleotide
gtcaggttatagcgttggaaacaagacagc

SEQ ID NO: 201804 - DNA, 30 bp, Artificial Sequence
  Synthetic oligonucleotide
tcgattttaatacgacgaacgccagacagc

SEQ ID NO: 201805 - DNA, 30 bp, Artificial Sequence
  Synthetic oligonucleotide
accaatcgaccgaagatgtggcacgacagc

SEQ ID NO: 201806 - DNA, 30 bp, Artificial Sequence
  Synthetic oligonucleotide
gccgatggaggaggtgacggccgggacagc

SEQ ID NO: 201807 - DNA, 30 bp, Artificial Sequence
  Synthetic oligonucleotide
acctaagaaggaaaaaggaggatggacagc

SEQ ID NO: 201808 - DNA, 30 bp, Artificial Sequence
  Synthetic oligonucleotide
cgaatagggactctacgctaatgtgacagc

SEQ ID NO: 201809 - DNA, 30 bp, Artificial Sequence
  Synthetic oligonucleotide
acgtactgcgggaacacgcttcttgacagc

SEQ ID NO: 201810 - DNA, 30 bp, Artificial Sequence
  Synthetic oligonucleotide
tctgtaatgcgtactcgcgagacatacagc

SEQ ID NO: 201811 - DNA, 30 bp, Artificial Sequence
  Synthetic oligonucleotide
gagcgcagagttccctagggcagatacagc

SEQ ID NO: 201812 - DNA, 30 bp, Artificial Sequence
  Synthetic oligonucleotide
ccggcagtgatcagatagtctctatacagc

SEQ ID NO: 201813 - DNA, 30 bp, Artificial Sequence
  Synthetic oligonucleotide
taatgctagttagggtggatccgctacagc

SEQ ID NO: 201814 - DNA, 30 bp, Artificial Sequence
  Synthetic oligonucleotide
atggaaccactaggtaccggtgagtacagc

SEQ ID NO: 201815 - DNA, 30 bp, Artificial Sequence
  Synthetic oligonucleotide
gtacgggtcagtgaagggcacctgtacagc

SEQ ID NO: 201816 - DNA, 30 bp, Artificial Sequence
  Synthetic oligonucleotide
aaggagcttgaccaacacgtggcaaccagc

SEQ ID NO: 201817 - DNA, 30 bp, Artificial Sequence
  Synthetic oligonucleotide
cgcatcaaacgaggggaacttgagaccagc

SEQ ID NO: 201818 - DNA, 30 bp, Artificial Sequence
  Synthetic oligonucleotide
gttaattgcacataaggagtatcgaccagc

SEQ ID NO: 201819 - DNA, 30 bp, Artificial Sequence
  Synthetic oligonucleotide
aagcaagttatggtacgtgggctgaccagc

SEQ ID NO: 201820 - DNA, 30 bp, Artificial Sequence
  Synthetic oligonucleotide
cgtaagggagggcagtacggctgtaccagc

SEQ ID NO: 201821 - DNA, 30 bp, Artificial Sequence
  Synthetic oligonucleotide
acttgtccctcgcacgtgaatctacccagc

SEQ ID NO: 201822 - DNA, 30 bp, Artificial Sequence
  Synthetic oligonucleotide
gaagtcgattgccaaggattttcagccagc

SEQ ID NO: 201823 - DNA, 30 bp, Artificial Sequence
  Synthetic oligonucleotide
ggatttggttagacggcttagtgagccagc

SEQ ID NO: 201824 - DNA, 30 bp, Artificial Sequence
  Synthetic oligonucleotide
ctccagcacttcagatccgagttcgccagc

SEQ ID NO: 201825 - DNA, 30 bp, Artificial Sequence
  Synthetic oligonucleotide
gatatcgtcggaatagacgggcgggccagc

SEQ ID NO: 201826 - DNA, 30 bp, Artificial Sequence
  Synthetic oligonucleotide
aacggtattgtcagacagcttgctgccagc

SEQ ID NO: 201827 - DNA, 30 bp, Artificial Sequence
  Synthetic oligonucleotide
taaccgactgtaacccgctgttctgccagc

SEQ ID NO: 201828 - DNA, 30 bp, Artificial Sequence
  Synthetic oligonucleotide
ggaaaccgctgtatatactcactatccagc

SEQ ID NO: 201829 - DNA, 30 bp, Artificial Sequence
  Synthetic oligonucleotide
atattaatgcacaaattcgcgtactccagc

SEQ ID NO: 201830 - DNA, 30 bp, Artificial Sequence
  Synthetic oligonucleotide
aaagccgacacacagagatagctctccagc

SEQ ID NO: 201831 - DNA, 30 bp, Artificial Sequence
  Synthetic oligonucleotide
tcaggatcaatagggttgccgacaagcagc

SEQ ID NO: 201832 - DNA, 30 bp, Artificial Sequence
  Synthetic oligonucleotide
cctgtgctcgggtatcatcatttacgcagc

SEQ ID NO: 201833 - DNA, 30 bp, Artificial Sequence
  Synthetic oligonucleotide
tcgtacagtggtaattgtcggatccgcagc

SEQ ID NO: 201834 - DNA, 30 bp, Artificial Sequence
  Synthetic oligonucleotide
cagaggtattagattcgatcacatcgcagc

SEQ ID NO: 201835 - DNA, 30 bp, Artificial Sequence
  Synthetic oligonucleotide
aggtacgcagtacacatgtggtctcgcagc

SEQ ID NO: 201836 - DNA, 30 bp, Artificial Sequence
  Synthetic oligonucleotide
gtctgccaagtagagaaggacagaggcagc

SEQ ID NO: 201837 - DNA, 30 bp, Artificial Sequence
  Synthetic oligonucleotide
cggatcgcacagtgtattaaaaacggcagc

SEQ ID NO: 201838 - DNA, 30 bp, Artificial Sequence
  Synthetic oligonucleotide
aacacaacgagtactagcacagcgggcagc

SEQ ID NO: 201839 - DNA, 30 bp, Artificial Sequence
  Synthetic oligonucleotide
aatttgaatcaggtgaaagggtaatgcagc

SEQ ID NO: 201840 - DNA, 30 bp, Artificial Sequence
  Synthetic oligonucleotide
tataattcggcatcgccgtagctatgcagc

SEQ ID NO: 201841 - DNA, 30 bp, Artificial Sequence
  Synthetic oligonucleotide
atacccaaataacccactaaacactgcagc

SEQ ID NO: 201842 - DNA, 30 bp, Artificial Sequence
  Synthetic oligonucleotide
ctagttaatcggaatctgtgaagttgcagc

SEQ ID NO: 201843 - DNA, 30 bp, Artificial Sequence
  Synthetic oligonucleotide
ccgaccatcaatatcctcggttcaatcagc

SEQ ID NO: 201844 - DNA, 30 bp, Artificial Sequence
  Synthetic oligonucleotide
ccaatctccaggctctgtgcatacatcagc

SEQ ID NO: 201845 - DNA, 30 bp, Artificial Sequence
  Synthetic oligonucleotide
tgattcaacgtagagctcgtcgagatcagc

SEQ ID NO: 201846 - DNA, 30 bp, Artificial Sequence
  Synthetic oligonucleotide
gtgtggacggattggcatatgcatatcagc

SEQ ID NO: 201847 - DNA, 30 bp, Artificial Sequence
  Synthetic oligonucleotide
gacagtagacggcgggaagtctgagtcagc

SEQ ID NO: 201848 - DNA, 30 bp, Artificial Sequence
  Synthetic oligonucleotide
gttctactcaatctgcaggggggggtcagc

SEQ ID NO: 201849 - DNA, 30 bp, Artificial Sequence
  Synthetic oligonucleotide
gctacggctatgggccatgtgtatgtcagc

SEQ ID NO: 201850 - DNA, 30 bp, Artificial Sequence
  Synthetic oligonucleotide
cacgtgaatgtatgctggggtggtgtcagc

SEQ ID NO: 201851 - DNA, 30 bp, Artificial Sequence
  Synthetic oligonucleotide
cgcactcgtgggccccactgacacaagagc

SEQ ID NO: 201852 - DNA, 30 bp, Artificial Sequence
  Synthetic oligonucleotide
tggcattctaacatgggcccattcaagagc

SEQ ID NO: 201853 - DNA, 30 bp, Artificial Sequence
  Synthetic oligonucleotide
tacttcgtcctaaaccatgtaattaagagc

SEQ ID NO: 201854 - DNA, 30 bp, Artificial Sequence
  Synthetic oligonucleotide
gttatatgcggaatgcccccgagacagagc

SEQ ID NO: 201855 - DNA, 30 bp, Artificial Sequence
  Synthetic oligonucleotide
ggtttttaggggagtatacctgaccagagc

SEQ ID NO: 201856 - DNA, 30 bp, Artificial Sequence
  Synthetic oligonucleotide
gccggcagggagtatagtgggttccagagc

SEQ ID NO: 201857 - DNA, 30 bp, Artificial Sequence
  Synthetic oligonucleotide
cggggtcgttcaggagactgcgcgcagagc

SEQ ID NO: 201858 - DNA, 30 bp, Artificial Sequence
  Synthetic oligonucleotide
gtggcatttattcagtataatctagagagc

SEQ ID NO: 201859 - DNA, 30 bp, Artificial Sequence
  Synthetic oligonucleotide
ggatctttaatcgtgtgagactgatagagc

SEQ ID NO: 201860 - DNA, 30 bp, Artificial Sequence
  Synthetic oligonucleotide
gggagcagggtcacgtaactgtactagagc

SEQ ID NO: 201861 - DNA, 30 bp, Artificial Sequence
  Synthetic oligonucleotide
ctgccgcgggagaacaaatgaacctagagc

SEQ ID NO: 201862 - DNA, 30 bp, Artificial Sequence
  Synthetic oligonucleotide
gaaggccctgtgtgtttcggaatgtagagc

SEQ ID NO: 201863 - DNA, 30 bp, Artificial Sequence
  Synthetic oligonucleotide
gttcatcgattaggtgtcgacatgtagagc

SEQ ID NO: 201864 - DNA, 30 bp, Artificial Sequence
  Synthetic oligonucleotide
acggacattgaagaagtccaggcgacgagc

SEQ ID NO: 201865 - DNA, 30 bp, Artificial Sequence
  Synthetic oligonucleotide
caacgcatgctgagtccaaaattgacgagc

SEQ ID NO: 201866 - DNA, 30 bp, Artificial Sequence
  Synthetic oligonucleotide
caacatcttaacattcacagaacaccgagc

SEQ ID NO: 201867 - DNA, 30 bp, Artificial Sequence
  Synthetic oligonucleotide
gggagtggacgggtacatacacctccgagc

SEQ ID NO: 201868 - DNA, 30 bp, Artificial Sequence
  Synthetic oligonucleotide
agttcggatagtatcgtttaagctccgagc

SEQ ID NO: 201869 - DNA, 30 bp, Artificial Sequence
  Synthetic oligonucleotide
gacgtgaggtcgcccggatatattgcgagc

SEQ ID NO: 201870 - DNA, 30 bp, Artificial Sequence
  Synthetic oligonucleotide
tgccatataccgtaggcgcttacatcgagc

SEQ ID NO: 201871 - DNA, 30 bp, Artificial Sequence
  Synthetic oligonucleotide
cgatgtcgtgcttaatacaattcatcgagc

SEQ ID NO: 201872 - DNA, 30 bp, Artificial Sequence
  Synthetic oligonucleotide
gaacagtcatcatgcagaacaaagtcgagc

SEQ ID NO: 201873 - DNA, 30 bp, Artificial Sequence
  Synthetic oligonucleotide
cttcagaattttccggcacgctattcgagc

SEQ ID NO: 201874 - DNA, 30 bp, Artificial Sequence
  Synthetic oligonucleotide
gctaaaagttaaccacatcgttcttcgagc

SEQ ID NO: 201875 - DNA, 30 bp, Artificial Sequence
  Synthetic oligonucleotide
tcgcaagcaccggggaaaatgagttcgagc

SEQ ID NO: 201876 - DNA, 30 bp, Artificial Sequence
  Synthetic oligonucleotide
agcacaggcgcaccggacgaagcaaggagc

SEQ ID NO: 201877 - DNA, 30 bp, Artificial Sequence
  Synthetic oligonucleotide
acatattaacattttgtgtcgagcaggagc

SEQ ID NO: 201878 - DNA, 30 bp, Artificial Sequence
  Synthetic oligonucleotide
ggatccacgtttaatgtatagaataggagc

SEQ ID NO: 201879 - DNA, 30 bp, Artificial Sequence
  Synthetic oligonucleotide
aactcgaagaatcagtgagactgtaggagc

SEQ ID NO: 201880 - DNA, 30 bp, Artificial Sequence
  Synthetic oligonucleotide
ggacggagcacggagtatgcgagccggagc

SEQ ID NO: 201881 - DNA, 30 bp, Artificial Sequence
  Synthetic oligonucleotide
tgaagagcgacgtgcttgaggaggcggagc

SEQ ID NO: 201882 - DNA, 30 bp, Artificial Sequence
  Synthetic oligonucleotide
aatgcgtgtgaattaaatacaagtcggagc

SEQ ID NO: 201883 - DNA, 30 bp, Artificial Sequence
  Synthetic oligonucleotide
tagattcacatttcgagacaaatagggagc

SEQ ID NO: 201884 - DNA, 30 bp, Artificial Sequence
  Synthetic oligonucleotide
agtggagtgaggagtcctctgctagggagc

SEQ ID NO: 201885 - DNA, 30 bp, Artificial Sequence
  Synthetic oligonucleotide
caccgtgcccagctagtaagtcacgggagc

SEQ ID NO: 201886 - DNA, 30 bp, Artificial Sequence
  Synthetic oligonucleotide
ctttcgaagggggtagtagtatacgggagc

SEQ ID NO: 201887 - DNA, 30 bp, Artificial Sequence
  Synthetic oligonucleotide
cactagactggacatagaataaatgggagc

SEQ ID NO: 201888 - DNA, 30 bp, Artificial Sequence
  Synthetic oligonucleotide
gggaaatggacaatggctccagaatggagc

SEQ ID NO: 201889 - DNA, 30 bp, Artificial Sequence
  Synthetic oligonucleotide
cgaaagaatagatatgagcattcgtggagc

SEQ ID NO: 201890 - DNA, 30 bp, Artificial Sequence
  Synthetic oligonucleotide
cggtagcttggggtgattgagtcttggagc

SEQ ID NO: 201891 - DNA, 30 bp, Artificial Sequence
  Synthetic oligonucleotide
gaaatctgcatctaaccagtacccatgagc

SEQ ID NO: 201892 - DNA, 30 bp, Artificial Sequence
  Synthetic oligonucleotide
ctgtgcggagggacagcacctatcatgagc

SEQ ID NO: 201893 - DNA, 30 bp, Artificial Sequence
  Synthetic oligonucleotide
gctccctggccgctcgtattaaaactgagc

SEQ ID NO: 201894 - DNA, 30 bp, Artificial Sequence
  Synthetic oligonucleotide
taccagtcactttgaccgatacaactgagc

SEQ ID NO: 201895 - DNA, 30 bp, Artificial Sequence
  Synthetic oligonucleotide
agaatgcgtgcctgcggataaccactgagc

SEQ ID NO: 201896 - DNA, 30 bp, Artificial Sequence
  Synthetic oligonucleotide
ccgagttcccataagtctttagcactgagc

SEQ ID NO: 201897 - DNA, 30 bp, Artificial Sequence
  Synthetic oligonucleotide
agcaaagatgtcttagcttgggtactgagc

SEQ ID NO: 201898 - DNA, 29 bp, Artificial Sequence
  Synthetic oligonucleotide
ctggatggtccgtgatggtgttcctgagc

SEQ ID NO: 201899 - DNA, 30 bp, Artificial Sequence
  Synthetic oligonucleotide
aaccaggctgggatatgtacaagtctgagc

SEQ ID NO: 201900 - DNA, 30 bp, Artificial Sequence
  Synthetic oligonucleotide
agatcagtatcttcaggaaagatagtgagc

SEQ ID NO: 201901 - DNA, 30 bp, Artificial Sequence
  Synthetic oligonucleotide
tagtaaaaaggcgtagggtcaacggtgagc

SEQ ID NO: 201902 - DNA, 30 bp, Artificial Sequence
  Synthetic oligonucleotide
catcgcagtatcagaaacttttcattgagc

SEQ ID NO: 201903 - DNA, 30 bp, Artificial Sequence
  Synthetic oligonucleotide
cacatcatctcaaagcgacaaaacttgagc

SEQ ID NO: 201904 - DNA, 30 bp, Artificial Sequence
  Synthetic oligonucleotide
ataagttgatacatatctctagtcttgagc

SEQ ID NO: 201905 - DNA, 30 bp, Artificial Sequence
  Synthetic oligonucleotide
gaagatgtgttgaatcggctagagttgagc

SEQ ID NO: 201906 - DNA, 30 bp, Artificial Sequence
  Synthetic oligonucleotide
aagagggatatatcgatggttttgttgagc

SEQ ID NO: 201907 - DNA, 30 bp, Artificial Sequence
  Synthetic oligonucleotide
ggatgcttttcatgttgagaaagaaatagc

SEQ ID NO: 201908 - DNA, 30 bp, Artificial Sequence
  Synthetic oligonucleotide
gggtaacttacaatacatcagcgaaatagc

SEQ ID NO: 201909 - DNA, 30 bp, Artificial Sequence
  Synthetic oligonucleotide
agaggtattgtctgagaagacgccaatagc

SEQ ID NO: 201910 - DNA, 30 bp, Artificial Sequence
  Synthetic oligonucleotide
agcacgatgtcacaaagtaacttcaatagc

SEQ ID NO: 201911 - DNA, 30 bp, Artificial Sequence
  Synthetic oligonucleotide
ttggactgcggtaacgcacttggtaatagc

SEQ ID NO: 201912 - DNA, 30 bp, Artificial Sequence
  Synthetic oligonucleotide
gagacgcacactaccacgatccaacatagc

SEQ ID NO: 201913 - DNA, 30 bp, Artificial Sequence
  Synthetic oligonucleotide
tcctcggggacccccggaagttatcatagc

SEQ ID NO: 201914 - DNA, 30 bp, Artificial Sequence
  Synthetic oligonucleotide
gataagtttcgtaggtaaggtcgagatagc

SEQ ID NO: 201915 - DNA, 30 bp, Artificial Sequence
  Synthetic oligonucleotide
catctatacgtgatttacacgtgagatagc

SEQ ID NO: 201916 - DNA, 30 bp, Artificial Sequence
  Synthetic oligonucleotide
tcatgaagacgttctcgtgccggcgatagc

SEQ ID NO: 201917 - DNA, 30 bp, Artificial Sequence
  Synthetic oligonucleotide
caggtgatgcgcgccaggttagaatatagc

SEQ ID NO: 201918 - DNA, 30 bp, Artificial Sequence
  Synthetic oligonucleotide
ctcccttgaacattcaagtatttatatagc

SEQ ID NO: 201919 - DNA, 30 bp, Artificial Sequence
  Synthetic oligonucleotide
tttacaaccgaaggggatttataaactagc

SEQ ID NO: 201920 - DNA, 30 bp, Artificial Sequence
  Synthetic oligonucleotide
cgcttgaagaatgaaagcgcgggcactagc

SEQ ID NO: 201921 - DNA, 30 bp, Artificial Sequence
  Synthetic oligonucleotide
cgatcgttctctgcctggggcgagactagc

SEQ ID NO: 201922 - DNA, 30 bp, Artificial Sequence
  Synthetic oligonucleotide
gatggtcagaataacgcctctaccgctagc

SEQ ID NO: 201923 - DNA, 30 bp, Artificial Sequence
  Synthetic oligonucleotide
aggggggacgttcggagcctcggcgctagc

SEQ ID NO: 201924 - DNA, 30 bp, Artificial Sequence
  Synthetic oligonucleotide
gataataccctagggaatcccgtcgctagc

SEQ ID NO: 201925 - DNA, 30 bp, Artificial Sequence
  Synthetic oligonucleotide
gactgcgattgttcagttaacatggctagc

SEQ ID NO: 201926 - DNA, 30 bp, Artificial Sequence
  Synthetic oligonucleotide
cccacaagtgctctgcctgagtggtctagc

SEQ ID NO: 201927 - DNA, 30 bp, Artificial Sequence
  Synthetic oligonucleotide
agttcggtaatactacgatcaagttctagc

SEQ ID NO: 201928 - DNA, 30 bp, Artificial Sequence
  Synthetic oligonucleotide
agacggcttcttgttacatgtctaagtagc

SEQ ID NO: 201929 - DNA, 30 bp, Artificial Sequence
  Synthetic oligonucleotide
ggtacggaattcttaaggcagcggagtagc

SEQ ID NO: 201930 - DNA, 30 bp, Artificial Sequence
  Synthetic oligonucleotide
cggtgtcaaaagccctgcacaatgagtagc

SEQ ID NO: 201931 - DNA, 30 bp, Artificial Sequence
  Synthetic oligonucleotide
aagctatgtatggtatagatgaatagtagc

SEQ ID NO: 201932 - DNA, 30 bp, Artificial Sequence
  Synthetic oligonucleotide
acgaatctcgtcatccgacagcttagtagc

SEQ ID NO: 201933 - DNA, 30 bp, Artificial Sequence
  Synthetic oligonucleotide
ttagggcgggtaacatggcggagacgtagc

SEQ ID NO: 201934 - DNA, 30 bp, Artificial Sequence
  Synthetic oligonucleotide
ttagacatgcttttctaaggaatacgtagc

SEQ ID NO: 201935 - DNA, 30 bp, Artificial Sequence
  Synthetic oligonucleotide
atgactatactgtacaacatctcgcgtagc

SEQ ID NO: 201936 - DNA, 30 bp, Artificial Sequence
  Synthetic oligonucleotide
gattcgggtagatgactgggtacaggtagc

SEQ ID NO: 201937 - DNA, 30 bp, Artificial Sequence
  Synthetic oligonucleotide
tgatgactggaataagtcggagagggtagc

SEQ ID NO: 201938 - DNA, 30 bp, Artificial Sequence
  Synthetic oligonucleotide
aagtccttaagccagttctacgagggtagc

SEQ ID NO: 201939 - DNA, 30 bp, Artificial Sequence
  Synthetic oligonucleotide
caaatatcacttagattctagctctgtagc

SEQ ID NO: 201940 - DNA, 30 bp, Artificial Sequence
  Synthetic oligonucleotide
gcttcccactactaagggtggggtattagc

SEQ ID NO: 201941 - DNA, 30 bp, Artificial Sequence
  Synthetic oligonucleotide
gtgaccaccgcccgccgtagggcacttagc

SEQ ID NO: 201942 - DNA, 30 bp, Artificial Sequence
  Synthetic oligonucleotide
agacactcagtagccatgagggtacttagc

SEQ ID NO: 201943 - DNA, 30 bp, Artificial Sequence
  Synthetic oligonucleotide
tacccccaagccgcgattatggagcttagc

SEQ ID NO: 201944 - DNA, 30 bp, Artificial Sequence
  Synthetic oligonucleotide
gagaaacgctccccaaatcgtatgcttagc

SEQ ID NO: 201945 - DNA, 30 bp, Artificial Sequence
  Synthetic oligonucleotide
gctatcaatttgagatatcgtgttcttagc

SEQ ID NO: 201946 - DNA, 30 bp, Artificial Sequence
  Synthetic oligonucleotide
caaaatgaaaacgggtaaaggggggttagc

SEQ ID NO: 201947 - DNA, 30 bp, Artificial Sequence
  Synthetic oligonucleotide
cctttgctcgaagccgaacaggtggttagc

SEQ ID NO: 201948 - DNA, 30 bp, Artificial Sequence
  Synthetic oligonucleotide
acagctatcgaccggctaggatctgttagc

SEQ ID NO: 201949 - DNA, 30 bp, Artificial Sequence
  Synthetic oligonucleotide
cagttgatattggcagacgggagttttagc

SEQ ID NO: 201950 - DNA, 30 bp, Artificial Sequence
  Synthetic oligonucleotide
gattgaatccatgtgctagacgtttttagc

SEQ ID NO: 201951 - DNA, 30 bp, Artificial Sequence
  Synthetic oligonucleotide
ggtccaagctgagggcgggcagtaaaacgc

SEQ ID NO: 201952 - DNA, 30 bp, Artificial Sequence
  Synthetic oligonucleotide
tcgtgccaatgcgtgcatcttgagaaacgc

SEQ ID NO: 201953 - DNA, 30 bp, Artificial Sequence
  Synthetic oligonucleotide
aaatcatgaaacgaagcaaagatgaaacgc

SEQ ID NO: 201954 - DNA, 30 bp, Artificial Sequence
  Synthetic oligonucleotide
aaggaaggcgaattcgctctccaacaacgc

SEQ ID NO: 201955 - DNA, 30 bp, Artificial Sequence
  Synthetic oligonucleotide
ctcgatacagcctcaagcttcaaccaacgc

SEQ ID NO: 201956 - DNA, 30 bp, Artificial Sequence
  Synthetic oligonucleotide
gaatagctcaatggaatgatgtgccaacgc

SEQ ID NO: 201957 - DNA, 30 bp, Artificial Sequence
  Synthetic oligonucleotide
tccataaacatcaccgagcgggtgcaacgc

SEQ ID NO: 201958 - DNA, 30 bp, Artificial Sequence
  Synthetic oligonucleotide
cactgccttgctaactatttatctcaacgc

SEQ ID NO: 201959 - DNA, 30 bp, Artificial Sequence
  Synthetic oligonucleotide
acgcggaccaaaatagaggtaattcaacgc

SEQ ID NO: 201960 - DNA, 30 bp, Artificial Sequence
  Synthetic oligonucleotide
cactaacttaaattattgccatgagaacgc

SEQ ID NO: 201961 - DNA, 30 bp, Artificial Sequence
  Synthetic oligonucleotide
aagggcgtggacaagctgatgcacgaacgc

SEQ ID NO: 201962 - DNA, 30 bp, Artificial Sequence
  Synthetic oligonucleotide
agccaaacggtgcctaacggaattgaacgc

SEQ ID NO: 201963 - DNA, 30 bp, Artificial Sequence
  Synthetic oligonucleotide
cgagcgatgttcacttctccagtgtaacgc

SEQ ID NO: 201964 - DNA, 30 bp, Artificial Sequence
  Synthetic oligonucleotide
tagttgattgacataccaatccattaacgc

SEQ ID NO: 201965 - DNA, 30 bp, Artificial Sequence
  Synthetic oligonucleotide
tagtttgcgagccagacttcggcttaacgc

SEQ ID NO: 201966 - DNA, 30 bp, Artificial Sequence
  Synthetic oligonucleotide
acttgggggtggacatgtccagatacacgc

SEQ ID NO: 201967 - DNA, 30 bp, Artificial Sequence
  Synthetic oligonucleotide
agataaggtcgtggttagggtgtcccacgc

SEQ ID NO: 201968 - DNA, 30 bp, Artificial Sequence
  Synthetic oligonucleotide
caggtggagaagagctacattactccacgc

SEQ ID NO: 201969 - DNA, 30 bp, Artificial Sequence
  Synthetic oligonucleotide
cactagggtacttctgatgcacttccacgc

SEQ ID NO: 201970 - DNA, 30 bp, Artificial Sequence
  Synthetic oligonucleotide
cacctgggaactgcatcgaaaagtgcacgc

SEQ ID NO: 201971 - DNA, 30 bp, Artificial Sequence
  Synthetic oligonucleotide
aggtagtatcgagcatgggttgtatcacgc

SEQ ID NO: 201972 - DNA, 30 bp, Artificial Sequence
  Synthetic oligonucleotide
ttgccctgtgagggactatttaactcacgc

SEQ ID NO: 201973 - DNA, 30 bp, Artificial Sequence
  Synthetic oligonucleotide
tagggagtgctgagcgaaccgccctcacgc

SEQ ID NO: 201974 - DNA, 30 bp, Artificial Sequence
  Synthetic oligonucleotide
tgcataaaactggacacgacatcgtcacgc

SEQ ID NO: 201975 - DNA, 30 bp, Artificial Sequence
  Synthetic oligonucleotide
ctcgcgactcacgtaactacggcgcgacgc

SEQ ID NO: 201976 - DNA, 30 bp, Artificial Sequence
  Synthetic oligonucleotide
cgcagggctctagtggaacagcccatacgc

SEQ ID NO: 201977 - DNA, 30 bp, Artificial Sequence
  Synthetic oligonucleotide
accagaagaccggtatcaactacgatacgc

SEQ ID NO: 201978 - DNA, 30 bp, Artificial Sequence
  Synthetic oligonucleotide
atgggaaagcccaatacagaatctatacgc

SEQ ID NO: 201979 - DNA, 30 bp, Artificial Sequence
  Synthetic oligonucleotide
gatgaatcacaggctcaatccccactacgc

SEQ ID NO: 201980 - DNA, 30 bp, Artificial Sequence
  Synthetic oligonucleotide
cgccctgagcgtgctaatgtaagactacgc

SEQ ID NO: 201981 - DNA, 30 bp, Artificial Sequence
  Synthetic oligonucleotide
ctccaggtcgaaccacatcgctgcctacgc

SEQ ID NO: 201982 - DNA, 30 bp, Artificial Sequence
  Synthetic oligonucleotide
gatacgtcggtgccacaaggacctctacgc

SEQ ID NO: 201983 - DNA, 30 bp, Artificial Sequence
  Synthetic oligonucleotide
aaatgtgaggctgtgtacaggacagtacgc

SEQ ID NO: 201984 - DNA, 30 bp, Artificial Sequence
  Synthetic oligonucleotide
ggcgcgaatcgcagacacgctaacgtacgc

SEQ ID NO: 201985 - DNA, 30 bp, Artificial Sequence
  Synthetic oligonucleotide
ttgacgcacaaatgatcgcataccgtacgc

SEQ ID NO: 201986 - DNA, 30 bp, Artificial Sequence
  Synthetic oligonucleotide
cgtcgtgacctgtcacgtggctgcgtacgc

SEQ ID NO: 201987 - DNA, 30 bp, Artificial Sequence
  Synthetic oligonucleotide
cacaagtctaggcccgggtatagtgtacgc

SEQ ID NO: 201988 - DNA, 30 bp, Artificial Sequence
  Synthetic oligonucleotide
catcaggaactatcaacttgcgccttacgc

SEQ ID NO: 201989 - DNA, 30 bp, Artificial Sequence
  Synthetic oligonucleotide
actggactcggttcgccaaatacgttacgc

SEQ ID NO: 201990 - DNA, 30 bp, Artificial Sequence
  Synthetic oligonucleotide
gcgatcgcaacgctatgcagtggaaaccgc

SEQ ID NO: 201991 - DNA, 30 bp, Artificial Sequence
  Synthetic oligonucleotide
agttacatctactgacgagactccaaccgc

SEQ ID NO: 201992 - DNA, 30 bp, Artificial Sequence
  Synthetic oligonucleotide
gaggcaaaccagctagcacgcacgaaccgc

SEQ ID NO: 201993 - DNA, 30 bp, Artificial Sequence
  Synthetic oligonucleotide
agtttagccactgggacataaatgaaccgc

SEQ ID NO: 201994 - DNA, 30 bp, Artificial Sequence
  Synthetic oligonucleotide
cacaactttgggcaatacagagtgaaccgc

SEQ ID NO: 201995 - DNA, 30 bp, Artificial Sequence
  Synthetic oligonucleotide
cgcgaatgtgactagactccggaagaccgc

SEQ ID NO: 201996 - DNA, 30 bp, Artificial Sequence
  Synthetic oligonucleotide
ggactccgtagaagtacggcttaagaccgc

SEQ ID NO: 201997 - DNA, 30 bp, Artificial Sequence
  Synthetic oligonucleotide
ttctcgcttggaaaataaacatacgaccgc

SEQ ID NO: 201998 - DNA, 30 bp, Artificial Sequence
  Synthetic oligonucleotide
gggatatgatgatacgcgctcggataccgc

SEQ ID NO: 201999 - DNA, 30 bp, Artificial Sequence
  Synthetic oligonucleotide
ttggtacgggggacgtagaacggttaccgc

SEQ ID NO: 202000 - DNA, 30 bp, Artificial Sequence
  Synthetic oligonucleotide
agcgcgcgatgcaggcgaaaacgaacccgc

SEQ ID NO: 202001 - DNA, 30 bp, Artificial Sequence
  Synthetic oligonucleotide
attagcgttcgggcgatcagtcatacccgc

SEQ ID NO: 202002 - DNA, 30 bp, Artificial Sequence
  Synthetic oligonucleotide
ggtatctcaagctagtccattggtacccgc

SEQ ID NO: 202003 - DNA, 30 bp, Artificial Sequence
  Synthetic oligonucleotide
acacccacgcgattgctagttattacccgc

SEQ ID NO: 202004 - DNA, 30 bp, Artificial Sequence
  Synthetic oligonucleotide
aggataagccaggtctaggcggtaccccgc

SEQ ID NO: 202005 - DNA, 30 bp, Artificial Sequence
  Synthetic oligonucleotide
ggacgagcgatcattagcactctcccccgc

SEQ ID NO: 202006 - DNA, 30 bp, Artificial Sequence
  Synthetic oligonucleotide
gggtcgtacggtcgaggtttcagagcccgc

SEQ ID NO: 202007 - DNA, 30 bp, Artificial Sequence
  Synthetic oligonucleotide
tgtatagaaccagccatgacccacgcccgc

SEQ ID NO: 202008 - DNA, 30 bp, Artificial Sequence
  Synthetic oligonucleotide
ggacattacttagaattaagtgaaagccgc

SEQ ID NO: 202009 - DNA, 30 bp, Artificial Sequence
  Synthetic oligonucleotide
ttgtaacaaatgttagcaataggcagccgc

SEQ ID NO: 202010 - DNA, 30 bp, Artificial Sequence
  Synthetic oligonucleotide
atgcggcagccaccattacagaggcgccgc

SEQ ID NO: 202011 - DNA, 30 bp, Artificial Sequence
  Synthetic oligonucleotide
gtcacctgagcttcgccacaactgcgccgc

SEQ ID NO: 202012 - DNA, 30 bp, Artificial Sequence
  Synthetic oligonucleotide
tctggcaagggttgcaattccggtcgccgc

SEQ ID NO: 202013 - DNA, 30 bp, Artificial Sequence
  Synthetic oligonucleotide
ataaggggcacgggatgagggctaggccgc

SEQ ID NO: 202014 - DNA, 30 bp, Artificial Sequence
  Synthetic oligonucleotide
actggcgcgtcatggttacgtgtaggccgc

SEQ ID NO: 202015 - DNA, 30 bp, Artificial Sequence
  Synthetic oligonucleotide
tgttgttttaacaagttgcgtgagggccgc

SEQ ID NO: 202016 - DNA, 30 bp, Artificial Sequence
  Synthetic oligonucleotide
gtaatagccttcaatttaagtcatggccgc

SEQ ID NO: 202017 - DNA, 30 bp, Artificial Sequence
  Synthetic oligonucleotide
cccaagtataatgatgaattgattggccgc

SEQ ID NO: 202018 - DNA, 30 bp, Artificial Sequence
  Synthetic oligonucleotide
attacaagagcgaggcggatactaatccgc

SEQ ID NO: 202019 - DNA, 30 bp, Artificial Sequence
  Synthetic oligonucleotide
gctttagcgccggaacgttccctcatccgc

SEQ ID NO: 202020 - DNA, 30 bp, Artificial Sequence
  Synthetic oligonucleotide
attatgactagtggtatacgtctcatccgc

SEQ ID NO: 202021 - DNA, 30 bp, Artificial Sequence
  Synthetic oligonucleotide
tcgggtgtatcccctcaggaaggcctccgc

SEQ ID NO: 202022 - DNA, 30 bp, Artificial Sequence
  Synthetic oligonucleotide
tatggggaatgaacagtaaagctgctccgc

SEQ ID NO: 202023 - DNA, 30 bp, Artificial Sequence
  Synthetic oligonucleotide
atggatgtcgatggcctgttgggtctccgc

SEQ ID NO: 202024 - DNA, 30 bp, Artificial Sequence
  Synthetic oligonucleotide
gcagtgggtagtttggtttaattcgtccgc

SEQ ID NO: 202025 - DNA, 30 bp, Artificial Sequence
  Synthetic oligonucleotide
aatgctgcagacgacggggtcctaaagcgc

SEQ ID NO: 202026 - DNA, 30 bp, Artificial Sequence
  Synthetic oligonucleotide
aacgtccgtgttcagaaccattaacagcgc

SEQ ID NO: 202027 - DNA, 30 bp, Artificial Sequence
  Synthetic oligonucleotide
caagggaagcagcaagaagtttatgagcgc

SEQ ID NO: 202028 - DNA, 30 bp, Artificial Sequence
  Synthetic oligonucleotide
tcgtctggtggattgataagacgatagcgc

SEQ ID NO: 202029 - DNA, 30 bp, Artificial Sequence
  Synthetic oligonucleotide
ggttatctgactttagaagcatccacgcgc

SEQ ID NO: 202030 - DNA, 30 bp, Artificial Sequence
  Synthetic oligonucleotide
ccccggacctattggtcccacacgccgcgc

SEQ ID NO: 202031 - DNA, 30 bp, Artificial Sequence
  Synthetic oligonucleotide
ggaaactagcagtgaccatgtggcgcgcgc

SEQ ID NO: 202032 - DNA, 30 bp, Artificial Sequence
  Synthetic oligonucleotide
agaaggcccctatcaaccaatagggcgcgc

SEQ ID NO: 202033 - DNA, 30 bp, Artificial Sequence
  Synthetic oligonucleotide
tatcccggtactattcagattcgtgcgcgc

SEQ ID NO: 202034 - DNA, 30 bp, Artificial Sequence
  Synthetic oligonucleotide
gtagctagagggtgtgtcgtgtcatcgcgc

SEQ ID NO: 202035 - DNA, 30 bp, Artificial Sequence
  Synthetic oligonucleotide
cttggcaacttaatgtcaagttgttcgcgc

SEQ ID NO: 202036 - DNA, 30 bp, Artificial Sequence
  Synthetic oligonucleotide
ctagtcagaagatcggggatgatcaggcgc

SEQ ID NO: 202037 - DNA, 30 bp, Artificial Sequence
  Synthetic oligonucleotide
agataccggatctttagttacctgaggcgc

SEQ ID NO: 202038 - DNA, 30 bp, Artificial Sequence
  Synthetic oligonucleotide
ggcaggtgagtcgactagaagccccggcgc

SEQ ID NO: 202039 - DNA, 30 bp, Artificial Sequence
  Synthetic oligonucleotide
ctccacttgtcaaggtgtgtgatccggcgc

SEQ ID NO: 202040 - DNA, 30 bp, Artificial Sequence
  Synthetic oligonucleotide
acgccctggccgtttgatcatttccggcgc

SEQ ID NO: 202041 - DNA, 30 bp, Artificial Sequence
  Synthetic oligonucleotide
ttatacgaataaacggtgggccgtcggcgc

SEQ ID NO: 202042 - DNA, 30 bp, Artificial Sequence
  Synthetic oligonucleotide
aggtgggtgatgctagagtaattcgggcgc

SEQ ID NO: 202043 - DNA, 30 bp, Artificial Sequence
  Synthetic oligonucleotide
ttacgtaaagaggacctggccccggggcgc

SEQ ID NO: 202044 - DNA, 30 bp, Artificial Sequence
  Synthetic oligonucleotide
ttagaaatataacactggaaaagggggcgc

SEQ ID NO: 202045 - DNA, 30 bp, Artificial Sequence
  Synthetic oligonucleotide
aaaaagtggcccttcaggcaggactggcgc

SEQ ID NO: 202046 - DNA, 30 bp, Artificial Sequence
  Synthetic oligonucleotide
gtagctggactaagtagtaacacctggcgc

SEQ ID NO: 202047 - DNA, 30 bp, Artificial Sequence
  Synthetic oligonucleotide
ccacaagtccagcaagaattgtcaatgcgc

SEQ ID NO: 202048 - DNA, 28 bp, Artificial Sequence
  Synthetic oligonucleotide
tttgttgtgtaggtttactcccatgcgc

SEQ ID NO: 202049 - DNA, 30 bp, Artificial Sequence
  Synthetic oligonucleotide
gcttggccattaatgaataccttcatgcgc

SEQ ID NO: 202050 - DNA, 30 bp, Artificial Sequence
  Synthetic oligonucleotide
tcctatgattacgatggaagagtgatgcgc

SEQ ID NO: 202051 - DNA, 30 bp, Artificial Sequence
  Synthetic oligonucleotide
aaatactatccatgaaaggaggcactgcgc

SEQ ID NO: 202052 - DNA, 30 bp, Artificial Sequence
  Synthetic oligonucleotide
acagtcaatggtaaggtttagaacctgcgc

SEQ ID NO: 202053 - DNA, 30 bp, Artificial Sequence
  Synthetic oligonucleotide
ataccgaacgctggtgattacaaagtgcgc

SEQ ID NO: 202054 - DNA, 30 bp, Artificial Sequence
  Synthetic oligonucleotide
ggttgctagctctgcgggccatgcgtgcgc

SEQ ID NO: 202055 - DNA, 30 bp, Artificial Sequence
  Synthetic oligonucleotide
agaaggcttttcaatcacccatttgtgcgc

SEQ ID NO: 202056 - DNA, 30 bp, Artificial Sequence
  Synthetic oligonucleotide
gatactaagatgtgtcatgtgtaattgcgc

SEQ ID NO: 202057 - DNA, 30 bp, Artificial Sequence
  Synthetic oligonucleotide
tggagtactgatacaattgttccgttgcgc

SEQ ID NO: 202058 - DNA, 30 bp, Artificial Sequence
  Synthetic oligonucleotide
aaagatctcaaaatttagaacgcgttgcgc

SEQ ID NO: 202059 - DNA, 30 bp, Artificial Sequence
  Synthetic oligonucleotide
cctcgcccgcgcaaactcgataaaaatcgc

SEQ ID NO: 202060 - DNA, 30 bp, Artificial Sequence
  Synthetic oligonucleotide
gtaatgaacagtggagaatgcggcaatcgc

SEQ ID NO: 202061 - DNA, 30 bp, Artificial Sequence
  Synthetic oligonucleotide
agcacgtctgttagatcggtgtcgaatcgc

SEQ ID NO: 202062 - DNA, 30 bp, Artificial Sequence
  Synthetic oligonucleotide
gggaccctaagcagtgaatgactgaatcgc

SEQ ID NO: 202063 - DNA, 30 bp, Artificial Sequence
  Synthetic oligonucleotide
acgacttcctcgattttcattaggcatcgc

SEQ ID NO: 202064 - DNA, 30 bp, Artificial Sequence
  Synthetic oligonucleotide
ccaatacactagccctcagaacctcatcgc

SEQ ID NO: 202065 - DNA, 30 bp, Artificial Sequence
  Synthetic oligonucleotide
ggagggtcctgctgatctgtaagtcatcgc

SEQ ID NO: 202066 - DNA, 30 bp, Artificial Sequence
  Synthetic oligonucleotide
ttgctgattcaccactgctagcgtcatcgc

SEQ ID NO: 202067 - DNA, 30 bp, Artificial Sequence
  Synthetic oligonucleotide
aataggcgtaccacgtgagggggtcatcgc

SEQ ID NO: 202068 - DNA, 30 bp, Artificial Sequence
  Synthetic oligonucleotide
gcatcaagactcaaaatgaagatagatcgc

SEQ ID NO: 202069 - DNA, 30 bp, Artificial Sequence
  Synthetic oligonucleotide
aggggcaatgtagaattatccttagatcgc

SEQ ID NO: 202070 - DNA, 30 bp, Artificial Sequence
  Synthetic oligonucleotide
ggtcacgtaaatagtatccgcagggatcgc

SEQ ID NO: 202071 - DNA, 30 bp, Artificial Sequence
  Synthetic oligonucleotide
ggtagatactggcagagccaaagtgatcgc

SEQ ID NO: 202072 - DNA, 30 bp, Artificial Sequence
  Synthetic oligonucleotide
agcgccactcgtggatcgtgtctatatcgc

SEQ ID NO: 202073 - DNA, 30 bp, Artificial Sequence
  Synthetic oligonucleotide
gtaggtatgaaacagacactcaagtatcgc

SEQ ID NO: 202074 - DNA, 30 bp, Artificial Sequence
  Synthetic oligonucleotide
atggactactccgcgctagcgaagtatcgc

SEQ ID NO: 202075 - DNA, 30 bp, Artificial Sequence
  Synthetic oligonucleotide
ggatagtggtcgtctgtagctatgtatcgc

SEQ ID NO: 202076 - DNA, 30 bp, Artificial Sequence
  Synthetic oligonucleotide
ctacctgcataaattatcgcggtcactcgc

SEQ ID NO: 202077 - DNA, 30 bp, Artificial Sequence
  Synthetic oligonucleotide
acgagatctagcttctcgagggaccctcgc

SEQ ID NO: 202078 - DNA, 30 bp, Artificial Sequence
  Synthetic oligonucleotide
accggataaacttcgaggagcgcgcctcgc

SEQ ID NO: 202079 - DNA, 30 bp, Artificial Sequence
  Synthetic oligonucleotide
ctgtcaggtcgatatgcaacatatcctcgc

SEQ ID NO: 202080 - DNA, 30 bp, Artificial Sequence
  Synthetic oligonucleotide
gggggtgcagattagacgtactatcctcgc

SEQ ID NO: 202081 - DNA, 30 bp, Artificial Sequence
  Synthetic oligonucleotide
actcagataatatgccgatgcccagctcgc

SEQ ID NO: 202082 - DNA, 30 bp, Artificial Sequence
  Synthetic oligonucleotide
ctcggaatctaccgcaccttgaacgctcgc

SEQ ID NO: 202083 - DNA, 30 bp, Artificial Sequence
  Synthetic oligonucleotide
tcgttgcttgtggcctgcaatatcgctcgc

SEQ ID NO: 202084 - DNA, 30 bp, Artificial Sequence
  Synthetic oligonucleotide
gatttaccggggtctggcattagctctcgc

SEQ ID NO: 202085 - DNA, 30 bp, Artificial Sequence
  Synthetic oligonucleotide
atggggctatggctgctacatagttctcgc

SEQ ID NO: 202086 - DNA, 30 bp, Artificial Sequence
  Synthetic oligonucleotide
ctcctaaatgaggcgcgttacaacagtcgc

SEQ ID NO: 202087 - DNA, 30 bp, Artificial Sequence
  Synthetic oligonucleotide
ggtactaacattgggataaggcacagtcgc

SEQ ID NO: 202088 - DNA, 30 bp, Artificial Sequence
  Synthetic oligonucleotide
aagtaggtctcacaaacctaacccagtcgc

SEQ ID NO: 202089 - DNA, 30 bp, Artificial Sequence
  Synthetic oligonucleotide
tgatggcatcatcttaagtgtatcagtcgc

SEQ ID NO: 202090 - DNA, 30 bp, Artificial Sequence
  Synthetic oligonucleotide
tactcgtgtgtgcctgtaggatctagtcgc

SEQ ID NO: 202091 - DNA, 30 bp, Artificial Sequence
  Synthetic oligonucleotide
tttgtgtggaccccaactagaggacgtcgc

SEQ ID NO: 202092 - DNA, 30 bp, Artificial Sequence
  Synthetic oligonucleotide
gcagccatcgaaatccgtaaccatcgtcgc

SEQ ID NO: 202093 - DNA, 30 bp, Artificial Sequence
  Synthetic oligonucleotide
gcgtctgatgtattatgtgtggatcgtcgc

SEQ ID NO: 202094 - DNA, 30 bp, Artificial Sequence
  Synthetic oligonucleotide
gtgtcgatttagccatcaatcgtcggtcgc

SEQ ID NO: 202095 - DNA, 30 bp, Artificial Sequence
  Synthetic oligonucleotide
tgcagaaccggtgctggggaatcgggtcgc

SEQ ID NO: 202096 - DNA, 30 bp, Artificial Sequence
  Synthetic oligonucleotide
agcaattgcgacagcacggttcctggtcgc

SEQ ID NO: 202097 - DNA, 30 bp, Artificial Sequence
  Synthetic oligonucleotide
gcacgtacggtcactagtactaactgtcgc

SEQ ID NO: 202098 - DNA, 30 bp, Artificial Sequence
  Synthetic oligonucleotide
actagcggctacctaaacgacggctgtcgc

SEQ ID NO: 202099 - DNA, 30 bp, Artificial Sequence
  Synthetic oligonucleotide
cgaatagacactggctttatgaattgtcgc

SEQ ID NO: 202100 - DNA, 30 bp, Artificial Sequence
  Synthetic oligonucleotide
tggtggtaacgtggagcgtcgatttgtcgc

SEQ ID NO: 202101 - DNA, 30 bp, Artificial Sequence
  Synthetic oligonucleotide
ggagaattccagaatatgtaataaattcgc

SEQ ID NO: 202102 - DNA, 30 bp, Artificial Sequence
  Synthetic oligonucleotide
ttcacggaacctgacatccgaataattcgc

SEQ ID NO: 202103 - DNA, 30 bp, Artificial Sequence
  Synthetic oligonucleotide
cccgtcacataccacaaaggtgatattcgc

SEQ ID NO: 202104 - DNA, 30 bp, Artificial Sequence
  Synthetic oligonucleotide
taatgccgggctcggagaagcaggcttcgc

SEQ ID NO: 202105 - DNA, 30 bp, Artificial Sequence
  Synthetic oligonucleotide
gttaggtgtcccataaagggtatgcttcgc

SEQ ID NO: 202106 - DNA, 30 bp, Artificial Sequence
  Synthetic oligonucleotide
atcttctcaagaaatcctagagtcgttcgc

SEQ ID NO: 202107 - DNA, 30 bp, Artificial Sequence
  Synthetic oligonucleotide
atcatatagactatacgcacgtcatttcgc

SEQ ID NO: 202108 - DNA, 30 bp, Artificial Sequence
  Synthetic oligonucleotide
tccgtgtcacttaaccgggccatatttcgc

SEQ ID NO: 202109 - DNA, 30 bp, Artificial Sequence
  Synthetic oligonucleotide
aatagtaaggttacagccgtgacctttcgc

SEQ ID NO: 202110 - DNA, 30 bp, Artificial Sequence
  Synthetic oligonucleotide
atgtactactgccatctatgcccgtttcgc

SEQ ID NO: 202111 - DNA, 30 bp, Artificial Sequence
  Synthetic oligonucleotide
acgtgtgggaattgcaaggcgatttttcgc

SEQ ID NO: 202112 - DNA, 30 bp, Artificial Sequence
  Synthetic oligonucleotide
gtcatcgaacgctccatgggatgaaaaggc

SEQ ID NO: 202113 - DNA, 30 bp, Artificial Sequence
  Synthetic oligonucleotide
gtggaatctacagagagtactaccaaaggc

SEQ ID NO: 202114 - DNA, 30 bp, Artificial Sequence
  Synthetic oligonucleotide
gattgatgtgaacatgtcataaacgaaggc

SEQ ID NO: 202115 - DNA, 30 bp, Artificial Sequence
  Synthetic oligonucleotide
attgaatgtggtataacgactatcgaaggc

SEQ ID NO: 202116 - DNA, 30 bp, Artificial Sequence
  Synthetic oligonucleotide
tacagacgagcgagacagtcctaggaaggc

SEQ ID NO: 202117 - DNA, 30 bp, Artificial Sequence
  Synthetic oligonucleotide
aggtaggcagacctagggagtttggaaggc

SEQ ID NO: 202118 - DNA, 30 bp, Artificial Sequence
  Synthetic oligonucleotide
ttatcgtgtcgcgatagggcgaaataaggc

SEQ ID NO: 202119 - DNA, 30 bp, Artificial Sequence
  Synthetic oligonucleotide
aaagattcgggataagaagacgcctaaggc

SEQ ID NO: 202120 - DNA, 30 bp, Artificial Sequence
  Synthetic oligonucleotide
aaccggaacatcggatagggcttctaaggc

SEQ ID NO: 202121 - DNA, 30 bp, Artificial Sequence
  Synthetic oligonucleotide
acaacatggtggcgaaggctgaattaaggc

SEQ ID NO: 202122 - DNA, 30 bp, Artificial Sequence
  Synthetic oligonucleotide
ctgcgcatatgtacataggactaaccaggc

SEQ ID NO: 202123 - DNA, 30 bp, Artificial Sequence
  Synthetic oligonucleotide
tttgcacggttttcacctatgctaccaggc

SEQ ID NO: 202124 - DNA, 30 bp, Artificial Sequence
  Synthetic oligonucleotide
gaaactatgaacagatcggagttaccaggc

SEQ ID NO: 202125 - DNA, 30 bp, Artificial Sequence
  Synthetic oligonucleotide
ttacagggcacgacagggaggtccccaggc

SEQ ID NO: 202126 - DNA, 30 bp, Artificial Sequence
  Synthetic oligonucleotide
gcgtgtggtttttaggggagacatccaggc

SEQ ID NO: 202127 - DNA, 30 bp, Artificial Sequence
  Synthetic oligonucleotide
gtggatactaaggagtaaaagttcgcaggc

SEQ ID NO: 202128 - DNA, 30 bp, Artificial Sequence
  Synthetic oligonucleotide
ccgcccaagcttccaaagaagcgtgcaggc

SEQ ID NO: 202129 - DNA, 30 bp, Artificial Sequence
  Synthetic oligonucleotide
cagagccgttagctcgcatggcttgcaggc

SEQ ID NO: 202130 - DNA, 30 bp, Artificial Sequence
  Synthetic oligonucleotide
tcgtacttttctagcgattacccgtcaggc

SEQ ID NO: 202131 - DNA, 30 bp, Artificial Sequence
  Synthetic oligonucleotide
aaggctttggaaaggtttatcacttcaggc

SEQ ID NO: 202132 - DNA, 30 bp, Artificial Sequence
  Synthetic oligonucleotide
cgttaagcaatagcccccagactttcaggc

SEQ ID NO: 202133 - DNA, 30 bp, Artificial Sequence
  Synthetic oligonucleotide
catggacctgtgtcggctatctcaagaggc

SEQ ID NO: 202134 - DNA, 30 bp, Artificial Sequence
  Synthetic oligonucleotide
cagactaatcggaatactcagtgaagaggc

SEQ ID NO: 202135 - DNA, 30 bp, Artificial Sequence
  Synthetic oligonucleotide
tcaccctgtagcaagaaactcgtaagaggc

SEQ ID NO: 202136 - DNA, 30 bp, Artificial Sequence
  Synthetic oligonucleotide
atgcgcagatagcgcagacaatacagaggc

SEQ ID NO: 202137 - DNA, 30 bp, Artificial Sequence
  Synthetic oligonucleotide
ctctcgatccaaatactgtgagccagaggc

SEQ ID NO: 202138 - DNA, 30 bp, Artificial Sequence
  Synthetic oligonucleotide
tttcgatagtggagcgtgaagtcgagaggc

SEQ ID NO: 202139 - DNA, 30 bp, Artificial Sequence
  Synthetic oligonucleotide
gcgtcggcgtccccacggccgtatagaggc

SEQ ID NO: 202140 - DNA, 30 bp, Artificial Sequence
  Synthetic oligonucleotide
gcacatatttcacaaattcaggctagaggc

SEQ ID NO: 202141 - DNA, 30 bp, Artificial Sequence
  Synthetic oligonucleotide
agggacggtccgcttcgtaagttacgaggc

SEQ ID NO: 202142 - DNA, 30 bp, Artificial Sequence
  Synthetic oligonucleotide
cgccgcaaagtatatttcattaatcgaggc

SEQ ID NO: 202143 - DNA, 30 bp, Artificial Sequence
  Synthetic oligonucleotide
agttggaatctgcgacgataagaaggaggc

SEQ ID NO: 202144 - DNA, 30 bp, Artificial Sequence
  Synthetic oligonucleotide
tgtgagggagaggaccttcacgagggaggc

SEQ ID NO: 202145 - DNA, 30 bp, Artificial Sequence
  Synthetic oligonucleotide
gcccaatgctacacacattcaaggggaggc

SEQ ID NO: 202146 - DNA, 30 bp, Artificial Sequence
  Synthetic oligonucleotide
aaggggcatcccggaaggcgcgactgaggc

SEQ ID NO: 202147 - DNA, 30 bp, Artificial Sequence
  Synthetic oligonucleotide
tcgacgggcgtatgtaaaatttattgaggc

SEQ ID NO: 202148 - DNA, 30 bp, Artificial Sequence
  Synthetic oligonucleotide
gttaaggacaatgtggtgccaatttgaggc

SEQ ID NO: 202149 - DNA, 30 bp, Artificial Sequence
  Synthetic oligonucleotide
aggggtttaggccacgagggtgtgataggc

SEQ ID NO: 202150 - DNA, 30 bp, Artificial Sequence
  Synthetic oligonucleotide
ttcaagatgacactggggaaaattataggc

SEQ ID NO: 202151 - DNA, 30 bp, Artificial Sequence
  Synthetic oligonucleotide
actcgcgaacataatttaatgcggctaggc

SEQ ID NO: 202152 - DNA, 30 bp, Artificial Sequence
  Synthetic oligonucleotide
aagtatataccagaccaaagtcgtctaggc

SEQ ID NO: 202153 - DNA, 30 bp, Artificial Sequence
  Synthetic oligonucleotide
ggctttgtcggttcagtcctcgtcgtaggc

SEQ ID NO: 202154 - DNA, 30 bp, Artificial Sequence
  Synthetic oligonucleotide
cctttcttttataacggcaacgatgtaggc

SEQ ID NO: 202155 - DNA, 30 bp, Artificial Sequence
  Synthetic oligonucleotide
agctcgcggcaggtggaacacgctgtaggc

SEQ ID NO: 202156 - DNA, 30 bp, Artificial Sequence
  Synthetic oligonucleotide
tcgggacatatctcatctacaaaattaggc

SEQ ID NO: 202157 - DNA, 30 bp, Artificial Sequence
  Synthetic oligonucleotide
gtgtggggagctggggcccacgtcttaggc

SEQ ID NO: 202158 - DNA, 30 bp, Artificial Sequence
  Synthetic oligonucleotide
aactgacgaaggaatgaccatgcgttaggc

SEQ ID NO: 202159 - DNA, 30 bp, Artificial Sequence
  Synthetic oligonucleotide
tatgaagtacatgcgagctgcaggttaggc

SEQ ID NO: 202160 - DNA, 30 bp, Artificial Sequence
  Synthetic oligonucleotide
ctaatagcagatccgatcacggggttaggc

SEQ ID NO: 202161 - DNA, 30 bp, Artificial Sequence
  Synthetic oligonucleotide
cgttgaccggttagcgcgtcagtgttaggc

SEQ ID NO: 202162 - DNA, 30 bp, Artificial Sequence
  Synthetic oligonucleotide
tgcaaacttgggtgcctcgcgcatttaggc

SEQ ID NO: 202163 - DNA, 30 bp, Artificial Sequence
  Synthetic oligonucleotide
gggtggtaagaacctccgcctcgtttaggc

SEQ ID NO: 202164 - DNA, 30 bp, Artificial Sequence
  Synthetic oligonucleotide
acttggatacacagttgggcctagaacggc

SEQ ID NO: 202165 - DNA, 30 bp, Artificial Sequence
  Synthetic oligonucleotide
caacctcgtcttcaccaggtcccacacggc

SEQ ID NO: 202166 - DNA, 30 bp, Artificial Sequence
  Synthetic oligonucleotide
ttggagaggccttggaaagaaaagcacggc

SEQ ID NO: 202167 - DNA, 30 bp, Artificial Sequence
  Synthetic oligonucleotide
cgattgacgatggtcctctacaaagacggc

SEQ ID NO: 202168 - DNA, 30 bp, Artificial Sequence
  Synthetic oligonucleotide
gaccgaatctgctgagctctgcgagacggc

SEQ ID NO: 202169 - DNA, 30 bp, Artificial Sequence
  Synthetic oligonucleotide
acaggaaattgcagtgccgatatagacggc

SEQ ID NO: 202170 - DNA, 30 bp, Artificial Sequence
  Synthetic oligonucleotide
gttcaaaaacacggctcgaggggcgacggc

SEQ ID NO: 202171 - DNA, 30 bp, Artificial Sequence
  Synthetic oligonucleotide
gcgtcaaaagctaagcccacttgcgacggc

SEQ ID NO: 202172 - DNA, 30 bp, Artificial Sequence
  Synthetic oligonucleotide
tcgaattaggtacacgtttgatttgacggc

SEQ ID NO: 202173 - DNA, 30 bp, Artificial Sequence
  Synthetic oligonucleotide
aacgtccgtctacgtctgacccgatacggc

SEQ ID NO: 202174 - DNA, 30 bp, Artificial Sequence
  Synthetic oligonucleotide
ggaaccaagaactagagtcagtactacggc

SEQ ID NO: 202175 - DNA, 30 bp, Artificial Sequence
  Synthetic oligonucleotide
ccaggatatccgtccgtctatgtctacggc

SEQ ID NO: 202176 - DNA, 30 bp, Artificial Sequence
  Synthetic oligonucleotide
cgaaccctacaattgttggttgggtacggc

SEQ ID NO: 202177 - DNA, 30 bp, Artificial Sequence
  Synthetic oligonucleotide
catatccaattgtcaacctatcgttacggc

SEQ ID NO: 202178 - DNA, 30 bp, Artificial Sequence
  Synthetic oligonucleotide
gacctgtacatactcgttatcaaaaccggc

SEQ ID NO: 202179 - DNA, 30 bp, Artificial Sequence
  Synthetic oligonucleotide
tcgcgtcgaggtcagcctcgatagaccggc

SEQ ID NO: 202180 - DNA, 30 bp, Artificial Sequence
  Synthetic oligonucleotide
acggctgtgcataatataccaggccccggc

SEQ ID NO: 202181 - DNA, 30 bp, Artificial Sequence
  Synthetic oligonucleotide
gatccagggtctgagtactgaaatcccggc

SEQ ID NO: 202182 - DNA, 30 bp, Artificial Sequence
  Synthetic oligonucleotide
cttagcgagtaacatgtcagggacgccggc

SEQ ID NO: 202183 - DNA, 30 bp, Artificial Sequence
  Synthetic oligonucleotide
ctgaggtgaatcggtattgagaccgccggc

SEQ ID NO: 202184 - DNA, 30 bp, Artificial Sequence
  Synthetic oligonucleotide
gttatcctgggatagtactattgcgccggc

SEQ ID NO: 202185 - DNA, 30 bp, Artificial Sequence
  Synthetic oligonucleotide
tatcaatctaagcctaccgtgatcgccggc

SEQ ID NO: 202186 - DNA, 30 bp, Artificial Sequence
  Synthetic oligonucleotide
tcggagcgttaaagaattttttgggccggc

SEQ ID NO: 202187 - DNA, 30 bp, Artificial Sequence
  Synthetic oligonucleotide
tacgcaatttcccaaatcatgattgccggc

SEQ ID NO: 202188 - DNA, 30 bp, Artificial Sequence
  Synthetic oligonucleotide
acggtgttctaacccgggttcgtatccggc

SEQ ID NO: 202189 - DNA, 30 bp, Artificial Sequence
  Synthetic oligonucleotide
taattacaacgatcaacggacaactccggc

SEQ ID NO: 202190 - DNA, 30 bp, Artificial Sequence
  Synthetic oligonucleotide
aatagttgatctatttaacaggtctccggc

SEQ ID NO: 202191 - DNA, 30 bp, Artificial Sequence
  Synthetic oligonucleotide
gtcacgactcgttaaatgtcgagttccggc

SEQ ID NO: 202192 - DNA, 30 bp, Artificial Sequence
  Synthetic oligonucleotide
caagcccccgcgtgagactggagaagcggc

SEQ ID NO: 202193 - DNA, 30 bp, Artificial Sequence
  Synthetic oligonucleotide
ccgcgggatacatgcggcctgggaagcggc

SEQ ID NO: 202194 - DNA, 30 bp, Artificial Sequence
  Synthetic oligonucleotide
tcagctatcgaatcgctgtgtctaagcggc

SEQ ID NO: 202195 - DNA, 30 bp, Artificial Sequence
  Synthetic oligonucleotide
cgaaagtatacatccatttatttaagcggc

SEQ ID NO: 202196 - DNA, 30 bp, Artificial Sequence
  Synthetic oligonucleotide
actggacggtacacgctcttcgccagcggc

SEQ ID NO: 202197 - DNA, 30 bp, Artificial Sequence
  Synthetic oligonucleotide
ccccagagccacgttatcggggtcagcggc

SEQ ID NO: 202198 - DNA, 30 bp, Artificial Sequence
  Synthetic oligonucleotide
cccaagaatttaacagaaggcgcgagcggc

SEQ ID NO: 202199 - DNA, 30 bp, Artificial Sequence
  Synthetic oligonucleotide
ttaaatgaaatcgcgagtagggggagcggc

SEQ ID NO: 202200 - DNA, 30 bp, Artificial Sequence
  Synthetic oligonucleotide
tacggccaaccgcacaacgtcactagcggc

SEQ ID NO: 202201 - DNA, 30 bp, Artificial Sequence
  Synthetic oligonucleotide
tctggactcgtaataatgtcgtcacgcggc

SEQ ID NO: 202202 - DNA, 30 bp, Artificial Sequence
  Synthetic oligonucleotide
gacaaaattaaaggcctccgtctacgcggc

SEQ ID NO: 202203 - DNA, 30 bp, Artificial Sequence
  Synthetic oligonucleotide
cttagggggaaagtgaagtaattacgcggc

SEQ ID NO: 202204 - DNA, 30 bp, Artificial Sequence
  Synthetic oligonucleotide
acgtttattgtctattactacgaaggcggc

SEQ ID NO: 202205 - DNA, 30 bp, Artificial Sequence
  Synthetic oligonucleotide
atccgctacggggtgtgacggcctggcggc

SEQ ID NO: 202206 - DNA, 30 bp, Artificial Sequence
  Synthetic oligonucleotide
ttgcaggtcacattgcactacagatgcggc

SEQ ID NO: 202207 - DNA, 30 bp, Artificial Sequence
  Synthetic oligonucleotide
ggacaaagacgattctcttacatctgcggc

SEQ ID NO: 202208 - DNA, 30 bp, Artificial Sequence
  Synthetic oligonucleotide
agtcgaagctcttagcaatatctctgcggc

SEQ ID NO: 202209 - DNA, 30 bp, Artificial Sequence
  Synthetic oligonucleotide
agtaactcagcgtccccgcgggccatcggc

SEQ ID NO: 202210 - DNA, 30 bp, Artificial Sequence
  Synthetic oligonucleotide
gaggttaagtagacgttaactgggatcggc

SEQ ID NO: 202211 - DNA, 30 bp, Artificial Sequence
  Synthetic oligonucleotide
atcaggattcgggtccgcgaaatgatcggc

SEQ ID NO: 202212 - DNA, 30 bp, Artificial Sequence
  Synthetic oligonucleotide
attagttcaattgatgaaacctgcgtcggc

SEQ ID NO: 202213 - DNA, 30 bp, Artificial Sequence
  Synthetic oligonucleotide
tcaaacggtggtaggcacgggtaattcggc

SEQ ID NO: 202214 - DNA, 30 bp, Artificial Sequence
  Synthetic oligonucleotide
ggaaattcagtttcaaaccagatattcggc

SEQ ID NO: 202215 - DNA, 30 bp, Artificial Sequence
  Synthetic oligonucleotide
aagacgacaaaatggggaccgaagttcggc

SEQ ID NO: 202216 - DNA, 30 bp, Artificial Sequence
  Synthetic oligonucleotide
ctgaggttggaccttttaatgaaaaagggc

SEQ ID NO: 202217 - DNA, 30 bp, Artificial Sequence
  Synthetic oligonucleotide
gaaaaaaataataaccgtctgataaagggc

SEQ ID NO: 202218 - DNA, 30 bp, Artificial Sequence
  Synthetic oligonucleotide
acgaactttgggaagtcatgtctaaagggc

SEQ ID NO: 202219 - DNA, 30 bp, Artificial Sequence
  Synthetic oligonucleotide
aacgtacaggcatttagagagcccaagggc

SEQ ID NO: 202220 - DNA, 30 bp, Artificial Sequence
  Synthetic oligonucleotide
catcaaggaatattcaaaagcttcaagggc

SEQ ID NO: 202221 - DNA, 30 bp, Artificial Sequence
  Synthetic oligonucleotide
attagaagagaaccctttacgttcaagggc

SEQ ID NO: 202222 - DNA, 30 bp, Artificial Sequence
  Synthetic oligonucleotide
aaggctatccgttatggcgaggagaagggc

SEQ ID NO: 202223 - DNA, 30 bp, Artificial Sequence
  Synthetic oligonucleotide
atgaaaatgcctgagaacgtaccgaagggc

SEQ ID NO: 202224 - DNA, 31 bp, Artificial Sequence
  Synthetic oligonucleotide
cctgtcaaatcggtcagcgtcccggaagggc

SEQ ID NO: 202225 - DNA, 30 bp, Artificial Sequence
  Synthetic oligonucleotide
ggtctgagccaatatcccagtcaacagggc

SEQ ID NO: 202226 - DNA, 30 bp, Artificial Sequence
  Synthetic oligonucleotide
tagaactcatgttgctgaacagtccagggc

SEQ ID NO: 202227 - DNA, 30 bp, Artificial Sequence
  Synthetic oligonucleotide
tcccgcgacactacgaaaaactcgcagggc

SEQ ID NO: 202228 - DNA, 30 bp, Artificial Sequence
  Synthetic oligonucleotide
cgttctaatgacatagagcgtgttcagggc

SEQ ID NO: 202229 - DNA, 30 bp, Artificial Sequence
  Synthetic oligonucleotide
tggtatggggataatcctgggaaagagggc

SEQ ID NO: 202230 - DNA, 30 bp, Artificial Sequence
  Synthetic oligonucleotide
gaaaattatggtctacacgaatacgagggc

SEQ ID NO: 202231 - DNA, 30 bp, Artificial Sequence
  Synthetic oligonucleotide
gagcaagatgttcgaaagggttgggagggc

SEQ ID NO: 202232 - DNA, 30 bp, Artificial Sequence
  Synthetic oligonucleotide
tgtgtaaaatccagctcgcgctgatagggc

SEQ ID NO: 202233 - DNA, 30 bp, Artificial Sequence
  Synthetic oligonucleotide
tcctatttgtagttggcatggatatagggc

SEQ ID NO: 202234 - DNA, 30 bp, Artificial Sequence
  Synthetic oligonucleotide
cgcatgtaatcctacttcggtcactagggc

SEQ ID NO: 202235 - DNA, 30 bp, Artificial Sequence
  Synthetic oligonucleotide
cgtgctggcgagtggaatatggcttagggc

SEQ ID NO: 202236 - DNA, 30 bp, Artificial Sequence
  Synthetic oligonucleotide
gtaatacttacaggacgactgggaacgggc

SEQ ID NO: 202237 - DNA, 30 bp, Artificial Sequence
  Synthetic oligonucleotide
aatgcgatggggatgggagtcgtaccgggc

SEQ ID NO: 202238 - DNA, 30 bp, Artificial Sequence
  Synthetic oligonucleotide
gtgtgtgaacaactaacagatgatccgggc

SEQ ID NO: 202239 - DNA, 30 bp, Artificial Sequence
  Synthetic oligonucleotide
taacgaagcccagtagtaggcggtccgggc

SEQ ID NO: 202240 - DNA, 30 bp, Artificial Sequence
  Synthetic oligonucleotide
tgcagtgaaggttgatccaaaaccgcgggc

SEQ ID NO: 202241 - DNA, 30 bp, Artificial Sequence
  Synthetic oligonucleotide
tgtattagatcgcctagggagagcgcgggc

SEQ ID NO: 202242 - DNA, 30 bp, Artificial Sequence
  Synthetic oligonucleotide
gggcataacgtgtcggatggacgcgcgggc

SEQ ID NO: 202243 - DNA, 30 bp, Artificial Sequence
  Synthetic oligonucleotide
tagacaagctctcagcgcggacctgcgggc

SEQ ID NO: 202244 - DNA, 30 bp, Artificial Sequence
  Synthetic oligonucleotide
tgctaatgatctctggtagtgagatcgggc

SEQ ID NO: 202245 - DNA, 30 bp, Artificial Sequence
  Synthetic oligonucleotide
acccaaatgccagggacaccgaagtcgggc

SEQ ID NO: 202246 - DNA, 30 bp, Artificial Sequence
  Synthetic oligonucleotide
tagtagatcatctatgcctacccgtcgggc

SEQ ID NO: 202247 - DNA, 30 bp, Artificial Sequence
  Synthetic oligonucleotide
tgaacggatcggagtccgtgattgtcgggc

SEQ ID NO: 202248 - DNA, 30 bp, Artificial Sequence
  Synthetic oligonucleotide
agggcactagacaggatttcttattcgggc

SEQ ID NO: 202249 - DNA, 29 bp, Artificial Sequence
  Synthetic oligonucleotide
gggtgtgattcttgggactgaaaaggggc

SEQ ID NO: 202250 - DNA, 30 bp, Artificial Sequence
  Synthetic oligonucleotide
atccccacaccatagctattaccaaggggc

SEQ ID NO: 202251 - DNA, 30 bp, Artificial Sequence
  Synthetic oligonucleotide
cttctttacacgggtccataagcgaggggc

SEQ ID NO: 202252 - DNA, 30 bp, Artificial Sequence
  Synthetic oligonucleotide
aacgcggggcaccgtagccctcataggggc

SEQ ID NO: 202253 - DNA, 30 bp, Artificial Sequence
  Synthetic oligonucleotide
cagggcaggttgtacagagtctcacggggc

SEQ ID NO: 202254 - DNA, 30 bp, Artificial Sequence
  Synthetic oligonucleotide
taccagccggtattgaatccgtgacggggc

SEQ ID NO: 202255 - DNA, 30 bp, Artificial Sequence
  Synthetic oligonucleotide
acgtgtttctcaaagtaaacgcgccggggc

SEQ ID NO: 202256 - DNA, 30 bp, Artificial Sequence
  Synthetic oligonucleotide
cgagcgtagacgacagttgcagggcggggc

SEQ ID NO: 202257 - DNA, 30 bp, Artificial Sequence
  Synthetic oligonucleotide
gcgaatatcgggccgacatagcatcggggc

SEQ ID NO: 202258 - DNA, 30 bp, Artificial Sequence
  Synthetic oligonucleotide
attgcaacacaggacaaggaatatcggggc

SEQ ID NO: 202259 - DNA, 30 bp, Artificial Sequence
  Synthetic oligonucleotide
ctaggaagagggtagtgcatcatagggggc

SEQ ID NO: 202260 - DNA, 30 bp, Artificial Sequence
  Synthetic oligonucleotide
aagtaaaggaccaacagtgcccgggggggc

SEQ ID NO: 202261 - DNA, 30 bp, Artificial Sequence
  Synthetic oligonucleotide
gacgccggcgcataagagtgttctgggggc

SEQ ID NO: 202262 - DNA, 30 bp, Artificial Sequence
  Synthetic oligonucleotide
actacagccgcgcagtgatcggaatggggc

SEQ ID NO: 202263 - DNA, 31 bp, Artificial Sequence
  Synthetic oligonucleotide
tgcagtaggactaagaatctgagcatggggc

SEQ ID NO: 202264 - DNA, 30 bp, Artificial Sequence
  Synthetic oligonucleotide
aggagagggagagttctgaccccgtggggc

SEQ ID NO: 202265 - DNA, 30 bp, Artificial Sequence
  Synthetic oligonucleotide
ccgcgtatgcctggcgggtaccggatgggc

SEQ ID NO: 202266 - DNA, 30 bp, Artificial Sequence
  Synthetic oligonucleotide
accggtcggaatgttcggcggcggatgggc

SEQ ID NO: 202267 - DNA, 30 bp, Artificial Sequence
  Synthetic oligonucleotide
agatgaattggcacaagaggcattatgggc

SEQ ID NO: 202268 - DNA, 30 bp, Artificial Sequence
  Synthetic oligonucleotide
agcaatagagccatctttggatagctgggc

SEQ ID NO: 202269 - DNA, 30 bp, Artificial Sequence
  Synthetic oligonucleotide
ccaagacgacctgcattgtgtttagtgggc

SEQ ID NO: 202270 - DNA, 30 bp, Artificial Sequence
  Synthetic oligonucleotide
cgccatctctagtttccatggagcgtgggc

SEQ ID NO: 202271 - DNA, 30 bp, Artificial Sequence
  Synthetic oligonucleotide
actggggtcattactccaatgtatgtgggc

SEQ ID NO: 202272 - DNA, 30 bp, Artificial Sequence
  Synthetic oligonucleotide
ataatgccttattgacgacctcgtgtgggc

SEQ ID NO: 202273 - DNA, 30 bp, Artificial Sequence
  Synthetic oligonucleotide
ttcgttagggaagttcaagcggcgttgggc

SEQ ID NO: 202274 - DNA, 30 bp, Artificial Sequence
  Synthetic oligonucleotide
ggctggtgccagagtatatccttgttgggc

SEQ ID NO: 202275 - DNA, 30 bp, Artificial Sequence
  Synthetic oligonucleotide
agggtactcgttgagttacgtgcgaatggc

SEQ ID NO: 202276 - DNA, 30 bp, Artificial Sequence
  Synthetic oligonucleotide
cattatgggttgatgaaaggattgaatggc

SEQ ID NO: 202277 - DNA, 30 bp, Artificial Sequence
  Synthetic oligonucleotide
gcacgtggaccgaaactcccagttaatggc

SEQ ID NO: 202278 - DNA, 30 bp, Artificial Sequence
  Synthetic oligonucleotide
cggcaggtacactacttcattctacatggc

SEQ ID NO: 202279 - DNA, 30 bp, Artificial Sequence
  Synthetic oligonucleotide
tagcaccatttacgtcctcaattacatggc

SEQ ID NO: 202280 - DNA, 30 bp, Artificial Sequence
  Synthetic oligonucleotide
cttatccggataactccaaactgcgatggc

SEQ ID NO: 202281 - DNA, 30 bp, Artificial Sequence
  Synthetic oligonucleotide
ttagggcgatggcgctaacggaaggatggc

SEQ ID NO: 202282 - DNA, 30 bp, Artificial Sequence
  Synthetic oligonucleotide
tccgtggacagaatatcttgcccttatggc

SEQ ID NO: 202283 - DNA, 30 bp, Artificial Sequence
  Synthetic oligonucleotide
ccggcgagacccaatatattaacgactggc

SEQ ID NO: 202284 - DNA, 30 bp, Artificial Sequence
  Synthetic oligonucleotide
cagggtagccgcgaattaaacacgactggc

SEQ ID NO: 202285 - DNA, 30 bp, Artificial Sequence
  Synthetic oligonucleotide
ctagccgttcgaaggctcttagatactggc

SEQ ID NO: 202286 - DNA, 30 bp, Artificial Sequence
  Synthetic oligonucleotide
aagggcacggttgtgaagagctatactggc

SEQ ID NO: 202287 - DNA, 30 bp, Artificial Sequence
  Synthetic oligonucleotide
tgcaggtcgttcgtgcacctgtatactggc

SEQ ID NO: 202288 - DNA, 30 bp, Artificial Sequence
  Synthetic oligonucleotide
aagcctagaatgggcattaagtctactggc

SEQ ID NO: 202289 - DNA, 30 bp, Artificial Sequence
  Synthetic oligonucleotide
ttcactcgtcggtgcgccgttcatcctggc

SEQ ID NO: 202290 - DNA, 30 bp, Artificial Sequence
  Synthetic oligonucleotide
ggagacgcataagtgggtggtgttcctggc

SEQ ID NO: 202291 - DNA, 30 bp, Artificial Sequence
  Synthetic oligonucleotide
caagggatggcgtttaagacctcggctggc

SEQ ID NO: 202292 - DNA, 30 bp, Artificial Sequence
  Synthetic oligonucleotide
agccttaaagtatgcgggaaggactctggc

SEQ ID NO: 202293 - DNA, 30 bp, Artificial Sequence
  Synthetic oligonucleotide
gacgaacctttgaccgtgaaagcctctggc

SEQ ID NO: 202294 - DNA, 30 bp, Artificial Sequence
  Synthetic oligonucleotide
cgaagccatctggaattcgatgattctggc

SEQ ID NO: 202295 - DNA, 30 bp, Artificial Sequence
  Synthetic oligonucleotide
taattaggaagtatgaattgtaaaagtggc

SEQ ID NO: 202296 - DNA, 30 bp, Artificial Sequence
  Synthetic oligonucleotide
aatacgtaggcgaacttttaccaaagtggc

SEQ ID NO: 202297 - DNA, 30 bp, Artificial Sequence
  Synthetic oligonucleotide
gctatggaaaagatgctccgttaaagtggc

SEQ ID NO: 202298 - DNA, 30 bp, Artificial Sequence
  Synthetic oligonucleotide
gcgtgattccagcttgaaatgtgaagtggc

SEQ ID NO: 202299 - DNA, 30 bp, Artificial Sequence
  Synthetic oligonucleotide
gtgaacgagcgtgttcgtcgttgcagtggc

SEQ ID NO: 202300 - DNA, 30 bp, Artificial Sequence
  Synthetic oligonucleotide
cgacaatacgtagtagcgggcggtagtggc

SEQ ID NO: 202301 - DNA, 30 bp, Artificial Sequence
  Synthetic oligonucleotide
tggctttaacagtagggtaagaaacgtggc

SEQ ID NO: 202302 - DNA, 30 bp, Artificial Sequence
  Synthetic oligonucleotide
tgcgttaagccataacagcgtctacgtggc

SEQ ID NO: 202303 - DNA, 30 bp, Artificial Sequence
  Synthetic oligonucleotide
gattaatgtcagggcggcattttgcgtggc

SEQ ID NO: 202304 - DNA, 30 bp, Artificial Sequence
  Synthetic oligonucleotide
gttgactaggcgtacacacgttatcgtggc

SEQ ID NO: 202305 - DNA, 30 bp, Artificial Sequence
  Synthetic oligonucleotide
acaatgatgacccaagggaccgctcgtggc

SEQ ID NO: 202306 - DNA, 30 bp, Artificial Sequence
  Synthetic oligonucleotide
cggcccgcagtaacggcaaaacgtcgtggc

SEQ ID NO: 202307 - DNA, 30 bp, Artificial Sequence
  Synthetic oligonucleotide
gcaaaaaatcgctcaaggttcttaggtggc

SEQ ID NO: 202308 - DNA, 30 bp, Artificial Sequence
  Synthetic oligonucleotide
cgggcacctattatcgttaggcggggtggc

SEQ ID NO: 202309 - DNA, 30 bp, Artificial Sequence
  Synthetic oligonucleotide
acacacatcagtgcaagttcgacatgtggc

SEQ ID NO: 202310 - DNA, 30 bp, Artificial Sequence
  Synthetic oligonucleotide
cgcccacacgtttaggtgtccgcatgtggc

SEQ ID NO: 202311 - DNA, 30 bp, Artificial Sequence
  Synthetic oligonucleotide
tctattagggatggaactcgctcctgtggc

SEQ ID NO: 202312 - DNA, 30 bp, Artificial Sequence
  Synthetic oligonucleotide
ccggcacatatgtataatacaagttgtggc

SEQ ID NO: 202313 - DNA, 30 bp, Artificial Sequence
  Synthetic oligonucleotide
atgggtggctagtaattataatgttgtggc

SEQ ID NO: 202314 - DNA, 30 bp, Artificial Sequence
  Synthetic oligonucleotide
cctcatgggcccaggttaccaccgattggc

SEQ ID NO: 202315 - DNA, 30 bp, Artificial Sequence
  Synthetic oligonucleotide
ggcccaatatcagagtagggtaatattggc

SEQ ID NO: 202316 - DNA, 30 bp, Artificial Sequence
  Synthetic oligonucleotide
ggactcccgataatgaggagggtacttggc

SEQ ID NO: 202317 - DNA, 30 bp, Artificial Sequence
  Synthetic oligonucleotide
ccctggtgctaaggaccgagcaaccttggc

SEQ ID NO: 202318 - DNA, 30 bp, Artificial Sequence
  Synthetic oligonucleotide
ctgctaagcgtattagcacaataccttggc

SEQ ID NO: 202319 - DNA, 30 bp, Artificial Sequence
  Synthetic oligonucleotide
tcacttcgcacaagtagatgaatccttggc

SEQ ID NO: 202320 - DNA, 30 bp, Artificial Sequence
  Synthetic oligonucleotide
ttataatatccagtgttttctgagcttggc

SEQ ID NO: 202321 - DNA, 30 bp, Artificial Sequence
  Synthetic oligonucleotide
tattcaagtactcttgggactaggcttggc

SEQ ID NO: 202322 - DNA, 30 bp, Artificial Sequence
  Synthetic oligonucleotide
ataccgcaggcgtactcgtgaactcttggc

SEQ ID NO: 202323 - DNA, 30 bp, Artificial Sequence
  Synthetic oligonucleotide
taagatggtttggttacagtttatgttggc

SEQ ID NO: 202324 - DNA, 30 bp, Artificial Sequence
  Synthetic oligonucleotide
gcggagatgggtaaagagagtctctttggc

SEQ ID NO: 202325 - DNA, 30 bp, Artificial Sequence
  Synthetic oligonucleotide
ttgcgtggaccggcttacgcaacgtttggc

SEQ ID NO: 202326 - DNA, 30 bp, Artificial Sequence
  Synthetic oligonucleotide
gataggccacgattggaacgggagaaatgc

SEQ ID NO: 202327 - DNA, 30 bp, Artificial Sequence
  Synthetic oligonucleotide
aaagcgtttttccaaatggaatcgaaatgc

SEQ ID NO: 202328 - DNA, 30 bp, Artificial Sequence
  Synthetic oligonucleotide
aggttagcggtgaaatttggaactaaatgc

SEQ ID NO: 202329 - DNA, 30 bp, Artificial Sequence
  Synthetic oligonucleotide
acaaccttgtccccgcattggggtaaatgc

SEQ ID NO: 202330 - DNA, 30 bp, Artificial Sequence
  Synthetic oligonucleotide
actccgaaaccaggggcgcaagtacaatgc

SEQ ID NO: 202331 - DNA, 30 bp, Artificial Sequence
  Synthetic oligonucleotide
cagccagtggacactaaaactcaagaatgc

SEQ ID NO: 202332 - DNA, 30 bp, Artificial Sequence
  Synthetic oligonucleotide
ccatgtccctgaactgaatcttccgaatgc

SEQ ID NO: 202333 - DNA, 30 bp, Artificial Sequence
  Synthetic oligonucleotide
ccactggaaaaggtggttagaggcgaatgc

SEQ ID NO: 202334 - DNA, 30 bp, Artificial Sequence
  Synthetic oligonucleotide
aaggcgagtagaaatttggtctcggaatgc

SEQ ID NO: 202335 - DNA, 30 bp, Artificial Sequence
  Synthetic oligonucleotide
caataaaaacttaatgtttgccgtgaatgc

SEQ ID NO: 202336 - DNA, 30 bp, Artificial Sequence
  Synthetic oligonucleotide
acgcctacgtgattgaccatccttgaatgc

SEQ ID NO: 202337 - DNA, 30 bp, Artificial Sequence
  Synthetic oligonucleotide
aagtaggtggaagaacggaagggataatgc

SEQ ID NO: 202338 - DNA, 30 bp, Artificial Sequence
  Synthetic oligonucleotide
ccagaacttaccggatttaccttataatgc

SEQ ID NO: 202339 - DNA, 30 bp, Artificial Sequence
  Synthetic oligonucleotide
cgttgtggggagtcgatgggtcgctaatgc

SEQ ID NO: 202340 - DNA, 30 bp, Artificial Sequence
  Synthetic oligonucleotide
gagcgatccttacgatatgcgatgtaatgc

SEQ ID NO: 202341 - DNA, 30 bp, Artificial Sequence
  Synthetic oligonucleotide
gtctgaggggcgacatgcttcagcacatgc

SEQ ID NO: 202342 - DNA, 30 bp, Artificial Sequence
  Synthetic oligonucleotide
acgttaggttagcacggactgaaaccatgc

SEQ ID NO: 202343 - DNA, 30 bp, Artificial Sequence
  Synthetic oligonucleotide
gagagtggataacggcactggttaccatgc

SEQ ID NO: 202344 - DNA, 30 bp, Artificial Sequence
  Synthetic oligonucleotide
tcgtctttcatcctctgtcgttccccatgc

SEQ ID NO: 202345 - DNA, 30 bp, Artificial Sequence
  Synthetic oligonucleotide
gacaggtctgtgagtttatcctatccatgc

SEQ ID NO: 202346 - DNA, 30 bp, Artificial Sequence
  Synthetic oligonucleotide
aaaggctacagaatgatcctggcagcatgc

SEQ ID NO: 202347 - DNA, 30 bp, Artificial Sequence
  Synthetic oligonucleotide
aaggtacgttatctctggataaaggcatgc

SEQ ID NO: 202348 - DNA, 30 bp, Artificial Sequence
  Synthetic oligonucleotide
tcatttccaactcacatcccgcaggcatgc

SEQ ID NO: 202349 - DNA, 30 bp, Artificial Sequence
  Synthetic oligonucleotide
tcctgtcccgtgaatcatattacggcatgc

SEQ ID NO: 202350 - DNA, 30 bp, Artificial Sequence
  Synthetic oligonucleotide
aagcggtggactctgctgactcatgcatgc

SEQ ID NO: 202351 - DNA, 30 bp, Artificial Sequence
  Synthetic oligonucleotide
aattcagcataggtcgatacccgtgcatgc

SEQ ID NO: 202352 - DNA, 30 bp, Artificial Sequence
  Synthetic oligonucleotide
gcgtgggtctagggctaatgcggtgcatgc

SEQ ID NO: 202353 - DNA, 30 bp, Artificial Sequence
  Synthetic oligonucleotide
tggccaccgagaccccatggggtgtcatgc

SEQ ID NO: 202354 - DNA, 30 bp, Artificial Sequence
  Synthetic oligonucleotide
tggataattcagataaccagttattcatgc

SEQ ID NO: 202355 - DNA, 30 bp, Artificial Sequence
  Synthetic oligonucleotide
aggatttatcctctatcatacaggagatgc

SEQ ID NO: 202356 - DNA, 30 bp, Artificial Sequence
  Synthetic oligonucleotide
cagagatcgtgtctgttcgtgaatagatgc

SEQ ID NO: 202357 - DNA, 30 bp, Artificial Sequence
  Synthetic oligonucleotide
gggaagtcccagaacgagtccggtagatgc

SEQ ID NO: 202358 - DNA, 30 bp, Artificial Sequence
  Synthetic oligonucleotide
acactgctgaatggtctgtggattagatgc

SEQ ID NO: 202359 - DNA, 30 bp, Artificial Sequence
  Synthetic oligonucleotide
aaggttgaacatgcccaagtgttacgatgc

SEQ ID NO: 202360 - DNA, 30 bp, Artificial Sequence
  Synthetic oligonucleotide
gcgcctactggtaggttaactcatcgatgc

SEQ ID NO: 202361 - DNA, 30 bp, Artificial Sequence
  Synthetic oligonucleotide
gttaagagttagagggttatataaggatgc

SEQ ID NO: 202362 - DNA, 30 bp, Artificial Sequence
  Synthetic oligonucleotide
ccggaccaggcattaacacctggcggatgc

SEQ ID NO: 202363 - DNA, 30 bp, Artificial Sequence
  Synthetic oligonucleotide
gaaacagatgatgatggcatagagggatgc

SEQ ID NO: 202364 - DNA, 30 bp, Artificial Sequence
  Synthetic oligonucleotide
gaacagacggtaaaatggtactggggatgc

SEQ ID NO: 202365 - DNA, 30 bp, Artificial Sequence
  Synthetic oligonucleotide
atgaacgaagtagtgctagggcaatgatgc

SEQ ID NO: 202366 - DNA, 30 bp, Artificial Sequence
  Synthetic oligonucleotide
tcctcgtggtgggtctagacaagatgatgc

SEQ ID NO: 202367 - DNA, 30 bp, Artificial Sequence
  Synthetic oligonucleotide
ggttacataatcgtcaaagacgtctgatgc

SEQ ID NO: 202368 - DNA, 30 bp, Artificial Sequence
  Synthetic oligonucleotide
gcctaagcaaccccgggaccactgtgatgc

SEQ ID NO: 202369 - DNA, 30 bp, Artificial Sequence
  Synthetic oligonucleotide
agctaaagataccttctattgggaatatgc

SEQ ID NO: 202370 - DNA, 30 bp, Artificial Sequence
  Synthetic oligonucleotide
aaagaaaattgaaaggcctaatacatatgc

SEQ ID NO: 202371 - DNA, 30 bp, Artificial Sequence
  Synthetic oligonucleotide
aatcgcagtgtcggaaaggaagagatatgc

SEQ ID NO: 202372 - DNA, 30 bp, Artificial Sequence
  Synthetic oligonucleotide
ttagttgtgcgagcacactgttagatatgc

SEQ ID NO: 202373 - DNA, 30 bp, Artificial Sequence
  Synthetic oligonucleotide
acctcacttatttcgcatttcaaactatgc

SEQ ID NO: 202374 - DNA, 30 bp, Artificial Sequence
  Synthetic oligonucleotide
agggttagcctaacagcctgcaatctatgc

SEQ ID NO: 202375 - DNA, 30 bp, Artificial Sequence
  Synthetic oligonucleotide
tcacaaagttccaatcgtcaaaacgtatgc

SEQ ID NO: 202376 - DNA, 31 bp, Artificial Sequence
  Synthetic oligonucleotide
atggaatgtgggttgatattaagtcgtatgc

SEQ ID NO: 202377 - DNA, 30 bp, Artificial Sequence
  Synthetic oligonucleotide
tatgcgggatctgtggaaattagtgtatgc

SEQ ID NO: 202378 - DNA, 31 bp, Artificial Sequence
  Synthetic oligonucleotide
aaagtggatggaagctcttagttgattatgc

SEQ ID NO: 202379 - DNA, 30 bp, Artificial Sequence
  Synthetic oligonucleotide
agtgatgtctaagtgttgtatttcttatgc

SEQ ID NO: 202380 - DNA, 30 bp, Artificial Sequence
  Synthetic oligonucleotide
atgaaacaataaatagcctggaaaaactgc

SEQ ID NO: 202381 - DNA, 30 bp, Artificial Sequence
  Synthetic oligonucleotide
gtcatcgaaaagctcggtaccggaaactgc

SEQ ID NO: 202382 - DNA, 30 bp, Artificial Sequence
  Synthetic oligonucleotide
tcacgtatgaatacagccagcgcacactgc

SEQ ID NO: 202383 - DNA, 30 bp, Artificial Sequence
  Synthetic oligonucleotide
ccggctgagaagcaggagcaccacgactgc

SEQ ID NO: 202384 - DNA, 30 bp, Artificial Sequence
  Synthetic oligonucleotide
caacaaagtgcatgggtcaacctcgactgc

SEQ ID NO: 202385 - DNA, 30 bp, Artificial Sequence
  Synthetic oligonucleotide
cttagtaagtcttatgcaataagggactgc

SEQ ID NO: 202386 - DNA, 30 bp, Artificial Sequence
  Synthetic oligonucleotide
cgattcgcaacaaactcttggttggactgc

SEQ ID NO: 202387 - DNA, 30 bp, Artificial Sequence
  Synthetic oligonucleotide
tccggacgcgctgtttggctaattgactgc

SEQ ID NO: 202388 - DNA, 30 bp, Artificial Sequence
  Synthetic oligonucleotide
gctagccacatatccatatgcgcctactgc

SEQ ID NO: 202389 - DNA, 30 bp, Artificial Sequence
  Synthetic oligonucleotide
tgggttcatacgaatacgaactcgtactgc

SEQ ID NO: 202390 - DNA, 29 bp, Artificial Sequence
  Synthetic oligonucleotide
gcctagacaatcgaaccccctcgtactgc

SEQ ID NO: 202391 - DNA, 30 bp, Artificial Sequence
  Synthetic oligonucleotide
tacgtgttctatcgtagtaccgggtactgc

SEQ ID NO: 202392 - DNA, 30 bp, Artificial Sequence
  Synthetic oligonucleotide
ctcgggtttcaatctatcacaaattactgc

SEQ ID NO: 202393 - DNA, 30 bp, Artificial Sequence
  Synthetic oligonucleotide
aaaagattcctgcgagtcgggtgttactgc

SEQ ID NO: 202394 - DNA, 30 bp, Artificial Sequence
  Synthetic oligonucleotide
gactggacactcaaacgattacaaacctgc

SEQ ID NO: 202395 - DNA, 30 bp, Artificial Sequence
  Synthetic oligonucleotide
tccggcgtctcggggagggtgagaacctgc

SEQ ID NO: 202396 - DNA, 30 bp, Artificial Sequence
  Synthetic oligonucleotide
ttaacatacgtggtctacgtctgcacctgc

SEQ ID NO: 202397 - DNA, 30 bp, Artificial Sequence
  Synthetic oligonucleotide
tagagtagcgatgaattgcttgggacctgc

SEQ ID NO: 202398 - DNA, 30 bp, Artificial Sequence
  Synthetic oligonucleotide
caaggatgcggactgtcctagagtacctgc

SEQ ID NO: 202399 - DNA, 30 bp, Artificial Sequence
  Synthetic oligonucleotide
aattgtaggaaggactaaataggtacctgc

SEQ ID NO: 202400 - DNA, 30 bp, Artificial Sequence
  Synthetic oligonucleotide
acggcgggtaacacaacgacacaaccctgc

SEQ ID NO: 202401 - DNA, 30 bp, Artificial Sequence
  Synthetic oligonucleotide
taggaggactacaccggcggggcaccctgc

SEQ ID NO: 202402 - DNA, 30 bp, Artificial Sequence
  Synthetic oligonucleotide
tcttggagttcgccgcgataacacccctgc

SEQ ID NO: 202403 - DNA, 30 bp, Artificial Sequence
  Synthetic oligonucleotide
tctttgcgaatttcatcttgtacagcctgc

SEQ ID NO: 202404 - DNA, 30 bp, Artificial Sequence
  Synthetic oligonucleotide
atcatcgcacacactcggagcaaatcctgc

SEQ ID NO: 202405 - DNA, 30 bp, Artificial Sequence
  Synthetic oligonucleotide
ggtcaaagttcttgttatagtacatcctgc

SEQ ID NO: 202406 - DNA, 30 bp, Artificial Sequence
  Synthetic oligonucleotide
ctctgaagtgtgatacctaattactcctgc

SEQ ID NO: 202407 - DNA, 30 bp, Artificial Sequence
  Synthetic oligonucleotide
aggttacaaactaatagggtgatctcctgc

SEQ ID NO: 202408 - DNA, 30 bp, Artificial Sequence
  Synthetic oligonucleotide
ttgtgtatcctccttagaagagggtcctgc

SEQ ID NO: 202409 - DNA, 30 bp, Artificial Sequence
  Synthetic oligonucleotide
tagctgggataaggttggcacagttcctgc

SEQ ID NO: 202410 - DNA, 30 bp, Artificial Sequence
  Synthetic oligonucleotide
gacacctacacgagtacaatgctttcctgc

SEQ ID NO: 202411 - DNA, 30 bp, Artificial Sequence
  Synthetic oligonucleotide
acagccgagaaatgccacttcgcgagctgc

SEQ ID NO: 202412 - DNA, 30 bp, Artificial Sequence
  Synthetic oligonucleotide
attgttccagagaatacatggcgtagctgc

SEQ ID NO: 202413 - DNA, 30 bp, Artificial Sequence
  Synthetic oligonucleotide
ggcctggattctggaaaatagggtagctgc

SEQ ID NO: 202414 - DNA, 30 bp, Artificial Sequence
  Synthetic oligonucleotide
cacgcacgaggagttattgaccgacgctgc

SEQ ID NO: 202415 - DNA, 30 bp, Artificial Sequence
  Synthetic oligonucleotide
gaggcacttaaaaaacacgcgcgacgctgc

SEQ ID NO: 202416 - DNA, 30 bp, Artificial Sequence
  Synthetic oligonucleotide
gtcaagccatgaaccacgtgtaggcgctgc

SEQ ID NO: 202417 - DNA, 30 bp, Artificial Sequence
  Synthetic oligonucleotide
actaaaaattggttccttaaaacaggctgc

SEQ ID NO: 202418 - DNA, 30 bp, Artificial Sequence
  Synthetic oligonucleotide
cgagttgtctgcgcggagcaatgaggctgc

SEQ ID NO: 202419 - DNA, 30 bp, Artificial Sequence
  Synthetic oligonucleotide
accgccgttgcgatggtgcattgaggctgc

SEQ ID NO: 202420 - DNA, 30 bp, Artificial Sequence
  Synthetic oligonucleotide
taaaccggtaggactgatcgtgtaggctgc

SEQ ID NO: 202421 - DNA, 30 bp, Artificial Sequence
  Synthetic oligonucleotide
agaaggtgctgcctcgcctacaacggctgc

SEQ ID NO: 202422 - DNA, 30 bp, Artificial Sequence
  Synthetic oligonucleotide
atttatggaatacccagtggtaccggctgc

SEQ ID NO: 202423 - DNA, 30 bp, Artificial Sequence
  Synthetic oligonucleotide
ggccggagccagatattcgaagatggctgc

SEQ ID NO: 202424 - DNA, 30 bp, Artificial Sequence
  Synthetic oligonucleotide
tgctggttccgctttggtggttgtggctgc

SEQ ID NO: 202425 - DNA, 30 bp, Artificial Sequence
  Synthetic oligonucleotide
tgcgcggatctatcatatggccttggctgc

SEQ ID NO: 202426 - DNA, 30 bp, Artificial Sequence
  Synthetic oligonucleotide
ttcaggcatcaccctgagaagccctgctgc

SEQ ID NO: 202427 - DNA, 30 bp, Artificial Sequence
  Synthetic oligonucleotide
gtaatgatttgggcgacaaccgaaatctgc

SEQ ID NO: 202428 - DNA, 30 bp, Artificial Sequence
  Synthetic oligonucleotide
taagggggacacagggcacgaatgatctgc

SEQ ID NO: 202429 - DNA, 30 bp, Artificial Sequence
  Synthetic oligonucleotide
gcgactatgttgtaggctgctcccctctgc

SEQ ID NO: 202430 - DNA, 30 bp, Artificial Sequence
  Synthetic oligonucleotide
tactcgcaatatatacgctcactcctctgc

SEQ ID NO: 202431 - DNA, 30 bp, Artificial Sequence
  Synthetic oligonucleotide
atggtgggtgacgatatataagaagtctgc

SEQ ID NO: 202432 - DNA, 30 bp, Artificial Sequence
  Synthetic oligonucleotide
acgtggagtgctgatcgtggacagttctgc

SEQ ID NO: 202433 - DNA, 30 bp, Artificial Sequence
  Synthetic oligonucleotide
aatgcttgcaagaccgagccttatttctgc

SEQ ID NO: 202434 - DNA, 30 bp, Artificial Sequence
  Synthetic oligonucleotide
gacagttctcctccgaacgaacggaagtgc

SEQ ID NO: 202435 - DNA, 30 bp, Artificial Sequence
  Synthetic oligonucleotide
agttagttcccaccctgatagatgaagtgc

SEQ ID NO: 202436 - DNA, 30 bp, Artificial Sequence
  Synthetic oligonucleotide
tcccgtccgtctcacagtgatggccagtgc

SEQ ID NO: 202437 - DNA, 30 bp, Artificial Sequence
  Synthetic oligonucleotide
ttcaattcacatcagcggtgcgtccagtgc

SEQ ID NO: 202438 - DNA, 30 bp, Artificial Sequence
  Synthetic oligonucleotide
gtcattagggtccgtggggcatatcagtgc

SEQ ID NO: 202439 - DNA, 30 bp, Artificial Sequence
  Synthetic oligonucleotide
tggggaatacgcaggcgagagagggagtgc

SEQ ID NO: 202440 - DNA, 30 bp, Artificial Sequence
  Synthetic oligonucleotide
tcagcttgcacgtgaagggggtctgagtgc

SEQ ID NO: 202441 - DNA, 30 bp, Artificial Sequence
  Synthetic oligonucleotide
ggttaggccccaatatgacgtgaatagtgc

SEQ ID NO: 202442 - DNA, 30 bp, Artificial Sequence
  Synthetic oligonucleotide
aataccaaggtttggtcgaccggatagtgc

SEQ ID NO: 202443 - DNA, 30 bp, Artificial Sequence
  Synthetic oligonucleotide
atagtaatgaagactattgtagagtagtgc

SEQ ID NO: 202444 - DNA, 30 bp, Artificial Sequence
  Synthetic oligonucleotide
aaccgctggccaatctcctgattgtagtgc

SEQ ID NO: 202445 - DNA, 30 bp, Artificial Sequence
  Synthetic oligonucleotide
aatattaatcgctctacgccacgttagtgc

SEQ ID NO: 202446 - DNA, 30 bp, Artificial Sequence
  Synthetic oligonucleotide
gctacccacgaccagccttaaacaacgtgc

SEQ ID NO: 202447 - DNA, 30 bp, Artificial Sequence
  Synthetic oligonucleotide
aaactaataacaggtccaactatcacgtgc

SEQ ID NO: 202448 - DNA, 30 bp, Artificial Sequence
  Synthetic oligonucleotide
acagtgagacaactcacgcatcagacgtgc

SEQ ID NO: 202449 - DNA, 30 bp, Artificial Sequence
  Synthetic oligonucleotide
gaggctcacgatctgacaggtgcgacgtgc

SEQ ID NO: 202450 - DNA, 30 bp, Artificial Sequence
  Synthetic oligonucleotide
aggcgtaatacactgtttagggggacgtgc

SEQ ID NO: 202451 - DNA, 30 bp, Artificial Sequence
  Synthetic oligonucleotide
tccggcggtcgtgtgatactggaaccgtgc

SEQ ID NO: 202452 - DNA, 30 bp, Artificial Sequence
  Synthetic oligonucleotide
atcgaggacggtgggactagtgacccgtgc

SEQ ID NO: 202453 - DNA, 30 bp, Artificial Sequence
  Synthetic oligonucleotide
gtaccaactctaattagtctttccccgtgc

SEQ ID NO: 202454 - DNA, 30 bp, Artificial Sequence
  Synthetic oligonucleotide
ggacacgcggaggtaactgaccgcccgtgc

SEQ ID NO: 202455 - DNA, 30 bp, Artificial Sequence
  Synthetic oligonucleotide
gacaaagactgttcttagacgacgccgtgc

SEQ ID NO: 202456 - DNA, 30 bp, Artificial Sequence
  Synthetic oligonucleotide
ctcttcgtaatgttatctcctagtccgtgc

SEQ ID NO: 202457 - DNA, 30 bp, Artificial Sequence
  Synthetic oligonucleotide
tgtcattctctaggacaagtacaagcgtgc

SEQ ID NO: 202458 - DNA, 30 bp, Artificial Sequence
  Synthetic oligonucleotide
gaactgatcctctgacataacaacgcgtgc

SEQ ID NO: 202459 - DNA, 30 bp, Artificial Sequence
  Synthetic oligonucleotide
gattaagtcatgagtagttatacatcgtgc

SEQ ID NO: 202460 - DNA, 30 bp, Artificial Sequence
  Synthetic oligonucleotide
gacagaccgatagggaaaccccgatcgtgc

SEQ ID NO: 202461 - DNA, 30 bp, Artificial Sequence
  Synthetic oligonucleotide
tgtctttcgaggtgcatcccaagctcgtgc

SEQ ID NO: 202462 - DNA, 30 bp, Artificial Sequence
  Synthetic oligonucleotide
cagtcggagcgattagatttgagttcgtgc

SEQ ID NO: 202463 - DNA, 30 bp, Artificial Sequence
  Synthetic oligonucleotide
cctgattgtcggctgtagggttgaaggtgc

SEQ ID NO: 202464 - DNA, 30 bp, Artificial Sequence
  Synthetic oligonucleotide
aatacagcaaccgcacaattaggcaggtgc

SEQ ID NO: 202465 - DNA, 30 bp, Artificial Sequence
  Synthetic oligonucleotide
gttattgggggtacaggcgcgcgtaggtgc

SEQ ID NO: 202466 - DNA, 30 bp, Artificial Sequence
  Synthetic oligonucleotide
cagggtcgtgcactcgagactccacggtgc

SEQ ID NO: 202467 - DNA, 30 bp, Artificial Sequence
  Synthetic oligonucleotide
gccctagacagctacgtcggattacggtgc

SEQ ID NO: 202468 - DNA, 30 bp, Artificial Sequence
  Synthetic oligonucleotide
tccttctctccatgccgggtgcgccggtgc

SEQ ID NO: 202469 - DNA, 30 bp, Artificial Sequence
  Synthetic oligonucleotide
gggcctgcccgcgtcagaaacgtccggtgc

SEQ ID NO: 202470 - DNA, 30 bp, Artificial Sequence
  Synthetic oligonucleotide
aaccactgctataataggcgtcctcggtgc

SEQ ID NO: 202471 - DNA, 30 bp, Artificial Sequence
  Synthetic oligonucleotide
atggctggtggagacgcaaacggagggtgc

SEQ ID NO: 202472 - DNA, 30 bp, Artificial Sequence
  Synthetic oligonucleotide
cgaacagccggtttctcgggcttcgggtgc

SEQ ID NO: 202473 - DNA, 30 bp, Artificial Sequence
  Synthetic oligonucleotide
gttatcagcggctccgtaaagaaggggtgc

SEQ ID NO: 202474 - DNA, 30 bp, Artificial Sequence
  Synthetic oligonucleotide
tcgaatcaaaattgtcatcgaatggggtgc

SEQ ID NO: 202475 - DNA, 30 bp, Artificial Sequence
  Synthetic oligonucleotide
gaggattatctgatttaaactagtgggtgc

SEQ ID NO: 202476 - DNA, 30 bp, Artificial Sequence
  Synthetic oligonucleotide
ctgtacagttaaaaaagaaggaaatggtgc

SEQ ID NO: 202477 - DNA, 30 bp, Artificial Sequence
  Synthetic oligonucleotide
gaggtatcgtgggggtggatcacatggtgc

SEQ ID NO: 202478 - DNA, 30 bp, Artificial Sequence
  Synthetic oligonucleotide
tccacaagatagcacgcgagttcatggtgc

SEQ ID NO: 202479 - DNA, 30 bp, Artificial Sequence
  Synthetic oligonucleotide
gcggaaaattgttcgggaagcacctggtgc

SEQ ID NO: 202480 - DNA, 30 bp, Artificial Sequence
  Synthetic oligonucleotide
caatggatttggctataacggctttggtgc

SEQ ID NO: 202481 - DNA, 30 bp, Artificial Sequence
  Synthetic oligonucleotide
aagagtttcaggccggacgggtttatgtgc

SEQ ID NO: 202482 - DNA, 30 bp, Artificial Sequence
  Synthetic oligonucleotide
cattatagaagttttatactgttcctgtgc

SEQ ID NO: 202483 - DNA, 30 bp, Artificial Sequence
  Synthetic oligonucleotide
atggtgcgccattggtcccatgcgctgtgc

SEQ ID NO: 202484 - DNA, 30 bp, Artificial Sequence
  Synthetic oligonucleotide
ccatgcacggtcgggctcctaaatctgtgc

SEQ ID NO: 202485 - DNA, 30 bp, Artificial Sequence
  Synthetic oligonucleotide
cgacaaagtgtacggagtcgccttctgtgc

SEQ ID NO: 202486 - DNA, 30 bp, Artificial Sequence
  Synthetic oligonucleotide
gtacgctgtgggagtatccgggaagtgtgc

SEQ ID NO: 202487 - DNA, 30 bp, Artificial Sequence
  Synthetic oligonucleotide
tccgaattaatgcgggggttaacagtgtgc

SEQ ID NO: 202488 - DNA, 30 bp, Artificial Sequence
  Synthetic oligonucleotide
tttggctccacgagggccttgtcagtgtgc

SEQ ID NO: 202489 - DNA, 30 bp, Artificial Sequence
  Synthetic oligonucleotide
acctatccgtgaggtcaccgccgcgtgtgc

SEQ ID NO: 202490 - DNA, 30 bp, Artificial Sequence
  Synthetic oligonucleotide
aggtagcaaacagttagctttgctgtgtgc

SEQ ID NO: 202491 - DNA, 30 bp, Artificial Sequence
  Synthetic oligonucleotide
ctcaaggtctacctcttaaaacaattgtgc

SEQ ID NO: 202492 - DNA, 30 bp, Artificial Sequence
  Synthetic oligonucleotide
caccgtactcggtccttcaaaacattgtgc

SEQ ID NO: 202493 - DNA, 30 bp, Artificial Sequence
  Synthetic oligonucleotide
ggggatgcgctgtgaccagtatcgttgtgc

SEQ ID NO: 202494 - DNA, 30 bp, Artificial Sequence
  Synthetic oligonucleotide
aggaggtgtgctcttagcctatcaaattgc

SEQ ID NO: 202495 - DNA, 30 bp, Artificial Sequence
  Synthetic oligonucleotide
tcgattttaagtagcttagctgtaaattgc

SEQ ID NO: 202496 - DNA, 30 bp, Artificial Sequence
  Synthetic oligonucleotide
cattactctaagggcttacgaaccaattgc

SEQ ID NO: 202497 - DNA, 30 bp, Artificial Sequence
  Synthetic oligonucleotide
gcagtgtaactaacgccagttgtcaattgc

SEQ ID NO: 202498 - DNA, 30 bp, Artificial Sequence
  Synthetic oligonucleotide
ttccgtgatagtttcgaatggtggcattgc

SEQ ID NO: 202499 - DNA, 30 bp, Artificial Sequence
  Synthetic oligonucleotide
gtccatggtattacctgcgcagatcattgc

SEQ ID NO: 202500 - DNA, 30 bp, Artificial Sequence
  Synthetic oligonucleotide
tgtgaagtgcgaacgataatctaagattgc

SEQ ID NO: 202501 - DNA, 30 bp, Artificial Sequence
  Synthetic oligonucleotide
ccggcccaacgtgagaagcattgctattgc

SEQ ID NO: 202502 - DNA, 30 bp, Artificial Sequence
  Synthetic oligonucleotide
ttagggcggactatgcgcgagtgttattgc

SEQ ID NO: 202503 - DNA, 30 bp, Artificial Sequence
  Synthetic oligonucleotide
tcacaggatggttcactgcgacacacttgc

SEQ ID NO: 202504 - DNA, 30 bp, Artificial Sequence
  Synthetic oligonucleotide
tacgcagaataatattatgaacgtacttgc

SEQ ID NO: 202505 - DNA, 30 bp, Artificial Sequence
  Synthetic oligonucleotide
agaaatagcgtgcgggacctggtaccttgc

SEQ ID NO: 202506 - DNA, 30 bp, Artificial Sequence
  Synthetic oligonucleotide
agctcggcagtttttccagcttgcccttgc

SEQ ID NO: 202507 - DNA, 30 bp, Artificial Sequence
  Synthetic oligonucleotide
tgcagcggactggggggacggtcggcttgc

SEQ ID NO: 202508 - DNA, 30 bp, Artificial Sequence
  Synthetic oligonucleotide
agatcgccagtatctagcagcgctgcttgc

SEQ ID NO: 202509 - DNA, 30 bp, Artificial Sequence
  Synthetic oligonucleotide
gcgagtacgtctctttgcggttgtgcttgc

SEQ ID NO: 202510 - DNA, 30 bp, Artificial Sequence
  Synthetic oligonucleotide
cgcggtcatgccgcattagagccaagttgc

SEQ ID NO: 202511 - DNA, 30 bp, Artificial Sequence
  Synthetic oligonucleotide
gccttgaatatctgtgaagtgcggagttgc

SEQ ID NO: 202512 - DNA, 30 bp, Artificial Sequence
  Synthetic oligonucleotide
ccgacagacactagtaaacttcatagttgc

SEQ ID NO: 202513 - DNA, 30 bp, Artificial Sequence
  Synthetic oligonucleotide
gcggaccgctgcgtacgctgggatagttgc

SEQ ID NO: 202514 - DNA, 30 bp, Artificial Sequence
  Synthetic oligonucleotide
caggtagggtccccagagtcgccgcgttgc

SEQ ID NO: 202515 - DNA, 30 bp, Artificial Sequence
  Synthetic oligonucleotide
tcttaaggaccgtatgttagtgatcgttgc

SEQ ID NO: 202516 - DNA, 30 bp, Artificial Sequence
  Synthetic oligonucleotide
cgctatcggccaatgctatgtcccggttgc

SEQ ID NO: 202517 - DNA, 30 bp, Artificial Sequence
  Synthetic oligonucleotide
ggtaccagcccatctcaaggcatcggttgc

SEQ ID NO: 202518 - DNA, 30 bp, Artificial Sequence
  Synthetic oligonucleotide
cgatcatcggcgcgtgtataggatggttgc

SEQ ID NO: 202519 - DNA, 30 bp, Artificial Sequence
  Synthetic oligonucleotide
ctgtcgtcctgagtggtgccgtatggttgc

SEQ ID NO: 202520 - DNA, 30 bp, Artificial Sequence
  Synthetic oligonucleotide
ggagagaatggcctcctggcgtcctgttgc

SEQ ID NO: 202521 - DNA, 30 bp, Artificial Sequence
  Synthetic oligonucleotide
cataccgatgagataatgtgccagtgttgc

SEQ ID NO: 202522 - DNA, 30 bp, Artificial Sequence
  Synthetic oligonucleotide
tgcctatcgattcagagtagggcttgttgc

SEQ ID NO: 202523 - DNA, 30 bp, Artificial Sequence
  Synthetic oligonucleotide
cttgtcaaatgggtgattgttctttgttgc

SEQ ID NO: 202524 - DNA, 30 bp, Artificial Sequence
  Synthetic oligonucleotide
aacttgcaacacacgaggagtgtaatttgc

SEQ ID NO: 202525 - DNA, 30 bp, Artificial Sequence
  Synthetic oligonucleotide
gtggcaaagtgcgaaacgttgaggatttgc

SEQ ID NO: 202526 - DNA, 30 bp, Artificial Sequence
  Synthetic oligonucleotide
gggagatgtgcgactagacagagtatttgc

SEQ ID NO: 202527 - DNA, 30 bp, Artificial Sequence
  Synthetic oligonucleotide
ataacagattagatcggcgggtgtatttgc

SEQ ID NO: 202528 - DNA, 30 bp, Artificial Sequence
  Synthetic oligonucleotide
ggatgaactaggtttcgtgcgagactttgc

SEQ ID NO: 202529 - DNA, 30 bp, Artificial Sequence
  Synthetic oligonucleotide
ccggaaaggggggaagtccaccaggtttgc

SEQ ID NO: 202530 - DNA, 30 bp, Artificial Sequence
  Synthetic oligonucleotide
ttgttcaacaaaatcatctatcgggtttgc

SEQ ID NO: 202531 - DNA, 30 bp, Artificial Sequence
  Synthetic oligonucleotide
aagcgaaagaccacaatagatctattttgc

SEQ ID NO: 202532 - DNA, 30 bp, Artificial Sequence
  Synthetic oligonucleotide
gcactaatgcgtcgacgaggtaatttttgc

SEQ ID NO: 202533 - DNA, 30 bp, Artificial Sequence
  Synthetic oligonucleotide
tggcgtaaaagagatgcaggttctttttgc

SEQ ID NO: 202534 - DNA, 30 bp, Artificial Sequence
  Synthetic oligonucleotide
acttccggtcagtgatcgatacgtttttgc

SEQ ID NO: 202535 - DNA, 30 bp, Artificial Sequence
  Synthetic oligonucleotide
gcatgtatggaaaatagcttgattttttgc

SEQ ID NO: 202536 - DNA, 30 bp, Artificial Sequence
  Synthetic oligonucleotide
ggttacttcagtgtaggtattccaaaaatc

SEQ ID NO: 202537 - DNA, 30 bp, Artificial Sequence
  Synthetic oligonucleotide
ggaagagcctacggtgtggtaaacaaaatc

SEQ ID NO: 202538 - DNA, 30 bp, Artificial Sequence
  Synthetic oligonucleotide
gaacagatcgttagtttatatgtcaaaatc

SEQ ID NO: 202539 - DNA, 30 bp, Artificial Sequence
  Synthetic oligonucleotide
agcctatatcaataccgagtcttcaaaatc

SEQ ID NO: 202540 - DNA, 30 bp, Artificial Sequence
  Synthetic oligonucleotide
cacagactccgacgtgcgttgctgaaaatc

SEQ ID NO: 202541 - DNA, 30 bp, Artificial Sequence
  Synthetic oligonucleotide
gctaatcgcgacgttaaggttgtgaaaatc

SEQ ID NO: 202542 - DNA, 30 bp, Artificial Sequence
  Synthetic oligonucleotide
ctatatccggaccggcgtggaaataaaatc

SEQ ID NO: 202543 - DNA, 30 bp, Artificial Sequence
  Synthetic oligonucleotide
agttcgattacctagggctacgataaaatc

SEQ ID NO: 202544 - DNA, 30 bp, Artificial Sequence
  Synthetic oligonucleotide
attgagtcaagcagatcgagcactaaaatc

SEQ ID NO: 202545 - DNA, 30 bp, Artificial Sequence
  Synthetic oligonucleotide
cttcatagggccaaataaccgtgtaaaatc

SEQ ID NO: 202546 - DNA, 30 bp, Artificial Sequence
  Synthetic oligonucleotide
atcgacactaggaagatataagaccaaatc

SEQ ID NO: 202547 - DNA, 30 bp, Artificial Sequence
  Synthetic oligonucleotide
accagtggatcagcagatccaagccaaatc

SEQ ID NO: 202548 - DNA, 30 bp, Artificial Sequence
  Synthetic oligonucleotide
ccaacatcgaggcgtaagcccggtcaaatc

SEQ ID NO: 202549 - DNA, 30 bp, Artificial Sequence
  Synthetic oligonucleotide
gcgtcattaactgcgatttcagttcaaatc

SEQ ID NO: 202550 - DNA, 30 bp, Artificial Sequence
  Synthetic oligonucleotide
gtaaattctagggtagcctacgaagaaatc

SEQ ID NO: 202551 - DNA, 30 bp, Artificial Sequence
  Synthetic oligonucleotide
gaagtgcgaaagcacggtgtttaagaaatc

SEQ ID NO: 202552 - DNA, 30 bp, Artificial Sequence
  Synthetic oligonucleotide
gacctagccccaacagagggtgtagaaatc

SEQ ID NO: 202553 - DNA, 30 bp, Artificial Sequence
  Synthetic oligonucleotide
cgaggccttataaaataagggcgcgaaatc

SEQ ID NO: 202554 - DNA, 30 bp, Artificial Sequence
  Synthetic oligonucleotide
acgtgacgatagttctttatcctcgaaatc

SEQ ID NO: 202555 - DNA, 30 bp, Artificial Sequence
  Synthetic oligonucleotide
ccaagtcagggccataatcagggataaatc

SEQ ID NO: 202556 - DNA, 30 bp, Artificial Sequence
  Synthetic oligonucleotide
gggtacgatcccggcggatccaactaaatc

SEQ ID NO: 202557 - DNA, 30 bp, Artificial Sequence
  Synthetic oligonucleotide
gtttagacccgataataggacgcgtaaatc

SEQ ID NO: 202558 - DNA, 30 bp, Artificial Sequence
  Synthetic oligonucleotide
ggagtaatcgaacaaggttaggattaaatc

SEQ ID NO: 202559 - DNA, 30 bp, Artificial Sequence
  Synthetic oligonucleotide
agcagcacgaaacgtatcgacttttaaatc

SEQ ID NO: 202560 - DNA, 30 bp, Artificial Sequence
  Synthetic oligonucleotide
gtggaacttactactccaatacaaacaatc

SEQ ID NO: 202561 - DNA, 30 bp, Artificial Sequence
  Synthetic oligonucleotide
tgacacgttaacacagatgaggagacaatc

SEQ ID NO: 202562 - DNA, 30 bp, Artificial Sequence
  Synthetic oligonucleotide
gtaaacgtgacccgtcatctgcctacaatc

SEQ ID NO: 202563 - DNA, 30 bp, Artificial Sequence
  Synthetic oligonucleotide
agggcgccctccgtcgcttagtcaccaatc

SEQ ID NO: 202564 - DNA, 30 bp, Artificial Sequence
  Synthetic oligonucleotide
gctgagatgcgaaacttctaaaagccaatc

SEQ ID NO: 202565 - DNA, 30 bp, Artificial Sequence
  Synthetic oligonucleotide
tgcaaattgacattatctagcatgccaatc

SEQ ID NO: 202566 - DNA, 30 bp, Artificial Sequence
  Synthetic oligonucleotide
tctccgggcaggggactctctcctccaatc

SEQ ID NO: 202567 - DNA, 30 bp, Artificial Sequence
  Synthetic oligonucleotide
tgacgaacaagacatacccaaggtccaatc

SEQ ID NO: 202568 - DNA, 30 bp, Artificial Sequence
  Synthetic oligonucleotide
tgatagtgactctccgctaggcgagcaatc

SEQ ID NO: 202569 - DNA, 30 bp, Artificial Sequence
  Synthetic oligonucleotide
ccttacctggatcacataaccgcggcaatc

SEQ ID NO: 202570 - DNA, 30 bp, Artificial Sequence
  Synthetic oligonucleotide
tggcgcgtgctcctactcgaacgggcaatc

SEQ ID NO: 202571 - DNA, 30 bp, Artificial Sequence
  Synthetic oligonucleotide
attaaaaaagggggattatacactgcaatc

SEQ ID NO: 202572 - DNA, 30 bp, Artificial Sequence
  Synthetic oligonucleotide
gtctggctgcggaaattcaaacaatcaatc

SEQ ID NO: 202573 - DNA, 30 bp, Artificial Sequence
  Synthetic oligonucleotide
ggaaaccaaatccgagaacgacactcaatc

SEQ ID NO: 202574 - DNA, 30 bp, Artificial Sequence
  Synthetic oligonucleotide
cctccggtcctggcacgaaacgagtcaatc

SEQ ID NO: 202575 - DNA, 30 bp, Artificial Sequence
  Synthetic oligonucleotide
agcgccctgcgtcaaatgcggaggtcaatc

SEQ ID NO: 202576 - DNA, 30 bp, Artificial Sequence
  Synthetic oligonucleotide
gtgagcaacgcttacggttcagtttcaatc

SEQ ID NO: 202577 - DNA, 30 bp, Artificial Sequence
  Synthetic oligonucleotide
gcatgtgggtcctagcaaagctgaagaatc

SEQ ID NO: 202578 - DNA, 30 bp, Artificial Sequence
  Synthetic oligonucleotide
ttccgatggcaccatgacagcggcagaatc

SEQ ID NO: 202579 - DNA, 29 bp, Artificial Sequence
  Synthetic oligonucleotide
acaaccgacaccacggtcgcgatagaatc

SEQ ID NO: 202580 - DNA, 30 bp, Artificial Sequence
  Synthetic oligonucleotide
agtacttttgaagcagtgcgcacacgaatc

SEQ ID NO: 202581 - DNA, 30 bp, Artificial Sequence
  Synthetic oligonucleotide
aggcctttgcttcgagtgaaggcacgaatc

SEQ ID NO: 202582 - DNA, 30 bp, Artificial Sequence
  Synthetic oligonucleotide
gtcagggcatgtcttgaactcccccgaatc

SEQ ID NO: 202583 - DNA, 30 bp, Artificial Sequence
  Synthetic oligonucleotide
atctgtggtcatcggagacccactcgaatc

SEQ ID NO: 202584 - DNA, 30 bp, Artificial Sequence
  Synthetic oligonucleotide
ctcgtttgctatttagacaatggaggaatc

SEQ ID NO: 202585 - DNA, 30 bp, Artificial Sequence
  Synthetic oligonucleotide
tgcgaggcgttttaaccagtggtgggaatc

SEQ ID NO: 202586 - DNA, 30 bp, Artificial Sequence
  Synthetic oligonucleotide
aggtagcaggattatttgtatgctggaatc

SEQ ID NO: 202587 - DNA, 30 bp, Artificial Sequence
  Synthetic oligonucleotide
cgatagtgtctccttcattgagaatgaatc

SEQ ID NO: 202588 - DNA, 30 bp, Artificial Sequence
  Synthetic oligonucleotide
gaatggcacaggttgttcatagaatgaatc

SEQ ID NO: 202589 - DNA, 30 bp, Artificial Sequence
  Synthetic oligonucleotide
tgccttccaaggtaaacaggaatatgaatc

SEQ ID NO: 202590 - DNA, 30 bp, Artificial Sequence
  Synthetic oligonucleotide
cgtggtgtcccacactggggctattgaatc

SEQ ID NO: 202591 - DNA, 30 bp, Artificial Sequence
  Synthetic oligonucleotide
cgtaggatgtacgtgtgacaaacttgaatc

SEQ ID NO: 202592 - DNA, 30 bp, Artificial Sequence
  Synthetic oligonucleotide
cgagcctctaacaaaaagtgcctttgaatc

SEQ ID NO: 202593 - DNA, 30 bp, Artificial Sequence
  Synthetic oligonucleotide
gtggacctccaacaagcgggtataataatc

SEQ ID NO: 202594 - DNA, 30 bp, Artificial Sequence
  Synthetic oligonucleotide
gtagtgcatagttggaagtgtgtaataatc

SEQ ID NO: 202595 - DNA, 30 bp, Artificial Sequence
  Synthetic oligonucleotide
tacacagcgaggttcatcggtaagataatc

SEQ ID NO: 202596 - DNA, 30 bp, Artificial Sequence
  Synthetic oligonucleotide
gtataaagctggcatcctaagctgataatc

SEQ ID NO: 202597 - DNA, 30 bp, Artificial Sequence
  Synthetic oligonucleotide
agcttcccataggaattgttcatcctaatc

SEQ ID NO: 202598 - DNA, 30 bp, Artificial Sequence
  Synthetic oligonucleotide
attagtccagacaggttaaggtagctaatc

SEQ ID NO: 202599 - DNA, 30 bp, Artificial Sequence
  Synthetic oligonucleotide
cctctgctcacatgataccataggctaatc

SEQ ID NO: 202600 - DNA, 31 bp, Artificial Sequence
  Synthetic oligonucleotide
cacagatatccttagcaacttatccgtaatc

SEQ ID NO: 202601 - DNA, 30 bp, Artificial Sequence
  Synthetic oligonucleotide
tcccacgctatatggatccgggtcgtaatc

SEQ ID NO: 202602 - DNA, 30 bp, Artificial Sequence
  Synthetic oligonucleotide
ttgggaatattagtaagcagaagggtaatc

SEQ ID NO: 202603 - DNA, 30 bp, Artificial Sequence
  Synthetic oligonucleotide
gaggggggccaggaaaatacattggtaatc

SEQ ID NO: 202604 - DNA, 30 bp, Artificial Sequence
  Synthetic oligonucleotide
ggcccgctaacttaagaggtccctgtaatc

SEQ ID NO: 202605 - DNA, 30 bp, Artificial Sequence
  Synthetic oligonucleotide
aattagtagggagaatcctatacattaatc

SEQ ID NO: 202606 - DNA, 30 bp, Artificial Sequence
  Synthetic oligonucleotide
gggaattttatatgtgtgatatgcttaatc

SEQ ID NO: 202607 - DNA, 30 bp, Artificial Sequence
  Synthetic oligonucleotide
atgtggcgaaccgtgtacgtgcagttaatc

SEQ ID NO: 202608 - DNA, 30 bp, Artificial Sequence
  Synthetic oligonucleotide
ggtagggataataattcgcaatggttaatc

SEQ ID NO: 202609 - DNA, 30 bp, Artificial Sequence
  Synthetic oligonucleotide
cggcttgaagcaggcgatgggggcaacatc

SEQ ID NO: 202610 - DNA, 30 bp, Artificial Sequence
  Synthetic oligonucleotide
gcgtaccgccagattgattgctgcaacatc

SEQ ID NO: 202611 - DNA, 30 bp, Artificial Sequence
  Synthetic oligonucleotide
agttgcctggagaaatgcccaaggaacatc

SEQ ID NO: 202612 - DNA, 30 bp, Artificial Sequence
  Synthetic oligonucleotide
actctagcatcaccaaatctcgataacatc

SEQ ID NO: 202613 - DNA, 30 bp, Artificial Sequence
  Synthetic oligonucleotide
gtgtcgtaggatttggtttcgactaacatc

SEQ ID NO: 202614 - DNA, 30 bp, Artificial Sequence
  Synthetic oligonucleotide
tgtaactaccacaagagtggatggcacatc

SEQ ID NO: 202615 - DNA, 30 bp, Artificial Sequence
  Synthetic oligonucleotide
ctccgtgagtcaattcaagaaacagacatc

SEQ ID NO: 202616 - DNA, 30 bp, Artificial Sequence
  Synthetic oligonucleotide
tgggtcgttaggacccccgcgaaggacatc

SEQ ID NO: 202617 - DNA, 30 bp, Artificial Sequence
  Synthetic oligonucleotide
tagagatagagctcaactgccggggacatc

SEQ ID NO: 202618 - DNA, 30 bp, Artificial Sequence
  Synthetic oligonucleotide
tgtctaggttcctccattcaataatacatc

SEQ ID NO: 202619 - DNA, 30 bp, Artificial Sequence
  Synthetic oligonucleotide
aaggggtataatactatctaggtctacatc

SEQ ID NO: 202620 - DNA, 30 bp, Artificial Sequence
  Synthetic oligonucleotide
ttctagctctagttatagataaggtacatc

SEQ ID NO: 202621 - DNA, 30 bp, Artificial Sequence
  Synthetic oligonucleotide
ggacttgcctgtcgggttatgtgaaccatc

SEQ ID NO: 202622 - DNA, 30 bp, Artificial Sequence
  Synthetic oligonucleotide
gggttactgggcaatcctctaaataccatc

SEQ ID NO: 202623 - DNA, 30 bp, Artificial Sequence
  Synthetic oligonucleotide
ttacttagttggacggctcaggataccatc

SEQ ID NO: 202624 - DNA, 30 bp, Artificial Sequence
  Synthetic oligonucleotide
cgtccattacacatatttcctcgtaccatc

SEQ ID NO: 202625 - DNA, 30 bp, Artificial Sequence
  Synthetic oligonucleotide
accgtctgcatgaccaaagaggaacccatc

SEQ ID NO: 202626 - DNA, 30 bp, Artificial Sequence
  Synthetic oligonucleotide
ggtcaataagtgcgcacctgcctccccatc

SEQ ID NO: 202627 - DNA, 30 bp, Artificial Sequence
  Synthetic oligonucleotide
gtgggtattgcataatcaaaaaaagccatc

SEQ ID NO: 202628 - DNA, 30 bp, Artificial Sequence
  Synthetic oligonucleotide
agcggttcaaacaatgattgtgcagccatc

SEQ ID NO: 202629 - DNA, 30 bp, Artificial Sequence
  Synthetic oligonucleotide
gcagatcaatattatgaggttaccgccatc

SEQ ID NO: 202630 - DNA, 30 bp, Artificial Sequence
  Synthetic oligonucleotide
atgacaagggctccatgtgatgatgccatc

SEQ ID NO: 202631 - DNA, 30 bp, Artificial Sequence
  Synthetic oligonucleotide
taactaggttagatatagcagtcctccatc

SEQ ID NO: 202632 - DNA, 30 bp, Artificial Sequence
  Synthetic oligonucleotide
aaagtaggtcatggacggccattttccatc

SEQ ID NO: 202633 - DNA, 30 bp, Artificial Sequence
  Synthetic oligonucleotide
tgtacgatcagggtccgggaggatagcatc

SEQ ID NO: 202634 - DNA, 30 bp, Artificial Sequence
  Synthetic oligonucleotide
gggttcggctacacaaccatatttagcatc

SEQ ID NO: 202635 - DNA, 30 bp, Artificial Sequence
  Synthetic oligonucleotide
caaaacggtctcagcggacagacacgcatc

SEQ ID NO: 202636 - DNA, 30 bp, Artificial Sequence
  Synthetic oligonucleotide
atggacaatcagtgcttaccaccacgcatc

SEQ ID NO: 202637 - DNA, 30 bp, Artificial Sequence
  Synthetic oligonucleotide
tagtacgcggataggcccaaagcgcgcatc

SEQ ID NO: 202638 - DNA, 30 bp, Artificial Sequence
  Synthetic oligonucleotide
acaaaaatctaaagcatgagtcggggcatc

SEQ ID NO: 202639 - DNA, 30 bp, Artificial Sequence
  Synthetic oligonucleotide
tcgaatgatattggattgtatgtgggcatc

SEQ ID NO: 202640 - DNA, 30 bp, Artificial Sequence
  Synthetic oligonucleotide
tcccatgcgcgacagtgcattgatggcatc

SEQ ID NO: 202641 - DNA, 30 bp, Artificial Sequence
  Synthetic oligonucleotide
aatagttatagggaaaaaggggctggcatc

SEQ ID NO: 202642 - DNA, 30 bp, Artificial Sequence
  Synthetic oligonucleotide
gatagaggttacttgagcgagtgtggcatc

SEQ ID NO: 202643 - DNA, 30 bp, Artificial Sequence
  Synthetic oligonucleotide
atccgcggtgtcgtccattgctagtgcatc

SEQ ID NO: 202644 - DNA, 30 bp, Artificial Sequence
  Synthetic oligonucleotide
cagatcctagaaatgcgtaatcattgcatc

SEQ ID NO: 202645 - DNA, 30 bp, Artificial Sequence
  Synthetic oligonucleotide
ccatgctttggcttactgctattttgcatc

SEQ ID NO: 202646 - DNA, 30 bp, Artificial Sequence
  Synthetic oligonucleotide
agtccacgcaaggaacataggcaaatcatc

SEQ ID NO: 202647 - DNA, 30 bp, Artificial Sequence
  Synthetic oligonucleotide
tctaaccatctcaataaatctggaatcatc

SEQ ID NO: 202648 - DNA, 30 bp, Artificial Sequence
  Synthetic oligonucleotide
tccgggacatttaggaatcggtacatcatc

SEQ ID NO: 202649 - DNA, 30 bp, Artificial Sequence
  Synthetic oligonucleotide
caacaacatttgatactagcacagatcatc

SEQ ID NO: 202650 - DNA, 30 bp, Artificial Sequence
  Synthetic oligonucleotide
ttgtaaaggtgggttgtaccagggatcatc

SEQ ID NO: 202651 - DNA, 30 bp, Artificial Sequence
  Synthetic oligonucleotide
gtataagtcggtgtcgtggcgaatatcatc

SEQ ID NO: 202652 - DNA, 30 bp, Artificial Sequence
  Synthetic oligonucleotide
aattccggaacccgttaagccgtactcatc

SEQ ID NO: 202653 - DNA, 30 bp, Artificial Sequence
  Synthetic oligonucleotide
cggttgtacttctagacaaagcccctcatc

SEQ ID NO: 202654 - DNA, 30 bp, Artificial Sequence
  Synthetic oligonucleotide
agtaaaatctagcataaagtacgcctcatc

SEQ ID NO: 202655 - DNA, 30 bp, Artificial Sequence
  Synthetic oligonucleotide
cgaacgaagaatgtctgcgatctcctcatc

SEQ ID NO: 202656 - DNA, 30 bp, Artificial Sequence
  Synthetic oligonucleotide
gttgatactctttggaaaatcattctcatc

SEQ ID NO: 202657 - DNA, 30 bp, Artificial Sequence
  Synthetic oligonucleotide
gcgatccgcccgttccattaaacagtcatc

SEQ ID NO: 202658 - DNA, 30 bp, Artificial Sequence
  Synthetic oligonucleotide
ggatgaaacagcgtactaggctcagtcatc

SEQ ID NO: 202659 - DNA, 30 bp, Artificial Sequence
  Synthetic oligonucleotide
ccaaattcggggcacacctagagagtcatc

SEQ ID NO: 202660 - DNA, 30 bp, Artificial Sequence
  Synthetic oligonucleotide
tcggagtgtgaacgaagtacttatgtcatc

SEQ ID NO: 202661 - DNA, 35 bp, Artificial Sequence
  Synthetic oligonucleotide
tgattaccaccactgcgtccaaatacaaattcatc

SEQ ID NO: 202662 - DNA, 30 bp, Artificial Sequence
  Synthetic oligonucleotide
aacccaataatgtctgatggtaacaagatc

SEQ ID NO: 202663 - DNA, 30 bp, Artificial Sequence
  Synthetic oligonucleotide
agaaatctatccggcatggtagagaagatc

SEQ ID NO: 202664 - DNA, 30 bp, Artificial Sequence
  Synthetic oligonucleotide
aatcagctcgagaaagttggaggtaagatc

SEQ ID NO: 202665 - DNA, 30 bp, Artificial Sequence
  Synthetic oligonucleotide
atgggcacgcacttataagtcattaagatc

SEQ ID NO: 202666 - DNA, 30 bp, Artificial Sequence
  Synthetic oligonucleotide
acgctgctggaagtgttaaaaggacagatc

SEQ ID NO: 202667 - DNA, 30 bp, Artificial Sequence
  Synthetic oligonucleotide
ggtcgttaacgccaactcaccctacagatc

SEQ ID NO: 202668 - DNA, 30 bp, Artificial Sequence
  Synthetic oligonucleotide
cgctgtccgataaccttaggtgaccagatc

SEQ ID NO: 202669 - DNA, 30 bp, Artificial Sequence
  Synthetic oligonucleotide
gcgcgcgaagtacttgcgcacccccagatc

SEQ ID NO: 202670 - DNA, 30 bp, Artificial Sequence
  Synthetic oligonucleotide
tcgctgcatttgacaagcggggggcagatc

SEQ ID NO: 202671 - DNA, 30 bp, Artificial Sequence
  Synthetic oligonucleotide
gtctacacacgaacaccgaccgatcagatc

SEQ ID NO: 202672 - DNA, 30 bp, Artificial Sequence
  Synthetic oligonucleotide
cgagcaggcttcacttcgcgcatcgagatc

SEQ ID NO: 202673 - DNA, 30 bp, Artificial Sequence
  Synthetic oligonucleotide
cgtattgtaagattcggaatagctgagatc

SEQ ID NO: 202674 - DNA, 30 bp, Artificial Sequence
  Synthetic oligonucleotide
cgtatcttctgcgccaccacttctgagatc

SEQ ID NO: 202675 - DNA, 30 bp, Artificial Sequence
  Synthetic oligonucleotide
gaaggcgaagagcactcctaacgtgagatc

SEQ ID NO: 202676 - DNA, 30 bp, Artificial Sequence
  Synthetic oligonucleotide
aacagcggttcgcgagttaggccatagatc

SEQ ID NO: 202677 - DNA, 30 bp, Artificial Sequence
  Synthetic oligonucleotide
gcccatcgcggttgtaaagtgggatagatc

SEQ ID NO: 202678 - DNA, 30 bp, Artificial Sequence
  Synthetic oligonucleotide
tttcaagccaaacactccggacctacgatc

SEQ ID NO: 202679 - DNA, 30 bp, Artificial Sequence
  Synthetic oligonucleotide
ataatcctccgccagcgttagtagccgatc

SEQ ID NO: 202680 - DNA, 30 bp, Artificial Sequence
  Synthetic oligonucleotide
cgggtgctcaaaatactttattggccgatc

SEQ ID NO: 202681 - DNA, 30 bp, Artificial Sequence
  Synthetic oligonucleotide
gggaggccgagctacttcgaggacgcgatc

SEQ ID NO: 202682 - DNA, 30 bp, Artificial Sequence
  Synthetic oligonucleotide
agccgtaagatattttaaagaggcgcgatc

SEQ ID NO: 202683 - DNA, 30 bp, Artificial Sequence
  Synthetic oligonucleotide
gaggggccagggaaatactagggcgcgatc

SEQ ID NO: 202684 - DNA, 30 bp, Artificial Sequence
  Synthetic oligonucleotide
gcaagagtatagcgatctcacagggcgatc

SEQ ID NO: 202685 - DNA, 30 bp, Artificial Sequence
  Synthetic oligonucleotide
gacccaacacatctcgcgacacgctcgatc

SEQ ID NO: 202686 - DNA, 30 bp, Artificial Sequence
  Synthetic oligonucleotide
cgtcacgtcagaattattacgtattcgatc

SEQ ID NO: 202687 - DNA, 30 bp, Artificial Sequence
  Synthetic oligonucleotide
gagttaggcccgtcggggataataaggatc

SEQ ID NO: 202688 - DNA, 30 bp, Artificial Sequence
  Synthetic oligonucleotide
aagggtgctaatgttccgacagacaggatc

SEQ ID NO: 202689 - DNA, 30 bp, Artificial Sequence
  Synthetic oligonucleotide
tacccacaatggcaaaagcgaagcaggatc

SEQ ID NO: 202690 - DNA, 30 bp, Artificial Sequence
  Synthetic oligonucleotide
gatgtcagagtaagatcataactgaggatc

SEQ ID NO: 202691 - DNA, 30 bp, Artificial Sequence
  Synthetic oligonucleotide
tatccgatcaggaccttggatattaggatc

SEQ ID NO: 202692 - DNA, 30 bp, Artificial Sequence
  Synthetic oligonucleotide
gcccatcgggtctctcaataaagccggatc

SEQ ID NO: 202693 - DNA, 30 bp, Artificial Sequence
  Synthetic oligonucleotide
atcaggtgatcgtaaggcgcactccggatc

SEQ ID NO: 202694 - DNA, 30 bp, Artificial Sequence
  Synthetic oligonucleotide
tgggctttctattggaaatggaatcggatc

SEQ ID NO: 202695 - DNA, 30 bp, Artificial Sequence
  Synthetic oligonucleotide
gggatacagaagacagtcgcgcttcggatc

SEQ ID NO: 202696 - DNA, 30 bp, Artificial Sequence
  Synthetic oligonucleotide
caggaccgtccgtttcttcaacgagggatc

SEQ ID NO: 202697 - DNA, 30 bp, Artificial Sequence
  Synthetic oligonucleotide
tgcccgaaggtgaaacactatcaggggatc

SEQ ID NO: 202698 - DNA, 30 bp, Artificial Sequence
  Synthetic oligonucleotide
tgcggttggggttgggggtggccggggatc

SEQ ID NO: 202699 - DNA, 30 bp, Artificial Sequence
  Synthetic oligonucleotide
tttgaaggacggttacgactagtggggatc

SEQ ID NO: 202700 - DNA, 30 bp, Artificial Sequence
  Synthetic oligonucleotide
gaccctccgtcgtgagcatgcagtgggatc

SEQ ID NO: 202701 - DNA, 30 bp, Artificial Sequence
  Synthetic oligonucleotide
tcgcttatttctcactgaacatcatggatc

SEQ ID NO: 202702 - DNA, 30 bp, Artificial Sequence
  Synthetic oligonucleotide
agtacacaggaagtgtaccggcactggatc

SEQ ID NO: 202703 - DNA, 30 bp, Artificial Sequence
  Synthetic oligonucleotide
gttgacctggcgatagtaggtgactggatc

SEQ ID NO: 202704 - DNA, 30 bp, Artificial Sequence
  Synthetic oligonucleotide
tcgcgtccaccatgtatccgggcctggatc

SEQ ID NO: 202705 - DNA, 30 bp, Artificial Sequence
  Synthetic oligonucleotide
atactacgcggacggaactcgtgctggatc

SEQ ID NO: 202706 - DNA, 30 bp, Artificial Sequence
  Synthetic oligonucleotide
tagcagtccgaaagggaacggatgtggatc

SEQ ID NO: 202707 - DNA, 30 bp, Artificial Sequence
  Synthetic oligonucleotide
catacttccaaatacgaagtcaatatgatc

SEQ ID NO: 202708 - DNA, 30 bp, Artificial Sequence
  Synthetic oligonucleotide
cgcgtcatggcgagaacaatttgtctgatc

SEQ ID NO: 202709 - DNA, 30 bp, Artificial Sequence
  Synthetic oligonucleotide
aatgaaatcacatggaaaaccgtagtgatc

SEQ ID NO: 202710 - DNA, 30 bp, Artificial Sequence
  Synthetic oligonucleotide
gtcccgaacggatcttttaataccgtgatc

SEQ ID NO: 202711 - DNA, 30 bp, Artificial Sequence
  Synthetic oligonucleotide
ggcaacaagcgggtaaccggaggcgtgatc

SEQ ID NO: 202712 - DNA, 30 bp, Artificial Sequence
  Synthetic oligonucleotide
gaaaaggactcaaacgcgcgcggcgtgatc

SEQ ID NO: 202713 - DNA, 30 bp, Artificial Sequence
  Synthetic oligonucleotide
tgagcgtcacgcatcctggtcagggtgatc

SEQ ID NO: 202714 - DNA, 30 bp, Artificial Sequence
  Synthetic oligonucleotide
gcggcgtaagatgcctcgccgtatgtgatc

SEQ ID NO: 202715 - DNA, 30 bp, Artificial Sequence
  Synthetic oligonucleotide
ggtggaacgtactcggtcaagcctgtgatc

SEQ ID NO: 202716 - DNA, 30 bp, Artificial Sequence
  Synthetic oligonucleotide
ccggacggaaccttttttgttagtgtgatc

SEQ ID NO: 202717 - DNA, 30 bp, Artificial Sequence
  Synthetic oligonucleotide
gatggatccgggggtgttgtttcgttgatc

SEQ ID NO: 202718 - DNA, 30 bp, Artificial Sequence
  Synthetic oligonucleotide
tggagatcttgatctctagcacggttgatc

SEQ ID NO: 202719 - DNA, 28 bp, Artificial Sequence
  Synthetic oligonucleotide
gcgtaggtcgtgaatcgtccggaatatc

SEQ ID NO: 202720 - DNA, 30 bp, Artificial Sequence
  Synthetic oligonucleotide
agcataaatcaagtaatgtctgggaatatc

SEQ ID NO: 202721 - DNA, 30 bp, Artificial Sequence
  Synthetic oligonucleotide
aatggtggatagtaaaggttgatgaatatc

SEQ ID NO: 202722 - DNA, 30 bp, Artificial Sequence
  Synthetic oligonucleotide
ggagtgcagcggcttgactcaagtaatatc

SEQ ID NO: 202723 - DNA, 30 bp, Artificial Sequence
  Synthetic oligonucleotide
acacttaatacagtcgatagccaacatatc

SEQ ID NO: 202724 - DNA, 30 bp, Artificial Sequence
  Synthetic oligonucleotide
ttaggaacgaaagttacagctttgcatatc

SEQ ID NO: 202725 - DNA, 30 bp, Artificial Sequence
  Synthetic oligonucleotide
taggaagagctatgttgagtaaaagatatc

SEQ ID NO: 202726 - DNA, 30 bp, Artificial Sequence
  Synthetic oligonucleotide
tcatcagtcgtagtcaaatgcatagatatc

SEQ ID NO: 202727 - DNA, 30 bp, Artificial Sequence
  Synthetic oligonucleotide
tcgccgacggaccaccggactacggatatc

SEQ ID NO: 202728 - DNA, 30 bp, Artificial Sequence
  Synthetic oligonucleotide
tttactttgctaggaaaagagagtgatatc

SEQ ID NO: 202729 - DNA, 30 bp, Artificial Sequence
  Synthetic oligonucleotide
gcggatagcatatgaactttacgatatatc

SEQ ID NO: 202730 - DNA, 30 bp, Artificial Sequence
  Synthetic oligonucleotide
aactagaaacaatgatacccagcctatatc

SEQ ID NO: 202731 - DNA, 30 bp, Artificial Sequence
  Synthetic oligonucleotide
cgggatcatacggagcaccatgcttatatc

SEQ ID NO: 202732 - DNA, 30 bp, Artificial Sequence
  Synthetic oligonucleotide
aagaaaactgaaggaggtagtctttatatc

SEQ ID NO: 202733 - DNA, 30 bp, Artificial Sequence
  Synthetic oligonucleotide
tgcgtcgtgatcaacaggatctcacctatc

SEQ ID NO: 202734 - DNA, 30 bp, Artificial Sequence
  Synthetic oligonucleotide
tgaaaataagtatagtgatctgcccctatc

SEQ ID NO: 202735 - DNA, 30 bp, Artificial Sequence
  Synthetic oligonucleotide
ctgctagggcgcaaatggaactcgcctatc

SEQ ID NO: 202736 - DNA, 30 bp, Artificial Sequence
  Synthetic oligonucleotide
ggagtagcggtgtactttacagcagctatc

SEQ ID NO: 202737 - DNA, 30 bp, Artificial Sequence
  Synthetic oligonucleotide
gtaggtgtgcgacgggtccgtctagctatc

SEQ ID NO: 202738 - DNA, 30 bp, Artificial Sequence
  Synthetic oligonucleotide
aatacagacctgcgaatgtggagtgctatc

SEQ ID NO: 202739 - DNA, 30 bp, Artificial Sequence
  Synthetic oligonucleotide
gtttggcttaccggtgaatggtcatctatc

SEQ ID NO: 202740 - DNA, 30 bp, Artificial Sequence
  Synthetic oligonucleotide
atgaatagttgtacaggtgttcactctatc

SEQ ID NO: 202741 - DNA, 30 bp, Artificial Sequence
  Synthetic oligonucleotide
ccatggccatcttagtttggcgtaagtatc

SEQ ID NO: 202742 - DNA, 30 bp, Artificial Sequence
  Synthetic oligonucleotide
ttcaaacaacacccaatcttatacagtatc

SEQ ID NO: 202743 - DNA, 30 bp, Artificial Sequence
  Synthetic oligonucleotide
tcggcatgacttgaaatgtggttcagtatc

SEQ ID NO: 202744 - DNA, 30 bp, Artificial Sequence
  Synthetic oligonucleotide
cagaatgcgttgagaagtggtggacgtatc

SEQ ID NO: 202745 - DNA, 30 bp, Artificial Sequence
  Synthetic oligonucleotide
atttcattagaggaagggaacgtacgtatc

SEQ ID NO: 202746 - DNA, 30 bp, Artificial Sequence
  Synthetic oligonucleotide
tgggaggtaagaaattcgcccaaccgtatc

SEQ ID NO: 202747 - DNA, 30 bp, Artificial Sequence
  Synthetic oligonucleotide
ggtacgtaggtgcttgatgggaagcgtatc

SEQ ID NO: 202748 - DNA, 30 bp, Artificial Sequence
  Synthetic oligonucleotide
acatgtgtaggagcggtgggacatcgtatc

SEQ ID NO: 202749 - DNA, 30 bp, Artificial Sequence
  Synthetic oligonucleotide
gacttcaaagactggataaatctaggtatc

SEQ ID NO: 202750 - DNA, 30 bp, Artificial Sequence
  Synthetic oligonucleotide
aggagggcgtagggtcgtgtctagggtatc

SEQ ID NO: 202751 - DNA, 30 bp, Artificial Sequence
  Synthetic oligonucleotide
gagtaagaggaaaaaataagatcgggtatc

SEQ ID NO: 202752 - DNA, 30 bp, Artificial Sequence
  Synthetic oligonucleotide
gcatcacaagataccatgacatatggtatc

SEQ ID NO: 202753 - DNA, 30 bp, Artificial Sequence
  Synthetic oligonucleotide
cgttaaaaatacatcctatagcctggtatc

SEQ ID NO: 202754 - DNA, 30 bp, Artificial Sequence
  Synthetic oligonucleotide
agggtggcattcctactacctatctgtatc

SEQ ID NO: 202755 - DNA, 30 bp, Artificial Sequence
  Synthetic oligonucleotide
cctgtaggtaaagaaatgtgggggtgtatc

SEQ ID NO: 202756 - DNA, 30 bp, Artificial Sequence
  Synthetic oligonucleotide
acgactgtcattcgttcgggtttgtgtatc

SEQ ID NO: 202757 - DNA, 30 bp, Artificial Sequence
  Synthetic oligonucleotide
atacctaattgaaaatcgtcaccttgtatc

SEQ ID NO: 202758 - DNA, 30 bp, Artificial Sequence
  Synthetic oligonucleotide
ggggccttgtggatagccacaacaattatc

SEQ ID NO: 202759 - DNA, 30 bp, Artificial Sequence
  Synthetic oligonucleotide
gcacaacaggtatagagcggtgagattatc

SEQ ID NO: 202760 - DNA, 30 bp, Artificial Sequence
  Synthetic oligonucleotide
gaactgaacacagcctaacgtccgattatc

SEQ ID NO: 202761 - DNA, 30 bp, Artificial Sequence
  Synthetic oligonucleotide
gctcggtgcagtgaaatgatgtgtattatc

SEQ ID NO: 202762 - DNA, 30 bp, Artificial Sequence
  Synthetic oligonucleotide
aggctaaggagagatcctttgacccttatc

SEQ ID NO: 202763 - DNA, 30 bp, Artificial Sequence
  Synthetic oligonucleotide
cgcactacgggggtgatgactaatcttatc

SEQ ID NO: 202764 - DNA, 30 bp, Artificial Sequence
  Synthetic oligonucleotide
tgtggtactgcataatattaccgggttatc

SEQ ID NO: 202765 - DNA, 30 bp, Artificial Sequence
  Synthetic oligonucleotide
aacaccggaaattttcttgagttggttatc

SEQ ID NO: 202766 - DNA, 30 bp, Artificial Sequence
  Synthetic oligonucleotide
agtcgaaccggtcaagatatctttgttatc

SEQ ID NO: 202767 - DNA, 30 bp, Artificial Sequence
  Synthetic oligonucleotide
acgcagacagggcattagaccgagaaactc

SEQ ID NO: 202768 - DNA, 30 bp, Artificial Sequence
  Synthetic oligonucleotide
ccccggaaccgttagcaataatataaactc

SEQ ID NO: 202769 - DNA, 30 bp, Artificial Sequence
  Synthetic oligonucleotide
tcgtgataggggtagaacatggagcaactc

SEQ ID NO: 202770 - DNA, 30 bp, Artificial Sequence
  Synthetic oligonucleotide
gtggcgatgtccaaaatcgcctatcaactc

SEQ ID NO: 202771 - DNA, 30 bp, Artificial Sequence
  Synthetic oligonucleotide
ctggtgccaataggttccggggctcaactc

SEQ ID NO: 202772 - DNA, 30 bp, Artificial Sequence
  Synthetic oligonucleotide
aagatgggtcgaaacatacggtcagaactc

SEQ ID NO: 202773 - DNA, 30 bp, Artificial Sequence
  Synthetic oligonucleotide
ggaggacctccagggttaacgtgagaactc

SEQ ID NO: 202774 - DNA, 30 bp, Artificial Sequence
  Synthetic oligonucleotide
ttgtctgtgcaactttgggaacgggaactc

SEQ ID NO: 202775 - DNA, 30 bp, Artificial Sequence
  Synthetic oligonucleotide
accgcttcgcttggggcgagaggggaactc

SEQ ID NO: 202776 - DNA, 30 bp, Artificial Sequence
  Synthetic oligonucleotide
gtataggaatgcgccactcccgatgaactc

SEQ ID NO: 202777 - DNA, 30 bp, Artificial Sequence
  Synthetic oligonucleotide
gcgcagtgacatgcagcgatcagctaactc

SEQ ID NO: 202778 - DNA, 30 bp, Artificial Sequence
  Synthetic oligonucleotide
cggtcgaaatgcgcgttcaccgattaactc

SEQ ID NO: 202779 - DNA, 30 bp, Artificial Sequence
  Synthetic oligonucleotide
gcaacttctcagctagtagagcgttaactc

SEQ ID NO: 202780 - DNA, 30 bp, Artificial Sequence
  Synthetic oligonucleotide
ttaaagcggaaccataaccagtacacactc

SEQ ID NO: 202781 - DNA, 30 bp, Artificial Sequence
  Synthetic oligonucleotide
tagagagggaacatatctggaccgacactc

SEQ ID NO: 202782 - DNA, 30 bp, Artificial Sequence
  Synthetic oligonucleotide
atgtcggcgtgtaaggtgccctccccactc

SEQ ID NO: 202783 - DNA, 30 bp, Artificial Sequence
  Synthetic oligonucleotide
atgcaagcaaggagttgggcggtcccactc

SEQ ID NO: 202784 - DNA, 30 bp, Artificial Sequence
  Synthetic oligonucleotide
cggccacacgcttctttgagtcggccactc

SEQ ID NO: 202785 - DNA, 30 bp, Artificial Sequence
  Synthetic oligonucleotide
taaggattgtgggagatgttttaagcactc

SEQ ID NO: 202786 - DNA, 30 bp, Artificial Sequence
  Synthetic oligonucleotide
tctacatattaccagtaccgatgagcactc

SEQ ID NO: 202787 - DNA, 30 bp, Artificial Sequence
  Synthetic oligonucleotide
ctgccagatatgttaagatccgaggcactc

SEQ ID NO: 202788 - DNA, 30 bp, Artificial Sequence
  Synthetic oligonucleotide
ttttactaaatagggagaggcgtgtcactc

SEQ ID NO: 202789 - DNA, 30 bp, Artificial Sequence
  Synthetic oligonucleotide
gataggccagcctagtccgagggttcactc

SEQ ID NO: 202790 - DNA, 30 bp, Artificial Sequence
  Synthetic oligonucleotide
acgctttcgccacggatcggaaagagactc

SEQ ID NO: 202791 - DNA, 30 bp, Artificial Sequence
  Synthetic oligonucleotide
taaaggaaaggagttagaatcgggagactc

SEQ ID NO: 202792 - DNA, 30 bp, Artificial Sequence
  Synthetic oligonucleotide
atatcgggttaggtcgtatcggatagactc

SEQ ID NO: 202793 - DNA, 30 bp, Artificial Sequence
  Synthetic oligonucleotide
tggtctgcgaaaaaccacagtcgtagactc

SEQ ID NO: 202794 - DNA, 30 bp, Artificial Sequence
  Synthetic oligonucleotide
ttccaatgtaaacataggcgggcacgactc

SEQ ID NO: 202795 - DNA, 30 bp, Artificial Sequence
  Synthetic oligonucleotide
ccgatctgtcatcctgctcggtgacgactc

SEQ ID NO: 202796 - DNA, 30 bp, Artificial Sequence
  Synthetic oligonucleotide
gcggagtgccctttactaatacagcgactc

SEQ ID NO: 202797 - DNA, 30 bp, Artificial Sequence
  Synthetic oligonucleotide
cccccgcacggagagggatcaccaggactc

SEQ ID NO: 202798 - DNA, 30 bp, Artificial Sequence
  Synthetic oligonucleotide
taatgaacggctagagatgttataggactc

SEQ ID NO: 202799 - DNA, 30 bp, Artificial Sequence
  Synthetic oligonucleotide
aggggcacttcctctaattcattaggactc

SEQ ID NO: 202800 - DNA, 30 bp, Artificial Sequence
  Synthetic oligonucleotide
ggtattagattgcgatgtttaaagggactc

SEQ ID NO: 202801 - DNA, 30 bp, Artificial Sequence
  Synthetic oligonucleotide
aagggtcatcacgctgcgcgcgatggactc

SEQ ID NO: 202802 - DNA, 30 bp, Artificial Sequence
  Synthetic oligonucleotide
ccattattagacgagagtacggcttgactc

SEQ ID NO: 202803 - DNA, 30 bp, Artificial Sequence
  Synthetic oligonucleotide
acggaactgcttatatagagtaacatactc

SEQ ID NO: 202804 - DNA, 30 bp, Artificial Sequence
  Synthetic oligonucleotide
gcggtgggtctttgcggttacaagatactc

SEQ ID NO: 202805 - DNA, 30 bp, Artificial Sequence
  Synthetic oligonucleotide
aacggcgtagtagtcagagcctaactactc

SEQ ID NO: 202806 - DNA, 30 bp, Artificial Sequence
  Synthetic oligonucleotide
aagtcagttagggaagctattcgactactc

SEQ ID NO: 202807 - DNA, 30 bp, Artificial Sequence
  Synthetic oligonucleotide
gtagtaatccccagaacaccgagcctactc

SEQ ID NO: 202808 - DNA, 30 bp, Artificial Sequence
  Synthetic oligonucleotide
gggtgaatgaaaattcttgcactgctactc

SEQ ID NO: 202809 - DNA, 30 bp, Artificial Sequence
  Synthetic oligonucleotide
atggtaaatgaccgtatcggcaatctactc

SEQ ID NO: 202810 - DNA, 30 bp, Artificial Sequence
  Synthetic oligonucleotide
gtactggaagtacggaaaagatcattactc

SEQ ID NO: 202811 - DNA, 30 bp, Artificial Sequence
  Synthetic oligonucleotide
gaataaaacggagaaaagtcaatattactc

SEQ ID NO: 202812 - DNA, 30 bp, Artificial Sequence
  Synthetic oligonucleotide
cactgcaacatataatgcgagaccttactc

SEQ ID NO: 202813 - DNA, 30 bp, Artificial Sequence
  Synthetic oligonucleotide
actgcggccgttgcttagtagcagttactc

SEQ ID NO: 202814 - DNA, 30 bp, Artificial Sequence
  Synthetic oligonucleotide
gagcggatccgtttaaatactgtgaacctc

SEQ ID NO: 202815 - DNA, 30 bp, Artificial Sequence
  Synthetic oligonucleotide
catgatcataaggtattgtaccaacacctc

SEQ ID NO: 202816 - DNA, 30 bp, Artificial Sequence
  Synthetic oligonucleotide
cgtagggtctgaaagtcttatgtacacctc

SEQ ID NO: 202817 - DNA, 30 bp, Artificial Sequence
  Synthetic oligonucleotide
tcctgtgggtggccagtgctttaccacctc

SEQ ID NO: 202818 - DNA, 30 bp, Artificial Sequence
  Synthetic oligonucleotide
ttgaacgcctgatgagaaggcgcccacctc

SEQ ID NO: 202819 - DNA, 30 bp, Artificial Sequence
  Synthetic oligonucleotide
taccactccatacatcgtataatagccctc

SEQ ID NO: 202820 - DNA, 30 bp, Artificial Sequence
  Synthetic oligonucleotide
aagttcgcggtctggaccgttgccgccctc

SEQ ID NO: 202821 - DNA, 30 bp, Artificial Sequence
  Synthetic oligonucleotide
gttccatgacgaacatcaacacgggccctc

SEQ ID NO: 202822 - DNA, 30 bp, Artificial Sequence
  Synthetic oligonucleotide
cggttaagtgtctgactcgggcttgccctc

SEQ ID NO: 202823 - DNA, 30 bp, Artificial Sequence
  Synthetic oligonucleotide
agtcgctgtacatataatccaaaatccctc

SEQ ID NO: 202824 - DNA, 30 bp, Artificial Sequence
  Synthetic oligonucleotide
atgccgtcagatagaaccaaacaatccctc

SEQ ID NO: 202825 - DNA, 30 bp, Artificial Sequence
  Synthetic oligonucleotide
ttctgaccgaacaacgccctcgactccctc

SEQ ID NO: 202826 - DNA, 30 bp, Artificial Sequence
  Synthetic oligonucleotide
ggattagtcaccgttggggagatgtccctc

SEQ ID NO: 202827 - DNA, 30 bp, Artificial Sequence
  Synthetic oligonucleotide
gtaacaaatctagatatgtgggtgagcctc

SEQ ID NO: 202828 - DNA, 30 bp, Artificial Sequence
  Synthetic oligonucleotide
gcactagcagtccaaaaccgaactagcctc

SEQ ID NO: 202829 - DNA, 30 bp, Artificial Sequence
  Synthetic oligonucleotide
gtattgccacccaaacgctagtgtagcctc

SEQ ID NO: 202830 - DNA, 30 bp, Artificial Sequence
  Synthetic oligonucleotide
ggcgagagtgcacgctcagtggcacgcctc

SEQ ID NO: 202831 - DNA, 30 bp, Artificial Sequence
  Synthetic oligonucleotide
cacgtgctccgaccacccgattggcgcctc

SEQ ID NO: 202832 - DNA, 30 bp, Artificial Sequence
  Synthetic oligonucleotide
cagcggccgcgtggtaaagtgattggcctc

SEQ ID NO: 202833 - DNA, 30 bp, Artificial Sequence
  Synthetic oligonucleotide
gtagtggcattcggatttgttgttggcctc

SEQ ID NO: 202834 - DNA, 30 bp, Artificial Sequence
  Synthetic oligonucleotide
agttaagtatgggattaaaattttggcctc

SEQ ID NO: 202835 - DNA, 30 bp, Artificial Sequence
  Synthetic oligonucleotide
ccagaggggtagcaaaaatgctcgtgcctc

SEQ ID NO: 202836 - DNA, 30 bp, Artificial Sequence
  Synthetic oligonucleotide
agatgcagtggccggtcgtatgtgatcctc

SEQ ID NO: 202837 - DNA, 30 bp, Artificial Sequence
  Synthetic oligonucleotide
gttcacaatatcaagttctcacctatcctc

SEQ ID NO: 202838 - DNA, 30 bp, Artificial Sequence
  Synthetic oligonucleotide
attactgtattccacgagggttctatcctc

SEQ ID NO: 202839 - DNA, 30 bp, Artificial Sequence
  Synthetic oligonucleotide
agactattttcaagtttctggtaagtcctc

SEQ ID NO: 202840 - DNA, 30 bp, Artificial Sequence
  Synthetic oligonucleotide
ccacaagagtcacagccatcaagcgtcctc

SEQ ID NO: 202841 - DNA, 30 bp, Artificial Sequence
  Synthetic oligonucleotide
gggcaatccgctcatagtgcgtcggtcctc

SEQ ID NO: 202842 - DNA, 30 bp, Artificial Sequence
  Synthetic oligonucleotide
gcctggtgaaggtcatatagaaatgtcctc

SEQ ID NO: 202843 - DNA, 30 bp, Artificial Sequence
  Synthetic oligonucleotide
cgtctgtcatgaatctcactttgattcctc

SEQ ID NO: 202844 - DNA, 30 bp, Artificial Sequence
  Synthetic oligonucleotide
ccaggtcgtgacatgcacgtgaccaagctc

SEQ ID NO: 202845 - DNA, 30 bp, Artificial Sequence
  Synthetic oligonucleotide
gatctagtgcaaatcggtgagatgaagctc

SEQ ID NO: 202846 - DNA, 30 bp, Artificial Sequence
  Synthetic oligonucleotide
cagttgtccacagtcatataggcccagctc

SEQ ID NO: 202847 - DNA, 30 bp, Artificial Sequence
  Synthetic oligonucleotide
ctcatgtgtgaatagttgttagatcagctc

SEQ ID NO: 202848 - DNA, 30 bp, Artificial Sequence
  Synthetic oligonucleotide
ctgtggtaaatgctattttcactcgagctc

SEQ ID NO: 202849 - DNA, 30 bp, Artificial Sequence
  Synthetic oligonucleotide
agtgcgtgttgttagggatcgcaggagctc

SEQ ID NO: 202850 - DNA, 30 bp, Artificial Sequence
  Synthetic oligonucleotide
atacgtagtcgcaagggcggaattgagctc

SEQ ID NO: 202851 - DNA, 30 bp, Artificial Sequence
  Synthetic oligonucleotide
ggacctctggttgctcttaatggctagctc

SEQ ID NO: 202852 - DNA, 30 bp, Artificial Sequence
  Synthetic oligonucleotide
cataatcacgcttgatcttccatgtagctc

SEQ ID NO: 202853 - DNA, 30 bp, Artificial Sequence
  Synthetic oligonucleotide
attaaacatcgagcccgaccttgttagctc

SEQ ID NO: 202854 - DNA, 30 bp, Artificial Sequence
  Synthetic oligonucleotide
tctcgtaagatagctatggtacgaccgctc

SEQ ID NO: 202855 - DNA, 30 bp, Artificial Sequence
  Synthetic oligonucleotide
gcagatagggagataattcggataccgctc

SEQ ID NO: 202856 - DNA, 30 bp, Artificial Sequence
  Synthetic oligonucleotide
agagggggcgctctctcattagcagcgctc

SEQ ID NO: 202857 - DNA, 30 bp, Artificial Sequence
  Synthetic oligonucleotide
ccggcttagacatcttgtgcccacgcgctc

SEQ ID NO: 202858 - DNA, 30 bp, Artificial Sequence
  Synthetic oligonucleotide
gtatctccacacgcccaacatcccgcgctc

SEQ ID NO: 202859 - DNA, 30 bp, Artificial Sequence
  Synthetic oligonucleotide
ttccgcatgggacattaccgtggtgcgctc

SEQ ID NO: 202860 - DNA, 30 bp, Artificial Sequence
  Synthetic oligonucleotide
accgaggatcactccagtgcgggctcgctc

SEQ ID NO: 202861 - DNA, 30 bp, Artificial Sequence
  Synthetic oligonucleotide
cgtgcaacaggcttgtcggacagaaggctc

SEQ ID NO: 202862 - DNA, 30 bp, Artificial Sequence
  Synthetic oligonucleotide
gcggagacgttgtcaaatccggcgaggctc

SEQ ID NO: 202863 - DNA, 30 bp, Artificial Sequence
  Synthetic oligonucleotide
agtcgtggggcaaccaaaatgctgcggctc

SEQ ID NO: 202864 - DNA, 30 bp, Artificial Sequence
  Synthetic oligonucleotide
attattaggtggcatggcgggagagggctc

SEQ ID NO: 202865 - DNA, 30 bp, Artificial Sequence
  Synthetic oligonucleotide
tttacggtcaccaccggtaccagcgggctc

SEQ ID NO: 202866 - DNA, 30 bp, Artificial Sequence
  Synthetic oligonucleotide
gagcatagttttaacaaagcgggcgggctc

SEQ ID NO: 202867 - DNA, 30 bp, Artificial Sequence
  Synthetic oligonucleotide
actttcatgggtaggtcttgtccctggctc

SEQ ID NO: 202868 - DNA, 30 bp, Artificial Sequence
  Synthetic oligonucleotide
gcggtagacttagcaattaagtcaatgctc

SEQ ID NO: 202869 - DNA, 30 bp, Artificial Sequence
  Synthetic oligonucleotide
ttgtcgttctatagctcggcgtagatgctc

SEQ ID NO: 202870 - DNA, 30 bp, Artificial Sequence
  Synthetic oligonucleotide
ctctgtgacctttaataagttgcgatgctc

SEQ ID NO: 202871 - DNA, 28 bp, Artificial Sequence
  Synthetic oligonucleotide
cagttatcgaaagctgtggcctatgctc

SEQ ID NO: 202872 - DNA, 30 bp, Artificial Sequence
  Synthetic oligonucleotide
tggaatccagaagacttagatacgctgctc

SEQ ID NO: 202873 - DNA, 30 bp, Artificial Sequence
  Synthetic oligonucleotide
gagaccagcgtgcacctacaatctctgctc

SEQ ID NO: 202874 - DNA, 30 bp, Artificial Sequence
  Synthetic oligonucleotide
agtcagttctaactgacgccgggtctgctc

SEQ ID NO: 202875 - DNA, 30 bp, Artificial Sequence
  Synthetic oligonucleotide
cgctaagacactggcgtattcgatgtgctc

SEQ ID NO: 202876 - DNA, 30 bp, Artificial Sequence
  Synthetic oligonucleotide
gtggctacagcgtctagcactaaattgctc

SEQ ID NO: 202877 - DNA, 30 bp, Artificial Sequence
  Synthetic oligonucleotide
ctcttacctccaacacaaccacaattgctc

SEQ ID NO: 202878 - DNA, 30 bp, Artificial Sequence
  Synthetic oligonucleotide
ttcctctcatataagagaagagaattgctc

SEQ ID NO: 202879 - DNA, 30 bp, Artificial Sequence
  Synthetic oligonucleotide
ggcctaagaaggaaactcaaggacttgctc

SEQ ID NO: 202880 - DNA, 31 bp, Artificial Sequence
  Synthetic oligonucleotide
gcagcggaaattcgaaaagtaaggtttgctc

SEQ ID NO: 202881 - DNA, 30 bp, Artificial Sequence
  Synthetic oligonucleotide
ctaccgagggatcaaaaagctgcaaatctc

SEQ ID NO: 202882 - DNA, 30 bp, Artificial Sequence
  Synthetic oligonucleotide
cggataggggaaaaagaatatgtaaatctc

SEQ ID NO: 202883 - DNA, 30 bp, Artificial Sequence
  Synthetic oligonucleotide
cttaggctttgtgaaaggataacgaatctc

SEQ ID NO: 202884 - DNA, 30 bp, Artificial Sequence
  Synthetic oligonucleotide
cggcatcctgatgagaggtttcggaatctc

SEQ ID NO: 202885 - DNA, 30 bp, Artificial Sequence
  Synthetic oligonucleotide
aagccgaggtcagaacggaccatacatctc

SEQ ID NO: 202886 - DNA, 30 bp, Artificial Sequence
  Synthetic oligonucleotide
tattgcgactcgccacgcgtggtacatctc

SEQ ID NO: 202887 - DNA, 30 bp, Artificial Sequence
  Synthetic oligonucleotide
gctcgagttcattaccattactaccatctc

SEQ ID NO: 202888 - DNA, 30 bp, Artificial Sequence
  Synthetic oligonucleotide
cgatgtcgaacgacgtgggaaacccatctc

SEQ ID NO: 202889 - DNA, 30 bp, Artificial Sequence
  Synthetic oligonucleotide
gccaatcaacccaggaggatatctcatctc

SEQ ID NO: 202890 - DNA, 30 bp, Artificial Sequence
  Synthetic oligonucleotide
ctgttgaagggaagttgcggagccgatctc

SEQ ID NO: 202891 - DNA, 30 bp, Artificial Sequence
  Synthetic oligonucleotide
gggcgagcagcacaccctgcgtccgatctc

SEQ ID NO: 202892 - DNA, 30 bp, Artificial Sequence
  Synthetic oligonucleotide
agtcaattggtaaggtggcctagcgatctc

SEQ ID NO: 202893 - DNA, 30 bp, Artificial Sequence
  Synthetic oligonucleotide
gaaaccaaaaaaatggcaagaggtgatctc

SEQ ID NO: 202894 - DNA, 30 bp, Artificial Sequence
  Synthetic oligonucleotide
gaaaggatcacgatgaaagcgcttgatctc

SEQ ID NO: 202895 - DNA, 30 bp, Artificial Sequence
  Synthetic oligonucleotide
ctgtgggtacttagcactaatcactatctc

SEQ ID NO: 202896 - DNA, 30 bp, Artificial Sequence
  Synthetic oligonucleotide
actgcttattggtctgtatactggtatctc

SEQ ID NO: 202897 - DNA, 31 bp, Artificial Sequence
  Synthetic oligonucleotide
actaaccatgcaagctaaataggtttatctc

SEQ ID NO: 202898 - DNA, 30 bp, Artificial Sequence
  Synthetic oligonucleotide
tgaccaacgctactgtatatactcactctc

SEQ ID NO: 202899 - DNA, 30 bp, Artificial Sequence
  Synthetic oligonucleotide
ggagatcttccggagaagatcgcgcctctc

SEQ ID NO: 202900 - DNA, 30 bp, Artificial Sequence
  Synthetic oligonucleotide
ctaaacgggggcacagaggctcacgctctc

SEQ ID NO: 202901 - DNA, 30 bp, Artificial Sequence
  Synthetic oligonucleotide
gcctgaagtcatctgctaagttcggctctc

SEQ ID NO: 202902 - DNA, 30 bp, Artificial Sequence
  Synthetic oligonucleotide
tctaatactttgtgtaagtgctgggctctc

SEQ ID NO: 202903 - DNA, 30 bp, Artificial Sequence
  Synthetic oligonucleotide
agtcatccctagtatatgcacacctctctc

SEQ ID NO: 202904 - DNA, 30 bp, Artificial Sequence
  Synthetic oligonucleotide
aatggtgccagctcagggcccataagtctc

SEQ ID NO: 202905 - DNA, 30 bp, Artificial Sequence
  Synthetic oligonucleotide
acggctgcggatggcgatattaacagtctc

SEQ ID NO: 202906 - DNA, 30 bp, Artificial Sequence
  Synthetic oligonucleotide
atagactacaggaaactaaatgtacgtctc

SEQ ID NO: 202907 - DNA, 30 bp, Artificial Sequence
  Synthetic oligonucleotide
atggagacgttacccgtagaacaccgtctc

SEQ ID NO: 202908 - DNA, 30 bp, Artificial Sequence
  Synthetic oligonucleotide
agtccgtcaaaatgtccacatgcccgtctc

SEQ ID NO: 202909 - DNA, 30 bp, Artificial Sequence
  Synthetic oligonucleotide
aacttagtggtcagtcctaaacgccgtctc

SEQ ID NO: 202910 - DNA, 30 bp, Artificial Sequence
  Synthetic oligonucleotide
cattggaagtttactattcctgtccgtctc

SEQ ID NO: 202911 - DNA, 30 bp, Artificial Sequence
  Synthetic oligonucleotide
gccgcttagataaatcggttccctcgtctc

SEQ ID NO: 202912 - DNA, 30 bp, Artificial Sequence
  Synthetic oligonucleotide
gaatctgtggggacctcgggcaaaggtctc

SEQ ID NO: 202913 - DNA, 30 bp, Artificial Sequence
  Synthetic oligonucleotide
taaaactgttgtggatttgtgaccggtctc

SEQ ID NO: 202914 - DNA, 30 bp, Artificial Sequence
  Synthetic oligonucleotide
cacgtggtccttgagattatgcgcggtctc

SEQ ID NO: 202915 - DNA, 30 bp, Artificial Sequence
  Synthetic oligonucleotide
ctcatccatactaattgcaatcagggtctc

SEQ ID NO: 202916 - DNA, 30 bp, Artificial Sequence
  Synthetic oligonucleotide
atcctcgtaaaacagcgagttgagggtctc

SEQ ID NO: 202917 - DNA, 30 bp, Artificial Sequence
  Synthetic oligonucleotide
tggtggcgccgttcttattgttaatgtctc

SEQ ID NO: 202918 - DNA, 30 bp, Artificial Sequence
  Synthetic oligonucleotide
ggtcacagagaaacggtgcccccctgtctc

SEQ ID NO: 202919 - DNA, 30 bp, Artificial Sequence
  Synthetic oligonucleotide
cgaagctacggtagagttcatcgacttctc

SEQ ID NO: 202920 - DNA, 30 bp, Artificial Sequence
  Synthetic oligonucleotide
caaaaaccgtaggtgtactagacgcttctc

SEQ ID NO: 202921 - DNA, 30 bp, Artificial Sequence
  Synthetic oligonucleotide
tgggaaatgttagttaaacgtccgcttctc

SEQ ID NO: 202922 - DNA, 30 bp, Artificial Sequence
  Synthetic oligonucleotide
agcatgaaaagattgaatcttctgcttctc

SEQ ID NO: 202923 - DNA, 30 bp, Artificial Sequence
  Synthetic oligonucleotide
ggcaaaccccacacgtacgagcctcttctc

SEQ ID NO: 202924 - DNA, 30 bp, Artificial Sequence
  Synthetic oligonucleotide
cgtgacataggggagcggaaagaagttctc

SEQ ID NO: 202925 - DNA, 29 bp, Artificial Sequence
  Synthetic oligonucleotide
tcccaaaaacgtccagcacaatggttctc

SEQ ID NO: 202926 - DNA, 30 bp, Artificial Sequence
  Synthetic oligonucleotide
tcggccgcgtcaaggatcatgtgtgttctc

SEQ ID NO: 202927 - DNA, 30 bp, Artificial Sequence
  Synthetic oligonucleotide
tgggcagtaccaaaagactgaaaatttctc

SEQ ID NO: 202928 - DNA, 30 bp, Artificial Sequence
  Synthetic oligonucleotide
gacgcaagaaacttacgttacttctttctc

SEQ ID NO: 202929 - DNA, 30 bp, Artificial Sequence
  Synthetic oligonucleotide
taccccaggggttgagtagggtgaaaagtc

SEQ ID NO: 202930 - DNA, 30 bp, Artificial Sequence
  Synthetic oligonucleotide
aagtgggaggctgtatgatattgcaaagtc

SEQ ID NO: 202931 - DNA, 30 bp, Artificial Sequence
  Synthetic oligonucleotide
ctaattattgctatgtggcttcgtaaagtc

SEQ ID NO: 202932 - DNA, 30 bp, Artificial Sequence
  Synthetic oligonucleotide
ctagtattccaccgctgattcatccaagtc

SEQ ID NO: 202933 - DNA, 30 bp, Artificial Sequence
  Synthetic oligonucleotide
ggagatggagttcggccatcgaggcaagtc

SEQ ID NO: 202934 - DNA, 30 bp, Artificial Sequence
  Synthetic oligonucleotide
cataagataggaacagggtaagatcaagtc

SEQ ID NO: 202935 - DNA, 30 bp, Artificial Sequence
  Synthetic oligonucleotide
ccgacactgcatatcaaaggtcgcgaagtc

SEQ ID NO: 202936 - DNA, 30 bp, Artificial Sequence
  Synthetic oligonucleotide
agacacgtgtgtattctgaaatttgaagtc

SEQ ID NO: 202937 - DNA, 30 bp, Artificial Sequence
  Synthetic oligonucleotide
ggcctcgcttcgacctacctacactaagtc

SEQ ID NO: 202938 - DNA, 30 bp, Artificial Sequence
  Synthetic oligonucleotide
gcagagtactactattgcaagtactaagtc

SEQ ID NO: 202939 - DNA, 30 bp, Artificial Sequence
  Synthetic oligonucleotide
tgggagtgctacagtcttgaaacgtaagtc

SEQ ID NO: 202940 - DNA, 30 bp, Artificial Sequence
  Synthetic oligonucleotide
acgaaggcaagacttgatgagacgtaagtc

SEQ ID NO: 202941 - DNA, 30 bp, Artificial Sequence
  Synthetic oligonucleotide
ctgttgttgggcctgagggttacgtaagtc

SEQ ID NO: 202942 - DNA, 30 bp, Artificial Sequence
  Synthetic oligonucleotide
cgtcacgattgatacgatcaggcgtaagtc

SEQ ID NO: 202943 - DNA, 30 bp, Artificial Sequence
  Synthetic oligonucleotide
taatggttccgtgttaaacacgcttaagtc

SEQ ID NO: 202944 - DNA, 30 bp, Artificial Sequence
  Synthetic oligonucleotide
ccgagtggtcgccgtcggaaccgttaagtc

SEQ ID NO: 202945 - DNA, 30 bp, Artificial Sequence
  Synthetic oligonucleotide
gatttaacaccagacaagtctcaaacagtc

SEQ ID NO: 202946 - DNA, 30 bp, Artificial Sequence
  Synthetic oligonucleotide
tatacgacgaattgggtgagccgaacagtc

SEQ ID NO: 202947 - DNA, 30 bp, Artificial Sequence
  Synthetic oligonucleotide
gcccagagacgaaagcccaaggtaacagtc

SEQ ID NO: 202948 - DNA, 30 bp, Artificial Sequence
  Synthetic oligonucleotide
gttggtcaagcgcattcatcattcacagtc

SEQ ID NO: 202949 - DNA, 30 bp, Artificial Sequence
  Synthetic oligonucleotide
ggcttggtttcgatatgctaaaagacagtc

SEQ ID NO: 202950 - DNA, 30 bp, Artificial Sequence
  Synthetic oligonucleotide
tcaagaaagcattccttcgcgctgacagtc

SEQ ID NO: 202951 - DNA, 30 bp, Artificial Sequence
  Synthetic oligonucleotide
taaggagtctgtggccgccgcactacagtc

SEQ ID NO: 202952 - DNA, 30 bp, Artificial Sequence
  Synthetic oligonucleotide
cagctgcttctcctatggcatgtgccagtc

SEQ ID NO: 202953 - DNA, 30 bp, Artificial Sequence
  Synthetic oligonucleotide
ctggactgaccattagctgctcctccagtc

SEQ ID NO: 202954 - DNA, 30 bp, Artificial Sequence
  Synthetic oligonucleotide
ctgccgtgggatagggaattttttccagtc

SEQ ID NO: 202955 - DNA, 30 bp, Artificial Sequence
  Synthetic oligonucleotide
ggttacaggtgtgtttagatggccgcagtc

SEQ ID NO: 202956 - DNA, 30 bp, Artificial Sequence
  Synthetic oligonucleotide
gcgcacatagccctaaacggtagcgcagtc

SEQ ID NO: 202957 - DNA, 30 bp, Artificial Sequence
  Synthetic oligonucleotide
gaaacgaccttaaaggagtcatgcgcagtc

SEQ ID NO: 202958 - DNA, 30 bp, Artificial Sequence
  Synthetic oligonucleotide
gggattgactgtcggaggccgcgggcagtc

SEQ ID NO: 202959 - DNA, 30 bp, Artificial Sequence
  Synthetic oligonucleotide
gcggagttcacattacaaccgtttgcagtc

SEQ ID NO: 202960 - DNA, 30 bp, Artificial Sequence
  Synthetic oligonucleotide
gttaagctgctcagtggtctatagtcagtc

SEQ ID NO: 202961 - DNA, 30 bp, Artificial Sequence
  Synthetic oligonucleotide
ggctggtcctccaagtgctaaacgtcagtc

SEQ ID NO: 202962 - DNA, 30 bp, Artificial Sequence
  Synthetic oligonucleotide
agatataaccagatgtaaggaggcagagtc

SEQ ID NO: 202963 - DNA, 30 bp, Artificial Sequence
  Synthetic oligonucleotide
gactaagataacataaattgacatagagtc

SEQ ID NO: 202964 - DNA, 30 bp, Artificial Sequence
  Synthetic oligonucleotide
ttgcgccttgcccaccacacttcacgagtc

SEQ ID NO: 202965 - DNA, 30 bp, Artificial Sequence
  Synthetic oligonucleotide
cccgctgaatctgcgttaggggtacgagtc

SEQ ID NO: 202966 - DNA, 30 bp, Artificial Sequence
  Synthetic oligonucleotide
tcaaccaaagtcacgaataacatccgagtc

SEQ ID NO: 202967 - DNA, 30 bp, Artificial Sequence
  Synthetic oligonucleotide
tttaaacaacgaaacttgctgaggcgagtc

SEQ ID NO: 202968 - DNA, 30 bp, Artificial Sequence
  Synthetic oligonucleotide
gcccatcggataactggtccgcgtcgagtc

SEQ ID NO: 202969 - DNA, 30 bp, Artificial Sequence
  Synthetic oligonucleotide
cttgaagagctgtaaaaggtttgaggagtc

SEQ ID NO: 202970 - DNA, 30 bp, Artificial Sequence
  Synthetic oligonucleotide
acactctgcccctgtagatgagtgggagtc

SEQ ID NO: 202971 - DNA, 30 bp, Artificial Sequence
  Synthetic oligonucleotide
gggggttgggtatcgaggccaaatggagtc

SEQ ID NO: 202972 - DNA, 30 bp, Artificial Sequence
  Synthetic oligonucleotide
ttatagactctgacgacatctagtggagtc

SEQ ID NO: 202973 - DNA, 30 bp, Artificial Sequence
  Synthetic oligonucleotide
agattcacgcgatagtgggtgtcatgagtc

SEQ ID NO: 202974 - DNA, 30 bp, Artificial Sequence
  Synthetic oligonucleotide
tgcccgactatatccgtggatcactgagtc

SEQ ID NO: 202975 - DNA, 30 bp, Artificial Sequence
  Synthetic oligonucleotide
tgtgcacaaggaggacgtcactcgtgagtc

SEQ ID NO: 202976 - DNA, 30 bp, Artificial Sequence
  Synthetic oligonucleotide
aattgcaaccgatggaccaaagggtgagtc

SEQ ID NO: 202977 - DNA, 30 bp, Artificial Sequence
  Synthetic oligonucleotide
cagcaaagcgactagaccccctattgagtc

SEQ ID NO: 202978 - DNA, 30 bp, Artificial Sequence
  Synthetic oligonucleotide
ggtctgatacagcgctaaagtggaatagtc

SEQ ID NO: 202979 - DNA, 30 bp, Artificial Sequence
  Synthetic oligonucleotide
tgccgcgatttaaaattaccattgatagtc

SEQ ID NO: 202980 - DNA, 30 bp, Artificial Sequence
  Synthetic oligonucleotide
gctcagcaacaaagtaccctccaactagtc

SEQ ID NO: 202981 - DNA, 30 bp, Artificial Sequence
  Synthetic oligonucleotide
gtacatctccatgtgacgctatcgctagtc

SEQ ID NO: 202982 - DNA, 30 bp, Artificial Sequence
  Synthetic oligonucleotide
ttggggagagcaaaagacacttcgctagtc

SEQ ID NO: 202983 - DNA, 30 bp, Artificial Sequence
  Synthetic oligonucleotide
actggccaaacgccagtatcgcatctagtc

SEQ ID NO: 202984 - DNA, 30 bp, Artificial Sequence
  Synthetic oligonucleotide
ccgtagtagatagccctacgaggtctagtc

SEQ ID NO: 202985 - DNA, 30 bp, Artificial Sequence
  Synthetic oligonucleotide
ttgaagcttccacactggataggtctagtc

SEQ ID NO: 202986 - DNA, 30 bp, Artificial Sequence
  Synthetic oligonucleotide
ccacgatgggatgagcctacgggtctagtc

SEQ ID NO: 202987 - DNA, 30 bp, Artificial Sequence
  Synthetic oligonucleotide
ttggggtggtaagcatcgaacccagtagtc

SEQ ID NO: 202988 - DNA, 30 bp, Artificial Sequence
  Synthetic oligonucleotide
gtctggccttagatggattgactagtagtc

SEQ ID NO: 202989 - DNA, 30 bp, Artificial Sequence
  Synthetic oligonucleotide
taccttgtcaaggagctgattagtgtagtc

SEQ ID NO: 202990 - DNA, 30 bp, Artificial Sequence
  Synthetic oligonucleotide
tatgataacaccgcaacaggaggtgtagtc

SEQ ID NO: 202991 - DNA, 30 bp, Artificial Sequence
  Synthetic oligonucleotide
gtaatgaaccgtccttgcacgggtgtagtc

SEQ ID NO: 202992 - DNA, 30 bp, Artificial Sequence
  Synthetic oligonucleotide
tcgatacccgacatgctgtacattgtagtc

SEQ ID NO: 202993 - DNA, 30 bp, Artificial Sequence
  Synthetic oligonucleotide
agcctagcgcggacaggacttcttgtagtc

SEQ ID NO: 202994 - DNA, 30 bp, Artificial Sequence
  Synthetic oligonucleotide
cgcggacatgctactacggttacattagtc

SEQ ID NO: 202995 - DNA, 30 bp, Artificial Sequence
  Synthetic oligonucleotide
ctgttgggattgtcggtttacatgttagtc

SEQ ID NO: 202996 - DNA, 30 bp, Artificial Sequence
  Synthetic oligonucleotide
tgcggacgtggaattgggtcctgcaacgtc

SEQ ID NO: 202997 - DNA, 30 bp, Artificial Sequence
  Synthetic oligonucleotide
ggtattcggctgggactgatcttacacgtc

SEQ ID NO: 202998 - DNA, 30 bp, Artificial Sequence
  Synthetic oligonucleotide
gtacatttcctcgcactctgcatagacgtc

SEQ ID NO: 202999 - DNA, 30 bp, Artificial Sequence
  Synthetic oligonucleotide
ggcgaaaaccctcgtggtataaaggacgtc

SEQ ID NO: 203000 - DNA, 30 bp, Artificial Sequence
  Synthetic oligonucleotide
gacaagattcgaaaagaagctacggacgtc

SEQ ID NO: 203001 - DNA, 30 bp, Artificial Sequence
  Synthetic oligonucleotide
aagactgttatatttttacgctagtacgtc

SEQ ID NO: 203002 - DNA, 30 bp, Artificial Sequence
  Synthetic oligonucleotide
caggtatgctgtaaccggtggtgaaccgtc

SEQ ID NO: 203003 - DNA, 30 bp, Artificial Sequence
  Synthetic oligonucleotide
ccgtttgcattattcaacggcttaaccgtc

SEQ ID NO: 203004 - DNA, 30 bp, Artificial Sequence
  Synthetic oligonucleotide
tatccgttaatgatactgtttcagaccgtc

SEQ ID NO: 203005 - DNA, 30 bp, Artificial Sequence
  Synthetic oligonucleotide
gtacagaaataccacaagcgtacgaccgtc

SEQ ID NO: 203006 - DNA, 30 bp, Artificial Sequence
  Synthetic oligonucleotide
gcgattccaatggcgaccaatgatcccgtc

SEQ ID NO: 203007 - DNA, 30 bp, Artificial Sequence
  Synthetic oligonucleotide
gatttgaactccaattgaggctcagccgtc

SEQ ID NO: 203008 - DNA, 30 bp, Artificial Sequence
  Synthetic oligonucleotide
atgggctccgctggaaaagtatgtgccgtc

SEQ ID NO: 203009 - DNA, 30 bp, Artificial Sequence
  Synthetic oligonucleotide
agcgcacacctcaaaagtggcgggtccgtc

SEQ ID NO: 203010 - DNA, 30 bp, Artificial Sequence
  Synthetic oligonucleotide
gcgtaatttataggggcggatgggtccgtc

SEQ ID NO: 203011 - DNA, 30 bp, Artificial Sequence
  Synthetic oligonucleotide
tgttcattagtctctgtggggatgtccgtc

SEQ ID NO: 203012 - DNA, 30 bp, Artificial Sequence
  Synthetic oligonucleotide
agacggtcaccacggctgttagattccgtc

SEQ ID NO: 203013 - DNA, 30 bp, Artificial Sequence
  Synthetic oligonucleotide
aagttaagatagataagcgtaacttccgtc

SEQ ID NO: 203014 - DNA, 30 bp, Artificial Sequence
  Synthetic oligonucleotide
gttcctcgtaagagaccgacgtacagcgtc

SEQ ID NO: 203015 - DNA, 30 bp, Artificial Sequence
  Synthetic oligonucleotide
ccaaagggaccaatgctggtactgagcgtc

SEQ ID NO: 203016 - DNA, 30 bp, Artificial Sequence
  Synthetic oligonucleotide
cgcgaatgcgactccggtgaagatcgcgtc

SEQ ID NO: 203017 - DNA, 30 bp, Artificial Sequence
  Synthetic oligonucleotide
cgcgtctccgaaataaatttgtttcgcgtc

SEQ ID NO: 203018 - DNA, 30 bp, Artificial Sequence
  Synthetic oligonucleotide
aagcgagccgcgtacggacaaggaggcgtc

SEQ ID NO: 203019 - DNA, 30 bp, Artificial Sequence
  Synthetic oligonucleotide
gtggcactaatcagactccaaagcggcgtc

SEQ ID NO: 203020 - DNA, 30 bp, Artificial Sequence
  Synthetic oligonucleotide
tcgaaaaattcaatcgtggtatctggcgtc

SEQ ID NO: 203021 - DNA, 30 bp, Artificial Sequence
  Synthetic oligonucleotide
ccagtaagctccaagctacattctggcgtc

SEQ ID NO: 203022 - DNA, 30 bp, Artificial Sequence
  Synthetic oligonucleotide
cgattggttccacctccccacgttggcgtc

SEQ ID NO: 203023 - DNA, 30 bp, Artificial Sequence
  Synthetic oligonucleotide
agtctacggcattaactcaccgttggcgtc

SEQ ID NO: 203024 - DNA, 30 bp, Artificial Sequence
  Synthetic oligonucleotide
gggaatgcgggggttcatttcctatgcgtc

SEQ ID NO: 203025 - DNA, 30 bp, Artificial Sequence
  Synthetic oligonucleotide
tccagggaaccccgattttcctactgcgtc

SEQ ID NO: 203026 - DNA, 30 bp, Artificial Sequence
  Synthetic oligonucleotide
gggagcgtggggcttagtctctgctgcgtc

SEQ ID NO: 203027 - DNA, 30 bp, Artificial Sequence
  Synthetic oligonucleotide
cttagtggactttagctttgttcgatcgtc

SEQ ID NO: 203028 - DNA, 30 bp, Artificial Sequence
  Synthetic oligonucleotide
cgcatccgaacttctttcttcaggatcgtc

SEQ ID NO: 203029 - DNA, 30 bp, Artificial Sequence
  Synthetic oligonucleotide
aaaaataggtagcttactatcaacctcgtc

SEQ ID NO: 203030 - DNA, 30 bp, Artificial Sequence
  Synthetic oligonucleotide
ctgacaccagtactgagggtcagtctcgtc

SEQ ID NO: 203031 - DNA, 30 bp, Artificial Sequence
  Synthetic oligonucleotide
cgtatttacgagaaaacgtctaaggtcgtc

SEQ ID NO: 203032 - DNA, 30 bp, Artificial Sequence
  Synthetic oligonucleotide
acattttctggaatttcgaattatgtcgtc

SEQ ID NO: 203033 - DNA, 30 bp, Artificial Sequence
  Synthetic oligonucleotide
acggtctcggcatgatgacgttgattcgtc

SEQ ID NO: 203034 - DNA, 30 bp, Artificial Sequence
  Synthetic oligonucleotide
taagttgggaggcgcaacggcatattcgtc

SEQ ID NO: 203035 - DNA, 30 bp, Artificial Sequence
  Synthetic oligonucleotide
agcagagtcatatctcggtctcatttcgtc

SEQ ID NO: 203036 - DNA, 29 bp, Artificial Sequence
  Synthetic oligonucleotide
cataagcacgtactgttcgtcatttcgtc

SEQ ID NO: 203037 - DNA, 30 bp, Artificial Sequence
  Synthetic oligonucleotide
ctagttggtcactgcaccaccattttcgtc

SEQ ID NO: 203038 - DNA, 30 bp, Artificial Sequence
  Synthetic oligonucleotide
gacgctggggatgtgtcgatgtgaaaggtc

SEQ ID NO: 203039 - DNA, 30 bp, Artificial Sequence
  Synthetic oligonucleotide
gatagacaggtccccgagggaccgaaggtc

SEQ ID NO: 203040 - DNA, 30 bp, Artificial Sequence
  Synthetic oligonucleotide
atcaggagcggcggcatttccatgaaggtc

SEQ ID NO: 203041 - DNA, 30 bp, Artificial Sequence
  Synthetic oligonucleotide
cctagttcgaagtcacacagagataaggtc

SEQ ID NO: 203042 - DNA, 30 bp, Artificial Sequence
  Synthetic oligonucleotide
ctgggtttgacctggacatcgggtaaggtc

SEQ ID NO: 203043 - DNA, 30 bp, Artificial Sequence
  Synthetic oligonucleotide
aacgcattctattgtgaatttatacaggtc

SEQ ID NO: 203044 - DNA, 30 bp, Artificial Sequence
  Synthetic oligonucleotide
cggcgcgttctacgctggagttaccaggtc

SEQ ID NO: 203045 - DNA, 30 bp, Artificial Sequence
  Synthetic oligonucleotide
acgatcacttcaatgaggtggaagcaggtc

SEQ ID NO: 203046 - DNA, 30 bp, Artificial Sequence
  Synthetic oligonucleotide
agaggcagaatatactagtacagtcaggtc

SEQ ID NO: 203047 - DNA, 30 bp, Artificial Sequence
  Synthetic oligonucleotide
atacgggaattgggtgaacgcacagaggtc

SEQ ID NO: 203048 - DNA, 30 bp, Artificial Sequence
  Synthetic oligonucleotide
gttcagatcggggtcgaatcgttcgaggtc

SEQ ID NO: 203049 - DNA, 30 bp, Artificial Sequence
  Synthetic oligonucleotide
tcctctagcatgtctagatgataataggtc

SEQ ID NO: 203050 - DNA, 30 bp, Artificial Sequence
  Synthetic oligonucleotide
ataaatggcgtgtgccacacgatataggtc

SEQ ID NO: 203051 - DNA, 30 bp, Artificial Sequence
  Synthetic oligonucleotide
gatgatccgcttttctgaactcggtaggtc

SEQ ID NO: 203052 - DNA, 30 bp, Artificial Sequence
  Synthetic oligonucleotide
cggggagtgaggtggaaccatctgtaggtc

SEQ ID NO: 203053 - DNA, 30 bp, Artificial Sequence
  Synthetic oligonucleotide
caatcgaacaaggggcgattggcgacggtc

SEQ ID NO: 203054 - DNA, 30 bp, Artificial Sequence
  Synthetic oligonucleotide
gcatacgagggataccaagttcatacggtc

SEQ ID NO: 203055 - DNA, 30 bp, Artificial Sequence
  Synthetic oligonucleotide
ccgcggcgtcgactgtgggcgtgaccggtc

SEQ ID NO: 203056 - DNA, 30 bp, Artificial Sequence
  Synthetic oligonucleotide
agatagaagaatggagacgtagtaccggtc

SEQ ID NO: 203057 - DNA, 30 bp, Artificial Sequence
  Synthetic oligonucleotide
accgaagatttcgcgcgctcgtgcccggtc

SEQ ID NO: 203058 - DNA, 30 bp, Artificial Sequence
  Synthetic oligonucleotide
cgtcaatagaagtccagtgggaatccggtc

SEQ ID NO: 203059 - DNA, 30 bp, Artificial Sequence
  Synthetic oligonucleotide
caatgagtaaccccgcaaattaaagcggtc

SEQ ID NO: 203060 - DNA, 30 bp, Artificial Sequence
  Synthetic oligonucleotide
aacatcacaagcggccgcgagctagcggtc

SEQ ID NO: 203061 - DNA, 30 bp, Artificial Sequence
  Synthetic oligonucleotide
taaaatagcaggccccgacgaaacgcggtc

SEQ ID NO: 203062 - DNA, 30 bp, Artificial Sequence
  Synthetic oligonucleotide
gttccttaaaacaacgttacctaggcggtc

SEQ ID NO: 203063 - DNA, 30 bp, Artificial Sequence
  Synthetic oligonucleotide
aaataatgtactattagagctttatcggtc

SEQ ID NO: 203064 - DNA, 30 bp, Artificial Sequence
  Synthetic oligonucleotide
ggaaaagagacttcttcaaagacctcggtc

SEQ ID NO: 203065 - DNA, 30 bp, Artificial Sequence
  Synthetic oligonucleotide
tgcacgttcggggatctttttagctcggtc

SEQ ID NO: 203066 - DNA, 30 bp, Artificial Sequence
  Synthetic oligonucleotide
caagagatcgtctttccgaccacaagggtc

SEQ ID NO: 203067 - DNA, 30 bp, Artificial Sequence
  Synthetic oligonucleotide
ataatgagcaagataaccaatgtaagggtc

SEQ ID NO: 203068 - DNA, 30 bp, Artificial Sequence
  Synthetic oligonucleotide
tgcttggtgaacgttctccgatcgagggtc

SEQ ID NO: 203069 - DNA, 30 bp, Artificial Sequence
  Synthetic oligonucleotide
ttacgcaatgttggataaggataccgggtc

SEQ ID NO: 203070 - DNA, 30 bp, Artificial Sequence
  Synthetic oligonucleotide
tgtttctggcgtgagaatccgttccgggtc

SEQ ID NO: 203071 - DNA, 30 bp, Artificial Sequence
  Synthetic oligonucleotide
gacctcatcagggattgacggaatcgggtc

SEQ ID NO: 203072 - DNA, 30 bp, Artificial Sequence
  Synthetic oligonucleotide
gtgaacgctattggtagctactttcgggtc

SEQ ID NO: 203073 - DNA, 30 bp, Artificial Sequence
  Synthetic oligonucleotide
agttgatgggaacatgatatcctcggggtc

SEQ ID NO: 203074 - DNA, 30 bp, Artificial Sequence
  Synthetic oligonucleotide
catccgcacctccatgtccactggggggtc

SEQ ID NO: 203075 - DNA, 30 bp, Artificial Sequence
  Synthetic oligonucleotide
tctaaacaaatattaaccctatatggggtc

SEQ ID NO: 203076 - DNA, 30 bp, Artificial Sequence
  Synthetic oligonucleotide
aacgtactaaaactatgttatctatgggtc

SEQ ID NO: 203077 - DNA, 30 bp, Artificial Sequence
  Synthetic oligonucleotide
cgcgaaaagattataattgcgagctgggtc

SEQ ID NO: 203078 - DNA, 30 bp, Artificial Sequence
  Synthetic oligonucleotide
gcgtggcgggtgaaggaacaggtctgggtc

SEQ ID NO: 203079 - DNA, 30 bp, Artificial Sequence
  Synthetic oligonucleotide
gaaatacatggcctaagtggaatgtgggtc

SEQ ID NO: 203080 - DNA, 30 bp, Artificial Sequence
  Synthetic oligonucleotide
tgtaaccaaaatgaggggaagacttgggtc

SEQ ID NO: 203081 - DNA, 29 bp, Artificial Sequence
  Synthetic oligonucleotide
caatttgtgcacatagaacgatttgggtc

SEQ ID NO: 203082 - DNA, 30 bp, Artificial Sequence
  Synthetic oligonucleotide
gagactgctatgccaggcgatccaatggtc

SEQ ID NO: 203083 - DNA, 30 bp, Artificial Sequence
  Synthetic oligonucleotide
cggaggtttcggatccctgagcagatggtc

SEQ ID NO: 203084 - DNA, 30 bp, Artificial Sequence
  Synthetic oligonucleotide
ggtaagatgtaactagcgaaaaaactggtc

SEQ ID NO: 203085 - DNA, 30 bp, Artificial Sequence
  Synthetic oligonucleotide
tcgtcagcccttgtttgtgtgacactggtc

SEQ ID NO: 203086 - DNA, 30 bp, Artificial Sequence
  Synthetic oligonucleotide
gtatgccgttgggtattatgggacctggtc

SEQ ID NO: 203087 - DNA, 30 bp, Artificial Sequence
  Synthetic oligonucleotide
ctgaaaagtgtcgcagaagccgagctggtc

SEQ ID NO: 203088 - DNA, 30 bp, Artificial Sequence
  Synthetic oligonucleotide
gtacaagtccgagtgtttaccattctggtc

SEQ ID NO: 203089 - DNA, 30 bp, Artificial Sequence
  Synthetic oligonucleotide
tccagatagatggtgacgaaccctgtggtc

SEQ ID NO: 203090 - DNA, 30 bp, Artificial Sequence
  Synthetic oligonucleotide
gtatcccaggagctggttaaaatattggtc

SEQ ID NO: 203091 - DNA, 30 bp, Artificial Sequence
  Synthetic oligonucleotide
attacggttatcattgatattcatttggtc

SEQ ID NO: 203092 - DNA, 28 bp, Artificial Sequence
  Synthetic oligonucleotide
ttatgtcatcttttgtcatcctttggtc

SEQ ID NO: 203093 - DNA, 30 bp, Artificial Sequence
  Synthetic oligonucleotide
tgcgggtagaggaccgcaggttagaatgtc

SEQ ID NO: 203094 - DNA, 30 bp, Artificial Sequence
  Synthetic oligonucleotide
gtctaggattgtcgatgattcacgaatgtc

SEQ ID NO: 203095 - DNA, 30 bp, Artificial Sequence
  Synthetic oligonucleotide
atgcggaccacaaatgtcccccggaatgtc

SEQ ID NO: 203096 - DNA, 30 bp, Artificial Sequence
  Synthetic oligonucleotide
cctcttcgtatgctccactgcggccatgtc

SEQ ID NO: 203097 - DNA, 31 bp, Artificial Sequence
  Synthetic oligonucleotide
gcacccataggaccgagttgtaaggcatgtc

SEQ ID NO: 203098 - DNA, 30 bp, Artificial Sequence
  Synthetic oligonucleotide
cggtcagtttaccagtggggagggcatgtc

SEQ ID NO: 203099 - DNA, 30 bp, Artificial Sequence
  Synthetic oligonucleotide
gtgacctctgccaaccgctcgagagatgtc

SEQ ID NO: 203100 - DNA, 30 bp, Artificial Sequence
  Synthetic oligonucleotide
tcttaacaagaaaaaggttgatccgatgtc

SEQ ID NO: 203101 - DNA, 30 bp, Artificial Sequence
  Synthetic oligonucleotide
gcataacggcataacatttgaagggatgtc

SEQ ID NO: 203102 - DNA, 30 bp, Artificial Sequence
  Synthetic oligonucleotide
cctagctcaacatgacgtagggtatatgtc

SEQ ID NO: 203103 - DNA, 30 bp, Artificial Sequence
  Synthetic oligonucleotide
tacaacgttccgggcatgccaggctatgtc

SEQ ID NO: 203104 - DNA, 30 bp, Artificial Sequence
  Synthetic oligonucleotide
gcggtcatacgataaatgggtcagtatgtc

SEQ ID NO: 203105 - DNA, 30 bp, Artificial Sequence
  Synthetic oligonucleotide
gagcgtactccactctgttccagttatgtc

SEQ ID NO: 203106 - DNA, 30 bp, Artificial Sequence
  Synthetic oligonucleotide
atataacgacggtgtccgcaagcaactgtc

SEQ ID NO: 203107 - DNA, 30 bp, Artificial Sequence
  Synthetic oligonucleotide
gtaacccgatcatcgtactacacgactgtc

SEQ ID NO: 203108 - DNA, 30 bp, Artificial Sequence
  Synthetic oligonucleotide
accgaggtgataagggggagcaagcctgtc

SEQ ID NO: 203109 - DNA, 30 bp, Artificial Sequence
  Synthetic oligonucleotide
gcattagggcgcgcgaatatcactcctgtc

SEQ ID NO: 203110 - DNA, 30 bp, Artificial Sequence
  Synthetic oligonucleotide
atctcatcaaagggcggtcaggctcctgtc

SEQ ID NO: 203111 - DNA, 35 bp, Artificial Sequence
  Synthetic oligonucleotide
tggacggatgtccaatggatgatttccgtcctgtc

SEQ ID NO: 203112 - DNA, 30 bp, Artificial Sequence
  Synthetic oligonucleotide
tgaaatgcgtagacgcgacttcttgctgtc

SEQ ID NO: 203113 - DNA, 30 bp, Artificial Sequence
  Synthetic oligonucleotide
ctcttgacagggttaccggcgcagtctgtc

SEQ ID NO: 203114 - DNA, 30 bp, Artificial Sequence
  Synthetic oligonucleotide
accctgataatacgcgtctgtgtttctgtc

SEQ ID NO: 203115 - DNA, 30 bp, Artificial Sequence
  Synthetic oligonucleotide
cacagagatttcaaagggctatcaagtgtc

SEQ ID NO: 203116 - DNA, 30 bp, Artificial Sequence
  Synthetic oligonucleotide
gaatagttgggttattgtggaaccagtgtc

SEQ ID NO: 203117 - DNA, 30 bp, Artificial Sequence
  Synthetic oligonucleotide
aaccaggcgggagcacggcacatgagtgtc

SEQ ID NO: 203118 - DNA, 30 bp, Artificial Sequence
  Synthetic oligonucleotide
ggtcacgattccatgaagatacgacgtgtc

SEQ ID NO: 203119 - DNA, 30 bp, Artificial Sequence
  Synthetic oligonucleotide
gtgggctactcgcgtgggtagctccgtgtc

SEQ ID NO: 203120 - DNA, 30 bp, Artificial Sequence
  Synthetic oligonucleotide
ttaaggagatggtacaaacggtagcgtgtc

SEQ ID NO: 203121 - DNA, 30 bp, Artificial Sequence
  Synthetic oligonucleotide
cgaggtacgggttaagggaaccatcgtgtc

SEQ ID NO: 203122 - DNA, 31 bp, Artificial Sequence
  Synthetic oligonucleotide
atgggtcacggacgactgaagatatcgtgtc

SEQ ID NO: 203123 - DNA, 30 bp, Artificial Sequence
  Synthetic oligonucleotide
tggttcctcgctttgttctctgctcgtgtc

SEQ ID NO: 203124 - DNA, 30 bp, Artificial Sequence
  Synthetic oligonucleotide
cgatattagctgttgctttcttaaggtgtc

SEQ ID NO: 203125 - DNA, 30 bp, Artificial Sequence
  Synthetic oligonucleotide
atgaaacaaatgatctttggaacaggtgtc

SEQ ID NO: 203126 - DNA, 30 bp, Artificial Sequence
  Synthetic oligonucleotide
ggaattcacgcgtaaggagtatcgggtgtc

SEQ ID NO: 203127 - DNA, 30 bp, Artificial Sequence
  Synthetic oligonucleotide
cacctgtttgttcaggtgaaaattggtgtc

SEQ ID NO: 203128 - DNA, 30 bp, Artificial Sequence
  Synthetic oligonucleotide
tgagtcaccagtggggcaggcatatgtgtc

SEQ ID NO: 203129 - DNA, 30 bp, Artificial Sequence
  Synthetic oligonucleotide
tagacgttacaagtaagtattcgctgtgtc

SEQ ID NO: 203130 - DNA, 30 bp, Artificial Sequence
  Synthetic oligonucleotide
aatctagtgacccatccgggctgttgtgtc

SEQ ID NO: 203131 - DNA, 30 bp, Artificial Sequence
  Synthetic oligonucleotide
gcaagggcacttccaagggagcgaattgtc

SEQ ID NO: 203132 - DNA, 30 bp, Artificial Sequence
  Synthetic oligonucleotide
aaaaagtgaaccttctttagtacgattgtc

SEQ ID NO: 203133 - DNA, 30 bp, Artificial Sequence
  Synthetic oligonucleotide
tctcacacttaagttagctggtcgattgtc

SEQ ID NO: 203134 - DNA, 30 bp, Artificial Sequence
  Synthetic oligonucleotide
gcgatcctcgacgataccttttctattgtc

SEQ ID NO: 203135 - DNA, 30 bp, Artificial Sequence
  Synthetic oligonucleotide
tgaagcctggggccctacaactgtattgtc

SEQ ID NO: 203136 - DNA, 30 bp, Artificial Sequence
  Synthetic oligonucleotide
ccggaatattaacctgtactttgccttgtc

SEQ ID NO: 203137 - DNA, 30 bp, Artificial Sequence
  Synthetic oligonucleotide
gtccacgccgggtcttagtgggtgcttgtc

SEQ ID NO: 203138 - DNA, 30 bp, Artificial Sequence
  Synthetic oligonucleotide
ccgtcaccgatggcgcccttaccagttgtc

SEQ ID NO: 203139 - DNA, 30 bp, Artificial Sequence
  Synthetic oligonucleotide
cttcatggagggaaatcattgagagttgtc

SEQ ID NO: 203140 - DNA, 30 bp, Artificial Sequence
  Synthetic oligonucleotide
aagaagctgatattcagtagatgagttgtc

SEQ ID NO: 203141 - DNA, 30 bp, Artificial Sequence
  Synthetic oligonucleotide
gggtcatctctggatcaacagatagttgtc

SEQ ID NO: 203142 - DNA, 30 bp, Artificial Sequence
  Synthetic oligonucleotide
gagaatgcaggcaatggggtagtcgttgtc

SEQ ID NO: 203143 - DNA, 30 bp, Artificial Sequence
  Synthetic oligonucleotide
aaaacaaacaactacccatgccgggttgtc

SEQ ID NO: 203144 - DNA, 30 bp, Artificial Sequence
  Synthetic oligonucleotide
agttagactgcgcacatgtctgtggttgtc

SEQ ID NO: 203145 - DNA, 30 bp, Artificial Sequence
  Synthetic oligonucleotide
ttttgcgaactttcgtcgaatggtgttgtc

SEQ ID NO: 203146 - DNA, 30 bp, Artificial Sequence
  Synthetic oligonucleotide
gcagtttgctaatctactattccatttgtc

SEQ ID NO: 203147 - DNA, 30 bp, Artificial Sequence
  Synthetic oligonucleotide
tgactagcgtatcggtaaacgacttttgtc

SEQ ID NO: 203148 - DNA, 30 bp, Artificial Sequence
  Synthetic oligonucleotide
tatacctcaatccagagtcgtccgaaattc

SEQ ID NO: 203149 - DNA, 30 bp, Artificial Sequence
  Synthetic oligonucleotide
tatcgactgcatactcagttgaggaaattc

SEQ ID NO: 203150 - DNA, 30 bp, Artificial Sequence
  Synthetic oligonucleotide
tgtagcaccggtatgataccaaaacaattc

SEQ ID NO: 203151 - DNA, 31 bp, Artificial Sequence
  Synthetic oligonucleotide
taaattaatccacctgtactgcactcaattc

SEQ ID NO: 203152 - DNA, 30 bp, Artificial Sequence
  Synthetic oligonucleotide
cctgttcgcgtggttgggacaagcgaattc

SEQ ID NO: 203153 - DNA, 30 bp, Artificial Sequence
  Synthetic oligonucleotide
agattgtgtattacgtagactcctgaattc

SEQ ID NO: 203154 - DNA, 30 bp, Artificial Sequence
  Synthetic oligonucleotide
accgggctgcattcgtgtggggctgaattc

SEQ ID NO: 203155 - DNA, 30 bp, Artificial Sequence
  Synthetic oligonucleotide
tgagtcacgaagtactgggctcgtgaattc

SEQ ID NO: 203156 - DNA, 30 bp, Artificial Sequence
  Synthetic oligonucleotide
ggggctggagtagctctgggcggtgaattc

SEQ ID NO: 203157 - DNA, 30 bp, Artificial Sequence
  Synthetic oligonucleotide
gagggaccgaagaacattatacgataattc

SEQ ID NO: 203158 - DNA, 30 bp, Artificial Sequence
  Synthetic oligonucleotide
cctatggtgtgaaacaaaatagtataattc

SEQ ID NO: 203159 - DNA, 30 bp, Artificial Sequence
  Synthetic oligonucleotide
gaaaaggaaaagactaaggtgttataattc

SEQ ID NO: 203160 - DNA, 30 bp, Artificial Sequence
  Synthetic oligonucleotide
ggaggatatctagatctacaggagtaattc

SEQ ID NO: 203161 - DNA, 30 bp, Artificial Sequence
  Synthetic oligonucleotide
cgttgctgtgtgagtccccgtgcttaattc

SEQ ID NO: 203162 - DNA, 30 bp, Artificial Sequence
  Synthetic oligonucleotide
gtcttcgtatgttcgaataagcgcacattc

SEQ ID NO: 203163 - DNA, 30 bp, Artificial Sequence
  Synthetic oligonucleotide
gtgcaatagtctgaggacattgggacattc

SEQ ID NO: 203164 - DNA, 30 bp, Artificial Sequence
  Synthetic oligonucleotide
gccccctagtgttaaggtggacgaccattc

SEQ ID NO: 203165 - DNA, 30 bp, Artificial Sequence
  Synthetic oligonucleotide
aggtggctagcgttgtgaggatcatcattc

SEQ ID NO: 203166 - DNA, 30 bp, Artificial Sequence
  Synthetic oligonucleotide
tttggagcgtacacgacgaatgactcattc

SEQ ID NO: 203167 - DNA, 30 bp, Artificial Sequence
  Synthetic oligonucleotide
catgcggccaaaagaccaccctattcattc

SEQ ID NO: 203168 - DNA, 30 bp, Artificial Sequence
  Synthetic oligonucleotide
gaaaaaaatgtgaacaggcggtagagattc

SEQ ID NO: 203169 - DNA, 30 bp, Artificial Sequence
  Synthetic oligonucleotide
tcgacgtgaacacgcaaatacatgagattc

SEQ ID NO: 203170 - DNA, 30 bp, Artificial Sequence
  Synthetic oligonucleotide
gttaggggctatgctcaagttgttagattc

SEQ ID NO: 203171 - DNA, 30 bp, Artificial Sequence
  Synthetic oligonucleotide
gcgcacgtgaacgtgttgcgataacgattc

SEQ ID NO: 203172 - DNA, 31 bp, Artificial Sequence
  Synthetic oligonucleotide
tagaatggggtagtaggggtagaaccgattc

SEQ ID NO: 203173 - DNA, 30 bp, Artificial Sequence
  Synthetic oligonucleotide
gtagaggtgacaaacgcgtgtgggcgattc

SEQ ID NO: 203174 - DNA, 30 bp, Artificial Sequence
  Synthetic oligonucleotide
tcgtagagacaagagaacttgactcgattc

SEQ ID NO: 203175 - DNA, 30 bp, Artificial Sequence
  Synthetic oligonucleotide
gtaaatcaagttaccaaataagtcggattc

SEQ ID NO: 203176 - DNA, 30 bp, Artificial Sequence
  Synthetic oligonucleotide
agggctgccaatataaatatcaagggattc

SEQ ID NO: 203177 - DNA, 30 bp, Artificial Sequence
  Synthetic oligonucleotide
tcaaatgaccagagaagctgagagggattc

SEQ ID NO: 203178 - DNA, 30 bp, Artificial Sequence
  Synthetic oligonucleotide
actgatataaagtacaatggccatggattc

SEQ ID NO: 203179 - DNA, 30 bp, Artificial Sequence
  Synthetic oligonucleotide
tgggctgagagtccagtattgattggattc

SEQ ID NO: 203180 - DNA, 30 bp, Artificial Sequence
  Synthetic oligonucleotide
tggtgtggctcactgtgccacgcatgattc

SEQ ID NO: 203181 - DNA, 30 bp, Artificial Sequence
  Synthetic oligonucleotide
atttgtaaccacccgactagaaactgattc

SEQ ID NO: 203182 - DNA, 30 bp, Artificial Sequence
  Synthetic oligonucleotide
catcatgtaaaaacgcggtgtcgctgattc

SEQ ID NO: 203183 - DNA, 30 bp, Artificial Sequence
  Synthetic oligonucleotide
tccctcagcactaaagccgtcgtctgattc

SEQ ID NO: 203184 - DNA, 30 bp, Artificial Sequence
  Synthetic oligonucleotide
atgatcgctgtggtacggcctgcgtgattc

SEQ ID NO: 203185 - DNA, 30 bp, Artificial Sequence
  Synthetic oligonucleotide
acgaaagccggggatacgcgccggtgattc

SEQ ID NO: 203186 - DNA, 30 bp, Artificial Sequence
  Synthetic oligonucleotide
ccgtataggtccgaattccatcgaatattc

SEQ ID NO: 203187 - DNA, 30 bp, Artificial Sequence
  Synthetic oligonucleotide
agacatttgatacggcgagcacgcatattc

SEQ ID NO: 203188 - DNA, 30 bp, Artificial Sequence
  Synthetic oligonucleotide
tctcgtcaagattggcttctaatcatattc

SEQ ID NO: 203189 - DNA, 30 bp, Artificial Sequence
  Synthetic oligonucleotide
ctggccttggcccaggagaagagtatattc

SEQ ID NO: 203190 - DNA, 30 bp, Artificial Sequence
  Synthetic oligonucleotide
actggccagacagaccctcgcttcctattc

SEQ ID NO: 203191 - DNA, 30 bp, Artificial Sequence
  Synthetic oligonucleotide
ggaacgggctgcatacggtataggctattc

SEQ ID NO: 203192 - DNA, 30 bp, Artificial Sequence
  Synthetic oligonucleotide
ggctcaaccgccatcgcatgaagtctattc

SEQ ID NO: 203193 - DNA, 30 bp, Artificial Sequence
  Synthetic oligonucleotide
gtacaattagatgactgccaacaagtattc

SEQ ID NO: 203194 - DNA, 30 bp, Artificial Sequence
  Synthetic oligonucleotide
gtcgaattgggtcatgtcaccccagtattc

SEQ ID NO: 203195 - DNA, 30 bp, Artificial Sequence
  Synthetic oligonucleotide
cgcttgacttcgtgcgcgtaaacgttattc

SEQ ID NO: 203196 - DNA, 30 bp, Artificial Sequence
  Synthetic oligonucleotide
actcccacagctctaacgggtataaacttc

SEQ ID NO: 203197 - DNA, 30 bp, Artificial Sequence
  Synthetic oligonucleotide
agtcacttcgctgaggaccaattaaacttc

SEQ ID NO: 203198 - DNA, 30 bp, Artificial Sequence
  Synthetic oligonucleotide
agttgagtggtaaaagggttgcgcaacttc

SEQ ID NO: 203199 - DNA, 30 bp, Artificial Sequence
  Synthetic oligonucleotide
ggtacgtcattagttatggcattcaacttc

SEQ ID NO: 203200 - DNA, 30 bp, Artificial Sequence
  Synthetic oligonucleotide
gcccattagtaagggatcacccatcacttc

SEQ ID NO: 203201 - DNA, 30 bp, Artificial Sequence
  Synthetic oligonucleotide
gggaagatcacaccatcaaaagctcacttc

SEQ ID NO: 203202 - DNA, 30 bp, Artificial Sequence
  Synthetic oligonucleotide
gtagagtggtactccagttgctttcacttc

SEQ ID NO: 203203 - DNA, 30 bp, Artificial Sequence
  Synthetic oligonucleotide
aattgtagtgaaccgtatcagcgcgacttc

SEQ ID NO: 203204 - DNA, 30 bp, Artificial Sequence
  Synthetic oligonucleotide
agaagatggcactgccaacccttcgacttc

SEQ ID NO: 203205 - DNA, 30 bp, Artificial Sequence
  Synthetic oligonucleotide
cgtaacttgacgcaagttcagtaggacttc

SEQ ID NO: 203206 - DNA, 30 bp, Artificial Sequence
  Synthetic oligonucleotide
aacgaccttgacctgattaagattgacttc

SEQ ID NO: 203207 - DNA, 30 bp, Artificial Sequence
  Synthetic oligonucleotide
gttaaagagcttactgacacgacctacttc

SEQ ID NO: 203208 - DNA, 30 bp, Artificial Sequence
  Synthetic oligonucleotide
ccactaaactcctgatcggccaagtacttc

SEQ ID NO: 203209 - DNA, 30 bp, Artificial Sequence
  Synthetic oligonucleotide
gtgagaactccagtggaatctgggtacttc

SEQ ID NO: 203210 - DNA, 30 bp, Artificial Sequence
  Synthetic oligonucleotide
gtgggtatgcgttacatcaagatgtacttc

SEQ ID NO: 203211 - DNA, 30 bp, Artificial Sequence
  Synthetic oligonucleotide
tagtgttacgccgtatgcctatccaccttc

SEQ ID NO: 203212 - DNA, 30 bp, Artificial Sequence
  Synthetic oligonucleotide
gcaaggtgactagaagggactttgaccttc

SEQ ID NO: 203213 - DNA, 30 bp, Artificial Sequence
  Synthetic oligonucleotide
tcaaaccaataagggactgtacgccccttc

SEQ ID NO: 203214 - DNA, 30 bp, Artificial Sequence
  Synthetic oligonucleotide
tgggctcgtatccaaaagattgatgccttc

SEQ ID NO: 203215 - DNA, 30 bp, Artificial Sequence
  Synthetic oligonucleotide
caggcaaggggtcctgagtctgccagcttc

SEQ ID NO: 203216 - DNA, 30 bp, Artificial Sequence
  Synthetic oligonucleotide
cggtgacgcttggtgtctaaattgagcttc

SEQ ID NO: 203217 - DNA, 30 bp, Artificial Sequence
  Synthetic oligonucleotide
tcttggccgccggtcacgtgacatagcttc

SEQ ID NO: 203218 - DNA, 30 bp, Artificial Sequence
  Synthetic oligonucleotide
gagacttgccaaagtaatgcttaacgcttc

SEQ ID NO: 203219 - DNA, 31 bp, Artificial Sequence
  Synthetic oligonucleotide
aggggaatcgaactcatggggttaacgcttc

SEQ ID NO: 203220 - DNA, 30 bp, Artificial Sequence
  Synthetic oligonucleotide
ggtgcggcactaatagactcagggcgcttc

SEQ ID NO: 203221 - DNA, 30 bp, Artificial Sequence
  Synthetic oligonucleotide
cggtgaggcgaagaatgctttctgcgcttc

SEQ ID NO: 203222 - DNA, 30 bp, Artificial Sequence
  Synthetic oligonucleotide
ccccgagcccgcaacaatctcaaaggcttc

SEQ ID NO: 203223 - DNA, 30 bp, Artificial Sequence
  Synthetic oligonucleotide
aaccatcatagactggtaattcgcggcttc

SEQ ID NO: 203224 - DNA, 30 bp, Artificial Sequence
  Synthetic oligonucleotide
ggagttcacgttgatcgttagaagggcttc

SEQ ID NO: 203225 - DNA, 30 bp, Artificial Sequence
  Synthetic oligonucleotide
gatgcaaccgaaaagatgagactgggcttc

SEQ ID NO: 203226 - DNA, 30 bp, Artificial Sequence
  Synthetic oligonucleotide
cagtgtgatcgaccatgtgatctatgcttc

SEQ ID NO: 203227 - DNA, 30 bp, Artificial Sequence
  Synthetic oligonucleotide
gcggtcaagcaggggcacacacgctgcttc

SEQ ID NO: 203228 - DNA, 30 bp, Artificial Sequence
  Synthetic oligonucleotide
gcactaaaaacgtggtatgtgtagatcttc

SEQ ID NO: 203229 - DNA, 30 bp, Artificial Sequence
  Synthetic oligonucleotide
gactgcggtaatccaggattgcgtatcttc

SEQ ID NO: 203230 - DNA, 30 bp, Artificial Sequence
  Synthetic oligonucleotide
acaaatggctgatccgtgtgctttatcttc

SEQ ID NO: 203231 - DNA, 30 bp, Artificial Sequence
  Synthetic oligonucleotide
aggggggaactacgcagtgtcttgctcttc

SEQ ID NO: 203232 - DNA, 30 bp, Artificial Sequence
  Synthetic oligonucleotide
acaccgaccccaccctagaaacccgtcttc

SEQ ID NO: 203233 - DNA, 30 bp, Artificial Sequence
  Synthetic oligonucleotide
ctcggggacgagacttggggggcattcttc

SEQ ID NO: 203234 - DNA, 30 bp, Artificial Sequence
  Synthetic oligonucleotide
gcatcagtttgtcgtatagagcatttcttc

SEQ ID NO: 203235 - DNA, 30 bp, Artificial Sequence
  Synthetic oligonucleotide
tgaggagctatacaagattagcatttcttc

SEQ ID NO: 203236 - DNA, 30 bp, Artificial Sequence
  Synthetic oligonucleotide
tagtcgaaagcgcccattggtctaaagttc

SEQ ID NO: 203237 - DNA, 30 bp, Artificial Sequence
  Synthetic oligonucleotide
cgtgcgtaccgcgtaagggtacagaagttc

SEQ ID NO: 203238 - DNA, 30 bp, Artificial Sequence
  Synthetic oligonucleotide
tagatagacatgtgcttgggagttaagttc

SEQ ID NO: 203239 - DNA, 30 bp, Artificial Sequence
  Synthetic oligonucleotide
tgagactgcgagattgcctcaccccagttc

SEQ ID NO: 203240 - DNA, 30 bp, Artificial Sequence
  Synthetic oligonucleotide
aagatccgataccgagagcaattccagttc

SEQ ID NO: 203241 - DNA, 30 bp, Artificial Sequence
  Synthetic oligonucleotide
gtgagtgctgattgtggaaggaatcagttc

SEQ ID NO: 203242 - DNA, 30 bp, Artificial Sequence
  Synthetic oligonucleotide
ggcactgacaaccggggccaactagagttc

SEQ ID NO: 203243 - DNA, 30 bp, Artificial Sequence
  Synthetic oligonucleotide
tttagagtggttccgtaattgatcgagttc

SEQ ID NO: 203244 - DNA, 30 bp, Artificial Sequence
  Synthetic oligonucleotide
tggctctatcttaggttcacgggggagttc

SEQ ID NO: 203245 - DNA, 31 bp, Artificial Sequence
  Synthetic oligonucleotide
ggtgtcacaaagtaatttcttgaaatagttc

SEQ ID NO: 203246 - DNA, 30 bp, Artificial Sequence
  Synthetic oligonucleotide
gaaggcgattgagttgcatcaccatagttc

SEQ ID NO: 203247 - DNA, 30 bp, Artificial Sequence
  Synthetic oligonucleotide
gtaagcggtccgaacacgggctcatagttc

SEQ ID NO: 203248 - DNA, 30 bp, Artificial Sequence
  Synthetic oligonucleotide
gccaggtaaccgaatactgagggttagttc

SEQ ID NO: 203249 - DNA, 30 bp, Artificial Sequence
  Synthetic oligonucleotide
agtgccacactaggtcccgccggaacgttc

SEQ ID NO: 203250 - DNA, 30 bp, Artificial Sequence
  Synthetic oligonucleotide
tggagcacaccgctcagcgaatacacgttc

SEQ ID NO: 203251 - DNA, 30 bp, Artificial Sequence
  Synthetic oligonucleotide
tgcttgtcggataagtagggtgatacgttc

SEQ ID NO: 203252 - DNA, 30 bp, Artificial Sequence
  Synthetic oligonucleotide
ctacgaggatctttgacacctactacgttc

SEQ ID NO: 203253 - DNA, 30 bp, Artificial Sequence
  Synthetic oligonucleotide
gacattcgtgcgcccagacagccaccgttc

SEQ ID NO: 203254 - DNA, 30 bp, Artificial Sequence
  Synthetic oligonucleotide
aaacacgtaagtgagctaaagggcccgttc

SEQ ID NO: 203255 - DNA, 30 bp, Artificial Sequence
  Synthetic oligonucleotide
tgggacctcgagcacgtccgaaggccgttc

SEQ ID NO: 203256 - DNA, 30 bp, Artificial Sequence
  Synthetic oligonucleotide
cttgatatatgctccgatgctaggccgttc

SEQ ID NO: 203257 - DNA, 30 bp, Artificial Sequence
  Synthetic oligonucleotide
taaaccttcttccaccgttgaagcgcgttc

SEQ ID NO: 203258 - DNA, 30 bp, Artificial Sequence
  Synthetic oligonucleotide
gttagcgagaatctaagagactaatcgttc

SEQ ID NO: 203259 - DNA, 30 bp, Artificial Sequence
  Synthetic oligonucleotide
ggaaagttatattaacactcatattcgttc

SEQ ID NO: 203260 - DNA, 30 bp, Artificial Sequence
  Synthetic oligonucleotide
gatcgtcggtaatcacgcctgccaaggttc

SEQ ID NO: 203261 - DNA, 30 bp, Artificial Sequence
  Synthetic oligonucleotide
tactaaggcagccatgtggaggtcaggttc

SEQ ID NO: 203262 - DNA, 30 bp, Artificial Sequence
  Synthetic oligonucleotide
tttacggtgagtagagaaaagttcaggttc

SEQ ID NO: 203263 - DNA, 30 bp, Artificial Sequence
  Synthetic oligonucleotide
gctagtgcgtcgaacgcgagcgagaggttc

SEQ ID NO: 203264 - DNA, 30 bp, Artificial Sequence
  Synthetic oligonucleotide
agtgggatttttcgaatttaataacggttc

SEQ ID NO: 203265 - DNA, 30 bp, Artificial Sequence
  Synthetic oligonucleotide
tacctgtgggtaaaaagttaacatcggttc

SEQ ID NO: 203266 - DNA, 30 bp, Artificial Sequence
  Synthetic oligonucleotide
ttcacttggcgctttatgaaagttcggttc

SEQ ID NO: 203267 - DNA, 30 bp, Artificial Sequence
  Synthetic oligonucleotide
taactatatagattgaacagaaaagggttc

SEQ ID NO: 203268 - DNA, 30 bp, Artificial Sequence
  Synthetic oligonucleotide
agactgatgctcattgagtggaaagggttc

SEQ ID NO: 203269 - DNA, 30 bp, Artificial Sequence
  Synthetic oligonucleotide
gcataggcttccgacttgcatcaagggttc

SEQ ID NO: 203270 - DNA, 30 bp, Artificial Sequence
  Synthetic oligonucleotide
gatgtgcaagtgtcttagtactgcgggttc

SEQ ID NO: 203271 - DNA, 30 bp, Artificial Sequence
  Synthetic oligonucleotide
ggtgggaggtgtggcggagtatgtgggttc

SEQ ID NO: 203272 - DNA, 30 bp, Artificial Sequence
  Synthetic oligonucleotide
gaggacataaagacccacaataaatggttc

SEQ ID NO: 203273 - DNA, 30 bp, Artificial Sequence
  Synthetic oligonucleotide
cactctaaggagagaatgggacgctggttc

SEQ ID NO: 203274 - DNA, 30 bp, Artificial Sequence
  Synthetic oligonucleotide
agatcaatcattttggccagtgggtggttc

SEQ ID NO: 203275 - DNA, 30 bp, Artificial Sequence
  Synthetic oligonucleotide
tggttttgcgaatatagtaagtggtggttc

SEQ ID NO: 203276 - DNA, 30 bp, Artificial Sequence
  Synthetic oligonucleotide
gtggtgatgccctacacatgtttgtggttc

SEQ ID NO: 203277 - DNA, 30 bp, Artificial Sequence
  Synthetic oligonucleotide
gcaagtgttacgtctacgctggattggttc

SEQ ID NO: 203278 - DNA, 30 bp, Artificial Sequence
  Synthetic oligonucleotide
tgaaattcaacctccttttacacaatgttc

SEQ ID NO: 203279 - DNA, 30 bp, Artificial Sequence
  Synthetic oligonucleotide
aaatcgtctgaggcggacatcgccatgttc

SEQ ID NO: 203280 - DNA, 30 bp, Artificial Sequence
  Synthetic oligonucleotide
gaacgataagctttcactccatccatgttc

SEQ ID NO: 203281 - DNA, 30 bp, Artificial Sequence
  Synthetic oligonucleotide
ccgggtcctgaaaaggagacaatgatgttc

SEQ ID NO: 203282 - DNA, 30 bp, Artificial Sequence
  Synthetic oligonucleotide
cgaattgccgtgggggcgttggctatgttc

SEQ ID NO: 203283 - DNA, 30 bp, Artificial Sequence
  Synthetic oligonucleotide
ggcaaaaactgaactttggaaatactgttc

SEQ ID NO: 203284 - DNA, 30 bp, Artificial Sequence
  Synthetic oligonucleotide
taagacgggccgcgaggtagcaccctgttc

SEQ ID NO: 203285 - DNA, 30 bp, Artificial Sequence
  Synthetic oligonucleotide
ctcggtgcccatgttagaaacaagctgttc

SEQ ID NO: 203286 - DNA, 30 bp, Artificial Sequence
  Synthetic oligonucleotide
gacaccaggcgtgtaggtcattctgtgttc

SEQ ID NO: 203287 - DNA, 30 bp, Artificial Sequence
  Synthetic oligonucleotide
tcggcccgataattcgcttctagtgtgttc

SEQ ID NO: 203288 - DNA, 30 bp, Artificial Sequence
  Synthetic oligonucleotide
ccaccagtataagcagttgttagtgtgttc

SEQ ID NO: 203289 - DNA, 30 bp, Artificial Sequence
  Synthetic oligonucleotide
gggaaactctcccacgacgtgcccttgttc

SEQ ID NO: 203290 - DNA, 30 bp, Artificial Sequence
  Synthetic oligonucleotide
ccatgagtaggccccctaatctggttgttc

SEQ ID NO: 203291 - DNA, 30 bp, Artificial Sequence
  Synthetic oligonucleotide
tagcggcagtatcgtactcattttttgttc

SEQ ID NO: 203292 - DNA, 30 bp, Artificial Sequence
  Synthetic oligonucleotide
agaatgttgataacgatgaatgtcaatttc

SEQ ID NO: 203293 - DNA, 30 bp, Artificial Sequence
  Synthetic oligonucleotide
ctttcgtaggccgggccgactaataatttc

SEQ ID NO: 203294 - DNA, 30 bp, Artificial Sequence
  Synthetic oligonucleotide
ctttcagttcaaagaacttaatcacatttc

SEQ ID NO: 203295 - DNA, 30 bp, Artificial Sequence
  Synthetic oligonucleotide
tgaagctcaaacctatgacaggcagatttc

SEQ ID NO: 203296 - DNA, 30 bp, Artificial Sequence
  Synthetic oligonucleotide
tagatgtaggcctcgtaatctggggatttc

SEQ ID NO: 203297 - DNA, 30 bp, Artificial Sequence
  Synthetic oligonucleotide
agcgctagtttcaagcataatatggatttc

SEQ ID NO: 203298 - DNA, 30 bp, Artificial Sequence
  Synthetic oligonucleotide
cggtttatcgtaacttgatacagtgatttc

SEQ ID NO: 203299 - DNA, 30 bp, Artificial Sequence
  Synthetic oligonucleotide
cgtatagttgccgaaacattatagtatttc

SEQ ID NO: 203300 - DNA, 30 bp, Artificial Sequence
  Synthetic oligonucleotide
atcgatgcccgaacgcgcgacgcgtatttc

SEQ ID NO: 203301 - DNA, 30 bp, Artificial Sequence
  Synthetic oligonucleotide
cattcatcatctcggtgttgcttgtatttc

SEQ ID NO: 203302 - DNA, 30 bp, Artificial Sequence
  Synthetic oligonucleotide
ccgggtttagcgttagttacgatgactttc

SEQ ID NO: 203303 - DNA, 30 bp, Artificial Sequence
  Synthetic oligonucleotide
tcgagattaccctccttgggtactactttc

SEQ ID NO: 203304 - DNA, 30 bp, Artificial Sequence
  Synthetic oligonucleotide
gcgtcaactctagatggccgtattactttc

SEQ ID NO: 203305 - DNA, 30 bp, Artificial Sequence
  Synthetic oligonucleotide
gaaagagcaaggtatcgtcggactcctttc

SEQ ID NO: 203306 - DNA, 30 bp, Artificial Sequence
  Synthetic oligonucleotide
tattgccctaaaatctaccgtgctcctttc

SEQ ID NO: 203307 - DNA, 30 bp, Artificial Sequence
  Synthetic oligonucleotide
atacagcgagcgtgtattacgagtcctttc

SEQ ID NO: 203308 - DNA, 30 bp, Artificial Sequence
  Synthetic oligonucleotide
tttctgggacgtaaggttgcaatcgctttc

SEQ ID NO: 203309 - DNA, 30 bp, Artificial Sequence
  Synthetic oligonucleotide
gaatgcctaggtgacgaagtaagggctttc

SEQ ID NO: 203310 - DNA, 30 bp, Artificial Sequence
  Synthetic oligonucleotide
gcatctaaagggatacgtgagtgtgctttc

SEQ ID NO: 203311 - DNA, 30 bp, Artificial Sequence
  Synthetic oligonucleotide
tcaagggagaatcgcgaatatgaatctttc

SEQ ID NO: 203312 - DNA, 30 bp, Artificial Sequence
  Synthetic oligonucleotide
gacagaacaggttaataccgaacttctttc

SEQ ID NO: 203313 - DNA, 30 bp, Artificial Sequence
  Synthetic oligonucleotide
tctaaaagtactgaggggattgtaagtttc

SEQ ID NO: 203314 - DNA, 30 bp, Artificial Sequence
  Synthetic oligonucleotide
atgggatggtacgtaccaacgggcagtttc

SEQ ID NO: 203315 - DNA, 30 bp, Artificial Sequence
  Synthetic oligonucleotide
ataggtcttgagcatgacaaattcagtttc

SEQ ID NO: 203316 - DNA, 30 bp, Artificial Sequence
  Synthetic oligonucleotide
cgccgttctaacattgactaattcagtttc

SEQ ID NO: 203317 - DNA, 30 bp, Artificial Sequence
  Synthetic oligonucleotide
acggttcattcccagatgaggaatagtttc

SEQ ID NO: 203318 - DNA, 30 bp, Artificial Sequence
  Synthetic oligonucleotide
tgcctatgcatggtatctcaagagcgtttc

SEQ ID NO: 203319 - DNA, 30 bp, Artificial Sequence
  Synthetic oligonucleotide
cagaatggatactggcgcctggttcgtttc

SEQ ID NO: 203320 - DNA, 30 bp, Artificial Sequence
  Synthetic oligonucleotide
atgcgtgcatagggttgattcaacggtttc

SEQ ID NO: 203321 - DNA, 30 bp, Artificial Sequence
  Synthetic oligonucleotide
accaagaaggccccgaacagtaccggtttc

SEQ ID NO: 203322 - DNA, 30 bp, Artificial Sequence
  Synthetic oligonucleotide
actccaaacatccacacaggacatggtttc

SEQ ID NO: 203323 - DNA, 30 bp, Artificial Sequence
  Synthetic oligonucleotide
ggcccggaagtgctgactgttaaatgtttc

SEQ ID NO: 203324 - DNA, 30 bp, Artificial Sequence
  Synthetic oligonucleotide
ggctctcgggtacacattagtcaatgtttc

SEQ ID NO: 203325 - DNA, 30 bp, Artificial Sequence
  Synthetic oligonucleotide
ggacactaactggcaggccacagatgtttc

SEQ ID NO: 203326 - DNA, 30 bp, Artificial Sequence
  Synthetic oligonucleotide
tagaaagttccaagggatattcattgtttc

SEQ ID NO: 203327 - DNA, 30 bp, Artificial Sequence
  Synthetic oligonucleotide
ctgtggtcctcggactactaatcaattttc

SEQ ID NO: 203328 - DNA, 30 bp, Artificial Sequence
  Synthetic oligonucleotide
gtcggataaaggataaccgagccgattttc

SEQ ID NO: 203329 - DNA, 30 bp, Artificial Sequence
  Synthetic oligonucleotide
tacaacagtggggggcgatacgctattttc

SEQ ID NO: 203330 - DNA, 30 bp, Artificial Sequence
  Synthetic oligonucleotide
tgttgcaacttcctcccaacaggggttttc

SEQ ID NO: 203331 - DNA, 30 bp, Artificial Sequence
  Synthetic oligonucleotide
cttcgttagggaacacctagggaatttttc

SEQ ID NO: 203332 - DNA, 30 bp, Artificial Sequence
  Synthetic oligonucleotide
tcttccttttgtgttttcctcccatttttc

SEQ ID NO: 203333 - DNA, 30 bp, Artificial Sequence
  Synthetic oligonucleotide
tggaagaaacccgcgtgtagttgctttttc

SEQ ID NO: 203334 - DNA, 30 bp, Artificial Sequence
  Synthetic oligonucleotide
gaggaaataagaggcctatgaaggtttttc

SEQ ID NO: 203335 - DNA, 30 bp, Artificial Sequence
  Synthetic oligonucleotide
gcatcgttcagttatgggaggagcaaaaag

SEQ ID NO: 203336 - DNA, 30 bp, Artificial Sequence
  Synthetic oligonucleotide
gataagggatgtcatgcatagcgcaaaaag

SEQ ID NO: 203337 - DNA, 30 bp, Artificial Sequence
  Synthetic oligonucleotide
ccttttaaaactggggatcgcttcaaaaag

SEQ ID NO: 203338 - DNA, 30 bp, Artificial Sequence
  Synthetic oligonucleotide
atcattataggaacacccgttgtgaaaaag

SEQ ID NO: 203339 - DNA, 30 bp, Artificial Sequence
  Synthetic oligonucleotide
tatgctcatgatgctcggtaacgtaaaaag

SEQ ID NO: 203340 - DNA, 30 bp, Artificial Sequence
  Synthetic oligonucleotide
gcacgcgagggcccctgctgtagacaaaag

SEQ ID NO: 203341 - DNA, 30 bp, Artificial Sequence
  Synthetic oligonucleotide
agaatatatagtaaattgacctgacaaaag

SEQ ID NO: 203342 - DNA, 30 bp, Artificial Sequence
  Synthetic oligonucleotide
atccgactcgggacaaatggcttccaaaag

SEQ ID NO: 203343 - DNA, 30 bp, Artificial Sequence
  Synthetic oligonucleotide
cttggaaattttggcaactactatcaaaag

SEQ ID NO: 203344 - DNA, 30 bp, Artificial Sequence
  Synthetic oligonucleotide
ttcctagcttcagcccgcatctctcaaaag

SEQ ID NO: 203345 - DNA, 30 bp, Artificial Sequence
  Synthetic oligonucleotide
ctagtgcgattgcaacctataacagaaaag

SEQ ID NO: 203346 - DNA, 30 bp, Artificial Sequence
  Synthetic oligonucleotide
accggggatattgttcgctacaacgaaaag

SEQ ID NO: 203347 - DNA, 30 bp, Artificial Sequence
  Synthetic oligonucleotide
tctgatttgtcacgggcgtaggaggaaaag

SEQ ID NO: 203348 - DNA, 30 bp, Artificial Sequence
  Synthetic oligonucleotide
caaaaagacgggtcttgattggaggaaaag

SEQ ID NO: 203349 - DNA, 30 bp, Artificial Sequence
  Synthetic oligonucleotide
cagacgtcagcgtaataagggggggaaaag

SEQ ID NO: 203350 - DNA, 30 bp, Artificial Sequence
  Synthetic oligonucleotide
cagtaaattatgaagcttcggaatgaaaag

SEQ ID NO: 203351 - DNA, 30 bp, Artificial Sequence
  Synthetic oligonucleotide
aaccacggttcttcgcacctacttgaaaag

SEQ ID NO: 203352 - DNA, 30 bp, Artificial Sequence
  Synthetic oligonucleotide
ctagcagactcgaatagttaatgataaaag

SEQ ID NO: 203353 - DNA, 30 bp, Artificial Sequence
  Synthetic oligonucleotide
tctggcgggtaagatagtttaatctaaaag

SEQ ID NO: 203354 - DNA, 30 bp, Artificial Sequence
  Synthetic oligonucleotide
gcggtttcattagaccatgagaagtaaaag

SEQ ID NO: 203355 - DNA, 30 bp, Artificial Sequence
  Synthetic oligonucleotide
gaagcacgcctttgcctaaccacgtaaaag

SEQ ID NO: 203356 - DNA, 30 bp, Artificial Sequence
  Synthetic oligonucleotide
gcccctcatataaaggataatggttaaaag

SEQ ID NO: 203357 - DNA, 30 bp, Artificial Sequence
  Synthetic oligonucleotide
atgttccagggtggtgtttgatcaacaaag

SEQ ID NO: 203358 - DNA, 30 bp, Artificial Sequence
  Synthetic oligonucleotide
gaaagcgggggctcttaaggaaccacaaag

SEQ ID NO: 203359 - DNA, 30 bp, Artificial Sequence
  Synthetic oligonucleotide
agtatatgcgcgcgccttctaaccacaaag

SEQ ID NO: 203360 - DNA, 30 bp, Artificial Sequence
  Synthetic oligonucleotide
gacaagtaaggaccgtaggtctccacaaag

SEQ ID NO: 203361 - DNA, 30 bp, Artificial Sequence
  Synthetic oligonucleotide
gaaacaagccttacacagagcctcacaaag

SEQ ID NO: 203362 - DNA, 30 bp, Artificial Sequence
  Synthetic oligonucleotide
cccaaatgttatcgcttctgtacaccaaag

SEQ ID NO: 203363 - DNA, 30 bp, Artificial Sequence
  Synthetic oligonucleotide
ttattgtgctaagtgcgaattagcccaaag

SEQ ID NO: 203364 - DNA, 30 bp, Artificial Sequence
  Synthetic oligonucleotide
gagccaaggcagagctagccttttccaaag

SEQ ID NO: 203365 - DNA, 30 bp, Artificial Sequence
  Synthetic oligonucleotide
tcgtgatgacgcgaaatgttgacagcaaag

SEQ ID NO: 203366 - DNA, 29 bp, Artificial Sequence
  Synthetic oligonucleotide
aatcgtaaagagactcgtctctagcaaag

SEQ ID NO: 203367 - DNA, 30 bp, Artificial Sequence
  Synthetic oligonucleotide
accctcgggaaaccagcccgatgcgcaaag

SEQ ID NO: 203368 - DNA, 30 bp, Artificial Sequence
  Synthetic oligonucleotide
gtacgatactgatttacagaccgtgcaaag

SEQ ID NO: 203369 - DNA, 30 bp, Artificial Sequence
  Synthetic oligonucleotide
atagccgtgaggtaacttaggacatcaaag

SEQ ID NO: 203370 - DNA, 30 bp, Artificial Sequence
  Synthetic oligonucleotide
gggttgatatttgcggcgtgtgactcaaag

SEQ ID NO: 203371 - DNA, 30 bp, Artificial Sequence
  Synthetic oligonucleotide
ccagccaaaaagtggatacccccttcaaag

SEQ ID NO: 203372 - DNA, 30 bp, Artificial Sequence
  Synthetic oligonucleotide
taagatggtcgttcgaatacagtttcaaag

SEQ ID NO: 203373 - DNA, 30 bp, Artificial Sequence
  Synthetic oligonucleotide
atgagccaaaattaccggagcttaagaaag

SEQ ID NO: 203374 - DNA, 30 bp, Artificial Sequence
  Synthetic oligonucleotide
gtggcagttaagagggctacttctagaaag

SEQ ID NO: 203375 - DNA, 30 bp, Artificial Sequence
  Synthetic oligonucleotide
gccacactatctgaccttaaaatccgaaag

SEQ ID NO: 203376 - DNA, 30 bp, Artificial Sequence
  Synthetic oligonucleotide
tctgaacgctgggtgcgatattagcgaaag

SEQ ID NO: 203377 - DNA, 30 bp, Artificial Sequence
  Synthetic oligonucleotide
gaatcaaggttacggcggtctgcgcgaaag

SEQ ID NO: 203378 - DNA, 30 bp, Artificial Sequence
  Synthetic oligonucleotide
agccggccagtttaaataaaaaggcgaaag

SEQ ID NO: 203379 - DNA, 30 bp, Artificial Sequence
  Synthetic oligonucleotide
aatagtcttgtgtaagcaggacggcgaaag

SEQ ID NO: 203380 - DNA, 30 bp, Artificial Sequence
  Synthetic oligonucleotide
tgatgaccaattcgggcgcgcgcaggaaag

SEQ ID NO: 203381 - DNA, 30 bp, Artificial Sequence
  Synthetic oligonucleotide
acactcacgcgtgagaacgttggaggaaag

SEQ ID NO: 203382 - DNA, 30 bp, Artificial Sequence
  Synthetic oligonucleotide
taacaagaaacactggacttgcacggaaag

SEQ ID NO: 203383 - DNA, 30 bp, Artificial Sequence
  Synthetic oligonucleotide
gggataaaggtcagctattgacagggaaag

SEQ ID NO: 203384 - DNA, 30 bp, Artificial Sequence
  Synthetic oligonucleotide
gcgattttaattactgaattagggggaaag

SEQ ID NO: 203385 - DNA, 30 bp, Artificial Sequence
  Synthetic oligonucleotide
ctcagtaattccaagtacattgtgggaaag

SEQ ID NO: 203386 - DNA, 30 bp, Artificial Sequence
  Synthetic oligonucleotide
gtcaaaacacattgcgagcacatatgaaag

SEQ ID NO: 203387 - DNA, 30 bp, Artificial Sequence
  Synthetic oligonucleotide
agtccctcctccaacagagccatgtgaaag

SEQ ID NO: 203388 - DNA, 30 bp, Artificial Sequence
  Synthetic oligonucleotide
tggggccagaagggattttctgattgaaag

SEQ ID NO: 203389 - DNA, 30 bp, Artificial Sequence
  Synthetic oligonucleotide
aaaagagatatggtatccagagcttgaaag

SEQ ID NO: 203390 - DNA, 31 bp, Artificial Sequence
  Synthetic oligonucleotide
aatgtaccggtgtcgcgaggcggaaataaag

SEQ ID NO: 203391 - DNA, 30 bp, Artificial Sequence
  Synthetic oligonucleotide
tttgataataatggcacctggcgaataaag

SEQ ID NO: 203392 - DNA, 30 bp, Artificial Sequence
  Synthetic oligonucleotide
ggccgattcgaacgcgaaagtctaataaag

SEQ ID NO: 203393 - DNA, 30 bp, Artificial Sequence
  Synthetic oligonucleotide
gctcccccgacggaataatcccgcataaag

SEQ ID NO: 203394 - DNA, 30 bp, Artificial Sequence
  Synthetic oligonucleotide
ttacatgttgctacaaaacatggcataaag

SEQ ID NO: 203395 - DNA, 30 bp, Artificial Sequence
  Synthetic oligonucleotide
tacctcgacttcggaggaagtgtgataaag

SEQ ID NO: 203396 - DNA, 30 bp, Artificial Sequence
  Synthetic oligonucleotide
gcatggttagttttttgcgacttgataaag

SEQ ID NO: 203397 - DNA, 30 bp, Artificial Sequence
  Synthetic oligonucleotide
gccttaagagacgcctcaggccgtataaag

SEQ ID NO: 203398 - DNA, 30 bp, Artificial Sequence
  Synthetic oligonucleotide
tctaaaaacacactatcatccatactaaag

SEQ ID NO: 203399 - DNA, 30 bp, Artificial Sequence
  Synthetic oligonucleotide
cgcgttccgctctgttcaaaccccctaaag

SEQ ID NO: 203400 - DNA, 30 bp, Artificial Sequence
  Synthetic oligonucleotide
gatctggatgcctgctgtttgagcctaaag

SEQ ID NO: 203401 - DNA, 31 bp, Artificial Sequence
  Synthetic oligonucleotide
ctcggagtagaagagatcgtggatcctaaag

SEQ ID NO: 203402 - DNA, 30 bp, Artificial Sequence
  Synthetic oligonucleotide
gtgaatttaacggctcgggatgtcctaaag

SEQ ID NO: 203403 - DNA, 30 bp, Artificial Sequence
  Synthetic oligonucleotide
gtctaatctacagacttagctcctctaaag

SEQ ID NO: 203404 - DNA, 30 bp, Artificial Sequence
  Synthetic oligonucleotide
atacggtcatgttagccaaaaggtctaaag

SEQ ID NO: 203405 - DNA, 30 bp, Artificial Sequence
  Synthetic oligonucleotide
taccgcttcggtattcattcaacagtaaag

SEQ ID NO: 203406 - DNA, 30 bp, Artificial Sequence
  Synthetic oligonucleotide
gttaaatagggatacttgttctaggtaaag

SEQ ID NO: 203407 - DNA, 30 bp, Artificial Sequence
  Synthetic oligonucleotide
gatttcattcactcgggtctggctgtaaag

SEQ ID NO: 203408 - DNA, 30 bp, Artificial Sequence
  Synthetic oligonucleotide
ccgatcgtctcggcagagtgaattgtaaag

SEQ ID NO: 203409 - DNA, 30 bp, Artificial Sequence
  Synthetic oligonucleotide
ttggaactcaactactgaaacgccttaaag

SEQ ID NO: 203410 - DNA, 30 bp, Artificial Sequence
  Synthetic oligonucleotide
aaggcaaacgattcgtacacgtgcttaaag

SEQ ID NO: 203411 - DNA, 30 bp, Artificial Sequence
  Synthetic oligonucleotide
gcacggtaggacttagtgggattcttaaag

SEQ ID NO: 203412 - DNA, 30 bp, Artificial Sequence
  Synthetic oligonucleotide
cagcggttgaggtgttgatggccgttaaag

SEQ ID NO: 203413 - DNA, 30 bp, Artificial Sequence
  Synthetic oligonucleotide
agcggtcctaactgtcaaaggagtttaaag

SEQ ID NO: 203414 - DNA, 30 bp, Artificial Sequence
  Synthetic oligonucleotide
acttggtttgacagtgccatttcaaacaag

SEQ ID NO: 203415 - DNA, 30 bp, Artificial Sequence
  Synthetic oligonucleotide
accttagtgccgagtgatggcggaaacaag

SEQ ID NO: 203416 - DNA, 30 bp, Artificial Sequence
  Synthetic oligonucleotide
tcagtccccgcgtatttagaggtaaacaag

SEQ ID NO: 203417 - DNA, 30 bp, Artificial Sequence
  Synthetic oligonucleotide
atatggctactggaacaggcggacaacaag

SEQ ID NO: 203418 - DNA, 30 bp, Artificial Sequence
  Synthetic oligonucleotide
gaagctcgaatcttgtccagccaacacaag

SEQ ID NO: 203419 - DNA, 30 bp, Artificial Sequence
  Synthetic oligonucleotide
tgaaagctgtaaagcgtagtagaccacaag

SEQ ID NO: 203420 - DNA, 30 bp, Artificial Sequence
  Synthetic oligonucleotide
gaacctaaatagagggggctatgccacaag

SEQ ID NO: 203421 - DNA, 30 bp, Artificial Sequence
  Synthetic oligonucleotide
tagcagttagtttgcatggctaagcacaag

SEQ ID NO: 203422 - DNA, 30 bp, Artificial Sequence
  Synthetic oligonucleotide
cgcttgttgtgtgaggcattgttgcacaag

SEQ ID NO: 203423 - DNA, 30 bp, Artificial Sequence
  Synthetic oligonucleotide
gtttaccttcggcctgggacttatcacaag

SEQ ID NO: 203424 - DNA, 30 bp, Artificial Sequence
  Synthetic oligonucleotide
gcggtccctagtcgacatctgcgtcacaag

SEQ ID NO: 203425 - DNA, 30 bp, Artificial Sequence
  Synthetic oligonucleotide
ctggcaggcggaccgctcaaggcagacaag

SEQ ID NO: 203426 - DNA, 30 bp, Artificial Sequence
  Synthetic oligonucleotide
aactacgttagtaaaagcctaccggacaag

SEQ ID NO: 203427 - DNA, 30 bp, Artificial Sequence
  Synthetic oligonucleotide
ttagttattaggtggtacaagcatgacaag

SEQ ID NO: 203428 - DNA, 30 bp, Artificial Sequence
  Synthetic oligonucleotide
agccccccccgcggtgaaatgattgacaag

SEQ ID NO: 203429 - DNA, 30 bp, Artificial Sequence
  Synthetic oligonucleotide
tcgaaagcttatatttcgattagatacaag

SEQ ID NO: 203430 - DNA, 30 bp, Artificial Sequence
  Synthetic oligonucleotide
aactattatgcatatcacggatgctacaag

SEQ ID NO: 203431 - DNA, 30 bp, Artificial Sequence
  Synthetic oligonucleotide
gctttcgactgcgtcaacaggatctacaag

SEQ ID NO: 203432 - DNA, 30 bp, Artificial Sequence
  Synthetic oligonucleotide
gccagtattcaatgatctcataagtacaag

SEQ ID NO: 203433 - DNA, 30 bp, Artificial Sequence
  Synthetic oligonucleotide
atagattcagttctgtcatccccgtacaag

SEQ ID NO: 203434 - DNA, 30 bp, Artificial Sequence
  Synthetic oligonucleotide
ggcgaggatgggaccaacaggcggtacaag

SEQ ID NO: 203435 - DNA, 30 bp, Artificial Sequence
  Synthetic oligonucleotide
cagtgcagcgtgcgtgatcttagaaccaag

SEQ ID NO: 203436 - DNA, 30 bp, Artificial Sequence
  Synthetic oligonucleotide
accctatgtaagtaccaagtgcgtaccaag

SEQ ID NO: 203437 - DNA, 30 bp, Artificial Sequence
  Synthetic oligonucleotide
agcttaagcacggcaatcccggcgcccaag

SEQ ID NO: 203438 - DNA, 30 bp, Artificial Sequence
  Synthetic oligonucleotide
tcggttaaaaagagcacttctgatcccaag

SEQ ID NO: 203439 - DNA, 30 bp, Artificial Sequence
  Synthetic oligonucleotide
tatacgaacacaggcatacggcccgccaag

SEQ ID NO: 203440 - DNA, 30 bp, Artificial Sequence
  Synthetic oligonucleotide
atatcccgtataatcgtcggatccgccaag

SEQ ID NO: 203441 - DNA, 30 bp, Artificial Sequence
  Synthetic oligonucleotide
tcatacgcgaatcgccggcactccgccaag

SEQ ID NO: 203442 - DNA, 30 bp, Artificial Sequence
  Synthetic oligonucleotide
atacaggtaataatgggcggtatggccaag

SEQ ID NO: 203443 - DNA, 30 bp, Artificial Sequence
  Synthetic oligonucleotide
acatttcttgattggggaccgtgtgccaag

SEQ ID NO: 203444 - DNA, 30 bp, Artificial Sequence
  Synthetic oligonucleotide
cccgtgagacctatacaaactggctccaag

SEQ ID NO: 203445 - DNA, 30 bp, Artificial Sequence
  Synthetic oligonucleotide
gcctactatgagcacacggttgcgtccaag

SEQ ID NO: 203446 - DNA, 30 bp, Artificial Sequence
  Synthetic oligonucleotide
gactattactgtgaaaagagcaggtccaag

SEQ ID NO: 203447 - DNA, 30 bp, Artificial Sequence
  Synthetic oligonucleotide
aacgatatgcaacacgggtcatgttccaag

SEQ ID NO: 203448 - DNA, 30 bp, Artificial Sequence
  Synthetic oligonucleotide
ggttattcgagtacgcaacccaaaagcaag

SEQ ID NO: 203449 - DNA, 30 bp, Artificial Sequence
  Synthetic oligonucleotide
tccaactgcgaagagataagcacaagcaag

SEQ ID NO: 203450 - DNA, 30 bp, Artificial Sequence
  Synthetic oligonucleotide
tcgcacatatccgcgagagtcacgagcaag

SEQ ID NO: 203451 - DNA, 30 bp, Artificial Sequence
  Synthetic oligonucleotide
cgcagtatactgtgcgtacgggggagcaag

SEQ ID NO: 203452 - DNA, 30 bp, Artificial Sequence
  Synthetic oligonucleotide
cggctgccctaacggcaggctaaccgcaag

SEQ ID NO: 203453 - DNA, 30 bp, Artificial Sequence
  Synthetic oligonucleotide
gtttacgatatgtcgtcaccgcaccgcaag

SEQ ID NO: 203454 - DNA, 30 bp, Artificial Sequence
  Synthetic oligonucleotide
ataccccccgtaagctgataaaatcgcaag

SEQ ID NO: 203455 - DNA, 30 bp, Artificial Sequence
  Synthetic oligonucleotide
ctggatatctagcacttacactgaggcaag

SEQ ID NO: 203456 - DNA, 30 bp, Artificial Sequence
  Synthetic oligonucleotide
cgcggcgtgcattagtggcaagtaggcaag

SEQ ID NO: 203457 - DNA, 30 bp, Artificial Sequence
  Synthetic oligonucleotide
caccacggacacatttagggagtaggcaag

SEQ ID NO: 203458 - DNA, 30 bp, Artificial Sequence
  Synthetic oligonucleotide
ttggtatgcaagtcggtcgcatacggcaag

SEQ ID NO: 203459 - DNA, 30 bp, Artificial Sequence
  Synthetic oligonucleotide
ttgcggccaataaagcgcgtcgagggcaag

SEQ ID NO: 203460 - DNA, 30 bp, Artificial Sequence
  Synthetic oligonucleotide
agccggacgaaggcgaaaccggagggcaag

SEQ ID NO: 203461 - DNA, 30 bp, Artificial Sequence
  Synthetic oligonucleotide
tgttgagcgacagataacggggctggcaag

SEQ ID NO: 203462 - DNA, 30 bp, Artificial Sequence
  Synthetic oligonucleotide
caatccactagtgaataccgacaatgcaag

SEQ ID NO: 203463 - DNA, 30 bp, Artificial Sequence
  Synthetic oligonucleotide
cactcgccttgagcaacgggattatgcaag

SEQ ID NO: 203464 - DNA, 30 bp, Artificial Sequence
  Synthetic oligonucleotide
atattccttcaaaactatagcggctgcaag

SEQ ID NO: 203465 - DNA, 29 bp, Artificial Sequence
  Synthetic oligonucleotide
gttctactaagaggtagggtggttgcaag

SEQ ID NO: 203466 - DNA, 30 bp, Artificial Sequence
  Synthetic oligonucleotide
ttgtgacataaagcacatctgaaaatcaag

SEQ ID NO: 203467 - DNA, 30 bp, Artificial Sequence
  Synthetic oligonucleotide
aatgccagccaaaggttctgggacatcaag

SEQ ID NO: 203468 - DNA, 30 bp, Artificial Sequence
  Synthetic oligonucleotide
gatgtggggactctcagaattacgatcaag

SEQ ID NO: 203469 - DNA, 30 bp, Artificial Sequence
  Synthetic oligonucleotide
gtgtaatcaagtgatcgaataccgatcaag

SEQ ID NO: 203470 - DNA, 30 bp, Artificial Sequence
  Synthetic oligonucleotide
ggtacgttcccaatagtgggacatatcaag

SEQ ID NO: 203471 - DNA, 30 bp, Artificial Sequence
  Synthetic oligonucleotide
caaagtctggactgcgctcgaaagctcaag

SEQ ID NO: 203472 - DNA, 30 bp, Artificial Sequence
  Synthetic oligonucleotide
ttagacgtgcatcccaattctcgtctcaag

SEQ ID NO: 203473 - DNA, 30 bp, Artificial Sequence
  Synthetic oligonucleotide
gcatggtgctttggatcataagttctcaag

SEQ ID NO: 203474 - DNA, 30 bp, Artificial Sequence
  Synthetic oligonucleotide
ttcagcccgtactcatttcgaacagtcaag

SEQ ID NO: 203475 - DNA, 30 bp, Artificial Sequence
  Synthetic oligonucleotide
tctcggctagggagcatgacacgcgtcaag

SEQ ID NO: 203476 - DNA, 30 bp, Artificial Sequence
  Synthetic oligonucleotide
cattatgatttgaaaagttttttcgtcaag

SEQ ID NO: 203477 - DNA, 30 bp, Artificial Sequence
  Synthetic oligonucleotide
gttgtacgagtcaccgcaaaaagggtcaag

SEQ ID NO: 203478 - DNA, 30 bp, Artificial Sequence
  Synthetic oligonucleotide
cgagatttcggtagagtggtctgggtcaag

SEQ ID NO: 203479 - DNA, 30 bp, Artificial Sequence
  Synthetic oligonucleotide
gactaacagcagcatccgtgctttgtcaag

SEQ ID NO: 203480 - DNA, 30 bp, Artificial Sequence
  Synthetic oligonucleotide
tcgcgtctatgacaccgatagtagttcaag

SEQ ID NO: 203481 - DNA, 30 bp, Artificial Sequence
  Synthetic oligonucleotide
gtgtacagtgtactaagttcgaggttcaag

SEQ ID NO: 203482 - DNA, 30 bp, Artificial Sequence
  Synthetic oligonucleotide
catacaatgacgcaaggaaattgtttcaag

SEQ ID NO: 203483 - DNA, 30 bp, Artificial Sequence
  Synthetic oligonucleotide
acgggcgctggccactagaccacaaagaag

SEQ ID NO: 203484 - DNA, 30 bp, Artificial Sequence
  Synthetic oligonucleotide
acattcggggagcttgagtttagcaagaag

SEQ ID NO: 203485 - DNA, 30 bp, Artificial Sequence
  Synthetic oligonucleotide
tcacacgcagtaaaatctctgatcaagaag

SEQ ID NO: 203486 - DNA, 30 bp, Artificial Sequence
  Synthetic oligonucleotide
cgtccggctaaagtataacctgtacagaag

SEQ ID NO: 203487 - DNA, 30 bp, Artificial Sequence
  Synthetic oligonucleotide
gcctacatacgcacggttgaggcccagaag

SEQ ID NO: 203488 - DNA, 30 bp, Artificial Sequence
  Synthetic oligonucleotide
gcttttagtaccgttgcgaatgtccagaag

SEQ ID NO: 203489 - DNA, 30 bp, Artificial Sequence
  Synthetic oligonucleotide
ctgtttcaaattccggaacggaatcagaag

SEQ ID NO: 203490 - DNA, 30 bp, Artificial Sequence
  Synthetic oligonucleotide
caacgtttgaagtatggaaactatcagaag

SEQ ID NO: 203491 - DNA, 30 bp, Artificial Sequence
  Synthetic oligonucleotide
gtgtcctggtttagccgcaacattcagaag

SEQ ID NO: 203492 - DNA, 30 bp, Artificial Sequence
  Synthetic oligonucleotide
cagtaactcgagaggccaacctttcagaag

SEQ ID NO: 203493 - DNA, 30 bp, Artificial Sequence
  Synthetic oligonucleotide
gcacgcacctacacacctgttaaagagaag

SEQ ID NO: 203494 - DNA, 30 bp, Artificial Sequence
  Synthetic oligonucleotide
agctgaggttccggggggatctccgagaag

SEQ ID NO: 203495 - DNA, 30 bp, Artificial Sequence
  Synthetic oligonucleotide
aagaaccgttgtagcctttgcatcgagaag

SEQ ID NO: 203496 - DNA, 30 bp, Artificial Sequence
  Synthetic oligonucleotide
ggtacccgttaacgggggggctcggagaag

SEQ ID NO: 203497 - DNA, 29 bp, Artificial Sequence
  Synthetic oligonucleotide
tcgctttatgctcaagtggcattgagaag

SEQ ID NO: 203498 - DNA, 30 bp, Artificial Sequence
  Synthetic oligonucleotide
tgttgtttcaatcccaggacaacatagaag

SEQ ID NO: 203499 - DNA, 30 bp, Artificial Sequence
  Synthetic oligonucleotide
gaacagcgccaatctgctagtcactagaag

SEQ ID NO: 203500 - DNA, 30 bp, Artificial Sequence
  Synthetic oligonucleotide
tcctgggactttgctcaggcagtctagaag

SEQ ID NO: 203501 - DNA, 30 bp, Artificial Sequence
  Synthetic oligonucleotide
gtcatgccaagttcgcatggcacgtagaag

SEQ ID NO: 203502 - DNA, 30 bp, Artificial Sequence
  Synthetic oligonucleotide
tagcatgggatttcaatgtactggtagaag

SEQ ID NO: 203503 - DNA, 30 bp, Artificial Sequence
  Synthetic oligonucleotide
attgcagtgaagatgaaagacatgtagaag

SEQ ID NO: 203504 - DNA, 30 bp, Artificial Sequence
  Synthetic oligonucleotide
cttgttcaagtataagtgcatttttagaag

SEQ ID NO: 203505 - DNA, 30 bp, Artificial Sequence
  Synthetic oligonucleotide
cggtacacggcgcttggagaacaaacgaag

SEQ ID NO: 203506 - DNA, 30 bp, Artificial Sequence
  Synthetic oligonucleotide
tattgtcattcacagtagtatgccacgaag

SEQ ID NO: 203507 - DNA, 30 bp, Artificial Sequence
  Synthetic oligonucleotide
gaatggttctccagtaaaagatgcacgaag

SEQ ID NO: 203508 - DNA, 30 bp, Artificial Sequence
  Synthetic oligonucleotide
tacctactcacacatatacgtctcacgaag

SEQ ID NO: 203509 - DNA, 30 bp, Artificial Sequence
  Synthetic oligonucleotide
tgtaggcctacctatacgggcgggacgaag

SEQ ID NO: 203510 - DNA, 30 bp, Artificial Sequence
  Synthetic oligonucleotide
aggttcgacgctggttggggtaatacgaag

SEQ ID NO: 203511 - DNA, 30 bp, Artificial Sequence
  Synthetic oligonucleotide
gttaatcagactatatggaattctacgaag

SEQ ID NO: 203512 - DNA, 30 bp, Artificial Sequence
  Synthetic oligonucleotide
aagtggaacttaaaactgaggcttacgaag

SEQ ID NO: 203513 - DNA, 30 bp, Artificial Sequence
  Synthetic oligonucleotide
ggtcatactgtatatcttagtggaccgaag

SEQ ID NO: 203514 - DNA, 30 bp, Artificial Sequence
  Synthetic oligonucleotide
ctacgtaacatgggtattgcaaccccgaag

SEQ ID NO: 203515 - DNA, 30 bp, Artificial Sequence
  Synthetic oligonucleotide
aaggcaattggtataggtaacaggccgaag

SEQ ID NO: 203516 - DNA, 30 bp, Artificial Sequence
  Synthetic oligonucleotide
gcaatgggtaggagagtgaaactgccgaag

SEQ ID NO: 203517 - DNA, 30 bp, Artificial Sequence
  Synthetic oligonucleotide
cataaggaatcctcttaagtccctccgaag

SEQ ID NO: 203518 - DNA, 30 bp, Artificial Sequence
  Synthetic oligonucleotide
gagtaaccagatcgaccgttggctccgaag

SEQ ID NO: 203519 - DNA, 30 bp, Artificial Sequence
  Synthetic oligonucleotide
gggttgacgaaacctgattgacacgcgaag

SEQ ID NO: 203520 - DNA, 30 bp, Artificial Sequence
  Synthetic oligonucleotide
ggttcgcgattcagtgttcactgggcgaag

SEQ ID NO: 203521 - DNA, 30 bp, Artificial Sequence
  Synthetic oligonucleotide
ataccacttgggtcgacaggggtggcgaag

SEQ ID NO: 203522 - DNA, 30 bp, Artificial Sequence
  Synthetic oligonucleotide
aaccacgctcataaggtagcgttctcgaag

SEQ ID NO: 203523 - DNA, 30 bp, Artificial Sequence
  Synthetic oligonucleotide
ctgagggattaggctgctccctcgtcgaag

SEQ ID NO: 203524 - DNA, 30 bp, Artificial Sequence
  Synthetic oligonucleotide
ttggctcctgtcacaagccaggcaaggaag

SEQ ID NO: 203525 - DNA, 30 bp, Artificial Sequence
  Synthetic oligonucleotide
tattggtacgcgggttccctgagaaggaag

SEQ ID NO: 203526 - DNA, 30 bp, Artificial Sequence
  Synthetic oligonucleotide
tgacgtaggcattgaagaggtagaaggaag

SEQ ID NO: 203527 - DNA, 30 bp, Artificial Sequence
  Synthetic oligonucleotide
cgtacaagattctagactgatttaaggaag

SEQ ID NO: 203528 - DNA, 28 bp, Artificial Sequence
  Synthetic oligonucleotide
actcctgaggtagaacgtttacaggaag

SEQ ID NO: 203529 - DNA, 30 bp, Artificial Sequence
  Synthetic oligonucleotide
cctcaagcgtggcgagctgaaaccaggaag

SEQ ID NO: 203530 - DNA, 30 bp, Artificial Sequence
  Synthetic oligonucleotide
accacaggcacgtccccacacatgaggaag

SEQ ID NO: 203531 - DNA, 30 bp, Artificial Sequence
  Synthetic oligonucleotide
cgtaagcccgtattacggcatactaggaag

SEQ ID NO: 203532 - DNA, 30 bp, Artificial Sequence
  Synthetic oligonucleotide
tgcaatttttatggaaaacacaaacggaag

SEQ ID NO: 203533 - DNA, 30 bp, Artificial Sequence
  Synthetic oligonucleotide
cttacagtcggcgtcgcgagctaacggaag

SEQ ID NO: 203534 - DNA, 30 bp, Artificial Sequence
  Synthetic oligonucleotide
agtcaccgccgtgctaatccctagcggaag

SEQ ID NO: 203535 - DNA, 30 bp, Artificial Sequence
  Synthetic oligonucleotide
aaacggcggtccggagtccatgggcggaag

SEQ ID NO: 203536 - DNA, 30 bp, Artificial Sequence
  Synthetic oligonucleotide
cgtatcgcaaagcacatgttaagtcggaag

SEQ ID NO: 203537 - DNA, 30 bp, Artificial Sequence
  Synthetic oligonucleotide
tgatcgtatataaacagccggattcggaag

SEQ ID NO: 203538 - DNA, 30 bp, Artificial Sequence
  Synthetic oligonucleotide
ttaagtcctatccgtacattgccagggaag

SEQ ID NO: 203539 - DNA, 30 bp, Artificial Sequence
  Synthetic oligonucleotide
gacctggattacatttttacctcagggaag

SEQ ID NO: 203540 - DNA, 30 bp, Artificial Sequence
  Synthetic oligonucleotide
tggttatcttaaatccgcgtagccgggaag

SEQ ID NO: 203541 - DNA, 30 bp, Artificial Sequence
  Synthetic oligonucleotide
caattccagcgtgtatttaatttcgggaag

SEQ ID NO: 203542 - DNA, 31 bp, Artificial Sequence
  Synthetic oligonucleotide
ggaagggcactgtagtaagcggcaggggaag

SEQ ID NO: 203543 - DNA, 30 bp, Artificial Sequence
  Synthetic oligonucleotide
aagtgaccatggcaaatgctccgggggaag

SEQ ID NO: 203544 - DNA, 30 bp, Artificial Sequence
  Synthetic oligonucleotide
gtcagcactgtgcaatccgccaatgggaag

SEQ ID NO: 203545 - DNA, 30 bp, Artificial Sequence
  Synthetic oligonucleotide
caaatcatttagtgtggcattagtgggaag

SEQ ID NO: 203546 - DNA, 30 bp, Artificial Sequence
  Synthetic oligonucleotide
cgaaggttagaaaatagacatctctggaag

SEQ ID NO: 203547 - DNA, 30 bp, Artificial Sequence
  Synthetic oligonucleotide
tcagggaacgtccccaataccgtctggaag

SEQ ID NO: 203548 - DNA, 30 bp, Artificial Sequence
  Synthetic oligonucleotide
tctccgtaaaatagtagcacattctggaag

SEQ ID NO: 203549 - DNA, 29 bp, Artificial Sequence
  Synthetic oligonucleotide
gtacgcagattgacatggttaagtggaag

SEQ ID NO: 203550 - DNA, 30 bp, Artificial Sequence
  Synthetic oligonucleotide
cgttgatttgctagcacgtcatattggaag

SEQ ID NO: 203551 - DNA, 30 bp, Artificial Sequence
  Synthetic oligonucleotide
aaagcgaaaagtttgtggggcatcatgaag

SEQ ID NO: 203552 - DNA, 30 bp, Artificial Sequence
  Synthetic oligonucleotide
tattgctctagatggcattggtagatgaag

SEQ ID NO: 203553 - DNA, 30 bp, Artificial Sequence
  Synthetic oligonucleotide
ctgtaggtgtccaggtctatttgtatgaag

SEQ ID NO: 203554 - DNA, 30 bp, Artificial Sequence
  Synthetic oligonucleotide
actgcgtcggtctgtttcaaaaaactgaag

SEQ ID NO: 203555 - DNA, 30 bp, Artificial Sequence
  Synthetic oligonucleotide
atttgagactgtctgctggatgtactgaag

SEQ ID NO: 203556 - DNA, 30 bp, Artificial Sequence
  Synthetic oligonucleotide
taaatcggggccgttcaaagtggcctgaag

SEQ ID NO: 203557 - DNA, 30 bp, Artificial Sequence
  Synthetic oligonucleotide
gcttagctcacatttaccccttcgctgaag

SEQ ID NO: 203558 - DNA, 30 bp, Artificial Sequence
  Synthetic oligonucleotide
catgcagtagccactcttttctttctgaag

SEQ ID NO: 203559 - DNA, 30 bp, Artificial Sequence
  Synthetic oligonucleotide
tggtacataaggattcccagttaagtgaag

SEQ ID NO: 203560 - DNA, 30 bp, Artificial Sequence
  Synthetic oligonucleotide
cggagctctataactatccaactagtgaag

SEQ ID NO: 203561 - DNA, 30 bp, Artificial Sequence
  Synthetic oligonucleotide
gaaagcggaacgcacactgtggaggtgaag

SEQ ID NO: 203562 - DNA, 30 bp, Artificial Sequence
  Synthetic oligonucleotide
gataagcgtcccatcaaggtggatgtgaag

SEQ ID NO: 203563 - DNA, 30 bp, Artificial Sequence
  Synthetic oligonucleotide
agtgaaagtttactcgacaggtcattgaag

SEQ ID NO: 203564 - DNA, 30 bp, Artificial Sequence
  Synthetic oligonucleotide
aattcacaagcagaagactccgccttgaag

SEQ ID NO: 203565 - DNA, 30 bp, Artificial Sequence
  Synthetic oligonucleotide
ccatagattgtcaccggcaactatttgaag

SEQ ID NO: 203566 - DNA, 30 bp, Artificial Sequence
  Synthetic oligonucleotide
tccgcatatcatcgcataaagagaaataag

SEQ ID NO: 203567 - DNA, 30 bp, Artificial Sequence
  Synthetic oligonucleotide
atttaacagttgtatattgcgctaaataag

SEQ ID NO: 203568 - DNA, 30 bp, Artificial Sequence
  Synthetic oligonucleotide
gggtgcagaatcctttcatctcacaataag

SEQ ID NO: 203569 - DNA, 30 bp, Artificial Sequence
  Synthetic oligonucleotide
gccgaccgggccattactgtagacaataag

SEQ ID NO: 203570 - DNA, 30 bp, Artificial Sequence
  Synthetic oligonucleotide
gaaacaaggtactgttgagagcccaataag

SEQ ID NO: 203571 - DNA, 30 bp, Artificial Sequence
  Synthetic oligonucleotide
gaaggcgttgtgttggcagagaataataag

SEQ ID NO: 203572 - DNA, 30 bp, Artificial Sequence
  Synthetic oligonucleotide
cattttaggaagggtgaacaacctaataag

SEQ ID NO: 203573 - DNA, 31 bp, Artificial Sequence
  Synthetic oligonucleotide
agtgtaactgtgtgtttttggggcacataag

SEQ ID NO: 203574 - DNA, 30 bp, Artificial Sequence
  Synthetic oligonucleotide
gcacacccttaacgtaaacctcggcataag

SEQ ID NO: 203575 - DNA, 30 bp, Artificial Sequence
  Synthetic oligonucleotide
agataattcattaacaacggccctcataag

SEQ ID NO: 203576 - DNA, 30 bp, Artificial Sequence
  Synthetic oligonucleotide
catgaagacataattttgccagctcataag

SEQ ID NO: 203577 - DNA, 30 bp, Artificial Sequence
  Synthetic oligonucleotide
gttcaagatgaaggagacccccacgataag

SEQ ID NO: 203578 - DNA, 30 bp, Artificial Sequence
  Synthetic oligonucleotide
cgcatatgaaatcacaaaattacggataag

SEQ ID NO: 203579 - DNA, 30 bp, Artificial Sequence
  Synthetic oligonucleotide
aacagtacgtagcgggaattcgaatataag

SEQ ID NO: 203580 - DNA, 30 bp, Artificial Sequence
  Synthetic oligonucleotide
agagatgcctgacgtgtgcgtacatataag

SEQ ID NO: 203581 - DNA, 30 bp, Artificial Sequence
  Synthetic oligonucleotide
ccaggtatagccctttcgaaaggatataag

SEQ ID NO: 203582 - DNA, 30 bp, Artificial Sequence
  Synthetic oligonucleotide
ggaacgattgtgaggcaaatgttatataag

SEQ ID NO: 203583 - DNA, 30 bp, Artificial Sequence
  Synthetic oligonucleotide
cacagtcgaccgcttcgtcgcgactataag

SEQ ID NO: 203584 - DNA, 30 bp, Artificial Sequence
  Synthetic oligonucleotide
ggcgggaatttcaatgggtgatcctataag

SEQ ID NO: 203585 - DNA, 30 bp, Artificial Sequence
  Synthetic oligonucleotide
tgtcagtatggggctacgataccgtataag

SEQ ID NO: 203586 - DNA, 30 bp, Artificial Sequence
  Synthetic oligonucleotide
gcaatgagcgctgggaagaactggtataag

SEQ ID NO: 203587 - DNA, 30 bp, Artificial Sequence
  Synthetic oligonucleotide
acttggctgaggtagccagccggttataag

SEQ ID NO: 203588 - DNA, 30 bp, Artificial Sequence
  Synthetic oligonucleotide
tttctacggataaagatacgtaaaactaag

SEQ ID NO: 203589 - DNA, 30 bp, Artificial Sequence
  Synthetic oligonucleotide
catggtcgggtttcaggctagcaaactaag

SEQ ID NO: 203590 - DNA, 30 bp, Artificial Sequence
  Synthetic oligonucleotide
ctgcgatgcgcttatggcgctctaactaag

SEQ ID NO: 203591 - DNA, 30 bp, Artificial Sequence
  Synthetic oligonucleotide
tgcgttcctgcttgaaagtcgtgcactaag

SEQ ID NO: 203592 - DNA, 30 bp, Artificial Sequence
  Synthetic oligonucleotide
aattgagacattctcaagaagcagactaag

SEQ ID NO: 203593 - DNA, 30 bp, Artificial Sequence
  Synthetic oligonucleotide
gcgggacggtcctgggcatagcggactaag

SEQ ID NO: 203594 - DNA, 30 bp, Artificial Sequence
  Synthetic oligonucleotide
gtgaaaatgacgagccaagagcaccctaag

SEQ ID NO: 203595 - DNA, 30 bp, Artificial Sequence
  Synthetic oligonucleotide
cgagctgaacgaacagggacggggcctaag

SEQ ID NO: 203596 - DNA, 30 bp, Artificial Sequence
  Synthetic oligonucleotide
ctctgtcgaccactcgggtatactcctaag

SEQ ID NO: 203597 - DNA, 30 bp, Artificial Sequence
  Synthetic oligonucleotide
ccgccgtacaatagtggaggaggtcctaag

SEQ ID NO: 203598 - DNA, 30 bp, Artificial Sequence
  Synthetic oligonucleotide
atcgagacgccaaaggggacgccagctaag

SEQ ID NO: 203599 - DNA, 30 bp, Artificial Sequence
  Synthetic oligonucleotide
gggctgagcggttggatatcccgagctaag

SEQ ID NO: 203600 - DNA, 30 bp, Artificial Sequence
  Synthetic oligonucleotide
ggtggcatagtcatcaacgtaaatgctaag

SEQ ID NO: 203601 - DNA, 30 bp, Artificial Sequence
  Synthetic oligonucleotide
cactccattaaaaagagagatactgctaag

SEQ ID NO: 203602 - DNA, 30 bp, Artificial Sequence
  Synthetic oligonucleotide
aggtgtctacggttagcaagttggtctaag

SEQ ID NO: 203603 - DNA, 30 bp, Artificial Sequence
  Synthetic oligonucleotide
gcagatggcagcatccaacatgcttctaag

SEQ ID NO: 203604 - DNA, 30 bp, Artificial Sequence
  Synthetic oligonucleotide
ggagtcaatcaaccgtctgttggaagtaag

SEQ ID NO: 203605 - DNA, 30 bp, Artificial Sequence
  Synthetic oligonucleotide
gcaacgtggctgagtggacactacagtaag

SEQ ID NO: 203606 - DNA, 30 bp, Artificial Sequence
  Synthetic oligonucleotide
cagggttgaaaaatttcgccatcgagtaag

SEQ ID NO: 203607 - DNA, 30 bp, Artificial Sequence
  Synthetic oligonucleotide
tgacctctccaagcggagtatcggagtaag

SEQ ID NO: 203608 - DNA, 30 bp, Artificial Sequence
  Synthetic oligonucleotide
ctggtgcgacaaagtgtcctaagtagtaag

SEQ ID NO: 203609 - DNA, 30 bp, Artificial Sequence
  Synthetic oligonucleotide
ggccactagtaggactggcacctacgtaag

SEQ ID NO: 203610 - DNA, 30 bp, Artificial Sequence
  Synthetic oligonucleotide
ctgtagaatgggaaggagccagtacgtaag

SEQ ID NO: 203611 - DNA, 30 bp, Artificial Sequence
  Synthetic oligonucleotide
acgaggtattaatcgatacgtacgcgtaag

SEQ ID NO: 203612 - DNA, 30 bp, Artificial Sequence
  Synthetic oligonucleotide
gcagctgagatatggaaagaccggcgtaag

SEQ ID NO: 203613 - DNA, 30 bp, Artificial Sequence
  Synthetic oligonucleotide
taggtggattacctcgaaatccctcgtaag

SEQ ID NO: 203614 - DNA, 30 bp, Artificial Sequence
  Synthetic oligonucleotide
gacagcgcctctatgttggaaattcgtaag

SEQ ID NO: 203615 - DNA, 30 bp, Artificial Sequence
  Synthetic oligonucleotide
aaatgataccactttgatcgggagggtaag

SEQ ID NO: 203616 - DNA, 30 bp, Artificial Sequence
  Synthetic oligonucleotide
taccgtgggtggtcccagcgctagggtaag

SEQ ID NO: 203617 - DNA, 30 bp, Artificial Sequence
  Synthetic oligonucleotide
tcgaacagggtggtatttaaaaggggtaag

SEQ ID NO: 203618 - DNA, 30 bp, Artificial Sequence
  Synthetic oligonucleotide
tcaataattcttctgatagaaggatgtaag

SEQ ID NO: 203619 - DNA, 30 bp, Artificial Sequence
  Synthetic oligonucleotide
tcagttggcaccgtgggatatcattgtaag

SEQ ID NO: 203620 - DNA, 30 bp, Artificial Sequence
  Synthetic oligonucleotide
ttcctacagtgactaggtagtcaaattaag

SEQ ID NO: 203621 - DNA, 30 bp, Artificial Sequence
  Synthetic oligonucleotide
caggcttgcgaggttggacgcccaattaag

SEQ ID NO: 203622 - DNA, 30 bp, Artificial Sequence
  Synthetic oligonucleotide
acacctaggggacacatctgtagaattaag

SEQ ID NO: 203623 - DNA, 31 bp, Artificial Sequence
  Synthetic oligonucleotide
ggttatgcgagctctagaaactaccattaag

SEQ ID NO: 203624 - DNA, 30 bp, Artificial Sequence
  Synthetic oligonucleotide
gtgataatcgacgatcatagctggattaag

SEQ ID NO: 203625 - DNA, 30 bp, Artificial Sequence
  Synthetic oligonucleotide
gacatatgagcacggatcgggtgtattaag

SEQ ID NO: 203626 - DNA, 30 bp, Artificial Sequence
  Synthetic oligonucleotide
ccacttctcggcctcaaagggggacttaag

SEQ ID NO: 203627 - DNA, 30 bp, Artificial Sequence
  Synthetic oligonucleotide
cgtcgatctctcattcatggaatacttaag

SEQ ID NO: 203628 - DNA, 30 bp, Artificial Sequence
  Synthetic oligonucleotide
ttatcagctgtacgtaaccgcaatcttaag

SEQ ID NO: 203629 - DNA, 30 bp, Artificial Sequence
  Synthetic oligonucleotide
gtccgtttcgggtaacgttcaactcttaag

SEQ ID NO: 203630 - DNA, 30 bp, Artificial Sequence
  Synthetic oligonucleotide
gtaaaacacttgtacatgtctcacgttaag

SEQ ID NO: 203631 - DNA, 30 bp, Artificial Sequence
  Synthetic oligonucleotide
cggagttttagaagcagtagagacgttaag

SEQ ID NO: 203632 - DNA, 30 bp, Artificial Sequence
  Synthetic oligonucleotide
atacgatgcacgtattgttctaccgttaag

SEQ ID NO: 203633 - DNA, 30 bp, Artificial Sequence
  Synthetic oligonucleotide
gtgattcctctgctttcaatcggcgttaag

SEQ ID NO: 203634 - DNA, 30 bp, Artificial Sequence
  Synthetic oligonucleotide
tgatgtcgagcgagcggtactgaggttaag

SEQ ID NO: 203635 - DNA, 30 bp, Artificial Sequence
  Synthetic oligonucleotide
ataatagctagagccattgtgagggttaag

SEQ ID NO: 203636 - DNA, 30 bp, Artificial Sequence
  Synthetic oligonucleotide
ggccaggaagaattcccactcgctgttaag

SEQ ID NO: 203637 - DNA, 30 bp, Artificial Sequence
  Synthetic oligonucleotide
aaacaataacctctaagccgaagtgttaag

SEQ ID NO: 203638 - DNA, 30 bp, Artificial Sequence
  Synthetic oligonucleotide
tacgaaattgtctccgccaggcttgttaag

SEQ ID NO: 203639 - DNA, 30 bp, Artificial Sequence
  Synthetic oligonucleotide
tttgattacaatggaagtggccaatttaag

SEQ ID NO: 203640 - DNA, 30 bp, Artificial Sequence
  Synthetic oligonucleotide
agcttacgaaggactccaacagcatttaag

SEQ ID NO: 203641 - DNA, 30 bp, Artificial Sequence
  Synthetic oligonucleotide
gcgcttaaacacggaataacatgatttaag

SEQ ID NO: 203642 - DNA, 30 bp, Artificial Sequence
  Synthetic oligonucleotide
acggttcatatacggccgtactgatttaag

SEQ ID NO: 203643 - DNA, 30 bp, Artificial Sequence
  Synthetic oligonucleotide
ggatcgcgtagggccgactcgtcctttaag

SEQ ID NO: 203644 - DNA, 30 bp, Artificial Sequence
  Synthetic oligonucleotide
agaccgagggcagctttacatctctttaag

SEQ ID NO: 203645 - DNA, 31 bp, Artificial Sequence
  Synthetic oligonucleotide
acgcatatttgtgcaaattgcttgttttaag

SEQ ID NO: 203646 - DNA, 30 bp, Artificial Sequence
  Synthetic oligonucleotide
aatcacgcattctatacattttcaaaacag

SEQ ID NO: 203647 - DNA, 30 bp, Artificial Sequence
  Synthetic oligonucleotide
tgaacactggcttcgcgatcccgaaaacag

SEQ ID NO: 203648 - DNA, 30 bp, Artificial Sequence
  Synthetic oligonucleotide
acatctgagctttggtcggcacataaacag

SEQ ID NO: 203649 - DNA, 30 bp, Artificial Sequence
  Synthetic oligonucleotide
ccagcaaggcatgtatatttccttaaacag

SEQ ID NO: 203650 - DNA, 30 bp, Artificial Sequence
  Synthetic oligonucleotide
gagtatgatcgactatgaatcgtacaacag

SEQ ID NO: 203651 - DNA, 30 bp, Artificial Sequence
  Synthetic oligonucleotide
caggtgtgtcatatgtagtgctttcaacag

SEQ ID NO: 203652 - DNA, 30 bp, Artificial Sequence
  Synthetic oligonucleotide
gggcccgctcgcgtggtttacaaagaacag

SEQ ID NO: 203653 - DNA, 30 bp, Artificial Sequence
  Synthetic oligonucleotide
tttatatctgagctccggagtgaagaacag

SEQ ID NO: 203654 - DNA, 30 bp, Artificial Sequence
  Synthetic oligonucleotide
caagcattctagtgggatctaacagaacag

SEQ ID NO: 203655 - DNA, 30 bp, Artificial Sequence
  Synthetic oligonucleotide
tttaggaccgattgaccggagccagaacag

SEQ ID NO: 203656 - DNA, 30 bp, Artificial Sequence
  Synthetic oligonucleotide
aggttacgtttatcgaggagagcagaacag

SEQ ID NO: 203657 - DNA, 30 bp, Artificial Sequence
  Synthetic oligonucleotide
atagaaccaggcacccccatatcagaacag

SEQ ID NO: 203658 - DNA, 30 bp, Artificial Sequence
  Synthetic oligonucleotide
acttgaagaagtgggtgaacatacgaacag

SEQ ID NO: 203659 - DNA, 30 bp, Artificial Sequence
  Synthetic oligonucleotide
gaatcctggatctacctctgtcatgaacag

SEQ ID NO: 203660 - DNA, 30 bp, Artificial Sequence
  Synthetic oligonucleotide
aagaagctagatcaccaacccagtgaacag

SEQ ID NO: 203661 - DNA, 30 bp, Artificial Sequence
  Synthetic oligonucleotide
tgcgtccgggcaaatgctaggtttgaacag

SEQ ID NO: 203662 - DNA, 30 bp, Artificial Sequence
  Synthetic oligonucleotide
aaaggaaggctgatattcttaatataacag

SEQ ID NO: 203663 - DNA, 30 bp, Artificial Sequence
  Synthetic oligonucleotide
gccttcctctgtctctatgaacagtaacag

SEQ ID NO: 203664 - DNA, 30 bp, Artificial Sequence
  Synthetic oligonucleotide
ttgaccacgtttgattacctaaggtaacag

SEQ ID NO: 203665 - DNA, 30 bp, Artificial Sequence
  Synthetic oligonucleotide
ggggatggaactactacggctgggtaacag

SEQ ID NO: 203666 - DNA, 30 bp, Artificial Sequence
  Synthetic oligonucleotide
tacgttccaggtaggccggtcgcttaacag

SEQ ID NO: 203667 - DNA, 30 bp, Artificial Sequence
  Synthetic oligonucleotide
ctccatttgcctacacaatgttaaacacag

SEQ ID NO: 203668 - DNA, 30 bp, Artificial Sequence
  Synthetic oligonucleotide
actttcgctagaactaagctcgtaacacag

SEQ ID NO: 203669 - DNA, 30 bp, Artificial Sequence
  Synthetic oligonucleotide
ttccaggcaccacgggattgtcacacacag

SEQ ID NO: 203670 - DNA, 30 bp, Artificial Sequence
  Synthetic oligonucleotide
ggtcgggtacttgtaacctccaccccacag

SEQ ID NO: 203671 - DNA, 30 bp, Artificial Sequence
  Synthetic oligonucleotide
ggacgggggtgcaacgatccacggccacag

SEQ ID NO: 203672 - DNA, 30 bp, Artificial Sequence
  Synthetic oligonucleotide
ccatcccagtcaggaggctctagggcacag

SEQ ID NO: 203673 - DNA, 30 bp, Artificial Sequence
  Synthetic oligonucleotide
cacggacgtccagagacatagccatcacag

SEQ ID NO: 203674 - DNA, 30 bp, Artificial Sequence
  Synthetic oligonucleotide
aaagtaccgggcgcgtatatgcgatcacag

SEQ ID NO: 203675 - DNA, 30 bp, Artificial Sequence
  Synthetic oligonucleotide
atgaagaataagaacccatcttgatcacag

SEQ ID NO: 203676 - DNA, 30 bp, Artificial Sequence
  Synthetic oligonucleotide
taaacatatctgaccgagcgcaactcacag

SEQ ID NO: 203677 - DNA, 30 bp, Artificial Sequence
  Synthetic oligonucleotide
tcccgggcatctcttgtaaagggctcacag

SEQ ID NO: 203678 - DNA, 30 bp, Artificial Sequence
  Synthetic oligonucleotide
gaagcatatatcctatacaggaagtcacag

SEQ ID NO: 203679 - DNA, 30 bp, Artificial Sequence
  Synthetic oligonucleotide
ggactgtaatagttcgcttccaggtcacag

SEQ ID NO: 203680 - DNA, 30 bp, Artificial Sequence
  Synthetic oligonucleotide
tatcggtgtgtcctgaagtctccttcacag

SEQ ID NO: 203681 - DNA, 30 bp, Artificial Sequence
  Synthetic oligonucleotide
acaattctcaaccgacaacgatgttcacag

SEQ ID NO: 203682 - DNA, 30 bp, Artificial Sequence
  Synthetic oligonucleotide
agatcgcggcgggacgttatcccaagacag

SEQ ID NO: 203683 - DNA, 30 bp, Artificial Sequence
  Synthetic oligonucleotide
gcgcccccagacgatataccaaggagacag

SEQ ID NO: 203684 - DNA, 30 bp, Artificial Sequence
  Synthetic oligonucleotide
gggctctaaaatgtctggttagggagacag

SEQ ID NO: 203685 - DNA, 30 bp, Artificial Sequence
  Synthetic oligonucleotide
ggatttggatgaacactcgggttgagacag

SEQ ID NO: 203686 - DNA, 30 bp, Artificial Sequence
  Synthetic oligonucleotide
ccctatatgagtccacgtgagaatagacag

SEQ ID NO: 203687 - DNA, 30 bp, Artificial Sequence
  Synthetic oligonucleotide
aataagcaacggccgccagatagtagacag

SEQ ID NO: 203688 - DNA, 30 bp, Artificial Sequence
  Synthetic oligonucleotide
gtacgccgcaacccatagagaaaacgacag

SEQ ID NO: 203689 - DNA, 30 bp, Artificial Sequence
  Synthetic oligonucleotide
agaaagttgaggcatgtctcacaccgacag

SEQ ID NO: 203690 - DNA, 30 bp, Artificial Sequence
  Synthetic oligonucleotide
aacttcgaagcgccaccaggtacccgacag

SEQ ID NO: 203691 - DNA, 30 bp, Artificial Sequence
  Synthetic oligonucleotide
ctctcgagacacgtcatattttcgcgacag

SEQ ID NO: 203692 - DNA, 30 bp, Artificial Sequence
  Synthetic oligonucleotide
ggactacctaagcgttacagataaggacag

SEQ ID NO: 203693 - DNA, 30 bp, Artificial Sequence
  Synthetic oligonucleotide
gaaacagcggctggcttaataagaggacag

SEQ ID NO: 203694 - DNA, 30 bp, Artificial Sequence
  Synthetic oligonucleotide
ggcgttacctgagatacttaaatcggacag

SEQ ID NO: 203695 - DNA, 30 bp, Artificial Sequence
  Synthetic oligonucleotide
tcaccattacgagtacgctggcagggacag

SEQ ID NO: 203696 - DNA, 30 bp, Artificial Sequence
  Synthetic oligonucleotide
cattctcgtcgcgttagaaattagggacag

SEQ ID NO: 203697 - DNA, 30 bp, Artificial Sequence
  Synthetic oligonucleotide
gcgtaaacatgagccgttatagtgggacag

SEQ ID NO: 203698 - DNA, 30 bp, Artificial Sequence
  Synthetic oligonucleotide
ctcgtggtgcatgaacatacaactggacag

SEQ ID NO: 203699 - DNA, 30 bp, Artificial Sequence
  Synthetic oligonucleotide
aagatatgttggagggtccggacatgacag

SEQ ID NO: 203700 - DNA, 30 bp, Artificial Sequence
  Synthetic oligonucleotide
tatgccgtgttcgggctctcacaaatacag

SEQ ID NO: 203701 - DNA, 30 bp, Artificial Sequence
  Synthetic oligonucleotide
cttggagcgtgaccgcacgatgaaatacag

SEQ ID NO: 203702 - DNA, 30 bp, Artificial Sequence
  Synthetic oligonucleotide
ggctccgcgtatatgaggtggaacatacag

SEQ ID NO: 203703 - DNA, 30 bp, Artificial Sequence
  Synthetic oligonucleotide
aattagtgcaacctacatgaattgatacag

SEQ ID NO: 203704 - DNA, 30 bp, Artificial Sequence
  Synthetic oligonucleotide
agatgtccgttaacatactgtttgatacag

SEQ ID NO: 203705 - DNA, 30 bp, Artificial Sequence
  Synthetic oligonucleotide
attcgagggatacttatcggagtcctacag

SEQ ID NO: 203706 - DNA, 30 bp, Artificial Sequence
  Synthetic oligonucleotide
ggtacgtttaatagggacagtctgctacag

SEQ ID NO: 203707 - DNA, 30 bp, Artificial Sequence
  Synthetic oligonucleotide
ttagggaagacatcttagctcaccgtacag

SEQ ID NO: 203708 - DNA, 30 bp, Artificial Sequence
  Synthetic oligonucleotide
agctaccctggagatatctccccggtacag

SEQ ID NO: 203709 - DNA, 30 bp, Artificial Sequence
  Synthetic oligonucleotide
tctccggcgctcagcccaaaagcggtacag

SEQ ID NO: 203710 - DNA, 30 bp, Artificial Sequence
  Synthetic oligonucleotide
caaacaaggttgccactaatgcgggtacag

SEQ ID NO: 203711 - DNA, 30 bp, Artificial Sequence
  Synthetic oligonucleotide
tgcaaacgccgaattgcacgacttgtacag

SEQ ID NO: 203712 - DNA, 30 bp, Artificial Sequence
  Synthetic oligonucleotide
taggaatgcgcttcatttcctcttgtacag

SEQ ID NO: 203713 - DNA, 30 bp, Artificial Sequence
  Synthetic oligonucleotide
aaataaggattccattccaagttattacag

SEQ ID NO: 203714 - DNA, 30 bp, Artificial Sequence
  Synthetic oligonucleotide
tttcgtgtgacaagttaacctggcttacag

SEQ ID NO: 203715 - DNA, 30 bp, Artificial Sequence
  Synthetic oligonucleotide
agtaactaaggattccctacttggttacag

SEQ ID NO: 203716 - DNA, 30 bp, Artificial Sequence
  Synthetic oligonucleotide
gtgacaattatgcattaagatgtgttacag

SEQ ID NO: 203717 - DNA, 30 bp, Artificial Sequence
  Synthetic oligonucleotide
aatgtatgacataacaggtgtcgcaaccag

SEQ ID NO: 203718 - DNA, 30 bp, Artificial Sequence
  Synthetic oligonucleotide
aagcagcttacacccggcggatgtcaccag

SEQ ID NO: 203719 - DNA, 30 bp, Artificial Sequence
  Synthetic oligonucleotide
atttgtggctgcagggcacgtagagaccag

SEQ ID NO: 203720 - DNA, 30 bp, Artificial Sequence
  Synthetic oligonucleotide
taagaggtacttttggtgaagtgagaccag

SEQ ID NO: 203721 - DNA, 30 bp, Artificial Sequence
  Synthetic oligonucleotide
ccactcggtcatagcccatggtgcgaccag

SEQ ID NO: 203722 - DNA, 30 bp, Artificial Sequence
  Synthetic oligonucleotide
acagcgtcgatacgctttacgttataccag

SEQ ID NO: 203723 - DNA, 30 bp, Artificial Sequence
  Synthetic oligonucleotide
aacaagattataataacgttacactaccag

SEQ ID NO: 203724 - DNA, 30 bp, Artificial Sequence
  Synthetic oligonucleotide
atctctgccgcggggacacctatctaccag

SEQ ID NO: 203725 - DNA, 30 bp, Artificial Sequence
  Synthetic oligonucleotide
tgaactttaatcacactcacacgttaccag

SEQ ID NO: 203726 - DNA, 30 bp, Artificial Sequence
  Synthetic oligonucleotide
acatttaattggaacttcgagtgttaccag

SEQ ID NO: 203727 - DNA, 30 bp, Artificial Sequence
  Synthetic oligonucleotide
gttcacgcgacacatgagagtaaaacccag

SEQ ID NO: 203728 - DNA, 30 bp, Artificial Sequence
  Synthetic oligonucleotide
tcacgtagtattactttgacaggcacccag

SEQ ID NO: 203729 - DNA, 30 bp, Artificial Sequence
  Synthetic oligonucleotide
tccgggaaacagatcttacgcttgacccag

SEQ ID NO: 203730 - DNA, 30 bp, Artificial Sequence
  Synthetic oligonucleotide
ataagtctgagtaaggtaccaactacccag

SEQ ID NO: 203731 - DNA, 30 bp, Artificial Sequence
  Synthetic oligonucleotide
ggctatgtccgatccgctctacaaccccag

SEQ ID NO: 203732 - DNA, 30 bp, Artificial Sequence
  Synthetic oligonucleotide
taggggagtttcgtccatacacagccccag

SEQ ID NO: 203733 - DNA, 30 bp, Artificial Sequence
  Synthetic oligonucleotide
cacccgtacaggcattagtcaggtccccag

SEQ ID NO: 203734 - DNA, 30 bp, Artificial Sequence
  Synthetic oligonucleotide
cagagagtcggtggcctggcagtcgcccag

SEQ ID NO: 203735 - DNA, 30 bp, Artificial Sequence
  Synthetic oligonucleotide
tataccgcgtatcatgactagttatcccag

SEQ ID NO: 203736 - DNA, 30 bp, Artificial Sequence
  Synthetic oligonucleotide
ggtatataggcgggggatggtttctcccag

SEQ ID NO: 203737 - DNA, 30 bp, Artificial Sequence
  Synthetic oligonucleotide
gttgtgccgggtagaggaaaaccttcccag

SEQ ID NO: 203738 - DNA, 30 bp, Artificial Sequence
  Synthetic oligonucleotide
gctattgcactccttatttcgtccagccag

SEQ ID NO: 203739 - DNA, 30 bp, Artificial Sequence
  Synthetic oligonucleotide
gccttgagaaacggcactctcctgagccag

SEQ ID NO: 203740 - DNA, 30 bp, Artificial Sequence
  Synthetic oligonucleotide
aaaaagatgcgttatgttatgtaccgccag

SEQ ID NO: 203741 - DNA, 30 bp, Artificial Sequence
  Synthetic oligonucleotide
tttgaaagaatgcgacgcctacgccgccag

SEQ ID NO: 203742 - DNA, 31 bp, Artificial Sequence
  Synthetic oligonucleotide
tgccatgacatgtttcgaagtccacggccag

SEQ ID NO: 203743 - DNA, 30 bp, Artificial Sequence
  Synthetic oligonucleotide
tagatgaaagccgtggcatggcacggccag

SEQ ID NO: 203744 - DNA, 30 bp, Artificial Sequence
  Synthetic oligonucleotide
acttacaatagatgtgggattaagggccag

SEQ ID NO: 203745 - DNA, 30 bp, Artificial Sequence
  Synthetic oligonucleotide
tactactggctataaagcactgcgggccag

SEQ ID NO: 203746 - DNA, 30 bp, Artificial Sequence
  Synthetic oligonucleotide
ctgaagtgtgcgaccgttttcaggggccag

SEQ ID NO: 203747 - DNA, 30 bp, Artificial Sequence
  Synthetic oligonucleotide
atgaaacaccgaacgtaaacggctggccag

SEQ ID NO: 203748 - DNA, 30 bp, Artificial Sequence
  Synthetic oligonucleotide
catagcggttgatagatttatcgtggccag

SEQ ID NO: 203749 - DNA, 30 bp, Artificial Sequence
  Synthetic oligonucleotide
tagaaaagtaacaaaagccgtatgtgccag

SEQ ID NO: 203750 - DNA, 30 bp, Artificial Sequence
  Synthetic oligonucleotide
caagaacgattttagctataatcaatccag

SEQ ID NO: 203751 - DNA, 30 bp, Artificial Sequence
  Synthetic oligonucleotide
tcaggatacaaagggacctggtgtatccag

SEQ ID NO: 203752 - DNA, 30 bp, Artificial Sequence
  Synthetic oligonucleotide
gtttagcaactatgacgaaaaattatccag

SEQ ID NO: 203753 - DNA, 30 bp, Artificial Sequence
  Synthetic oligonucleotide
ctaccgacctgagctaaagcgcaactccag

SEQ ID NO: 203754 - DNA, 30 bp, Artificial Sequence
  Synthetic oligonucleotide
taagtgctcagggaacagccagtgctccag

SEQ ID NO: 203755 - DNA, 30 bp, Artificial Sequence
  Synthetic oligonucleotide
taggggcccgttaacgaacgtcatctccag

SEQ ID NO: 203756 - DNA, 30 bp, Artificial Sequence
  Synthetic oligonucleotide
gtcggggtttcaatcgttgggcaagtccag

SEQ ID NO: 203757 - DNA, 30 bp, Artificial Sequence
  Synthetic oligonucleotide
cctcctagttcaaaaaaggggtacgtccag

SEQ ID NO: 203758 - DNA, 30 bp, Artificial Sequence
  Synthetic oligonucleotide
ggaagatgctggcgagtcatcagcgtccag

SEQ ID NO: 203759 - DNA, 30 bp, Artificial Sequence
  Synthetic oligonucleotide
ttacgggccgcctatttttccatcgtccag

SEQ ID NO: 203760 - DNA, 30 bp, Artificial Sequence
  Synthetic oligonucleotide
tgtaattaagacagggatcatggggtccag

SEQ ID NO: 203761 - DNA, 30 bp, Artificial Sequence
  Synthetic oligonucleotide
ggcgacccgctgcaggggcgcttggtccag

SEQ ID NO: 203762 - DNA, 30 bp, Artificial Sequence
  Synthetic oligonucleotide
ctctggctgagtagttccgccacattccag

SEQ ID NO: 203763 - DNA, 30 bp, Artificial Sequence
  Synthetic oligonucleotide
aggtggcggtggggagctgggtcattccag

SEQ ID NO: 203764 - DNA, 30 bp, Artificial Sequence
  Synthetic oligonucleotide
gacggttagcgcagtgtcgtgtgcttccag

SEQ ID NO: 203765 - DNA, 30 bp, Artificial Sequence
  Synthetic oligonucleotide
gcaaaggcgcggttctcggttgtaaagcag

SEQ ID NO: 203766 - DNA, 30 bp, Artificial Sequence
  Synthetic oligonucleotide
ggtgatgatggaacattcacaacgaagcag

SEQ ID NO: 203767 - DNA, 30 bp, Artificial Sequence
  Synthetic oligonucleotide
gcctcagtgattagggcagccgagcagcag

SEQ ID NO: 203768 - DNA, 30 bp, Artificial Sequence
  Synthetic oligonucleotide
gcccgaggaatatacaagtacgcgcagcag

SEQ ID NO: 203769 - DNA, 30 bp, Artificial Sequence
  Synthetic oligonucleotide
ttcaggagaacgggtgctccattgcagcag

SEQ ID NO: 203770 - DNA, 30 bp, Artificial Sequence
  Synthetic oligonucleotide
tgggactcgggtaaagttgccgatcagcag

SEQ ID NO: 203771 - DNA, 30 bp, Artificial Sequence
  Synthetic oligonucleotide
tacggtacgatactggatcctgcagagcag

SEQ ID NO: 203772 - DNA, 30 bp, Artificial Sequence
  Synthetic oligonucleotide
aagtatacgacggtcccatagggagagcag

SEQ ID NO: 203773 - DNA, 30 bp, Artificial Sequence
  Synthetic oligonucleotide
ccggcggcgcatcacaacagtgccgagcag

SEQ ID NO: 203774 - DNA, 30 bp, Artificial Sequence
  Synthetic oligonucleotide
atccgttgggtttgtgcaactcgcgagcag

SEQ ID NO: 203775 - DNA, 30 bp, Artificial Sequence
  Synthetic oligonucleotide
tcgtactgcacaccactgagaatggagcag

SEQ ID NO: 203776 - DNA, 30 bp, Artificial Sequence
  Synthetic oligonucleotide
tacgtgcctcttaaagcctgcagctagcag

SEQ ID NO: 203777 - DNA, 30 bp, Artificial Sequence
  Synthetic oligonucleotide
ttggggggttccatgaaaggatcaacgcag

SEQ ID NO: 203778 - DNA, 30 bp, Artificial Sequence
  Synthetic oligonucleotide
ttaggacaggaccctcatgtaaccacgcag

SEQ ID NO: 203779 - DNA, 30 bp, Artificial Sequence
  Synthetic oligonucleotide
taaccgcaactagtctttcacatcacgcag

SEQ ID NO: 203780 - DNA, 30 bp, Artificial Sequence
  Synthetic oligonucleotide
ccacacgtgatgggaggtactgatacgcag

SEQ ID NO: 203781 - DNA, 30 bp, Artificial Sequence
  Synthetic oligonucleotide
cgagctttcgaaatcagatagcgtacgcag

SEQ ID NO: 203782 - DNA, 30 bp, Artificial Sequence
  Synthetic oligonucleotide
gtagaacctgcagaaggagaagccccgcag

SEQ ID NO: 203783 - DNA, 30 bp, Artificial Sequence
  Synthetic oligonucleotide
atagactagacacgagttatgtcgccgcag

SEQ ID NO: 203784 - DNA, 30 bp, Artificial Sequence
  Synthetic oligonucleotide
actctctcacgcataggtgaaatgccgcag

SEQ ID NO: 203785 - DNA, 30 bp, Artificial Sequence
  Synthetic oligonucleotide
gttacttctagtagacgaacgggagcgcag

SEQ ID NO: 203786 - DNA, 30 bp, Artificial Sequence
  Synthetic oligonucleotide
cgtgttataactctgaggtcctcggcgcag

SEQ ID NO: 203787 - DNA, 30 bp, Artificial Sequence
  Synthetic oligonucleotide
aatgaggtgcaagcaactagtctggcgcag

SEQ ID NO: 203788 - DNA, 30 bp, Artificial Sequence
  Synthetic oligonucleotide
actatggccatgtacgatatctatgcgcag

SEQ ID NO: 203789 - DNA, 30 bp, Artificial Sequence
  Synthetic oligonucleotide
cgttgtaatgcgtgcggctccgtatcgcag

SEQ ID NO: 203790 - DNA, 30 bp, Artificial Sequence
  Synthetic oligonucleotide
tgacccgtaagtatcatcggatactcgcag

SEQ ID NO: 203791 - DNA, 30 bp, Artificial Sequence
  Synthetic oligonucleotide
actacaaccttgggcggttctaagtcgcag

SEQ ID NO: 203792 - DNA, 30 bp, Artificial Sequence
  Synthetic oligonucleotide
ccgtgtcatatatagacatgcctttcgcag

SEQ ID NO: 203793 - DNA, 30 bp, Artificial Sequence
  Synthetic oligonucleotide
gtttaagattacggcaatgagaaaaggcag

SEQ ID NO: 203794 - DNA, 30 bp, Artificial Sequence
  Synthetic oligonucleotide
actcgtggcgatagtcggtaacaaaggcag

SEQ ID NO: 203795 - DNA, 30 bp, Artificial Sequence
  Synthetic oligonucleotide
aggtatggggtacataactagggtaggcag

SEQ ID NO: 203796 - DNA, 30 bp, Artificial Sequence
  Synthetic oligonucleotide
tgtaccgacttggctagtcgtaaccggcag

SEQ ID NO: 203797 - DNA, 30 bp, Artificial Sequence
  Synthetic oligonucleotide
atcgtggtcgcattacgagtgcgccggcag

SEQ ID NO: 203798 - DNA, 30 bp, Artificial Sequence
  Synthetic oligonucleotide
ggacgccgaagtgctcatctttaagggcag

SEQ ID NO: 203799 - DNA, 30 bp, Artificial Sequence
  Synthetic oligonucleotide
tttgaggagcagagcaacataggagggcag

SEQ ID NO: 203800 - DNA, 30 bp, Artificial Sequence
  Synthetic oligonucleotide
atggaatcccccgggtccgattgagggcag

SEQ ID NO: 203801 - DNA, 30 bp, Artificial Sequence
  Synthetic oligonucleotide
cgggctgataaatgtaacatattagggcag

SEQ ID NO: 203802 - DNA, 30 bp, Artificial Sequence
  Synthetic oligonucleotide
tatctgtgttaccgagcgaccgccgggcag

SEQ ID NO: 203803 - DNA, 30 bp, Artificial Sequence
  Synthetic oligonucleotide
gggactagaggcagacgtgtacaggggcag

SEQ ID NO: 203804 - DNA, 30 bp, Artificial Sequence
  Synthetic oligonucleotide
gaagtgaaaaaatgttttgatagggggcag

SEQ ID NO: 203805 - DNA, 30 bp, Artificial Sequence
  Synthetic oligonucleotide
agtacccagcagacaacgacccgggggcag

SEQ ID NO: 203806 - DNA, 30 bp, Artificial Sequence
  Synthetic oligonucleotide
atgcaccctttcctgcggacaactgggcag

SEQ ID NO: 203807 - DNA, 30 bp, Artificial Sequence
  Synthetic oligonucleotide
agcgccgggagacggttagggtgtgggcag

SEQ ID NO: 203808 - DNA, 30 bp, Artificial Sequence
  Synthetic oligonucleotide
ttgtacgaggacttacatcgagtatggcag

SEQ ID NO: 203809 - DNA, 30 bp, Artificial Sequence
  Synthetic oligonucleotide
tgcacaaacaccccggcgaactcgtggcag

SEQ ID NO: 203810 - DNA, 30 bp, Artificial Sequence
  Synthetic oligonucleotide
cattgctgaaggtcgtatggaatgtggcag

SEQ ID NO: 203811 - DNA, 30 bp, Artificial Sequence
  Synthetic oligonucleotide
aacgagcggttttggctacagaaaatgcag

SEQ ID NO: 203812 - DNA, 30 bp, Artificial Sequence
  Synthetic oligonucleotide
tcctgtttccgaaaccaacagttaatgcag

SEQ ID NO: 203813 - DNA, 30 bp, Artificial Sequence
  Synthetic oligonucleotide
agatattgttcatgtagacggttaatgcag

SEQ ID NO: 203814 - DNA, 30 bp, Artificial Sequence
  Synthetic oligonucleotide
cccaatttagggtcgagacacgacatgcag

SEQ ID NO: 203815 - DNA, 30 bp, Artificial Sequence
  Synthetic oligonucleotide
tcactccgcgaggtcagggtggggatgcag

SEQ ID NO: 203816 - DNA, 30 bp, Artificial Sequence
  Synthetic oligonucleotide
cctgagagttggagcagggggtcgctgcag

SEQ ID NO: 203817 - DNA, 30 bp, Artificial Sequence
  Synthetic oligonucleotide
ggtagtaagcaacatcaatagagtctgcag

SEQ ID NO: 203818 - DNA, 30 bp, Artificial Sequence
  Synthetic oligonucleotide
tttatgtgaaggcttactggaggagtgcag

SEQ ID NO: 203819 - DNA, 30 bp, Artificial Sequence
  Synthetic oligonucleotide
agaacgggtaatcggatcgcttcggtgcag

SEQ ID NO: 203820 - DNA, 30 bp, Artificial Sequence
  Synthetic oligonucleotide
agaaggggcttatcgctctacatggtgcag

SEQ ID NO: 203821 - DNA, 30 bp, Artificial Sequence
  Synthetic oligonucleotide
agaaaaatacgtgggcggggagaattgcag

SEQ ID NO: 203822 - DNA, 30 bp, Artificial Sequence
  Synthetic oligonucleotide
cgtacgcgagaggcactaagcacattgcag

SEQ ID NO: 203823 - DNA, 30 bp, Artificial Sequence
  Synthetic oligonucleotide
ggtccgacggaagcaaaattgcgattgcag

SEQ ID NO: 203824 - DNA, 30 bp, Artificial Sequence
  Synthetic oligonucleotide
acagacacgatgttaaaacgtctattgcag

SEQ ID NO: 203825 - DNA, 30 bp, Artificial Sequence
  Synthetic oligonucleotide
ggtgacagaaaattgaaacactgcttgcag

SEQ ID NO: 203826 - DNA, 30 bp, Artificial Sequence
  Synthetic oligonucleotide
gtgcaccaacgttctccgattgtgttgcag

SEQ ID NO: 203827 - DNA, 30 bp, Artificial Sequence
  Synthetic oligonucleotide
cggtcataaaccgcgctgttgccaaatcag

SEQ ID NO: 203828 - DNA, 30 bp, Artificial Sequence
  Synthetic oligonucleotide
ggctgcgatctgtgttgctgtacacatcag

SEQ ID NO: 203829 - DNA, 30 bp, Artificial Sequence
  Synthetic oligonucleotide
agtgatttcttgtggctaaggtgacatcag

SEQ ID NO: 203830 - DNA, 30 bp, Artificial Sequence
  Synthetic oligonucleotide
acatacgcgatcaaggattagtagcatcag

SEQ ID NO: 203831 - DNA, 30 bp, Artificial Sequence
  Synthetic oligonucleotide
tgcacaaaagaagctaatcctttgcatcag

SEQ ID NO: 203832 - DNA, 30 bp, Artificial Sequence
  Synthetic oligonucleotide
ttggccgaggagttatactttcaagatcag

SEQ ID NO: 203833 - DNA, 30 bp, Artificial Sequence
  Synthetic oligonucleotide
agtgtcagcgcgtgaacttacttagatcag

SEQ ID NO: 203834 - DNA, 30 bp, Artificial Sequence
  Synthetic oligonucleotide
tcgcgccggtatcgtctcggaaacgatcag

SEQ ID NO: 203835 - DNA, 30 bp, Artificial Sequence
  Synthetic oligonucleotide
cagcgctgtatggaaacgaaagccgatcag

SEQ ID NO: 203836 - DNA, 30 bp, Artificial Sequence
  Synthetic oligonucleotide
tcctgattgtagtgacaggtcggggatcag

SEQ ID NO: 203837 - DNA, 30 bp, Artificial Sequence
  Synthetic oligonucleotide
cccggactagggaagatataaaatgatcag

SEQ ID NO: 203838 - DNA, 30 bp, Artificial Sequence
  Synthetic oligonucleotide
ttcagggatttcctggtggcgcttgatcag

SEQ ID NO: 203839 - DNA, 30 bp, Artificial Sequence
  Synthetic oligonucleotide
acctatacgcctggagccgacaattatcag

SEQ ID NO: 203840 - DNA, 30 bp, Artificial Sequence
  Synthetic oligonucleotide
gttgaacatttataggcaaagaacactcag

SEQ ID NO: 203841 - DNA, 30 bp, Artificial Sequence
  Synthetic oligonucleotide
ggagtgaccgtgaaaataccgagcactcag

SEQ ID NO: 203842 - DNA, 30 bp, Artificial Sequence
  Synthetic oligonucleotide
atcccgaaccaggtatagggatggactcag

SEQ ID NO: 203843 - DNA, 30 bp, Artificial Sequence
  Synthetic oligonucleotide
gggcgctcgaggaaaagtgcgtctactcag

SEQ ID NO: 203844 - DNA, 30 bp, Artificial Sequence
  Synthetic oligonucleotide
tgggcggcacttacagtgttaacccctcag

SEQ ID NO: 203845 - DNA, 30 bp, Artificial Sequence
  Synthetic oligonucleotide
ctatacgtcgcttaccaaatttggcctcag

SEQ ID NO: 203846 - DNA, 30 bp, Artificial Sequence
  Synthetic oligonucleotide
ggccttacatactaactcctgtgtcctcag

SEQ ID NO: 203847 - DNA, 30 bp, Artificial Sequence
  Synthetic oligonucleotide
ggttggtgatgttgcgtcatgattcctcag

SEQ ID NO: 203848 - DNA, 30 bp, Artificial Sequence
  Synthetic oligonucleotide
gcacggcacctttggcgataaagagctcag

SEQ ID NO: 203849 - DNA, 29 bp, Artificial Sequence
  Synthetic oligonucleotide
gtatgtaagacgaaaccgacttagctcag

SEQ ID NO: 203850 - DNA, 30 bp, Artificial Sequence
  Synthetic oligonucleotide
cataattggtcaccgttatatactgctcag

SEQ ID NO: 203851 - DNA, 30 bp, Artificial Sequence
  Synthetic oligonucleotide
ctccgaggatttctgataagaacgtctcag

SEQ ID NO: 203852 - DNA, 30 bp, Artificial Sequence
  Synthetic oligonucleotide
gggaagtcgtaaagatgaagtaggtctcag

SEQ ID NO: 203853 - DNA, 30 bp, Artificial Sequence
  Synthetic oligonucleotide
gaaatcaaggaagggggccatgggtctcag

SEQ ID NO: 203854 - DNA, 30 bp, Artificial Sequence
  Synthetic oligonucleotide
tctcgtagaagaaagatgtcggattctcag

SEQ ID NO: 203855 - DNA, 30 bp, Artificial Sequence
  Synthetic oligonucleotide
tactttggagtgcaagaggttaaaagtcag

SEQ ID NO: 203856 - DNA, 30 bp, Artificial Sequence
  Synthetic oligonucleotide
gttcagcccaacacatcgtcgccacgtcag

SEQ ID NO: 203857 - DNA, 30 bp, Artificial Sequence
  Synthetic oligonucleotide
gagttcacggtcggaggatgaagacgtcag

SEQ ID NO: 203858 - DNA, 30 bp, Artificial Sequence
  Synthetic oligonucleotide
tacatgtccggaaaagccgctatacgtcag

SEQ ID NO: 203859 - DNA, 30 bp, Artificial Sequence
  Synthetic oligonucleotide
gaaaggagtccgccgttagacgaccgtcag

SEQ ID NO: 203860 - DNA, 30 bp, Artificial Sequence
  Synthetic oligonucleotide
gggttaccctggccataataaaggcgtcag

SEQ ID NO: 203861 - DNA, 30 bp, Artificial Sequence
  Synthetic oligonucleotide
ctacaaccccttgaagggcgcttgcgtcag

SEQ ID NO: 203862 - DNA, 30 bp, Artificial Sequence
  Synthetic oligonucleotide
gtggaagcctagagggctcttaatcgtcag

SEQ ID NO: 203863 - DNA, 30 bp, Artificial Sequence
  Synthetic oligonucleotide
cgattcggcgattggggccgtcaaggtcag

SEQ ID NO: 203864 - DNA, 30 bp, Artificial Sequence
  Synthetic oligonucleotide
gacaggttatacacgtctaattcaggtcag

SEQ ID NO: 203865 - DNA, 30 bp, Artificial Sequence
  Synthetic oligonucleotide
ttctgtgtaacgcccatacggataggtcag

SEQ ID NO: 203866 - DNA, 30 bp, Artificial Sequence
  Synthetic oligonucleotide
gaatagccataacggcatgtgtacggtcag

SEQ ID NO: 203867 - DNA, 30 bp, Artificial Sequence
  Synthetic oligonucleotide
ttaggtgaagagcatgaagatctcggtcag

SEQ ID NO: 203868 - DNA, 30 bp, Artificial Sequence
  Synthetic oligonucleotide
tcttacacaataacaaaaaaccagggtcag

SEQ ID NO: 203869 - DNA, 31 bp, Artificial Sequence
  Synthetic oligonucleotide
aacgaggggttttttacattccgggggtcag

SEQ ID NO: 203870 - DNA, 30 bp, Artificial Sequence
  Synthetic oligonucleotide
tgagtcccgccgatgaattcgatgggtcag

SEQ ID NO: 203871 - DNA, 30 bp, Artificial Sequence
  Synthetic oligonucleotide
gacgaaaggaccgataacccggcatgtcag

SEQ ID NO: 203872 - DNA, 30 bp, Artificial Sequence
  Synthetic oligonucleotide
actggttgaagctaagattctctatgtcag

SEQ ID NO: 203873 - DNA, 30 bp, Artificial Sequence
  Synthetic oligonucleotide
atcggagttcggttagtagacatctgtcag

SEQ ID NO: 203874 - DNA, 30 bp, Artificial Sequence
  Synthetic oligonucleotide
caaatataaataaggtggagttggtgtcag

SEQ ID NO: 203875 - DNA, 30 bp, Artificial Sequence
  Synthetic oligonucleotide
ccaggaatggaccataatacgggcattcag

SEQ ID NO: 203876 - DNA, 30 bp, Artificial Sequence
  Synthetic oligonucleotide
tcaggccacctccgtgggaagctcattcag

SEQ ID NO: 203877 - DNA, 30 bp, Artificial Sequence
  Synthetic oligonucleotide
gctacatgacgtgtatccaaaaggattcag

SEQ ID NO: 203878 - DNA, 30 bp, Artificial Sequence
  Synthetic oligonucleotide
gcctagtacaaaatccgattacaacttcag

SEQ ID NO: 203879 - DNA, 30 bp, Artificial Sequence
  Synthetic oligonucleotide
ttagttcgacgcgaggtggattgagttcag

SEQ ID NO: 203880 - DNA, 30 bp, Artificial Sequence
  Synthetic oligonucleotide
tacaaacgcgtggtcaagtccaaggttcag

SEQ ID NO: 203881 - DNA, 30 bp, Artificial Sequence
  Synthetic oligonucleotide
gtacactttactcatgtgttgacggttcag

SEQ ID NO: 203882 - DNA, 30 bp, Artificial Sequence
  Synthetic oligonucleotide
ttaggcatgtagtgcaacgagtgggttcag

SEQ ID NO: 203883 - DNA, 30 bp, Artificial Sequence
  Synthetic oligonucleotide
gtgcgtggacagggctttaccctggttcag

SEQ ID NO: 203884 - DNA, 30 bp, Artificial Sequence
  Synthetic oligonucleotide
tactgagtgagtccagtggggctggttcag

SEQ ID NO: 203885 - DNA, 30 bp, Artificial Sequence
  Synthetic oligonucleotide
cccagtaacacagtagccgtttgctttcag

SEQ ID NO: 203886 - DNA, 30 bp, Artificial Sequence
  Synthetic oligonucleotide
catctgcagtggaagaacaccgggtttcag

SEQ ID NO: 203887 - DNA, 30 bp, Artificial Sequence
  Synthetic oligonucleotide
ggggagacccgggagtccatgccttttcag

SEQ ID NO: 203888 - DNA, 30 bp, Artificial Sequence
  Synthetic oligonucleotide
aaggacgaaccaatagaattatcttttcag

SEQ ID NO: 203889 - DNA, 30 bp, Artificial Sequence
  Synthetic oligonucleotide
gatgactctagcggatgggttgtttttcag

SEQ ID NO: 203890 - DNA, 30 bp, Artificial Sequence
  Synthetic oligonucleotide
tctaggtaatgtaaatgtcggttttttcag

SEQ ID NO: 203891 - DNA, 30 bp, Artificial Sequence
  Synthetic oligonucleotide
gtttgctagcatcgacggtaacaaaaagag

SEQ ID NO: 203892 - DNA, 30 bp, Artificial Sequence
  Synthetic oligonucleotide
taaggcaccagctgtcccccgataaaagag

SEQ ID NO: 203893 - DNA, 30 bp, Artificial Sequence
  Synthetic oligonucleotide
gttcccttagggacttagggacagaaagag

SEQ ID NO: 203894 - DNA, 30 bp, Artificial Sequence
  Synthetic oligonucleotide
cgacagtttatctagtaatccgttaaagag

SEQ ID NO: 203895 - DNA, 30 bp, Artificial Sequence
  Synthetic oligonucleotide
ccccttcaaattagagcacaatcccaagag

SEQ ID NO: 203896 - DNA, 30 bp, Artificial Sequence
  Synthetic oligonucleotide
tgttccgcatgcacgttaacatgccaagag

SEQ ID NO: 203897 - DNA, 30 bp, Artificial Sequence
  Synthetic oligonucleotide
acatcgaaaagtgtagcagctgggcaagag

SEQ ID NO: 203898 - DNA, 30 bp, Artificial Sequence
  Synthetic oligonucleotide
caggaatcacacaccttttatttgcaagag

SEQ ID NO: 203899 - DNA, 30 bp, Artificial Sequence
  Synthetic oligonucleotide
cggcctaccacgtattcgatgtaagaagag

SEQ ID NO: 203900 - DNA, 30 bp, Artificial Sequence
  Synthetic oligonucleotide
cttaccgcctcgttagacaaatgtgaagag

SEQ ID NO: 203901 - DNA, 30 bp, Artificial Sequence
  Synthetic oligonucleotide
ttcatgttacgccaagttgaataataagag

SEQ ID NO: 203902 - DNA, 30 bp, Artificial Sequence
  Synthetic oligonucleotide
ccgggatcggatgatacatcgtaataagag

SEQ ID NO: 203903 - DNA, 30 bp, Artificial Sequence
  Synthetic oligonucleotide
ggttatgactgtttacagaaaagctaagag

SEQ ID NO: 203904 - DNA, 30 bp, Artificial Sequence
  Synthetic oligonucleotide
cgtgtcacgctcatggaactcggctaagag

SEQ ID NO: 203905 - DNA, 30 bp, Artificial Sequence
  Synthetic oligonucleotide
ttgaaatagggtacggcccgcctctaagag

SEQ ID NO: 203906 - DNA, 30 bp, Artificial Sequence
  Synthetic oligonucleotide
cactgtagactacgtgcccactaaacagag

SEQ ID NO: 203907 - DNA, 30 bp, Artificial Sequence
  Synthetic oligonucleotide
cccggctaatagacatgattgggaacagag

SEQ ID NO: 203908 - DNA, 30 bp, Artificial Sequence
  Synthetic oligonucleotide
tacaattcacaaaactgcgcaataacagag

SEQ ID NO: 203909 - DNA, 30 bp, Artificial Sequence
  Synthetic oligonucleotide
cgtacgttctgttcgattttcaagacagag

SEQ ID NO: 203910 - DNA, 30 bp, Artificial Sequence
  Synthetic oligonucleotide
gatacggggtgaaagggacacgcgacagag

SEQ ID NO: 203911 - DNA, 30 bp, Artificial Sequence
  Synthetic oligonucleotide
gtaagcaggacttcgtctaccaggacagag

SEQ ID NO: 203912 - DNA, 30 bp, Artificial Sequence
  Synthetic oligonucleotide
ggtgaagcacatagcatggcggatacagag

SEQ ID NO: 203913 - DNA, 30 bp, Artificial Sequence
  Synthetic oligonucleotide
ctatgggccatcatagtggtgattacagag

SEQ ID NO: 203914 - DNA, 30 bp, Artificial Sequence
  Synthetic oligonucleotide
agaaactaaatttgtggtaacccagcagag

SEQ ID NO: 203915 - DNA, 30 bp, Artificial Sequence
  Synthetic oligonucleotide
tatatatcaaagggtgcccatcacgcagag

SEQ ID NO: 203916 - DNA, 30 bp, Artificial Sequence
  Synthetic oligonucleotide
tgacctgatagagaaggtggccgcgcagag

SEQ ID NO: 203917 - DNA, 30 bp, Artificial Sequence
  Synthetic oligonucleotide
aagtgagcagtgcgaaattctcgcgcagag

SEQ ID NO: 203918 - DNA, 30 bp, Artificial Sequence
  Synthetic oligonucleotide
tgaccgctgtgaaaaggaaaaatcgcagag

SEQ ID NO: 203919 - DNA, 30 bp, Artificial Sequence
  Synthetic oligonucleotide
tagtatactcgatcccccaggatcgcagag

SEQ ID NO: 203920 - DNA, 30 bp, Artificial Sequence
  Synthetic oligonucleotide
ctttgttgtgtaacggggtcaaaggcagag

SEQ ID NO: 203921 - DNA, 30 bp, Artificial Sequence
  Synthetic oligonucleotide
ataaggctcgtcagaagcgttttggcagag

SEQ ID NO: 203922 - DNA, 30 bp, Artificial Sequence
  Synthetic oligonucleotide
agtcgtaacaaacggactactacgtcagag

SEQ ID NO: 203923 - DNA, 30 bp, Artificial Sequence
  Synthetic oligonucleotide
tgtgagatgaagacccgtcggtcgtcagag

SEQ ID NO: 203924 - DNA, 30 bp, Artificial Sequence
  Synthetic oligonucleotide
caagtattagcggtacaggtgtcttcagag

SEQ ID NO: 203925 - DNA, 30 bp, Artificial Sequence
  Synthetic oligonucleotide
tctatgctagtaccaaagagggccagagag

SEQ ID NO: 203926 - DNA, 30 bp, Artificial Sequence
  Synthetic oligonucleotide
tcgggcgcagtggttccaagagagagagag

SEQ ID NO: 203927 - DNA, 30 bp, Artificial Sequence
  Synthetic oligonucleotide
atatactatgcagggatgatgagtagagag

SEQ ID NO: 203928 - DNA, 30 bp, Artificial Sequence
  Synthetic oligonucleotide
ttggtacgtctaaaagaaaccattagagag

SEQ ID NO: 203929 - DNA, 30 bp, Artificial Sequence
  Synthetic oligonucleotide
cccttcgcaatccgtggtaacgaacgagag

SEQ ID NO: 203930 - DNA, 30 bp, Artificial Sequence
  Synthetic oligonucleotide
tatcgggagtcactctgtctagcccgagag

SEQ ID NO: 203931 - DNA, 31 bp, Artificial Sequence
  Synthetic oligonucleotide
cgccgatacactgtttgccccaggccgagag

SEQ ID NO: 203932 - DNA, 30 bp, Artificial Sequence
  Synthetic oligonucleotide
gcaactcgcacctggatcggggtccgagag

SEQ ID NO: 203933 - DNA, 30 bp, Artificial Sequence
  Synthetic oligonucleotide
gtgtattgcttagaaagtcgtttccgagag

SEQ ID NO: 203934 - DNA, 30 bp, Artificial Sequence
  Synthetic oligonucleotide
gcgatcatttaattaggacgaaagcgagag

SEQ ID NO: 203935 - DNA, 30 bp, Artificial Sequence
  Synthetic oligonucleotide
aaccgagcggcctttgggcattctcgagag

SEQ ID NO: 203936 - DNA, 30 bp, Artificial Sequence
  Synthetic oligonucleotide
ttaacgactgggtcttcaaattaatgagag

SEQ ID NO: 203937 - DNA, 30 bp, Artificial Sequence
  Synthetic oligonucleotide
ttgattaaggttgtggtgtcacattgagag

SEQ ID NO: 203938 - DNA, 30 bp, Artificial Sequence
  Synthetic oligonucleotide
caaagtatagtaggataaatgcaaatagag

SEQ ID NO: 203939 - DNA, 30 bp, Artificial Sequence
  Synthetic oligonucleotide
ttcgactgctcccttgggaaactaatagag

SEQ ID NO: 203940 - DNA, 30 bp, Artificial Sequence
  Synthetic oligonucleotide
gctaaggttcatggcgaacgttatatagag

SEQ ID NO: 203941 - DNA, 30 bp, Artificial Sequence
  Synthetic oligonucleotide
actggataagcccagtcctatatcctagag

SEQ ID NO: 203942 - DNA, 30 bp, Artificial Sequence
  Synthetic oligonucleotide
gtgggggatataaccaatgcgtcgctagag

SEQ ID NO: 203943 - DNA, 30 bp, Artificial Sequence
  Synthetic oligonucleotide
tgccatgtgtttgtccaatgggtagtagag

SEQ ID NO: 203944 - DNA, 30 bp, Artificial Sequence
  Synthetic oligonucleotide
agagggggacggggcgagttgaacgtagag

SEQ ID NO: 203945 - DNA, 30 bp, Artificial Sequence
  Synthetic oligonucleotide
tcataggtcaacggaaaattacacgtagag

SEQ ID NO: 203946 - DNA, 30 bp, Artificial Sequence
  Synthetic oligonucleotide
ggttcgaagggaacaaggtgagtcgtagag

SEQ ID NO: 203947 - DNA, 30 bp, Artificial Sequence
  Synthetic oligonucleotide
gccatgtcgcgtcgggaattatcggtagag

SEQ ID NO: 203948 - DNA, 30 bp, Artificial Sequence
  Synthetic oligonucleotide
tgcggtgcgttgcacttactagtggtagag

SEQ ID NO: 203949 - DNA, 30 bp, Artificial Sequence
  Synthetic oligonucleotide
actggttatatatcatagatcgtggtagag

SEQ ID NO: 203950 - DNA, 30 bp, Artificial Sequence
  Synthetic oligonucleotide
tttaaggtctgtcctgtaactcatgtagag

SEQ ID NO: 203951 - DNA, 30 bp, Artificial Sequence
  Synthetic oligonucleotide
acacctctgagtgtgatgggggctgtagag

SEQ ID NO: 203952 - DNA, 30 bp, Artificial Sequence
  Synthetic oligonucleotide
tttccggtagtagctagggtctttgtagag

SEQ ID NO: 203953 - DNA, 30 bp, Artificial Sequence
  Synthetic oligonucleotide
gcgcagaaaggttgggatgtacaattagag

SEQ ID NO: 203954 - DNA, 30 bp, Artificial Sequence
  Synthetic oligonucleotide
ttagctaacgctttgggttgctcattagag

SEQ ID NO: 203955 - DNA, 30 bp, Artificial Sequence
  Synthetic oligonucleotide
gtcagacccctaattttgacctgcttagag

SEQ ID NO: 203956 - DNA, 30 bp, Artificial Sequence
  Synthetic oligonucleotide
tggttgcaaattgctgagtatgtcttagag

SEQ ID NO: 203957 - DNA, 30 bp, Artificial Sequence
  Synthetic oligonucleotide
actacaaatgtaaccgtttgtcggttagag

SEQ ID NO: 203958 - DNA, 30 bp, Artificial Sequence
  Synthetic oligonucleotide
aacctattgaaaaggtcctcggaaaacgag

SEQ ID NO: 203959 - DNA, 30 bp, Artificial Sequence
  Synthetic oligonucleotide
gcatttaagagcagccaacagagaaacgag

SEQ ID NO: 203960 - DNA, 30 bp, Artificial Sequence
  Synthetic oligonucleotide
tggtcagctccaaccatggacaataacgag

SEQ ID NO: 203961 - DNA, 30 bp, Artificial Sequence
  Synthetic oligonucleotide
ttgtgtacggccggcgttcgcgataacgag

SEQ ID NO: 203962 - DNA, 30 bp, Artificial Sequence
  Synthetic oligonucleotide
acacgccagttattaatgggccagcacgag

SEQ ID NO: 203963 - DNA, 30 bp, Artificial Sequence
  Synthetic oligonucleotide
cacaatctctaattaatcaacttgcacgag

SEQ ID NO: 203964 - DNA, 30 bp, Artificial Sequence
  Synthetic oligonucleotide
tctaaatccgacgataaagtgcccgacgag

SEQ ID NO: 203965 - DNA, 30 bp, Artificial Sequence
  Synthetic oligonucleotide
gttgggagtgtactctttcgtaatgacgag

SEQ ID NO: 203966 - DNA, 30 bp, Artificial Sequence
  Synthetic oligonucleotide
tctgaccgattgggctacagcgtatacgag

SEQ ID NO: 203967 - DNA, 30 bp, Artificial Sequence
  Synthetic oligonucleotide
aaccatggggtgtgaaggtaaaactacgag

SEQ ID NO: 203968 - DNA, 30 bp, Artificial Sequence
  Synthetic oligonucleotide
aatggtatagattcgtacatgacctacgag

SEQ ID NO: 203969 - DNA, 30 bp, Artificial Sequence
  Synthetic oligonucleotide
ttggatccgtggttttatagtaaaaccgag

SEQ ID NO: 203970 - DNA, 30 bp, Artificial Sequence
  Synthetic oligonucleotide
catgcatattgctcatcaggtttcaccgag

SEQ ID NO: 203971 - DNA, 30 bp, Artificial Sequence
  Synthetic oligonucleotide
cactattactggacacaatggtctaccgag

SEQ ID NO: 203972 - DNA, 30 bp, Artificial Sequence
  Synthetic oligonucleotide
tgaggtcttaccaagtaattgtcacccgag

SEQ ID NO: 203973 - DNA, 30 bp, Artificial Sequence
  Synthetic oligonucleotide
tgcgtaaggggctgactggccggacccgag

SEQ ID NO: 203974 - DNA, 30 bp, Artificial Sequence
  Synthetic oligonucleotide
tgcgtgcaatatgccgctactagccccgag

SEQ ID NO: 203975 - DNA, 30 bp, Artificial Sequence
  Synthetic oligonucleotide
cgccgtggctgctgaagatatagtcccgag

SEQ ID NO: 203976 - DNA, 30 bp, Artificial Sequence
  Synthetic oligonucleotide
cggaaatttgacatgcgtaagttggccgag

SEQ ID NO: 203977 - DNA, 30 bp, Artificial Sequence
  Synthetic oligonucleotide
gcgcgtgggcaatacccattaaagtccgag

SEQ ID NO: 203978 - DNA, 30 bp, Artificial Sequence
  Synthetic oligonucleotide
cggttaatcgttcgatcctattagtccgag

SEQ ID NO: 203979 - DNA, 30 bp, Artificial Sequence
  Synthetic oligonucleotide
gtgatatacgcatgcaaccaaatgtccgag

SEQ ID NO: 203980 - DNA, 30 bp, Artificial Sequence
  Synthetic oligonucleotide
actaggttcgtgacacagcaagtgtccgag

SEQ ID NO: 203981 - DNA, 30 bp, Artificial Sequence
  Synthetic oligonucleotide
actaagttgtcttaattacggtccagcgag

SEQ ID NO: 203982 - DNA, 30 bp, Artificial Sequence
  Synthetic oligonucleotide
gcaccccgtgatctcttaactgtcagcgag

SEQ ID NO: 203983 - DNA, 30 bp, Artificial Sequence
  Synthetic oligonucleotide
gcgaccagggtttctaccctcgggagcgag

SEQ ID NO: 203984 - DNA, 30 bp, Artificial Sequence
  Synthetic oligonucleotide
aacaaacttaacgtaggacccgtgagcgag

SEQ ID NO: 203985 - DNA, 30 bp, Artificial Sequence
  Synthetic oligonucleotide
ctagggtggtacggttgtggaagaggcgag

SEQ ID NO: 203986 - DNA, 30 bp, Artificial Sequence
  Synthetic oligonucleotide
gaaacaggcgatgagtgcggttatggcgag

SEQ ID NO: 203987 - DNA, 30 bp, Artificial Sequence
  Synthetic oligonucleotide
gcctgaggcgaggcagcggagggtggcgag

SEQ ID NO: 203988 - DNA, 30 bp, Artificial Sequence
  Synthetic oligonucleotide
gtcaagaatggtgacttattcatatgcgag

SEQ ID NO: 203989 - DNA, 30 bp, Artificial Sequence
  Synthetic oligonucleotide
gtataataatttgtgttcgagccctgcgag

SEQ ID NO: 203990 - DNA, 30 bp, Artificial Sequence
  Synthetic oligonucleotide
agctatgcagaggaccgccgggcgtgcgag

SEQ ID NO: 203991 - DNA, 30 bp, Artificial Sequence
  Synthetic oligonucleotide
ttggaggtctcccatctttccgattgcgag

SEQ ID NO: 203992 - DNA, 30 bp, Artificial Sequence
  Synthetic oligonucleotide
gaattgtaacatcttaccagatattgcgag

SEQ ID NO: 203993 - DNA, 30 bp, Artificial Sequence
  Synthetic oligonucleotide
atacgtcgctggtcttagtcatacatcgag

SEQ ID NO: 203994 - DNA, 30 bp, Artificial Sequence
  Synthetic oligonucleotide
gatgatccgaacagagcctctttcatcgag

SEQ ID NO: 203995 - DNA, 30 bp, Artificial Sequence
  Synthetic oligonucleotide
ggtaagtcagcttttacagcacagatcgag

SEQ ID NO: 203996 - DNA, 30 bp, Artificial Sequence
  Synthetic oligonucleotide
aaaacgcactttatacatgagatgatcgag

SEQ ID NO: 203997 - DNA, 30 bp, Artificial Sequence
  Synthetic oligonucleotide
tgcattatagaacatacagaatctatcgag

SEQ ID NO: 203998 - DNA, 30 bp, Artificial Sequence
  Synthetic oligonucleotide
gcatctagacgagcgggcaatggtatcgag

SEQ ID NO: 203999 - DNA, 30 bp, Artificial Sequence
  Synthetic oligonucleotide
actcagttaacgtccggttagtgactcgag

SEQ ID NO: 204000 - DNA, 30 bp, Artificial Sequence
  Synthetic oligonucleotide
ccagcatcggcttaacggtcgttactcgag

SEQ ID NO: 204001 - DNA, 30 bp, Artificial Sequence
  Synthetic oligonucleotide
tacactctaaaactttcaagtagcctcgag

SEQ ID NO: 204002 - DNA, 30 bp, Artificial Sequence
  Synthetic oligonucleotide
tctgagtttcgagggagtcaagcgctcgag

SEQ ID NO: 204003 - DNA, 30 bp, Artificial Sequence
  Synthetic oligonucleotide
ggttggcgtctcggttgttaagcgctcgag

SEQ ID NO: 204004 - DNA, 30 bp, Artificial Sequence
  Synthetic oligonucleotide
ttcgtcttatcatcacaaagtagagtcgag

SEQ ID NO: 204005 - DNA, 30 bp, Artificial Sequence
  Synthetic oligonucleotide
acgagaaccgggggcgtaatcgtagtcgag

SEQ ID NO: 204006 - DNA, 30 bp, Artificial Sequence
  Synthetic oligonucleotide
ttatctctttctcaaagtactaacgtcgag

SEQ ID NO: 204007 - DNA, 30 bp, Artificial Sequence
  Synthetic oligonucleotide
ttatgttataatgccaggtaggacgtcgag

SEQ ID NO: 204008 - DNA, 30 bp, Artificial Sequence
  Synthetic oligonucleotide
ttgattccacgtggaccggtcagcgtcgag

SEQ ID NO: 204009 - DNA, 30 bp, Artificial Sequence
  Synthetic oligonucleotide
gtatgcagagatgtttcgggctatgtcgag

SEQ ID NO: 204010 - DNA, 30 bp, Artificial Sequence
  Synthetic oligonucleotide
taagcgaatgtggcagtcttcactgtcgag

SEQ ID NO: 204011 - DNA, 30 bp, Artificial Sequence
  Synthetic oligonucleotide
caggtatatgcgggatagaacgttgtcgag

SEQ ID NO: 204012 - DNA, 30 bp, Artificial Sequence
  Synthetic oligonucleotide
gcatctatgaatatctgggctccattcgag

SEQ ID NO: 204013 - DNA, 30 bp, Artificial Sequence
  Synthetic oligonucleotide
ggatcagtactgggcttttttgcattcgag

SEQ ID NO: 204014 - DNA, 30 bp, Artificial Sequence
  Synthetic oligonucleotide
acgaacaatagccacttggcaaagttcgag

SEQ ID NO: 204015 - DNA, 30 bp, Artificial Sequence
  Synthetic oligonucleotide
gctccgattacacgttgtagtctgttcgag

SEQ ID NO: 204016 - DNA, 30 bp, Artificial Sequence
  Synthetic oligonucleotide
ggcccaaaatattcaggtcgtagtttcgag

SEQ ID NO: 204017 - DNA, 30 bp, Artificial Sequence
  Synthetic oligonucleotide
atgtatattgtgccacgccaggcaaaggag

SEQ ID NO: 204018 - DNA, 30 bp, Artificial Sequence
  Synthetic oligonucleotide
aacatctacgtatggtgtacgaacaaggag

SEQ ID NO: 204019 - DNA, 30 bp, Artificial Sequence
  Synthetic oligonucleotide
gatgatcgctcatcttgaaccctgaaggag

SEQ ID NO: 204020 - DNA, 30 bp, Artificial Sequence
  Synthetic oligonucleotide
tggtagggtggggcagatccgaaacaggag

SEQ ID NO: 204021 - DNA, 30 bp, Artificial Sequence
  Synthetic oligonucleotide
tccattgttagtggcacagacgaacaggag

SEQ ID NO: 204022 - DNA, 30 bp, Artificial Sequence
  Synthetic oligonucleotide
acacttagggtacaccgcctgtcacaggag

SEQ ID NO: 204023 - DNA, 30 bp, Artificial Sequence
  Synthetic oligonucleotide
tgacagtgcgttgatacccatctacaggag

SEQ ID NO: 204024 - DNA, 30 bp, Artificial Sequence
  Synthetic oligonucleotide
tattcgaccgtcattctgcggttacaggag

SEQ ID NO: 204025 - DNA, 30 bp, Artificial Sequence
  Synthetic oligonucleotide
ctggtatgacaccattagtagcgccaggag

SEQ ID NO: 204026 - DNA, 30 bp, Artificial Sequence
  Synthetic oligonucleotide
ctcatcaattcctttactggagagcaggag

SEQ ID NO: 204027 - DNA, 30 bp, Artificial Sequence
  Synthetic oligonucleotide
tgcaaccggagggccgttgtattgcaggag

SEQ ID NO: 204028 - DNA, 30 bp, Artificial Sequence
  Synthetic oligonucleotide
attgcagccaaggataggggtgatcaggag

SEQ ID NO: 204029 - DNA, 30 bp, Artificial Sequence
  Synthetic oligonucleotide
acgtgtgattgccatggcgtgtctcaggag

SEQ ID NO: 204030 - DNA, 30 bp, Artificial Sequence
  Synthetic oligonucleotide
gtcaattcgtaaaaggcttatggagaggag

SEQ ID NO: 204031 - DNA, 30 bp, Artificial Sequence
  Synthetic oligonucleotide
aaggaaattatcagcagaccgttcgaggag

SEQ ID NO: 204032 - DNA, 30 bp, Artificial Sequence
  Synthetic oligonucleotide
acaatctccatattaaactggtaggaggag

SEQ ID NO: 204033 - DNA, 30 bp, Artificial Sequence
  Synthetic oligonucleotide
ttacgtcccctcgcgcgcttggcggaggag

SEQ ID NO: 204034 - DNA, 30 bp, Artificial Sequence
  Synthetic oligonucleotide
cgcatggggatggaacagagtatggaggag

SEQ ID NO: 204035 - DNA, 30 bp, Artificial Sequence
  Synthetic oligonucleotide
tcgatctaagtcctgtgttctcgtgaggag

SEQ ID NO: 204036 - DNA, 30 bp, Artificial Sequence
  Synthetic oligonucleotide
tttaacttgcgcgaaggggcgccctaggag

SEQ ID NO: 204037 - DNA, 30 bp, Artificial Sequence
  Synthetic oligonucleotide
atttagacatttagctcaaccgtgtaggag

SEQ ID NO: 204038 - DNA, 30 bp, Artificial Sequence
  Synthetic oligonucleotide
attacctccagtgacaacacagtaacggag

SEQ ID NO: 204039 - DNA, 30 bp, Artificial Sequence
  Synthetic oligonucleotide
agaggacgtcgtacttgcaatcacacggag

SEQ ID NO: 204040 - DNA, 30 bp, Artificial Sequence
  Synthetic oligonucleotide
gggatgattaggactcgtagaggcacggag

SEQ ID NO: 204041 - DNA, 30 bp, Artificial Sequence
  Synthetic oligonucleotide
aatggtattgccccggtcttgttgacggag

SEQ ID NO: 204042 - DNA, 30 bp, Artificial Sequence
  Synthetic oligonucleotide
gcattgggaagttgcgcatttactacggag

SEQ ID NO: 204043 - DNA, 30 bp, Artificial Sequence
  Synthetic oligonucleotide
gtatagacatggcgcaggattgaaccggag

SEQ ID NO: 204044 - DNA, 30 bp, Artificial Sequence
  Synthetic oligonucleotide
agcattgaggtagccaaatcctcaccggag

SEQ ID NO: 204045 - DNA, 30 bp, Artificial Sequence
  Synthetic oligonucleotide
gggagactcggcacgacaaccctgccggag

SEQ ID NO: 204046 - DNA, 30 bp, Artificial Sequence
  Synthetic oligonucleotide
aaacgcgcggcaggtcagaggttgccggag

SEQ ID NO: 204047 - DNA, 30 bp, Artificial Sequence
  Synthetic oligonucleotide
cggtcatccatgggacggtttatggcggag

SEQ ID NO: 204048 - DNA, 30 bp, Artificial Sequence
  Synthetic oligonucleotide
actgtttaaacgttggcagatattgcggag

SEQ ID NO: 204049 - DNA, 30 bp, Artificial Sequence
  Synthetic oligonucleotide
cccgtcgtttgagttgcgaatcactcggag

SEQ ID NO: 204050 - DNA, 30 bp, Artificial Sequence
  Synthetic oligonucleotide
gggtcgacctcgaaggttttgccaagggag

SEQ ID NO: 204051 - DNA, 30 bp, Artificial Sequence
  Synthetic oligonucleotide
tccattgaaaggacgcgttgaataagggag

SEQ ID NO: 204052 - DNA, 30 bp, Artificial Sequence
  Synthetic oligonucleotide
gcaatttccaggtgttttggtataagggag

SEQ ID NO: 204053 - DNA, 30 bp, Artificial Sequence
  Synthetic oligonucleotide
cagcccatgcgtggggcggctttacgggag

SEQ ID NO: 204054 - DNA, 30 bp, Artificial Sequence
  Synthetic oligonucleotide
aatcagggcatcgggaacttccgccgggag

SEQ ID NO: 204055 - DNA, 30 bp, Artificial Sequence
  Synthetic oligonucleotide
ggctaaggtctgcggacgaatgttcgggag

SEQ ID NO: 204056 - DNA, 30 bp, Artificial Sequence
  Synthetic oligonucleotide
ccgtttaatggacgagggaaaaccggggag

SEQ ID NO: 204057 - DNA, 30 bp, Artificial Sequence
  Synthetic oligonucleotide
agggaggggggttttgggttcggcggggag

SEQ ID NO: 204058 - DNA, 30 bp, Artificial Sequence
  Synthetic oligonucleotide
tccccgaaagggaggagaagtctgggggag

SEQ ID NO: 204059 - DNA, 30 bp, Artificial Sequence
  Synthetic oligonucleotide
tttgccttatagtggtgacgtgtgggggag

SEQ ID NO: 204060 - DNA, 30 bp, Artificial Sequence
  Synthetic oligonucleotide
ttccgagcacatgcgacggggagtggggag

SEQ ID NO: 204061 - DNA, 30 bp, Artificial Sequence
  Synthetic oligonucleotide
tcaaccggcacccgcgggtgaggatgggag

SEQ ID NO: 204062 - DNA, 30 bp, Artificial Sequence
  Synthetic oligonucleotide
gccctagctgctacatgggctgtatgggag

SEQ ID NO: 204063 - DNA, 30 bp, Artificial Sequence
  Synthetic oligonucleotide
tctccgggcgcaaaattttagtattgggag

SEQ ID NO: 204064 - DNA, 30 bp, Artificial Sequence
  Synthetic oligonucleotide
ctatttggagttaaaaagtccctaatggag

SEQ ID NO: 204065 - DNA, 30 bp, Artificial Sequence
  Synthetic oligonucleotide
atccaatatgatatctagacggggatggag

SEQ ID NO: 204066 - DNA, 30 bp, Artificial Sequence
  Synthetic oligonucleotide
acctaaagatcgcgcggctgaaatatggag

SEQ ID NO: 204067 - DNA, 30 bp, Artificial Sequence
  Synthetic oligonucleotide
gtacactacgtggtgactgcaggtatggag

SEQ ID NO: 204068 - DNA, 30 bp, Artificial Sequence
  Synthetic oligonucleotide
aatgacttatacactacgagcccgctggag

SEQ ID NO: 204069 - DNA, 30 bp, Artificial Sequence
  Synthetic oligonucleotide
ccaggcggactattgcacaatagtctggag

SEQ ID NO: 204070 - DNA, 30 bp, Artificial Sequence
  Synthetic oligonucleotide
acaccgtgtgggtcgcataagcgagtggag

SEQ ID NO: 204071 - DNA, 30 bp, Artificial Sequence
  Synthetic oligonucleotide
tagtgacccggggcgtgcacgagcgtggag

SEQ ID NO: 204072 - DNA, 30 bp, Artificial Sequence
  Synthetic oligonucleotide
tagttataccctaacagatagctcgtggag

SEQ ID NO: 204073 - DNA, 30 bp, Artificial Sequence
  Synthetic oligonucleotide
ctcgtcaaatccagcaggcacaaggtggag

SEQ ID NO: 204074 - DNA, 30 bp, Artificial Sequence
  Synthetic oligonucleotide
tgacattttaggagggtatactcggtggag

SEQ ID NO: 204075 - DNA, 29 bp, Artificial Sequence
  Synthetic oligonucleotide
tcttagccgatagacacaactatgtggag

SEQ ID NO: 204076 - DNA, 30 bp, Artificial Sequence
  Synthetic oligonucleotide
atcacgtgtactacggcacttcctgtggag

SEQ ID NO: 204077 - DNA, 30 bp, Artificial Sequence
  Synthetic oligonucleotide
ggccatcgctacaaaaaatgtgttgtggag

SEQ ID NO: 204078 - DNA, 30 bp, Artificial Sequence
  Synthetic oligonucleotide
gatgataaacgctatgttctcgaattggag

SEQ ID NO: 204079 - DNA, 30 bp, Artificial Sequence
  Synthetic oligonucleotide
cctcaccgacagtaagaatggtcattggag

SEQ ID NO: 204080 - DNA, 30 bp, Artificial Sequence
  Synthetic oligonucleotide
ctatcctgagtttgcatgccgagattggag

SEQ ID NO: 204081 - DNA, 30 bp, Artificial Sequence
  Synthetic oligonucleotide
gacgcctgcggataggaccacgtattggag

SEQ ID NO: 204082 - DNA, 30 bp, Artificial Sequence
  Synthetic oligonucleotide
ttccggaatacggtctcgagccggttggag

SEQ ID NO: 204083 - DNA, 30 bp, Artificial Sequence
  Synthetic oligonucleotide
gcaggcagttttcagattcgggacaatgag

SEQ ID NO: 204084 - DNA, 30 bp, Artificial Sequence
  Synthetic oligonucleotide
gctgcttttgcggggtttatcgggaatgag

SEQ ID NO: 204085 - DNA, 30 bp, Artificial Sequence
  Synthetic oligonucleotide
gaagtctaacacaaacgttggatgaatgag

SEQ ID NO: 204086 - DNA, 30 bp, Artificial Sequence
  Synthetic oligonucleotide
gtatggcatccttgtctccgagttaatgag

SEQ ID NO: 204087 - DNA, 30 bp, Artificial Sequence
  Synthetic oligonucleotide
tgacttggtttgcgaggctatgcacatgag

SEQ ID NO: 204088 - DNA, 30 bp, Artificial Sequence
  Synthetic oligonucleotide
acataaggcataccaccgtttcagcatgag

SEQ ID NO: 204089 - DNA, 30 bp, Artificial Sequence
  Synthetic oligonucleotide
gtgaaggacgtgtgtggtacgtcgcatgag

SEQ ID NO: 204090 - DNA, 30 bp, Artificial Sequence
  Synthetic oligonucleotide
cgcatgattcgtccagggtggcatcatgag

SEQ ID NO: 204091 - DNA, 30 bp, Artificial Sequence
  Synthetic oligonucleotide
cataaacaggggagcggttctagtcatgag

SEQ ID NO: 204092 - DNA, 30 bp, Artificial Sequence
  Synthetic oligonucleotide
ttagctccaccctataacgaaccggatgag

SEQ ID NO: 204093 - DNA, 30 bp, Artificial Sequence
  Synthetic oligonucleotide
cattctcgcgcaaggcacagaggggatgag

SEQ ID NO: 204094 - DNA, 29 bp, Artificial Sequence
  Synthetic oligonucleotide
ataatcgtctaggggtgagtaatgatgag

SEQ ID NO: 204095 - DNA, 30 bp, Artificial Sequence
  Synthetic oligonucleotide
agaatctacttgagatctggtgatgatgag

SEQ ID NO: 204096 - DNA, 30 bp, Artificial Sequence
  Synthetic oligonucleotide
gcaaagtgctagataccggatcactatgag

SEQ ID NO: 204097 - DNA, 30 bp, Artificial Sequence
  Synthetic oligonucleotide
cgtcaaaactcaactggcaacttctatgag

SEQ ID NO: 204098 - DNA, 30 bp, Artificial Sequence
  Synthetic oligonucleotide
tcagacaaacttggctggggtgggtatgag

SEQ ID NO: 204099 - DNA, 30 bp, Artificial Sequence
  Synthetic oligonucleotide
ttgcaacgagcacacgcgagtcgttatgag

SEQ ID NO: 204100 - DNA, 30 bp, Artificial Sequence
  Synthetic oligonucleotide
cggcacgtcgtaaccggcttctgttatgag

SEQ ID NO: 204101 - DNA, 30 bp, Artificial Sequence
  Synthetic oligonucleotide
gctcttcactttacgcaagtcaacactgag

SEQ ID NO: 204102 - DNA, 30 bp, Artificial Sequence
  Synthetic oligonucleotide
gctggcccctaaaattctccacacactgag

SEQ ID NO: 204103 - DNA, 30 bp, Artificial Sequence
  Synthetic oligonucleotide
gtgcggtccgcgaaccttctaagcactgag

SEQ ID NO: 204104 - DNA, 30 bp, Artificial Sequence
  Synthetic oligonucleotide
gtagcttggtacacttattttctcactgag

SEQ ID NO: 204105 - DNA, 30 bp, Artificial Sequence
  Synthetic oligonucleotide
tattgttgcgagggttctccggatactgag

SEQ ID NO: 204106 - DNA, 30 bp, Artificial Sequence
  Synthetic oligonucleotide
tcaccgacttctaatgtgtcatgtactgag

SEQ ID NO: 204107 - DNA, 30 bp, Artificial Sequence
  Synthetic oligonucleotide
acaggtggttgacgggtataggttactgag

SEQ ID NO: 204108 - DNA, 30 bp, Artificial Sequence
  Synthetic oligonucleotide
agttcaaaattgctccggagctgacctgag

SEQ ID NO: 204109 - DNA, 30 bp, Artificial Sequence
  Synthetic oligonucleotide
aagattctgtacactgcttgagtacctgag

SEQ ID NO: 204110 - DNA, 30 bp, Artificial Sequence
  Synthetic oligonucleotide
ttaacagagcgcaatccgagaatccctgag

SEQ ID NO: 204111 - DNA, 30 bp, Artificial Sequence
  Synthetic oligonucleotide
gtatcacttggtctagcaccattccctgag

SEQ ID NO: 204112 - DNA, 30 bp, Artificial Sequence
  Synthetic oligonucleotide
tgcgaaggtacacgtatatttgctcctgag

SEQ ID NO: 204113 - DNA, 30 bp, Artificial Sequence
  Synthetic oligonucleotide
gtgcctacagaggccgtgtctagtcctgag

SEQ ID NO: 204114 - DNA, 30 bp, Artificial Sequence
  Synthetic oligonucleotide
gcactaccaatgatatgaaattgtcctgag

SEQ ID NO: 204115 - DNA, 31 bp, Artificial Sequence
  Synthetic oligonucleotide
agagtggcctacaaaagcattagtagctgag

SEQ ID NO: 204116 - DNA, 30 bp, Artificial Sequence
  Synthetic oligonucleotide
ttgaagtcgtttaacacgatcaccgctgag

SEQ ID NO: 204117 - DNA, 30 bp, Artificial Sequence
  Synthetic oligonucleotide
tcaccgtctaattggcgcacagaggctgag

SEQ ID NO: 204118 - DNA, 30 bp, Artificial Sequence
  Synthetic oligonucleotide
tctatatgcaacgcccgtctgtagtctgag

SEQ ID NO: 204119 - DNA, 30 bp, Artificial Sequence
  Synthetic oligonucleotide
tatacatgaccggcgttctaagcttctgag

SEQ ID NO: 204120 - DNA, 30 bp, Artificial Sequence
  Synthetic oligonucleotide
aataggatgctagactatggggcttctgag

SEQ ID NO: 204121 - DNA, 30 bp, Artificial Sequence
  Synthetic oligonucleotide
gttctatgccgtgttcattacctaagtgag

SEQ ID NO: 204122 - DNA, 30 bp, Artificial Sequence
  Synthetic oligonucleotide
aaacgggcgtcggcgatccttttcagtgag

SEQ ID NO: 204123 - DNA, 30 bp, Artificial Sequence
  Synthetic oligonucleotide
aacgaccgcgcaaattgacgtgagagtgag

SEQ ID NO: 204124 - DNA, 30 bp, Artificial Sequence
  Synthetic oligonucleotide
tctcagtaggttatctcgtcatagagtgag

SEQ ID NO: 204125 - DNA, 30 bp, Artificial Sequence
  Synthetic oligonucleotide
tgcctccgcggtggtcatgagaggagtgag

SEQ ID NO: 204126 - DNA, 30 bp, Artificial Sequence
  Synthetic oligonucleotide
ttgacttgagcatgcgacacggggagtgag

SEQ ID NO: 204127 - DNA, 30 bp, Artificial Sequence
  Synthetic oligonucleotide
ttcgttgaatgttcacgccccgctagtgag

SEQ ID NO: 204128 - DNA, 30 bp, Artificial Sequence
  Synthetic oligonucleotide
ccgtgtaacgcgctgccgaattctagtgag

SEQ ID NO: 204129 - DNA, 30 bp, Artificial Sequence
  Synthetic oligonucleotide
gctatcaccattcatgggagtagtagtgag

SEQ ID NO: 204130 - DNA, 30 bp, Artificial Sequence
  Synthetic oligonucleotide
agtgatcgcccttatccattgtcccgtgag

SEQ ID NO: 204131 - DNA, 30 bp, Artificial Sequence
  Synthetic oligonucleotide
actaacgcgctcgatgagaaaaagcgtgag

SEQ ID NO: 204132 - DNA, 30 bp, Artificial Sequence
  Synthetic oligonucleotide
caatggttagacgacacggagtatcgtgag

SEQ ID NO: 204133 - DNA, 30 bp, Artificial Sequence
  Synthetic oligonucleotide
attgcggctcggacgctgaagtcaggtgag

SEQ ID NO: 204134 - DNA, 30 bp, Artificial Sequence
  Synthetic oligonucleotide
tttggtgcgaatgacgatgctgccggtgag

SEQ ID NO: 204135 - DNA, 30 bp, Artificial Sequence
  Synthetic oligonucleotide
tcaggaacctagggcagccgccgcggtgag

SEQ ID NO: 204136 - DNA, 30 bp, Artificial Sequence
  Synthetic oligonucleotide
gtgtctaatagagatgccatggcgggtgag

SEQ ID NO: 204137 - DNA, 30 bp, Artificial Sequence
  Synthetic oligonucleotide
tctatctcggccactacacaactgtgtgag

SEQ ID NO: 204138 - DNA, 30 bp, Artificial Sequence
  Synthetic oligonucleotide
ccagtaaaatgcacgcgctcaacttgtgag

SEQ ID NO: 204139 - DNA, 30 bp, Artificial Sequence
  Synthetic oligonucleotide
acgaaatgaggtgccttcgttaaaattgag

SEQ ID NO: 204140 - DNA, 30 bp, Artificial Sequence
  Synthetic oligonucleotide
aaagagtcatgggtaccgtcagaaattgag

SEQ ID NO: 204141 - DNA, 30 bp, Artificial Sequence
  Synthetic oligonucleotide
ttcactgagagtaccacttcactaattgag

SEQ ID NO: 204142 - DNA, 30 bp, Artificial Sequence
  Synthetic oligonucleotide
tgtatcgtctggtgaaccgttttaattgag

SEQ ID NO: 204143 - DNA, 30 bp, Artificial Sequence
  Synthetic oligonucleotide
acacagacaaccgcacctagggacattgag

SEQ ID NO: 204144 - DNA, 30 bp, Artificial Sequence
  Synthetic oligonucleotide
cagtcaagtctaggtattcaaatgattgag

SEQ ID NO: 204145 - DNA, 30 bp, Artificial Sequence
  Synthetic oligonucleotide
tggatatatcgacacgtagcccaacttgag

SEQ ID NO: 204146 - DNA, 30 bp, Artificial Sequence
  Synthetic oligonucleotide
aggcccttataccactccatccaccttgag

SEQ ID NO: 204147 - DNA, 30 bp, Artificial Sequence
  Synthetic oligonucleotide
actttaaaattgattctgggacgtcttgag

SEQ ID NO: 204148 - DNA, 30 bp, Artificial Sequence
  Synthetic oligonucleotide
tagtcatactgatgaattaggcgagttgag

SEQ ID NO: 204149 - DNA, 30 bp, Artificial Sequence
  Synthetic oligonucleotide
ttgaaatgagtcgccgaaaatggagttgag

SEQ ID NO: 204150 - DNA, 30 bp, Artificial Sequence
  Synthetic oligonucleotide
cacggtacgctctcaggtgggtgagttgag

SEQ ID NO: 204151 - DNA, 30 bp, Artificial Sequence
  Synthetic oligonucleotide
cgcgtagcccgaaaaagacgcatagttgag

SEQ ID NO: 204152 - DNA, 30 bp, Artificial Sequence
  Synthetic oligonucleotide
atatggttcatgcttttcgacatcgttgag

SEQ ID NO: 204153 - DNA, 30 bp, Artificial Sequence
  Synthetic oligonucleotide
catgaatttgataagttggagcaggttgag

SEQ ID NO: 204154 - DNA, 30 bp, Artificial Sequence
  Synthetic oligonucleotide
cttatcgccctacataagccacgggttgag

SEQ ID NO: 204155 - DNA, 30 bp, Artificial Sequence
  Synthetic oligonucleotide
catgggaccaacaagggacttttggttgag

SEQ ID NO: 204156 - DNA, 30 bp, Artificial Sequence
  Synthetic oligonucleotide
tgagtggggacactccttaggtaatttgag

SEQ ID NO: 204157 - DNA, 30 bp, Artificial Sequence
  Synthetic oligonucleotide
ttctgtcaatatgaatatatatcatttgag

SEQ ID NO: 204158 - DNA, 30 bp, Artificial Sequence
  Synthetic oligonucleotide
tacgtaatgaccccattggctttatttgag

SEQ ID NO: 204159 - DNA, 30 bp, Artificial Sequence
  Synthetic oligonucleotide
gggtgataatagagcgtattggcgtttgag

SEQ ID NO: 204160 - DNA, 30 bp, Artificial Sequence
  Synthetic oligonucleotide
ctagaaaagcggtagcgttgtcggtttgag

SEQ ID NO: 204161 - DNA, 30 bp, Artificial Sequence
  Synthetic oligonucleotide
tagctgtccaagattaatggctggtttgag

SEQ ID NO: 204162 - DNA, 30 bp, Artificial Sequence
  Synthetic oligonucleotide
ggcgattatgtacgctccctgagaaaatag

SEQ ID NO: 204163 - DNA, 30 bp, Artificial Sequence
  Synthetic oligonucleotide
gggttgacacttgtttccgacatcaaatag

SEQ ID NO: 204164 - DNA, 30 bp, Artificial Sequence
  Synthetic oligonucleotide
cttgtcaaaccgggtcagcgctagaaatag

SEQ ID NO: 204165 - DNA, 30 bp, Artificial Sequence
  Synthetic oligonucleotide
gttgggatagagcggcgcctgggtaaatag

SEQ ID NO: 204166 - DNA, 30 bp, Artificial Sequence
  Synthetic oligonucleotide
gtacgtatgtttgtctatagataccaatag

SEQ ID NO: 204167 - DNA, 30 bp, Artificial Sequence
  Synthetic oligonucleotide
atagtacttggcgcatgtttttgccaatag

SEQ ID NO: 204168 - DNA, 30 bp, Artificial Sequence
  Synthetic oligonucleotide
ggggaaatagttaggcgatccttccaatag

SEQ ID NO: 204169 - DNA, 30 bp, Artificial Sequence
  Synthetic oligonucleotide
atcgccgagactatctgaattaggcaatag

SEQ ID NO: 204170 - DNA, 30 bp, Artificial Sequence
  Synthetic oligonucleotide
ggacgttgctatgattgaacgtcagaatag

SEQ ID NO: 204171 - DNA, 30 bp, Artificial Sequence
  Synthetic oligonucleotide
tgtggtgcagtgcgccatcggtgagaatag

SEQ ID NO: 204172 - DNA, 30 bp, Artificial Sequence
  Synthetic oligonucleotide
aattgcgatatccggtgtacaatagaatag

SEQ ID NO: 204173 - DNA, 30 bp, Artificial Sequence
  Synthetic oligonucleotide
gacatacgtacaagttctagttaggaatag

SEQ ID NO: 204174 - DNA, 30 bp, Artificial Sequence
  Synthetic oligonucleotide
aacgatactgtcgttcgaaagacggaatag

SEQ ID NO: 204175 - DNA, 30 bp, Artificial Sequence
  Synthetic oligonucleotide
agacgttgctccttactcaggacataatag

SEQ ID NO: 204176 - DNA, 30 bp, Artificial Sequence
  Synthetic oligonucleotide
tacgcgggtatgcagtaatggcgctaatag

SEQ ID NO: 204177 - DNA, 30 bp, Artificial Sequence
  Synthetic oligonucleotide
tataacagttaggagagatcggcgtaatag

SEQ ID NO: 204178 - DNA, 30 bp, Artificial Sequence
  Synthetic oligonucleotide
gtgcgggctcaaagcgccaaatgttaatag

SEQ ID NO: 204179 - DNA, 30 bp, Artificial Sequence
  Synthetic oligonucleotide
agtggtagtgtgtaagttccttgcacatag

SEQ ID NO: 204180 - DNA, 30 bp, Artificial Sequence
  Synthetic oligonucleotide
tcagacgtacggcggtcaacccagacatag

SEQ ID NO: 204181 - DNA, 30 bp, Artificial Sequence
  Synthetic oligonucleotide
gtgacacgcggctgtccactacatacatag

SEQ ID NO: 204182 - DNA, 30 bp, Artificial Sequence
  Synthetic oligonucleotide
gggtataacgggatttgaccgtccccatag

SEQ ID NO: 204183 - DNA, 30 bp, Artificial Sequence
  Synthetic oligonucleotide
tatgagttaaacaatagatagacgccatag

SEQ ID NO: 204184 - DNA, 30 bp, Artificial Sequence
  Synthetic oligonucleotide
gaaagcgtaatccgagtatactcagcatag

SEQ ID NO: 204185 - DNA, 30 bp, Artificial Sequence
  Synthetic oligonucleotide
tgactaagaagtccggtagtagaggcatag

SEQ ID NO: 204186 - DNA, 30 bp, Artificial Sequence
  Synthetic oligonucleotide
tggaagtgcacatcgattcgcggggcatag

SEQ ID NO: 204187 - DNA, 30 bp, Artificial Sequence
  Synthetic oligonucleotide
ttgcgatggcgcttccgagacttggcatag

SEQ ID NO: 204188 - DNA, 30 bp, Artificial Sequence
  Synthetic oligonucleotide
aaaagtgtctggtaaccgtcgaatgcatag

SEQ ID NO: 204189 - DNA, 30 bp, Artificial Sequence
  Synthetic oligonucleotide
tactacaatctgagcagcctggatgcatag

SEQ ID NO: 204190 - DNA, 30 bp, Artificial Sequence
  Synthetic oligonucleotide
ctagtgagatgtgaaagcgaggctgcatag

SEQ ID NO: 204191 - DNA, 30 bp, Artificial Sequence
  Synthetic oligonucleotide
tcagcgcaacgtctgcaatactgatcatag

SEQ ID NO: 204192 - DNA, 30 bp, Artificial Sequence
  Synthetic oligonucleotide
atccaagccgacgtttgcatggtatcatag

SEQ ID NO: 204193 - DNA, 30 bp, Artificial Sequence
  Synthetic oligonucleotide
aagtacaacaaaggaagtgcagagtcatag

SEQ ID NO: 204194 - DNA, 30 bp, Artificial Sequence
  Synthetic oligonucleotide
gcttaacacaaatgaaaagtttggtcatag

SEQ ID NO: 204195 - DNA, 30 bp, Artificial Sequence
  Synthetic oligonucleotide
tgcgacccatgagctcggcctttgtcatag

SEQ ID NO: 204196 - DNA, 30 bp, Artificial Sequence
  Synthetic oligonucleotide
actttcgcgggttgggtgctgacttcatag

SEQ ID NO: 204197 - DNA, 30 bp, Artificial Sequence
  Synthetic oligonucleotide
tttgaaagtacacccgaaccacgttcatag

SEQ ID NO: 204198 - DNA, 30 bp, Artificial Sequence
  Synthetic oligonucleotide
atgttaggggaagacggatgaatttcatag

SEQ ID NO: 204199 - DNA, 30 bp, Artificial Sequence
  Synthetic oligonucleotide
tccctacaaactgcatagggtcgcagatag

SEQ ID NO: 204200 - DNA, 30 bp, Artificial Sequence
  Synthetic oligonucleotide
ttcaggactgagctcaccatcgggagatag

SEQ ID NO: 204201 - DNA, 30 bp, Artificial Sequence
  Synthetic oligonucleotide
gttataagaaaatcttgttagattagatag

SEQ ID NO: 204202 - DNA, 30 bp, Artificial Sequence
  Synthetic oligonucleotide
tgccgtcgtatcgttgcaacatcacgatag

SEQ ID NO: 204203 - DNA, 30 bp, Artificial Sequence
  Synthetic oligonucleotide
gctcgttggtttcgtagagggagacgatag

SEQ ID NO: 204204 - DNA, 30 bp, Artificial Sequence
  Synthetic oligonucleotide
gataagttatcacaataggggtgacgatag

SEQ ID NO: 204205 - DNA, 30 bp, Artificial Sequence
  Synthetic oligonucleotide
aaacatgaatgaagatatggacatcgatag

SEQ ID NO: 204206 - DNA, 30 bp, Artificial Sequence
  Synthetic oligonucleotide
tctattatcgtctttagccagaacggatag

SEQ ID NO: 204207 - DNA, 30 bp, Artificial Sequence
  Synthetic oligonucleotide
agaacctaattatatagggtcgacggatag

SEQ ID NO: 204208 - DNA, 30 bp, Artificial Sequence
  Synthetic oligonucleotide
aaggcagccgaggaaggggcgcgcggatag

SEQ ID NO: 204209 - DNA, 30 bp, Artificial Sequence
  Synthetic oligonucleotide
gcgatgcgacggggttcaaatgcgggatag

SEQ ID NO: 204210 - DNA, 30 bp, Artificial Sequence
  Synthetic oligonucleotide
agtaggctgaggcctacttgacttggatag

SEQ ID NO: 204211 - DNA, 30 bp, Artificial Sequence
  Synthetic oligonucleotide
gaggagagtgtagccaactcctttggatag

SEQ ID NO: 204212 - DNA, 30 bp, Artificial Sequence
  Synthetic oligonucleotide
acaaactctaatcgtcagcgtgcatgatag

SEQ ID NO: 204213 - DNA, 30 bp, Artificial Sequence
  Synthetic oligonucleotide
aagtcttactgttctttctaaagatgatag

SEQ ID NO: 204214 - DNA, 30 bp, Artificial Sequence
  Synthetic oligonucleotide
ttcaaagtttgtcctaccccgacctgatag

SEQ ID NO: 204215 - DNA, 30 bp, Artificial Sequence
  Synthetic oligonucleotide
caggctaattagtatcgcatatggtgatag

SEQ ID NO: 204216 - DNA, 30 bp, Artificial Sequence
  Synthetic oligonucleotide
catgaacgagtaagattgattccaatatag

SEQ ID NO: 204217 - DNA, 30 bp, Artificial Sequence
  Synthetic oligonucleotide
taaggggttgtaacgttacgagtaatatag

SEQ ID NO: 204218 - DNA, 30 bp, Artificial Sequence
  Synthetic oligonucleotide
ggaagttcagatgggggagtcgccatatag

SEQ ID NO: 204219 - DNA, 30 bp, Artificial Sequence
  Synthetic oligonucleotide
aaggtccggaagattatgtgaaagatatag

SEQ ID NO: 204220 - DNA, 30 bp, Artificial Sequence
  Synthetic oligonucleotide
catcggacagtcaccgtgtggtcactatag

SEQ ID NO: 204221 - DNA, 30 bp, Artificial Sequence
  Synthetic oligonucleotide
gtcgagcatcccccggcctctggactatag

SEQ ID NO: 204222 - DNA, 30 bp, Artificial Sequence
  Synthetic oligonucleotide
gcccatatggatagaataaccctactatag

SEQ ID NO: 204223 - DNA, 30 bp, Artificial Sequence
  Synthetic oligonucleotide
cgttcctatgcggcgtcacaggggctatag

SEQ ID NO: 204224 - DNA, 30 bp, Artificial Sequence
  Synthetic oligonucleotide
tcgtctcaccgaaccttagcgtgtctatag

SEQ ID NO: 204225 - DNA, 30 bp, Artificial Sequence
  Synthetic oligonucleotide
cagttgggcaatatataaacactagtatag

SEQ ID NO: 204226 - DNA, 30 bp, Artificial Sequence
  Synthetic oligonucleotide
gtggatatatacctattttggtacgtatag

SEQ ID NO: 204227 - DNA, 30 bp, Artificial Sequence
  Synthetic oligonucleotide
ttagttaggcctaccatcgaaacggtatag

SEQ ID NO: 204228 - DNA, 30 bp, Artificial Sequence
  Synthetic oligonucleotide
gcgtaatatacgtatatcaactgggtatag

SEQ ID NO: 204229 - DNA, 31 bp, Artificial Sequence
  Synthetic oligonucleotide
tgtataactatatcacgtgacgatggtatag

SEQ ID NO: 204230 - DNA, 30 bp, Artificial Sequence
  Synthetic oligonucleotide
tgttacagatcgccattagtacctgtatag

SEQ ID NO: 204231 - DNA, 30 bp, Artificial Sequence
  Synthetic oligonucleotide
cgtccgacgggttgtacactccttgtatag

SEQ ID NO: 204232 - DNA, 30 bp, Artificial Sequence
  Synthetic oligonucleotide
taggtgcgacaagtatgatttgttgtatag

SEQ ID NO: 204233 - DNA, 30 bp, Artificial Sequence
  Synthetic oligonucleotide
ggctcccaaccagcgacctgatagttatag

SEQ ID NO: 204234 - DNA, 30 bp, Artificial Sequence
  Synthetic oligonucleotide
cccaggttggtagtttatcgcacgttatag

SEQ ID NO: 204235 - DNA, 30 bp, Artificial Sequence
  Synthetic oligonucleotide
tcccgacaggcaaatgtttatgggttatag

SEQ ID NO: 204236 - DNA, 30 bp, Artificial Sequence
  Synthetic oligonucleotide
ggctaccaccgttgatgaagtatgttatag

SEQ ID NO: 204237 - DNA, 30 bp, Artificial Sequence
  Synthetic oligonucleotide
ataaactgcggaacggatccggatttatag

SEQ ID NO: 204238 - DNA, 30 bp, Artificial Sequence
  Synthetic oligonucleotide
cggactttaggaggggcggtcataaactag

SEQ ID NO: 204239 - DNA, 30 bp, Artificial Sequence
  Synthetic oligonucleotide
tcgcaaccaacgggcgctatttataactag

SEQ ID NO: 204240 - DNA, 30 bp, Artificial Sequence
  Synthetic oligonucleotide
atttgtttacagtaacacgtgagtaactag

SEQ ID NO: 204241 - DNA, 30 bp, Artificial Sequence
  Synthetic oligonucleotide
agtcctattgttagttatctgcccgactag

SEQ ID NO: 204242 - DNA, 30 bp, Artificial Sequence
  Synthetic oligonucleotide
agcgagtagcaaggctccctcccggactag

SEQ ID NO: 204243 - DNA, 30 bp, Artificial Sequence
  Synthetic oligonucleotide
agccattgcaataacgcgcaatcggactag

SEQ ID NO: 204244 - DNA, 30 bp, Artificial Sequence
  Synthetic oligonucleotide
tagagccggacgccgtctaatgttgactag

SEQ ID NO: 204245 - DNA, 30 bp, Artificial Sequence
  Synthetic oligonucleotide
ttaaagccgattgtgtgaggtaaatactag

SEQ ID NO: 204246 - DNA, 30 bp, Artificial Sequence
  Synthetic oligonucleotide
aggtacttttgttagctcggcagatactag

SEQ ID NO: 204247 - DNA, 30 bp, Artificial Sequence
  Synthetic oligonucleotide
aggcaaccccggccgtcttacttatactag

SEQ ID NO: 204248 - DNA, 30 bp, Artificial Sequence
  Synthetic oligonucleotide
ctggaatacatggcgcaaaccccctactag

SEQ ID NO: 204249 - DNA, 30 bp, Artificial Sequence
  Synthetic oligonucleotide
ttggggtgtgacaattgtgggttctactag

SEQ ID NO: 204250 - DNA, 30 bp, Artificial Sequence
  Synthetic oligonucleotide
tgcgggtatgagacgtattgcggttactag

SEQ ID NO: 204251 - DNA, 30 bp, Artificial Sequence
  Synthetic oligonucleotide
gtcattcggtccttggggaaactaacctag

SEQ ID NO: 204252 - DNA, 30 bp, Artificial Sequence
  Synthetic oligonucleotide
caaaccggcatacacctgaatcttccctag

SEQ ID NO: 204253 - DNA, 30 bp, Artificial Sequence
  Synthetic oligonucleotide
gccatagtgtgcgtgagtggcgttccctag

SEQ ID NO: 204254 - DNA, 30 bp, Artificial Sequence
  Synthetic oligonucleotide
cgatggggatatgatcacctcagatcctag

SEQ ID NO: 204255 - DNA, 30 bp, Artificial Sequence
  Synthetic oligonucleotide
atactgacgtaagatatagcgatatcctag

SEQ ID NO: 204256 - DNA, 30 bp, Artificial Sequence
  Synthetic oligonucleotide
taggcgtattacaaattttcgttatcctag

SEQ ID NO: 204257 - DNA, 30 bp, Artificial Sequence
  Synthetic oligonucleotide
tatagggagagaattgtcggatcctcctag

SEQ ID NO: 204258 - DNA, 30 bp, Artificial Sequence
  Synthetic oligonucleotide
ccgagttatatgaaaggagtccaaagctag

SEQ ID NO: 204259 - DNA, 30 bp, Artificial Sequence
  Synthetic oligonucleotide
gattaaccataagatagacgtgggagctag

SEQ ID NO: 204260 - DNA, 30 bp, Artificial Sequence
  Synthetic oligonucleotide
cctggtttggtacctaattggacacgctag

SEQ ID NO: 204261 - DNA, 30 bp, Artificial Sequence
  Synthetic oligonucleotide
gtaagggtaagcttcctggcaataggctag

SEQ ID NO: 204262 - DNA, 30 bp, Artificial Sequence
  Synthetic oligonucleotide
gcagtctgagcataccatctgtgcggctag

SEQ ID NO: 204263 - DNA, 30 bp, Artificial Sequence
  Synthetic oligonucleotide
tactatttcgggagaggttaatagggctag

SEQ ID NO: 204264 - DNA, 30 bp, Artificial Sequence
  Synthetic oligonucleotide
caatgggatctcataaagaacccgggctag

SEQ ID NO: 204265 - DNA, 30 bp, Artificial Sequence
  Synthetic oligonucleotide
gctgggcctttgcaaagatacgatggctag

SEQ ID NO: 204266 - DNA, 30 bp, Artificial Sequence
  Synthetic oligonucleotide
taacgcatcacggtgagtatccgtggctag

SEQ ID NO: 204267 - DNA, 30 bp, Artificial Sequence
  Synthetic oligonucleotide
cagatgggtttcgccgcctttcgtggctag

SEQ ID NO: 204268 - DNA, 30 bp, Artificial Sequence
  Synthetic oligonucleotide
aggcgtcctgggagtacccggattggctag

SEQ ID NO: 204269 - DNA, 30 bp, Artificial Sequence
  Synthetic oligonucleotide
cacggtcaattgaatactacctgttgctag

SEQ ID NO: 204270 - DNA, 30 bp, Artificial Sequence
  Synthetic oligonucleotide
caacggcgtatgcaacccgcgtgttgctag

SEQ ID NO: 204271 - DNA, 30 bp, Artificial Sequence
  Synthetic oligonucleotide
gccttagacagaaggatcaaaaaaatctag

SEQ ID NO: 204272 - DNA, 30 bp, Artificial Sequence
  Synthetic oligonucleotide
taaggcgtgaggctcctgtgttgaatctag

SEQ ID NO: 204273 - DNA, 30 bp, Artificial Sequence
  Synthetic oligonucleotide
gagtacagtaccatggtcgtatcgatctag

SEQ ID NO: 204274 - DNA, 30 bp, Artificial Sequence
  Synthetic oligonucleotide
gtcgtgaactaatatggggaacaactctag

SEQ ID NO: 204275 - DNA, 30 bp, Artificial Sequence
  Synthetic oligonucleotide
cgcgactatgcggcgcaactggacctctag

SEQ ID NO: 204276 - DNA, 30 bp, Artificial Sequence
  Synthetic oligonucleotide
ctcgtgagtaggtgtctttataatctctag

SEQ ID NO: 204277 - DNA, 30 bp, Artificial Sequence
  Synthetic oligonucleotide
agctttatcggatagttaaggacagtctag

SEQ ID NO: 204278 - DNA, 30 bp, Artificial Sequence
  Synthetic oligonucleotide
tattgtaagatgcgccaaacagctgtctag

SEQ ID NO: 204279 - DNA, 30 bp, Artificial Sequence
  Synthetic oligonucleotide
tcatatttcttacatcattctctgttctag

SEQ ID NO: 204280 - DNA, 30 bp, Artificial Sequence
  Synthetic oligonucleotide
gttatcaccatgtcacactttcaaaagtag

SEQ ID NO: 204281 - DNA, 30 bp, Artificial Sequence
  Synthetic oligonucleotide
ggcaacaaacgaggatacgtagccaagtag

SEQ ID NO: 204282 - DNA, 30 bp, Artificial Sequence
  Synthetic oligonucleotide
gtgtgtagagccggaactcacttcaagtag

SEQ ID NO: 204283 - DNA, 30 bp, Artificial Sequence
  Synthetic oligonucleotide
tgttgatttatatccacatgcgagaagtag

SEQ ID NO: 204284 - DNA, 30 bp, Artificial Sequence
  Synthetic oligonucleotide
tacaacgtcctgttccaaccttagaagtag

SEQ ID NO: 204285 - DNA, 30 bp, Artificial Sequence
  Synthetic oligonucleotide
gcaatcccggccgagctggcaaggaagtag

SEQ ID NO: 204286 - DNA, 30 bp, Artificial Sequence
  Synthetic oligonucleotide
cttctatgaccggaaggcgttattaagtag

SEQ ID NO: 204287 - DNA, 30 bp, Artificial Sequence
  Synthetic oligonucleotide
gcgcgaagatctcacgcgttgccacagtag

SEQ ID NO: 204288 - DNA, 30 bp, Artificial Sequence
  Synthetic oligonucleotide
agtggtgcgtaatccgaaaagaggcagtag

SEQ ID NO: 204289 - DNA, 30 bp, Artificial Sequence
  Synthetic oligonucleotide
ggtgggactgggaacagactgctgcagtag

SEQ ID NO: 204290 - DNA, 30 bp, Artificial Sequence
  Synthetic oligonucleotide
acctaaggtctacggggacgtgtgcagtag

SEQ ID NO: 204291 - DNA, 30 bp, Artificial Sequence
  Synthetic oligonucleotide
agacagaattcgaatagcgtttgtcagtag

SEQ ID NO: 204292 - DNA, 30 bp, Artificial Sequence
  Synthetic oligonucleotide
acgatgacgcggactttcattattcagtag

SEQ ID NO: 204293 - DNA, 30 bp, Artificial Sequence
  Synthetic oligonucleotide
tgattatttgctgcgcgtattagcgagtag

SEQ ID NO: 204294 - DNA, 30 bp, Artificial Sequence
  Synthetic oligonucleotide
ccacatctccacatccaaaatgcggagtag

SEQ ID NO: 204295 - DNA, 30 bp, Artificial Sequence
  Synthetic oligonucleotide
agatcgaacagttccaatgtctatgagtag

SEQ ID NO: 204296 - DNA, 29 bp, Artificial Sequence
  Synthetic oligonucleotide
gtagaacttttgcgggggtgtatgagtag

SEQ ID NO: 204297 - DNA, 30 bp, Artificial Sequence
  Synthetic oligonucleotide
gctcttctgcataacaagtttaaatagtag

SEQ ID NO: 204298 - DNA, 30 bp, Artificial Sequence
  Synthetic oligonucleotide
ccggtatattggaaaaatagaagatagtag

SEQ ID NO: 204299 - DNA, 30 bp, Artificial Sequence
  Synthetic oligonucleotide
tgtcggcagtagaccggatggagatagtag

SEQ ID NO: 204300 - DNA, 30 bp, Artificial Sequence
  Synthetic oligonucleotide
agtgctcaagaagtagcttccaactagtag

SEQ ID NO: 204301 - DNA, 30 bp, Artificial Sequence
  Synthetic oligonucleotide
agcgcttcaggatcctggaatacctagtag

SEQ ID NO: 204302 - DNA, 30 bp, Artificial Sequence
  Synthetic oligonucleotide
gacgctcatattgagaatccacgctagtag

SEQ ID NO: 204303 - DNA, 30 bp, Artificial Sequence
  Synthetic oligonucleotide
aataagactccagcttagagaggctagtag

SEQ ID NO: 204304 - DNA, 30 bp, Artificial Sequence
  Synthetic oligonucleotide
ttaaacaaggtattgtatggcgtctagtag

SEQ ID NO: 204305 - DNA, 30 bp, Artificial Sequence
  Synthetic oligonucleotide
acgtcgcggtagcttttacgcttgtagtag

SEQ ID NO: 204306 - DNA, 31 bp, Artificial Sequence
  Synthetic oligonucleotide
ttgtgaagggcaatatgttttggattagtag

SEQ ID NO: 204307 - DNA, 30 bp, Artificial Sequence
  Synthetic oligonucleotide
agaggcttaggcggttcttagttttagtag

SEQ ID NO: 204308 - DNA, 30 bp, Artificial Sequence
  Synthetic oligonucleotide
ggggttatgacagttcagctctcaacgtag

SEQ ID NO: 204309 - DNA, 30 bp, Artificial Sequence
  Synthetic oligonucleotide
gtttggatcacaagagacgaggccacgtag

SEQ ID NO: 204310 - DNA, 30 bp, Artificial Sequence
  Synthetic oligonucleotide
atgaaccgtcaattaaatgcggatacgtag

SEQ ID NO: 204311 - DNA, 30 bp, Artificial Sequence
  Synthetic oligonucleotide
cgggaaagggagcggccggtcgttacgtag

SEQ ID NO: 204312 - DNA, 30 bp, Artificial Sequence
  Synthetic oligonucleotide
gaggcgaagcataggagccgccaaccgtag

SEQ ID NO: 204313 - DNA, 30 bp, Artificial Sequence
  Synthetic oligonucleotide
atacagatttgggcatcggatacaccgtag

SEQ ID NO: 204314 - DNA, 30 bp, Artificial Sequence
  Synthetic oligonucleotide
gtatggaccccagaggtggtaaacccgtag

SEQ ID NO: 204315 - DNA, 30 bp, Artificial Sequence
  Synthetic oligonucleotide
tcacccggtaactgtgaggaggtcccgtag

SEQ ID NO: 204316 - DNA, 30 bp, Artificial Sequence
  Synthetic oligonucleotide
tactcgatatgagcaggaatcgagccgtag

SEQ ID NO: 204317 - DNA, 30 bp, Artificial Sequence
  Synthetic oligonucleotide
aacggtatccaggccatagaaggtccgtag

SEQ ID NO: 204318 - DNA, 30 bp, Artificial Sequence
  Synthetic oligonucleotide
tattggaggggtacagagctacttccgtag

SEQ ID NO: 204319 - DNA, 30 bp, Artificial Sequence
  Synthetic oligonucleotide
ttggcactctaaagaaacgtgccatcgtag

SEQ ID NO: 204320 - DNA, 30 bp, Artificial Sequence
  Synthetic oligonucleotide
gaccgctcccgcctacctagctcatcgtag

SEQ ID NO: 204321 - DNA, 30 bp, Artificial Sequence
  Synthetic oligonucleotide
ttagtcaaaagtatagccataagctcgtag

SEQ ID NO: 204322 - DNA, 30 bp, Artificial Sequence
  Synthetic oligonucleotide
cgagtctccatcataggatgactgtcgtag

SEQ ID NO: 204323 - DNA, 30 bp, Artificial Sequence
  Synthetic oligonucleotide
tgtttataagccgaacccgtagattcgtag

SEQ ID NO: 204324 - DNA, 30 bp, Artificial Sequence
  Synthetic oligonucleotide
agcgtaagcatcctaagtttcgcttcgtag

SEQ ID NO: 204325 - DNA, 30 bp, Artificial Sequence
  Synthetic oligonucleotide
gagagtaagttcaaaaattatcgttcgtag

SEQ ID NO: 204326 - DNA, 30 bp, Artificial Sequence
  Synthetic oligonucleotide
gtcgatccggcaacgggtaattccaggtag

SEQ ID NO: 204327 - DNA, 30 bp, Artificial Sequence
  Synthetic oligonucleotide
cgatcaataactaatcagacctgcaggtag

SEQ ID NO: 204328 - DNA, 31 bp, Artificial Sequence
  Synthetic oligonucleotide
caatctcatcttggatgagcaagggaggtag

SEQ ID NO: 204329 - DNA, 30 bp, Artificial Sequence
  Synthetic oligonucleotide
tatctttccccgaggaacaacgtgaggtag

SEQ ID NO: 204330 - DNA, 30 bp, Artificial Sequence
  Synthetic oligonucleotide
cgacaagggtattaagttcggtctaggtag

SEQ ID NO: 204331 - DNA, 30 bp, Artificial Sequence
  Synthetic oligonucleotide
ctctatcatcaataacccactgaacggtag

SEQ ID NO: 204332 - DNA, 30 bp, Artificial Sequence
  Synthetic oligonucleotide
attgattattaagaaaagtacaaccggtag

SEQ ID NO: 204333 - DNA, 30 bp, Artificial Sequence
  Synthetic oligonucleotide
cactagaccgagggattcagaacgcggtag

SEQ ID NO: 204334 - DNA, 30 bp, Artificial Sequence
  Synthetic oligonucleotide
aagagacgcgcaaggtgtgtccaagggtag

SEQ ID NO: 204335 - DNA, 30 bp, Artificial Sequence
  Synthetic oligonucleotide
ccggcttatctacccaaaaatatagggtag

SEQ ID NO: 204336 - DNA, 30 bp, Artificial Sequence
  Synthetic oligonucleotide
ctatgtgacggattacggccggacgggtag

SEQ ID NO: 204337 - DNA, 29 bp, Artificial Sequence
  Synthetic oligonucleotide
agcaggtaatcgtcctgctctacgggtag

SEQ ID NO: 204338 - DNA, 30 bp, Artificial Sequence
  Synthetic oligonucleotide
ttatatgccgacaaggcgagacgcgggtag

SEQ ID NO: 204339 - DNA, 30 bp, Artificial Sequence
  Synthetic oligonucleotide
ctttcgatggacaggcagactggcgggtag

SEQ ID NO: 204340 - DNA, 30 bp, Artificial Sequence
  Synthetic oligonucleotide
agggatgctacaggagctcccggggggtag

SEQ ID NO: 204341 - DNA, 30 bp, Artificial Sequence
  Synthetic oligonucleotide
ccaaggtaaactttatatgcaagtgggtag

SEQ ID NO: 204342 - DNA, 30 bp, Artificial Sequence
  Synthetic oligonucleotide
atattaaggttcgagaggggtacatggtag

SEQ ID NO: 204343 - DNA, 30 bp, Artificial Sequence
  Synthetic oligonucleotide
agtatcgaaagaaacactagtagctggtag

SEQ ID NO: 204344 - DNA, 30 bp, Artificial Sequence
  Synthetic oligonucleotide
gttactattgacagacaccagggctggtag

SEQ ID NO: 204345 - DNA, 30 bp, Artificial Sequence
  Synthetic oligonucleotide
cgagacctatttcgttatagattctggtag

SEQ ID NO: 204346 - DNA, 31 bp, Artificial Sequence
  Synthetic oligonucleotide
ttacaagcatgaccggagaggccaaatgtag

SEQ ID NO: 204347 - DNA, 30 bp, Artificial Sequence
  Synthetic oligonucleotide
gcaactggaaattaaatgagtacaatgtag

SEQ ID NO: 204348 - DNA, 28 bp, Artificial Sequence
  Synthetic oligonucleotide
cattccggccggactgtctatcatgtag

SEQ ID NO: 204349 - DNA, 30 bp, Artificial Sequence
  Synthetic oligonucleotide
cccgatgtcacgagacgcctagcgatgtag

SEQ ID NO: 204350 - DNA, 30 bp, Artificial Sequence
  Synthetic oligonucleotide
caacagctccgcattgcgctactgatgtag

SEQ ID NO: 204351 - DNA, 30 bp, Artificial Sequence
  Synthetic oligonucleotide
tggcactattggtaatcaaagaatatgtag

SEQ ID NO: 204352 - DNA, 30 bp, Artificial Sequence
  Synthetic oligonucleotide
tgggacagcacccgtgtagagaaactgtag

SEQ ID NO: 204353 - DNA, 30 bp, Artificial Sequence
  Synthetic oligonucleotide
aaaatatcgaggcgggcatgtccactgtag

SEQ ID NO: 204354 - DNA, 30 bp, Artificial Sequence
  Synthetic oligonucleotide
atgttgagcggataatatggctccctgtag

SEQ ID NO: 204355 - DNA, 30 bp, Artificial Sequence
  Synthetic oligonucleotide
aaacattcaacatgggatggtcagctgtag

SEQ ID NO: 204356 - DNA, 30 bp, Artificial Sequence
  Synthetic oligonucleotide
ggtaagttgccatttaaggtgcggctgtag

SEQ ID NO: 204357 - DNA, 30 bp, Artificial Sequence
  Synthetic oligonucleotide
caaaatggtccggtcaggtttttgctgtag

SEQ ID NO: 204358 - DNA, 30 bp, Artificial Sequence
  Synthetic oligonucleotide
gatcgtaactttatcagacactctctgtag

SEQ ID NO: 204359 - DNA, 30 bp, Artificial Sequence
  Synthetic oligonucleotide
gtaagcttatggagataagcaagtctgtag

SEQ ID NO: 204360 - DNA, 30 bp, Artificial Sequence
  Synthetic oligonucleotide
agcatcctcgatattgttatccgtctgtag

SEQ ID NO: 204361 - DNA, 30 bp, Artificial Sequence
  Synthetic oligonucleotide
gcggagcgcgagcggattagggtagtgtag

SEQ ID NO: 204362 - DNA, 30 bp, Artificial Sequence
  Synthetic oligonucleotide
ttagaaattatagcaggaccaaccgtgtag

SEQ ID NO: 204363 - DNA, 30 bp, Artificial Sequence
  Synthetic oligonucleotide
gcatctttcacataagatggcgaggtgtag

SEQ ID NO: 204364 - DNA, 30 bp, Artificial Sequence
  Synthetic oligonucleotide
tggatagggtaaggttgggttatcttgtag

SEQ ID NO: 204365 - DNA, 30 bp, Artificial Sequence
  Synthetic oligonucleotide
cacgggaggtcgctgtgtcgcatgttgtag

SEQ ID NO: 204366 - DNA, 30 bp, Artificial Sequence
  Synthetic oligonucleotide
gtgggcaggatagttctgttgatgttgtag

SEQ ID NO: 204367 - DNA, 30 bp, Artificial Sequence
  Synthetic oligonucleotide
gcgcgaatgtaaagtaaaacctttttgtag

SEQ ID NO: 204368 - DNA, 30 bp, Artificial Sequence
  Synthetic oligonucleotide
gctgtcggcaacccttcgcgcaaaaattag

SEQ ID NO: 204369 - DNA, 30 bp, Artificial Sequence
  Synthetic oligonucleotide
tggaataagtcgagccatgtgcaaaattag

SEQ ID NO: 204370 - DNA, 30 bp, Artificial Sequence
  Synthetic oligonucleotide
ggcgccaaatagtcctgcggtctcaattag

SEQ ID NO: 204371 - DNA, 30 bp, Artificial Sequence
  Synthetic oligonucleotide
ctcccggctgtaactttaagtcagaattag

SEQ ID NO: 204372 - DNA, 30 bp, Artificial Sequence
  Synthetic oligonucleotide
gggacacagacggggcgtacgcggaattag

SEQ ID NO: 204373 - DNA, 30 bp, Artificial Sequence
  Synthetic oligonucleotide
catcgattccgcattcgttgcgggaattag

SEQ ID NO: 204374 - DNA, 30 bp, Artificial Sequence
  Synthetic oligonucleotide
acttacctatttgcttaaaaagataattag

SEQ ID NO: 204375 - DNA, 30 bp, Artificial Sequence
  Synthetic oligonucleotide
tcgttgggcatataggctatggcacattag

SEQ ID NO: 204376 - DNA, 30 bp, Artificial Sequence
  Synthetic oligonucleotide
cacattgggtgggagagtggtttacattag

SEQ ID NO: 204377 - DNA, 30 bp, Artificial Sequence
  Synthetic oligonucleotide
catgattaacacagcccactcaagcattag

SEQ ID NO: 204378 - DNA, 30 bp, Artificial Sequence
  Synthetic oligonucleotide
tagtaccagcgaaccagggttgtgcattag

SEQ ID NO: 204379 - DNA, 30 bp, Artificial Sequence
  Synthetic oligonucleotide
ctcgcggacaaaggtggtccaagtcattag

SEQ ID NO: 204380 - DNA, 30 bp, Artificial Sequence
  Synthetic oligonucleotide
atggtcgttcggcctctatgccgtcattag

SEQ ID NO: 204381 - DNA, 30 bp, Artificial Sequence
  Synthetic oligonucleotide
cgttaccctgtacgtcctatcgaagattag

SEQ ID NO: 204382 - DNA, 30 bp, Artificial Sequence
  Synthetic oligonucleotide
caccctgttctagccaccagctcagattag

SEQ ID NO: 204383 - DNA, 30 bp, Artificial Sequence
  Synthetic oligonucleotide
gagcagcccaacaccctacacctagattag

SEQ ID NO: 204384 - DNA, 30 bp, Artificial Sequence
  Synthetic oligonucleotide
ttattccatgtcaccgagatacacgattag

SEQ ID NO: 204385 - DNA, 30 bp, Artificial Sequence
  Synthetic oligonucleotide
gcacgtcctgtcgtaaaagcgggcgattag

SEQ ID NO: 204386 - DNA, 30 bp, Artificial Sequence
  Synthetic oligonucleotide
cggatagtggatcctgtaattggggattag

SEQ ID NO: 204387 - DNA, 30 bp, Artificial Sequence
  Synthetic oligonucleotide
atggatatacgtcaggaatcagtggattag

SEQ ID NO: 204388 - DNA, 30 bp, Artificial Sequence
  Synthetic oligonucleotide
caatagacctaatatgggaaacaatattag

SEQ ID NO: 204389 - DNA, 30 bp, Artificial Sequence
  Synthetic oligonucleotide
gtgagaaacgctcacgtttcacaatattag

SEQ ID NO: 204390 - DNA, 30 bp, Artificial Sequence
  Synthetic oligonucleotide
aaaaagtaaacgtgtgggacaggatattag

SEQ ID NO: 204391 - DNA, 30 bp, Artificial Sequence
  Synthetic oligonucleotide
gccggcattggtatgatttaactatattag

SEQ ID NO: 204392 - DNA, 30 bp, Artificial Sequence
  Synthetic oligonucleotide
cgcgtggaaagctcaatcgagccctattag

SEQ ID NO: 204393 - DNA, 30 bp, Artificial Sequence
  Synthetic oligonucleotide
attaagtgagaggatcgcacggcgtattag

SEQ ID NO: 204394 - DNA, 30 bp, Artificial Sequence
  Synthetic oligonucleotide
ctgccaatacggaggtgcaagtgttattag

SEQ ID NO: 204395 - DNA, 30 bp, Artificial Sequence
  Synthetic oligonucleotide
attacgaagcaactcccagtgtgttattag

SEQ ID NO: 204396 - DNA, 30 bp, Artificial Sequence
  Synthetic oligonucleotide
atggaataagcgataattacataaacttag

SEQ ID NO: 204397 - DNA, 30 bp, Artificial Sequence
  Synthetic oligonucleotide
accaaggttgaatctagaatcacaacttag

SEQ ID NO: 204398 - DNA, 30 bp, Artificial Sequence
  Synthetic oligonucleotide
ggacatgctgactatagattgcccacttag

SEQ ID NO: 204399 - DNA, 30 bp, Artificial Sequence
  Synthetic oligonucleotide
tcttatttgataaataagtcgtttacttag

SEQ ID NO: 204400 - DNA, 30 bp, Artificial Sequence
  Synthetic oligonucleotide
gggacttgcagaactcccccgtcaccttag

SEQ ID NO: 204401 - DNA, 30 bp, Artificial Sequence
  Synthetic oligonucleotide
tacgtatacaaagagcaacggagtccttag

SEQ ID NO: 204402 - DNA, 30 bp, Artificial Sequence
  Synthetic oligonucleotide
tcgatcgagggcctctcggtactagcttag

SEQ ID NO: 204403 - DNA, 30 bp, Artificial Sequence
  Synthetic oligonucleotide
tgggaggagcggacaatggaagtagcttag

SEQ ID NO: 204404 - DNA, 30 bp, Artificial Sequence
  Synthetic oligonucleotide
catccatacaagccgtgttaggaggcttag

SEQ ID NO: 204405 - DNA, 30 bp, Artificial Sequence
  Synthetic oligonucleotide
tacagatagtaaggctgggttcatgcttag

SEQ ID NO: 204406 - DNA, 30 bp, Artificial Sequence
  Synthetic oligonucleotide
cttgtttgctcggggtggatgagatcttag

SEQ ID NO: 204407 - DNA, 30 bp, Artificial Sequence
  Synthetic oligonucleotide
gcccaataaagggagtatacgtactcttag

SEQ ID NO: 204408 - DNA, 30 bp, Artificial Sequence
  Synthetic oligonucleotide
gaggatggctagtcgcggttgatgtcttag

SEQ ID NO: 204409 - DNA, 30 bp, Artificial Sequence
  Synthetic oligonucleotide
cgggaccgctatagaggaaggtattcttag

SEQ ID NO: 204410 - DNA, 30 bp, Artificial Sequence
  Synthetic oligonucleotide
acccgcttatggaactaaacgcacagttag

SEQ ID NO: 204411 - DNA, 30 bp, Artificial Sequence
  Synthetic oligonucleotide
gttagctatcccaaacagccgagcagttag

SEQ ID NO: 204412 - DNA, 30 bp, Artificial Sequence
  Synthetic oligonucleotide
gtagcctattaaaaattaaacttcagttag

SEQ ID NO: 204413 - DNA, 30 bp, Artificial Sequence
  Synthetic oligonucleotide
ttcacccaggggaaatgcataccgagttag

SEQ ID NO: 204414 - DNA, 30 bp, Artificial Sequence
  Synthetic oligonucleotide
cgggaagagcttttccggggacatagttag

SEQ ID NO: 204415 - DNA, 30 bp, Artificial Sequence
  Synthetic oligonucleotide
gataaagctcccggccgacatgatagttag

SEQ ID NO: 204416 - DNA, 30 bp, Artificial Sequence
  Synthetic oligonucleotide
ccagttctaatgatatttcggagtagttag

SEQ ID NO: 204417 - DNA, 30 bp, Artificial Sequence
  Synthetic oligonucleotide
agtatatgtggcaatttgcctcgtagttag

SEQ ID NO: 204418 - DNA, 30 bp, Artificial Sequence
  Synthetic oligonucleotide
tcgtatggacgacagcggggtcgtagttag

SEQ ID NO: 204419 - DNA, 30 bp, Artificial Sequence
  Synthetic oligonucleotide
tcatagttcgttcggtttacgggacgttag

SEQ ID NO: 204420 - DNA, 30 bp, Artificial Sequence
  Synthetic oligonucleotide
agcgattcgcggcatagtgacagccgttag

SEQ ID NO: 204421 - DNA, 30 bp, Artificial Sequence
  Synthetic oligonucleotide
ccaataacgtcctgttaacggcgccgttag

SEQ ID NO: 204422 - DNA, 30 bp, Artificial Sequence
  Synthetic oligonucleotide
tatttgtcggttccgttgaaatgccgttag

SEQ ID NO: 204423 - DNA, 30 bp, Artificial Sequence
  Synthetic oligonucleotide
agggggtttcaacagttttaacttcgttag

SEQ ID NO: 204424 - DNA, 30 bp, Artificial Sequence
  Synthetic oligonucleotide
aagtcaggagttcgatcatggtgaggttag

SEQ ID NO: 204425 - DNA, 30 bp, Artificial Sequence
  Synthetic oligonucleotide
tgtggcccatatgttctgcctagcggttag

SEQ ID NO: 204426 - DNA, 30 bp, Artificial Sequence
  Synthetic oligonucleotide
tactaacttttaggaagtaacaagggttag

SEQ ID NO: 204427 - DNA, 30 bp, Artificial Sequence
  Synthetic oligonucleotide
gagtccgtatcatgtagagctgggggttag

SEQ ID NO: 204428 - DNA, 30 bp, Artificial Sequence
  Synthetic oligonucleotide
catatacaaccaccagttggcgatggttag

SEQ ID NO: 204429 - DNA, 30 bp, Artificial Sequence
  Synthetic oligonucleotide
tgtcagcgagggttctggggtactggttag

SEQ ID NO: 204430 - DNA, 30 bp, Artificial Sequence
  Synthetic oligonucleotide
tcggaagcccttatcgcgcgaagtggttag

SEQ ID NO: 204431 - DNA, 30 bp, Artificial Sequence
  Synthetic oligonucleotide
tggtttagagcttggctgcacattggttag

SEQ ID NO: 204432 - DNA, 30 bp, Artificial Sequence
  Synthetic oligonucleotide
cgataacacacattaatcaaaagctgttag

SEQ ID NO: 204433 - DNA, 30 bp, Artificial Sequence
  Synthetic oligonucleotide
aacgaaagtcctgtgaatctttattgttag

SEQ ID NO: 204434 - DNA, 30 bp, Artificial Sequence
  Synthetic oligonucleotide
tcatatggcttcagtctaagaaaaatttag

SEQ ID NO: 204435 - DNA, 30 bp, Artificial Sequence
  Synthetic oligonucleotide
cggcgagaccaagggcgatgagtcatttag

SEQ ID NO: 204436 - DNA, 30 bp, Artificial Sequence
  Synthetic oligonucleotide
cgtgtatttgcggacgtaatcgcgatttag

SEQ ID NO: 204437 - DNA, 30 bp, Artificial Sequence
  Synthetic oligonucleotide
aagttctcccgtaaagcccgttgactttag

SEQ ID NO: 204438 - DNA, 30 bp, Artificial Sequence
  Synthetic oligonucleotide
aaaaaggggtcaacggtcatactactttag

SEQ ID NO: 204439 - DNA, 30 bp, Artificial Sequence
  Synthetic oligonucleotide
cgacggggtcaggttggcgagatcctttag

SEQ ID NO: 204440 - DNA, 30 bp, Artificial Sequence
  Synthetic oligonucleotide
ccggctgggtaaggtggcggaaacgtttag

SEQ ID NO: 204441 - DNA, 30 bp, Artificial Sequence
  Synthetic oligonucleotide
tagtaagatgagacaaaacgatgggtttag

SEQ ID NO: 204442 - DNA, 30 bp, Artificial Sequence
  Synthetic oligonucleotide
caacgtgttgctcatagtcagtgggtttag

SEQ ID NO: 204443 - DNA, 30 bp, Artificial Sequence
  Synthetic oligonucleotide
ctgccgcaacctcgatatgtttgggtttag

SEQ ID NO: 204444 - DNA, 30 bp, Artificial Sequence
  Synthetic oligonucleotide
ggcgtagcgataggaaagccctatgtttag

SEQ ID NO: 204445 - DNA, 30 bp, Artificial Sequence
  Synthetic oligonucleotide
cacacctgagatggtgctcatactgtttag

SEQ ID NO: 204446 - DNA, 30 bp, Artificial Sequence
  Synthetic oligonucleotide
ttcgcgcgtgttcacgctaatcgtgtttag

SEQ ID NO: 204447 - DNA, 30 bp, Artificial Sequence
  Synthetic oligonucleotide
actggtagctaaagcgtcttggttgtttag

SEQ ID NO: 204448 - DNA, 30 bp, Artificial Sequence
  Synthetic oligonucleotide
cgctctgtggaataggttccagaattttag

SEQ ID NO: 204449 - DNA, 30 bp, Artificial Sequence
  Synthetic oligonucleotide
aacacaatgggcggtcgacgttacttttag

SEQ ID NO: 204450 - DNA, 30 bp, Artificial Sequence
  Synthetic oligonucleotide
taggacgggggacgacagtaaggcttttag

SEQ ID NO: 204451 - DNA, 30 bp, Artificial Sequence
  Synthetic oligonucleotide
cgcaagggcctcgtttgacattatttttag

SEQ ID NO: 204452 - DNA, 30 bp, Artificial Sequence
  Synthetic oligonucleotide
gagtcaccaattcatgccacggttttttag

SEQ ID NO: 204453 - DNA, 30 bp, Artificial Sequence
  Synthetic oligonucleotide
cccggtcagttcatacctcgcgggaaaacg

SEQ ID NO: 204454 - DNA, 30 bp, Artificial Sequence
  Synthetic oligonucleotide
tataggttgtagactgtcagctggaaaacg

SEQ ID NO: 204455 - DNA, 30 bp, Artificial Sequence
  Synthetic oligonucleotide
aatacacacccatgggttaaaagtaaaacg

SEQ ID NO: 204456 - DNA, 30 bp, Artificial Sequence
  Synthetic oligonucleotide
taggcgagcggggtgccccgcaaacaaacg

SEQ ID NO: 204457 - DNA, 31 bp, Artificial Sequence
  Synthetic oligonucleotide
tcgacactcttggggaattgcataccaaacg

SEQ ID NO: 204458 - DNA, 30 bp, Artificial Sequence
  Synthetic oligonucleotide
catcccagggccactgggggcaatcaaacg

SEQ ID NO: 204459 - DNA, 30 bp, Artificial Sequence
  Synthetic oligonucleotide
ccagatgttgacctgtgctattatcaaacg

SEQ ID NO: 204460 - DNA, 30 bp, Artificial Sequence
  Synthetic oligonucleotide
ggctacgttaatttcagggccagtcaaacg

SEQ ID NO: 204461 - DNA, 30 bp, Artificial Sequence
  Synthetic oligonucleotide
atggaggcctgctcaatgtaagtggaaacg

SEQ ID NO: 204462 - DNA, 30 bp, Artificial Sequence
  Synthetic oligonucleotide
aagccctctggaaggacaacccttgaaacg

SEQ ID NO: 204463 - DNA, 30 bp, Artificial Sequence
  Synthetic oligonucleotide
tacggtgaccttggggtaatggttgaaacg

SEQ ID NO: 204464 - DNA, 30 bp, Artificial Sequence
  Synthetic oligonucleotide
ccgatcccttgttactcgaggcaataaacg

SEQ ID NO: 204465 - DNA, 30 bp, Artificial Sequence
  Synthetic oligonucleotide
acggtccgactctgaagcggcacctaaacg

SEQ ID NO: 204466 - DNA, 30 bp, Artificial Sequence
  Synthetic oligonucleotide
ctctctgaggggaaagggagcgtctaaacg

SEQ ID NO: 204467 - DNA, 30 bp, Artificial Sequence
  Synthetic oligonucleotide
gactgctcttgtgcatcctagcattaaacg

SEQ ID NO: 204468 - DNA, 30 bp, Artificial Sequence
  Synthetic oligonucleotide
ccttttctaggacaatggctgggttaaacg

SEQ ID NO: 204469 - DNA, 31 bp, Artificial Sequence
  Synthetic oligonucleotide
tggtacgttcagtcgcagggggcccacaacg

SEQ ID NO: 204470 - DNA, 30 bp, Artificial Sequence
  Synthetic oligonucleotide
gtatcaccacgcccttagcgtagcacaacg

SEQ ID NO: 204471 - DNA, 30 bp, Artificial Sequence
  Synthetic oligonucleotide
atctcaggtgtctgtttacataatacaacg

SEQ ID NO: 204472 - DNA, 30 bp, Artificial Sequence
  Synthetic oligonucleotide
ctcgaggccagccccatactccatacaacg

SEQ ID NO: 204473 - DNA, 30 bp, Artificial Sequence
  Synthetic oligonucleotide
agcgtcgtgcctttgaaactggtaccaacg

SEQ ID NO: 204474 - DNA, 30 bp, Artificial Sequence
  Synthetic oligonucleotide
taaaccagcgggaaactatcgggcccaacg

SEQ ID NO: 204475 - DNA, 30 bp, Artificial Sequence
  Synthetic oligonucleotide
gaacctatagctgccccactagatccaacg

SEQ ID NO: 204476 - DNA, 30 bp, Artificial Sequence
  Synthetic oligonucleotide
cccaatcagatattatccgaccctccaacg

SEQ ID NO: 204477 - DNA, 30 bp, Artificial Sequence
  Synthetic oligonucleotide
gcgggcaagggacacgtgatggttccaacg

SEQ ID NO: 204478 - DNA, 30 bp, Artificial Sequence
  Synthetic oligonucleotide
ctaggtcccccatccctgtgccaagcaacg

SEQ ID NO: 204479 - DNA, 30 bp, Artificial Sequence
  Synthetic oligonucleotide
cagtatcctgtcctgagttagaaggcaacg

SEQ ID NO: 204480 - DNA, 30 bp, Artificial Sequence
  Synthetic oligonucleotide
cccgaaagctccgactgtatctgtgcaacg

SEQ ID NO: 204481 - DNA, 30 bp, Artificial Sequence
  Synthetic oligonucleotide
aactctagcggcattatgtactagtcaacg

SEQ ID NO: 204482 - DNA, 30 bp, Artificial Sequence
  Synthetic oligonucleotide
aagtcaggttaagcacacattccgtcaacg

SEQ ID NO: 204483 - DNA, 30 bp, Artificial Sequence
  Synthetic oligonucleotide
atggccccgatagctacggggcaaagaacg

SEQ ID NO: 204484 - DNA, 30 bp, Artificial Sequence
  Synthetic oligonucleotide
ccgcagaagtgtagacattccataagaacg

SEQ ID NO: 204485 - DNA, 30 bp, Artificial Sequence
  Synthetic oligonucleotide
tagtgggggtagcctttgtgaaccagaacg

SEQ ID NO: 204486 - DNA, 30 bp, Artificial Sequence
  Synthetic oligonucleotide
cgagaccgtagacgcgaattcagcagaacg

SEQ ID NO: 204487 - DNA, 30 bp, Artificial Sequence
  Synthetic oligonucleotide
agccgaaaactagtcggaacaactagaacg

SEQ ID NO: 204488 - DNA, 30 bp, Artificial Sequence
  Synthetic oligonucleotide
gttcttgtcaatcgggggaccactagaacg

SEQ ID NO: 204489 - DNA, 30 bp, Artificial Sequence
  Synthetic oligonucleotide
acggtacatcaggatggctaccctagaacg

SEQ ID NO: 204490 - DNA, 30 bp, Artificial Sequence
  Synthetic oligonucleotide
tccgtaacccctaagggttttacacgaacg

SEQ ID NO: 204491 - DNA, 30 bp, Artificial Sequence
  Synthetic oligonucleotide
tgctctgcacacgcatacacaccgggaacg

SEQ ID NO: 204492 - DNA, 30 bp, Artificial Sequence
  Synthetic oligonucleotide
acaacgtgcatggcctgggcagcgggaacg

SEQ ID NO: 204493 - DNA, 30 bp, Artificial Sequence
  Synthetic oligonucleotide
aaataactgtttgcgtcatatatgggaacg

SEQ ID NO: 204494 - DNA, 30 bp, Artificial Sequence
  Synthetic oligonucleotide
tgtcagcgttagctgtctcagtaatgaacg

SEQ ID NO: 204495 - DNA, 30 bp, Artificial Sequence
  Synthetic oligonucleotide
gatgttggcttagagattttcgcatgaacg

SEQ ID NO: 204496 - DNA, 30 bp, Artificial Sequence
  Synthetic oligonucleotide
tccctaatatgtactcgcattgtctgaacg

SEQ ID NO: 204497 - DNA, 30 bp, Artificial Sequence
  Synthetic oligonucleotide
gcgctagggcttacagatatcaagtgaacg

SEQ ID NO: 204498 - DNA, 30 bp, Artificial Sequence
  Synthetic oligonucleotide
ttcgcgcggttgcgggccttgcagtgaacg

SEQ ID NO: 204499 - DNA, 30 bp, Artificial Sequence
  Synthetic oligonucleotide
agattgatgccccagactgaaacttgaacg

SEQ ID NO: 204500 - DNA, 30 bp, Artificial Sequence
  Synthetic oligonucleotide
agttaagggtacttacccgcggcgataacg

SEQ ID NO: 204501 - DNA, 30 bp, Artificial Sequence
  Synthetic oligonucleotide
agacagcaatctttattgttaaggataacg

SEQ ID NO: 204502 - DNA, 25 bp, Artificial Sequence
  Synthetic oligonucleotide
cgaaagtaatgtaggcatgataacg

SEQ ID NO: 204503 - DNA, 30 bp, Artificial Sequence
  Synthetic oligonucleotide
tgccatccgaaaccggtataggtactaacg

SEQ ID NO: 204504 - DNA, 30 bp, Artificial Sequence
  Synthetic oligonucleotide
taaatgaccaaagctggtgagtggctaacg

SEQ ID NO: 204505 - DNA, 30 bp, Artificial Sequence
  Synthetic oligonucleotide
gcggaaccgccggaacgcatttccgtaacg

SEQ ID NO: 204506 - DNA, 30 bp, Artificial Sequence
  Synthetic oligonucleotide
gtccagaggccatggtgtgccagcgtaacg

SEQ ID NO: 204507 - DNA, 30 bp, Artificial Sequence
  Synthetic oligonucleotide
tccagtgcgcctttaccagatcttgtaacg

SEQ ID NO: 204508 - DNA, 30 bp, Artificial Sequence
  Synthetic oligonucleotide
gcgcgtcaaaattatatctggaggttaacg

SEQ ID NO: 204509 - DNA, 30 bp, Artificial Sequence
  Synthetic oligonucleotide
gataggaccagtcacgacgtcaaaaacacg

SEQ ID NO: 204510 - DNA, 30 bp, Artificial Sequence
  Synthetic oligonucleotide
aagattttaatcaggattccgctaaacacg

SEQ ID NO: 204511 - DNA, 30 bp, Artificial Sequence
  Synthetic oligonucleotide
tcacctaaaacctagcgttatcacaacacg

SEQ ID NO: 204512 - DNA, 30 bp, Artificial Sequence
  Synthetic oligonucleotide
ggtcatccatttttgcagggcgggaacacg

SEQ ID NO: 204513 - DNA, 30 bp, Artificial Sequence
  Synthetic oligonucleotide
gtaaagcgccggccacaagaatataacacg

SEQ ID NO: 204514 - DNA, 30 bp, Artificial Sequence
  Synthetic oligonucleotide
accactgctgcagactctccgtataacacg

SEQ ID NO: 204515 - DNA, 30 bp, Artificial Sequence
  Synthetic oligonucleotide
atactcacgcgccaacttcttgtccacacg

SEQ ID NO: 204516 - DNA, 30 bp, Artificial Sequence
  Synthetic oligonucleotide
caccccgtggagtcggaactagcgcacacg

SEQ ID NO: 204517 - DNA, 30 bp, Artificial Sequence
  Synthetic oligonucleotide
accagtacggcactgaatggataagacacg

SEQ ID NO: 204518 - DNA, 30 bp, Artificial Sequence
  Synthetic oligonucleotide
aaccaaacactggcaaacacgaacgacacg

SEQ ID NO: 204519 - DNA, 30 bp, Artificial Sequence
  Synthetic oligonucleotide
acagcgttgagatacaggtctactgacacg

SEQ ID NO: 204520 - DNA, 30 bp, Artificial Sequence
  Synthetic oligonucleotide
gcgacagattctggctaagagcttgacacg

SEQ ID NO: 204521 - DNA, 30 bp, Artificial Sequence
  Synthetic oligonucleotide
cggtaagcgctgacttatgctcgatacacg

SEQ ID NO: 204522 - DNA, 30 bp, Artificial Sequence
  Synthetic oligonucleotide
tcacgacgctaatcatcaggtgactacacg

SEQ ID NO: 204523 - DNA, 30 bp, Artificial Sequence
  Synthetic oligonucleotide
ctcaggagtatagaagtacaatgctacacg

SEQ ID NO: 204524 - DNA, 30 bp, Artificial Sequence
  Synthetic oligonucleotide
tgactgatataccgctcttgcaggtacacg

SEQ ID NO: 204525 - DNA, 30 bp, Artificial Sequence
  Synthetic oligonucleotide
gacaagtacgcttgaaaatcactaaccacg

SEQ ID NO: 204526 - DNA, 30 bp, Artificial Sequence
  Synthetic oligonucleotide
ataggggcgtttcccataacacaccccacg

SEQ ID NO: 204527 - DNA, 30 bp, Artificial Sequence
  Synthetic oligonucleotide
agagtgcatgggccctcgttacctcccacg

SEQ ID NO: 204528 - DNA, 30 bp, Artificial Sequence
  Synthetic oligonucleotide
gtaacgcgcaggcagcccacccctcccacg

SEQ ID NO: 204529 - DNA, 30 bp, Artificial Sequence
  Synthetic oligonucleotide
ccaccaaagctttcattccaggcagccacg

SEQ ID NO: 204530 - DNA, 30 bp, Artificial Sequence
  Synthetic oligonucleotide
ggttggtacatggtcaaaagtgcagccacg

SEQ ID NO: 204531 - DNA, 30 bp, Artificial Sequence
  Synthetic oligonucleotide
gcaacgtcaaggtagccagaaggcgccacg

SEQ ID NO: 204532 - DNA, 30 bp, Artificial Sequence
  Synthetic oligonucleotide
tataaacgtaacggtgcaggtacggccacg

SEQ ID NO: 204533 - DNA, 30 bp, Artificial Sequence
  Synthetic oligonucleotide
aggctgtgttgatagctaagatctgccacg

SEQ ID NO: 204534 - DNA, 30 bp, Artificial Sequence
  Synthetic oligonucleotide
catgatagatgacttcttgtaacatccacg

SEQ ID NO: 204535 - DNA, 30 bp, Artificial Sequence
  Synthetic oligonucleotide
tcctctagaattcatgtccgctgatccacg

SEQ ID NO: 204536 - DNA, 30 bp, Artificial Sequence
  Synthetic oligonucleotide
ctagattcgattaagccagtcggcagcacg

SEQ ID NO: 204537 - DNA, 30 bp, Artificial Sequence
  Synthetic oligonucleotide
ctaagggaatgcttcgggggcttacgcacg

SEQ ID NO: 204538 - DNA, 30 bp, Artificial Sequence
  Synthetic oligonucleotide
gaggcatctatgcctaggggcgtccgcacg

SEQ ID NO: 204539 - DNA, 30 bp, Artificial Sequence
  Synthetic oligonucleotide
aagtcgcggggccaccagggatcgcgcacg

SEQ ID NO: 204540 - DNA, 30 bp, Artificial Sequence
  Synthetic oligonucleotide
ctggcaacgggactcccaagaatgcgcacg

SEQ ID NO: 204541 - DNA, 30 bp, Artificial Sequence
  Synthetic oligonucleotide
cctttggccctgaggtggtcagtgcgcacg

SEQ ID NO: 204542 - DNA, 30 bp, Artificial Sequence
  Synthetic oligonucleotide
aagaccggagggtgagcacgttagggcacg

SEQ ID NO: 204543 - DNA, 30 bp, Artificial Sequence
  Synthetic oligonucleotide
cggagagaagaaggggtcgttctgggcacg

SEQ ID NO: 204544 - DNA, 30 bp, Artificial Sequence
  Synthetic oligonucleotide
caatgagtttatacgtgagttagtggcacg

SEQ ID NO: 204545 - DNA, 30 bp, Artificial Sequence
  Synthetic oligonucleotide
agccaggcactacctattatataatgcacg

SEQ ID NO: 204546 - DNA, 30 bp, Artificial Sequence
  Synthetic oligonucleotide
acctgttaaggtcgcgggctatagtgcacg

SEQ ID NO: 204547 - DNA, 31 bp, Artificial Sequence
  Synthetic oligonucleotide
accaagcgacagctttaaagttgcgtgcacg

SEQ ID NO: 204548 - DNA, 30 bp, Artificial Sequence
  Synthetic oligonucleotide
ttacagggaacgaattcactctgaatcacg

SEQ ID NO: 204549 - DNA, 30 bp, Artificial Sequence
  Synthetic oligonucleotide
acactgaagtaccgcgagggctacatcacg

SEQ ID NO: 204550 - DNA, 30 bp, Artificial Sequence
  Synthetic oligonucleotide
aaccgtttgagcctcacacccgagatcacg

SEQ ID NO: 204551 - DNA, 30 bp, Artificial Sequence
  Synthetic oligonucleotide
tgaaaagccgatgtactcaagaatatcacg

SEQ ID NO: 204552 - DNA, 30 bp, Artificial Sequence
  Synthetic oligonucleotide
acccaagtcgagcgtatttctaaactcacg

SEQ ID NO: 204553 - DNA, 30 bp, Artificial Sequence
  Synthetic oligonucleotide
taggttgctccctgatcaagcgaactcacg

SEQ ID NO: 204554 - DNA, 30 bp, Artificial Sequence
  Synthetic oligonucleotide
acgctatgcgtttgaggtcgggaactcacg

SEQ ID NO: 204555 - DNA, 30 bp, Artificial Sequence
  Synthetic oligonucleotide
gagctgcatcatatcgatttgcgactcacg

SEQ ID NO: 204556 - DNA, 30 bp, Artificial Sequence
  Synthetic oligonucleotide
tcgagtccggctattcgctctgtactcacg

SEQ ID NO: 204557 - DNA, 30 bp, Artificial Sequence
  Synthetic oligonucleotide
ctggattgggttggcaaacccttgctcacg

SEQ ID NO: 204558 - DNA, 30 bp, Artificial Sequence
  Synthetic oligonucleotide
tagccaaagccagtttacttaagagtcacg

SEQ ID NO: 204559 - DNA, 30 bp, Artificial Sequence
  Synthetic oligonucleotide
tgatgttaatgccacaatgaccgagtcacg

SEQ ID NO: 204560 - DNA, 30 bp, Artificial Sequence
  Synthetic oligonucleotide
ctgagggtcatatacgttgttggcgtcacg

SEQ ID NO: 204561 - DNA, 30 bp, Artificial Sequence
  Synthetic oligonucleotide
gcgtccttacatcttcaaatatgcgtcacg

SEQ ID NO: 204562 - DNA, 30 bp, Artificial Sequence
  Synthetic oligonucleotide
ccaattgaagcttaatctggaagtgtcacg

SEQ ID NO: 204563 - DNA, 30 bp, Artificial Sequence
  Synthetic oligonucleotide
tgccgttcgtcagtactggaggaattcacg

SEQ ID NO: 204564 - DNA, 30 bp, Artificial Sequence
  Synthetic oligonucleotide
tcgctggcagcggttccatgcttattcacg

SEQ ID NO: 204565 - DNA, 30 bp, Artificial Sequence
  Synthetic oligonucleotide
tgcgccaagtgggttagggggagcttcacg

SEQ ID NO: 204566 - DNA, 30 bp, Artificial Sequence
  Synthetic oligonucleotide
caatctcctcaacataggaaactgttcacg

SEQ ID NO: 204567 - DNA, 30 bp, Artificial Sequence
  Synthetic oligonucleotide
ggggttaggaagaataaggacccaaagacg

SEQ ID NO: 204568 - DNA, 30 bp, Artificial Sequence
  Synthetic oligonucleotide
tcatcacttagtgtggtaacgctaaagacg

SEQ ID NO: 204569 - DNA, 30 bp, Artificial Sequence
  Synthetic oligonucleotide
ttagcgcctacaagtttaaggcggaagacg

SEQ ID NO: 204570 - DNA, 30 bp, Artificial Sequence
  Synthetic oligonucleotide
gtcaaaactctgatgagtagatctaagacg

SEQ ID NO: 204571 - DNA, 30 bp, Artificial Sequence
  Synthetic oligonucleotide
ttccacatgaaagtaatgccgcaacagacg

SEQ ID NO: 204572 - DNA, 30 bp, Artificial Sequence
  Synthetic oligonucleotide
ctgtagaggtaaagttcacctttacagacg

SEQ ID NO: 204573 - DNA, 30 bp, Artificial Sequence
  Synthetic oligonucleotide
acgtgttaatttgagagggggcagcagacg

SEQ ID NO: 204574 - DNA, 30 bp, Artificial Sequence
  Synthetic oligonucleotide
tgccctagcagggaccctatcgggcagacg

SEQ ID NO: 204575 - DNA, 30 bp, Artificial Sequence
  Synthetic oligonucleotide
atgagagatcgatcttaagcagtggagacg

SEQ ID NO: 204576 - DNA, 30 bp, Artificial Sequence
  Synthetic oligonucleotide
tatactaaaagcgacggaatgtatgagacg

SEQ ID NO: 204577 - DNA, 30 bp, Artificial Sequence
  Synthetic oligonucleotide
cgcactttgggactgatatcgaggtagacg

SEQ ID NO: 204578 - DNA, 30 bp, Artificial Sequence
  Synthetic oligonucleotide
gggacgtgtagaagtcaaacctcttagacg

SEQ ID NO: 204579 - DNA, 30 bp, Artificial Sequence
  Synthetic oligonucleotide
ctagcattagccacggcgtggtgcacgacg

SEQ ID NO: 204580 - DNA, 30 bp, Artificial Sequence
  Synthetic oligonucleotide
gtacgctaaagggatgctctattgacgacg

SEQ ID NO: 204581 - DNA, 30 bp, Artificial Sequence
  Synthetic oligonucleotide
atgtaggtgcgtgttcgagggaatacgacg

SEQ ID NO: 204582 - DNA, 30 bp, Artificial Sequence
  Synthetic oligonucleotide
caccccagtgacgaaactttcatcccgacg

SEQ ID NO: 204583 - DNA, 30 bp, Artificial Sequence
  Synthetic oligonucleotide
aaatatagatagaggctggattggccgacg

SEQ ID NO: 204584 - DNA, 29 bp, Artificial Sequence
  Synthetic oligonucleotide
tggcttggcgactactggtggatccgacg

SEQ ID NO: 204585 - DNA, 30 bp, Artificial Sequence
  Synthetic oligonucleotide
tgacgcgggcgtgaggcagtagcagcgacg

SEQ ID NO: 204586 - DNA, 30 bp, Artificial Sequence
  Synthetic oligonucleotide
ccgtgaagtcactggctcgagttagcgacg

SEQ ID NO: 204587 - DNA, 30 bp, Artificial Sequence
  Synthetic oligonucleotide
attgcagatatggtgtcttgtaaggcgacg

SEQ ID NO: 204588 - DNA, 30 bp, Artificial Sequence
  Synthetic oligonucleotide
actcgcacgactttcctggcgggggcgacg

SEQ ID NO: 204589 - DNA, 30 bp, Artificial Sequence
  Synthetic oligonucleotide
gaccatattcgaacgggccagtgtgcgacg

SEQ ID NO: 204590 - DNA, 30 bp, Artificial Sequence
  Synthetic oligonucleotide
ccagctagacaaggcgcatgcgcatcgacg

SEQ ID NO: 204591 - DNA, 30 bp, Artificial Sequence
  Synthetic oligonucleotide
tgggtagttgaagacggacttatatcgacg

SEQ ID NO: 204592 - DNA, 30 bp, Artificial Sequence
  Synthetic oligonucleotide
tgtagtcccccgggcgacaaaggttcgacg

SEQ ID NO: 204593 - DNA, 30 bp, Artificial Sequence
  Synthetic oligonucleotide
ccagcattcgggaatggccaaccaaggacg

SEQ ID NO: 204594 - DNA, 30 bp, Artificial Sequence
  Synthetic oligonucleotide
ctgggtagggattataagcgtgataggacg

SEQ ID NO: 204595 - DNA, 30 bp, Artificial Sequence
  Synthetic oligonucleotide
tacaatattcgcgttgaacaatctaggacg

SEQ ID NO: 204596 - DNA, 30 bp, Artificial Sequence
  Synthetic oligonucleotide
acatcctagttcgcatgctggcaacggacg

SEQ ID NO: 204597 - DNA, 30 bp, Artificial Sequence
  Synthetic oligonucleotide
ggatttgcgttcgtgaatccaactcggacg

SEQ ID NO: 204598 - DNA, 30 bp, Artificial Sequence
  Synthetic oligonucleotide
attcatacgggcgagcagatgggagggacg

SEQ ID NO: 204599 - DNA, 30 bp, Artificial Sequence
  Synthetic oligonucleotide
ttcgattagcgagtggcagattgggggacg

SEQ ID NO: 204600 - DNA, 30 bp, Artificial Sequence
  Synthetic oligonucleotide
cgctaatcaaatataatgaaccttgggacg

SEQ ID NO: 204601 - DNA, 30 bp, Artificial Sequence
  Synthetic oligonucleotide
tgtcaggtgttgccagaagcatttgggacg

SEQ ID NO: 204602 - DNA, 30 bp, Artificial Sequence
  Synthetic oligonucleotide
gatcatgaaggggggtagtattttgggacg

SEQ ID NO: 204603 - DNA, 30 bp, Artificial Sequence
  Synthetic oligonucleotide
agtcccgaacacctttgggatccatggacg

SEQ ID NO: 204604 - DNA, 30 bp, Artificial Sequence
  Synthetic oligonucleotide
cagttctgagagcatgctacaacctggacg

SEQ ID NO: 204605 - DNA, 30 bp, Artificial Sequence
  Synthetic oligonucleotide
gcgttccaattgtataagcaatcctggacg

SEQ ID NO: 204606 - DNA, 31 bp, Artificial Sequence
  Synthetic oligonucleotide
tcagcaacagtagagtaattctcgctggacg

SEQ ID NO: 204607 - DNA, 30 bp, Artificial Sequence
  Synthetic oligonucleotide
cggggtgatactgtgtgcgcggtgtggacg

SEQ ID NO: 204608 - DNA, 30 bp, Artificial Sequence
  Synthetic oligonucleotide
tcgacagcacagctgtaactgggttggacg

SEQ ID NO: 204609 - DNA, 30 bp, Artificial Sequence
  Synthetic oligonucleotide
gttgtgctgcggacattagatcgaatgacg

SEQ ID NO: 204610 - DNA, 30 bp, Artificial Sequence
  Synthetic oligonucleotide
tccgtagtggagcatccgagcaccatgacg

SEQ ID NO: 204611 - DNA, 30 bp, Artificial Sequence
  Synthetic oligonucleotide
aacggctaccgtagcacaggagtcatgacg

SEQ ID NO: 204612 - DNA, 30 bp, Artificial Sequence
  Synthetic oligonucleotide
gcaacgggagtccaaaacaacagtatgacg

SEQ ID NO: 204613 - DNA, 30 bp, Artificial Sequence
  Synthetic oligonucleotide
gcataggtttagacatttaatcccctgacg

SEQ ID NO: 204614 - DNA, 30 bp, Artificial Sequence
  Synthetic oligonucleotide
cacatcagggcggaccttgccgtgctgacg

SEQ ID NO: 204615 - DNA, 30 bp, Artificial Sequence
  Synthetic oligonucleotide
tcctctatcacagaccgtaagacattgacg

SEQ ID NO: 204616 - DNA, 30 bp, Artificial Sequence
  Synthetic oligonucleotide
tcgcaaacccacttctgcatcagattgacg

SEQ ID NO: 204617 - DNA, 30 bp, Artificial Sequence
  Synthetic oligonucleotide
tatcgaagtaaattaagtaacatgttgacg

SEQ ID NO: 204618 - DNA, 30 bp, Artificial Sequence
  Synthetic oligonucleotide
gtctggtaataaatactgtgccgcaatacg

SEQ ID NO: 204619 - DNA, 30 bp, Artificial Sequence
  Synthetic oligonucleotide
acatctgcaaatcgggtgctccaccatacg

SEQ ID NO: 204620 - DNA, 30 bp, Artificial Sequence
  Synthetic oligonucleotide
accacttccgactatatgggaatccatacg

SEQ ID NO: 204621 - DNA, 30 bp, Artificial Sequence
  Synthetic oligonucleotide
ctcagcagggttttttagtgcatccatacg

SEQ ID NO: 204622 - DNA, 30 bp, Artificial Sequence
  Synthetic oligonucleotide
gtgcaagcttgtgcatcatgaaatcatacg

SEQ ID NO: 204623 - DNA, 30 bp, Artificial Sequence
  Synthetic oligonucleotide
cggttacatagcataaacgctaatcatacg

SEQ ID NO: 204624 - DNA, 30 bp, Artificial Sequence
  Synthetic oligonucleotide
gggccattcgtgtagatttaacgggatacg

SEQ ID NO: 204625 - DNA, 30 bp, Artificial Sequence
  Synthetic oligonucleotide
caacccaagcgcgtggatcgggcatatacg

SEQ ID NO: 204626 - DNA, 30 bp, Artificial Sequence
  Synthetic oligonucleotide
acttactggagagacggatagtactatacg

SEQ ID NO: 204627 - DNA, 30 bp, Artificial Sequence
  Synthetic oligonucleotide
attcgcgtcgataagaccctaccctatacg

SEQ ID NO: 204628 - DNA, 30 bp, Artificial Sequence
  Synthetic oligonucleotide
gacattcagctaggtcgggagttctatacg

SEQ ID NO: 204629 - DNA, 30 bp, Artificial Sequence
  Synthetic oligonucleotide
caagtgtgaatgtatctacaatagtatacg

SEQ ID NO: 204630 - DNA, 30 bp, Artificial Sequence
  Synthetic oligonucleotide
ctcgccgcggaatgaggcttgacgtatacg

SEQ ID NO: 204631 - DNA, 30 bp, Artificial Sequence
  Synthetic oligonucleotide
ctttcaagcaacgatcgtttacaccctacg

SEQ ID NO: 204632 - DNA, 30 bp, Artificial Sequence
  Synthetic oligonucleotide
aatagatatcaggcgtggcgggaagctacg

SEQ ID NO: 204633 - DNA, 30 bp, Artificial Sequence
  Synthetic oligonucleotide
aggtcctatagtttatggtaagtcgctacg

SEQ ID NO: 204634 - DNA, 30 bp, Artificial Sequence
  Synthetic oligonucleotide
agcataccaaacatcaggggaccatctacg

SEQ ID NO: 204635 - DNA, 30 bp, Artificial Sequence
  Synthetic oligonucleotide
aaagcgcaaccaagcggaaggttatctacg

SEQ ID NO: 204636 - DNA, 30 bp, Artificial Sequence
  Synthetic oligonucleotide
attagcgattcatttgcaatctggtctacg

SEQ ID NO: 204637 - DNA, 30 bp, Artificial Sequence
  Synthetic oligonucleotide
tcctgaattggaaagttgcgacgaagtacg

SEQ ID NO: 204638 - DNA, 30 bp, Artificial Sequence
  Synthetic oligonucleotide
taagagtattgtgaggggctaggcagtacg

SEQ ID NO: 204639 - DNA, 30 bp, Artificial Sequence
  Synthetic oligonucleotide
cggtctcgttagtggtcctgtgatagtacg

SEQ ID NO: 204640 - DNA, 30 bp, Artificial Sequence
  Synthetic oligonucleotide
gatgggacccgtatcggcaccaatcgtacg

SEQ ID NO: 204641 - DNA, 30 bp, Artificial Sequence
  Synthetic oligonucleotide
gaaggttgtctggtaagacgggctcgtacg

SEQ ID NO: 204642 - DNA, 30 bp, Artificial Sequence
  Synthetic oligonucleotide
atagaacggaccctaccgccattaggtacg

SEQ ID NO: 204643 - DNA, 30 bp, Artificial Sequence
  Synthetic oligonucleotide
gacgaactcgacttactatggcccggtacg

SEQ ID NO: 204644 - DNA, 30 bp, Artificial Sequence
  Synthetic oligonucleotide
agatgagctcctgcaaacccagccggtacg

SEQ ID NO: 204645 - DNA, 30 bp, Artificial Sequence
  Synthetic oligonucleotide
aacgcacgatcatgggtcaaaatcggtacg

SEQ ID NO: 204646 - DNA, 30 bp, Artificial Sequence
  Synthetic oligonucleotide
tggaaccatgaattatctcactcgggtacg

SEQ ID NO: 204647 - DNA, 30 bp, Artificial Sequence
  Synthetic oligonucleotide
tggtaggtcatggacgtgacttctggtacg

SEQ ID NO: 204648 - DNA, 30 bp, Artificial Sequence
  Synthetic oligonucleotide
tagttcctatcagactagccctgtggtacg

SEQ ID NO: 204649 - DNA, 30 bp, Artificial Sequence
  Synthetic oligonucleotide
agtaagcatagtgtgtatttaattggtacg

SEQ ID NO: 204650 - DNA, 30 bp, Artificial Sequence
  Synthetic oligonucleotide
cacccaaactgggtttaggaaccatgtacg

SEQ ID NO: 204651 - DNA, 30 bp, Artificial Sequence
  Synthetic oligonucleotide
ccagatcctcatactgtctgagcatgtacg

SEQ ID NO: 204652 - DNA, 30 bp, Artificial Sequence
  Synthetic oligonucleotide
agctcttgagcagaccgatcgatatgtacg

SEQ ID NO: 204653 - DNA, 30 bp, Artificial Sequence
  Synthetic oligonucleotide
tatccgatactgaaaacactctagtgtacg

SEQ ID NO: 204654 - DNA, 30 bp, Artificial Sequence
  Synthetic oligonucleotide
ggactacgacctactaagccgacgtgtacg

SEQ ID NO: 204655 - DNA, 30 bp, Artificial Sequence
  Synthetic oligonucleotide
tgactccaagtgagtttcatagggtgtacg

SEQ ID NO: 204656 - DNA, 30 bp, Artificial Sequence
  Synthetic oligonucleotide
ttctgtagggagaggcgcccaggttgtacg

SEQ ID NO: 204657 - DNA, 30 bp, Artificial Sequence
  Synthetic oligonucleotide
atcatgggggttaactaacctaaaattacg

SEQ ID NO: 204658 - DNA, 30 bp, Artificial Sequence
  Synthetic oligonucleotide
acgcgcgccaaagaaactgttagaattacg

SEQ ID NO: 204659 - DNA, 30 bp, Artificial Sequence
  Synthetic oligonucleotide
aaggagtaataagcttaaactcgaattacg

SEQ ID NO: 204660 - DNA, 30 bp, Artificial Sequence
  Synthetic oligonucleotide
aacgtagttgcgagttggagcggaattacg

SEQ ID NO: 204661 - DNA, 30 bp, Artificial Sequence
  Synthetic oligonucleotide
ataaacacgatatcctagaggttaattacg

SEQ ID NO: 204662 - DNA, 30 bp, Artificial Sequence
  Synthetic oligonucleotide
tggatagcgatgaagccaaacgatcttacg

SEQ ID NO: 204663 - DNA, 30 bp, Artificial Sequence
  Synthetic oligonucleotide
gagaccgatttcagacctgtctgagttacg

SEQ ID NO: 204664 - DNA, 30 bp, Artificial Sequence
  Synthetic oligonucleotide
tggttatggcgcgttaaagctaatgttacg

SEQ ID NO: 204665 - DNA, 30 bp, Artificial Sequence
  Synthetic oligonucleotide
aacttgccgtcagattatgcggttgttacg

SEQ ID NO: 204666 - DNA, 30 bp, Artificial Sequence
  Synthetic oligonucleotide
catctaattcccatccggcataactttacg

SEQ ID NO: 204667 - DNA, 30 bp, Artificial Sequence
  Synthetic oligonucleotide
cacaaaacaaaagtggacaggacgtttacg

SEQ ID NO: 204668 - DNA, 30 bp, Artificial Sequence
  Synthetic oligonucleotide
taatcgtggaggagttacacttccaaaccg

SEQ ID NO: 204669 - DNA, 30 bp, Artificial Sequence
  Synthetic oligonucleotide
gatggaataagtatgatagcttggaaaccg

SEQ ID NO: 204670 - DNA, 30 bp, Artificial Sequence
  Synthetic oligonucleotide
agagtggatgctcatgcgcgggataaaccg

SEQ ID NO: 204671 - DNA, 30 bp, Artificial Sequence
  Synthetic oligonucleotide
acttagattgttcgaaacaccgctaaaccg

SEQ ID NO: 204672 - DNA, 30 bp, Artificial Sequence
  Synthetic oligonucleotide
accggcaccgcggcagtcggccgtaaaccg

SEQ ID NO: 204673 - DNA, 30 bp, Artificial Sequence
  Synthetic oligonucleotide
tgcccagcggatggtaaaccagcccaaccg

SEQ ID NO: 204674 - DNA, 30 bp, Artificial Sequence
  Synthetic oligonucleotide
tggagtaccttcggtagaacggatcaaccg

SEQ ID NO: 204675 - DNA, 30 bp, Artificial Sequence
  Synthetic oligonucleotide
cgggcgtagtgtcagatttcagaagaaccg

SEQ ID NO: 204676 - DNA, 30 bp, Artificial Sequence
  Synthetic oligonucleotide
tacgacttagaatcgcattgcccagaaccg

SEQ ID NO: 204677 - DNA, 30 bp, Artificial Sequence
  Synthetic oligonucleotide
ccggagaccggctacctgatggcagaaccg

SEQ ID NO: 204678 - DNA, 30 bp, Artificial Sequence
  Synthetic oligonucleotide
ccttatatatatgctaaatgttgcgaaccg

SEQ ID NO: 204679 - DNA, 30 bp, Artificial Sequence
  Synthetic oligonucleotide
agtttaatcagggatcaccatctcgaaccg

SEQ ID NO: 204680 - DNA, 30 bp, Artificial Sequence
  Synthetic oligonucleotide
cttgttgtacaattttataaaaaggaaccg

SEQ ID NO: 204681 - DNA, 30 bp, Artificial Sequence
  Synthetic oligonucleotide
gtggattctagaacatggcatgaggaaccg

SEQ ID NO: 204682 - DNA, 30 bp, Artificial Sequence
  Synthetic oligonucleotide
attctcggtgaggttttcatctgggaaccg

SEQ ID NO: 204683 - DNA, 30 bp, Artificial Sequence
  Synthetic oligonucleotide
gttgtttggcacgccatttatggtgaaccg

SEQ ID NO: 204684 - DNA, 30 bp, Artificial Sequence
  Synthetic oligonucleotide
aaccctctccgttttcagcaagttgaaccg

SEQ ID NO: 204685 - DNA, 30 bp, Artificial Sequence
  Synthetic oligonucleotide
agaaggggggcgtgctagggtggctaaccg

SEQ ID NO: 204686 - DNA, 30 bp, Artificial Sequence
  Synthetic oligonucleotide
ggtgctgctttgagcctagtatggtaaccg

SEQ ID NO: 204687 - DNA, 30 bp, Artificial Sequence
  Synthetic oligonucleotide
aaacagccgacaaatccggatctgtaaccg

SEQ ID NO: 204688 - DNA, 30 bp, Artificial Sequence
  Synthetic oligonucleotide
tcgcggactaagggagggaacacttaaccg

SEQ ID NO: 204689 - DNA, 30 bp, Artificial Sequence
  Synthetic oligonucleotide
gatccgtgtactttactatagataacaccg

SEQ ID NO: 204690 - DNA, 30 bp, Artificial Sequence
  Synthetic oligonucleotide
gattcgtaacttctcactcagaccacaccg

SEQ ID NO: 204691 - DNA, 30 bp, Artificial Sequence
  Synthetic oligonucleotide
gacgtgtgaaaaggctttccagcgacaccg

SEQ ID NO: 204692 - DNA, 30 bp, Artificial Sequence
  Synthetic oligonucleotide
tcacttcgtcttaggggaaaagtgacaccg

SEQ ID NO: 204693 - DNA, 30 bp, Artificial Sequence
  Synthetic oligonucleotide
agcactgaacatcagggttaccgtacaccg

SEQ ID NO: 204694 - DNA, 30 bp, Artificial Sequence
  Synthetic oligonucleotide
tgccggcgcgcgatagagaaatttacaccg

SEQ ID NO: 204695 - DNA, 30 bp, Artificial Sequence
  Synthetic oligonucleotide
aacgggtgttcgttgtattcaataccaccg

SEQ ID NO: 204696 - DNA, 30 bp, Artificial Sequence
  Synthetic oligonucleotide
gtacggacatggactatagatctgccaccg

SEQ ID NO: 204697 - DNA, 30 bp, Artificial Sequence
  Synthetic oligonucleotide
tagtgctggatgcctcgacgggctccaccg

SEQ ID NO: 204698 - DNA, 30 bp, Artificial Sequence
  Synthetic oligonucleotide
ttatgagttgggattcggctatttccaccg

SEQ ID NO: 204699 - DNA, 30 bp, Artificial Sequence
  Synthetic oligonucleotide
ggtaaaaaagtatttgtcgggggcgcaccg

SEQ ID NO: 204700 - DNA, 30 bp, Artificial Sequence
  Synthetic oligonucleotide
ctgtcgtgcatcattttcataggggcaccg

SEQ ID NO: 204701 - DNA, 30 bp, Artificial Sequence
  Synthetic oligonucleotide
ctaatcagcgtcaattgaacacgtgcaccg

SEQ ID NO: 204702 - DNA, 30 bp, Artificial Sequence
  Synthetic oligonucleotide
gtgcgatactttggtggggcctcctcaccg

SEQ ID NO: 204703 - DNA, 30 bp, Artificial Sequence
  Synthetic oligonucleotide
tgagggagtggctattgtggtggctcaccg

SEQ ID NO: 204704 - DNA, 30 bp, Artificial Sequence
  Synthetic oligonucleotide
aagacaaccgtagggttgcgacgttcaccg

SEQ ID NO: 204705 - DNA, 30 bp, Artificial Sequence
  Synthetic oligonucleotide
caatgggtatgtaagttgccaacaagaccg

SEQ ID NO: 204706 - DNA, 30 bp, Artificial Sequence
  Synthetic oligonucleotide
ctatggaacttttactggtcggtcagaccg

SEQ ID NO: 204707 - DNA, 30 bp, Artificial Sequence
  Synthetic oligonucleotide
tgtgcgagtactcgtgtaagaatacgaccg

SEQ ID NO: 204708 - DNA, 30 bp, Artificial Sequence
  Synthetic oligonucleotide
gtcgcacacctgtattaagtccgccgaccg

SEQ ID NO: 204709 - DNA, 30 bp, Artificial Sequence
  Synthetic oligonucleotide
gggatgccggcgtggaggacgtgccgaccg

SEQ ID NO: 204710 - DNA, 30 bp, Artificial Sequence
  Synthetic oligonucleotide
gccgttcacattttgacgtcagatcgaccg

SEQ ID NO: 204711 - DNA, 30 bp, Artificial Sequence
  Synthetic oligonucleotide
ttctcaccccgaagtgagatccctcgaccg

SEQ ID NO: 204712 - DNA, 30 bp, Artificial Sequence
  Synthetic oligonucleotide
tattccacctgttgaatggcgcacggaccg

SEQ ID NO: 204713 - DNA, 30 bp, Artificial Sequence
  Synthetic oligonucleotide
agtggataggaaggtatggagtgcggaccg

SEQ ID NO: 204714 - DNA, 30 bp, Artificial Sequence
  Synthetic oligonucleotide
cgaatatttgagacacttatcccgggaccg

SEQ ID NO: 204715 - DNA, 30 bp, Artificial Sequence
  Synthetic oligonucleotide
ggtactgccagcaactcagaaaatggaccg

SEQ ID NO: 204716 - DNA, 30 bp, Artificial Sequence
  Synthetic oligonucleotide
gcactttgagcacgtgtttgaaactgaccg

SEQ ID NO: 204717 - DNA, 30 bp, Artificial Sequence
  Synthetic oligonucleotide
tgctacggtgctagcgcgagggcaataccg

SEQ ID NO: 204718 - DNA, 30 bp, Artificial Sequence
  Synthetic oligonucleotide
aagatgtgatacgtggtagtgtccataccg

SEQ ID NO: 204719 - DNA, 30 bp, Artificial Sequence
  Synthetic oligonucleotide
gtttgaccaccttgggcagccgcgataccg

SEQ ID NO: 204720 - DNA, 30 bp, Artificial Sequence
  Synthetic oligonucleotide
cttaggcaggtgtgactaatgattataccg

SEQ ID NO: 204721 - DNA, 30 bp, Artificial Sequence
  Synthetic oligonucleotide
atagttcagacctgaaagtacccactaccg

SEQ ID NO: 204722 - DNA, 30 bp, Artificial Sequence
  Synthetic oligonucleotide
tattggcgggaagatgccccggagctaccg

SEQ ID NO: 204723 - DNA, 30 bp, Artificial Sequence
  Synthetic oligonucleotide
ttccgaaaattatgggccgaggcgctaccg

SEQ ID NO: 204724 - DNA, 30 bp, Artificial Sequence
  Synthetic oligonucleotide
ccaagtttatgtagggaaactaggctaccg

SEQ ID NO: 204725 - DNA, 30 bp, Artificial Sequence
  Synthetic oligonucleotide
gtgtgatgatgggggggcaagcctctaccg

SEQ ID NO: 204726 - DNA, 30 bp, Artificial Sequence
  Synthetic oligonucleotide
tgcgcgatcagatgtccggtattagtaccg

SEQ ID NO: 204727 - DNA, 30 bp, Artificial Sequence
  Synthetic oligonucleotide
tatgacctggataaatttggggacgtaccg

SEQ ID NO: 204728 - DNA, 30 bp, Artificial Sequence
  Synthetic oligonucleotide
cggaagggtaagttatggcaccgggtaccg

SEQ ID NO: 204729 - DNA, 30 bp, Artificial Sequence
  Synthetic oligonucleotide
cgtatgcaagggacgtgatgtaatgtaccg

SEQ ID NO: 204730 - DNA, 30 bp, Artificial Sequence
  Synthetic oligonucleotide
cggatcagggacctgccttgttctgtaccg

SEQ ID NO: 204731 - DNA, 30 bp, Artificial Sequence
  Synthetic oligonucleotide
tcaagaataacgcgtcataaaccgttaccg

SEQ ID NO: 204732 - DNA, 30 bp, Artificial Sequence
  Synthetic oligonucleotide
cgagtccctatgctcgggattaccaacccg

SEQ ID NO: 204733 - DNA, 30 bp, Artificial Sequence
  Synthetic oligonucleotide
tggaaacaattgtctcatagccagaacccg

SEQ ID NO: 204734 - DNA, 30 bp, Artificial Sequence
  Synthetic oligonucleotide
tctcaaacacggcttcaaaggtggaacccg

SEQ ID NO: 204735 - DNA, 30 bp, Artificial Sequence
  Synthetic oligonucleotide
cacggttgtcctcaatgcgcaattaacccg

SEQ ID NO: 204736 - DNA, 30 bp, Artificial Sequence
  Synthetic oligonucleotide
cctggcacatatggaggcgaaaaacacccg

SEQ ID NO: 204737 - DNA, 30 bp, Artificial Sequence
  Synthetic oligonucleotide
cgaagtcgacatttctgagcattacacccg

SEQ ID NO: 204738 - DNA, 30 bp, Artificial Sequence
  Synthetic oligonucleotide
atatggtttacgtctcaggataagcacccg

SEQ ID NO: 204739 - DNA, 30 bp, Artificial Sequence
  Synthetic oligonucleotide
gcggcggcggcttcctaaaatttgcacccg

SEQ ID NO: 204740 - DNA, 30 bp, Artificial Sequence
  Synthetic oligonucleotide
aatgtatgcacgctttgcttgcatcacccg

SEQ ID NO: 204741 - DNA, 30 bp, Artificial Sequence
  Synthetic oligonucleotide
gcgttggatggcgtagatgccagtcacccg

SEQ ID NO: 204742 - DNA, 30 bp, Artificial Sequence
  Synthetic oligonucleotide
agcctggtcgaggagttatgcttcgacccg

SEQ ID NO: 204743 - DNA, 30 bp, Artificial Sequence
  Synthetic oligonucleotide
caagcatggggtggatgtagtgttgacccg

SEQ ID NO: 204744 - DNA, 30 bp, Artificial Sequence
  Synthetic oligonucleotide
ggacatgaacgcactccatcctaatacccg

SEQ ID NO: 204745 - DNA, 30 bp, Artificial Sequence
  Synthetic oligonucleotide
tgactggagtgagtttctcgattatacccg

SEQ ID NO: 204746 - DNA, 30 bp, Artificial Sequence
  Synthetic oligonucleotide
gataattaagctatatgtcgagcctacccg

SEQ ID NO: 204747 - DNA, 29 bp, Artificial Sequence
  Synthetic oligonucleotide
cctaccgctatccagcagttagctacccg

SEQ ID NO: 204748 - DNA, 30 bp, Artificial Sequence
  Synthetic oligonucleotide
tggaggtacaagctacgccatttctacccg

SEQ ID NO: 204749 - DNA, 30 bp, Artificial Sequence
  Synthetic oligonucleotide
ggggtgatcatactcggattaacgtacccg

SEQ ID NO: 204750 - DNA, 30 bp, Artificial Sequence
  Synthetic oligonucleotide
gatggaccctccaccattgcatcgtacccg

SEQ ID NO: 204751 - DNA, 30 bp, Artificial Sequence
  Synthetic oligonucleotide
ggtagaccctagtctcgcccgttgtacccg

SEQ ID NO: 204752 - DNA, 30 bp, Artificial Sequence
  Synthetic oligonucleotide
ccgagaaattcatcctggtgattaaccccg

SEQ ID NO: 204753 - DNA, 30 bp, Artificial Sequence
  Synthetic oligonucleotide
tggatgacccgatgtcgtgaacacaccccg

SEQ ID NO: 204754 - DNA, 30 bp, Artificial Sequence
  Synthetic oligonucleotide
agtcggattcaaacgactaactgcaccccg

SEQ ID NO: 204755 - DNA, 30 bp, Artificial Sequence
  Synthetic oligonucleotide
gtctttagctaaactaaatagcagaccccg

SEQ ID NO: 204756 - DNA, 30 bp, Artificial Sequence
  Synthetic oligonucleotide
ctatctattaaccaaaagtaaaataccccg

SEQ ID NO: 204757 - DNA, 30 bp, Artificial Sequence
  Synthetic oligonucleotide
aacgaaggttcgggtgcggtcggtaccccg

SEQ ID NO: 204758 - DNA, 30 bp, Artificial Sequence
  Synthetic oligonucleotide
cactttgagctcttgcggtaattccccccg

SEQ ID NO: 204759 - DNA, 30 bp, Artificial Sequence
  Synthetic oligonucleotide
cttgggccaaacggttaaggcagcgccccg

SEQ ID NO: 204760 - DNA, 30 bp, Artificial Sequence
  Synthetic oligonucleotide
tgcaataaacctggaattcaacagtccccg

SEQ ID NO: 204761 - DNA, 30 bp, Artificial Sequence
  Synthetic oligonucleotide
aaccgaactcctaacccagtctagtccccg

SEQ ID NO: 204762 - DNA, 30 bp, Artificial Sequence
  Synthetic oligonucleotide
agcatggaaacgaggcttaacccgtccccg

SEQ ID NO: 204763 - DNA, 30 bp, Artificial Sequence
  Synthetic oligonucleotide
tctaggaccatgaggcaaggcgcgtccccg

SEQ ID NO: 204764 - DNA, 30 bp, Artificial Sequence
  Synthetic oligonucleotide
tgcggcgtaaccttaaccctggcgtccccg

SEQ ID NO: 204765 - DNA, 30 bp, Artificial Sequence
  Synthetic oligonucleotide
atcggcgcaatgtcgcggagtgtgcgcccg

SEQ ID NO: 204766 - DNA, 30 bp, Artificial Sequence
  Synthetic oligonucleotide
ctcggcgattactgcatatagccaggcccg

SEQ ID NO: 204767 - DNA, 30 bp, Artificial Sequence
  Synthetic oligonucleotide
acggacattagggtttccgcggacggcccg

SEQ ID NO: 204768 - DNA, 30 bp, Artificial Sequence
  Synthetic oligonucleotide
ctcgctgtactggtaacgaacaggggcccg

SEQ ID NO: 204769 - DNA, 30 bp, Artificial Sequence
  Synthetic oligonucleotide
atctaagtacgggagtaggagcatggcccg

SEQ ID NO: 204770 - DNA, 30 bp, Artificial Sequence
  Synthetic oligonucleotide
acactcgcagtgccgtagtttatatgcccg

SEQ ID NO: 204771 - DNA, 30 bp, Artificial Sequence
  Synthetic oligonucleotide
tcatgttacccgtcgtgagtggactgcccg

SEQ ID NO: 204772 - DNA, 30 bp, Artificial Sequence
  Synthetic oligonucleotide
ttaacgggagccaccgctgtgaggtgcccg

SEQ ID NO: 204773 - DNA, 30 bp, Artificial Sequence
  Synthetic oligonucleotide
tgtgttaacttgagaggatatgggtgcccg

SEQ ID NO: 204774 - DNA, 30 bp, Artificial Sequence
  Synthetic oligonucleotide
gcaactccattgaacggcagtcaaatcccg

SEQ ID NO: 204775 - DNA, 30 bp, Artificial Sequence
  Synthetic oligonucleotide
ctagcggcggtgagttatcgaataatcccg

SEQ ID NO: 204776 - DNA, 30 bp, Artificial Sequence
  Synthetic oligonucleotide
tccatgttacgggaggactagaacatcccg

SEQ ID NO: 204777 - DNA, 29 bp, Artificial Sequence
  Synthetic oligonucleotide
aggtgaataaagccatataatgtatcccg

SEQ ID NO: 204778 - DNA, 30 bp, Artificial Sequence
  Synthetic oligonucleotide
ggaacgatagcttatcgttccccgctcccg

SEQ ID NO: 204779 - DNA, 30 bp, Artificial Sequence
  Synthetic oligonucleotide
ggaagtgcacgacaccagtttagagtcccg

SEQ ID NO: 204780 - DNA, 30 bp, Artificial Sequence
  Synthetic oligonucleotide
tggactgaaacgcgggattgagtcgtcccg

SEQ ID NO: 204781 - DNA, 30 bp, Artificial Sequence
  Synthetic oligonucleotide
tcgagggtttggtactaaaagacggtcccg

SEQ ID NO: 204782 - DNA, 30 bp, Artificial Sequence
  Synthetic oligonucleotide
ttatcgcgggtagtacaagaatgtgtcccg

SEQ ID NO: 204783 - DNA, 30 bp, Artificial Sequence
  Synthetic oligonucleotide
ccatggtttatcgggaacggaatcttcccg

SEQ ID NO: 204784 - DNA, 30 bp, Artificial Sequence
  Synthetic oligonucleotide
tcagcgctgaatgcgttctagacgttcccg

SEQ ID NO: 204785 - DNA, 30 bp, Artificial Sequence
  Synthetic oligonucleotide
accctggatgagatcggtaagtgtttcccg

SEQ ID NO: 204786 - DNA, 30 bp, Artificial Sequence
  Synthetic oligonucleotide
atgtccctcaacttacaaaatgttttcccg

SEQ ID NO: 204787 - DNA, 30 bp, Artificial Sequence
  Synthetic oligonucleotide
gtgggaactctgtatcgtggggctaagccg

SEQ ID NO: 204788 - DNA, 30 bp, Artificial Sequence
  Synthetic oligonucleotide
tgtgacaaacgactcgaattctagcagccg

SEQ ID NO: 204789 - DNA, 30 bp, Artificial Sequence
  Synthetic oligonucleotide
tacgtcttcgaccacacggattggcagccg

SEQ ID NO: 204790 - DNA, 30 bp, Artificial Sequence
  Synthetic oligonucleotide
actgggcttatacaatcaatacctcagccg

SEQ ID NO: 204791 - DNA, 30 bp, Artificial Sequence
  Synthetic oligonucleotide
actattcgagaggtacgcaagaaagagccg

SEQ ID NO: 204792 - DNA, 30 bp, Artificial Sequence
  Synthetic oligonucleotide
aatcaaatcggcgaacattgctaagagccg

SEQ ID NO: 204793 - DNA, 30 bp, Artificial Sequence
  Synthetic oligonucleotide
ttctgtgcacgagtccgaatgtgcgagccg

SEQ ID NO: 204794 - DNA, 30 bp, Artificial Sequence
  Synthetic oligonucleotide
tctcactcgagtgtctgactgtaatagccg

SEQ ID NO: 204795 - DNA, 30 bp, Artificial Sequence
  Synthetic oligonucleotide
atccgcttggaccgcgtatgtggatagccg

SEQ ID NO: 204796 - DNA, 30 bp, Artificial Sequence
  Synthetic oligonucleotide
atcgcgggattgagaaaattttactagccg

SEQ ID NO: 204797 - DNA, 30 bp, Artificial Sequence
  Synthetic oligonucleotide
ctggaggttacgacctttaaccgctagccg

SEQ ID NO: 204798 - DNA, 30 bp, Artificial Sequence
  Synthetic oligonucleotide
tgaaatataggatcggatttgccgtagccg

SEQ ID NO: 204799 - DNA, 30 bp, Artificial Sequence
  Synthetic oligonucleotide
agcgaatgaaatctgctgcaaaggtagccg

SEQ ID NO: 204800 - DNA, 30 bp, Artificial Sequence
  Synthetic oligonucleotide
ctaagcgtcagtggtcctttgtattagccg

SEQ ID NO: 204801 - DNA, 30 bp, Artificial Sequence
  Synthetic oligonucleotide
gaaacgcaaacgaggttccatcgcacgccg

SEQ ID NO: 204802 - DNA, 30 bp, Artificial Sequence
  Synthetic oligonucleotide
atgatcttgtagtggaatgtatgcacgccg

SEQ ID NO: 204803 - DNA, 30 bp, Artificial Sequence
  Synthetic oligonucleotide
tagatgtaacgtttaaggttacctacgccg

SEQ ID NO: 204804 - DNA, 30 bp, Artificial Sequence
  Synthetic oligonucleotide
tcagcgtcccagatgcgttagcgaccgccg

SEQ ID NO: 204805 - DNA, 31 bp, Artificial Sequence
  Synthetic oligonucleotide
gcatgcgggtccgtcgggggaaggagcgccg

SEQ ID NO: 204806 - DNA, 30 bp, Artificial Sequence
  Synthetic oligonucleotide
aaaacggttggtatcgtgggaatagcgccg

SEQ ID NO: 204807 - DNA, 30 bp, Artificial Sequence
  Synthetic oligonucleotide
cggagcccgaagggaggttctaccgcgccg

SEQ ID NO: 204808 - DNA, 30 bp, Artificial Sequence
  Synthetic oligonucleotide
gatgaagggagtgcgatactcaacaggccg

SEQ ID NO: 204809 - DNA, 30 bp, Artificial Sequence
  Synthetic oligonucleotide
tcgtggtgtcgaggtgacactggcaggccg

SEQ ID NO: 204810 - DNA, 30 bp, Artificial Sequence
  Synthetic oligonucleotide
agaaccggaatttaactcagtggcaggccg

SEQ ID NO: 204811 - DNA, 30 bp, Artificial Sequence
  Synthetic oligonucleotide
gcgtaaagcgtcgacggttgttcacggccg

SEQ ID NO: 204812 - DNA, 30 bp, Artificial Sequence
  Synthetic oligonucleotide
cttgctaagtcaaatccgtttcagcggccg

SEQ ID NO: 204813 - DNA, 30 bp, Artificial Sequence
  Synthetic oligonucleotide
aagccagtcgtaaagtatttctagcggccg

SEQ ID NO: 204814 - DNA, 30 bp, Artificial Sequence
  Synthetic oligonucleotide
gagaggcatcggatatcattacatgggccg

SEQ ID NO: 204815 - DNA, 30 bp, Artificial Sequence
  Synthetic oligonucleotide
catctaaagtaagcattggttcatgggccg

SEQ ID NO: 204816 - DNA, 30 bp, Artificial Sequence
  Synthetic oligonucleotide
gtccttatagcgatgggcagatatgggccg

SEQ ID NO: 204817 - DNA, 30 bp, Artificial Sequence
  Synthetic oligonucleotide
aaactatgcacgtaacctcactctgggccg

SEQ ID NO: 204818 - DNA, 30 bp, Artificial Sequence
  Synthetic oligonucleotide
gaagactctagtggataagagagtgggccg

SEQ ID NO: 204819 - DNA, 30 bp, Artificial Sequence
  Synthetic oligonucleotide
cgtaaacataggcgcacatgccaatggccg

SEQ ID NO: 204820 - DNA, 30 bp, Artificial Sequence
  Synthetic oligonucleotide
cgtcattatcattgaagttcgacctggccg

SEQ ID NO: 204821 - DNA, 30 bp, Artificial Sequence
  Synthetic oligonucleotide
cggccctattacgggggcgtgtcctggccg

SEQ ID NO: 204822 - DNA, 30 bp, Artificial Sequence
  Synthetic oligonucleotide
gctcaaggtgtaaggctgcggatttggccg

SEQ ID NO: 204823 - DNA, 30 bp, Artificial Sequence
  Synthetic oligonucleotide
ggacgggaattatctcataagacaatgccg

SEQ ID NO: 204824 - DNA, 30 bp, Artificial Sequence
  Synthetic oligonucleotide
cgttaacaagttttgtgccccctgatgccg

SEQ ID NO: 204825 - DNA, 30 bp, Artificial Sequence
  Synthetic oligonucleotide
gttaagagaggtgtatggggtgcactgccg

SEQ ID NO: 204826 - DNA, 30 bp, Artificial Sequence
  Synthetic oligonucleotide
gtccgggccattagatcaaattcactgccg

SEQ ID NO: 204827 - DNA, 30 bp, Artificial Sequence
  Synthetic oligonucleotide
aaataggttgcgtggcactcgatcctgccg

SEQ ID NO: 204828 - DNA, 30 bp, Artificial Sequence
  Synthetic oligonucleotide
agtgtcttcccagaggggtaagtcgtgccg

SEQ ID NO: 204829 - DNA, 30 bp, Artificial Sequence
  Synthetic oligonucleotide
gggtctgtgcgtggctaggaaccggtgccg

SEQ ID NO: 204830 - DNA, 30 bp, Artificial Sequence
  Synthetic oligonucleotide
tgtgagtgcataaacgagagaaagttgccg

SEQ ID NO: 204831 - DNA, 30 bp, Artificial Sequence
  Synthetic oligonucleotide
catatggagaaacggctcaaccacaatccg

SEQ ID NO: 204832 - DNA, 30 bp, Artificial Sequence
  Synthetic oligonucleotide
aggttcgattagagctagtacttcaatccg

SEQ ID NO: 204833 - DNA, 30 bp, Artificial Sequence
  Synthetic oligonucleotide
ttggcgtggttgatgcaatactcgaatccg

SEQ ID NO: 204834 - DNA, 30 bp, Artificial Sequence
  Synthetic oligonucleotide
tctaacacctcgggccctccctggaatccg

SEQ ID NO: 204835 - DNA, 30 bp, Artificial Sequence
  Synthetic oligonucleotide
gagtgagaggtaagaaaaggaaaacatccg

SEQ ID NO: 204836 - DNA, 30 bp, Artificial Sequence
  Synthetic oligonucleotide
gaagtgaagaagccggccgcactacatccg

SEQ ID NO: 204837 - DNA, 30 bp, Artificial Sequence
  Synthetic oligonucleotide
gcactaccgttactggctctaccccatccg

SEQ ID NO: 204838 - DNA, 30 bp, Artificial Sequence
  Synthetic oligonucleotide
gggtgatcgtgtgttggagacgagcatccg

SEQ ID NO: 204839 - DNA, 30 bp, Artificial Sequence
  Synthetic oligonucleotide
agctttagatacctcacggacaatcatccg

SEQ ID NO: 204840 - DNA, 30 bp, Artificial Sequence
  Synthetic oligonucleotide
ctctacacagtcggggtcggacgagatccg

SEQ ID NO: 204841 - DNA, 30 bp, Artificial Sequence
  Synthetic oligonucleotide
gtgccccctgacgtaaaagttgtagatccg

SEQ ID NO: 204842 - DNA, 30 bp, Artificial Sequence
  Synthetic oligonucleotide
tttacaggtccgtataaaggcttagatccg

SEQ ID NO: 204843 - DNA, 30 bp, Artificial Sequence
  Synthetic oligonucleotide
agttcaaaggatcgttttccagtcgatccg

SEQ ID NO: 204844 - DNA, 30 bp, Artificial Sequence
  Synthetic oligonucleotide
gagaaacgaacacgtgactcggaggatccg

SEQ ID NO: 204845 - DNA, 30 bp, Artificial Sequence
  Synthetic oligonucleotide
gaatcatgcatctcgagtccgtaggatccg

SEQ ID NO: 204846 - DNA, 30 bp, Artificial Sequence
  Synthetic oligonucleotide
gatcaggacaccatcgtaatcgatgatccg

SEQ ID NO: 204847 - DNA, 30 bp, Artificial Sequence
  Synthetic oligonucleotide
agcccagtcgaatggtccatcggatatccg

SEQ ID NO: 204848 - DNA, 30 bp, Artificial Sequence
  Synthetic oligonucleotide
gtatagtggcggcgtctctgcgattatccg

SEQ ID NO: 204849 - DNA, 30 bp, Artificial Sequence
  Synthetic oligonucleotide
ttctattgtccaaaataattcgcttatccg

SEQ ID NO: 204850 - DNA, 30 bp, Artificial Sequence
  Synthetic oligonucleotide
gcgtcggcgaggcggaaggttcaaactccg

SEQ ID NO: 204851 - DNA, 30 bp, Artificial Sequence
  Synthetic oligonucleotide
atatgggtccgtgggattgtgtaaactccg

SEQ ID NO: 204852 - DNA, 30 bp, Artificial Sequence
  Synthetic oligonucleotide
tgaggtgcgatttatcgcgcgtaccctccg

SEQ ID NO: 204853 - DNA, 30 bp, Artificial Sequence
  Synthetic oligonucleotide
atttaggaggtggtagtaggcatgcctccg

SEQ ID NO: 204854 - DNA, 30 bp, Artificial Sequence
  Synthetic oligonucleotide
atgactcgattctgtgggtagtctgctccg

SEQ ID NO: 204855 - DNA, 30 bp, Artificial Sequence
  Synthetic oligonucleotide
gaaaggataaggccgaggcgacagtctccg

SEQ ID NO: 204856 - DNA, 30 bp, Artificial Sequence
  Synthetic oligonucleotide
caccttgccccaacaatctaccattctccg

SEQ ID NO: 204857 - DNA, 30 bp, Artificial Sequence
  Synthetic oligonucleotide
ggtaaatgtaggggcttggcagaaagtccg

SEQ ID NO: 204858 - DNA, 30 bp, Artificial Sequence
  Synthetic oligonucleotide
agcgtgtaggctccactataaagcagtccg

SEQ ID NO: 204859 - DNA, 30 bp, Artificial Sequence
  Synthetic oligonucleotide
tagcgtttcggtacctaacttttcagtccg

SEQ ID NO: 204860 - DNA, 30 bp, Artificial Sequence
  Synthetic oligonucleotide
caggtgtttgtcgtatgtaatgttagtccg

SEQ ID NO: 204861 - DNA, 30 bp, Artificial Sequence
  Synthetic oligonucleotide
ccactatcgaaagggctaggcctccgtccg

SEQ ID NO: 204862 - DNA, 30 bp, Artificial Sequence
  Synthetic oligonucleotide
ttggctataattatctctaaaaagcgtccg

SEQ ID NO: 204863 - DNA, 30 bp, Artificial Sequence
  Synthetic oligonucleotide
ctgtaggaaggaatcaactcccagcgtccg

SEQ ID NO: 204864 - DNA, 30 bp, Artificial Sequence
  Synthetic oligonucleotide
attgtgggtggctatagacgtacgcgtccg

SEQ ID NO: 204865 - DNA, 30 bp, Artificial Sequence
  Synthetic oligonucleotide
cactcctgatcaacgtacagtatgcgtccg

SEQ ID NO: 204866 - DNA, 30 bp, Artificial Sequence
  Synthetic oligonucleotide
cgtcacccttcttgcggggttggtcgtccg

SEQ ID NO: 204867 - DNA, 30 bp, Artificial Sequence
  Synthetic oligonucleotide
atcacatggcgcaaaaactatataggtccg

SEQ ID NO: 204868 - DNA, 30 bp, Artificial Sequence
  Synthetic oligonucleotide
cctaagacccacccaacgatagtaggtccg

SEQ ID NO: 204869 - DNA, 30 bp, Artificial Sequence
  Synthetic oligonucleotide
ccagggacgcgaataacttcccagggtccg

SEQ ID NO: 204870 - DNA, 31 bp, Artificial Sequence
  Synthetic oligonucleotide
gtgggtctatacgccgggaacagggggtccg

SEQ ID NO: 204871 - DNA, 30 bp, Artificial Sequence
  Synthetic oligonucleotide
cagacacgtgcgtgtccgggcgctggtccg

SEQ ID NO: 204872 - DNA, 30 bp, Artificial Sequence
  Synthetic oligonucleotide
cgaatgctggagtcctctagggcctgtccg

SEQ ID NO: 204873 - DNA, 30 bp, Artificial Sequence
  Synthetic oligonucleotide
cacacaagatctgccagaggacagtgtccg

SEQ ID NO: 204874 - DNA, 30 bp, Artificial Sequence
  Synthetic oligonucleotide
taagatgaagtcgagcgcaacaattgtccg

SEQ ID NO: 204875 - DNA, 30 bp, Artificial Sequence
  Synthetic oligonucleotide
agaaggttccttgaaatgcagtgttgtccg

SEQ ID NO: 204876 - DNA, 30 bp, Artificial Sequence
  Synthetic oligonucleotide
tacgtggttatctttcgtcaaaccattccg

SEQ ID NO: 204877 - DNA, 30 bp, Artificial Sequence
  Synthetic oligonucleotide
cgtgaatctaggtgctgaaccgagattccg

SEQ ID NO: 204878 - DNA, 30 bp, Artificial Sequence
  Synthetic oligonucleotide
ccctgcgttcgcttggagtaccatattccg

SEQ ID NO: 204879 - DNA, 30 bp, Artificial Sequence
  Synthetic oligonucleotide
gggaatggcgcgaggcccactgtggttccg

SEQ ID NO: 204880 - DNA, 30 bp, Artificial Sequence
  Synthetic oligonucleotide
cgatagtcagcattacgacttgctgttccg

SEQ ID NO: 204881 - DNA, 30 bp, Artificial Sequence
  Synthetic oligonucleotide
acgacgtattgacctggtataggtgttccg

SEQ ID NO: 204882 - DNA, 30 bp, Artificial Sequence
  Synthetic oligonucleotide
ttctgctgtcgggcgacaacgccatttccg

SEQ ID NO: 204883 - DNA, 30 bp, Artificial Sequence
  Synthetic oligonucleotide
ggttacatgttccttccgtgggagtttccg

SEQ ID NO: 204884 - DNA, 27 bp, Artificial Sequence
  Synthetic oligonucleotide
atttgcaaagagttcactgccaaagcg

SEQ ID NO: 204885 - DNA, 30 bp, Artificial Sequence
  Synthetic oligonucleotide
gtacataaagtcaatataagttccaaagcg

SEQ ID NO: 204886 - DNA, 30 bp, Artificial Sequence
  Synthetic oligonucleotide
agaaatgtagttactccggcccgcaaagcg

SEQ ID NO: 204887 - DNA, 30 bp, Artificial Sequence
  Synthetic oligonucleotide
atcgtataagcaggctaaacacctaaagcg

SEQ ID NO: 204888 - DNA, 30 bp, Artificial Sequence
  Synthetic oligonucleotide
aagtgtgcaagtgtggataagtctaaagcg

SEQ ID NO: 204889 - DNA, 30 bp, Artificial Sequence
  Synthetic oligonucleotide
ccacgcactaaagctacgttgggtaaagcg

SEQ ID NO: 204890 - DNA, 30 bp, Artificial Sequence
  Synthetic oligonucleotide
ggggcccttcaagtggatgagtgacaagcg

SEQ ID NO: 204891 - DNA, 30 bp, Artificial Sequence
  Synthetic oligonucleotide
agagccggctataaggtaagaccagaagcg

SEQ ID NO: 204892 - DNA, 30 bp, Artificial Sequence
  Synthetic oligonucleotide
tcgcccgctcttaaaattgcgtgtgaagcg

SEQ ID NO: 204893 - DNA, 30 bp, Artificial Sequence
  Synthetic oligonucleotide
ctacggtggagttatcgcaaggaataagcg

SEQ ID NO: 204894 - DNA, 30 bp, Artificial Sequence
  Synthetic oligonucleotide
gccttagtatccaggaccatgctataagcg

SEQ ID NO: 204895 - DNA, 30 bp, Artificial Sequence
  Synthetic oligonucleotide
tcgggagaggacggcagttgagtctaagcg

SEQ ID NO: 204896 - DNA, 30 bp, Artificial Sequence
  Synthetic oligonucleotide
gtgtctggtaagtgtagacactcgtaagcg

SEQ ID NO: 204897 - DNA, 30 bp, Artificial Sequence
  Synthetic oligonucleotide
tcgcgacacgcggtagggatcatgtaagcg

SEQ ID NO: 204898 - DNA, 30 bp, Artificial Sequence
  Synthetic oligonucleotide
tcggtcccgtgcagggtacttatgtaagcg

SEQ ID NO: 204899 - DNA, 29 bp, Artificial Sequence
  Synthetic oligonucleotide
tgtagcgacgaaaatgtttggtttaagcg

SEQ ID NO: 204900 - DNA, 30 bp, Artificial Sequence
  Synthetic oligonucleotide
ggtagagtccgggagggttcacgtacagcg

SEQ ID NO: 204901 - DNA, 30 bp, Artificial Sequence
  Synthetic oligonucleotide
gagctcagctattgttgttaagacccagcg

SEQ ID NO: 204902 - DNA, 30 bp, Artificial Sequence
  Synthetic oligonucleotide
gtagggcaggtttccggcaggcggccagcg

SEQ ID NO: 204903 - DNA, 30 bp, Artificial Sequence
  Synthetic oligonucleotide
cgggttaatggatctgtagggtgtccagcg

SEQ ID NO: 204904 - DNA, 30 bp, Artificial Sequence
  Synthetic oligonucleotide
gtcattgcgggtatgcatgcacaagcagcg

SEQ ID NO: 204905 - DNA, 30 bp, Artificial Sequence
  Synthetic oligonucleotide
gagcgtctcgagctccgttgatttgcagcg

SEQ ID NO: 204906 - DNA, 30 bp, Artificial Sequence
  Synthetic oligonucleotide
tcggactagcgagagttggccgaatcagcg

SEQ ID NO: 204907 - DNA, 30 bp, Artificial Sequence
  Synthetic oligonucleotide
tatactcgcagcaagaatcatgaatcagcg

SEQ ID NO: 204908 - DNA, 30 bp, Artificial Sequence
  Synthetic oligonucleotide
acggcacagcgctaagcgcgcaactcagcg

SEQ ID NO: 204909 - DNA, 30 bp, Artificial Sequence
  Synthetic oligonucleotide
aaaaaaaactggtaataaacgtattcagcg

SEQ ID NO: 204910 - DNA, 30 bp, Artificial Sequence
  Synthetic oligonucleotide
ttcagacggcccatctgaaggggttcagcg

SEQ ID NO: 204911 - DNA, 30 bp, Artificial Sequence
  Synthetic oligonucleotide
gccggtagaaggttacttcgatgaagagcg

SEQ ID NO: 204912 - DNA, 30 bp, Artificial Sequence
  Synthetic oligonucleotide
gtttcgccggagaatggtagcgtcagagcg

SEQ ID NO: 204913 - DNA, 30 bp, Artificial Sequence
  Synthetic oligonucleotide
cagttgcgcgtggcaacaggggtcagagcg

SEQ ID NO: 204914 - DNA, 30 bp, Artificial Sequence
  Synthetic oligonucleotide
caacgaatcatagatgcagctaggagagcg

SEQ ID NO: 204915 - DNA, 30 bp, Artificial Sequence
  Synthetic oligonucleotide
aacggccggattgtaattagtgaacgagcg

SEQ ID NO: 204916 - DNA, 30 bp, Artificial Sequence
  Synthetic oligonucleotide
cccgtatccgtcccatattgggaccgagcg

SEQ ID NO: 204917 - DNA, 30 bp, Artificial Sequence
  Synthetic oligonucleotide
atgttcgccaaacacccacatgtccgagcg

SEQ ID NO: 204918 - DNA, 30 bp, Artificial Sequence
  Synthetic oligonucleotide
ctggaaccgagtggtttttactctcgagcg

SEQ ID NO: 204919 - DNA, 30 bp, Artificial Sequence
  Synthetic oligonucleotide
aatacacgctaagcgaatggtggaggagcg

SEQ ID NO: 204920 - DNA, 30 bp, Artificial Sequence
  Synthetic oligonucleotide
cgagtggatcatagacactctaccggagcg

SEQ ID NO: 204921 - DNA, 30 bp, Artificial Sequence
  Synthetic oligonucleotide
gtcacagcttgaaggtgcactgtcggagcg

SEQ ID NO: 204922 - DNA, 30 bp, Artificial Sequence
  Synthetic oligonucleotide
ggttggttttatgtgaacgtgcggggagcg

SEQ ID NO: 204923 - DNA, 29 bp, Artificial Sequence
  Synthetic oligonucleotide
tttacgctaactaattgtactatggagcg

SEQ ID NO: 204924 - DNA, 30 bp, Artificial Sequence
  Synthetic oligonucleotide
ctaataagtagaccgctaaaaactggagcg

SEQ ID NO: 204925 - DNA, 30 bp, Artificial Sequence
  Synthetic oligonucleotide
catgaattatattaaaaaccttttggagcg

SEQ ID NO: 204926 - DNA, 30 bp, Artificial Sequence
  Synthetic oligonucleotide
acctcgaaaagtacttaaaacctgtgagcg

SEQ ID NO: 204927 - DNA, 30 bp, Artificial Sequence
  Synthetic oligonucleotide
cctagcatttaccggtaacaattgtgagcg

SEQ ID NO: 204928 - DNA, 30 bp, Artificial Sequence
  Synthetic oligonucleotide
atgcccggcgatgtacaaagcgcttgagcg

SEQ ID NO: 204929 - DNA, 30 bp, Artificial Sequence
  Synthetic oligonucleotide
tacaccgtccgttttacagcgggttgagcg

SEQ ID NO: 204930 - DNA, 30 bp, Artificial Sequence
  Synthetic oligonucleotide
cgcgctcgacttagccaaatgatttgagcg

SEQ ID NO: 204931 - DNA, 30 bp, Artificial Sequence
  Synthetic oligonucleotide
ggtgaggcggagcaacctcacgaaatagcg

SEQ ID NO: 204932 - DNA, 30 bp, Artificial Sequence
  Synthetic oligonucleotide
tgttgtctgtgacaaactttcccaatagcg

SEQ ID NO: 204933 - DNA, 30 bp, Artificial Sequence
  Synthetic oligonucleotide
cgcccataactatcacacaacttcatagcg

SEQ ID NO: 204934 - DNA, 30 bp, Artificial Sequence
  Synthetic oligonucleotide
gttgacccgaaggcccagcaacagatagcg

SEQ ID NO: 204935 - DNA, 30 bp, Artificial Sequence
  Synthetic oligonucleotide
cggtcaactatgtctaccgactatatagcg

SEQ ID NO: 204936 - DNA, 30 bp, Artificial Sequence
  Synthetic oligonucleotide
ggcagatgactgtgaaaagattcactagcg

SEQ ID NO: 204937 - DNA, 30 bp, Artificial Sequence
  Synthetic oligonucleotide
tcctgttagtaacgtccagattccctagcg

SEQ ID NO: 204938 - DNA, 30 bp, Artificial Sequence
  Synthetic oligonucleotide
ttcgcaggacccacaggaaaaactctagcg

SEQ ID NO: 204939 - DNA, 30 bp, Artificial Sequence
  Synthetic oligonucleotide
ggcgccatccagggagtaaactttctagcg

SEQ ID NO: 204940 - DNA, 30 bp, Artificial Sequence
  Synthetic oligonucleotide
taatccactgcttgatctttgtgagtagcg

SEQ ID NO: 204941 - DNA, 30 bp, Artificial Sequence
  Synthetic oligonucleotide
aataagcatgcggtcaaaaggtaggtagcg

SEQ ID NO: 204942 - DNA, 30 bp, Artificial Sequence
  Synthetic oligonucleotide
ttgatggtaaacatagagttttgggtagcg

SEQ ID NO: 204943 - DNA, 30 bp, Artificial Sequence
  Synthetic oligonucleotide
aggtatgccaagctaaagccaactgtagcg

SEQ ID NO: 204944 - DNA, 30 bp, Artificial Sequence
  Synthetic oligonucleotide
gacaggatcagacggcatgggggtgtagcg

SEQ ID NO: 204945 - DNA, 30 bp, Artificial Sequence
  Synthetic oligonucleotide
cgattttaatcgcaagcgcggcagttagcg

SEQ ID NO: 204946 - DNA, 30 bp, Artificial Sequence
  Synthetic oligonucleotide
aacgctcaactagttggcgtatatttagcg

SEQ ID NO: 204947 - DNA, 30 bp, Artificial Sequence
  Synthetic oligonucleotide
ggacgccttataaagtgaggtttaaacgcg

SEQ ID NO: 204948 - DNA, 30 bp, Artificial Sequence
  Synthetic oligonucleotide
caaatctagctatattgtctgagcaacgcg

SEQ ID NO: 204949 - DNA, 30 bp, Artificial Sequence
  Synthetic oligonucleotide
aggacggtttcagggtttgacgctaacgcg

SEQ ID NO: 204950 - DNA, 30 bp, Artificial Sequence
  Synthetic oligonucleotide
ttacatcgcacaggcatctaatcacacgcg

SEQ ID NO: 204951 - DNA, 30 bp, Artificial Sequence
  Synthetic oligonucleotide
aaggcccgttgtctggtcgtcaaccacgcg

SEQ ID NO: 204952 - DNA, 30 bp, Artificial Sequence
  Synthetic oligonucleotide
agcgtgtgaactgctttcgcggcccacgcg

SEQ ID NO: 204953 - DNA, 30 bp, Artificial Sequence
  Synthetic oligonucleotide
acgccatgaacaggatgttgtccgcacgcg

SEQ ID NO: 204954 - DNA, 30 bp, Artificial Sequence
  Synthetic oligonucleotide
atggaataacgcaatctgccatcggacgcg

SEQ ID NO: 204955 - DNA, 30 bp, Artificial Sequence
  Synthetic oligonucleotide
cgagtcggtattgactaaggctgggacgcg

SEQ ID NO: 204956 - DNA, 30 bp, Artificial Sequence
  Synthetic oligonucleotide
acgagcggacgcgcgaggaatgatgacgcg

SEQ ID NO: 204957 - DNA, 30 bp, Artificial Sequence
  Synthetic oligonucleotide
taggtaccaatccttattggaggatacgcg

SEQ ID NO: 204958 - DNA, 30 bp, Artificial Sequence
  Synthetic oligonucleotide
tcttgtgatggagagggtagtttatacgcg

SEQ ID NO: 204959 - DNA, 30 bp, Artificial Sequence
  Synthetic oligonucleotide
tcattcatgagaggtgatcatgaaaccgcg

SEQ ID NO: 204960 - DNA, 30 bp, Artificial Sequence
  Synthetic oligonucleotide
gggttagtgacaacgtgacaatctaccgcg

SEQ ID NO: 204961 - DNA, 30 bp, Artificial Sequence
  Synthetic oligonucleotide
ttgtgcataggacagacctgccaacccgcg

SEQ ID NO: 204962 - DNA, 30 bp, Artificial Sequence
  Synthetic oligonucleotide
agatggaagacggtccttatagcacccgcg

SEQ ID NO: 204963 - DNA, 30 bp, Artificial Sequence
  Synthetic oligonucleotide
ggtgctcaatctcctgaatttaaccccgcg

SEQ ID NO: 204964 - DNA, 30 bp, Artificial Sequence
  Synthetic oligonucleotide
agatggtcaacgtgccgctgttatcccgcg

SEQ ID NO: 204965 - DNA, 30 bp, Artificial Sequence
  Synthetic oligonucleotide
accattccttctaaacgttttcgagccgcg

SEQ ID NO: 204966 - DNA, 30 bp, Artificial Sequence
  Synthetic oligonucleotide
cactcggtactcacaaggcctcgcgccgcg

SEQ ID NO: 204967 - DNA, 30 bp, Artificial Sequence
  Synthetic oligonucleotide
attcaccaaaaacagttaaagtgggccgcg

SEQ ID NO: 204968 - DNA, 30 bp, Artificial Sequence
  Synthetic oligonucleotide
ccgacgtgaaaagctcttacgatctccgcg

SEQ ID NO: 204969 - DNA, 30 bp, Artificial Sequence
  Synthetic oligonucleotide
agctctgggtgggttttatcgctctccgcg

SEQ ID NO: 204970 - DNA, 30 bp, Artificial Sequence
  Synthetic oligonucleotide
gtggtaacttatcatagttcagcgtccgcg

SEQ ID NO: 204971 - DNA, 30 bp, Artificial Sequence
  Synthetic oligonucleotide
tagagattcgatgaccgcgctagttccgcg

SEQ ID NO: 204972 - DNA, 30 bp, Artificial Sequence
  Synthetic oligonucleotide
ggcgagcccgagtagattccatagagcgcg

SEQ ID NO: 204973 - DNA, 30 bp, Artificial Sequence
  Synthetic oligonucleotide
ttgaaggatacgggcctatattcgagcgcg

SEQ ID NO: 204974 - DNA, 30 bp, Artificial Sequence
  Synthetic oligonucleotide
gggcgttgaaccttaaagttcaggagcgcg

SEQ ID NO: 204975 - DNA, 30 bp, Artificial Sequence
  Synthetic oligonucleotide
aggtgacgttgcgttttctcagctagcgcg

SEQ ID NO: 204976 - DNA, 30 bp, Artificial Sequence
  Synthetic oligonucleotide
agggaccaccgggcccaggtcgaccgcgcg

SEQ ID NO: 204977 - DNA, 30 bp, Artificial Sequence
  Synthetic oligonucleotide
ctgatacgccgataataaatcagtcgcgcg

SEQ ID NO: 204978 - DNA, 30 bp, Artificial Sequence
  Synthetic oligonucleotide
tagcagattggtggctgaaccacaggcgcg

SEQ ID NO: 204979 - DNA, 30 bp, Artificial Sequence
  Synthetic oligonucleotide
ggcaccgagcatgacaactagtcaggcgcg

SEQ ID NO: 204980 - DNA, 30 bp, Artificial Sequence
  Synthetic oligonucleotide
taacggtctaaggtttacgcacgaggcgcg

SEQ ID NO: 204981 - DNA, 30 bp, Artificial Sequence
  Synthetic oligonucleotide
gaagtaggggccatctcgaagttcggcgcg

SEQ ID NO: 204982 - DNA, 30 bp, Artificial Sequence
  Synthetic oligonucleotide
ataaatagcgcattaagtaaagtatgcgcg

SEQ ID NO: 204983 - DNA, 30 bp, Artificial Sequence
  Synthetic oligonucleotide
gaatggtggaagaattacgggtactgcgcg

SEQ ID NO: 204984 - DNA, 30 bp, Artificial Sequence
  Synthetic oligonucleotide
actgtatccatcgtgctagatggctgcgcg

SEQ ID NO: 204985 - DNA, 30 bp, Artificial Sequence
  Synthetic oligonucleotide
ttagtggaacggagatgacgggcaatcgcg

SEQ ID NO: 204986 - DNA, 30 bp, Artificial Sequence
  Synthetic oligonucleotide
taatcatacaagtttcaataatagatcgcg

SEQ ID NO: 204987 - DNA, 30 bp, Artificial Sequence
  Synthetic oligonucleotide
gcccgagggtagttcaatcgggatatcgcg

SEQ ID NO: 204988 - DNA, 30 bp, Artificial Sequence
  Synthetic oligonucleotide
gtaaacaaccttaattatcacagtatcgcg

SEQ ID NO: 204989 - DNA, 30 bp, Artificial Sequence
  Synthetic oligonucleotide
tcgcaagtttggaacttaagtacactcgcg

SEQ ID NO: 204990 - DNA, 30 bp, Artificial Sequence
  Synthetic oligonucleotide
aatgaccgtctaacaaattaatccctcgcg

SEQ ID NO: 204991 - DNA, 30 bp, Artificial Sequence
  Synthetic oligonucleotide
tatgatctgtcgcgtatttccaagctcgcg

SEQ ID NO: 204992 - DNA, 30 bp, Artificial Sequence
  Synthetic oligonucleotide
tgactgatgctttatggagtctgtctcgcg

SEQ ID NO: 204993 - DNA, 30 bp, Artificial Sequence
  Synthetic oligonucleotide
attgatcgtatatcgactgatgtcgtcgcg

SEQ ID NO: 204994 - DNA, 30 bp, Artificial Sequence
  Synthetic oligonucleotide
agggtgagcacgaggtccgcgggggtcgcg

SEQ ID NO: 204995 - DNA, 30 bp, Artificial Sequence
  Synthetic oligonucleotide
gatccttaagcagaggaagccactgtcgcg

SEQ ID NO: 204996 - DNA, 30 bp, Artificial Sequence
  Synthetic oligonucleotide
cgtgcgttcaatccggagcgggttgtcgcg

SEQ ID NO: 204997 - DNA, 30 bp, Artificial Sequence
  Synthetic oligonucleotide
gaatatgtgcaactagtcaccccattcgcg

SEQ ID NO: 204998 - DNA, 30 bp, Artificial Sequence
  Synthetic oligonucleotide
tacgcccggcaagaggttacaggattcgcg

SEQ ID NO: 204999 - DNA, 30 bp, Artificial Sequence
  Synthetic oligonucleotide
catcacggcaaccactaaggtcatttcgcg

SEQ ID NO: 205000 - DNA, 30 bp, Artificial Sequence
  Synthetic oligonucleotide
ccggacacacgtagaaaaacagttttcgcg

SEQ ID NO: 205001 - DNA, 30 bp, Artificial Sequence
  Synthetic oligonucleotide
gtagccgatcagcagtagatacgaaaggcg

SEQ ID NO: 205002 - DNA, 30 bp, Artificial Sequence
  Synthetic oligonucleotide
ttcaagacgattcacggatcgagcaaggcg

SEQ ID NO: 205003 - DNA, 30 bp, Artificial Sequence
  Synthetic oligonucleotide
tgacccggataaacgttggagtgacaggcg

SEQ ID NO: 205004 - DNA, 30 bp, Artificial Sequence
  Synthetic oligonucleotide
tggatggcgagtaccaggtattgacaggcg

SEQ ID NO: 205005 - DNA, 30 bp, Artificial Sequence
  Synthetic oligonucleotide
gagtcataggtaacgattgtccaccaggcg

SEQ ID NO: 205006 - DNA, 30 bp, Artificial Sequence
  Synthetic oligonucleotide
agaagcttggaacacagttttagccaggcg

SEQ ID NO: 205007 - DNA, 30 bp, Artificial Sequence
  Synthetic oligonucleotide
gcggggctccgacccccgagagtgcaggcg

SEQ ID NO: 205008 - DNA, 30 bp, Artificial Sequence
  Synthetic oligonucleotide
tcatatcggcctcttcctatgtatcaggcg

SEQ ID NO: 205009 - DNA, 30 bp, Artificial Sequence
  Synthetic oligonucleotide
agggtgtccaactatttctggcaagaggcg

SEQ ID NO: 205010 - DNA, 30 bp, Artificial Sequence
  Synthetic oligonucleotide
tagaacgtcggggcttcaccatccgaggcg

SEQ ID NO: 205011 - DNA, 30 bp, Artificial Sequence
  Synthetic oligonucleotide
acaagagtcgaaaagaatcttttcgaggcg

SEQ ID NO: 205012 - DNA, 30 bp, Artificial Sequence
  Synthetic oligonucleotide
ttgtggcaacaaggggagttccaggaggcg

SEQ ID NO: 205013 - DNA, 30 bp, Artificial Sequence
  Synthetic oligonucleotide
cgtggtttttgtatgacgtcagatgaggcg

SEQ ID NO: 205014 - DNA, 30 bp, Artificial Sequence
  Synthetic oligonucleotide
attacgctgttcaaaatagtgagtgaggcg

SEQ ID NO: 205015 - DNA, 30 bp, Artificial Sequence
  Synthetic oligonucleotide
gcatggggctagccacatcagcaataggcg

SEQ ID NO: 205016 - DNA, 30 bp, Artificial Sequence
  Synthetic oligonucleotide
tcctaaatcatgtcagtgtcgatataggcg

SEQ ID NO: 205017 - DNA, 30 bp, Artificial Sequence
  Synthetic oligonucleotide
catcatttatcaagggatcctagctaggcg

SEQ ID NO: 205018 - DNA, 30 bp, Artificial Sequence
  Synthetic oligonucleotide
ctggctgttaaacatgaaagtccgtaggcg

SEQ ID NO: 205019 - DNA, 30 bp, Artificial Sequence
  Synthetic oligonucleotide
tatcgtgatgatgtgtggcgctattaggcg

SEQ ID NO: 205020 - DNA, 30 bp, Artificial Sequence
  Synthetic oligonucleotide
agaatgctaatggcttcattttagacggcg

SEQ ID NO: 205021 - DNA, 30 bp, Artificial Sequence
  Synthetic oligonucleotide
agaggaatgccgtcatctgttacgacggcg

SEQ ID NO: 205022 - DNA, 30 bp, Artificial Sequence
  Synthetic oligonucleotide
accaggctaagttactatgcggtgacggcg

SEQ ID NO: 205023 - DNA, 30 bp, Artificial Sequence
  Synthetic oligonucleotide
gctagtagtaattaaggctactatacggcg

SEQ ID NO: 205024 - DNA, 30 bp, Artificial Sequence
  Synthetic oligonucleotide
agcgcgtcgaggaactaatcaattacggcg

SEQ ID NO: 205025 - DNA, 30 bp, Artificial Sequence
  Synthetic oligonucleotide
atagggggtgctaaggggtgtaccccggcg

SEQ ID NO: 205026 - DNA, 30 bp, Artificial Sequence
  Synthetic oligonucleotide
ggttaagctaagggattccagttgccggcg

SEQ ID NO: 205027 - DNA, 30 bp, Artificial Sequence
  Synthetic oligonucleotide
ctttgacgtgtaaggggcgctcgtccggcg

SEQ ID NO: 205028 - DNA, 30 bp, Artificial Sequence
  Synthetic oligonucleotide
ctgccaattggagccccctcaaaggcggcg

SEQ ID NO: 205029 - DNA, 30 bp, Artificial Sequence
  Synthetic oligonucleotide
atggacacaatgccgaatcccgcggcggcg

SEQ ID NO: 205030 - DNA, 30 bp, Artificial Sequence
  Synthetic oligonucleotide
gctagtactcgttcgttcccatcggcggcg

SEQ ID NO: 205031 - DNA, 30 bp, Artificial Sequence
  Synthetic oligonucleotide
tctctcggagcagagcgttacacatcggcg

SEQ ID NO: 205032 - DNA, 30 bp, Artificial Sequence
  Synthetic oligonucleotide
ggagggaacagctgcggcatacggtcggcg

SEQ ID NO: 205033 - DNA, 30 bp, Artificial Sequence
  Synthetic oligonucleotide
ccaaagtgtgcatcgtgcgcataaagggcg

SEQ ID NO: 205034 - DNA, 30 bp, Artificial Sequence
  Synthetic oligonucleotide
ctaacatgaggaagccctgtcggaagggcg

SEQ ID NO: 205035 - DNA, 30 bp, Artificial Sequence
  Synthetic oligonucleotide
acaggtccaagggttccaaaggtcagggcg

SEQ ID NO: 205036 - DNA, 30 bp, Artificial Sequence
  Synthetic oligonucleotide
ctgggtagatatacgccataggcacgggcg

SEQ ID NO: 205037 - DNA, 30 bp, Artificial Sequence
  Synthetic oligonucleotide
ttcccagtaccactaaaccattcccgggcg

SEQ ID NO: 205038 - DNA, 30 bp, Artificial Sequence
  Synthetic oligonucleotide
ggggtagcaaacgcagagcgtagccgggcg

SEQ ID NO: 205039 - DNA, 30 bp, Artificial Sequence
  Synthetic oligonucleotide
cttcacaaacacgcaaacactttccgggcg

SEQ ID NO: 205040 - DNA, 30 bp, Artificial Sequence
  Synthetic oligonucleotide
ctgtgtggtgcttggtattaaaagcgggcg

SEQ ID NO: 205041 - DNA, 30 bp, Artificial Sequence
  Synthetic oligonucleotide
attcagcagggcagagaatttcagcgggcg

SEQ ID NO: 205042 - DNA, 30 bp, Artificial Sequence
  Synthetic oligonucleotide
tcaaaccaataaatgattcatgggcgggcg

SEQ ID NO: 205043 - DNA, 30 bp, Artificial Sequence
  Synthetic oligonucleotide
ggtagcgtccgagccgaacgtgttcgggcg

SEQ ID NO: 205044 - DNA, 30 bp, Artificial Sequence
  Synthetic oligonucleotide
cgcgtatgtaaaatattttagacaggggcg

SEQ ID NO: 205045 - DNA, 30 bp, Artificial Sequence
  Synthetic oligonucleotide
gagctaccaatcgctcacgttgccggggcg

SEQ ID NO: 205046 - DNA, 30 bp, Artificial Sequence
  Synthetic oligonucleotide
atatccacaagatcagtgccagagggggcg

SEQ ID NO: 205047 - DNA, 30 bp, Artificial Sequence
  Synthetic oligonucleotide
tggtcgggtactcattggcaggcgggggcg

SEQ ID NO: 205048 - DNA, 30 bp, Artificial Sequence
  Synthetic oligonucleotide
tccatgttcgtctcgaggcgtaactgggcg

SEQ ID NO: 205049 - DNA, 30 bp, Artificial Sequence
  Synthetic oligonucleotide
ggcacaaacatcagggacggaggctgggcg

SEQ ID NO: 205050 - DNA, 30 bp, Artificial Sequence
  Synthetic oligonucleotide
tacccctatcgtatgtgatcatggtgggcg

SEQ ID NO: 205051 - DNA, 30 bp, Artificial Sequence
  Synthetic oligonucleotide
cagcacagaatagtcaaattacgttgggcg

SEQ ID NO: 205052 - DNA, 30 bp, Artificial Sequence
  Synthetic oligonucleotide
ctatagagtagacgtctgattctttgggcg

SEQ ID NO: 205053 - DNA, 30 bp, Artificial Sequence
  Synthetic oligonucleotide
tatagggggaaccggcatgggcgaatggcg

SEQ ID NO: 205054 - DNA, 30 bp, Artificial Sequence
  Synthetic oligonucleotide
tcaatgtatagaaagagtttaataatggcg

SEQ ID NO: 205055 - DNA, 30 bp, Artificial Sequence
  Synthetic oligonucleotide
catggccacggatctcggttattaatggcg

SEQ ID NO: 205056 - DNA, 30 bp, Artificial Sequence
  Synthetic oligonucleotide
aatgtgcaatagcgctgtagactcatggcg

SEQ ID NO: 205057 - DNA, 30 bp, Artificial Sequence
  Synthetic oligonucleotide
gccgtcttgtaggacccactagtcatggcg

SEQ ID NO: 205058 - DNA, 30 bp, Artificial Sequence
  Synthetic oligonucleotide
taaaaggttggcgactatgtacaactggcg

SEQ ID NO: 205059 - DNA, 30 bp, Artificial Sequence
  Synthetic oligonucleotide
taaggtagtcataaggggtggatactggcg

SEQ ID NO: 205060 - DNA, 30 bp, Artificial Sequence
  Synthetic oligonucleotide
aagcctagaatcgcaccttccggcctggcg

SEQ ID NO: 205061 - DNA, 30 bp, Artificial Sequence
  Synthetic oligonucleotide
acagatttagaaggtgattggtccgtggcg

SEQ ID NO: 205062 - DNA, 30 bp, Artificial Sequence
  Synthetic oligonucleotide
gcagcaaggtggctcgtaaagttggtggcg

SEQ ID NO: 205063 - DNA, 30 bp, Artificial Sequence
  Synthetic oligonucleotide
ggacggagaaaattagccaacgtcttggcg

SEQ ID NO: 205064 - DNA, 30 bp, Artificial Sequence
  Synthetic oligonucleotide
gaccgattgaccctatgtcagcatttggcg

SEQ ID NO: 205065 - DNA, 30 bp, Artificial Sequence
  Synthetic oligonucleotide
ggggcaccatctgtgcttttgcatttggcg

SEQ ID NO: 205066 - DNA, 30 bp, Artificial Sequence
  Synthetic oligonucleotide
tgggccggaaggttctcactgactttggcg

SEQ ID NO: 205067 - DNA, 30 bp, Artificial Sequence
  Synthetic oligonucleotide
gggacgcctgggtgtgtcggaaaaaatgcg

SEQ ID NO: 205068 - DNA, 30 bp, Artificial Sequence
  Synthetic oligonucleotide
aaagattcgacagaccggacgaataatgcg

SEQ ID NO: 205069 - DNA, 30 bp, Artificial Sequence
  Synthetic oligonucleotide
cgccaaaacgagtacttcatgtaacatgcg

SEQ ID NO: 205070 - DNA, 30 bp, Artificial Sequence
  Synthetic oligonucleotide
acacgcaaatatcaatccagaggccatgcg

SEQ ID NO: 205071 - DNA, 30 bp, Artificial Sequence
  Synthetic oligonucleotide
cgtggttggggagggtgcatcggccatgcg

SEQ ID NO: 205072 - DNA, 30 bp, Artificial Sequence
  Synthetic oligonucleotide
atgtagactaaactgtcgccctgccatgcg

SEQ ID NO: 205073 - DNA, 30 bp, Artificial Sequence
  Synthetic oligonucleotide
tctagtgttctcacgataccccgagatgcg

SEQ ID NO: 205074 - DNA, 30 bp, Artificial Sequence
  Synthetic oligonucleotide
tcggtccgcaccaccgatcataaggatgcg

SEQ ID NO: 205075 - DNA, 30 bp, Artificial Sequence
  Synthetic oligonucleotide
atatgccatctcgtgaactagggggatgcg

SEQ ID NO: 205076 - DNA, 30 bp, Artificial Sequence
  Synthetic oligonucleotide
gtcaggcaacatcgtccccgcatggatgcg

SEQ ID NO: 205077 - DNA, 30 bp, Artificial Sequence
  Synthetic oligonucleotide
gtatacgtagacattatcaggggatatgcg

SEQ ID NO: 205078 - DNA, 30 bp, Artificial Sequence
  Synthetic oligonucleotide
cgatatttatgtatgagttgactatatgcg

SEQ ID NO: 205079 - DNA, 30 bp, Artificial Sequence
  Synthetic oligonucleotide
aaatgttatgcaatatagaatacctatgcg

SEQ ID NO: 205080 - DNA, 30 bp, Artificial Sequence
  Synthetic oligonucleotide
gacagagacaaccggagtccgcgctatgcg

SEQ ID NO: 205081 - DNA, 30 bp, Artificial Sequence
  Synthetic oligonucleotide
tactcgctatatttggttggtcaaactgcg

SEQ ID NO: 205082 - DNA, 30 bp, Artificial Sequence
  Synthetic oligonucleotide
cttgtacggaactagaatttattaactgcg

SEQ ID NO: 205083 - DNA, 30 bp, Artificial Sequence
  Synthetic oligonucleotide
ggtgtctatgtggcaaccaattcgactgcg

SEQ ID NO: 205084 - DNA, 30 bp, Artificial Sequence
  Synthetic oligonucleotide
tcgagcgtcgtagtaagtaattggactgcg

SEQ ID NO: 205085 - DNA, 30 bp, Artificial Sequence
  Synthetic oligonucleotide
gggcgcatgattaccttaaattatactgcg

SEQ ID NO: 205086 - DNA, 30 bp, Artificial Sequence
  Synthetic oligonucleotide
acggggtcccctgagtcacttgctactgcg

SEQ ID NO: 205087 - DNA, 30 bp, Artificial Sequence
  Synthetic oligonucleotide
gcgggttagcggtaaacccatccgcctgcg

SEQ ID NO: 205088 - DNA, 30 bp, Artificial Sequence
  Synthetic oligonucleotide
gccgaagcggaatcataggcctatcctgcg

SEQ ID NO: 205089 - DNA, 30 bp, Artificial Sequence
  Synthetic oligonucleotide
cggaccctaaaaaccttagggatagctgcg

SEQ ID NO: 205090 - DNA, 30 bp, Artificial Sequence
  Synthetic oligonucleotide
aggctaatgtagacacggcttatggctgcg

SEQ ID NO: 205091 - DNA, 30 bp, Artificial Sequence
  Synthetic oligonucleotide
ttggaatgtgagccggaaagctatgctgcg

SEQ ID NO: 205092 - DNA, 30 bp, Artificial Sequence
  Synthetic oligonucleotide
aggtcggaggggaatacacgcgtatctgcg

SEQ ID NO: 205093 - DNA, 30 bp, Artificial Sequence
  Synthetic oligonucleotide
ttcaaacaaacaataacggctgtgtctgcg

SEQ ID NO: 205094 - DNA, 30 bp, Artificial Sequence
  Synthetic oligonucleotide
gagtcgtagatgtgaacaggtacttctgcg

SEQ ID NO: 205095 - DNA, 30 bp, Artificial Sequence
  Synthetic oligonucleotide
attaagcagtaggcgagcccagacagtgcg

SEQ ID NO: 205096 - DNA, 30 bp, Artificial Sequence
  Synthetic oligonucleotide
agaatacgagggctctactatgccagtgcg

SEQ ID NO: 205097 - DNA, 30 bp, Artificial Sequence
  Synthetic oligonucleotide
cggcgcaaactattagccttgttacgtgcg

SEQ ID NO: 205098 - DNA, 30 bp, Artificial Sequence
  Synthetic oligonucleotide
acgggtttgtattcgttgctagagcgtgcg

SEQ ID NO: 205099 - DNA, 30 bp, Artificial Sequence
  Synthetic oligonucleotide
tattcaatggagaacctgatggatcgtgcg

SEQ ID NO: 205100 - DNA, 30 bp, Artificial Sequence
  Synthetic oligonucleotide
gttattatatccactgcgcgacaaggtgcg

SEQ ID NO: 205101 - DNA, 30 bp, Artificial Sequence
  Synthetic oligonucleotide
aatcgttaataagcacgcaagaggggtgcg

SEQ ID NO: 205102 - DNA, 30 bp, Artificial Sequence
  Synthetic oligonucleotide
gtgtagcattggtactaaggatggggtgcg

SEQ ID NO: 205103 - DNA, 30 bp, Artificial Sequence
  Synthetic oligonucleotide
ggcggttggtggacaatggtactgggtgcg

SEQ ID NO: 205104 - DNA, 30 bp, Artificial Sequence
  Synthetic oligonucleotide
ggaccggtgcggcttacggcgtatggtgcg

SEQ ID NO: 205105 - DNA, 30 bp, Artificial Sequence
  Synthetic oligonucleotide
gaaggctgtggtgattctggataatgtgcg

SEQ ID NO: 205106 - DNA, 30 bp, Artificial Sequence
  Synthetic oligonucleotide
ttacaaggggccaggttgaagttatgtgcg

SEQ ID NO: 205107 - DNA, 30 bp, Artificial Sequence
  Synthetic oligonucleotide
agtgaaggaatagccagggtcaactgtgcg

SEQ ID NO: 205108 - DNA, 30 bp, Artificial Sequence
  Synthetic oligonucleotide
tggtttggcgcggtgaagggggcctgtgcg

SEQ ID NO: 205109 - DNA, 30 bp, Artificial Sequence
  Synthetic oligonucleotide
gcgtgtacaggcacccaaacgcacattgcg

SEQ ID NO: 205110 - DNA, 30 bp, Artificial Sequence
  Synthetic oligonucleotide
cacgagaagcagcacccaccaagcattgcg

SEQ ID NO: 205111 - DNA, 30 bp, Artificial Sequence
  Synthetic oligonucleotide
attgggcttggcattgatggtaaacttgcg

SEQ ID NO: 205112 - DNA, 30 bp, Artificial Sequence
  Synthetic oligonucleotide
ttttgtgtaggtttactcctctaccttgcg

SEQ ID NO: 205113 - DNA, 30 bp, Artificial Sequence
  Synthetic oligonucleotide
gcgcgttacacttcttggagcctagttgcg

SEQ ID NO: 205114 - DNA, 30 bp, Artificial Sequence
  Synthetic oligonucleotide
aggtagttccgtaaaatcggtgaggttgcg

SEQ ID NO: 205115 - DNA, 30 bp, Artificial Sequence
  Synthetic oligonucleotide
cctgaagtggaactatccgggggggttgcg

SEQ ID NO: 205116 - DNA, 30 bp, Artificial Sequence
  Synthetic oligonucleotide
cctccaagtactcgggctcgggaatttgcg

SEQ ID NO: 205117 - DNA, 30 bp, Artificial Sequence
  Synthetic oligonucleotide
cgtttgtgacgcaagggtaggacatttgcg

SEQ ID NO: 205118 - DNA, 30 bp, Artificial Sequence
  Synthetic oligonucleotide
aaagtcgggcggcatatagggcattttgcg

SEQ ID NO: 205119 - DNA, 30 bp, Artificial Sequence
  Synthetic oligonucleotide
gtgtttatccaaagacggacgtaaaaatcg

SEQ ID NO: 205120 - DNA, 30 bp, Artificial Sequence
  Synthetic oligonucleotide
acattccaccagacaccctctctaaaatcg

SEQ ID NO: 205121 - DNA, 30 bp, Artificial Sequence
  Synthetic oligonucleotide
gtagtgtgtcgaaagctgactctcaaatcg

SEQ ID NO: 205122 - DNA, 30 bp, Artificial Sequence
  Synthetic oligonucleotide
gaatggaagcgacacagcctgtaacaatcg

SEQ ID NO: 205123 - DNA, 30 bp, Artificial Sequence
  Synthetic oligonucleotide
agactaaacgcctaaggcagtccacaatcg

SEQ ID NO: 205124 - DNA, 30 bp, Artificial Sequence
  Synthetic oligonucleotide
agtctccacccggtgcgaaggcaccaatcg

SEQ ID NO: 205125 - DNA, 30 bp, Artificial Sequence
  Synthetic oligonucleotide
ttagacaacgcggtgatcaggcagcaatcg

SEQ ID NO: 205126 - DNA, 30 bp, Artificial Sequence
  Synthetic oligonucleotide
taacgaagagttcggcgccagctgcaatcg

SEQ ID NO: 205127 - DNA, 30 bp, Artificial Sequence
  Synthetic oligonucleotide
agagagctcgggcctccgccgtatcaatcg

SEQ ID NO: 205128 - DNA, 30 bp, Artificial Sequence
  Synthetic oligonucleotide
ccttcaatattggaccccacgtccgaatcg

SEQ ID NO: 205129 - DNA, 30 bp, Artificial Sequence
  Synthetic oligonucleotide
tggacaagtgatattcactacaaggaatcg

SEQ ID NO: 205130 - DNA, 30 bp, Artificial Sequence
  Synthetic oligonucleotide
ctcttatacgagatagagctatgggaatcg

SEQ ID NO: 205131 - DNA, 30 bp, Artificial Sequence
  Synthetic oligonucleotide
agtcttaaccgcccatattacggataatcg

SEQ ID NO: 205132 - DNA, 30 bp, Artificial Sequence
  Synthetic oligonucleotide
tcaatatttgtaatattccagtgataatcg

SEQ ID NO: 205133 - DNA, 30 bp, Artificial Sequence
  Synthetic oligonucleotide
cgacttcgccaccgacatgaaacgtaatcg

SEQ ID NO: 205134 - DNA, 30 bp, Artificial Sequence
  Synthetic oligonucleotide
tgtcccatggtctcaggccctaggtaatcg

SEQ ID NO: 205135 - DNA, 30 bp, Artificial Sequence
  Synthetic oligonucleotide
cgacttactagtgcccccgtattgtaatcg

SEQ ID NO: 205136 - DNA, 30 bp, Artificial Sequence
  Synthetic oligonucleotide
cggcgccatgggcatgtgatgcattaatcg

SEQ ID NO: 205137 - DNA, 30 bp, Artificial Sequence
  Synthetic oligonucleotide
tgccgtcaataaatgaccgacgattaatcg

SEQ ID NO: 205138 - DNA, 30 bp, Artificial Sequence
  Synthetic oligonucleotide
tccaatttatgaaacaacaaggtttaatcg

SEQ ID NO: 205139 - DNA, 30 bp, Artificial Sequence
  Synthetic oligonucleotide
gaggctagtgaatcaagtgtcttttaatcg

SEQ ID NO: 205140 - DNA, 30 bp, Artificial Sequence
  Synthetic oligonucleotide
cgttcgaaatgtaagacggatcgaacatcg

SEQ ID NO: 205141 - DNA, 30 bp, Artificial Sequence
  Synthetic oligonucleotide
tccgcggccaataaaatcggtggaacatcg

SEQ ID NO: 205142 - DNA, 30 bp, Artificial Sequence
  Synthetic oligonucleotide
ataggcgggcgaaagccctcactaacatcg

SEQ ID NO: 205143 - DNA, 30 bp, Artificial Sequence
  Synthetic oligonucleotide
gaagtcgacatggcttagtaaaacacatcg

SEQ ID NO: 205144 - DNA, 30 bp, Artificial Sequence
  Synthetic oligonucleotide
aatggaatcgagtttagttggatcacatcg

SEQ ID NO: 205145 - DNA, 30 bp, Artificial Sequence
  Synthetic oligonucleotide
atgtgatagttgatgggcttggcaccatcg

SEQ ID NO: 205146 - DNA, 30 bp, Artificial Sequence
  Synthetic oligonucleotide
acgggcgtcgcactaagtacggtgccatcg

SEQ ID NO: 205147 - DNA, 30 bp, Artificial Sequence
  Synthetic oligonucleotide
atgatggagggcaggaactacccagcatcg

SEQ ID NO: 205148 - DNA, 30 bp, Artificial Sequence
  Synthetic oligonucleotide
ggctacctagggacaacttgagacgcatcg

SEQ ID NO: 205149 - DNA, 30 bp, Artificial Sequence
  Synthetic oligonucleotide
agtgttccattcttttcggcccgcgcatcg

SEQ ID NO: 205150 - DNA, 30 bp, Artificial Sequence
  Synthetic oligonucleotide
tccgtagttgatggcctctaagtcgcatcg

SEQ ID NO: 205151 - DNA, 30 bp, Artificial Sequence
  Synthetic oligonucleotide
ctccgtggcgactttcctaatagggcatcg

SEQ ID NO: 205152 - DNA, 30 bp, Artificial Sequence
  Synthetic oligonucleotide
gcttgatgatgacgaatagttagggcatcg

SEQ ID NO: 205153 - DNA, 30 bp, Artificial Sequence
  Synthetic oligonucleotide
gatgtacctataaagcgatagcgggcatcg

SEQ ID NO: 205154 - DNA, 30 bp, Artificial Sequence
  Synthetic oligonucleotide
tccgatatttaatgctatcgttgggcatcg

SEQ ID NO: 205155 - DNA, 30 bp, Artificial Sequence
  Synthetic oligonucleotide
aacgctagagtgagggcttattcaagatcg

SEQ ID NO: 205156 - DNA, 29 bp, Artificial Sequence
  Synthetic oligonucleotide
gcttcgccgtttatggtcttctgagatcg

SEQ ID NO: 205157 - DNA, 30 bp, Artificial Sequence
  Synthetic oligonucleotide
acttttactagccgatagtcgtctagatcg

SEQ ID NO: 205158 - DNA, 30 bp, Artificial Sequence
  Synthetic oligonucleotide
tcttctatcctctgatccatatcccgatcg

SEQ ID NO: 205159 - DNA, 30 bp, Artificial Sequence
  Synthetic oligonucleotide
gccagtccccggtcagggaaacagcgatcg

SEQ ID NO: 205160 - DNA, 30 bp, Artificial Sequence
  Synthetic oligonucleotide
gtccttggtgatcaatcagtgagtcgatcg

SEQ ID NO: 205161 - DNA, 30 bp, Artificial Sequence
  Synthetic oligonucleotide
tctcggctggctagtgggaatctaggatcg

SEQ ID NO: 205162 - DNA, 30 bp, Artificial Sequence
  Synthetic oligonucleotide
actctactaagcattgtgtgttccggatcg

SEQ ID NO: 205163 - DNA, 30 bp, Artificial Sequence
  Synthetic oligonucleotide
gtctttccaaattgaagtcttctcggatcg

SEQ ID NO: 205164 - DNA, 30 bp, Artificial Sequence
  Synthetic oligonucleotide
ttcgataagccagcaacatgtaggggatcg

SEQ ID NO: 205165 - DNA, 30 bp, Artificial Sequence
  Synthetic oligonucleotide
tcgataaaaatgccagcaggctactgatcg

SEQ ID NO: 205166 - DNA, 30 bp, Artificial Sequence
  Synthetic oligonucleotide
cattacggcctttaaacacccctttgatcg

SEQ ID NO: 205167 - DNA, 30 bp, Artificial Sequence
  Synthetic oligonucleotide
gattcgcattaatcgagtttcaaaatatcg

SEQ ID NO: 205168 - DNA, 30 bp, Artificial Sequence
  Synthetic oligonucleotide
gaccatgatactgagactgtgtccatatcg

SEQ ID NO: 205169 - DNA, 30 bp, Artificial Sequence
  Synthetic oligonucleotide
tcgtggacagatatctccgtgaagatatcg

SEQ ID NO: 205170 - DNA, 30 bp, Artificial Sequence
  Synthetic oligonucleotide
tgaggtacattagaatattttaagatatcg

SEQ ID NO: 205171 - DNA, 30 bp, Artificial Sequence
  Synthetic oligonucleotide
actagatttctgacgggaccgatgctatcg

SEQ ID NO: 205172 - DNA, 30 bp, Artificial Sequence
  Synthetic oligonucleotide
cctttcgaatatcaagaatttgatctatcg

SEQ ID NO: 205173 - DNA, 30 bp, Artificial Sequence
  Synthetic oligonucleotide
taaacaccaggttcttcggcagcagtatcg

SEQ ID NO: 205174 - DNA, 30 bp, Artificial Sequence
  Synthetic oligonucleotide
cgaattagcctcttgaaagtgcacgtatcg

SEQ ID NO: 205175 - DNA, 30 bp, Artificial Sequence
  Synthetic oligonucleotide
gtgttaacttcagcagatcgttacgtatcg

SEQ ID NO: 205176 - DNA, 30 bp, Artificial Sequence
  Synthetic oligonucleotide
tcacgtagcagagataccagcgccgtatcg

SEQ ID NO: 205177 - DNA, 30 bp, Artificial Sequence
  Synthetic oligonucleotide
ggcagatgttttggagtgtaaagcgtatcg

SEQ ID NO: 205178 - DNA, 30 bp, Artificial Sequence
  Synthetic oligonucleotide
tctgaggggcaatgaggagtcgtcgtatcg

SEQ ID NO: 205179 - DNA, 30 bp, Artificial Sequence
  Synthetic oligonucleotide
ttcgctcttgacgagccaagcttcgtatcg

SEQ ID NO: 205180 - DNA, 31 bp, Artificial Sequence
  Synthetic oligonucleotide
cgtatctggtattaggccggtattggtatcg

SEQ ID NO: 205181 - DNA, 30 bp, Artificial Sequence
  Synthetic oligonucleotide
agccagtccaagaaccgtaagaatgtatcg

SEQ ID NO: 205182 - DNA, 30 bp, Artificial Sequence
  Synthetic oligonucleotide
acagaaattccaacccactgttaattatcg

SEQ ID NO: 205183 - DNA, 30 bp, Artificial Sequence
  Synthetic oligonucleotide
gggtactcaaattgaacaagccacttatcg

SEQ ID NO: 205184 - DNA, 30 bp, Artificial Sequence
  Synthetic oligonucleotide
ttattgacagcggtcggaacaagaaactcg

SEQ ID NO: 205185 - DNA, 30 bp, Artificial Sequence
  Synthetic oligonucleotide
tcgtagtacacgtttagtcaatgaaactcg

SEQ ID NO: 205186 - DNA, 30 bp, Artificial Sequence
  Synthetic oligonucleotide
ttaactgcacgggtgttaagaatcaactcg

SEQ ID NO: 205187 - DNA, 30 bp, Artificial Sequence
  Synthetic oligonucleotide
atgcggaatttgtagctatgacagaactcg

SEQ ID NO: 205188 - DNA, 30 bp, Artificial Sequence
  Synthetic oligonucleotide
gatgtgattcgcgacgactgatgtaactcg

SEQ ID NO: 205189 - DNA, 30 bp, Artificial Sequence
  Synthetic oligonucleotide
cgacattaaattgaatcataatttaactcg

SEQ ID NO: 205190 - DNA, 30 bp, Artificial Sequence
  Synthetic oligonucleotide
gttacccagtgcgggcaaaatagacactcg

SEQ ID NO: 205191 - DNA, 30 bp, Artificial Sequence
  Synthetic oligonucleotide
acccctgcaaacggtagaaagaaccactcg

SEQ ID NO: 205192 - DNA, 30 bp, Artificial Sequence
  Synthetic oligonucleotide
cgcttattagcctctagagagacccactcg

SEQ ID NO: 205193 - DNA, 30 bp, Artificial Sequence
  Synthetic oligonucleotide
ccactcgcaaaggtcgattcagcccactcg

SEQ ID NO: 205194 - DNA, 30 bp, Artificial Sequence
  Synthetic oligonucleotide
attatccaccatgcaacatagttccactcg

SEQ ID NO: 205195 - DNA, 30 bp, Artificial Sequence
  Synthetic oligonucleotide
gggccagttagctcaatttacaggcactcg

SEQ ID NO: 205196 - DNA, 30 bp, Artificial Sequence
  Synthetic oligonucleotide
agatccaacattgatgtgacatgcgactcg

SEQ ID NO: 205197 - DNA, 30 bp, Artificial Sequence
  Synthetic oligonucleotide
tacgatcgagactgtcgaaaaatcgactcg

SEQ ID NO: 205198 - DNA, 30 bp, Artificial Sequence
  Synthetic oligonucleotide
gataaagggttgctcaacacggcggactcg

SEQ ID NO: 205199 - DNA, 30 bp, Artificial Sequence
  Synthetic oligonucleotide
cgtctgaggcaaacctttttccaatactcg

SEQ ID NO: 205200 - DNA, 30 bp, Artificial Sequence
  Synthetic oligonucleotide
aacaattccaacgaaattcggccatactcg

SEQ ID NO: 205201 - DNA, 30 bp, Artificial Sequence
  Synthetic oligonucleotide
agggaagtggcccacacgctttcctactcg

SEQ ID NO: 205202 - DNA, 30 bp, Artificial Sequence
  Synthetic oligonucleotide
gcggttgagcttaacacgtgatattactcg

SEQ ID NO: 205203 - DNA, 30 bp, Artificial Sequence
  Synthetic oligonucleotide
ggctaccgaaacatccaattttgttactcg

SEQ ID NO: 205204 - DNA, 30 bp, Artificial Sequence
  Synthetic oligonucleotide
gagcatgcgggaaatcaaggcttttactcg

SEQ ID NO: 205205 - DNA, 30 bp, Artificial Sequence
  Synthetic oligonucleotide
gcaggctaaaagccaggcccgggaacctcg

SEQ ID NO: 205206 - DNA, 30 bp, Artificial Sequence
  Synthetic oligonucleotide
ggctatcatgactagctcacaaacacctcg

SEQ ID NO: 205207 - DNA, 30 bp, Artificial Sequence
  Synthetic oligonucleotide
gccggggagttgcttgttactgtgacctcg

SEQ ID NO: 205208 - DNA, 30 bp, Artificial Sequence
  Synthetic oligonucleotide
ctatatgtcgtcgatgattttgcaccctcg

SEQ ID NO: 205209 - DNA, 30 bp, Artificial Sequence
  Synthetic oligonucleotide
agaagttcatcttagaagataggtccctcg

SEQ ID NO: 205210 - DNA, 30 bp, Artificial Sequence
  Synthetic oligonucleotide
agttagattgggacagcatgggccgcctcg

SEQ ID NO: 205211 - DNA, 30 bp, Artificial Sequence
  Synthetic oligonucleotide
attagcgcggtttcatccaatctcgcctcg

SEQ ID NO: 205212 - DNA, 30 bp, Artificial Sequence
  Synthetic oligonucleotide
ctagttcagaacccgccctactgtgcctcg

SEQ ID NO: 205213 - DNA, 30 bp, Artificial Sequence
  Synthetic oligonucleotide
gcgaaatatggtccgcttttcccatcctcg

SEQ ID NO: 205214 - DNA, 30 bp, Artificial Sequence
  Synthetic oligonucleotide
gtgtgttaaatcggtctaagagagtcctcg

SEQ ID NO: 205215 - DNA, 30 bp, Artificial Sequence
  Synthetic oligonucleotide
gatacgtttttcgaatcggtggcaagctcg

SEQ ID NO: 205216 - DNA, 30 bp, Artificial Sequence
  Synthetic oligonucleotide
atcctgtcagaagtggatgtttcgagctcg

SEQ ID NO: 205217 - DNA, 30 bp, Artificial Sequence
  Synthetic oligonucleotide
gcaacaagaaagatgcaagttattagctcg

SEQ ID NO: 205218 - DNA, 30 bp, Artificial Sequence
  Synthetic oligonucleotide
aatacaaatgaaaaaccaagatttagctcg

SEQ ID NO: 205219 - DNA, 30 bp, Artificial Sequence
  Synthetic oligonucleotide
gaggataggctaatggaggtctgacgctcg

SEQ ID NO: 205220 - DNA, 30 bp, Artificial Sequence
  Synthetic oligonucleotide
caagataggttgtcttcttcagagcgctcg

SEQ ID NO: 205221 - DNA, 30 bp, Artificial Sequence
  Synthetic oligonucleotide
atgggtgctacagcaagtgaaaccggctcg

SEQ ID NO: 205222 - DNA, 30 bp, Artificial Sequence
  Synthetic oligonucleotide
gtgcggacgtagacgcggactgccggctcg

SEQ ID NO: 205223 - DNA, 30 bp, Artificial Sequence
  Synthetic oligonucleotide
tcctttgaggaccgttatgttactggctcg

SEQ ID NO: 205224 - DNA, 30 bp, Artificial Sequence
  Synthetic oligonucleotide
gaactggtggtgatgacgggctaatgctcg

SEQ ID NO: 205225 - DNA, 30 bp, Artificial Sequence
  Synthetic oligonucleotide
ttcatataggattagaccacgtgatgctcg

SEQ ID NO: 205226 - DNA, 30 bp, Artificial Sequence
  Synthetic oligonucleotide
agacttagatggtcgaggactttatgctcg

SEQ ID NO: 205227 - DNA, 30 bp, Artificial Sequence
  Synthetic oligonucleotide
cagcggcaacggcgtcccggtctttgctcg

SEQ ID NO: 205228 - DNA, 30 bp, Artificial Sequence
  Synthetic oligonucleotide
aacggattacactcactagggccaatctcg

SEQ ID NO: 205229 - DNA, 30 bp, Artificial Sequence
  Synthetic oligonucleotide
cgttcaaccagaatggatcagtgaatctcg

SEQ ID NO: 205230 - DNA, 30 bp, Artificial Sequence
  Synthetic oligonucleotide
tctccggttagtttttcctaaggcatctcg

SEQ ID NO: 205231 - DNA, 30 bp, Artificial Sequence
  Synthetic oligonucleotide
ctgtaatgccgttggacgtaacttctctcg

SEQ ID NO: 205232 - DNA, 30 bp, Artificial Sequence
  Synthetic oligonucleotide
taagggatttgtggagaccctgttctctcg

SEQ ID NO: 205233 - DNA, 30 bp, Artificial Sequence
  Synthetic oligonucleotide
gctaatcgttaatggttttcatgagtctcg

SEQ ID NO: 205234 - DNA, 30 bp, Artificial Sequence
  Synthetic oligonucleotide
cacgcgcatcctagcgactcagtggtctcg

SEQ ID NO: 205235 - DNA, 30 bp, Artificial Sequence
  Synthetic oligonucleotide
gggtaagcaagttaccctacctatgtctcg

SEQ ID NO: 205236 - DNA, 30 bp, Artificial Sequence
  Synthetic oligonucleotide
cgatccaagcctttgctaacgcctgtctcg

SEQ ID NO: 205237 - DNA, 30 bp, Artificial Sequence
  Synthetic oligonucleotide
gggatacacgcagtggccattatattctcg

SEQ ID NO: 205238 - DNA, 30 bp, Artificial Sequence
  Synthetic oligonucleotide
ctattatcactagcataaatcgtcttctcg

SEQ ID NO: 205239 - DNA, 30 bp, Artificial Sequence
  Synthetic oligonucleotide
ttgtgtggcggggcgatgcaaacgttctcg

SEQ ID NO: 205240 - DNA, 30 bp, Artificial Sequence
  Synthetic oligonucleotide
aagtctggggtcgggaaaacgacgttctcg

SEQ ID NO: 205241 - DNA, 30 bp, Artificial Sequence
  Synthetic oligonucleotide
gaccgaggtggtggtgtttcgaaaaagtcg

SEQ ID NO: 205242 - DNA, 30 bp, Artificial Sequence
  Synthetic oligonucleotide
agtaaccagaaatatacagctgccaagtcg

SEQ ID NO: 205243 - DNA, 30 bp, Artificial Sequence
  Synthetic oligonucleotide
aatcggggttaacattaaacatctaagtcg

SEQ ID NO: 205244 - DNA, 30 bp, Artificial Sequence
  Synthetic oligonucleotide
ccccagcttactagaattgccaaccagtcg

SEQ ID NO: 205245 - DNA, 30 bp, Artificial Sequence
  Synthetic oligonucleotide
gatgaatcattgcaagatgcacagcagtcg

SEQ ID NO: 205246 - DNA, 30 bp, Artificial Sequence
  Synthetic oligonucleotide
catctggtcggaccaagtccactgcagtcg

SEQ ID NO: 205247 - DNA, 30 bp, Artificial Sequence
  Synthetic oligonucleotide
gcaccaggtctgtagcccctccctcagtcg

SEQ ID NO: 205248 - DNA, 30 bp, Artificial Sequence
  Synthetic oligonucleotide
cacgactacctgtatttactctctcagtcg

SEQ ID NO: 205249 - DNA, 30 bp, Artificial Sequence
  Synthetic oligonucleotide
atacgaagacgaatcgaattgagagagtcg

SEQ ID NO: 205250 - DNA, 30 bp, Artificial Sequence
  Synthetic oligonucleotide
tgctttgttggtggctttgcttgagagtcg

SEQ ID NO: 205251 - DNA, 30 bp, Artificial Sequence
  Synthetic oligonucleotide
gcgttatagacccttgggttagaggagtcg

SEQ ID NO: 205252 - DNA, 30 bp, Artificial Sequence
  Synthetic oligonucleotide
gaacgtgcttgggcattcaagttggagtcg

SEQ ID NO: 205253 - DNA, 30 bp, Artificial Sequence
  Synthetic oligonucleotide
aatgaaaggacatgtatgcgggctgagtcg

SEQ ID NO: 205254 - DNA, 30 bp, Artificial Sequence
  Synthetic oligonucleotide
gacaacgtcttgagttggcagtgtgagtcg

SEQ ID NO: 205255 - DNA, 30 bp, Artificial Sequence
  Synthetic oligonucleotide
agagcttgtatgatcaagcccaaatagtcg

SEQ ID NO: 205256 - DNA, 30 bp, Artificial Sequence
  Synthetic oligonucleotide
ctgaactaagtgcaaagtcttttatagtcg

SEQ ID NO: 205257 - DNA, 30 bp, Artificial Sequence
  Synthetic oligonucleotide
tgagagtcatgtaaataagctcactagtcg

SEQ ID NO: 205258 - DNA, 30 bp, Artificial Sequence
  Synthetic oligonucleotide
cccgggccttgcactagaaaagaaacgtcg

SEQ ID NO: 205259 - DNA, 30 bp, Artificial Sequence
  Synthetic oligonucleotide
cggaatgaattaaaagccgagccaacgtcg

SEQ ID NO: 205260 - DNA, 30 bp, Artificial Sequence
  Synthetic oligonucleotide
actttagtatagtaagaagcgataacgtcg

SEQ ID NO: 205261 - DNA, 30 bp, Artificial Sequence
  Synthetic oligonucleotide
gactggcgcaacgcctccggccccacgtcg

SEQ ID NO: 205262 - DNA, 30 bp, Artificial Sequence
  Synthetic oligonucleotide
atgaggggacctcaaggtagtcgcacgtcg

SEQ ID NO: 205263 - DNA, 30 bp, Artificial Sequence
  Synthetic oligonucleotide
caggcttctttcggggcattaatcacgtcg

SEQ ID NO: 205264 - DNA, 30 bp, Artificial Sequence
  Synthetic oligonucleotide
gatttaacgaccggaaatagaaagacgtcg

SEQ ID NO: 205265 - DNA, 30 bp, Artificial Sequence
  Synthetic oligonucleotide
tggcaacatattatacgtattccgacgtcg

SEQ ID NO: 205266 - DNA, 30 bp, Artificial Sequence
  Synthetic oligonucleotide
tactcatcaacgggatacagtgggacgtcg

SEQ ID NO: 205267 - DNA, 30 bp, Artificial Sequence
  Synthetic oligonucleotide
tcctggtacgttttgagtgatatgacgtcg

SEQ ID NO: 205268 - DNA, 30 bp, Artificial Sequence
  Synthetic oligonucleotide
ccgcctgtgatctatgttagaagtacgtcg

SEQ ID NO: 205269 - DNA, 29 bp, Artificial Sequence
  Synthetic oligonucleotide
aagaaattaagctggagtcatgtacgtcg

SEQ ID NO: 205270 - DNA, 30 bp, Artificial Sequence
  Synthetic oligonucleotide
tctctgagtggacgtgacggatcaccgtcg

SEQ ID NO: 205271 - DNA, 30 bp, Artificial Sequence
  Synthetic oligonucleotide
gggctcagaggcttggcacgtgttccgtcg

SEQ ID NO: 205272 - DNA, 30 bp, Artificial Sequence
  Synthetic oligonucleotide
agtggttttaatcggatcaagtgagcgtcg

SEQ ID NO: 205273 - DNA, 30 bp, Artificial Sequence
  Synthetic oligonucleotide
ttgaatagttgtagtttttataactcgtcg

SEQ ID NO: 205274 - DNA, 30 bp, Artificial Sequence
  Synthetic oligonucleotide
ggcttgggaatgcctggaaaattaaggtcg

SEQ ID NO: 205275 - DNA, 30 bp, Artificial Sequence
  Synthetic oligonucleotide
ggtcaaaaaaaggctgcgtttgccaggtcg

SEQ ID NO: 205276 - DNA, 30 bp, Artificial Sequence
  Synthetic oligonucleotide
taggggcgcttggcaggcaagtggaggtcg

SEQ ID NO: 205277 - DNA, 30 bp, Artificial Sequence
  Synthetic oligonucleotide
aataattcattagccgtaacggctaggtcg

SEQ ID NO: 205278 - DNA, 30 bp, Artificial Sequence
  Synthetic oligonucleotide
gcggacgggttgcataaaaggtctaggtcg

SEQ ID NO: 205279 - DNA, 30 bp, Artificial Sequence
  Synthetic oligonucleotide
gcaattgcaaggtccctctcgccacggtcg

SEQ ID NO: 205280 - DNA, 30 bp, Artificial Sequence
  Synthetic oligonucleotide
gtataaatcgtagcctacgcaatgcggtcg

SEQ ID NO: 205281 - DNA, 30 bp, Artificial Sequence
  Synthetic oligonucleotide
ctccttgaagttggtttgactttagggtcg

SEQ ID NO: 205282 - DNA, 30 bp, Artificial Sequence
  Synthetic oligonucleotide
ggattacagttggtcctgtgaagggggtcg

SEQ ID NO: 205283 - DNA, 30 bp, Artificial Sequence
  Synthetic oligonucleotide
ttagcaagtgtctggcctctacatgggtcg

SEQ ID NO: 205284 - DNA, 30 bp, Artificial Sequence
  Synthetic oligonucleotide
tcacaataactaggttggcgtcggtggtcg

SEQ ID NO: 205285 - DNA, 30 bp, Artificial Sequence
  Synthetic oligonucleotide
ttaaatgtatcaacgatgcaagtgtggtcg

SEQ ID NO: 205286 - DNA, 30 bp, Artificial Sequence
  Synthetic oligonucleotide
tgcaacgcgtttgcggttgagcaaatgtcg

SEQ ID NO: 205287 - DNA, 30 bp, Artificial Sequence
  Synthetic oligonucleotide
aagatggcggacgggttagtcttcatgtcg

SEQ ID NO: 205288 - DNA, 30 bp, Artificial Sequence
  Synthetic oligonucleotide
gtggaagtagactcaatagcgcagatgtcg

SEQ ID NO: 205289 - DNA, 30 bp, Artificial Sequence
  Synthetic oligonucleotide
tctactgaaggttaccgaacggcactgtcg

SEQ ID NO: 205290 - DNA, 30 bp, Artificial Sequence
  Synthetic oligonucleotide
gcaagaatttggtgacactacatgctgtcg

SEQ ID NO: 205291 - DNA, 30 bp, Artificial Sequence
  Synthetic oligonucleotide
gggaatcctttgtgcgtcttgcatctgtcg

SEQ ID NO: 205292 - DNA, 30 bp, Artificial Sequence
  Synthetic oligonucleotide
gccggagtatcctatgttattagtctgtcg

SEQ ID NO: 205293 - DNA, 30 bp, Artificial Sequence
  Synthetic oligonucleotide
gcatatcgactcatcaacttgaaggtgtcg

SEQ ID NO: 205294 - DNA, 30 bp, Artificial Sequence
  Synthetic oligonucleotide
ctaacgtctgtcaggctatctgcggtgtcg

SEQ ID NO: 205295 - DNA, 30 bp, Artificial Sequence
  Synthetic oligonucleotide
aaaaacgagcaaacaacccgtgccttgtcg

SEQ ID NO: 205296 - DNA, 30 bp, Artificial Sequence
  Synthetic oligonucleotide
atcgttggattcgttgtttgtggcaattcg

SEQ ID NO: 205297 - DNA, 30 bp, Artificial Sequence
  Synthetic oligonucleotide
aggggctagccaccccgaataccgaattcg

SEQ ID NO: 205298 - DNA, 30 bp, Artificial Sequence
  Synthetic oligonucleotide
acacttatattgagttactggctgaattcg

SEQ ID NO: 205299 - DNA, 30 bp, Artificial Sequence
  Synthetic oligonucleotide
tacgtcactggagcgcgcggaattaattcg

SEQ ID NO: 205300 - DNA, 30 bp, Artificial Sequence
  Synthetic oligonucleotide
aggcatatcctgatttcccgatagcattcg

SEQ ID NO: 205301 - DNA, 30 bp, Artificial Sequence
  Synthetic oligonucleotide
caccccatgtacgtatgtgtacaagattcg

SEQ ID NO: 205302 - DNA, 30 bp, Artificial Sequence
  Synthetic oligonucleotide
gacggtacgttccttagacgtatcgattcg

SEQ ID NO: 205303 - DNA, 30 bp, Artificial Sequence
  Synthetic oligonucleotide
caaaagtcaatgtgataagtacgtgattcg

SEQ ID NO: 205304 - DNA, 30 bp, Artificial Sequence
  Synthetic oligonucleotide
ggccgaacttaggatcatatgcgtgattcg

SEQ ID NO: 205305 - DNA, 30 bp, Artificial Sequence
  Synthetic oligonucleotide
ggtgcggtgaattttcggggtgttgattcg

SEQ ID NO: 205306 - DNA, 30 bp, Artificial Sequence
  Synthetic oligonucleotide
agcgtatcgatgttggttttagagtattcg

SEQ ID NO: 205307 - DNA, 30 bp, Artificial Sequence
  Synthetic oligonucleotide
aaggtcgcaatgacacacaaaacgtattcg

SEQ ID NO: 205308 - DNA, 30 bp, Artificial Sequence
  Synthetic oligonucleotide
tcatcactgtgaaaaggagctgcgtattcg

SEQ ID NO: 205309 - DNA, 30 bp, Artificial Sequence
  Synthetic oligonucleotide
ttgaactgttgatatcccaaactgtattcg

SEQ ID NO: 205310 - DNA, 30 bp, Artificial Sequence
  Synthetic oligonucleotide
ttttacaaatgcaggggcccgcgttattcg

SEQ ID NO: 205311 - DNA, 30 bp, Artificial Sequence
  Synthetic oligonucleotide
gtgacgttgcatgtttatagacgaacttcg

SEQ ID NO: 205312 - DNA, 30 bp, Artificial Sequence
  Synthetic oligonucleotide
agcagaaagtagggtaccggattcacttcg

SEQ ID NO: 205313 - DNA, 30 bp, Artificial Sequence
  Synthetic oligonucleotide
tcaggctgagattcggttattatgacttcg

SEQ ID NO: 205314 - DNA, 30 bp, Artificial Sequence
  Synthetic oligonucleotide
ccctaaagcgttttgtcaatagtgacttcg

SEQ ID NO: 205315 - DNA, 30 bp, Artificial Sequence
  Synthetic oligonucleotide
cgcgcgaagaagttcactagagatacttcg

SEQ ID NO: 205316 - DNA, 30 bp, Artificial Sequence
  Synthetic oligonucleotide
ccttgcaaaggaggggtaacttctccttcg

SEQ ID NO: 205317 - DNA, 30 bp, Artificial Sequence
  Synthetic oligonucleotide
tacgggctgtaagcagtaacattagcttcg

SEQ ID NO: 205318 - DNA, 30 bp, Artificial Sequence
  Synthetic oligonucleotide
gtatagggttaagcgaactttgacgcttcg

SEQ ID NO: 205319 - DNA, 30 bp, Artificial Sequence
  Synthetic oligonucleotide
ctaatttgcggcctattcttagccgcttcg

SEQ ID NO: 205320 - DNA, 30 bp, Artificial Sequence
  Synthetic oligonucleotide
ttgtatcatactgcgggtcacatcgcttcg

SEQ ID NO: 205321 - DNA, 30 bp, Artificial Sequence
  Synthetic oligonucleotide
atgagtaatgcgtcggactatatcgcttcg

SEQ ID NO: 205322 - DNA, 30 bp, Artificial Sequence
  Synthetic oligonucleotide
aatccacttcagtgcgcaagtgaggcttcg

SEQ ID NO: 205323 - DNA, 30 bp, Artificial Sequence
  Synthetic oligonucleotide
gcatgattaatgaagatcataccgagttcg

SEQ ID NO: 205324 - DNA, 30 bp, Artificial Sequence
  Synthetic oligonucleotide
gcagtgcaagacatatcttacaatagttcg

SEQ ID NO: 205325 - DNA, 30 bp, Artificial Sequence
  Synthetic oligonucleotide
aatcaagctcttgtactagcgtatagttcg

SEQ ID NO: 205326 - DNA, 30 bp, Artificial Sequence
  Synthetic oligonucleotide
tgattacacctgccaacggtgactagttcg

SEQ ID NO: 205327 - DNA, 30 bp, Artificial Sequence
  Synthetic oligonucleotide
ttcataccatgaggttgctatagtagttcg

SEQ ID NO: 205328 - DNA, 30 bp, Artificial Sequence
  Synthetic oligonucleotide
gacttaaaagggacccccgctgttagttcg

SEQ ID NO: 205329 - DNA, 30 bp, Artificial Sequence
  Synthetic oligonucleotide
ctcgcactttactaagtcgccatgcgttcg

SEQ ID NO: 205330 - DNA, 30 bp, Artificial Sequence
  Synthetic oligonucleotide
agattagatttcgtagccaatttgcgttcg

SEQ ID NO: 205331 - DNA, 30 bp, Artificial Sequence
  Synthetic oligonucleotide
tctgtggctctcccgcagtattatcgttcg

SEQ ID NO: 205332 - DNA, 30 bp, Artificial Sequence
  Synthetic oligonucleotide
cgttctttgtgaacctagtatagtcgttcg

SEQ ID NO: 205333 - DNA, 30 bp, Artificial Sequence
  Synthetic oligonucleotide
aaccgaagtgggtcccctggaaagggttcg

SEQ ID NO: 205334 - DNA, 30 bp, Artificial Sequence
  Synthetic oligonucleotide
acctgtagcgaaccaaatccgcggggttcg

SEQ ID NO: 205335 - DNA, 30 bp, Artificial Sequence
  Synthetic oligonucleotide
acgttatacagaggtctgccgtgtggttcg

SEQ ID NO: 205336 - DNA, 30 bp, Artificial Sequence
  Synthetic oligonucleotide
gacataacccggcgaaactccgaatgttcg

SEQ ID NO: 205337 - DNA, 30 bp, Artificial Sequence
  Synthetic oligonucleotide
gcatcaagaacatggattagacggtgttcg

SEQ ID NO: 205338 - DNA, 30 bp, Artificial Sequence
  Synthetic oligonucleotide
tatgcgtagcgacttggacgcacaatttcg

SEQ ID NO: 205339 - DNA, 30 bp, Artificial Sequence
  Synthetic oligonucleotide
ttggtcaaagggaggctggactacatttcg

SEQ ID NO: 205340 - DNA, 30 bp, Artificial Sequence
  Synthetic oligonucleotide
ggaccccacgtgttaatcgacagcatttcg

SEQ ID NO: 205341 - DNA, 30 bp, Artificial Sequence
  Synthetic oligonucleotide
cggggtagatccattacgccagtcatttcg

SEQ ID NO: 205342 - DNA, 30 bp, Artificial Sequence
  Synthetic oligonucleotide
cggtctactagcatcgataaccctatttcg

SEQ ID NO: 205343 - DNA, 30 bp, Artificial Sequence
  Synthetic oligonucleotide
catagtgatgcaagtattagctgtatttcg

SEQ ID NO: 205344 - DNA, 30 bp, Artificial Sequence
  Synthetic oligonucleotide
tgtaggatatcttagccgccttgtatttcg

SEQ ID NO: 205345 - DNA, 30 bp, Artificial Sequence
  Synthetic oligonucleotide
gaggttctagagataataccgaaactttcg

SEQ ID NO: 205346 - DNA, 30 bp, Artificial Sequence
  Synthetic oligonucleotide
cgtttaatagttaaatcgaggctcctttcg

SEQ ID NO: 205347 - DNA, 30 bp, Artificial Sequence
  Synthetic oligonucleotide
aatagatgtttgaacacgcaaatggtttcg

SEQ ID NO: 205348 - DNA, 30 bp, Artificial Sequence
  Synthetic oligonucleotide
ccaatgccaagagtttgcgcggtggtttcg

SEQ ID NO: 205349 - DNA, 30 bp, Artificial Sequence
  Synthetic oligonucleotide
ggtgcctggtcattaaatacacgtgtttcg

SEQ ID NO: 205350 - DNA, 30 bp, Artificial Sequence
  Synthetic oligonucleotide
agggaataacagccctatactgttgtttcg

SEQ ID NO: 205351 - DNA, 30 bp, Artificial Sequence
  Synthetic oligonucleotide
agcggcacactgtctaataggtcgttttcg

SEQ ID NO: 205352 - DNA, 30 bp, Artificial Sequence
  Synthetic oligonucleotide
gccacgccggatggtagaggccatttttcg

SEQ ID NO: 205353 - DNA, 30 bp, Artificial Sequence
  Synthetic oligonucleotide
gaagtcgagttggcaggtaaagctttttcg

SEQ ID NO: 205354 - DNA, 30 bp, Artificial Sequence
  Synthetic oligonucleotide
ttcgttctcgaaacccaggagggtttttcg

SEQ ID NO: 205355 - DNA, 30 bp, Artificial Sequence
  Synthetic oligonucleotide
gtctaggatcttcgaacgctcccaaaaagg

SEQ ID NO: 205356 - DNA, 30 bp, Artificial Sequence
  Synthetic oligonucleotide
cagcagcggggctgaatttatataaaaagg

SEQ ID NO: 205357 - DNA, 30 bp, Artificial Sequence
  Synthetic oligonucleotide
tcactttggtcgtaacgggaggtaaaaagg

SEQ ID NO: 205358 - DNA, 30 bp, Artificial Sequence
  Synthetic oligonucleotide
cacccccgacacggaattggtgacaaaagg

SEQ ID NO: 205359 - DNA, 30 bp, Artificial Sequence
  Synthetic oligonucleotide
cgtcgttttcggagcatattgaagaaaagg

SEQ ID NO: 205360 - DNA, 30 bp, Artificial Sequence
  Synthetic oligonucleotide
gttcaaaagtgaatgatggggcagaaaagg

SEQ ID NO: 205361 - DNA, 30 bp, Artificial Sequence
  Synthetic oligonucleotide
gtcgtcaatcggtattcatggcataaaagg

SEQ ID NO: 205362 - DNA, 30 bp, Artificial Sequence
  Synthetic oligonucleotide
agtgagtctagtattttggatagtaaaagg

SEQ ID NO: 205363 - DNA, 30 bp, Artificial Sequence
  Synthetic oligonucleotide
atgctttcggccttctcaatttaccaaagg

SEQ ID NO: 205364 - DNA, 30 bp, Artificial Sequence
  Synthetic oligonucleotide
agatgattgtctagcttcgcggcccaaagg

SEQ ID NO: 205365 - DNA, 30 bp, Artificial Sequence
  Synthetic oligonucleotide
attccaatggaccgtgcaaggtgccaaagg

SEQ ID NO: 205366 - DNA, 30 bp, Artificial Sequence
  Synthetic oligonucleotide
tcctaagtaaattggagtccgttccaaagg

SEQ ID NO: 205367 - DNA, 30 bp, Artificial Sequence
  Synthetic oligonucleotide
accgggattggccaatttatcaagcaaagg

SEQ ID NO: 205368 - DNA, 30 bp, Artificial Sequence
  Synthetic oligonucleotide
tagacttgggccttttccggccatcaaagg

SEQ ID NO: 205369 - DNA, 30 bp, Artificial Sequence
  Synthetic oligonucleotide
cttgagcggtcagaccaccgcgttcaaagg

SEQ ID NO: 205370 - DNA, 30 bp, Artificial Sequence
  Synthetic oligonucleotide
taccgccaatgatatcctgaacgggaaagg

SEQ ID NO: 205371 - DNA, 30 bp, Artificial Sequence
  Synthetic oligonucleotide
tgacgacatttcccgggcactcatgaaagg

SEQ ID NO: 205372 - DNA, 30 bp, Artificial Sequence
  Synthetic oligonucleotide
gaagtagactaacctggaggccctgaaagg

SEQ ID NO: 205373 - DNA, 30 bp, Artificial Sequence
  Synthetic oligonucleotide
tccctcaccggtcttacgaggacataaagg

SEQ ID NO: 205374 - DNA, 30 bp, Artificial Sequence
  Synthetic oligonucleotide
acgttgttgtcacacctgcttaagtaaagg

SEQ ID NO: 205375 - DNA, 30 bp, Artificial Sequence
  Synthetic oligonucleotide
ccgctagtggtaacgactaatctgtaaagg

SEQ ID NO: 205376 - DNA, 30 bp, Artificial Sequence
  Synthetic oligonucleotide
ggaacatgcatagatctcaggtcttaaagg

SEQ ID NO: 205377 - DNA, 30 bp, Artificial Sequence
  Synthetic oligonucleotide
aagcggtcaggcacgtaggaggtttaaagg

SEQ ID NO: 205378 - DNA, 30 bp, Artificial Sequence
  Synthetic oligonucleotide
gacacgaattggactgggttggaaacaagg

SEQ ID NO: 205379 - DNA, 30 bp, Artificial Sequence
  Synthetic oligonucleotide
ctacactgacattacagatcgacaacaagg

SEQ ID NO: 205380 - DNA, 30 bp, Artificial Sequence
  Synthetic oligonucleotide
tgatacagcacgaaccgggcagtcacaagg

SEQ ID NO: 205381 - DNA, 30 bp, Artificial Sequence
  Synthetic oligonucleotide
gcttaaattaaccatcgccagcggacaagg

SEQ ID NO: 205382 - DNA, 30 bp, Artificial Sequence
  Synthetic oligonucleotide
aggaccgtggtcgctcaagaccatacaagg

SEQ ID NO: 205383 - DNA, 30 bp, Artificial Sequence
  Synthetic oligonucleotide
agcagcattataaaagctcgaagaccaagg

SEQ ID NO: 205384 - DNA, 30 bp, Artificial Sequence
  Synthetic oligonucleotide
tacgagggtacactatggtggcgaccaagg

SEQ ID NO: 205385 - DNA, 30 bp, Artificial Sequence
  Synthetic oligonucleotide
agcccgagctcccatgaagtgcgcccaagg

SEQ ID NO: 205386 - DNA, 30 bp, Artificial Sequence
  Synthetic oligonucleotide
tactgttccatactctggtaatatccaagg

SEQ ID NO: 205387 - DNA, 30 bp, Artificial Sequence
  Synthetic oligonucleotide
tatcgctcgttcaagttaggaggtccaagg

SEQ ID NO: 205388 - DNA, 30 bp, Artificial Sequence
  Synthetic oligonucleotide
acagtgccactgcagctatcccgagcaagg

SEQ ID NO: 205389 - DNA, 30 bp, Artificial Sequence
  Synthetic oligonucleotide
atagaaacggtcaggatcaaactagcaagg

SEQ ID NO: 205390 - DNA, 30 bp, Artificial Sequence
  Synthetic oligonucleotide
aaccgaaatgtattgcagggtaacgcaagg

SEQ ID NO: 205391 - DNA, 30 bp, Artificial Sequence
  Synthetic oligonucleotide
gactcggaaggttgataaagggatgcaagg

SEQ ID NO: 205392 - DNA, 30 bp, Artificial Sequence
  Synthetic oligonucleotide
gggtgtagctgtcttctcaaatctgcaagg

SEQ ID NO: 205393 - DNA, 30 bp, Artificial Sequence
  Synthetic oligonucleotide
aactgttacagtccattcagacgtgcaagg

SEQ ID NO: 205394 - DNA, 30 bp, Artificial Sequence
  Synthetic oligonucleotide
ctctggttcatgcacgcccaaggtgcaagg

SEQ ID NO: 205395 - DNA, 30 bp, Artificial Sequence
  Synthetic oligonucleotide
gaggcgcgtcgaacgaagcaacttgcaagg

SEQ ID NO: 205396 - DNA, 30 bp, Artificial Sequence
  Synthetic oligonucleotide
gtgatggcctagaagggccccggatcaagg

SEQ ID NO: 205397 - DNA, 30 bp, Artificial Sequence
  Synthetic oligonucleotide
cccgcaaccagtgtagaccaaatatcaagg

SEQ ID NO: 205398 - DNA, 30 bp, Artificial Sequence
  Synthetic oligonucleotide
aggaaaagttgtttagatgttggctcaagg

SEQ ID NO: 205399 - DNA, 30 bp, Artificial Sequence
  Synthetic oligonucleotide
taagctcgcaaaatgccaaacagttcaagg

SEQ ID NO: 205400 - DNA, 30 bp, Artificial Sequence
  Synthetic oligonucleotide
ttcgaagtcggacgccaggtttccagaagg

SEQ ID NO: 205401 - DNA, 30 bp, Artificial Sequence
  Synthetic oligonucleotide
aaatggaccgcatgttgtaacatgagaagg

SEQ ID NO: 205402 - DNA, 30 bp, Artificial Sequence
  Synthetic oligonucleotide
ttgcataaggatatggtcttggtacgaagg

SEQ ID NO: 205403 - DNA, 30 bp, Artificial Sequence
  Synthetic oligonucleotide
gcctttgccgaccaagtccgaaaccgaagg

SEQ ID NO: 205404 - DNA, 30 bp, Artificial Sequence
  Synthetic oligonucleotide
gagcccggaaaatttatttggaaaggaagg

SEQ ID NO: 205405 - DNA, 30 bp, Artificial Sequence
  Synthetic oligonucleotide
atcggccgtacttcggcattccaaggaagg

SEQ ID NO: 205406 - DNA, 30 bp, Artificial Sequence
  Synthetic oligonucleotide
gaatggctcaaaaaggttatccctggaagg

SEQ ID NO: 205407 - DNA, 30 bp, Artificial Sequence
  Synthetic oligonucleotide
agaagctccaacgggagcacccgtggaagg

SEQ ID NO: 205408 - DNA, 30 bp, Artificial Sequence
  Synthetic oligonucleotide
tttggctcgagaacaggactgggtggaagg

SEQ ID NO: 205409 - DNA, 30 bp, Artificial Sequence
  Synthetic oligonucleotide
cagggggcgcgatgtcggttcattggaagg

SEQ ID NO: 205410 - DNA, 30 bp, Artificial Sequence
  Synthetic oligonucleotide
tgcaaattagcaattcatcgacgatgaagg

SEQ ID NO: 205411 - DNA, 30 bp, Artificial Sequence
  Synthetic oligonucleotide
gttcctctcagtatcacggccgactgaagg

SEQ ID NO: 205412 - DNA, 30 bp, Artificial Sequence
  Synthetic oligonucleotide
tgtcgccagtcgtgaaggccaagttgaagg

SEQ ID NO: 205413 - DNA, 30 bp, Artificial Sequence
  Synthetic oligonucleotide
ttaaatcgagacgacaaggaggtttgaagg

SEQ ID NO: 205414 - DNA, 30 bp, Artificial Sequence
  Synthetic oligonucleotide
gcacctaccaagcctagaggaagaataagg

SEQ ID NO: 205415 - DNA, 30 bp, Artificial Sequence
  Synthetic oligonucleotide
gtgggctggcacatgacgcgactaataagg

SEQ ID NO: 205416 - DNA, 30 bp, Artificial Sequence
  Synthetic oligonucleotide
gggatagctgaagtcgagaccctaataagg

SEQ ID NO: 205417 - DNA, 30 bp, Artificial Sequence
  Synthetic oligonucleotide
ttcgatcggtttgtgaaagggcacataagg

SEQ ID NO: 205418 - DNA, 30 bp, Artificial Sequence
  Synthetic oligonucleotide
gtggccgttacaatgcatcagagcataagg

SEQ ID NO: 205419 - DNA, 30 bp, Artificial Sequence
  Synthetic oligonucleotide
gatttgaccgggaaattcgattagataagg

SEQ ID NO: 205420 - DNA, 30 bp, Artificial Sequence
  Synthetic oligonucleotide
gaccatcggtcgccccactcaactataagg

SEQ ID NO: 205421 - DNA, 30 bp, Artificial Sequence
  Synthetic oligonucleotide
taccctggcacagggatctacactataagg

SEQ ID NO: 205422 - DNA, 30 bp, Artificial Sequence
  Synthetic oligonucleotide
ggggcgaaggatcacacgaacgttataagg

SEQ ID NO: 205423 - DNA, 31 bp, Artificial Sequence
  Synthetic oligonucleotide
gctaccagttacaacgtcttcatttataagg

SEQ ID NO: 205424 - DNA, 30 bp, Artificial Sequence
  Synthetic oligonucleotide
aagtcacagcataggggacacggactaagg

SEQ ID NO: 205425 - DNA, 30 bp, Artificial Sequence
  Synthetic oligonucleotide
aacaacactttgagtcgcttgatactaagg

SEQ ID NO: 205426 - DNA, 30 bp, Artificial Sequence
  Synthetic oligonucleotide
gtccgaatccggaaacagtcgcgcctaagg

SEQ ID NO: 205427 - DNA, 30 bp, Artificial Sequence
  Synthetic oligonucleotide
agatgaggatcgcgtttccttcatctaagg

SEQ ID NO: 205428 - DNA, 30 bp, Artificial Sequence
  Synthetic oligonucleotide
ccactttgagggggaggaggcactctaagg

SEQ ID NO: 205429 - DNA, 30 bp, Artificial Sequence
  Synthetic oligonucleotide
atttaaaacgcctggtcacggacagtaagg

SEQ ID NO: 205430 - DNA, 30 bp, Artificial Sequence
  Synthetic oligonucleotide
ttatatgcatggcactacgtatcagtaagg

SEQ ID NO: 205431 - DNA, 30 bp, Artificial Sequence
  Synthetic oligonucleotide
ggggctaaatacttctcttatgcggtaagg

SEQ ID NO: 205432 - DNA, 30 bp, Artificial Sequence
  Synthetic oligonucleotide
gcggaattggtgtcttaatgactggtaagg

SEQ ID NO: 205433 - DNA, 30 bp, Artificial Sequence
  Synthetic oligonucleotide
cagtcgcattaatcagcagagcctgtaagg

SEQ ID NO: 205434 - DNA, 30 bp, Artificial Sequence
  Synthetic oligonucleotide
gagatacgtacctagttgcccagtgtaagg

SEQ ID NO: 205435 - DNA, 30 bp, Artificial Sequence
  Synthetic oligonucleotide
ccacatggcttttgaatttaatgtgtaagg

SEQ ID NO: 205436 - DNA, 30 bp, Artificial Sequence
  Synthetic oligonucleotide
gagtcatctaaacgaaatgcttcattaagg

SEQ ID NO: 205437 - DNA, 30 bp, Artificial Sequence
  Synthetic oligonucleotide
tgaatgactcacttgggggctcgattaagg

SEQ ID NO: 205438 - DNA, 30 bp, Artificial Sequence
  Synthetic oligonucleotide
aaggcctataccaaggcgttggtattaagg

SEQ ID NO: 205439 - DNA, 30 bp, Artificial Sequence
  Synthetic oligonucleotide
agtcaaacaagacgcgggattaagttaagg

SEQ ID NO: 205440 - DNA, 30 bp, Artificial Sequence
  Synthetic oligonucleotide
ttctatgttcgagccatctcgttgttaagg

SEQ ID NO: 205441 - DNA, 30 bp, Artificial Sequence
  Synthetic oligonucleotide
cggatctcatttcccaagtgcgttttaagg

SEQ ID NO: 205442 - DNA, 30 bp, Artificial Sequence
  Synthetic oligonucleotide
ttgttgatcgggtgaactatggaaaacagg

SEQ ID NO: 205443 - DNA, 30 bp, Artificial Sequence
  Synthetic oligonucleotide
aagggaatcatattttgttcccgaaacagg

SEQ ID NO: 205444 - DNA, 30 bp, Artificial Sequence
  Synthetic oligonucleotide
ctgacatgacaactttcacgcggaaacagg

SEQ ID NO: 205445 - DNA, 30 bp, Artificial Sequence
  Synthetic oligonucleotide
aaacatagctgcgcttatgtagtaaacagg

SEQ ID NO: 205446 - DNA, 30 bp, Artificial Sequence
  Synthetic oligonucleotide
aacgtggtattacataacgtgaacaacagg

SEQ ID NO: 205447 - DNA, 30 bp, Artificial Sequence
  Synthetic oligonucleotide
ttagagtgcggtgctaacgcgcgcaacagg

SEQ ID NO: 205448 - DNA, 30 bp, Artificial Sequence
  Synthetic oligonucleotide
aacgggaatctaagattaatcaagaacagg

SEQ ID NO: 205449 - DNA, 30 bp, Artificial Sequence
  Synthetic oligonucleotide
atcatccagtctgtaccggcagagaacagg

SEQ ID NO: 205450 - DNA, 30 bp, Artificial Sequence
  Synthetic oligonucleotide
ttacttacggaaggaattgcaactaacagg

SEQ ID NO: 205451 - DNA, 30 bp, Artificial Sequence
  Synthetic oligonucleotide
ttaatcataacatcgctcaaatgtaacagg

SEQ ID NO: 205452 - DNA, 30 bp, Artificial Sequence
  Synthetic oligonucleotide
cttgacggcgtggaaggtgggtaacacagg

SEQ ID NO: 205453 - DNA, 30 bp, Artificial Sequence
  Synthetic oligonucleotide
tgccaagggctggtggttcaggagcacagg

SEQ ID NO: 205454 - DNA, 30 bp, Artificial Sequence
  Synthetic oligonucleotide
acagtcgagtttgcttagtctcgtcacagg

SEQ ID NO: 205455 - DNA, 30 bp, Artificial Sequence
  Synthetic oligonucleotide
ccatacgataactcccagtggcgagacagg

SEQ ID NO: 205456 - DNA, 30 bp, Artificial Sequence
  Synthetic oligonucleotide
agacgagcagtacatatttactgcgacagg

SEQ ID NO: 205457 - DNA, 30 bp, Artificial Sequence
  Synthetic oligonucleotide
aagccctcctttggtaaatgtttcgacagg

SEQ ID NO: 205458 - DNA, 30 bp, Artificial Sequence
  Synthetic oligonucleotide
tagtcgagaagggtttacattcctgacagg

SEQ ID NO: 205459 - DNA, 30 bp, Artificial Sequence
  Synthetic oligonucleotide
agatagtccgcgaacaacaccggctacagg

SEQ ID NO: 205460 - DNA, 30 bp, Artificial Sequence
  Synthetic oligonucleotide
ctcgggcgagcgtcgggttctggctacagg

SEQ ID NO: 205461 - DNA, 30 bp, Artificial Sequence
  Synthetic oligonucleotide
gcgcgagcgacatcattggtgtaaaccagg

SEQ ID NO: 205462 - DNA, 30 bp, Artificial Sequence
  Synthetic oligonucleotide
tacggggtctcggactggattgcaaccagg

SEQ ID NO: 205463 - DNA, 30 bp, Artificial Sequence
  Synthetic oligonucleotide
attcctactccctagagggtgaccaccagg

SEQ ID NO: 205464 - DNA, 30 bp, Artificial Sequence
  Synthetic oligonucleotide
aataagccgattctgggatttaggaccagg

SEQ ID NO: 205465 - DNA, 30 bp, Artificial Sequence
  Synthetic oligonucleotide
tttatacacgatcgattggcagggaccagg

SEQ ID NO: 205466 - DNA, 30 bp, Artificial Sequence
  Synthetic oligonucleotide
gacgttcccttccaaagacccatgaccagg

SEQ ID NO: 205467 - DNA, 30 bp, Artificial Sequence
  Synthetic oligonucleotide
tcgagttccccaagaagctcgttgaccagg

SEQ ID NO: 205468 - DNA, 30 bp, Artificial Sequence
  Synthetic oligonucleotide
ttgtctgcacagggggaagaaggtaccagg

SEQ ID NO: 205469 - DNA, 30 bp, Artificial Sequence
  Synthetic oligonucleotide
catgtaacacaggcaaggccctcccccagg

SEQ ID NO: 205470 - DNA, 30 bp, Artificial Sequence
  Synthetic oligonucleotide
tcccgatcttcctatgcgtattcccccagg

SEQ ID NO: 205471 - DNA, 30 bp, Artificial Sequence
  Synthetic oligonucleotide
gttatctcaataaaactgaagctccccagg

SEQ ID NO: 205472 - DNA, 30 bp, Artificial Sequence
  Synthetic oligonucleotide
gtgaatagaggggtgatcggcttgcccagg

SEQ ID NO: 205473 - DNA, 30 bp, Artificial Sequence
  Synthetic oligonucleotide
tctcgtaaaggtgcatagagaactcccagg

SEQ ID NO: 205474 - DNA, 30 bp, Artificial Sequence
  Synthetic oligonucleotide
tgccaaaaaccgaatatgtcagctcccagg

SEQ ID NO: 205475 - DNA, 30 bp, Artificial Sequence
  Synthetic oligonucleotide
cttcgaccggggaaatgctcgggtcccagg

SEQ ID NO: 205476 - DNA, 30 bp, Artificial Sequence
  Synthetic oligonucleotide
aggcgagtggtcaagaaagcctcagccagg

SEQ ID NO: 205477 - DNA, 30 bp, Artificial Sequence
  Synthetic oligonucleotide
gtagttgttaactgagtgcgcagagccagg

SEQ ID NO: 205478 - DNA, 30 bp, Artificial Sequence
  Synthetic oligonucleotide
aatattgtgccggttagggtgaccgccagg

SEQ ID NO: 205479 - DNA, 30 bp, Artificial Sequence
  Synthetic oligonucleotide
catccaagatcggtaccgtgcagcgccagg

SEQ ID NO: 205480 - DNA, 30 bp, Artificial Sequence
  Synthetic oligonucleotide
taacatcggctgtgtcagacaggcgccagg

SEQ ID NO: 205481 - DNA, 30 bp, Artificial Sequence
  Synthetic oligonucleotide
cggtctttcgcagaaactttggcggccagg

SEQ ID NO: 205482 - DNA, 30 bp, Artificial Sequence
  Synthetic oligonucleotide
agaaagaagggtctcagttattatgccagg

SEQ ID NO: 205483 - DNA, 30 bp, Artificial Sequence
  Synthetic oligonucleotide
gcgaccccgagtgcatcctcgtaatccagg

SEQ ID NO: 205484 - DNA, 30 bp, Artificial Sequence
  Synthetic oligonucleotide
ttctggacagcgtattccctgagctccagg

SEQ ID NO: 205485 - DNA, 30 bp, Artificial Sequence
  Synthetic oligonucleotide
tggggagactgaacaggagcccgctccagg

SEQ ID NO: 205486 - DNA, 30 bp, Artificial Sequence
  Synthetic oligonucleotide
ttagggcgttcgagattgtacatctccagg

SEQ ID NO: 205487 - DNA, 30 bp, Artificial Sequence
  Synthetic oligonucleotide
aaggtgacagtgggacgccggcattccagg

SEQ ID NO: 205488 - DNA, 30 bp, Artificial Sequence
  Synthetic oligonucleotide
atccatggactcgaaaatctttattccagg

SEQ ID NO: 205489 - DNA, 30 bp, Artificial Sequence
  Synthetic oligonucleotide
gccaagccgcactgttgcaagcaaagcagg

SEQ ID NO: 205490 - DNA, 30 bp, Artificial Sequence
  Synthetic oligonucleotide
aagatgtccgaattttataatacaagcagg

SEQ ID NO: 205491 - DNA, 30 bp, Artificial Sequence
  Synthetic oligonucleotide
gagagcgtacagacctcttatgcaagcagg

SEQ ID NO: 205492 - DNA, 30 bp, Artificial Sequence
  Synthetic oligonucleotide
aatcagtcggaatcaatgtattccagcagg

SEQ ID NO: 205493 - DNA, 30 bp, Artificial Sequence
  Synthetic oligonucleotide
cacctatggtcaagggcaatcggtagcagg

SEQ ID NO: 205494 - DNA, 30 bp, Artificial Sequence
  Synthetic oligonucleotide
gagggtggtgacaacgatagaaaacgcagg

SEQ ID NO: 205495 - DNA, 30 bp, Artificial Sequence
  Synthetic oligonucleotide
gtaggaagtccatgcgacaaaaagcgcagg

SEQ ID NO: 205496 - DNA, 30 bp, Artificial Sequence
  Synthetic oligonucleotide
tagtgcagaatgacgtcggtgcatcgcagg

SEQ ID NO: 205497 - DNA, 30 bp, Artificial Sequence
  Synthetic oligonucleotide
gagcttgtgccgacagcaatatagggcagg

SEQ ID NO: 205498 - DNA, 30 bp, Artificial Sequence
  Synthetic oligonucleotide
ggtcgggatgtgcaatttcaatatggcagg

SEQ ID NO: 205499 - DNA, 30 bp, Artificial Sequence
  Synthetic oligonucleotide
ctatgtaggtatgacacgtcagaatgcagg

SEQ ID NO: 205500 - DNA, 30 bp, Artificial Sequence
  Synthetic oligonucleotide
ccacagagttggataggtgctttctgcagg

SEQ ID NO: 205501 - DNA, 30 bp, Artificial Sequence
  Synthetic oligonucleotide
agaccctctcaactaagacggcaaatcagg

SEQ ID NO: 205502 - DNA, 30 bp, Artificial Sequence
  Synthetic oligonucleotide
gaacgtatctaagttaggatgatcatcagg

SEQ ID NO: 205503 - DNA, 30 bp, Artificial Sequence
  Synthetic oligonucleotide
gatctccttcccaccgcacgaacgatcagg

SEQ ID NO: 205504 - DNA, 30 bp, Artificial Sequence
  Synthetic oligonucleotide
tccgacaaataaacggctgcctatatcagg

SEQ ID NO: 205505 - DNA, 30 bp, Artificial Sequence
  Synthetic oligonucleotide
ctgattaatccctagtactgcgaactcagg

SEQ ID NO: 205506 - DNA, 30 bp, Artificial Sequence
  Synthetic oligonucleotide
ataccagcagaggttaatgggacactcagg

SEQ ID NO: 205507 - DNA, 30 bp, Artificial Sequence
  Synthetic oligonucleotide
tcagtcgaatagtacatacagggactcagg

SEQ ID NO: 205508 - DNA, 30 bp, Artificial Sequence
  Synthetic oligonucleotide
cggattggagcagtcggagtggacctcagg

SEQ ID NO: 205509 - DNA, 30 bp, Artificial Sequence
  Synthetic oligonucleotide
gagaccggcatcggtcatatacgcctcagg

SEQ ID NO: 205510 - DNA, 30 bp, Artificial Sequence
  Synthetic oligonucleotide
tatgcaatgtctcttagggaaaagctcagg

SEQ ID NO: 205511 - DNA, 30 bp, Artificial Sequence
  Synthetic oligonucleotide
gcgtaagagcccatgaagtgaaatctcagg

SEQ ID NO: 205512 - DNA, 30 bp, Artificial Sequence
  Synthetic oligonucleotide
cgctcgaacgcttaaagatccgcagtcagg

SEQ ID NO: 205513 - DNA, 30 bp, Artificial Sequence
  Synthetic oligonucleotide
gaggttgtcaaaactacgcacagagtcagg

SEQ ID NO: 205514 - DNA, 30 bp, Artificial Sequence
  Synthetic oligonucleotide
tcataatatcaatctttgaagtacgtcagg

SEQ ID NO: 205515 - DNA, 29 bp, Artificial Sequence
  Synthetic oligonucleotide
acgtgcaccctggacaagtcgccgtcagg

SEQ ID NO: 205516 - DNA, 30 bp, Artificial Sequence
  Synthetic oligonucleotide
caacatttcccgagacctgactaggtcagg

SEQ ID NO: 205517 - DNA, 30 bp, Artificial Sequence
  Synthetic oligonucleotide
agagactctaccggagttatccgggtcagg

SEQ ID NO: 205518 - DNA, 30 bp, Artificial Sequence
  Synthetic oligonucleotide
ttaattgggcacagctgcaaaaatgtcagg

SEQ ID NO: 205519 - DNA, 30 bp, Artificial Sequence
  Synthetic oligonucleotide
tgatgctctatcaactgggtcaatgtcagg

SEQ ID NO: 205520 - DNA, 30 bp, Artificial Sequence
  Synthetic oligonucleotide
caaataggtacgctatagtaacatgtcagg

SEQ ID NO: 205521 - DNA, 30 bp, Artificial Sequence
  Synthetic oligonucleotide
ctcggagttcactgcagaatgcatgtcagg

SEQ ID NO: 205522 - DNA, 30 bp, Artificial Sequence
  Synthetic oligonucleotide
caggtgtctacttcacaaggtcaattcagg

SEQ ID NO: 205523 - DNA, 30 bp, Artificial Sequence
  Synthetic oligonucleotide
aataccataacacgataccaagaattcagg

SEQ ID NO: 205524 - DNA, 30 bp, Artificial Sequence
  Synthetic oligonucleotide
cgatggaaatccgctggtaatcacttcagg

SEQ ID NO: 205525 - DNA, 30 bp, Artificial Sequence
  Synthetic oligonucleotide
ataattagtaagaaaccgagggagttcagg

SEQ ID NO: 205526 - DNA, 30 bp, Artificial Sequence
  Synthetic oligonucleotide
aaaggtaatttcttgagaccgtagttcagg

SEQ ID NO: 205527 - DNA, 30 bp, Artificial Sequence
  Synthetic oligonucleotide
gaacgacccatcgaagatcgtgcgttcagg

SEQ ID NO: 205528 - DNA, 30 bp, Artificial Sequence
  Synthetic oligonucleotide
aacggggtgaggtgagaccatattttcagg

SEQ ID NO: 205529 - DNA, 30 bp, Artificial Sequence
  Synthetic oligonucleotide
ttggcttcacaagtgcgctaaacaaagagg

SEQ ID NO: 205530 - DNA, 30 bp, Artificial Sequence
  Synthetic oligonucleotide
acccgtggagaggtattaagattcaagagg

SEQ ID NO: 205531 - DNA, 30 bp, Artificial Sequence
  Synthetic oligonucleotide
aactttactcaccgaacccctcagaagagg

SEQ ID NO: 205532 - DNA, 30 bp, Artificial Sequence
  Synthetic oligonucleotide
tatatttaatcagcactaagactgaagagg

SEQ ID NO: 205533 - DNA, 30 bp, Artificial Sequence
  Synthetic oligonucleotide
gcctccagcatttcagcgggtcataagagg

SEQ ID NO: 205534 - DNA, 30 bp, Artificial Sequence
  Synthetic oligonucleotide
ggatcactatgaacctatttttgtaagagg

SEQ ID NO: 205535 - DNA, 30 bp, Artificial Sequence
  Synthetic oligonucleotide
aggtgaatttggcgatgctaaattaagagg

SEQ ID NO: 205536 - DNA, 30 bp, Artificial Sequence
  Synthetic oligonucleotide
ttttctctcgaacgtagtgattgacagagg

SEQ ID NO: 205537 - DNA, 30 bp, Artificial Sequence
  Synthetic oligonucleotide
gccttgtcaatacgccattggatacagagg

SEQ ID NO: 205538 - DNA, 30 bp, Artificial Sequence
  Synthetic oligonucleotide
cctccgtgtcacaagcgtggtatccagagg

SEQ ID NO: 205539 - DNA, 30 bp, Artificial Sequence
  Synthetic oligonucleotide
gacacccctagctattacacaaagcagagg

SEQ ID NO: 205540 - DNA, 30 bp, Artificial Sequence
  Synthetic oligonucleotide
tcttcttccccatcagttgagaagcagagg

SEQ ID NO: 205541 - DNA, 30 bp, Artificial Sequence
  Synthetic oligonucleotide
cactcagatttgtatacataaagtcagagg

SEQ ID NO: 205542 - DNA, 30 bp, Artificial Sequence
  Synthetic oligonucleotide
ttaagcgtaccgggttacgatacagagagg

SEQ ID NO: 205543 - DNA, 30 bp, Artificial Sequence
  Synthetic oligonucleotide
tccatatcggatgaaaaacagaaatagagg

SEQ ID NO: 205544 - DNA, 30 bp, Artificial Sequence
  Synthetic oligonucleotide
atggacttcctcagtacgaagtaatagagg

SEQ ID NO: 205545 - DNA, 30 bp, Artificial Sequence
  Synthetic oligonucleotide
acacactaagtggagatccctagctagagg

SEQ ID NO: 205546 - DNA, 30 bp, Artificial Sequence
  Synthetic oligonucleotide
tcagtgctaaattcaataatggggtagagg

SEQ ID NO: 205547 - DNA, 30 bp, Artificial Sequence
  Synthetic oligonucleotide
cggctcaagaggttactattaaattagagg

SEQ ID NO: 205548 - DNA, 30 bp, Artificial Sequence
  Synthetic oligonucleotide
ggcgttggcatacaggttggtgtaacgagg

SEQ ID NO: 205549 - DNA, 30 bp, Artificial Sequence
  Synthetic oligonucleotide
gaggacattctgcttaggctgtccacgagg

SEQ ID NO: 205550 - DNA, 30 bp, Artificial Sequence
  Synthetic oligonucleotide
gcccaacagcgcacagcggtcaaaccgagg

SEQ ID NO: 205551 - DNA, 30 bp, Artificial Sequence
  Synthetic oligonucleotide
caggccactatgtcacctgcggaaccgagg

SEQ ID NO: 205552 - DNA, 30 bp, Artificial Sequence
  Synthetic oligonucleotide
ccttagtagattggtagttcgacaccgagg

SEQ ID NO: 205553 - DNA, 30 bp, Artificial Sequence
  Synthetic oligonucleotide
aacaagtgacttgcactgcgtcacccgagg

SEQ ID NO: 205554 - DNA, 30 bp, Artificial Sequence
  Synthetic oligonucleotide
agttcctagggacatggatcgaatccgagg

SEQ ID NO: 205555 - DNA, 30 bp, Artificial Sequence
  Synthetic oligonucleotide
ttgtacatccaggggcaatctaatccgagg

SEQ ID NO: 205556 - DNA, 30 bp, Artificial Sequence
  Synthetic oligonucleotide
gcgtatcccggggcttggagatgtccgagg

SEQ ID NO: 205557 - DNA, 30 bp, Artificial Sequence
  Synthetic oligonucleotide
gtgtgcacaaggcacgagaatggagcgagg

SEQ ID NO: 205558 - DNA, 30 bp, Artificial Sequence
  Synthetic oligonucleotide
ttatgagtcaaaagataatctgccgcgagg

SEQ ID NO: 205559 - DNA, 30 bp, Artificial Sequence
  Synthetic oligonucleotide
agccgaatcgagaaggtgatgacggcgagg

SEQ ID NO: 205560 - DNA, 30 bp, Artificial Sequence
  Synthetic oligonucleotide
ctagtcgtggaaagattggggcttgcgagg

SEQ ID NO: 205561 - DNA, 30 bp, Artificial Sequence
  Synthetic oligonucleotide
caaggttggccgcctgtcgaaacctcgagg

SEQ ID NO: 205562 - DNA, 30 bp, Artificial Sequence
  Synthetic oligonucleotide
agatctagcgacctatataaccggtcgagg

SEQ ID NO: 205563 - DNA, 30 bp, Artificial Sequence
  Synthetic oligonucleotide
ttggaggaacttgtctccgcatcttcgagg

SEQ ID NO: 205564 - DNA, 30 bp, Artificial Sequence
  Synthetic oligonucleotide
aatctaagacatgttatctcatcttcgagg

SEQ ID NO: 205565 - DNA, 30 bp, Artificial Sequence
  Synthetic oligonucleotide
ccgaagcttcggcttactgcgtcttcgagg

SEQ ID NO: 205566 - DNA, 30 bp, Artificial Sequence
  Synthetic oligonucleotide
tgttggctggatgtagtatacccaaggagg

SEQ ID NO: 205567 - DNA, 30 bp, Artificial Sequence
  Synthetic oligonucleotide
ggtaatatacgatgcaacatagcaaggagg

SEQ ID NO: 205568 - DNA, 31 bp, Artificial Sequence
  Synthetic oligonucleotide
agtattcggttccaattaagatatcaggagg

SEQ ID NO: 205569 - DNA, 30 bp, Artificial Sequence
  Synthetic oligonucleotide
ccgacattaaacgtttggcctgagaggagg

SEQ ID NO: 205570 - DNA, 30 bp, Artificial Sequence
  Synthetic oligonucleotide
cgggaacctacggaagccgcgtaacggagg

SEQ ID NO: 205571 - DNA, 30 bp, Artificial Sequence
  Synthetic oligonucleotide
gagcctataaaaaagaaaaacatccggagg

SEQ ID NO: 205572 - DNA, 30 bp, Artificial Sequence
  Synthetic oligonucleotide
tgtggatggcaactgaccagagctcggagg

SEQ ID NO: 205573 - DNA, 30 bp, Artificial Sequence
  Synthetic oligonucleotide
cacaaggatacaagctggcgcggggggagg

SEQ ID NO: 205574 - DNA, 30 bp, Artificial Sequence
  Synthetic oligonucleotide
ggatacgtggctcatagggttggctggagg

SEQ ID NO: 205575 - DNA, 30 bp, Artificial Sequence
  Synthetic oligonucleotide
tataggctgcgatggcctcgaaagtggagg

SEQ ID NO: 205576 - DNA, 30 bp, Artificial Sequence
  Synthetic oligonucleotide
ccaatcccgcggaagagccactcttggagg

SEQ ID NO: 205577 - DNA, 30 bp, Artificial Sequence
  Synthetic oligonucleotide
agagcgtactttgtctttacaaaaatgagg

SEQ ID NO: 205578 - DNA, 30 bp, Artificial Sequence
  Synthetic oligonucleotide
cgtcgacatgcatctcaggtgagaatgagg

SEQ ID NO: 205579 - DNA, 30 bp, Artificial Sequence
  Synthetic oligonucleotide
ctcacgtggggtactcaagaaatcatgagg

SEQ ID NO: 205580 - DNA, 30 bp, Artificial Sequence
  Synthetic oligonucleotide
cgccacttgcggggactatgccgcctgagg

SEQ ID NO: 205581 - DNA, 30 bp, Artificial Sequence
  Synthetic oligonucleotide
taaactacattggcgcataacagcgtgagg

SEQ ID NO: 205582 - DNA, 30 bp, Artificial Sequence
  Synthetic oligonucleotide
gactacgagctgatgagtagattcgtgagg

SEQ ID NO: 205583 - DNA, 30 bp, Artificial Sequence
  Synthetic oligonucleotide
gcagtttgatgtatgttatagtatgtgagg

SEQ ID NO: 205584 - DNA, 30 bp, Artificial Sequence
  Synthetic oligonucleotide
cctttatggaataatgtgctactattgagg

SEQ ID NO: 205585 - DNA, 30 bp, Artificial Sequence
  Synthetic oligonucleotide
ttatcaagtcgcaacaagaatgggttgagg

SEQ ID NO: 205586 - DNA, 30 bp, Artificial Sequence
  Synthetic oligonucleotide
atcatcatcgatagtcctcaaactttgagg

SEQ ID NO: 205587 - DNA, 30 bp, Artificial Sequence
  Synthetic oligonucleotide
cattattatcgacgtcgtcaatcaaatagg

SEQ ID NO: 205588 - DNA, 30 bp, Artificial Sequence
  Synthetic oligonucleotide
tagaaattcagcgggaagggcttcaatagg

SEQ ID NO: 205589 - DNA, 30 bp, Artificial Sequence
  Synthetic oligonucleotide
cagttgatgttagtcgatcagcgtaatagg

SEQ ID NO: 205590 - DNA, 30 bp, Artificial Sequence
  Synthetic oligonucleotide
aaacgttgagtgcgatggaaaggacatagg

SEQ ID NO: 205591 - DNA, 30 bp, Artificial Sequence
  Synthetic oligonucleotide
ttatattaagctcgctgccgaggacatagg

SEQ ID NO: 205592 - DNA, 30 bp, Artificial Sequence
  Synthetic oligonucleotide
tggctaaataaatattaggccgtacatagg

SEQ ID NO: 205593 - DNA, 30 bp, Artificial Sequence
  Synthetic oligonucleotide
tgcggtacccaaatattgagtcgagatagg

SEQ ID NO: 205594 - DNA, 30 bp, Artificial Sequence
  Synthetic oligonucleotide
gcataagaaactgtaatagatatagatagg

SEQ ID NO: 205595 - DNA, 30 bp, Artificial Sequence
  Synthetic oligonucleotide
gttagggcctctagtggaacggtagatagg

SEQ ID NO: 205596 - DNA, 30 bp, Artificial Sequence
  Synthetic oligonucleotide
cgcgcgattttaatgccatcgggcgatagg

SEQ ID NO: 205597 - DNA, 30 bp, Artificial Sequence
  Synthetic oligonucleotide
taacactgttaatgtcgacaaacggatagg

SEQ ID NO: 205598 - DNA, 30 bp, Artificial Sequence
  Synthetic oligonucleotide
ggtcttccaaggctcagaattgtggatagg

SEQ ID NO: 205599 - DNA, 30 bp, Artificial Sequence
  Synthetic oligonucleotide
ggcggactttaaccggcacgtcctgatagg

SEQ ID NO: 205600 - DNA, 30 bp, Artificial Sequence
  Synthetic oligonucleotide
tctacatcttgggcaaccaaactgtatagg

SEQ ID NO: 205601 - DNA, 30 bp, Artificial Sequence
  Synthetic oligonucleotide
acgtatatgcgatgtcgtttcgagactagg

SEQ ID NO: 205602 - DNA, 30 bp, Artificial Sequence
  Synthetic oligonucleotide
ccgtgaattgccgtacgcggatggactagg

SEQ ID NO: 205603 - DNA, 30 bp, Artificial Sequence
  Synthetic oligonucleotide
tctcgtactgtaagcggcgaaatgactagg

SEQ ID NO: 205604 - DNA, 30 bp, Artificial Sequence
  Synthetic oligonucleotide
cgccttcacaaacgtgaggttgctactagg

SEQ ID NO: 205605 - DNA, 30 bp, Artificial Sequence
  Synthetic oligonucleotide
ggtcatgtcgcgcctcacccaggacctagg

SEQ ID NO: 205606 - DNA, 30 bp, Artificial Sequence
  Synthetic oligonucleotide
attaaggcttccactcatgtgccccctagg

SEQ ID NO: 205607 - DNA, 30 bp, Artificial Sequence
  Synthetic oligonucleotide
ttaactaatccctttgattggaagcctagg

SEQ ID NO: 205608 - DNA, 30 bp, Artificial Sequence
  Synthetic oligonucleotide
ggattaaaggtttccgcccaggctcctagg

SEQ ID NO: 205609 - DNA, 30 bp, Artificial Sequence
  Synthetic oligonucleotide
agtgtctgccagacataaacataagctagg

SEQ ID NO: 205610 - DNA, 30 bp, Artificial Sequence
  Synthetic oligonucleotide
cttctatcccctcatattgtcaccgctagg

SEQ ID NO: 205611 - DNA, 30 bp, Artificial Sequence
  Synthetic oligonucleotide
ccggggttacactagggtaactgggctagg

SEQ ID NO: 205612 - DNA, 30 bp, Artificial Sequence
  Synthetic oligonucleotide
cccgactatactgctttgaacggctctagg

SEQ ID NO: 205613 - DNA, 30 bp, Artificial Sequence
  Synthetic oligonucleotide
ataaggtaacggcgactattgaggtctagg

SEQ ID NO: 205614 - DNA, 30 bp, Artificial Sequence
  Synthetic oligonucleotide
tctcggacgttaaggtcttaccgaagtagg

SEQ ID NO: 205615 - DNA, 30 bp, Artificial Sequence
  Synthetic oligonucleotide
attggtgatcgttaacctctggacagtagg

SEQ ID NO: 205616 - DNA, 30 bp, Artificial Sequence
  Synthetic oligonucleotide
tggaggacagtgtgttcccctgatagtagg

SEQ ID NO: 205617 - DNA, 30 bp, Artificial Sequence
  Synthetic oligonucleotide
atgcatggggaagctgaaatacaacgtagg

SEQ ID NO: 205618 - DNA, 30 bp, Artificial Sequence
  Synthetic oligonucleotide
tgcaaggtaaagcaatggcacataggtagg

SEQ ID NO: 205619 - DNA, 30 bp, Artificial Sequence
  Synthetic oligonucleotide
aactagacggttaggctcaggaacggtagg

SEQ ID NO: 205620 - DNA, 30 bp, Artificial Sequence
  Synthetic oligonucleotide
agccggggagacgggcaggtttccggtagg

SEQ ID NO: 205621 - DNA, 30 bp, Artificial Sequence
  Synthetic oligonucleotide
aaacgagtgtttcacgtataacagggtagg

SEQ ID NO: 205622 - DNA, 30 bp, Artificial Sequence
  Synthetic oligonucleotide
gatgtactgttaaggaaaccaatgggtagg

SEQ ID NO: 205623 - DNA, 30 bp, Artificial Sequence
  Synthetic oligonucleotide
cgacatctcccggttggggcgatgggtagg

SEQ ID NO: 205624 - DNA, 30 bp, Artificial Sequence
  Synthetic oligonucleotide
caaagaaccctatatacaagcggtggtagg

SEQ ID NO: 205625 - DNA, 30 bp, Artificial Sequence
  Synthetic oligonucleotide
tttgaccaggcgttttcaaacgcatgtagg

SEQ ID NO: 205626 - DNA, 30 bp, Artificial Sequence
  Synthetic oligonucleotide
gtgagctgcgaagggagtcgcgtatgtagg

SEQ ID NO: 205627 - DNA, 30 bp, Artificial Sequence
  Synthetic oligonucleotide
gtcgctaaacgatgcgttagtgcctgtagg

SEQ ID NO: 205628 - DNA, 29 bp, Artificial Sequence
  Synthetic oligonucleotide
tataaccgcaaattataacgtggtgtagg

SEQ ID NO: 205629 - DNA, 30 bp, Artificial Sequence
  Synthetic oligonucleotide
acggggggtagacttctattactgtgtagg

SEQ ID NO: 205630 - DNA, 30 bp, Artificial Sequence
  Synthetic oligonucleotide
attatcatagttgggtaggtgcattgtagg

SEQ ID NO: 205631 - DNA, 30 bp, Artificial Sequence
  Synthetic oligonucleotide
agttggactatatagcggtgcggttgtagg

SEQ ID NO: 205632 - DNA, 30 bp, Artificial Sequence
  Synthetic oligonucleotide
ggcagtccatgaagtcacgttgaaattagg

SEQ ID NO: 205633 - DNA, 30 bp, Artificial Sequence
  Synthetic oligonucleotide
gactcacactgcatggtgctacgaattagg

SEQ ID NO: 205634 - DNA, 30 bp, Artificial Sequence
  Synthetic oligonucleotide
accacttacaacaataaacgaataattagg

SEQ ID NO: 205635 - DNA, 30 bp, Artificial Sequence
  Synthetic oligonucleotide
gtttaattgcagtgaagtacaatcattagg

SEQ ID NO: 205636 - DNA, 30 bp, Artificial Sequence
  Synthetic oligonucleotide
aaatggaaagctttcaattgactcattagg

SEQ ID NO: 205637 - DNA, 30 bp, Artificial Sequence
  Synthetic oligonucleotide
agggtaggggagatggcacatccgattagg

SEQ ID NO: 205638 - DNA, 30 bp, Artificial Sequence
  Synthetic oligonucleotide
cgacggacctcgggagtactccatattagg

SEQ ID NO: 205639 - DNA, 30 bp, Artificial Sequence
  Synthetic oligonucleotide
attcagaagcttaggtctccatatattagg

SEQ ID NO: 205640 - DNA, 30 bp, Artificial Sequence
  Synthetic oligonucleotide
gctggacgactgttggatgaaagccttagg

SEQ ID NO: 205641 - DNA, 30 bp, Artificial Sequence
  Synthetic oligonucleotide
gcgtgggttttgtcagttaacgtccttagg

SEQ ID NO: 205642 - DNA, 30 bp, Artificial Sequence
  Synthetic oligonucleotide
gtattacaggtacggagtgatgtgcttagg

SEQ ID NO: 205643 - DNA, 30 bp, Artificial Sequence
  Synthetic oligonucleotide
catcagtcaacgtgcgctagaaatcttagg

SEQ ID NO: 205644 - DNA, 30 bp, Artificial Sequence
  Synthetic oligonucleotide
gggtagtgtttggtccttcgtaatcttagg

SEQ ID NO: 205645 - DNA, 30 bp, Artificial Sequence
  Synthetic oligonucleotide
taatataaaggagacgaataggtggttagg

SEQ ID NO: 205646 - DNA, 30 bp, Artificial Sequence
  Synthetic oligonucleotide
tcgtagctagagtccaatgccccatttagg

SEQ ID NO: 205647 - DNA, 30 bp, Artificial Sequence
  Synthetic oligonucleotide
tacttattcccatcgtagtaaagctttagg

SEQ ID NO: 205648 - DNA, 30 bp, Artificial Sequence
  Synthetic oligonucleotide
gaattaacatatcgatgatatcgttttagg

SEQ ID NO: 205649 - DNA, 30 bp, Artificial Sequence
  Synthetic oligonucleotide
tgcaccgcgctaaattgtctgcacaaacgg

SEQ ID NO: 205650 - DNA, 30 bp, Artificial Sequence
  Synthetic oligonucleotide
ttcatagcgtgaggtacatctttgaaacgg

SEQ ID NO: 205651 - DNA, 30 bp, Artificial Sequence
  Synthetic oligonucleotide
aattacgttgtcgtcactgcgattaaacgg

SEQ ID NO: 205652 - DNA, 30 bp, Artificial Sequence
  Synthetic oligonucleotide
aaggctttcaacaattattgcgggcaacgg

SEQ ID NO: 205653 - DNA, 30 bp, Artificial Sequence
  Synthetic oligonucleotide
gctggtaccctgggtgcagtgaatcaacgg

SEQ ID NO: 205654 - DNA, 30 bp, Artificial Sequence
  Synthetic oligonucleotide
acgctggagggggacttgattcatcaacgg

SEQ ID NO: 205655 - DNA, 30 bp, Artificial Sequence
  Synthetic oligonucleotide
acgatgtcaggcagtccctacaaagaacgg

SEQ ID NO: 205656 - DNA, 30 bp, Artificial Sequence
  Synthetic oligonucleotide
gcgggccgacccacggttcacactgaacgg

SEQ ID NO: 205657 - DNA, 30 bp, Artificial Sequence
  Synthetic oligonucleotide
gtgaggtcacagaatttatacgctgaacgg

SEQ ID NO: 205658 - DNA, 30 bp, Artificial Sequence
  Synthetic oligonucleotide
gtgccttggctcgttagaggggctgaacgg

SEQ ID NO: 205659 - DNA, 30 bp, Artificial Sequence
  Synthetic oligonucleotide
ataaggtttccgtgcaacccggagtaacgg

SEQ ID NO: 205660 - DNA, 30 bp, Artificial Sequence
  Synthetic oligonucleotide
gagcgtaatatgacgtcgccattgtaacgg

SEQ ID NO: 205661 - DNA, 30 bp, Artificial Sequence
  Synthetic oligonucleotide
aaaacagatcctatgctaaatcaaacacgg

SEQ ID NO: 205662 - DNA, 30 bp, Artificial Sequence
  Synthetic oligonucleotide
atgcgagggaatgtttggggtgcaacacgg

SEQ ID NO: 205663 - DNA, 30 bp, Artificial Sequence
  Synthetic oligonucleotide
agctaagtgcgttacttccggtacacacgg

SEQ ID NO: 205664 - DNA, 30 bp, Artificial Sequence
  Synthetic oligonucleotide
aaacaactggaagaaagataggagacacgg

SEQ ID NO: 205665 - DNA, 30 bp, Artificial Sequence
  Synthetic oligonucleotide
gtcgatgcggaacggatatcctgaccacgg

SEQ ID NO: 205666 - DNA, 30 bp, Artificial Sequence
  Synthetic oligonucleotide
gtcacgaaataggacgatatgcacccacgg

SEQ ID NO: 205667 - DNA, 30 bp, Artificial Sequence
  Synthetic oligonucleotide
cgagctgagccactgtaggtggatccacgg

SEQ ID NO: 205668 - DNA, 30 bp, Artificial Sequence
  Synthetic oligonucleotide
ggtgttagggcatgaatgttaactccacgg

SEQ ID NO: 205669 - DNA, 30 bp, Artificial Sequence
  Synthetic oligonucleotide
aacggagacgtagatacaccacttccacgg

SEQ ID NO: 205670 - DNA, 30 bp, Artificial Sequence
  Synthetic oligonucleotide
gggtctatgagaagggacacatactcacgg

SEQ ID NO: 205671 - DNA, 30 bp, Artificial Sequence
  Synthetic oligonucleotide
ggcctatagtatggaaacgatgattcacgg

SEQ ID NO: 205672 - DNA, 30 bp, Artificial Sequence
  Synthetic oligonucleotide
gctcaactccaacatgtatctgcaagacgg

SEQ ID NO: 205673 - DNA, 30 bp, Artificial Sequence
  Synthetic oligonucleotide
aaagggtataggacggaatctgtcagacgg

SEQ ID NO: 205674 - DNA, 30 bp, Artificial Sequence
  Synthetic oligonucleotide
cgtgctaggggataagcatcatagagacgg

SEQ ID NO: 205675 - DNA, 30 bp, Artificial Sequence
  Synthetic oligonucleotide
aactaaggattaataataccgaggagacgg

SEQ ID NO: 205676 - DNA, 30 bp, Artificial Sequence
  Synthetic oligonucleotide
cggctatgtttcggggacaggaggagacgg

SEQ ID NO: 205677 - DNA, 30 bp, Artificial Sequence
  Synthetic oligonucleotide
cagaggttgggtacccgcaaatttagacgg

SEQ ID NO: 205678 - DNA, 30 bp, Artificial Sequence
  Synthetic oligonucleotide
tacggcgtcatggacaaagttggccgacgg

SEQ ID NO: 205679 - DNA, 30 bp, Artificial Sequence
  Synthetic oligonucleotide
cggacggcgagggcgtattacgatcgacgg

SEQ ID NO: 205680 - DNA, 30 bp, Artificial Sequence
  Synthetic oligonucleotide
cattatggaacctaaggcagaatgggacgg

SEQ ID NO: 205681 - DNA, 30 bp, Artificial Sequence
  Synthetic oligonucleotide
gttcacgtaacgggaagcgcagtgggacgg

SEQ ID NO: 205682 - DNA, 30 bp, Artificial Sequence
  Synthetic oligonucleotide
aaatgaacaacaaaggcatgtaaatgacgg

SEQ ID NO: 205683 - DNA, 30 bp, Artificial Sequence
  Synthetic oligonucleotide
aatgggactgagaggggttgcctatgacgg

SEQ ID NO: 205684 - DNA, 30 bp, Artificial Sequence
  Synthetic oligonucleotide
tattggtgcatggtaacaaggctatgacgg

SEQ ID NO: 205685 - DNA, 30 bp, Artificial Sequence
  Synthetic oligonucleotide
tggtcaacgtaggatcgggaggtctgacgg

SEQ ID NO: 205686 - DNA, 30 bp, Artificial Sequence
  Synthetic oligonucleotide
gttaagcccagtatgggaaaattctgacgg

SEQ ID NO: 205687 - DNA, 30 bp, Artificial Sequence
  Synthetic oligonucleotide
gcgcaggtcggcaaggcgctacggtgacgg

SEQ ID NO: 205688 - DNA, 30 bp, Artificial Sequence
  Synthetic oligonucleotide
gtggagagacatccttacgatctgtgacgg

SEQ ID NO: 205689 - DNA, 30 bp, Artificial Sequence
  Synthetic oligonucleotide
gggcaataacgatgcagggaccaaatacgg

SEQ ID NO: 205690 - DNA, 30 bp, Artificial Sequence
  Synthetic oligonucleotide
tgatggtcgttagagggcaccccaatacgg

SEQ ID NO: 205691 - DNA, 30 bp, Artificial Sequence
  Synthetic oligonucleotide
gggccgtgggtcatcgaaaagccaatacgg

SEQ ID NO: 205692 - DNA, 30 bp, Artificial Sequence
  Synthetic oligonucleotide
tacgacaaggtataggccggggcaatacgg

SEQ ID NO: 205693 - DNA, 30 bp, Artificial Sequence
  Synthetic oligonucleotide
atgttaccgcgtatttaccatgcaatacgg

SEQ ID NO: 205694 - DNA, 30 bp, Artificial Sequence
  Synthetic oligonucleotide
ccgcaggggtattagtagcggttaatacgg

SEQ ID NO: 205695 - DNA, 30 bp, Artificial Sequence
  Synthetic oligonucleotide
caattgcgaatacaggacgtgttaatacgg

SEQ ID NO: 205696 - DNA, 30 bp, Artificial Sequence
  Synthetic oligonucleotide
cggatctagtccgccgctataaacatacgg

SEQ ID NO: 205697 - DNA, 30 bp, Artificial Sequence
  Synthetic oligonucleotide
ctaaataaactggattatccggacatacgg

SEQ ID NO: 205698 - DNA, 30 bp, Artificial Sequence
  Synthetic oligonucleotide
ctatgcacatctccagctataggcatacgg

SEQ ID NO: 205699 - DNA, 30 bp, Artificial Sequence
  Synthetic oligonucleotide
aaggtgtttgcggaataggctatcatacgg

SEQ ID NO: 205700 - DNA, 30 bp, Artificial Sequence
  Synthetic oligonucleotide
aaagcgagggagattgcttctacgatacgg

SEQ ID NO: 205701 - DNA, 30 bp, Artificial Sequence
  Synthetic oligonucleotide
taggaagccataaacgggtatccgatacgg

SEQ ID NO: 205702 - DNA, 30 bp, Artificial Sequence
  Synthetic oligonucleotide
cacgacctagtgattgtgttccggatacgg

SEQ ID NO: 205703 - DNA, 30 bp, Artificial Sequence
  Synthetic oligonucleotide
gaacaagcaaccgaaacacgattgatacgg

SEQ ID NO: 205704 - DNA, 30 bp, Artificial Sequence
  Synthetic oligonucleotide
tataaggcggcttgaggaggtcatatacgg

SEQ ID NO: 205705 - DNA, 30 bp, Artificial Sequence
  Synthetic oligonucleotide
cagacgaccgtattatttcgtcgtatacgg

SEQ ID NO: 205706 - DNA, 30 bp, Artificial Sequence
  Synthetic oligonucleotide
gaatgatcttgagggtccgtgcaactacgg

SEQ ID NO: 205707 - DNA, 30 bp, Artificial Sequence
  Synthetic oligonucleotide
tcattatgttatattggcgtctcactacgg

SEQ ID NO: 205708 - DNA, 30 bp, Artificial Sequence
  Synthetic oligonucleotide
cacggaaacgattgagcaacgcccctacgg

SEQ ID NO: 205709 - DNA, 30 bp, Artificial Sequence
  Synthetic oligonucleotide
gatagtcatcatttaatactgcagctacgg

SEQ ID NO: 205710 - DNA, 30 bp, Artificial Sequence
  Synthetic oligonucleotide
ttctggggattatgctaaactgggctacgg

SEQ ID NO: 205711 - DNA, 30 bp, Artificial Sequence
  Synthetic oligonucleotide
gatcgggggccgtccgtaggttggctacgg

SEQ ID NO: 205712 - DNA, 30 bp, Artificial Sequence
  Synthetic oligonucleotide
aatgactccccgaggaaagtagtgctacgg

SEQ ID NO: 205713 - DNA, 30 bp, Artificial Sequence
  Synthetic oligonucleotide
cgatgccagaggtgatagtggggtctacgg

SEQ ID NO: 205714 - DNA, 30 bp, Artificial Sequence
  Synthetic oligonucleotide
ctatctggttcggtgtcaaggatcgtacgg

SEQ ID NO: 205715 - DNA, 30 bp, Artificial Sequence
  Synthetic oligonucleotide
gctggagagtttacagagccgaaggtacgg

SEQ ID NO: 205716 - DNA, 30 bp, Artificial Sequence
  Synthetic oligonucleotide
cgagccagttaagggtctcgcccggtacgg

SEQ ID NO: 205717 - DNA, 30 bp, Artificial Sequence
  Synthetic oligonucleotide
gaagatactttcacccctagcattgtacgg

SEQ ID NO: 205718 - DNA, 30 bp, Artificial Sequence
  Synthetic oligonucleotide
cagtgagtcgcgggcctggaatttgtacgg

SEQ ID NO: 205719 - DNA, 30 bp, Artificial Sequence
  Synthetic oligonucleotide
taagtgatacggtggaacacgtagttacgg

SEQ ID NO: 205720 - DNA, 30 bp, Artificial Sequence
  Synthetic oligonucleotide
taacacctggtcctaaacgtaaggttacgg

SEQ ID NO: 205721 - DNA, 30 bp, Artificial Sequence
  Synthetic oligonucleotide
aatgctggttatggttatcacagaaaccgg

SEQ ID NO: 205722 - DNA, 30 bp, Artificial Sequence
  Synthetic oligonucleotide
cgatcgagttgggtgcaggttaggaaccgg

SEQ ID NO: 205723 - DNA, 30 bp, Artificial Sequence
  Synthetic oligonucleotide
cacaggtaaagaaaatatagttgtaaccgg

SEQ ID NO: 205724 - DNA, 30 bp, Artificial Sequence
  Synthetic oligonucleotide
gcattaagtcggggcatcattgtacaccgg

SEQ ID NO: 205725 - DNA, 30 bp, Artificial Sequence
  Synthetic oligonucleotide
caatataacgttaagcggaaatttcaccgg

SEQ ID NO: 205726 - DNA, 30 bp, Artificial Sequence
  Synthetic oligonucleotide
aaagtatgaggtgtgcaggcttaagaccgg

SEQ ID NO: 205727 - DNA, 30 bp, Artificial Sequence
  Synthetic oligonucleotide
tgcccggttatcctcaaaaatagcgaccgg

SEQ ID NO: 205728 - DNA, 30 bp, Artificial Sequence
  Synthetic oligonucleotide
gctttccaagctattagtttacaggaccgg

SEQ ID NO: 205729 - DNA, 30 bp, Artificial Sequence
  Synthetic oligonucleotide
tcgttcacgctcaggatattgcgggaccgg

SEQ ID NO: 205730 - DNA, 30 bp, Artificial Sequence
  Synthetic oligonucleotide
tgtaattgcactactgaaatagttgaccgg

SEQ ID NO: 205731 - DNA, 30 bp, Artificial Sequence
  Synthetic oligonucleotide
ctacggacggcacgcttaactagctaccgg

SEQ ID NO: 205732 - DNA, 30 bp, Artificial Sequence
  Synthetic oligonucleotide
aaattatgatccgcgaagcgtggcacccgg

SEQ ID NO: 205733 - DNA, 31 bp, Artificial Sequence
  Synthetic oligonucleotide
ccgagttgagcatatgaaaatctgcacccgg

SEQ ID NO: 205734 - DNA, 30 bp, Artificial Sequence
  Synthetic oligonucleotide
gtttgaatacacactgcccagatcacccgg

SEQ ID NO: 205735 - DNA, 30 bp, Artificial Sequence
  Synthetic oligonucleotide
gcgggcgaaggagcgatcgagccaccccgg

SEQ ID NO: 205736 - DNA, 30 bp, Artificial Sequence
  Synthetic oligonucleotide
attagcatttatggctgggtaaagccccgg

SEQ ID NO: 205737 - DNA, 30 bp, Artificial Sequence
  Synthetic oligonucleotide
acggtaatttgttcgataaccacagcccgg

SEQ ID NO: 205738 - DNA, 30 bp, Artificial Sequence
  Synthetic oligonucleotide
cattaaggatacttgtacaagtaggcccgg

SEQ ID NO: 205739 - DNA, 31 bp, Artificial Sequence
  Synthetic oligonucleotide
aactggtgtgaatttactcaaaatggcccgg

SEQ ID NO: 205740 - DNA, 30 bp, Artificial Sequence
  Synthetic oligonucleotide
aatcataggacgcacgtaacggtggcccgg

SEQ ID NO: 205741 - DNA, 30 bp, Artificial Sequence
  Synthetic oligonucleotide
acagggcagagccggtgatgggactcccgg

SEQ ID NO: 205742 - DNA, 30 bp, Artificial Sequence
  Synthetic oligonucleotide
gtacctctctgcgttaccccaatgtcccgg

SEQ ID NO: 205743 - DNA, 30 bp, Artificial Sequence
  Synthetic oligonucleotide
cgatctgagtggtattagcccgggagccgg

SEQ ID NO: 205744 - DNA, 30 bp, Artificial Sequence
  Synthetic oligonucleotide
gatcctcgatactgaaaacacgtgagccgg

SEQ ID NO: 205745 - DNA, 30 bp, Artificial Sequence
  Synthetic oligonucleotide
gtagcacgagtagggtatgtgcgtagccgg

SEQ ID NO: 205746 - DNA, 30 bp, Artificial Sequence
  Synthetic oligonucleotide
acgatcgtttatataatataggtacgccgg

SEQ ID NO: 205747 - DNA, 30 bp, Artificial Sequence
  Synthetic oligonucleotide
agcttaaccgggctctactgatcaggccgg

SEQ ID NO: 205748 - DNA, 30 bp, Artificial Sequence
  Synthetic oligonucleotide
ataggccggacgtaactttactgaggccgg

SEQ ID NO: 205749 - DNA, 30 bp, Artificial Sequence
  Synthetic oligonucleotide
gatctcggctctgacgtcggggacggccgg

SEQ ID NO: 205750 - DNA, 30 bp, Artificial Sequence
  Synthetic oligonucleotide
cttaggagatctacagttctgaatggccgg

SEQ ID NO: 205751 - DNA, 30 bp, Artificial Sequence
  Synthetic oligonucleotide
gcccagttaattccagtagcctatggccgg

SEQ ID NO: 205752 - DNA, 30 bp, Artificial Sequence
  Synthetic oligonucleotide
gtgtgatacgttctgggtaacattggccgg

SEQ ID NO: 205753 - DNA, 30 bp, Artificial Sequence
  Synthetic oligonucleotide
gatggagtgctcgtacgtagcgttggccgg

SEQ ID NO: 205754 - DNA, 30 bp, Artificial Sequence
  Synthetic oligonucleotide
tctagtcctagtccaataataacatgccgg

SEQ ID NO: 205755 - DNA, 30 bp, Artificial Sequence
  Synthetic oligonucleotide
gtccgacgacattacgggggctgatgccgg

SEQ ID NO: 205756 - DNA, 30 bp, Artificial Sequence
  Synthetic oligonucleotide
cctgatataagtatcggtaatccgtgccgg

SEQ ID NO: 205757 - DNA, 30 bp, Artificial Sequence
  Synthetic oligonucleotide
gtactggtagcgggggccgacccttgccgg

SEQ ID NO: 205758 - DNA, 30 bp, Artificial Sequence
  Synthetic oligonucleotide
ttaaaatagagtggaagcccgtaaatccgg

SEQ ID NO: 205759 - DNA, 30 bp, Artificial Sequence
  Synthetic oligonucleotide
taagtcggagacgcgggacataacatccgg

SEQ ID NO: 205760 - DNA, 30 bp, Artificial Sequence
  Synthetic oligonucleotide
catgaccgcgtaccgtcccgaacgatccgg

SEQ ID NO: 205761 - DNA, 30 bp, Artificial Sequence
  Synthetic oligonucleotide
gacagtatttctgggtggccgatgatccgg

SEQ ID NO: 205762 - DNA, 30 bp, Artificial Sequence
  Synthetic oligonucleotide
ggggcaaaccatcagtccacttccctccgg

SEQ ID NO: 205763 - DNA, 30 bp, Artificial Sequence
  Synthetic oligonucleotide
gtgtgtcaaggtgcagaaaaaacagtccgg

SEQ ID NO: 205764 - DNA, 30 bp, Artificial Sequence
  Synthetic oligonucleotide
gggagtggcagattctattgaatcgtccgg

SEQ ID NO: 205765 - DNA, 30 bp, Artificial Sequence
  Synthetic oligonucleotide
actggttagcgataatacatggtcgtccgg

SEQ ID NO: 205766 - DNA, 30 bp, Artificial Sequence
  Synthetic oligonucleotide
cgaaagtaatggcacggcgtcaaggtccgg

SEQ ID NO: 205767 - DNA, 30 bp, Artificial Sequence
  Synthetic oligonucleotide
agtgaatgggcaaacccaggctcggtccgg

SEQ ID NO: 205768 - DNA, 30 bp, Artificial Sequence
  Synthetic oligonucleotide
ctcgcggctggcgatttcgcacaattccgg

SEQ ID NO: 205769 - DNA, 30 bp, Artificial Sequence
  Synthetic oligonucleotide
atggtagtagaggcgggatgcagtttccgg

SEQ ID NO: 205770 - DNA, 30 bp, Artificial Sequence
  Synthetic oligonucleotide
gtgttaatgagagatcagagaggaaagcgg

SEQ ID NO: 205771 - DNA, 30 bp, Artificial Sequence
  Synthetic oligonucleotide
acgatcaggtcctattgacacttcaagcgg

SEQ ID NO: 205772 - DNA, 30 bp, Artificial Sequence
  Synthetic oligonucleotide
acgtttatacacctacaacctttcaagcgg

SEQ ID NO: 205773 - DNA, 30 bp, Artificial Sequence
  Synthetic oligonucleotide
catttcaaataggcgtcaactcggaagcgg

SEQ ID NO: 205774 - DNA, 30 bp, Artificial Sequence
  Synthetic oligonucleotide
gaaccattcaggaaagcgcttcaacagcgg

SEQ ID NO: 205775 - DNA, 30 bp, Artificial Sequence
  Synthetic oligonucleotide
gaggggcgagtcgggataagtacacagcgg

SEQ ID NO: 205776 - DNA, 30 bp, Artificial Sequence
  Synthetic oligonucleotide
acatcacgccctgcagcagtacgacagcgg

SEQ ID NO: 205777 - DNA, 30 bp, Artificial Sequence
  Synthetic oligonucleotide
atcggggaatacaactttaagatccagcgg

SEQ ID NO: 205778 - DNA, 30 bp, Artificial Sequence
  Synthetic oligonucleotide
gcgtataggtgccattatatagatcagcgg

SEQ ID NO: 205779 - DNA, 29 bp, Artificial Sequence
  Synthetic oligonucleotide
ttggataatagctcacgccaaaagagcgg

SEQ ID NO: 205780 - DNA, 30 bp, Artificial Sequence
  Synthetic oligonucleotide
gttacccgagaaaggggcctaaaagagcgg

SEQ ID NO: 205781 - DNA, 31 bp, Artificial Sequence
  Synthetic oligonucleotide
cctagtatcggcacacacctatctcgagcgg

SEQ ID NO: 205782 - DNA, 30 bp, Artificial Sequence
  Synthetic oligonucleotide
cggagagtccatcatgggcgaggatagcgg

SEQ ID NO: 205783 - DNA, 30 bp, Artificial Sequence
  Synthetic oligonucleotide
cgattttcccgaaatttcgtacactagcgg

SEQ ID NO: 205784 - DNA, 30 bp, Artificial Sequence
  Synthetic oligonucleotide
cctcgggggtcgcgtgttccctgaacgcgg

SEQ ID NO: 205785 - DNA, 30 bp, Artificial Sequence
  Synthetic oligonucleotide
tatgtgcgacaatacattaaacccacgcgg

SEQ ID NO: 205786 - DNA, 30 bp, Artificial Sequence
  Synthetic oligonucleotide
gttaatgtagcatgcctaccaagtacgcgg

SEQ ID NO: 205787 - DNA, 30 bp, Artificial Sequence
  Synthetic oligonucleotide
gtgcagtcgggctggcgccaaaggccgcgg

SEQ ID NO: 205788 - DNA, 30 bp, Artificial Sequence
  Synthetic oligonucleotide
acgtgaacggcactagggttcggagcgcgg

SEQ ID NO: 205789 - DNA, 30 bp, Artificial Sequence
  Synthetic oligonucleotide
gctatgccaaaatatattggcactgcgcgg

SEQ ID NO: 205790 - DNA, 30 bp, Artificial Sequence
  Synthetic oligonucleotide
attcagcccgctaaaagataaggtgcgcgg

SEQ ID NO: 205791 - DNA, 30 bp, Artificial Sequence
  Synthetic oligonucleotide
agataggggagagggtgacatcgatcgcgg

SEQ ID NO: 205792 - DNA, 30 bp, Artificial Sequence
  Synthetic oligonucleotide
tctcaaggtacagatgtaccggactcgcgg

SEQ ID NO: 205793 - DNA, 30 bp, Artificial Sequence
  Synthetic oligonucleotide
attgtggcgctttatgggacaccctcgcgg

SEQ ID NO: 205794 - DNA, 30 bp, Artificial Sequence
  Synthetic oligonucleotide
gatcgtcgcttttacacacggaagtcgcgg

SEQ ID NO: 205795 - DNA, 30 bp, Artificial Sequence
  Synthetic oligonucleotide
ttgtgaaggactgtcccaggcgattcgcgg

SEQ ID NO: 205796 - DNA, 30 bp, Artificial Sequence
  Synthetic oligonucleotide
atcttatttgaagaatttcccagttcgcgg

SEQ ID NO: 205797 - DNA, 30 bp, Artificial Sequence
  Synthetic oligonucleotide
gtgggcgcgatctttcccagtcctaggcgg

SEQ ID NO: 205798 - DNA, 30 bp, Artificial Sequence
  Synthetic oligonucleotide
tattcgcgcgaaggagtgtcctgtaggcgg

SEQ ID NO: 205799 - DNA, 30 bp, Artificial Sequence
  Synthetic oligonucleotide
tacgcgtaaaggagcagttacttacggcgg

SEQ ID NO: 205800 - DNA, 30 bp, Artificial Sequence
  Synthetic oligonucleotide
tgccgttgaagcaaattgaatgtccggcgg

SEQ ID NO: 205801 - DNA, 30 bp, Artificial Sequence
  Synthetic oligonucleotide
ccaaacagggtgttgattttagttcggcgg

SEQ ID NO: 205802 - DNA, 30 bp, Artificial Sequence
  Synthetic oligonucleotide
attgagatacagtagtaagaggcagggcgg

SEQ ID NO: 205803 - DNA, 30 bp, Artificial Sequence
  Synthetic oligonucleotide
tgcattaaagccatcgaccgttaggggcgg

SEQ ID NO: 205804 - DNA, 30 bp, Artificial Sequence
  Synthetic oligonucleotide
ggtcaactagcgtccttccatcaatggcgg

SEQ ID NO: 205805 - DNA, 30 bp, Artificial Sequence
  Synthetic oligonucleotide
gggttgggaagttggcaataaacgtggcgg

SEQ ID NO: 205806 - DNA, 30 bp, Artificial Sequence
  Synthetic oligonucleotide
atccagagtctcatcgcgacagcgtggcgg

SEQ ID NO: 205807 - DNA, 30 bp, Artificial Sequence
  Synthetic oligonucleotide
caaattcatactgggcgtagcatgtggcgg

SEQ ID NO: 205808 - DNA, 30 bp, Artificial Sequence
  Synthetic oligonucleotide
taagtgaggaatgctctcatccgaatgcgg

SEQ ID NO: 205809 - DNA, 30 bp, Artificial Sequence
  Synthetic oligonucleotide
aattatactcatagactaatgcatatgcgg

SEQ ID NO: 205810 - DNA, 30 bp, Artificial Sequence
  Synthetic oligonucleotide
accgacacttaatagtctaagaaactgcgg

SEQ ID NO: 205811 - DNA, 30 bp, Artificial Sequence
  Synthetic oligonucleotide
ttctatcgttatcgactgaagggcctgcgg

SEQ ID NO: 205812 - DNA, 30 bp, Artificial Sequence
  Synthetic oligonucleotide
gccgacggtcatacaacttcacggctgcgg

SEQ ID NO: 205813 - DNA, 30 bp, Artificial Sequence
  Synthetic oligonucleotide
acttaccacttcctgagaagagtgctgcgg

SEQ ID NO: 205814 - DNA, 30 bp, Artificial Sequence
  Synthetic oligonucleotide
tttgtgcagagaaaaggtcacgatgtgcgg

SEQ ID NO: 205815 - DNA, 30 bp, Artificial Sequence
  Synthetic oligonucleotide
aatcccacacccgtgataaaatgtgtgcgg

SEQ ID NO: 205816 - DNA, 30 bp, Artificial Sequence
  Synthetic oligonucleotide
cctacgcgaaaggactagatctgattgcgg

SEQ ID NO: 205817 - DNA, 30 bp, Artificial Sequence
  Synthetic oligonucleotide
tacgatgatttagcaatcgtagacttgcgg

SEQ ID NO: 205818 - DNA, 30 bp, Artificial Sequence
  Synthetic oligonucleotide
cagagagctgtgtgggcatctggcttgcgg

SEQ ID NO: 205819 - DNA, 30 bp, Artificial Sequence
  Synthetic oligonucleotide
caatgtcgttagtttcgtaacatgttgcgg

SEQ ID NO: 205820 - DNA, 29 bp, Artificial Sequence
  Synthetic oligonucleotide
ctaggccgttcttcggagtggcaaatcgg

SEQ ID NO: 205821 - DNA, 30 bp, Artificial Sequence
  Synthetic oligonucleotide
atgggacgcaactactattgttgaaatcgg

SEQ ID NO: 205822 - DNA, 30 bp, Artificial Sequence
  Synthetic oligonucleotide
ttgttggcgaactggtgtcgttgcaatcgg

SEQ ID NO: 205823 - DNA, 30 bp, Artificial Sequence
  Synthetic oligonucleotide
ggagaactgattgagttacgcgataatcgg

SEQ ID NO: 205824 - DNA, 30 bp, Artificial Sequence
  Synthetic oligonucleotide
gccaatcagaacctcggtctacgtaatcgg

SEQ ID NO: 205825 - DNA, 30 bp, Artificial Sequence
  Synthetic oligonucleotide
acgatgattatagtaagctaggttaatcgg

SEQ ID NO: 205826 - DNA, 30 bp, Artificial Sequence
  Synthetic oligonucleotide
cggcaaaggcgtcagagatgacgacatcgg

SEQ ID NO: 205827 - DNA, 30 bp, Artificial Sequence
  Synthetic oligonucleotide
attaatctcacagacaaagggcgacatcgg

SEQ ID NO: 205828 - DNA, 30 bp, Artificial Sequence
  Synthetic oligonucleotide
atagggcacgcttctcggactcgacatcgg

SEQ ID NO: 205829 - DNA, 30 bp, Artificial Sequence
  Synthetic oligonucleotide
ggaaacgtgactaataccataatagatcgg

SEQ ID NO: 205830 - DNA, 30 bp, Artificial Sequence
  Synthetic oligonucleotide
gggggggcggaacttgcgatatacgatcgg

SEQ ID NO: 205831 - DNA, 30 bp, Artificial Sequence
  Synthetic oligonucleotide
atcatatcaaactgtagggcctacgatcgg

SEQ ID NO: 205832 - DNA, 30 bp, Artificial Sequence
  Synthetic oligonucleotide
agatggtaactacgcagaggggaggatcgg

SEQ ID NO: 205833 - DNA, 30 bp, Artificial Sequence
  Synthetic oligonucleotide
ttattccaagaatgcccccctagggatcgg

SEQ ID NO: 205834 - DNA, 30 bp, Artificial Sequence
  Synthetic oligonucleotide
ttctgttggcaaagtgagacaactgatcgg

SEQ ID NO: 205835 - DNA, 30 bp, Artificial Sequence
  Synthetic oligonucleotide
tgcgtgctagcgccacccatagttgatcgg

SEQ ID NO: 205836 - DNA, 30 bp, Artificial Sequence
  Synthetic oligonucleotide
ttatggcaccacatggacaatttatatcgg

SEQ ID NO: 205837 - DNA, 30 bp, Artificial Sequence
  Synthetic oligonucleotide
gctttaataggggcgcttctacgctatcgg

SEQ ID NO: 205838 - DNA, 30 bp, Artificial Sequence
  Synthetic oligonucleotide
gtcccctactaccctagcaagatctatcgg

SEQ ID NO: 205839 - DNA, 30 bp, Artificial Sequence
  Synthetic oligonucleotide
ggccccgtttttcatagttatcagtatcgg

SEQ ID NO: 205840 - DNA, 30 bp, Artificial Sequence
  Synthetic oligonucleotide
gacattgtgagggggtacaacgagtatcgg

SEQ ID NO: 205841 - DNA, 31 bp, Artificial Sequence
  Synthetic oligonucleotide
atagattcatccgcgcatctacccgtatcgg

SEQ ID NO: 205842 - DNA, 30 bp, Artificial Sequence
  Synthetic oligonucleotide
ctcaagcctgttttggtgtacttgtatcgg

SEQ ID NO: 205843 - DNA, 30 bp, Artificial Sequence
  Synthetic oligonucleotide
aagtaggaactcatttcacgtggttatcgg

SEQ ID NO: 205844 - DNA, 30 bp, Artificial Sequence
  Synthetic oligonucleotide
attgagatcagccgtcccaccaacactcgg

SEQ ID NO: 205845 - DNA, 30 bp, Artificial Sequence
  Synthetic oligonucleotide
ggtatgtgcgggccttgcaacttcactcgg

SEQ ID NO: 205846 - DNA, 30 bp, Artificial Sequence
  Synthetic oligonucleotide
gaacgagagtcgggtatttacacgactcgg

SEQ ID NO: 205847 - DNA, 30 bp, Artificial Sequence
  Synthetic oligonucleotide
ggtcgcatgcgtaggcacatagggactcgg

SEQ ID NO: 205848 - DNA, 30 bp, Artificial Sequence
  Synthetic oligonucleotide
cgcatttttactgggcaccaccatactcgg

SEQ ID NO: 205849 - DNA, 30 bp, Artificial Sequence
  Synthetic oligonucleotide
tgacacggagtatctcccattgttactcgg

SEQ ID NO: 205850 - DNA, 30 bp, Artificial Sequence
  Synthetic oligonucleotide
ggccagcataaacggcggggactccctcgg

SEQ ID NO: 205851 - DNA, 30 bp, Artificial Sequence
  Synthetic oligonucleotide
ctgagtgcgttggatagcgacttccctcgg

SEQ ID NO: 205852 - DNA, 30 bp, Artificial Sequence
  Synthetic oligonucleotide
cactaatttaatgggctcacacagcctcgg

SEQ ID NO: 205853 - DNA, 30 bp, Artificial Sequence
  Synthetic oligonucleotide
actcatgatccggtaaattgaccgcctcgg

SEQ ID NO: 205854 - DNA, 28 bp, Artificial Sequence
  Synthetic oligonucleotide
aatctaagcacgtccaaaacgtcctcgg

SEQ ID NO: 205855 - DNA, 30 bp, Artificial Sequence
  Synthetic oligonucleotide
ggccagttcatagctccacgccgtgctcgg

SEQ ID NO: 205856 - DNA, 30 bp, Artificial Sequence
  Synthetic oligonucleotide
aagagtatatcgttgtggtcgcgatctcgg

SEQ ID NO: 205857 - DNA, 30 bp, Artificial Sequence
  Synthetic oligonucleotide
catgtgttgggcacgactaaggtctctcgg

SEQ ID NO: 205858 - DNA, 30 bp, Artificial Sequence
  Synthetic oligonucleotide
taaaggaacattctggtatgggagtctcgg

SEQ ID NO: 205859 - DNA, 30 bp, Artificial Sequence
  Synthetic oligonucleotide
atagtgtgggtaattctggtggagtctcgg

SEQ ID NO: 205860 - DNA, 30 bp, Artificial Sequence
  Synthetic oligonucleotide
tctgatgatatagtgaggaaacattctcgg

SEQ ID NO: 205861 - DNA, 30 bp, Artificial Sequence
  Synthetic oligonucleotide
cctgctcaagacaagccatgctattctcgg

SEQ ID NO: 205862 - DNA, 30 bp, Artificial Sequence
  Synthetic oligonucleotide
aagttgttaggcaagataatcgtcagtcgg

SEQ ID NO: 205863 - DNA, 30 bp, Artificial Sequence
  Synthetic oligonucleotide
actttaaggtatctaggagtaaggagtcgg

SEQ ID NO: 205864 - DNA, 30 bp, Artificial Sequence
  Synthetic oligonucleotide
cctgggagcctatgtcctgcggggagtcgg

SEQ ID NO: 205865 - DNA, 30 bp, Artificial Sequence
  Synthetic oligonucleotide
aacagcctgagccgcacatagtggagtcgg

SEQ ID NO: 205866 - DNA, 30 bp, Artificial Sequence
  Synthetic oligonucleotide
aagtatgaagtacctcgatgggatagtcgg

SEQ ID NO: 205867 - DNA, 30 bp, Artificial Sequence
  Synthetic oligonucleotide
ctacactcagcggcctggggggtccgtcgg

SEQ ID NO: 205868 - DNA, 30 bp, Artificial Sequence
  Synthetic oligonucleotide
ggaggagggcctcgatcatttttaggtcgg

SEQ ID NO: 205869 - DNA, 30 bp, Artificial Sequence
  Synthetic oligonucleotide
atgggaccggggtactagaaatacggtcgg

SEQ ID NO: 205870 - DNA, 30 bp, Artificial Sequence
  Synthetic oligonucleotide
gaagggcataggactgttttacgcggtcgg

SEQ ID NO: 205871 - DNA, 30 bp, Artificial Sequence
  Synthetic oligonucleotide
gctgaaagaatctgaaggcgccggggtcgg

SEQ ID NO: 205872 - DNA, 30 bp, Artificial Sequence
  Synthetic oligonucleotide
ttcataaaactctgttattcggggggtcgg

SEQ ID NO: 205873 - DNA, 30 bp, Artificial Sequence
  Synthetic oligonucleotide
ataactgtagactgtaattagtgatgtcgg

SEQ ID NO: 205874 - DNA, 30 bp, Artificial Sequence
  Synthetic oligonucleotide
ccagtatcgtagtgcattatatagtgtcgg

SEQ ID NO: 205875 - DNA, 30 bp, Artificial Sequence
  Synthetic oligonucleotide
tgatgatacgcctacaggatctacattcgg

SEQ ID NO: 205876 - DNA, 30 bp, Artificial Sequence
  Synthetic oligonucleotide
gagaaatacatgcgcaaatgaggcattcgg

SEQ ID NO: 205877 - DNA, 30 bp, Artificial Sequence
  Synthetic oligonucleotide
ttgaaaacgtatcacgttagaaggattcgg

SEQ ID NO: 205878 - DNA, 30 bp, Artificial Sequence
  Synthetic oligonucleotide
caggctccaagcaaacatgggctgattcgg

SEQ ID NO: 205879 - DNA, 30 bp, Artificial Sequence
  Synthetic oligonucleotide
ctgacacccaccctaatataatgtattcgg

SEQ ID NO: 205880 - DNA, 30 bp, Artificial Sequence
  Synthetic oligonucleotide
cgggtgtattcggtaaggaggtcacttcgg

SEQ ID NO: 205881 - DNA, 30 bp, Artificial Sequence
  Synthetic oligonucleotide
ttgggatgcgaggacacctaaccccttcgg

SEQ ID NO: 205882 - DNA, 30 bp, Artificial Sequence
  Synthetic oligonucleotide
aagattatgtataatgtttaatcgcttcgg

SEQ ID NO: 205883 - DNA, 30 bp, Artificial Sequence
  Synthetic oligonucleotide
gcggtaggattggtcttggacctgcttcgg

SEQ ID NO: 205884 - DNA, 30 bp, Artificial Sequence
  Synthetic oligonucleotide
tgagggatgcgctatgtgtagcgtcttcgg

SEQ ID NO: 205885 - DNA, 30 bp, Artificial Sequence
  Synthetic oligonucleotide
ttaaggggtgcaacctcggaatttcttcgg

SEQ ID NO: 205886 - DNA, 30 bp, Artificial Sequence
  Synthetic oligonucleotide
tagggtgtagtgtatttggattgagttcgg

SEQ ID NO: 205887 - DNA, 30 bp, Artificial Sequence
  Synthetic oligonucleotide
tggggagttctgcgctgagagcaatttcgg

SEQ ID NO: 205888 - DNA, 30 bp, Artificial Sequence
  Synthetic oligonucleotide
gaaccgtgacactgtaaaatgtcatttcgg

SEQ ID NO: 205889 - DNA, 30 bp, Artificial Sequence
  Synthetic oligonucleotide
tatgccaccacactcaattagtgctttcgg

SEQ ID NO: 205890 - DNA, 30 bp, Artificial Sequence
  Synthetic oligonucleotide
gcccatgggctatcctgaaaaaagtttcgg

SEQ ID NO: 205891 - DNA, 30 bp, Artificial Sequence
  Synthetic oligonucleotide
gcaatgaaacggtgcaaggcagagtttcgg

SEQ ID NO: 205892 - DNA, 30 bp, Artificial Sequence
  Synthetic oligonucleotide
aaaggggtcgcaagtcgtcgtaattttcgg

SEQ ID NO: 205893 - DNA, 30 bp, Artificial Sequence
  Synthetic oligonucleotide
cgggtaacactgtatagactacacaaaggg

SEQ ID NO: 205894 - DNA, 30 bp, Artificial Sequence
  Synthetic oligonucleotide
agggggtattctgcgcacaccaagaaaggg

SEQ ID NO: 205895 - DNA, 30 bp, Artificial Sequence
  Synthetic oligonucleotide
gtctggcaaacctttagctcacataaaggg

SEQ ID NO: 205896 - DNA, 30 bp, Artificial Sequence
  Synthetic oligonucleotide
aaagcgtgagtgactggcgtgattaaaggg

SEQ ID NO: 205897 - DNA, 30 bp, Artificial Sequence
  Synthetic oligonucleotide
aagtgtcaatggacgtgtccataacaaggg

SEQ ID NO: 205898 - DNA, 30 bp, Artificial Sequence
  Synthetic oligonucleotide
tgagcttgccttgaatcatccgcccaaggg

SEQ ID NO: 205899 - DNA, 30 bp, Artificial Sequence
  Synthetic oligonucleotide
tacgattctaaccattctaatgttcaaggg

SEQ ID NO: 205900 - DNA, 30 bp, Artificial Sequence
  Synthetic oligonucleotide
cgcgagggagctatacgttattcagaaggg

SEQ ID NO: 205901 - DNA, 30 bp, Artificial Sequence
  Synthetic oligonucleotide
catgcgcttttggatctttcccgcgaaggg

SEQ ID NO: 205902 - DNA, 30 bp, Artificial Sequence
  Synthetic oligonucleotide
ggagggagccccgctaaaggcggcgaaggg

SEQ ID NO: 205903 - DNA, 30 bp, Artificial Sequence
  Synthetic oligonucleotide
tatgtgtaccgtgtcgcgtcgatggaaggg

SEQ ID NO: 205904 - DNA, 30 bp, Artificial Sequence
  Synthetic oligonucleotide
gttccaatatacctatggaaggctgaaggg

SEQ ID NO: 205905 - DNA, 30 bp, Artificial Sequence
  Synthetic oligonucleotide
agcttacaatggaatagttaacactaaggg

SEQ ID NO: 205906 - DNA, 30 bp, Artificial Sequence
  Synthetic oligonucleotide
cccgggtggcccgtagatgatctgtaaggg

SEQ ID NO: 205907 - DNA, 30 bp, Artificial Sequence
  Synthetic oligonucleotide
cacaccctaactgcatagagttattaaggg

SEQ ID NO: 205908 - DNA, 30 bp, Artificial Sequence
  Synthetic oligonucleotide
attatcaacgcataatctgaattttaaggg

SEQ ID NO: 205909 - DNA, 30 bp, Artificial Sequence
  Synthetic oligonucleotide
ctgattaggtggcagtttataagaacaggg

SEQ ID NO: 205910 - DNA, 30 bp, Artificial Sequence
  Synthetic oligonucleotide
ctataatgactcgggggcgctaatacaggg

SEQ ID NO: 205911 - DNA, 30 bp, Artificial Sequence
  Synthetic oligonucleotide
gcagaaattctagtttccggtcatacaggg

SEQ ID NO: 205912 - DNA, 30 bp, Artificial Sequence
  Synthetic oligonucleotide
ccgtagtgacaagcgagcacgtaaccaggg

SEQ ID NO: 205913 - DNA, 30 bp, Artificial Sequence
  Synthetic oligonucleotide
ttagtctataacgattattacggaccaggg

SEQ ID NO: 205914 - DNA, 30 bp, Artificial Sequence
  Synthetic oligonucleotide
tctgaggacggggcggttcttatcccaggg

SEQ ID NO: 205915 - DNA, 30 bp, Artificial Sequence
  Synthetic oligonucleotide
tttgctcgagagtaaaccttaaatccaggg

SEQ ID NO: 205916 - DNA, 30 bp, Artificial Sequence
  Synthetic oligonucleotide
cacgtccagtaatctgcaccataagcaggg

SEQ ID NO: 205917 - DNA, 30 bp, Artificial Sequence
  Synthetic oligonucleotide
ccgaattacgaggctttggtttaggcaggg

SEQ ID NO: 205918 - DNA, 30 bp, Artificial Sequence
  Synthetic oligonucleotide
ggaagaccaggatggtttataggggcaggg

SEQ ID NO: 205919 - DNA, 30 bp, Artificial Sequence
  Synthetic oligonucleotide
agttgctatgcagctataattggggcaggg

SEQ ID NO: 205920 - DNA, 30 bp, Artificial Sequence
  Synthetic oligonucleotide
ctatacacatgggctggagggattgcaggg

SEQ ID NO: 205921 - DNA, 30 bp, Artificial Sequence
  Synthetic oligonucleotide
aaagagccggcttggacaggtatatcaggg

SEQ ID NO: 205922 - DNA, 30 bp, Artificial Sequence
  Synthetic oligonucleotide
cagttaacccggtattacaacctgtcaggg

SEQ ID NO: 205923 - DNA, 30 bp, Artificial Sequence
  Synthetic oligonucleotide
gaacctcggttcgaagttaaaaaaagaggg

SEQ ID NO: 205924 - DNA, 30 bp, Artificial Sequence
  Synthetic oligonucleotide
ataacacgttctcgggcaatccaaagaggg

SEQ ID NO: 205925 - DNA, 30 bp, Artificial Sequence
  Synthetic oligonucleotide
gggagagtggaagaccgaaggtcaagaggg

SEQ ID NO: 205926 - DNA, 30 bp, Artificial Sequence
  Synthetic oligonucleotide
agcaagtccgctctttcatttataagaggg

SEQ ID NO: 205927 - DNA, 30 bp, Artificial Sequence
  Synthetic oligonucleotide
attgaagagagagtcaaagagcacagaggg

SEQ ID NO: 205928 - DNA, 30 bp, Artificial Sequence
  Synthetic oligonucleotide
ctgatcgaacagacgagcgcttacagaggg

SEQ ID NO: 205929 - DNA, 30 bp, Artificial Sequence
  Synthetic oligonucleotide
ggacttgcaacagttatgcccaccagaggg

SEQ ID NO: 205930 - DNA, 30 bp, Artificial Sequence
  Synthetic oligonucleotide
gattgctgaagttgttggtaaggcagaggg

SEQ ID NO: 205931 - DNA, 30 bp, Artificial Sequence
  Synthetic oligonucleotide
cgcgtgctttggaaaggttttccgagaggg

SEQ ID NO: 205932 - DNA, 30 bp, Artificial Sequence
  Synthetic oligonucleotide
tgcaatacgcactgtccttaccggagaggg

SEQ ID NO: 205933 - DNA, 30 bp, Artificial Sequence
  Synthetic oligonucleotide
ttcctgaggacttggcggccttatagaggg

SEQ ID NO: 205934 - DNA, 30 bp, Artificial Sequence
  Synthetic oligonucleotide
gatagtccttggtgagcgtttcgtagaggg

SEQ ID NO: 205935 - DNA, 30 bp, Artificial Sequence
  Synthetic oligonucleotide
aatactactaggtaaacgagctttagaggg

SEQ ID NO: 205936 - DNA, 30 bp, Artificial Sequence
  Synthetic oligonucleotide
tctctaaacctaaccgtcaaaaaacgaggg

SEQ ID NO: 205937 - DNA, 30 bp, Artificial Sequence
  Synthetic oligonucleotide
cactaaggggcctacgtcacactacgaggg

SEQ ID NO: 205938 - DNA, 30 bp, Artificial Sequence
  Synthetic oligonucleotide
aagtgggatcgggcgtgactactacgaggg

SEQ ID NO: 205939 - DNA, 30 bp, Artificial Sequence
  Synthetic oligonucleotide
taatactccataacaaaattgccccgaggg

SEQ ID NO: 205940 - DNA, 30 bp, Artificial Sequence
  Synthetic oligonucleotide
ggatccaacaaccccgggaaggggcgaggg

SEQ ID NO: 205941 - DNA, 30 bp, Artificial Sequence
  Synthetic oligonucleotide
gaacgacgcgggtttatcttttaaggaggg

SEQ ID NO: 205942 - DNA, 30 bp, Artificial Sequence
  Synthetic oligonucleotide
caggatcgcgcgtaaaatgccgacggaggg

SEQ ID NO: 205943 - DNA, 30 bp, Artificial Sequence
  Synthetic oligonucleotide
ggcgtatcaggtaagcactgggccggaggg

SEQ ID NO: 205944 - DNA, 30 bp, Artificial Sequence
  Synthetic oligonucleotide
ttgaagggctagtaaacattcttgggaggg

SEQ ID NO: 205945 - DNA, 30 bp, Artificial Sequence
  Synthetic oligonucleotide
cgcgcacaatcggactccagagttggaggg

SEQ ID NO: 205946 - DNA, 30 bp, Artificial Sequence
  Synthetic oligonucleotide
caatgctaatgagccgcgcccacgtgaggg

SEQ ID NO: 205947 - DNA, 30 bp, Artificial Sequence
  Synthetic oligonucleotide
cgtgtaaatagcacacactcaatttgaggg

SEQ ID NO: 205948 - DNA, 31 bp, Artificial Sequence
  Synthetic oligonucleotide
ttcagatgagctgttaacactttaaataggg

SEQ ID NO: 205949 - DNA, 30 bp, Artificial Sequence
  Synthetic oligonucleotide
tagtgccggtcaggaggtgaatcaataggg

SEQ ID NO: 205950 - DNA, 30 bp, Artificial Sequence
  Synthetic oligonucleotide
ctggtagcacgttaaggtataggcataggg

SEQ ID NO: 205951 - DNA, 30 bp, Artificial Sequence
  Synthetic oligonucleotide
ggtgaatagcgatgcgcaaaagagataggg

SEQ ID NO: 205952 - DNA, 30 bp, Artificial Sequence
  Synthetic oligonucleotide
aagcttgcgcgattgggtcgtgagataggg

SEQ ID NO: 205953 - DNA, 30 bp, Artificial Sequence
  Synthetic oligonucleotide
aacgctgacgcatgggttagcctgataggg

SEQ ID NO: 205954 - DNA, 30 bp, Artificial Sequence
  Synthetic oligonucleotide
aaccacaagtggaaatatgtccgtataggg

SEQ ID NO: 205955 - DNA, 30 bp, Artificial Sequence
  Synthetic oligonucleotide
gggtccgggagcgtatgcgggtccctaggg

SEQ ID NO: 205956 - DNA, 30 bp, Artificial Sequence
  Synthetic oligonucleotide
gattgaatgtatatctggactgagctaggg

SEQ ID NO: 205957 - DNA, 30 bp, Artificial Sequence
  Synthetic oligonucleotide
tagggtctcgggattcgttagatagtaggg

SEQ ID NO: 205958 - DNA, 30 bp, Artificial Sequence
  Synthetic oligonucleotide
taaagcgttgggttgaatgcggtagtaggg

SEQ ID NO: 205959 - DNA, 30 bp, Artificial Sequence
  Synthetic oligonucleotide
cccatgcgagttgtgcatatatgcgtaggg

SEQ ID NO: 205960 - DNA, 30 bp, Artificial Sequence
  Synthetic oligonucleotide
aaggggggttgcttcctcctcatcgtaggg

SEQ ID NO: 205961 - DNA, 30 bp, Artificial Sequence
  Synthetic oligonucleotide
atgggccgctactaagtgcttcgggtaggg

SEQ ID NO: 205962 - DNA, 30 bp, Artificial Sequence
  Synthetic oligonucleotide
tgagcgttgctcttatagaaacatgtaggg

SEQ ID NO: 205963 - DNA, 30 bp, Artificial Sequence
  Synthetic oligonucleotide
gaagttttggtccagggggcgtctgtaggg

SEQ ID NO: 205964 - DNA, 30 bp, Artificial Sequence
  Synthetic oligonucleotide
ttttcatttcgccagtgatctcggttaggg

SEQ ID NO: 205965 - DNA, 30 bp, Artificial Sequence
  Synthetic oligonucleotide
cgagttctggattgttggacagaaaacggg

SEQ ID NO: 205966 - DNA, 30 bp, Artificial Sequence
  Synthetic oligonucleotide
ttgactcgaggccgggggtacaacaacggg

SEQ ID NO: 205967 - DNA, 30 bp, Artificial Sequence
  Synthetic oligonucleotide
gaaaatcaatggttgtcgaagaacaacggg

SEQ ID NO: 205968 - DNA, 30 bp, Artificial Sequence
  Synthetic oligonucleotide
actcttaggggatacctcggcgacaacggg

SEQ ID NO: 205969 - DNA, 30 bp, Artificial Sequence
  Synthetic oligonucleotide
ttcgtaattccgctatgtctgtcgaacggg

SEQ ID NO: 205970 - DNA, 30 bp, Artificial Sequence
  Synthetic oligonucleotide
aatagaagtggactagacacatggaacggg

SEQ ID NO: 205971 - DNA, 30 bp, Artificial Sequence
  Synthetic oligonucleotide
ctctgcatgacgggatttgggtataacggg

SEQ ID NO: 205972 - DNA, 30 bp, Artificial Sequence
  Synthetic oligonucleotide
attggacaaactcatccccatagacacggg

SEQ ID NO: 205973 - DNA, 30 bp, Artificial Sequence
  Synthetic oligonucleotide
aacctgacagatcggtagggtatccacggg

SEQ ID NO: 205974 - DNA, 30 bp, Artificial Sequence
  Synthetic oligonucleotide
tgcctgtagaaggcgtgttggaagcacggg

SEQ ID NO: 205975 - DNA, 30 bp, Artificial Sequence
  Synthetic oligonucleotide
aagaactgaccataagggaagctagacggg

SEQ ID NO: 205976 - DNA, 30 bp, Artificial Sequence
  Synthetic oligonucleotide
gaaagtcgagctagagcccggatcgacggg

SEQ ID NO: 205977 - DNA, 30 bp, Artificial Sequence
  Synthetic oligonucleotide
cagcgaacggcgctccaagctttggacggg

SEQ ID NO: 205978 - DNA, 30 bp, Artificial Sequence
  Synthetic oligonucleotide
tcaacgggttagtcgacttcgcaaaccggg

SEQ ID NO: 205979 - DNA, 30 bp, Artificial Sequence
  Synthetic oligonucleotide
ggttatggcactctattggcggtaaccggg

SEQ ID NO: 205980 - DNA, 30 bp, Artificial Sequence
  Synthetic oligonucleotide
ggtcagccacgctccagtcttctcaccggg

SEQ ID NO: 205981 - DNA, 31 bp, Artificial Sequence
  Synthetic oligonucleotide
gagtggccggaaatgagctgcgtcgaccggg

SEQ ID NO: 205982 - DNA, 30 bp, Artificial Sequence
  Synthetic oligonucleotide
aagtacgtttacaccggcagataacccggg

SEQ ID NO: 205983 - DNA, 30 bp, Artificial Sequence
  Synthetic oligonucleotide
ggtttgagttagttcggcgtggagcccggg

SEQ ID NO: 205984 - DNA, 30 bp, Artificial Sequence
  Synthetic oligonucleotide
gactaggcatttgctgaacgctgggccggg

SEQ ID NO: 205985 - DNA, 30 bp, Artificial Sequence
  Synthetic oligonucleotide
atgtgtaccaggggccgtgatcatgccggg

SEQ ID NO: 205986 - DNA, 30 bp, Artificial Sequence
  Synthetic oligonucleotide
ttccacttgtggacgcggataattgccggg

SEQ ID NO: 205987 - DNA, 30 bp, Artificial Sequence
  Synthetic oligonucleotide
cgtgagccaataagatttgtcgttgccggg

SEQ ID NO: 205988 - DNA, 30 bp, Artificial Sequence
  Synthetic oligonucleotide
gtacacctctgttcactggcactctccggg

SEQ ID NO: 205989 - DNA, 30 bp, Artificial Sequence
  Synthetic oligonucleotide
aggcacgggaccgttggggatctctccggg

SEQ ID NO: 205990 - DNA, 30 bp, Artificial Sequence
  Synthetic oligonucleotide
ttatgtcaggtcctgggccctacgtccggg

SEQ ID NO: 205991 - DNA, 30 bp, Artificial Sequence
  Synthetic oligonucleotide
atatatgagagtctagctaacgattccggg

SEQ ID NO: 205992 - DNA, 30 bp, Artificial Sequence
  Synthetic oligonucleotide
ttactatcgggggcatgtagaacttccggg

SEQ ID NO: 205993 - DNA, 30 bp, Artificial Sequence
  Synthetic oligonucleotide
cgaatctggtcgccgaactggagttccggg

SEQ ID NO: 205994 - DNA, 30 bp, Artificial Sequence
  Synthetic oligonucleotide
gtagtgctaaaaataatactcttttccggg

SEQ ID NO: 205995 - DNA, 30 bp, Artificial Sequence
  Synthetic oligonucleotide
aaatgtggtagctctccaatcggaagcggg

SEQ ID NO: 205996 - DNA, 30 bp, Artificial Sequence
  Synthetic oligonucleotide
gccaagcgatctcctcctaggtagagcggg

SEQ ID NO: 205997 - DNA, 30 bp, Artificial Sequence
  Synthetic oligonucleotide
tgtactactaatgggtttggaaatagcggg

SEQ ID NO: 205998 - DNA, 30 bp, Artificial Sequence
  Synthetic oligonucleotide
aatcgaccttagaataaggtataccgcggg

SEQ ID NO: 205999 - DNA, 30 bp, Artificial Sequence
  Synthetic oligonucleotide
taggcttcagttcagcgaagagttcgcggg

SEQ ID NO: 206000 - DNA, 30 bp, Artificial Sequence
  Synthetic oligonucleotide
cgtaagggcactggccagaaagcaggcggg

SEQ ID NO: 206001 - DNA, 30 bp, Artificial Sequence
  Synthetic oligonucleotide
atggatcacaggaatgtgcttcgaggcggg

SEQ ID NO: 206002 - DNA, 30 bp, Artificial Sequence
  Synthetic oligonucleotide
taaaggatccagcagtctccagtgggcggg

SEQ ID NO: 206003 - DNA, 30 bp, Artificial Sequence
  Synthetic oligonucleotide
ttgcatcggcatgaattgccaagtggcggg

SEQ ID NO: 206004 - DNA, 30 bp, Artificial Sequence
  Synthetic oligonucleotide
ccctagttatgataagaggcgcaatgcggg

SEQ ID NO: 206005 - DNA, 30 bp, Artificial Sequence
  Synthetic oligonucleotide
aacgcgggcctagtaacgaattaatgcggg

SEQ ID NO: 206006 - DNA, 31 bp, Artificial Sequence
  Synthetic oligonucleotide
tcacgagtcgttcgttgaatataagtgcggg

SEQ ID NO: 206007 - DNA, 30 bp, Artificial Sequence
  Synthetic oligonucleotide
cagagaccccagcggacaaaaggttgcggg

SEQ ID NO: 206008 - DNA, 30 bp, Artificial Sequence
  Synthetic oligonucleotide
gaggttgtgtcgcagtggacgtgttgcggg

SEQ ID NO: 206009 - DNA, 30 bp, Artificial Sequence
  Synthetic oligonucleotide
gaaagcctaacgtgcagagagatttgcggg

SEQ ID NO: 206010 - DNA, 30 bp, Artificial Sequence
  Synthetic oligonucleotide
cagcaagtcgcgttgtggtacggaatcggg

SEQ ID NO: 206011 - DNA, 30 bp, Artificial Sequence
  Synthetic oligonucleotide
ggaacggtctaaccccccttgcggatcggg

SEQ ID NO: 206012 - DNA, 30 bp, Artificial Sequence
  Synthetic oligonucleotide
cacgttggttagaactttcccctgatcggg

SEQ ID NO: 206013 - DNA, 30 bp, Artificial Sequence
  Synthetic oligonucleotide
tacactacatgtagatgggtgatgctcggg

SEQ ID NO: 206014 - DNA, 30 bp, Artificial Sequence
  Synthetic oligonucleotide
gtctagtatgcaattagaccgatagtcggg

SEQ ID NO: 206015 - DNA, 30 bp, Artificial Sequence
  Synthetic oligonucleotide
aaataactccattcatgggataaggtcggg

SEQ ID NO: 206016 - DNA, 30 bp, Artificial Sequence
  Synthetic oligonucleotide
agttgcctccccgatgttaacagggtcggg

SEQ ID NO: 206017 - DNA, 30 bp, Artificial Sequence
  Synthetic oligonucleotide
caaatgtggtcgtaacggtcgtgggtcggg

SEQ ID NO: 206018 - DNA, 30 bp, Artificial Sequence
  Synthetic oligonucleotide
tagcaagaatccccacaactggttgtcggg

SEQ ID NO: 206019 - DNA, 30 bp, Artificial Sequence
  Synthetic oligonucleotide
acaacgagcgttcattcgttgttcttcggg

SEQ ID NO: 206020 - DNA, 30 bp, Artificial Sequence
  Synthetic oligonucleotide
ctcccgaagcgcgatcagacagggttcggg

SEQ ID NO: 206021 - DNA, 30 bp, Artificial Sequence
  Synthetic oligonucleotide
cggtgctgctctcgagagccgggtttcggg

SEQ ID NO: 206022 - DNA, 30 bp, Artificial Sequence
  Synthetic oligonucleotide
gtgatatgcgttaagtttcttgacaagggg

SEQ ID NO: 206023 - DNA, 30 bp, Artificial Sequence
  Synthetic oligonucleotide
atcgttgacacaccgctagggaagaagggg

SEQ ID NO: 206024 - DNA, 30 bp, Artificial Sequence
  Synthetic oligonucleotide
aatagaccgggtgagggagagacgaagggg

SEQ ID NO: 206025 - DNA, 30 bp, Artificial Sequence
  Synthetic oligonucleotide
gtacacactatcagcagatcaactaagggg

SEQ ID NO: 206026 - DNA, 30 bp, Artificial Sequence
  Synthetic oligonucleotide
gctttgcgagccttaggggtctgtaagggg

SEQ ID NO: 206027 - DNA, 30 bp, Artificial Sequence
  Synthetic oligonucleotide
acagtgcggtcgcctgtttcattagagggg

SEQ ID NO: 206028 - DNA, 29 bp, Artificial Sequence
  Synthetic oligonucleotide
tcgtttgaaatcgatgatagaacgagggg

SEQ ID NO: 206029 - DNA, 30 bp, Artificial Sequence
  Synthetic oligonucleotide
ccaggaagctgtcgtctcttcatcgagggg

SEQ ID NO: 206030 - DNA, 30 bp, Artificial Sequence
  Synthetic oligonucleotide
gaaaagggtggaggatcgtcgcaggagggg

SEQ ID NO: 206031 - DNA, 30 bp, Artificial Sequence
  Synthetic oligonucleotide
ttatccaggcaagctggcggtcgggagggg

SEQ ID NO: 206032 - DNA, 30 bp, Artificial Sequence
  Synthetic oligonucleotide
gccgaaccgctaagatctatcgaatagggg

SEQ ID NO: 206033 - DNA, 30 bp, Artificial Sequence
  Synthetic oligonucleotide
cttggtgctaataccggatggggatagggg

SEQ ID NO: 206034 - DNA, 30 bp, Artificial Sequence
  Synthetic oligonucleotide
cgcagtgttcgcttggtaggtctatagggg

SEQ ID NO: 206035 - DNA, 30 bp, Artificial Sequence
  Synthetic oligonucleotide
cgatacttccaatcccttaaggtatagggg

SEQ ID NO: 206036 - DNA, 30 bp, Artificial Sequence
  Synthetic oligonucleotide
tccacggatggtaaggccatttactagggg

SEQ ID NO: 206037 - DNA, 30 bp, Artificial Sequence
  Synthetic oligonucleotide
taattaattcagcgtcgtatacgctagggg

SEQ ID NO: 206038 - DNA, 30 bp, Artificial Sequence
  Synthetic oligonucleotide
tcggcgtcaattccactagaatgctagggg

SEQ ID NO: 206039 - DNA, 30 bp, Artificial Sequence
  Synthetic oligonucleotide
gcccgattgtaactacccccagaaacgggg

SEQ ID NO: 206040 - DNA, 30 bp, Artificial Sequence
  Synthetic oligonucleotide
acacagcgtccatcgaaggaggagacgggg

SEQ ID NO: 206041 - DNA, 30 bp, Artificial Sequence
  Synthetic oligonucleotide
aagcacggagtctaacttcgaaggacgggg

SEQ ID NO: 206042 - DNA, 30 bp, Artificial Sequence
  Synthetic oligonucleotide
acgttgacttatcctattttgagtacgggg

SEQ ID NO: 206043 - DNA, 30 bp, Artificial Sequence
  Synthetic oligonucleotide
gaagaaaatccatacatttgtagtacgggg

SEQ ID NO: 206044 - DNA, 30 bp, Artificial Sequence
  Synthetic oligonucleotide
aggatgggcatagtctaatggtgaccgggg

SEQ ID NO: 206045 - DNA, 30 bp, Artificial Sequence
  Synthetic oligonucleotide
cggcttgttggactaagtggcgagccgggg

SEQ ID NO: 206046 - DNA, 30 bp, Artificial Sequence
  Synthetic oligonucleotide
gcggaggatctaggggaataatagccgggg

SEQ ID NO: 206047 - DNA, 30 bp, Artificial Sequence
  Synthetic oligonucleotide
aagcggtattaaattacgaccacgccgggg

SEQ ID NO: 206048 - DNA, 30 bp, Artificial Sequence
  Synthetic oligonucleotide
gtgaatacgtcactaatcggggatccgggg

SEQ ID NO: 206049 - DNA, 30 bp, Artificial Sequence
  Synthetic oligonucleotide
ccgaatccgattggtgtgcaagctccgggg

SEQ ID NO: 206050 - DNA, 30 bp, Artificial Sequence
  Synthetic oligonucleotide
atcgtcggctcgaacagtgcagctccgggg

SEQ ID NO: 206051 - DNA, 30 bp, Artificial Sequence
  Synthetic oligonucleotide
tcagccgcggtgatcgtccgttttccgggg

SEQ ID NO: 206052 - DNA, 30 bp, Artificial Sequence
  Synthetic oligonucleotide
ggtccctgagggataactctcaaagcgggg

SEQ ID NO: 206053 - DNA, 30 bp, Artificial Sequence
  Synthetic oligonucleotide
gctggaagagtactgtctatattagcgggg

SEQ ID NO: 206054 - DNA, 30 bp, Artificial Sequence
  Synthetic oligonucleotide
ggcatccctgtagttgaaaattaggcgggg

SEQ ID NO: 206055 - DNA, 30 bp, Artificial Sequence
  Synthetic oligonucleotide
taaacatggaattacactatttcggcgggg

SEQ ID NO: 206056 - DNA, 30 bp, Artificial Sequence
  Synthetic oligonucleotide
tcgaatatgtacgtttgatagaatgcgggg

SEQ ID NO: 206057 - DNA, 30 bp, Artificial Sequence
  Synthetic oligonucleotide
cgggaagaaagaggggctggtccatcgggg

SEQ ID NO: 206058 - DNA, 30 bp, Artificial Sequence
  Synthetic oligonucleotide
ttatgatctgtatgacatcctatatcgggg

SEQ ID NO: 206059 - DNA, 30 bp, Artificial Sequence
  Synthetic oligonucleotide
ggacgcgagtcgatatttacactatcgggg

SEQ ID NO: 206060 - DNA, 30 bp, Artificial Sequence
  Synthetic oligonucleotide
cttgcgcagccggatcaacaaccctcgggg

SEQ ID NO: 206061 - DNA, 30 bp, Artificial Sequence
  Synthetic oligonucleotide
acgcattcagagcgccaactttcgtcgggg

SEQ ID NO: 206062 - DNA, 30 bp, Artificial Sequence
  Synthetic oligonucleotide
cagccgatcacagccggcgactgaaggggg

SEQ ID NO: 206063 - DNA, 30 bp, Artificial Sequence
  Synthetic oligonucleotide
tttatacggtgtcacagaacggtcaggggg

SEQ ID NO: 206064 - DNA, 30 bp, Artificial Sequence
  Synthetic oligonucleotide
tgtcggtctatacttgaaagaaataggggg

SEQ ID NO: 206065 - DNA, 30 bp, Artificial Sequence
  Synthetic oligonucleotide
cgccagattgggcgatgtgtgactaggggg

SEQ ID NO: 206066 - DNA, 30 bp, Artificial Sequence
  Synthetic oligonucleotide
acctgttgttggtcctctaatgctaggggg

SEQ ID NO: 206067 - DNA, 30 bp, Artificial Sequence
  Synthetic oligonucleotide
acctccggctagtgtgtcgcaagtaggggg

SEQ ID NO: 206068 - DNA, 30 bp, Artificial Sequence
  Synthetic oligonucleotide
taccgctacggctgcacgaacattaggggg

SEQ ID NO: 206069 - DNA, 30 bp, Artificial Sequence
  Synthetic oligonucleotide
gttagaacgtgtcaactatatattaggggg

SEQ ID NO: 206070 - DNA, 30 bp, Artificial Sequence
  Synthetic oligonucleotide
tgaaggttgagacaacttacctcacggggg

SEQ ID NO: 206071 - DNA, 30 bp, Artificial Sequence
  Synthetic oligonucleotide
aactcaaatcggcgtagggaaggacggggg

SEQ ID NO: 206072 - DNA, 30 bp, Artificial Sequence
  Synthetic oligonucleotide
aatttgggtcacaagactattaagcggggg

SEQ ID NO: 206073 - DNA, 30 bp, Artificial Sequence
  Synthetic oligonucleotide
ggaaaatatgggtttttagggctgcggggg

SEQ ID NO: 206074 - DNA, 30 bp, Artificial Sequence
  Synthetic oligonucleotide
ggggaacctgtagggacctaatttcggggg

SEQ ID NO: 206075 - DNA, 30 bp, Artificial Sequence
  Synthetic oligonucleotide
taaggggggtcgaagtccgtgctagggggg

SEQ ID NO: 206076 - DNA, 30 bp, Artificial Sequence
  Synthetic oligonucleotide
cacatggccaggacgcgagggagggggggg

SEQ ID NO: 206077 - DNA, 30 bp, Artificial Sequence
  Synthetic oligonucleotide
tgacggtttccgcggtgtttgccctggggg

SEQ ID NO: 206078 - DNA, 30 bp, Artificial Sequence
  Synthetic oligonucleotide
ctaacggtccactcacactgtgtgtggggg

SEQ ID NO: 206079 - DNA, 30 bp, Artificial Sequence
  Synthetic oligonucleotide
ctcgggaaggtcgctggtttccctatgggg

SEQ ID NO: 206080 - DNA, 30 bp, Artificial Sequence
  Synthetic oligonucleotide
acattccgactatgcagttgagttatgggg

SEQ ID NO: 206081 - DNA, 30 bp, Artificial Sequence
  Synthetic oligonucleotide
tcaaacgcgatgaaggatgcatgactgggg

SEQ ID NO: 206082 - DNA, 30 bp, Artificial Sequence
  Synthetic oligonucleotide
cgattgcttgccaacaccagggtactgggg

SEQ ID NO: 206083 - DNA, 30 bp, Artificial Sequence
  Synthetic oligonucleotide
tttgtcagtggtctcggcgattacctgggg

SEQ ID NO: 206084 - DNA, 30 bp, Artificial Sequence
  Synthetic oligonucleotide
gtgtcggtctcattcctgtggtgcctgggg

SEQ ID NO: 206085 - DNA, 30 bp, Artificial Sequence
  Synthetic oligonucleotide
cctaatctgtcaaacgccaggcaagtgggg

SEQ ID NO: 206086 - DNA, 30 bp, Artificial Sequence
  Synthetic oligonucleotide
acagactcacctacaactcgagcagtgggg

SEQ ID NO: 206087 - DNA, 30 bp, Artificial Sequence
  Synthetic oligonucleotide
cgctttcccggtgtaccagcggtagtgggg

SEQ ID NO: 206088 - DNA, 30 bp, Artificial Sequence
  Synthetic oligonucleotide
agcggactgtgtgctctacgagacgtgggg

SEQ ID NO: 206089 - DNA, 30 bp, Artificial Sequence
  Synthetic oligonucleotide
ttaagggattccagtctcaaccatgtgggg

SEQ ID NO: 206090 - DNA, 30 bp, Artificial Sequence
  Synthetic oligonucleotide
gcggtttcatcgatcgtgaggcgattgggg

SEQ ID NO: 206091 - DNA, 29 bp, Artificial Sequence
  Synthetic oligonucleotide
ccctagcccttaaggcgcgagtcttgggg

SEQ ID NO: 206092 - DNA, 30 bp, Artificial Sequence
  Synthetic oligonucleotide
tgtaattgctaatatgtcgacgtcttgggg

SEQ ID NO: 206093 - DNA, 30 bp, Artificial Sequence
  Synthetic oligonucleotide
aaagggagaccaagagggagaccgttgggg

SEQ ID NO: 206094 - DNA, 30 bp, Artificial Sequence
  Synthetic oligonucleotide
ccatcgcgaaggattccttcccctttgggg

SEQ ID NO: 206095 - DNA, 30 bp, Artificial Sequence
  Synthetic oligonucleotide
ccgacggccgcgttcaattatgctttgggg

SEQ ID NO: 206096 - DNA, 30 bp, Artificial Sequence
  Synthetic oligonucleotide
acctgtaattgggaccgtcattctttgggg

SEQ ID NO: 206097 - DNA, 30 bp, Artificial Sequence
  Synthetic oligonucleotide
tagttcttcgtcgggtaagttccaaatggg

SEQ ID NO: 206098 - DNA, 30 bp, Artificial Sequence
  Synthetic oligonucleotide
tggatggacaggagggcaacgggaaatggg

SEQ ID NO: 206099 - DNA, 30 bp, Artificial Sequence
  Synthetic oligonucleotide
tacgggcgaatatgtcaccttttaaatggg

SEQ ID NO: 206100 - DNA, 30 bp, Artificial Sequence
  Synthetic oligonucleotide
cgaccgcactggaaccaatttacgaatggg

SEQ ID NO: 206101 - DNA, 30 bp, Artificial Sequence
  Synthetic oligonucleotide
cctcgatgcggaatagttttagcgaatggg

SEQ ID NO: 206102 - DNA, 30 bp, Artificial Sequence
  Synthetic oligonucleotide
aaacctatcaacatgataggcgaccatggg

SEQ ID NO: 206103 - DNA, 30 bp, Artificial Sequence
  Synthetic oligonucleotide
ttccccagatagtagaactcgctccatggg

SEQ ID NO: 206104 - DNA, 30 bp, Artificial Sequence
  Synthetic oligonucleotide
tctggtcttattagctcgcggtagcatggg

SEQ ID NO: 206105 - DNA, 30 bp, Artificial Sequence
  Synthetic oligonucleotide
ctagactgatcacatggggaaagtcatggg

SEQ ID NO: 206106 - DNA, 30 bp, Artificial Sequence
  Synthetic oligonucleotide
atagccacagctaagtgagaagttcatggg

SEQ ID NO: 206107 - DNA, 30 bp, Artificial Sequence
  Synthetic oligonucleotide
gaatgcctagtactgaaggccacagatggg

SEQ ID NO: 206108 - DNA, 30 bp, Artificial Sequence
  Synthetic oligonucleotide
agttcgaccttcaagccagattcagatggg

SEQ ID NO: 206109 - DNA, 30 bp, Artificial Sequence
  Synthetic oligonucleotide
gcacggagtagagcgccgctaagagatggg

SEQ ID NO: 206110 - DNA, 30 bp, Artificial Sequence
  Synthetic oligonucleotide
agctagtttttataaccacgcatagatggg

SEQ ID NO: 206111 - DNA, 30 bp, Artificial Sequence
  Synthetic oligonucleotide
ccagggatctcgaggtattaattagatggg

SEQ ID NO: 206112 - DNA, 30 bp, Artificial Sequence
  Synthetic oligonucleotide
cggggttcgagactaagtcacgtcgatggg

SEQ ID NO: 206113 - DNA, 30 bp, Artificial Sequence
  Synthetic oligonucleotide
gcgtcaggagggttctagtctagggatggg

SEQ ID NO: 206114 - DNA, 30 bp, Artificial Sequence
  Synthetic oligonucleotide
ggttgaacttgggttaccgaccctgatggg

SEQ ID NO: 206115 - DNA, 30 bp, Artificial Sequence
  Synthetic oligonucleotide
gtgagtgtgccggtgtataaataatatggg

SEQ ID NO: 206116 - DNA, 30 bp, Artificial Sequence
  Synthetic oligonucleotide
agagggatagatattgcaggtagatatggg

SEQ ID NO: 206117 - DNA, 30 bp, Artificial Sequence
  Synthetic oligonucleotide
ctctgatgtcgaaaagggaaaggatatggg

SEQ ID NO: 206118 - DNA, 30 bp, Artificial Sequence
  Synthetic oligonucleotide
gagcataaccgttgtattggtctgtatggg

SEQ ID NO: 206119 - DNA, 30 bp, Artificial Sequence
  Synthetic oligonucleotide
cacgctttctggttgcgaccggcttatggg

SEQ ID NO: 206120 - DNA, 30 bp, Artificial Sequence
  Synthetic oligonucleotide
agagcctacgtagaacagtagcaaactggg

SEQ ID NO: 206121 - DNA, 30 bp, Artificial Sequence
  Synthetic oligonucleotide
ggccgttgtgtctgctccttcgtaactggg

SEQ ID NO: 206122 - DNA, 30 bp, Artificial Sequence
  Synthetic oligonucleotide
gttgattcatacttagcttccttaactggg

SEQ ID NO: 206123 - DNA, 30 bp, Artificial Sequence
  Synthetic oligonucleotide
ctagtacgagttgtcgactgcttaactggg

SEQ ID NO: 206124 - DNA, 30 bp, Artificial Sequence
  Synthetic oligonucleotide
cggtcaatgggataagtgtaggtcactggg

SEQ ID NO: 206125 - DNA, 30 bp, Artificial Sequence
  Synthetic oligonucleotide
ctataatagggctaagggtgcatgactggg

SEQ ID NO: 206126 - DNA, 30 bp, Artificial Sequence
  Synthetic oligonucleotide
aagatcctgtccaagtcggggacacctggg

SEQ ID NO: 206127 - DNA, 30 bp, Artificial Sequence
  Synthetic oligonucleotide
agatacagatgatagggtcgctgacctggg

SEQ ID NO: 206128 - DNA, 30 bp, Artificial Sequence
  Synthetic oligonucleotide
tacgacctataaccggcaacagtccctggg

SEQ ID NO: 206129 - DNA, 30 bp, Artificial Sequence
  Synthetic oligonucleotide
agggggctgaactctatctcaccgcctggg

SEQ ID NO: 206130 - DNA, 30 bp, Artificial Sequence
  Synthetic oligonucleotide
tatttcaggggagggactcaaggtgctggg

SEQ ID NO: 206131 - DNA, 30 bp, Artificial Sequence
  Synthetic oligonucleotide
attacatgtatcaacgcctttggatctggg

SEQ ID NO: 206132 - DNA, 30 bp, Artificial Sequence
  Synthetic oligonucleotide
tgcaaaggatttatatacccaaggtctggg

SEQ ID NO: 206133 - DNA, 30 bp, Artificial Sequence
  Synthetic oligonucleotide
gtgatgtcgatactgtagctgccttctggg

SEQ ID NO: 206134 - DNA, 30 bp, Artificial Sequence
  Synthetic oligonucleotide
tgcatatgccttgcaaaggttaagagtggg

SEQ ID NO: 206135 - DNA, 30 bp, Artificial Sequence
  Synthetic oligonucleotide
tctatcgctacattacgataagagagtggg

SEQ ID NO: 206136 - DNA, 30 bp, Artificial Sequence
  Synthetic oligonucleotide
tcaagtagcatcttagtcgtttggagtggg

SEQ ID NO: 206137 - DNA, 30 bp, Artificial Sequence
  Synthetic oligonucleotide
aggttggggtcaaaattgatatatagtggg

SEQ ID NO: 206138 - DNA, 30 bp, Artificial Sequence
  Synthetic oligonucleotide
agggggtactggcctacgagagaacgtggg

SEQ ID NO: 206139 - DNA, 30 bp, Artificial Sequence
  Synthetic oligonucleotide
gattggccctgtcgtttggggtgacgtggg

SEQ ID NO: 206140 - DNA, 30 bp, Artificial Sequence
  Synthetic oligonucleotide
gcatccccccaagtcacaatatagcgtggg

SEQ ID NO: 206141 - DNA, 30 bp, Artificial Sequence
  Synthetic oligonucleotide
acttgtgagaaggttgtgcagtatcgtggg

SEQ ID NO: 206142 - DNA, 30 bp, Artificial Sequence
  Synthetic oligonucleotide
aacagcgtttacgcggtcttgagtcgtggg

SEQ ID NO: 206143 - DNA, 30 bp, Artificial Sequence
  Synthetic oligonucleotide
aacttaatagaacgtcatagcggtcgtggg

SEQ ID NO: 206144 - DNA, 30 bp, Artificial Sequence
  Synthetic oligonucleotide
gccgcctcatcacttcaatctcgaggtggg

SEQ ID NO: 206145 - DNA, 30 bp, Artificial Sequence
  Synthetic oligonucleotide
ggataggggcagggcttaaggggcggtggg

SEQ ID NO: 206146 - DNA, 30 bp, Artificial Sequence
  Synthetic oligonucleotide
tctggaaccaccgacgagggggagggtggg

SEQ ID NO: 206147 - DNA, 30 bp, Artificial Sequence
  Synthetic oligonucleotide
gggccaagatgtgatgggttgtagggtggg

SEQ ID NO: 206148 - DNA, 30 bp, Artificial Sequence
  Synthetic oligonucleotide
cacctatccattcctatctagacctgtggg

SEQ ID NO: 206149 - DNA, 30 bp, Artificial Sequence
  Synthetic oligonucleotide
gaaaaagcagggagagtgatcccttgtggg

SEQ ID NO: 206150 - DNA, 30 bp, Artificial Sequence
  Synthetic oligonucleotide
catttgagtggacatagcatgcgaattggg

SEQ ID NO: 206151 - DNA, 30 bp, Artificial Sequence
  Synthetic oligonucleotide
ttcggagcttcgggtacaaggaacattggg

SEQ ID NO: 206152 - DNA, 30 bp, Artificial Sequence
  Synthetic oligonucleotide
tgtgcacagtaacatgcatgaattattggg

SEQ ID NO: 206153 - DNA, 30 bp, Artificial Sequence
  Synthetic oligonucleotide
gattacgctaatcgtaaaaggaggcttggg

SEQ ID NO: 206154 - DNA, 30 bp, Artificial Sequence
  Synthetic oligonucleotide
gtgtcccccagtaaggcaaagactcttggg

SEQ ID NO: 206155 - DNA, 30 bp, Artificial Sequence
  Synthetic oligonucleotide
gccttaaatggctttataatgtgcgttggg

SEQ ID NO: 206156 - DNA, 30 bp, Artificial Sequence
  Synthetic oligonucleotide
gaccttatgcgatcggtcatgaaggttggg

SEQ ID NO: 206157 - DNA, 30 bp, Artificial Sequence
  Synthetic oligonucleotide
gttgcgtgttgctggatcgtcatggttggg

SEQ ID NO: 206158 - DNA, 30 bp, Artificial Sequence
  Synthetic oligonucleotide
catggtcagcaacattccaattctgttggg

SEQ ID NO: 206159 - DNA, 30 bp, Artificial Sequence
  Synthetic oligonucleotide
atgtgttagtcaccgactcgactatttggg

SEQ ID NO: 206160 - DNA, 30 bp, Artificial Sequence
  Synthetic oligonucleotide
aagcggattttgcgtttgtgtcactttggg

SEQ ID NO: 206161 - DNA, 30 bp, Artificial Sequence
  Synthetic oligonucleotide
tttagctccgaagaggtcggcgggtttggg

SEQ ID NO: 206162 - DNA, 30 bp, Artificial Sequence
  Synthetic oligonucleotide
atcgtgatgaagtcggcattacgaaaatgg

SEQ ID NO: 206163 - DNA, 30 bp, Artificial Sequence
  Synthetic oligonucleotide
tagtccgcaggtgacgcccttgacaaatgg

SEQ ID NO: 206164 - DNA, 30 bp, Artificial Sequence
  Synthetic oligonucleotide
gtgaggttcgacaaataagctttgaaatgg

SEQ ID NO: 206165 - DNA, 30 bp, Artificial Sequence
  Synthetic oligonucleotide
atggcggtactaatagcgacgtataaatgg

SEQ ID NO: 206166 - DNA, 30 bp, Artificial Sequence
  Synthetic oligonucleotide
tcaggggttataggtctcgcatttaaatgg

SEQ ID NO: 206167 - DNA, 30 bp, Artificial Sequence
  Synthetic oligonucleotide
gaagatcgttccgatcagcccaaccaatgg

SEQ ID NO: 206168 - DNA, 30 bp, Artificial Sequence
  Synthetic oligonucleotide
acgggtcaataacctgtgtcagagcaatgg

SEQ ID NO: 206169 - DNA, 30 bp, Artificial Sequence
  Synthetic oligonucleotide
ggtggaaaagggtaacagctcgagcaatgg

SEQ ID NO: 206170 - DNA, 30 bp, Artificial Sequence
  Synthetic oligonucleotide
caggtggagaatggaggcagtgacgaatgg

SEQ ID NO: 206171 - DNA, 30 bp, Artificial Sequence
  Synthetic oligonucleotide
agacggtcaatcattggagcaagcgaatgg

SEQ ID NO: 206172 - DNA, 30 bp, Artificial Sequence
  Synthetic oligonucleotide
agcggataatacgttgagaattgcgaatgg

SEQ ID NO: 206173 - DNA, 30 bp, Artificial Sequence
  Synthetic oligonucleotide
gtccgcgccggatgcccacaagatgaatgg

SEQ ID NO: 206174 - DNA, 30 bp, Artificial Sequence
  Synthetic oligonucleotide
aatctggttacccgtatgttgagtgaatgg

SEQ ID NO: 206175 - DNA, 30 bp, Artificial Sequence
  Synthetic oligonucleotide
gcatacgttttagttctgggacggtaatgg

SEQ ID NO: 206176 - DNA, 30 bp, Artificial Sequence
  Synthetic oligonucleotide
ggagttgtacattcaggcgaccggtaatgg

SEQ ID NO: 206177 - DNA, 30 bp, Artificial Sequence
  Synthetic oligonucleotide
gtgaagaggtgttctgtcgggtggtaatgg

SEQ ID NO: 206178 - DNA, 30 bp, Artificial Sequence
  Synthetic oligonucleotide
cgaccgttgtgtgcgcgtagtcattaatgg

SEQ ID NO: 206179 - DNA, 30 bp, Artificial Sequence
  Synthetic oligonucleotide
ggaggacgggtgacgtgggttagttaatgg

SEQ ID NO: 206180 - DNA, 30 bp, Artificial Sequence
  Synthetic oligonucleotide
cgtagcggacatcctgcttgggtttaatgg

SEQ ID NO: 206181 - DNA, 30 bp, Artificial Sequence
  Synthetic oligonucleotide
gtgtgactctagatcggtccatacacatgg

SEQ ID NO: 206182 - DNA, 30 bp, Artificial Sequence
  Synthetic oligonucleotide
atagggggcggggcgcggtgctggacatgg

SEQ ID NO: 206183 - DNA, 30 bp, Artificial Sequence
  Synthetic oligonucleotide
aggcattctatcttcgcgctgactacatgg

SEQ ID NO: 206184 - DNA, 30 bp, Artificial Sequence
  Synthetic oligonucleotide
aagtacacctataggcgcttggttccatgg

SEQ ID NO: 206185 - DNA, 30 bp, Artificial Sequence
  Synthetic oligonucleotide
ggtaccccggcaggttagtaagcagcatgg

SEQ ID NO: 206186 - DNA, 30 bp, Artificial Sequence
  Synthetic oligonucleotide
attgaacggcccatagtggtaacggcatgg

SEQ ID NO: 206187 - DNA, 30 bp, Artificial Sequence
  Synthetic oligonucleotide
atcctgagatgacggaattggtgggcatgg

SEQ ID NO: 206188 - DNA, 30 bp, Artificial Sequence
  Synthetic oligonucleotide
gtggcggttctaacctcggggatggcatgg

SEQ ID NO: 206189 - DNA, 30 bp, Artificial Sequence
  Synthetic oligonucleotide
acggtggagcatcacatcgccagtgcatgg

SEQ ID NO: 206190 - DNA, 30 bp, Artificial Sequence
  Synthetic oligonucleotide
gacggcagtaagctttatatttcatcatgg

SEQ ID NO: 206191 - DNA, 30 bp, Artificial Sequence
  Synthetic oligonucleotide
gtaactatggagccaggaaatgtctcatgg

SEQ ID NO: 206192 - DNA, 30 bp, Artificial Sequence
  Synthetic oligonucleotide
gcagaaaaacgagaagacgaaccttcatgg

SEQ ID NO: 206193 - DNA, 30 bp, Artificial Sequence
  Synthetic oligonucleotide
tatacttgctcaattccaaaacgttcatgg

SEQ ID NO: 206194 - DNA, 30 bp, Artificial Sequence
  Synthetic oligonucleotide
ttaggtgcgttttgtgacgtccgttcatgg

SEQ ID NO: 206195 - DNA, 30 bp, Artificial Sequence
  Synthetic oligonucleotide
agcaagttgacctgtaaatcaccaagatgg

SEQ ID NO: 206196 - DNA, 30 bp, Artificial Sequence
  Synthetic oligonucleotide
tcaccccgtcacggatctctcaacagatgg

SEQ ID NO: 206197 - DNA, 30 bp, Artificial Sequence
  Synthetic oligonucleotide
actcattcttaaggatcatgcaccagatgg

SEQ ID NO: 206198 - DNA, 30 bp, Artificial Sequence
  Synthetic oligonucleotide
gtggctacctatgatatgcgtagcagatgg

SEQ ID NO: 206199 - DNA, 30 bp, Artificial Sequence
  Synthetic oligonucleotide
ttcttggacgatataataatatagagatgg

SEQ ID NO: 206200 - DNA, 30 bp, Artificial Sequence
  Synthetic oligonucleotide
agaggaaccgctggcgtcagctcgagatgg

SEQ ID NO: 206201 - DNA, 30 bp, Artificial Sequence
  Synthetic oligonucleotide
accctgaaaactcctgtccaacggagatgg

SEQ ID NO: 206202 - DNA, 30 bp, Artificial Sequence
  Synthetic oligonucleotide
tcgtaagaagcgcggggccgcgggagatgg

SEQ ID NO: 206203 - DNA, 30 bp, Artificial Sequence
  Synthetic oligonucleotide
tacctcaactaaattcgccgtaggcgatgg

SEQ ID NO: 206204 - DNA, 30 bp, Artificial Sequence
  Synthetic oligonucleotide
tcaaagggttggcgtagcatttctcgatgg

SEQ ID NO: 206205 - DNA, 30 bp, Artificial Sequence
  Synthetic oligonucleotide
gggtctagtcacgtcagattgcaaggatgg

SEQ ID NO: 206206 - DNA, 30 bp, Artificial Sequence
  Synthetic oligonucleotide
tagttctttgaattgagctcaggaggatgg

SEQ ID NO: 206207 - DNA, 30 bp, Artificial Sequence
  Synthetic oligonucleotide
gcacgtagctacgcgtctcaccgcggatgg

SEQ ID NO: 206208 - DNA, 30 bp, Artificial Sequence
  Synthetic oligonucleotide
ctagaacccgagtattacaggtcgtgatgg

SEQ ID NO: 206209 - DNA, 30 bp, Artificial Sequence
  Synthetic oligonucleotide
tacgttcggtcctcctgggtcctgtgatgg

SEQ ID NO: 206210 - DNA, 30 bp, Artificial Sequence
  Synthetic oligonucleotide
tgaacaaggatgcggcttaaggcttgatgg

SEQ ID NO: 206211 - DNA, 30 bp, Artificial Sequence
  Synthetic oligonucleotide
attgccgaaaatttaggcaacagttgatgg

SEQ ID NO: 206212 - DNA, 30 bp, Artificial Sequence
  Synthetic oligonucleotide
ccgagcgacggcctaagaatgttgatatgg

SEQ ID NO: 206213 - DNA, 30 bp, Artificial Sequence
  Synthetic oligonucleotide
tgtcgactatatcggatacgtgtcctatgg

SEQ ID NO: 206214 - DNA, 30 bp, Artificial Sequence
  Synthetic oligonucleotide
ttacataccttgctaccattcacgctatgg

SEQ ID NO: 206215 - DNA, 30 bp, Artificial Sequence
  Synthetic oligonucleotide
atgtgtgcatagagcaaccggaaagtatgg

SEQ ID NO: 206216 - DNA, 30 bp, Artificial Sequence
  Synthetic oligonucleotide
gcaattcgccctgctcctagttcagtatgg

SEQ ID NO: 206217 - DNA, 30 bp, Artificial Sequence
  Synthetic oligonucleotide
tgaccgttatgcgcataggcgagagtatgg

SEQ ID NO: 206218 - DNA, 30 bp, Artificial Sequence
  Synthetic oligonucleotide
gctgttggataaagagtaatctgcgtatgg

SEQ ID NO: 206219 - DNA, 30 bp, Artificial Sequence
  Synthetic oligonucleotide
ggtgtgacctagtctattttgacggtatgg

SEQ ID NO: 206220 - DNA, 30 bp, Artificial Sequence
  Synthetic oligonucleotide
aagcttagggcctctggtgaacgggtatgg

SEQ ID NO: 206221 - DNA, 30 bp, Artificial Sequence
  Synthetic oligonucleotide
tcaaattatgtaggccgttcagtggtatgg

SEQ ID NO: 206222 - DNA, 30 bp, Artificial Sequence
  Synthetic oligonucleotide
ttccaacacagccaaaggtccggattatgg

SEQ ID NO: 206223 - DNA, 30 bp, Artificial Sequence
  Synthetic oligonucleotide
aggtgtgaattcaggcaaaatgtattatgg

SEQ ID NO: 206224 - DNA, 30 bp, Artificial Sequence
  Synthetic oligonucleotide
ttatgtcaatgttcactgccgggcttatgg

SEQ ID NO: 206225 - DNA, 30 bp, Artificial Sequence
  Synthetic oligonucleotide
acggtccttcgagatccctttgggttatgg

SEQ ID NO: 206226 - DNA, 30 bp, Artificial Sequence
  Synthetic oligonucleotide
gatgcaataaggtttgtcttagttttatgg

SEQ ID NO: 206227 - DNA, 30 bp, Artificial Sequence
  Synthetic oligonucleotide
cgaggtttgactatgtaaaggagcaactgg

SEQ ID NO: 206228 - DNA, 30 bp, Artificial Sequence
  Synthetic oligonucleotide
gagacatggctccgtgctgatagcaactgg

SEQ ID NO: 206229 - DNA, 30 bp, Artificial Sequence
  Synthetic oligonucleotide
ccagaacataggagccgggtagtcaactgg

SEQ ID NO: 206230 - DNA, 30 bp, Artificial Sequence
  Synthetic oligonucleotide
tctaggattgggtggaaagcttctaactgg

SEQ ID NO: 206231 - DNA, 30 bp, Artificial Sequence
  Synthetic oligonucleotide
cacctctctacagggttgtaccgtaactgg

SEQ ID NO: 206232 - DNA, 30 bp, Artificial Sequence
  Synthetic oligonucleotide
tagcaacgtgcacaaagtgcacaacactgg

SEQ ID NO: 206233 - DNA, 30 bp, Artificial Sequence
  Synthetic oligonucleotide
gaagtggggtgaaaggaaagttggcactgg

SEQ ID NO: 206234 - DNA, 30 bp, Artificial Sequence
  Synthetic oligonucleotide
agacgttttcaggtatacggttgtcactgg

SEQ ID NO: 206235 - DNA, 30 bp, Artificial Sequence
  Synthetic oligonucleotide
aaggtcgttacgatagttactaatgactgg

SEQ ID NO: 206236 - DNA, 30 bp, Artificial Sequence
  Synthetic oligonucleotide
ccgggattattattcgtggagaaatactgg

SEQ ID NO: 206237 - DNA, 30 bp, Artificial Sequence
  Synthetic oligonucleotide
ttaggaatagcaaagacggttgcgtactgg

SEQ ID NO: 206238 - DNA, 30 bp, Artificial Sequence
  Synthetic oligonucleotide
cgggcgtaccttgaagcgtcgtggtactgg

SEQ ID NO: 206239 - DNA, 30 bp, Artificial Sequence
  Synthetic oligonucleotide
gaaagactgaagcatgtttacgattactgg

SEQ ID NO: 206240 - DNA, 30 bp, Artificial Sequence
  Synthetic oligonucleotide
tgcgtgttggttacaggaggacgttactgg

SEQ ID NO: 206241 - DNA, 30 bp, Artificial Sequence
  Synthetic oligonucleotide
gtgcgttcatgcatatgaaagggttactgg

SEQ ID NO: 206242 - DNA, 30 bp, Artificial Sequence
  Synthetic oligonucleotide
tcactagtacgcttatcaaatttaacctgg

SEQ ID NO: 206243 - DNA, 30 bp, Artificial Sequence
  Synthetic oligonucleotide
aacaatccgcaggcatgataccgcacctgg

SEQ ID NO: 206244 - DNA, 30 bp, Artificial Sequence
  Synthetic oligonucleotide
agctaaactatctctaacggtcgcacctgg

SEQ ID NO: 206245 - DNA, 30 bp, Artificial Sequence
  Synthetic oligonucleotide
tgcgtagacagttggcgagaatgcacctgg

SEQ ID NO: 206246 - DNA, 30 bp, Artificial Sequence
  Synthetic oligonucleotide
aggaccggttgagacatagccatcacctgg

SEQ ID NO: 206247 - DNA, 30 bp, Artificial Sequence
  Synthetic oligonucleotide
aaagtgcgttacgatccatagactccctgg

SEQ ID NO: 206248 - DNA, 30 bp, Artificial Sequence
  Synthetic oligonucleotide
acgatcgccaagaagtttgccggtccctgg

SEQ ID NO: 206249 - DNA, 30 bp, Artificial Sequence
  Synthetic oligonucleotide
tcaagatgcctttaaaatgcgctagcctgg

SEQ ID NO: 206250 - DNA, 30 bp, Artificial Sequence
  Synthetic oligonucleotide
gtggggggtaaaccagttaggtaggcctgg

SEQ ID NO: 206251 - DNA, 30 bp, Artificial Sequence
  Synthetic oligonucleotide
actgatgtgtgtgggcatgcatctgcctgg

SEQ ID NO: 206252 - DNA, 30 bp, Artificial Sequence
  Synthetic oligonucleotide
aaaaggtttccttctagtttaagatcctgg

SEQ ID NO: 206253 - DNA, 30 bp, Artificial Sequence
  Synthetic oligonucleotide
attcgaatgcgcgaggcattgggatcctgg

SEQ ID NO: 206254 - DNA, 30 bp, Artificial Sequence
  Synthetic oligonucleotide
atgttgagaatttagtgtccgatatcctgg

SEQ ID NO: 206255 - DNA, 30 bp, Artificial Sequence
  Synthetic oligonucleotide
tccaaaggctgtagtaaagactagtcctgg

SEQ ID NO: 206256 - DNA, 30 bp, Artificial Sequence
  Synthetic oligonucleotide
cgctgcataaccaacttgcaggggtcctgg

SEQ ID NO: 206257 - DNA, 30 bp, Artificial Sequence
  Synthetic oligonucleotide
gacacttgaagttattcaatgcattcctgg

SEQ ID NO: 206258 - DNA, 30 bp, Artificial Sequence
  Synthetic oligonucleotide
tagtaagacagtagggcgcctaacagctgg

SEQ ID NO: 206259 - DNA, 30 bp, Artificial Sequence
  Synthetic oligonucleotide
gcactacatcgtatgagtctacagagctgg

SEQ ID NO: 206260 - DNA, 30 bp, Artificial Sequence
  Synthetic oligonucleotide
cttttgtgggcacctattcggggtagctgg

SEQ ID NO: 206261 - DNA, 30 bp, Artificial Sequence
  Synthetic oligonucleotide
ggatagagaggatggcctgctgttagctgg

SEQ ID NO: 206262 - DNA, 30 bp, Artificial Sequence
  Synthetic oligonucleotide
acacaataggaaattagaacagctcgctgg

SEQ ID NO: 206263 - DNA, 30 bp, Artificial Sequence
  Synthetic oligonucleotide
tgagtctatgtttaagaatactttcgctgg

SEQ ID NO: 206264 - DNA, 30 bp, Artificial Sequence
  Synthetic oligonucleotide
tactattatttacaaaggtgatacggctgg

SEQ ID NO: 206265 - DNA, 30 bp, Artificial Sequence
  Synthetic oligonucleotide
ggcgggcgcaagaggtaactacccggctgg

SEQ ID NO: 206266 - DNA, 30 bp, Artificial Sequence
  Synthetic oligonucleotide
gtgtgtgatatcacgtaattcctcggctgg

SEQ ID NO: 206267 - DNA, 30 bp, Artificial Sequence
  Synthetic oligonucleotide
ggattcgaaaatccctatcattagggctgg

SEQ ID NO: 206268 - DNA, 30 bp, Artificial Sequence
  Synthetic oligonucleotide
ggacgttccgtgggatcgcacatgggctgg

SEQ ID NO: 206269 - DNA, 30 bp, Artificial Sequence
  Synthetic oligonucleotide
caccgcatccactagcaccattgtggctgg

SEQ ID NO: 206270 - DNA, 30 bp, Artificial Sequence
  Synthetic oligonucleotide
gacaacatgagcctttaaggagcctgctgg

SEQ ID NO: 206271 - DNA, 30 bp, Artificial Sequence
  Synthetic oligonucleotide
taaacgactctcgatacctcatgctgctgg

SEQ ID NO: 206272 - DNA, 29 bp, Artificial Sequence
  Synthetic oligonucleotide
tgtacgaaacgcgccataggttctgctgg

SEQ ID NO: 206273 - DNA, 30 bp, Artificial Sequence
  Synthetic oligonucleotide
ttgtgtatgtgtcgcataaatcagtgctgg

SEQ ID NO: 206274 - DNA, 30 bp, Artificial Sequence
  Synthetic oligonucleotide
tcgaaggagggttcactccttatgtgctgg

SEQ ID NO: 206275 - DNA, 30 bp, Artificial Sequence
  Synthetic oligonucleotide
caggattccttacggtaacatcacatctgg

SEQ ID NO: 206276 - DNA, 30 bp, Artificial Sequence
  Synthetic oligonucleotide
cgacttattagataagtacaactgatctgg

SEQ ID NO: 206277 - DNA, 30 bp, Artificial Sequence
  Synthetic oligonucleotide
atgtggggaccaccgttggctttgatctgg

SEQ ID NO: 206278 - DNA, 30 bp, Artificial Sequence
  Synthetic oligonucleotide
tgcgcgaattccagagccgaccgtatctgg

SEQ ID NO: 206279 - DNA, 30 bp, Artificial Sequence
  Synthetic oligonucleotide
ggcgggcacgccagagtttccagcctctgg

SEQ ID NO: 206280 - DNA, 30 bp, Artificial Sequence
  Synthetic oligonucleotide
gccttagggtcaaccgctactaggctctgg

SEQ ID NO: 206281 - DNA, 30 bp, Artificial Sequence
  Synthetic oligonucleotide
aattcgtagagatctttgtgggggctctgg

SEQ ID NO: 206282 - DNA, 30 bp, Artificial Sequence
  Synthetic oligonucleotide
cgctgggctatacagcggcctggtctctgg

SEQ ID NO: 206283 - DNA, 30 bp, Artificial Sequence
  Synthetic oligonucleotide
gttcgttgggtcgacccctggattctctgg

SEQ ID NO: 206284 - DNA, 30 bp, Artificial Sequence
  Synthetic oligonucleotide
tgtatccacagtcatccaactggagtctgg

SEQ ID NO: 206285 - DNA, 30 bp, Artificial Sequence
  Synthetic oligonucleotide
taatcagcccagcctggctcgttagtctgg

SEQ ID NO: 206286 - DNA, 30 bp, Artificial Sequence
  Synthetic oligonucleotide
aagggcacattgcttcgggggtaggtctgg

SEQ ID NO: 206287 - DNA, 30 bp, Artificial Sequence
  Synthetic oligonucleotide
accgggtaggatccagtttcaagattctgg

SEQ ID NO: 206288 - DNA, 30 bp, Artificial Sequence
  Synthetic oligonucleotide
agacatttgatataggtgagtagattctgg

SEQ ID NO: 206289 - DNA, 30 bp, Artificial Sequence
  Synthetic oligonucleotide
cattgaagatattggtgaccatgattctgg

SEQ ID NO: 206290 - DNA, 30 bp, Artificial Sequence
  Synthetic oligonucleotide
ccagctgggcttaggcggcgcttattctgg

SEQ ID NO: 206291 - DNA, 30 bp, Artificial Sequence
  Synthetic oligonucleotide
gcaagatacatacagttactccagttctgg

SEQ ID NO: 206292 - DNA, 30 bp, Artificial Sequence
  Synthetic oligonucleotide
gcggcacactaggacttccatttgttctgg

SEQ ID NO: 206293 - DNA, 30 bp, Artificial Sequence
  Synthetic oligonucleotide
tcgactgattgagctttgataggtttctgg

SEQ ID NO: 206294 - DNA, 30 bp, Artificial Sequence
  Synthetic oligonucleotide
cccggtgatcgcacagtattcgaaaagtgg

SEQ ID NO: 206295 - DNA, 30 bp, Artificial Sequence
  Synthetic oligonucleotide
ggacagttggcggaacatttaaacaagtgg

SEQ ID NO: 206296 - DNA, 30 bp, Artificial Sequence
  Synthetic oligonucleotide
ctatagtgcatatcaacgtgcacgaagtgg

SEQ ID NO: 206297 - DNA, 30 bp, Artificial Sequence
  Synthetic oligonucleotide
gactccgttcgtcaaactaggcctaagtgg

SEQ ID NO: 206298 - DNA, 30 bp, Artificial Sequence
  Synthetic oligonucleotide
ctagaagggcataatagagtaggccagtgg

SEQ ID NO: 206299 - DNA, 30 bp, Artificial Sequence
  Synthetic oligonucleotide
agcaacgattcgactcgtatgggccagtgg

SEQ ID NO: 206300 - DNA, 30 bp, Artificial Sequence
  Synthetic oligonucleotide
tgccgaaggctgatatgtatcatgcagtgg

SEQ ID NO: 206301 - DNA, 30 bp, Artificial Sequence
  Synthetic oligonucleotide
cttattttacgagcatgcaatagtcagtgg

SEQ ID NO: 206302 - DNA, 30 bp, Artificial Sequence
  Synthetic oligonucleotide
catcaagaagtcgatggcgttaaagagtgg

SEQ ID NO: 206303 - DNA, 35 bp, Artificial Sequence
  Synthetic oligonucleotide
gctcaaacactgtggcttgaaccaccaggtagtgg

SEQ ID NO: 206304 - DNA, 30 bp, Artificial Sequence
  Synthetic oligonucleotide
tagaacccgcggcggtcggtataaacgtgg

SEQ ID NO: 206305 - DNA, 30 bp, Artificial Sequence
  Synthetic oligonucleotide
aggttgtaatctgcggatatatgcacgtgg

SEQ ID NO: 206306 - DNA, 30 bp, Artificial Sequence
  Synthetic oligonucleotide
atcgaccttaggaatcaatatatgacgtgg

SEQ ID NO: 206307 - DNA, 30 bp, Artificial Sequence
  Synthetic oligonucleotide
gccccacaaagttaacatatagtgacgtgg

SEQ ID NO: 206308 - DNA, 30 bp, Artificial Sequence
  Synthetic oligonucleotide
gcaatcggggctttgcctagacgtacgtgg

SEQ ID NO: 206309 - DNA, 30 bp, Artificial Sequence
  Synthetic oligonucleotide
aagccgcttctcggaaactcgaacccgtgg

SEQ ID NO: 206310 - DNA, 30 bp, Artificial Sequence
  Synthetic oligonucleotide
cgctcacaaaatcctaggtgaaagccgtgg

SEQ ID NO: 206311 - DNA, 30 bp, Artificial Sequence
  Synthetic oligonucleotide
tcgaatgtggcttaaagatggtagccgtgg

SEQ ID NO: 206312 - DNA, 30 bp, Artificial Sequence
  Synthetic oligonucleotide
atggaactattacgttctctgtctccgtgg

SEQ ID NO: 206313 - DNA, 30 bp, Artificial Sequence
  Synthetic oligonucleotide
cggttatcgttggtgggccgattagcgtgg

SEQ ID NO: 206314 - DNA, 30 bp, Artificial Sequence
  Synthetic oligonucleotide
cttgtccaagcgctactggacaccgcgtgg

SEQ ID NO: 206315 - DNA, 30 bp, Artificial Sequence
  Synthetic oligonucleotide
cccgggctgcaatacgtacatcaggcgtgg

SEQ ID NO: 206316 - DNA, 30 bp, Artificial Sequence
  Synthetic oligonucleotide
tatgaagacaacatgtttcttgttgcgtgg

SEQ ID NO: 206317 - DNA, 30 bp, Artificial Sequence
  Synthetic oligonucleotide
atgcttaggtcgattctgtcaggatcgtgg

SEQ ID NO: 206318 - DNA, 30 bp, Artificial Sequence
  Synthetic oligonucleotide
aacggaggtacttgaacctgttgctcgtgg

SEQ ID NO: 206319 - DNA, 30 bp, Artificial Sequence
  Synthetic oligonucleotide
gtgtgctcagcttagcgagcggtctcgtgg

SEQ ID NO: 206320 - DNA, 30 bp, Artificial Sequence
  Synthetic oligonucleotide
ggcttgggtattgggttgggggggtcgtgg

SEQ ID NO: 206321 - DNA, 30 bp, Artificial Sequence
  Synthetic oligonucleotide
gaggtgggaaaggtcagcctgctaaggtgg

SEQ ID NO: 206322 - DNA, 30 bp, Artificial Sequence
  Synthetic oligonucleotide
ttggtacactatctcttagctaccaggtgg

SEQ ID NO: 206323 - DNA, 30 bp, Artificial Sequence
  Synthetic oligonucleotide
gtccggtttagcaatcatggagtcaggtgg

SEQ ID NO: 206324 - DNA, 30 bp, Artificial Sequence
  Synthetic oligonucleotide
agtcagcttctcaaaggcgagttcaggtgg

SEQ ID NO: 206325 - DNA, 30 bp, Artificial Sequence
  Synthetic oligonucleotide
tcataaaccggtcgagattttaagaggtgg

SEQ ID NO: 206326 - DNA, 30 bp, Artificial Sequence
  Synthetic oligonucleotide
gtgggtctcggggcgtgagggcggaggtgg

SEQ ID NO: 206327 - DNA, 30 bp, Artificial Sequence
  Synthetic oligonucleotide
cactatatttgacagataagaaataggtgg

SEQ ID NO: 206328 - DNA, 30 bp, Artificial Sequence
  Synthetic oligonucleotide
aagcgacaagtaatgagtaggctccggtgg

SEQ ID NO: 206329 - DNA, 30 bp, Artificial Sequence
  Synthetic oligonucleotide
ttatcgtcgggggtggatcaacagcggtgg

SEQ ID NO: 206330 - DNA, 30 bp, Artificial Sequence
  Synthetic oligonucleotide
cccggcaaaaggaacccgatttcagggtgg

SEQ ID NO: 206331 - DNA, 30 bp, Artificial Sequence
  Synthetic oligonucleotide
ttgacaattagaagaagggaaggagggtgg

SEQ ID NO: 206332 - DNA, 30 bp, Artificial Sequence
  Synthetic oligonucleotide
gtgcgtaagtataagagggtgctagggtgg

SEQ ID NO: 206333 - DNA, 30 bp, Artificial Sequence
  Synthetic oligonucleotide
ttctataagcaaggatatattcccgggtgg

SEQ ID NO: 206334 - DNA, 30 bp, Artificial Sequence
  Synthetic oligonucleotide
gccggcgccgagaagagggtacgcgggtgg

SEQ ID NO: 206335 - DNA, 30 bp, Artificial Sequence
  Synthetic oligonucleotide
cctcttttaagatcagtgctgtgcgggtgg

SEQ ID NO: 206336 - DNA, 30 bp, Artificial Sequence
  Synthetic oligonucleotide
atgattcgtgagtctgcttctgtggggtgg

SEQ ID NO: 206337 - DNA, 30 bp, Artificial Sequence
  Synthetic oligonucleotide
acatcctgcagtttactagtctctgggtgg

SEQ ID NO: 206338 - DNA, 30 bp, Artificial Sequence
  Synthetic oligonucleotide
tgtcactttgaacatccttcggagtggtgg

SEQ ID NO: 206339 - DNA, 30 bp, Artificial Sequence
  Synthetic oligonucleotide
tcgcatttagcgagggcggatacgtggtgg

SEQ ID NO: 206340 - DNA, 30 bp, Artificial Sequence
  Synthetic oligonucleotide
tccgcaattgatattagagtggcgtggtgg

SEQ ID NO: 206341 - DNA, 30 bp, Artificial Sequence
  Synthetic oligonucleotide
gttcgagccatgatccgtaactcgtggtgg

SEQ ID NO: 206342 - DNA, 30 bp, Artificial Sequence
  Synthetic oligonucleotide
accctggccgcacgtaaaagagtgtggtgg

SEQ ID NO: 206343 - DNA, 30 bp, Artificial Sequence
  Synthetic oligonucleotide
agcaggttacggcatactatagattggtgg

SEQ ID NO: 206344 - DNA, 30 bp, Artificial Sequence
  Synthetic oligonucleotide
acagactgatcagcactgcaaaaaatgtgg

SEQ ID NO: 206345 - DNA, 30 bp, Artificial Sequence
  Synthetic oligonucleotide
gataaaggaacagtagcggagtaaatgtgg

SEQ ID NO: 206346 - DNA, 30 bp, Artificial Sequence
  Synthetic oligonucleotide
gggcgttctctgaccaagatgacaatgtgg

SEQ ID NO: 206347 - DNA, 30 bp, Artificial Sequence
  Synthetic oligonucleotide
actgcacacagaaactatatgataatgtgg

SEQ ID NO: 206348 - DNA, 30 bp, Artificial Sequence
  Synthetic oligonucleotide
ttaatcggccgggtagtatggggcatgtgg

SEQ ID NO: 206349 - DNA, 30 bp, Artificial Sequence
  Synthetic oligonucleotide
tcagttgacaagtatcgtggagagatgtgg

SEQ ID NO: 206350 - DNA, 30 bp, Artificial Sequence
  Synthetic oligonucleotide
gttagcgcctaagttattagcgtgatgtgg

SEQ ID NO: 206351 - DNA, 30 bp, Artificial Sequence
  Synthetic oligonucleotide
taacgggacgtcacagtccgctatatgtgg

SEQ ID NO: 206352 - DNA, 30 bp, Artificial Sequence
  Synthetic oligonucleotide
actacgtgtgtcactacttccgttatgtgg

SEQ ID NO: 206353 - DNA, 30 bp, Artificial Sequence
  Synthetic oligonucleotide
caggcgaaacattcctctactgttatgtgg

SEQ ID NO: 206354 - DNA, 30 bp, Artificial Sequence
  Synthetic oligonucleotide
gcgttgcgctcgcaaggtatgagactgtgg

SEQ ID NO: 206355 - DNA, 30 bp, Artificial Sequence
  Synthetic oligonucleotide
ggtcgaggttacacggcctggatcctgtgg

SEQ ID NO: 206356 - DNA, 30 bp, Artificial Sequence
  Synthetic oligonucleotide
ttatgcactgttgattacaaatagctgtgg

SEQ ID NO: 206357 - DNA, 30 bp, Artificial Sequence
  Synthetic oligonucleotide
agtcgacttggcccagaaagcgttctgtgg

SEQ ID NO: 206358 - DNA, 30 bp, Artificial Sequence
  Synthetic oligonucleotide
gtcgcagtgtttgcggtagtgccagtgtgg

SEQ ID NO: 206359 - DNA, 30 bp, Artificial Sequence
  Synthetic oligonucleotide
gtcaaagaccaggggtcaccccacgtgtgg

SEQ ID NO: 206360 - DNA, 30 bp, Artificial Sequence
  Synthetic oligonucleotide
aaatataagcggtagtggaaccaggtgtgg

SEQ ID NO: 206361 - DNA, 30 bp, Artificial Sequence
  Synthetic oligonucleotide
ggggcggttagcgcggggggggcggtgtgg

SEQ ID NO: 206362 - DNA, 30 bp, Artificial Sequence
  Synthetic oligonucleotide
tctgatatgctgggacagctttatgtgtgg

SEQ ID NO: 206363 - DNA, 30 bp, Artificial Sequence
  Synthetic oligonucleotide
aacactgctttcccgacagttgctgtgtgg

SEQ ID NO: 206364 - DNA, 30 bp, Artificial Sequence
  Synthetic oligonucleotide
gaactccccgaaggtggaataagtttgtgg

SEQ ID NO: 206365 - DNA, 30 bp, Artificial Sequence
  Synthetic oligonucleotide
agttggtgctgacggtcgtttgacaattgg

SEQ ID NO: 206366 - DNA, 30 bp, Artificial Sequence
  Synthetic oligonucleotide
ctgggaacctcctcatccagtcccaattgg

SEQ ID NO: 206367 - DNA, 30 bp, Artificial Sequence
  Synthetic oligonucleotide
tgttcgcgcgtcatgataagatagaattgg

SEQ ID NO: 206368 - DNA, 30 bp, Artificial Sequence
  Synthetic oligonucleotide
ctcgcgatctcgacaagtgcgactaattgg

SEQ ID NO: 206369 - DNA, 30 bp, Artificial Sequence
  Synthetic oligonucleotide
atgatctggatcatagtagatactaattgg

SEQ ID NO: 206370 - DNA, 30 bp, Artificial Sequence
  Synthetic oligonucleotide
cagtccggaggacaggcttgtcgtaattgg

SEQ ID NO: 206371 - DNA, 30 bp, Artificial Sequence
  Synthetic oligonucleotide
gagagcagggtcggtggtttaaaccattgg

SEQ ID NO: 206372 - DNA, 30 bp, Artificial Sequence
  Synthetic oligonucleotide
cgcggagggatgtaggtctgctaccattgg

SEQ ID NO: 206373 - DNA, 30 bp, Artificial Sequence
  Synthetic oligonucleotide
tgtacaggtaaggtctgctcgtgccattgg

SEQ ID NO: 206374 - DNA, 30 bp, Artificial Sequence
  Synthetic oligonucleotide
aatagccgggtccggaatgtgttgcattgg

SEQ ID NO: 206375 - DNA, 30 bp, Artificial Sequence
  Synthetic oligonucleotide
cgcccttaacctgtatgggcaagtcattgg

SEQ ID NO: 206376 - DNA, 30 bp, Artificial Sequence
  Synthetic oligonucleotide
catgttgcgcgtcgtgaaagttgtcattgg

SEQ ID NO: 206377 - DNA, 30 bp, Artificial Sequence
  Synthetic oligonucleotide
gcgactttacagctatttattgttcattgg

SEQ ID NO: 206378 - DNA, 30 bp, Artificial Sequence
  Synthetic oligonucleotide
gaacagtgctcgttgcgaggttgagattgg

SEQ ID NO: 206379 - DNA, 30 bp, Artificial Sequence
  Synthetic oligonucleotide
tgaaaccctgaacacagcgataccgattgg

SEQ ID NO: 206380 - DNA, 30 bp, Artificial Sequence
  Synthetic oligonucleotide
gcacccacgtggacggaacctgcggattgg

SEQ ID NO: 206381 - DNA, 30 bp, Artificial Sequence
  Synthetic oligonucleotide
gagcgggtccatcgacgaatcactgattgg

SEQ ID NO: 206382 - DNA, 30 bp, Artificial Sequence
  Synthetic oligonucleotide
aacgatagggaaaaaaagtcgtctgattgg

SEQ ID NO: 206383 - DNA, 30 bp, Artificial Sequence
  Synthetic oligonucleotide
agaagtttgtcttgcacaggatcgtattgg

SEQ ID NO: 206384 - DNA, 30 bp, Artificial Sequence
  Synthetic oligonucleotide
catatgaacagcatagtaaagaattattgg

SEQ ID NO: 206385 - DNA, 30 bp, Artificial Sequence
  Synthetic oligonucleotide
gtcgatattacgattgtctaagtaacttgg

SEQ ID NO: 206386 - DNA, 30 bp, Artificial Sequence
  Synthetic oligonucleotide
caggttagagaagagaaaaatctcacttgg

SEQ ID NO: 206387 - DNA, 30 bp, Artificial Sequence
  Synthetic oligonucleotide
tcgacgtagtatcagagcccctcgacttgg

SEQ ID NO: 206388 - DNA, 30 bp, Artificial Sequence
  Synthetic oligonucleotide
tgacaatgagcttgtaacataagcccttgg

SEQ ID NO: 206389 - DNA, 30 bp, Artificial Sequence
  Synthetic oligonucleotide
aacgacatgccccaactatgaaatccttgg

SEQ ID NO: 206390 - DNA, 30 bp, Artificial Sequence
  Synthetic oligonucleotide
tactgcaacatgcgggccctcaatccttgg

SEQ ID NO: 206391 - DNA, 30 bp, Artificial Sequence
  Synthetic oligonucleotide
acgtgatcagcacgttagtgtgatccttgg

SEQ ID NO: 206392 - DNA, 30 bp, Artificial Sequence
  Synthetic oligonucleotide
ggggcctatagctgcgtgggctatccttgg

SEQ ID NO: 206393 - DNA, 30 bp, Artificial Sequence
  Synthetic oligonucleotide
cattcacataacggcgggcaaagtccttgg

SEQ ID NO: 206394 - DNA, 30 bp, Artificial Sequence
  Synthetic oligonucleotide
aactgggcaggggagtgttctagtccttgg

SEQ ID NO: 206395 - DNA, 30 bp, Artificial Sequence
  Synthetic oligonucleotide
cgacccaactacgacggaattattccttgg

SEQ ID NO: 206396 - DNA, 30 bp, Artificial Sequence
  Synthetic oligonucleotide
atacgatatgatcgacgccgtcgcgcttgg

SEQ ID NO: 206397 - DNA, 30 bp, Artificial Sequence
  Synthetic oligonucleotide
ctatgagggcggcggtccgaaaatgcttgg

SEQ ID NO: 206398 - DNA, 30 bp, Artificial Sequence
  Synthetic oligonucleotide
ttcagccagcgtccgtaacacgcatcttgg

SEQ ID NO: 206399 - DNA, 30 bp, Artificial Sequence
  Synthetic oligonucleotide
agattatgttccattgatggtcagtcttgg

SEQ ID NO: 206400 - DNA, 30 bp, Artificial Sequence
  Synthetic oligonucleotide
atgagacaagcacatcacatcataagttgg

SEQ ID NO: 206401 - DNA, 30 bp, Artificial Sequence
  Synthetic oligonucleotide
tataggtagagactaaacgtgttaagttgg

SEQ ID NO: 206402 - DNA, 30 bp, Artificial Sequence
  Synthetic oligonucleotide
ggtctgaaccgatagtagcttaggagttgg

SEQ ID NO: 206403 - DNA, 30 bp, Artificial Sequence
  Synthetic oligonucleotide
aaggtagaccgcggggcaaattatagttgg

SEQ ID NO: 206404 - DNA, 30 bp, Artificial Sequence
  Synthetic oligonucleotide
cgcgctattaggcatcctatacttagttgg

SEQ ID NO: 206405 - DNA, 30 bp, Artificial Sequence
  Synthetic oligonucleotide
gggaggcatcctatagtttactgacgttgg

SEQ ID NO: 206406 - DNA, 30 bp, Artificial Sequence
  Synthetic oligonucleotide
atattctcaacaacgcttagtatacgttgg

SEQ ID NO: 206407 - DNA, 30 bp, Artificial Sequence
  Synthetic oligonucleotide
cataagttgctggcacttattgtacgttgg

SEQ ID NO: 206408 - DNA, 30 bp, Artificial Sequence
  Synthetic oligonucleotide
gccgacgtaattagaaacagcgaccgttgg

SEQ ID NO: 206409 - DNA, 30 bp, Artificial Sequence
  Synthetic oligonucleotide
ccattcccccggagacaccggtagcgttgg

SEQ ID NO: 206410 - DNA, 30 bp, Artificial Sequence
  Synthetic oligonucleotide
accgtgcagtccatggtggtgatgcgttgg

SEQ ID NO: 206411 - DNA, 29 bp, Artificial Sequence
  Synthetic oligonucleotide
cctcgttgcacccgtgaatgcccggttgg

SEQ ID NO: 206412 - DNA, 30 bp, Artificial Sequence
  Synthetic oligonucleotide
ggctgtgagcactatctccattccggttgg

SEQ ID NO: 206413 - DNA, 30 bp, Artificial Sequence
  Synthetic oligonucleotide
ttacagtaccacaatccgagcgggggttgg

SEQ ID NO: 206414 - DNA, 30 bp, Artificial Sequence
  Synthetic oligonucleotide
gagttaattgttatgtatccgtggggttgg

SEQ ID NO: 206415 - DNA, 30 bp, Artificial Sequence
  Synthetic oligonucleotide
tgaattgatcaaaactgtgtcggtggttgg

SEQ ID NO: 206416 - DNA, 30 bp, Artificial Sequence
  Synthetic oligonucleotide
ttagaattggacaaaggaacccttggttgg

SEQ ID NO: 206417 - DNA, 30 bp, Artificial Sequence
  Synthetic oligonucleotide
tgtaggtgatcacgcgccggggactgttgg

SEQ ID NO: 206418 - DNA, 30 bp, Artificial Sequence
  Synthetic oligonucleotide
ctgaggactttagcaagtagatcctgttgg

SEQ ID NO: 206419 - DNA, 30 bp, Artificial Sequence
  Synthetic oligonucleotide
aacggagcctgtcctatgtggaagtgttgg

SEQ ID NO: 206420 - DNA, 30 bp, Artificial Sequence
  Synthetic oligonucleotide
gaaaagtgttccgtatggtgaatttgttgg

SEQ ID NO: 206421 - DNA, 30 bp, Artificial Sequence
  Synthetic oligonucleotide
aaaaggtgtatcattgtaagcatttgttgg

SEQ ID NO: 206422 - DNA, 30 bp, Artificial Sequence
  Synthetic oligonucleotide
atgactaatctagtggaatcatgaatttgg

SEQ ID NO: 206423 - DNA, 30 bp, Artificial Sequence
  Synthetic oligonucleotide
ccggggggatcaccaggacacgtaatttgg

SEQ ID NO: 206424 - DNA, 30 bp, Artificial Sequence
  Synthetic oligonucleotide
ataggtccgtggacatccgaaatcatttgg

SEQ ID NO: 206425 - DNA, 30 bp, Artificial Sequence
  Synthetic oligonucleotide
tcgtacgttctgctaccaggcgcgatttgg

SEQ ID NO: 206426 - DNA, 30 bp, Artificial Sequence
  Synthetic oligonucleotide
acccaacctcattagttaagcgggatttgg

SEQ ID NO: 206427 - DNA, 30 bp, Artificial Sequence
  Synthetic oligonucleotide
ctatcagttttacctgcgaatgctatttgg

SEQ ID NO: 206428 - DNA, 29 bp, Artificial Sequence
  Synthetic oligonucleotide
gctctccaacgggattgatagaactttgg

SEQ ID NO: 206429 - DNA, 30 bp, Artificial Sequence
  Synthetic oligonucleotide
atttcacaggtacggttctagtcactttgg

SEQ ID NO: 206430 - DNA, 30 bp, Artificial Sequence
  Synthetic oligonucleotide
ggtcggaaagtcgtgggcataaacctttgg

SEQ ID NO: 206431 - DNA, 30 bp, Artificial Sequence
  Synthetic oligonucleotide
cagagcctgtgatatgaacgccttctttgg

SEQ ID NO: 206432 - DNA, 30 bp, Artificial Sequence
  Synthetic oligonucleotide
tgggtgaagcagtcgaattaaatcgtttgg

SEQ ID NO: 206433 - DNA, 30 bp, Artificial Sequence
  Synthetic oligonucleotide
gaaagtcggctatggcgtgattaggtttgg

SEQ ID NO: 206434 - DNA, 30 bp, Artificial Sequence
  Synthetic oligonucleotide
tgttaggacaagttacgcatgggggtttgg

SEQ ID NO: 206435 - DNA, 30 bp, Artificial Sequence
  Synthetic oligonucleotide
agaactagtctttgccccatttgggtttgg

SEQ ID NO: 206436 - DNA, 30 bp, Artificial Sequence
  Synthetic oligonucleotide
ggccacattatgtaagaacacctattttgg

SEQ ID NO: 206437 - DNA, 30 bp, Artificial Sequence
  Synthetic oligonucleotide
gagagacctgtgtggcatcttgtattttgg

SEQ ID NO: 206438 - DNA, 30 bp, Artificial Sequence
  Synthetic oligonucleotide
cggccttcactgtatcctgtcgtcttttgg

SEQ ID NO: 206439 - DNA, 30 bp, Artificial Sequence
  Synthetic oligonucleotide
tgtggtcagttcacaatagttaggttttgg

SEQ ID NO: 206440 - DNA, 30 bp, Artificial Sequence
  Synthetic oligonucleotide
ggacgtgagctctagcgaaatatcaaaatg

SEQ ID NO: 206441 - DNA, 30 bp, Artificial Sequence
  Synthetic oligonucleotide
ggtgtataatgggtaccgcagaagaaaatg

SEQ ID NO: 206442 - DNA, 30 bp, Artificial Sequence
  Synthetic oligonucleotide
aatctgcggtagatagggggggcgaaaatg

SEQ ID NO: 206443 - DNA, 30 bp, Artificial Sequence
  Synthetic oligonucleotide
aggctaagttgtattggaggagataaaatg

SEQ ID NO: 206444 - DNA, 30 bp, Artificial Sequence
  Synthetic oligonucleotide
catagggcacagggccaacgggataaaatg

SEQ ID NO: 206445 - DNA, 30 bp, Artificial Sequence
  Synthetic oligonucleotide
gttaatggacaaattatagatcctaaaatg

SEQ ID NO: 206446 - DNA, 30 bp, Artificial Sequence
  Synthetic oligonucleotide
taatggaagtcaaattggggcaaacaaatg

SEQ ID NO: 206447 - DNA, 30 bp, Artificial Sequence
  Synthetic oligonucleotide
cgatcagaaacaattatactcttccaaatg

SEQ ID NO: 206448 - DNA, 30 bp, Artificial Sequence
  Synthetic oligonucleotide
agtaaatcataatgagtcccgacgcaaatg

SEQ ID NO: 206449 - DNA, 30 bp, Artificial Sequence
  Synthetic oligonucleotide
cttcaccagacgcggtgaaaggcgcaaatg

SEQ ID NO: 206450 - DNA, 30 bp, Artificial Sequence
  Synthetic oligonucleotide
gaaccaccccgagtgcacactaggcaaatg

SEQ ID NO: 206451 - DNA, 30 bp, Artificial Sequence
  Synthetic oligonucleotide
tctttcgtcacggtcgatttggatcaaatg

SEQ ID NO: 206452 - DNA, 30 bp, Artificial Sequence
  Synthetic oligonucleotide
atataaccctgcaaatacatctaagaaatg

SEQ ID NO: 206453 - DNA, 30 bp, Artificial Sequence
  Synthetic oligonucleotide
aggttcgttcacggtaccagcctagaaatg

SEQ ID NO: 206454 - DNA, 30 bp, Artificial Sequence
  Synthetic oligonucleotide
tgcaagcgtcaatgcaggcggggcgaaatg

SEQ ID NO: 206455 - DNA, 30 bp, Artificial Sequence
  Synthetic oligonucleotide
agttcaattgacggtgaagttattgaaatg

SEQ ID NO: 206456 - DNA, 30 bp, Artificial Sequence
  Synthetic oligonucleotide
cgatcgatcttcgccacacgccactaaatg

SEQ ID NO: 206457 - DNA, 30 bp, Artificial Sequence
  Synthetic oligonucleotide
ataatcacgttgctgtgttgggactaaatg

SEQ ID NO: 206458 - DNA, 30 bp, Artificial Sequence
  Synthetic oligonucleotide
ttctggcattcatatgcagtgaagtaaatg

SEQ ID NO: 206459 - DNA, 30 bp, Artificial Sequence
  Synthetic oligonucleotide
cacaggaaactaaggttgcacaggtaaatg

SEQ ID NO: 206460 - DNA, 30 bp, Artificial Sequence
  Synthetic oligonucleotide
ctgagcagttacatagagtaatcttaaatg

SEQ ID NO: 206461 - DNA, 30 bp, Artificial Sequence
  Synthetic oligonucleotide
acagtgatcctaggaatggcgctttaaatg

SEQ ID NO: 206462 - DNA, 30 bp, Artificial Sequence
  Synthetic oligonucleotide
taacgtgttcgcgtttgaagaccgacaatg

SEQ ID NO: 206463 - DNA, 30 bp, Artificial Sequence
  Synthetic oligonucleotide
gggaccgtcgtccgagtcgagctgacaatg

SEQ ID NO: 206464 - DNA, 30 bp, Artificial Sequence
  Synthetic oligonucleotide
cgggtctggatctgtgacaccataccaatg

SEQ ID NO: 206465 - DNA, 30 bp, Artificial Sequence
  Synthetic oligonucleotide
ggagtacagtcggctatgaggaggccaatg

SEQ ID NO: 206466 - DNA, 30 bp, Artificial Sequence
  Synthetic oligonucleotide
ctaatccaggaagacacagctgttccaatg

SEQ ID NO: 206467 - DNA, 30 bp, Artificial Sequence
  Synthetic oligonucleotide
gggtccggatagcctgagggattggcaatg

SEQ ID NO: 206468 - DNA, 30 bp, Artificial Sequence
  Synthetic oligonucleotide
tgctgggagccatacaggcacttggcaatg

SEQ ID NO: 206469 - DNA, 30 bp, Artificial Sequence
  Synthetic oligonucleotide
aagtgtacgtaacactcgtatcaatcaatg

SEQ ID NO: 206470 - DNA, 30 bp, Artificial Sequence
  Synthetic oligonucleotide
agagtcaccggatacatgtttccctcaatg

SEQ ID NO: 206471 - DNA, 30 bp, Artificial Sequence
  Synthetic oligonucleotide
ctcctctcgggtggtggaaatttctcaatg

SEQ ID NO: 206472 - DNA, 30 bp, Artificial Sequence
  Synthetic oligonucleotide
tgaggacctatcatgcatgtactgtcaatg

SEQ ID NO: 206473 - DNA, 30 bp, Artificial Sequence
  Synthetic oligonucleotide
ggcaagtctaacagtgcatgatattcaatg

SEQ ID NO: 206474 - DNA, 30 bp, Artificial Sequence
  Synthetic oligonucleotide
cactacgactaacatgcttgaggaagaatg

SEQ ID NO: 206475 - DNA, 30 bp, Artificial Sequence
  Synthetic oligonucleotide
gctggctgtttggctcaaattacgagaatg

SEQ ID NO: 206476 - DNA, 30 bp, Artificial Sequence
  Synthetic oligonucleotide
aaaaggtccgggtgaccgcaatggagaatg

SEQ ID NO: 206477 - DNA, 30 bp, Artificial Sequence
  Synthetic oligonucleotide
ttggccaactccaagttgtcttttagaatg

SEQ ID NO: 206478 - DNA, 30 bp, Artificial Sequence
  Synthetic oligonucleotide
gacttggcctgtattaatggttaccgaatg

SEQ ID NO: 206479 - DNA, 30 bp, Artificial Sequence
  Synthetic oligonucleotide
aacagaggactgttatgttatagccgaatg

SEQ ID NO: 206480 - DNA, 30 bp, Artificial Sequence
  Synthetic oligonucleotide
tcaactaaggcaattacgacctagcgaatg

SEQ ID NO: 206481 - DNA, 30 bp, Artificial Sequence
  Synthetic oligonucleotide
aaagatgaaacactacggtgattgcgaatg

SEQ ID NO: 206482 - DNA, 30 bp, Artificial Sequence
  Synthetic oligonucleotide
caatggttggtcacactctcgaatcgaatg

SEQ ID NO: 206483 - DNA, 30 bp, Artificial Sequence
  Synthetic oligonucleotide
cgcgccatacgcgtctatattgatcgaatg

SEQ ID NO: 206484 - DNA, 30 bp, Artificial Sequence
  Synthetic oligonucleotide
cccggtcaggttaatggcaaactaggaatg

SEQ ID NO: 206485 - DNA, 30 bp, Artificial Sequence
  Synthetic oligonucleotide
gagctgtcgaacatctagtattgcggaatg

SEQ ID NO: 206486 - DNA, 30 bp, Artificial Sequence
  Synthetic oligonucleotide
caggaagggttatcggcagataatggaatg

SEQ ID NO: 206487 - DNA, 30 bp, Artificial Sequence
  Synthetic oligonucleotide
ggccgggagcacagggtatcccctggaatg

SEQ ID NO: 206488 - DNA, 30 bp, Artificial Sequence
  Synthetic oligonucleotide
gcgccagcacgttgttcaacccgtggaatg

SEQ ID NO: 206489 - DNA, 30 bp, Artificial Sequence
  Synthetic oligonucleotide
caaatcggaggtcacatttacggatgaatg

SEQ ID NO: 206490 - DNA, 30 bp, Artificial Sequence
  Synthetic oligonucleotide
aggggaaaataactcagccttcactgaatg

SEQ ID NO: 206491 - DNA, 30 bp, Artificial Sequence
  Synthetic oligonucleotide
agtggtgattgaacaccttcttgctgaatg

SEQ ID NO: 206492 - DNA, 30 bp, Artificial Sequence
  Synthetic oligonucleotide
tacttatatcgttcgtcacaaatttgaatg

SEQ ID NO: 206493 - DNA, 30 bp, Artificial Sequence
  Synthetic oligonucleotide
gttgcggagtattccatgcgtatttgaatg

SEQ ID NO: 206494 - DNA, 30 bp, Artificial Sequence
  Synthetic oligonucleotide
agagcaccctgcgacgccgaccaaataatg

SEQ ID NO: 206495 - DNA, 30 bp, Artificial Sequence
  Synthetic oligonucleotide
ctcatttgacttgctggtaagtccataatg

SEQ ID NO: 206496 - DNA, 30 bp, Artificial Sequence
  Synthetic oligonucleotide
tgctctttacgggagaagtcaggcataatg

SEQ ID NO: 206497 - DNA, 30 bp, Artificial Sequence
  Synthetic oligonucleotide
tctaggcgtttgtttcaggctacgataatg

SEQ ID NO: 206498 - DNA, 30 bp, Artificial Sequence
  Synthetic oligonucleotide
gagcagtggtcacatctgctttatataatg

SEQ ID NO: 206499 - DNA, 30 bp, Artificial Sequence
  Synthetic oligonucleotide
gcttcagcaagaattggagttgctataatg

SEQ ID NO: 206500 - DNA, 30 bp, Artificial Sequence
  Synthetic oligonucleotide
tgggggatatcagataatcccgttataatg

SEQ ID NO: 206501 - DNA, 30 bp, Artificial Sequence
  Synthetic oligonucleotide
ttactacccacgtctacggtttcactaatg

SEQ ID NO: 206502 - DNA, 30 bp, Artificial Sequence
  Synthetic oligonucleotide
ttggataagcgagattctggcagactaatg

SEQ ID NO: 206503 - DNA, 30 bp, Artificial Sequence
  Synthetic oligonucleotide
cacataggatgttgggaatgaatcctaatg

SEQ ID NO: 206504 - DNA, 30 bp, Artificial Sequence
  Synthetic oligonucleotide
tgtaagacctaagcggactcaaaagtaatg

SEQ ID NO: 206505 - DNA, 30 bp, Artificial Sequence
  Synthetic oligonucleotide
ataagtaatccagagctttcgggagtaatg

SEQ ID NO: 206506 - DNA, 30 bp, Artificial Sequence
  Synthetic oligonucleotide
taactgttgttccaaagcggatacgtaatg

SEQ ID NO: 206507 - DNA, 30 bp, Artificial Sequence
  Synthetic oligonucleotide
ctcattatcccatgaaaaccaggcgtaatg

SEQ ID NO: 206508 - DNA, 30 bp, Artificial Sequence
  Synthetic oligonucleotide
ttgggtaggtgaccaagaaacgtggtaatg

SEQ ID NO: 206509 - DNA, 30 bp, Artificial Sequence
  Synthetic oligonucleotide
aataacaaaactagagttcgaaatgtaatg

SEQ ID NO: 206510 - DNA, 30 bp, Artificial Sequence
  Synthetic oligonucleotide
gaagtctaaaaactgactcctcttgtaatg

SEQ ID NO: 206511 - DNA, 30 bp, Artificial Sequence
  Synthetic oligonucleotide
ccgggtagttactttgaatgctcattaatg

SEQ ID NO: 206512 - DNA, 30 bp, Artificial Sequence
  Synthetic oligonucleotide
ctggacaaatagataatctgcggattaatg

SEQ ID NO: 206513 - DNA, 30 bp, Artificial Sequence
  Synthetic oligonucleotide
gtgtaataacgttacaagcgtaacttaatg

SEQ ID NO: 206514 - DNA, 30 bp, Artificial Sequence
  Synthetic oligonucleotide
cggattgtcgttagttttgaagagttaatg

SEQ ID NO: 206515 - DNA, 30 bp, Artificial Sequence
  Synthetic oligonucleotide
ttgacttagtgaaagcgtgcagctttaatg

SEQ ID NO: 206516 - DNA, 30 bp, Artificial Sequence
  Synthetic oligonucleotide
tccacggttaagcaagcttcaggtttaatg

SEQ ID NO: 206517 - DNA, 30 bp, Artificial Sequence
  Synthetic oligonucleotide
attagataagttagggcatcaaaaaacatg

SEQ ID NO: 206518 - DNA, 30 bp, Artificial Sequence
  Synthetic oligonucleotide
caactatcatgctacagatggcaaaacatg

SEQ ID NO: 206519 - DNA, 30 bp, Artificial Sequence
  Synthetic oligonucleotide
ggtgccgtgatccgccatagaggaaacatg

SEQ ID NO: 206520 - DNA, 30 bp, Artificial Sequence
  Synthetic oligonucleotide
ctgcggcaaggacttctcggccgcaacatg

SEQ ID NO: 206521 - DNA, 30 bp, Artificial Sequence
  Synthetic oligonucleotide
aatgaatcaccgacgtatgccactaacatg

SEQ ID NO: 206522 - DNA, 30 bp, Artificial Sequence
  Synthetic oligonucleotide
tactaccggtttcgcaacccgggacacatg

SEQ ID NO: 206523 - DNA, 30 bp, Artificial Sequence
  Synthetic oligonucleotide
gaaacaacaactgggcgtcaattccacatg

SEQ ID NO: 206524 - DNA, 30 bp, Artificial Sequence
  Synthetic oligonucleotide
gatacacttggtcctagcctacagcacatg

SEQ ID NO: 206525 - DNA, 30 bp, Artificial Sequence
  Synthetic oligonucleotide
ctttccagaaccataggtaataaagacatg

SEQ ID NO: 206526 - DNA, 30 bp, Artificial Sequence
  Synthetic oligonucleotide
cccgtcagtgtttactaggggtcagacatg

SEQ ID NO: 206527 - DNA, 30 bp, Artificial Sequence
  Synthetic oligonucleotide
gctctcctaagcgtggtacaaatagacatg

SEQ ID NO: 206528 - DNA, 30 bp, Artificial Sequence
  Synthetic oligonucleotide
tgtgggagatttttagggaattgcgacatg

SEQ ID NO: 206529 - DNA, 30 bp, Artificial Sequence
  Synthetic oligonucleotide
tgatattgtaggcatgtgttctcggacatg

SEQ ID NO: 206530 - DNA, 30 bp, Artificial Sequence
  Synthetic oligonucleotide
tataagcgcagcgggagttcgggggacatg

SEQ ID NO: 206531 - DNA, 30 bp, Artificial Sequence
  Synthetic oligonucleotide
tcgtaccaaaattggctggaaaatgacatg

SEQ ID NO: 206532 - DNA, 30 bp, Artificial Sequence
  Synthetic oligonucleotide
aaccccgacgaatgactgtgaaatgacatg

SEQ ID NO: 206533 - DNA, 30 bp, Artificial Sequence
  Synthetic oligonucleotide
ctacagtcaacggttagtagtcatgacatg

SEQ ID NO: 206534 - DNA, 30 bp, Artificial Sequence
  Synthetic oligonucleotide
gcacgtccatgagcgtttcaacaatacatg

SEQ ID NO: 206535 - DNA, 30 bp, Artificial Sequence
  Synthetic oligonucleotide
aggctcccaatcgatgtagatcgatacatg

SEQ ID NO: 206536 - DNA, 30 bp, Artificial Sequence
  Synthetic oligonucleotide
aagaatgcgatgaagaccgtgatatacatg

SEQ ID NO: 206537 - DNA, 30 bp, Artificial Sequence
  Synthetic oligonucleotide
aacacgttgctggtcagtcctcgctacatg

SEQ ID NO: 206538 - DNA, 30 bp, Artificial Sequence
  Synthetic oligonucleotide
agaacgcataatataaaagttttgtacatg

SEQ ID NO: 206539 - DNA, 30 bp, Artificial Sequence
  Synthetic oligonucleotide
gttgggaggcgaaaagattcagtttacatg

SEQ ID NO: 206540 - DNA, 31 bp, Artificial Sequence
  Synthetic oligonucleotide
aatcgaggtagagcctcgtatacaaaccatg

SEQ ID NO: 206541 - DNA, 30 bp, Artificial Sequence
  Synthetic oligonucleotide
ccccattccacgagttctgtctagaccatg

SEQ ID NO: 206542 - DNA, 30 bp, Artificial Sequence
  Synthetic oligonucleotide
atgacaatttgctcaaataaggcgaccatg

SEQ ID NO: 206543 - DNA, 30 bp, Artificial Sequence
  Synthetic oligonucleotide
actaatgttggctcaatcgacatgaccatg

SEQ ID NO: 206544 - DNA, 30 bp, Artificial Sequence
  Synthetic oligonucleotide
tcgaaagttccagcataccgggctcccatg

SEQ ID NO: 206545 - DNA, 30 bp, Artificial Sequence
  Synthetic oligonucleotide
ctggaatgggtggtgatgcgcgacgccatg

SEQ ID NO: 206546 - DNA, 30 bp, Artificial Sequence
  Synthetic oligonucleotide
atgggtgacaacgtgttacgggccgccatg

SEQ ID NO: 206547 - DNA, 30 bp, Artificial Sequence
  Synthetic oligonucleotide
gggtcctacattaggaataaaagggccatg

SEQ ID NO: 206548 - DNA, 30 bp, Artificial Sequence
  Synthetic oligonucleotide
gtacggagattctggacggcttctgccatg

SEQ ID NO: 206549 - DNA, 30 bp, Artificial Sequence
  Synthetic oligonucleotide
ataagtccgcgccgcaaacccgaatccatg

SEQ ID NO: 206550 - DNA, 30 bp, Artificial Sequence
  Synthetic oligonucleotide
tctattcccgtaggttgaccgggatccatg

SEQ ID NO: 206551 - DNA, 30 bp, Artificial Sequence
  Synthetic oligonucleotide
taagacgactgcgtgtttcgttagtccatg

SEQ ID NO: 206552 - DNA, 30 bp, Artificial Sequence
  Synthetic oligonucleotide
ggcagaccactaaatagccctaggtccatg

SEQ ID NO: 206553 - DNA, 30 bp, Artificial Sequence
  Synthetic oligonucleotide
gtgccacagaaccctaccacctcttccatg

SEQ ID NO: 206554 - DNA, 30 bp, Artificial Sequence
  Synthetic oligonucleotide
acgtcctcataattcacatggatttccatg

SEQ ID NO: 206555 - DNA, 30 bp, Artificial Sequence
  Synthetic oligonucleotide
aagcagtggaatcatagcacagaaagcatg

SEQ ID NO: 206556 - DNA, 30 bp, Artificial Sequence
  Synthetic oligonucleotide
aagcgtccagtactcgtcttctaaagcatg

SEQ ID NO: 206557 - DNA, 30 bp, Artificial Sequence
  Synthetic oligonucleotide
agatagggtgagagagtcaatggaagcatg

SEQ ID NO: 206558 - DNA, 30 bp, Artificial Sequence
  Synthetic oligonucleotide
acctggaccggcacaattcacttgagcatg

SEQ ID NO: 206559 - DNA, 30 bp, Artificial Sequence
  Synthetic oligonucleotide
acaaagaacacttggctcgtcttgagcatg

SEQ ID NO: 206560 - DNA, 30 bp, Artificial Sequence
  Synthetic oligonucleotide
gaaggtctatgttgaatgaaaaatagcatg

SEQ ID NO: 206561 - DNA, 30 bp, Artificial Sequence
  Synthetic oligonucleotide
agttcataagggtgacggtactttagcatg

SEQ ID NO: 206562 - DNA, 30 bp, Artificial Sequence
  Synthetic oligonucleotide
atggtaaactcgcgttcgtgagcacgcatg

SEQ ID NO: 206563 - DNA, 30 bp, Artificial Sequence
  Synthetic oligonucleotide
taccagtgcttacttaaccgatcccgcatg

SEQ ID NO: 206564 - DNA, 30 bp, Artificial Sequence
  Synthetic oligonucleotide
atacaataagtcctcttcttataaggcatg

SEQ ID NO: 206565 - DNA, 30 bp, Artificial Sequence
  Synthetic oligonucleotide
tccaatccacaggtttagctatagggcatg

SEQ ID NO: 206566 - DNA, 30 bp, Artificial Sequence
  Synthetic oligonucleotide
attgcgtgccccatcgatgtgtgtggcatg

SEQ ID NO: 206567 - DNA, 30 bp, Artificial Sequence
  Synthetic oligonucleotide
gatgaatgagcccggaagcaagttggcatg

SEQ ID NO: 206568 - DNA, 30 bp, Artificial Sequence
  Synthetic oligonucleotide
attgtgcagaactctcagggcgaatgcatg

SEQ ID NO: 206569 - DNA, 30 bp, Artificial Sequence
  Synthetic oligonucleotide
actgttatctatcgctaccgtacttgcatg

SEQ ID NO: 206570 - DNA, 30 bp, Artificial Sequence
  Synthetic oligonucleotide
gatcggttgctgttgcaggggcgaatcatg

SEQ ID NO: 206571 - DNA, 30 bp, Artificial Sequence
  Synthetic oligonucleotide
agatagcacactggacctggttgcatcatg

SEQ ID NO: 206572 - DNA, 30 bp, Artificial Sequence
  Synthetic oligonucleotide
cggcgacccgagttgcgtttcgagatcatg

SEQ ID NO: 206573 - DNA, 30 bp, Artificial Sequence
  Synthetic oligonucleotide
ctcagtgctcggtgagcaaggctgatcatg

SEQ ID NO: 206574 - DNA, 30 bp, Artificial Sequence
  Synthetic oligonucleotide
tgtgctcgggcctcacttcacgatatcatg

SEQ ID NO: 206575 - DNA, 30 bp, Artificial Sequence
  Synthetic oligonucleotide
agggtgttgctgcgcggggccgctatcatg

SEQ ID NO: 206576 - DNA, 30 bp, Artificial Sequence
  Synthetic oligonucleotide
acacacacaccattagtcacgagtatcatg

SEQ ID NO: 206577 - DNA, 30 bp, Artificial Sequence
  Synthetic oligonucleotide
tcagcttttattctccaagcattgctcatg

SEQ ID NO: 206578 - DNA, 30 bp, Artificial Sequence
  Synthetic oligonucleotide
catccgcaacctaggaaatgttctctcatg

SEQ ID NO: 206579 - DNA, 30 bp, Artificial Sequence
  Synthetic oligonucleotide
aagtacggcaagcttgatttggcagtcatg

SEQ ID NO: 206580 - DNA, 30 bp, Artificial Sequence
  Synthetic oligonucleotide
tttaacgacgtttaatggtcgagcgtcatg

SEQ ID NO: 206581 - DNA, 30 bp, Artificial Sequence
  Synthetic oligonucleotide
tcagtataataccaaagcatagcattcatg

SEQ ID NO: 206582 - DNA, 30 bp, Artificial Sequence
  Synthetic oligonucleotide
ctctgcatgtatcttacggccgtgttcatg

SEQ ID NO: 206583 - DNA, 30 bp, Artificial Sequence
  Synthetic oligonucleotide
tcagggtggttatcttcacgagctttcatg

SEQ ID NO: 206584 - DNA, 30 bp, Artificial Sequence
  Synthetic oligonucleotide
tcgaaacacgaacattgaaaacttttcatg

SEQ ID NO: 206585 - DNA, 30 bp, Artificial Sequence
  Synthetic oligonucleotide
atctacttaaagtgggtaacaagaaagatg

SEQ ID NO: 206586 - DNA, 30 bp, Artificial Sequence
  Synthetic oligonucleotide
ggcaagcaatgaccaagtccagtaaagatg

SEQ ID NO: 206587 - DNA, 30 bp, Artificial Sequence
  Synthetic oligonucleotide
ctgatactacgctggtacgtgatcaagatg

SEQ ID NO: 206588 - DNA, 31 bp, Artificial Sequence
  Synthetic oligonucleotide
cctttctagtgactatacggtatttaagatg

SEQ ID NO: 206589 - DNA, 30 bp, Artificial Sequence
  Synthetic oligonucleotide
acctatttcatgacctcgtgccggcagatg

SEQ ID NO: 206590 - DNA, 30 bp, Artificial Sequence
  Synthetic oligonucleotide
gatatagtgggccgccaggtgatgcagatg

SEQ ID NO: 206591 - DNA, 30 bp, Artificial Sequence
  Synthetic oligonucleotide
taccgctaagcggtagcacgtgtgcagatg

SEQ ID NO: 206592 - DNA, 30 bp, Artificial Sequence
  Synthetic oligonucleotide
gtggcagcccaacatagccacgctcagatg

SEQ ID NO: 206593 - DNA, 30 bp, Artificial Sequence
  Synthetic oligonucleotide
ggtgccccgaaagtcggctgcctcgagatg

SEQ ID NO: 206594 - DNA, 30 bp, Artificial Sequence
  Synthetic oligonucleotide
atgtcactataagcgcggccatgggagatg

SEQ ID NO: 206595 - DNA, 30 bp, Artificial Sequence
  Synthetic oligonucleotide
agcagcttgctgtagctacactgtgagatg

SEQ ID NO: 206596 - DNA, 30 bp, Artificial Sequence
  Synthetic oligonucleotide
tctggacgaatttagggactgccatagatg

SEQ ID NO: 206597 - DNA, 31 bp, Artificial Sequence
  Synthetic oligonucleotide
cagggatctctcagaataaatacactagatg

SEQ ID NO: 206598 - DNA, 31 bp, Artificial Sequence
  Synthetic oligonucleotide
caatagcgactccagtgtggcgatctagatg

SEQ ID NO: 206599 - DNA, 30 bp, Artificial Sequence
  Synthetic oligonucleotide
ttcggggctaaaaggatgatggagtagatg

SEQ ID NO: 206600 - DNA, 30 bp, Artificial Sequence
  Synthetic oligonucleotide
aggcaaccggtttagcccgggacttagatg

SEQ ID NO: 206601 - DNA, 30 bp, Artificial Sequence
  Synthetic oligonucleotide
accggtatgaaacgggtactgtacacgatg

SEQ ID NO: 206602 - DNA, 30 bp, Artificial Sequence
  Synthetic oligonucleotide
aaatgaacggatcagacccggggcacgatg

SEQ ID NO: 206603 - DNA, 30 bp, Artificial Sequence
  Synthetic oligonucleotide
aggtgctgccttgtgcatggtaagacgatg

SEQ ID NO: 206604 - DNA, 30 bp, Artificial Sequence
  Synthetic oligonucleotide
agtatacggcccgtagccattacgacgatg

SEQ ID NO: 206605 - DNA, 30 bp, Artificial Sequence
  Synthetic oligonucleotide
ttaaatgctgggaatacccgcactacgatg

SEQ ID NO: 206606 - DNA, 30 bp, Artificial Sequence
  Synthetic oligonucleotide
agatggaactgcaccccaagaacaccgatg

SEQ ID NO: 206607 - DNA, 30 bp, Artificial Sequence
  Synthetic oligonucleotide
ctcgtgatgcgcgtgctactttgcccgatg

SEQ ID NO: 206608 - DNA, 30 bp, Artificial Sequence
  Synthetic oligonucleotide
agatggtatatcaaaggacataagccgatg

SEQ ID NO: 206609 - DNA, 30 bp, Artificial Sequence
  Synthetic oligonucleotide
acttggacggcggtgggggtgaatccgatg

SEQ ID NO: 206610 - DNA, 30 bp, Artificial Sequence
  Synthetic oligonucleotide
aaaataagggagggggtccaatcagcgatg

SEQ ID NO: 206611 - DNA, 30 bp, Artificial Sequence
  Synthetic oligonucleotide
aggtttagcgttaccccaaccgccgcgatg

SEQ ID NO: 206612 - DNA, 30 bp, Artificial Sequence
  Synthetic oligonucleotide
cgacctagtctgacggatctggccgcgatg

SEQ ID NO: 206613 - DNA, 30 bp, Artificial Sequence
  Synthetic oligonucleotide
tcaccaatatgagtgaagtctgccgcgatg

SEQ ID NO: 206614 - DNA, 30 bp, Artificial Sequence
  Synthetic oligonucleotide
tactatcgaagggtcttatctcatgcgatg

SEQ ID NO: 206615 - DNA, 30 bp, Artificial Sequence
  Synthetic oligonucleotide
taattaagaacgacgatgtggtatgcgatg

SEQ ID NO: 206616 - DNA, 30 bp, Artificial Sequence
  Synthetic oligonucleotide
cgggcgctacgacggttagacattgcgatg

SEQ ID NO: 206617 - DNA, 30 bp, Artificial Sequence
  Synthetic oligonucleotide
cgcggtacgcctactcttagtgaaaggatg

SEQ ID NO: 206618 - DNA, 30 bp, Artificial Sequence
  Synthetic oligonucleotide
aagatacacgagatccgtaagtcacggatg

SEQ ID NO: 206619 - DNA, 30 bp, Artificial Sequence
  Synthetic oligonucleotide
aggatattaagaccgccggcaccccggatg

SEQ ID NO: 206620 - DNA, 30 bp, Artificial Sequence
  Synthetic oligonucleotide
aaatgtcagtgaaaaggatgatagcggatg

SEQ ID NO: 206621 - DNA, 30 bp, Artificial Sequence
  Synthetic oligonucleotide
aagtagaacaaaccacaggggtagcggatg

SEQ ID NO: 206622 - DNA, 30 bp, Artificial Sequence
  Synthetic oligonucleotide
atttgttcgaagaatattcatgatcggatg

SEQ ID NO: 206623 - DNA, 30 bp, Artificial Sequence
  Synthetic oligonucleotide
gaaacccagcatagggccgacaaagggatg

SEQ ID NO: 206624 - DNA, 30 bp, Artificial Sequence
  Synthetic oligonucleotide
ctttactcaattatgccatgaggtgggatg

SEQ ID NO: 206625 - DNA, 30 bp, Artificial Sequence
  Synthetic oligonucleotide
ctactagagaaatttccggacgttgggatg

SEQ ID NO: 206626 - DNA, 30 bp, Artificial Sequence
  Synthetic oligonucleotide
aggtacgtttacttatcgatctagtggatg

SEQ ID NO: 206627 - DNA, 30 bp, Artificial Sequence
  Synthetic oligonucleotide
acactgatctagagtacaacaagttggatg

SEQ ID NO: 206628 - DNA, 30 bp, Artificial Sequence
  Synthetic oligonucleotide
ggtggctcgcgcggggactgtatttggatg

SEQ ID NO: 206629 - DNA, 30 bp, Artificial Sequence
  Synthetic oligonucleotide
ggctttgcttgagtagttagatccatgatg

SEQ ID NO: 206630 - DNA, 30 bp, Artificial Sequence
  Synthetic oligonucleotide
taattcggggaccgcgggggctatatgatg

SEQ ID NO: 206631 - DNA, 30 bp, Artificial Sequence
  Synthetic oligonucleotide
ggatccctacgttatctaacccttatgatg

SEQ ID NO: 206632 - DNA, 30 bp, Artificial Sequence
  Synthetic oligonucleotide
cacgcggcaaaatttcccattcttctgatg

SEQ ID NO: 206633 - DNA, 30 bp, Artificial Sequence
  Synthetic oligonucleotide
gatttgcacacgtgccggacataagtgatg

SEQ ID NO: 206634 - DNA, 30 bp, Artificial Sequence
  Synthetic oligonucleotide
ccattgattgtccgttgcaagatcgtgatg

SEQ ID NO: 206635 - DNA, 30 bp, Artificial Sequence
  Synthetic oligonucleotide
gcatgtaccagattgagtccagtggtgatg

SEQ ID NO: 206636 - DNA, 30 bp, Artificial Sequence
  Synthetic oligonucleotide
aaagcgcgttttgggcctggtttggtgatg

SEQ ID NO: 206637 - DNA, 30 bp, Artificial Sequence
  Synthetic oligonucleotide
agcgttgtgtctatttcggacaatgtgatg

SEQ ID NO: 206638 - DNA, 30 bp, Artificial Sequence
  Synthetic oligonucleotide
acatatagaacatgcaattgtgcattgatg

SEQ ID NO: 206639 - DNA, 30 bp, Artificial Sequence
  Synthetic oligonucleotide
atacggggattaccaataaagggattgatg

SEQ ID NO: 206640 - DNA, 30 bp, Artificial Sequence
  Synthetic oligonucleotide
taagcgagcatacgtggtcataccttgatg

SEQ ID NO: 206641 - DNA, 30 bp, Artificial Sequence
  Synthetic oligonucleotide
ttggacgggggtattttagcagtcttgatg

SEQ ID NO: 206642 - DNA, 30 bp, Artificial Sequence
  Synthetic oligonucleotide
ccttggaacaccctatgatatacgttgatg

SEQ ID NO: 206643 - DNA, 30 bp, Artificial Sequence
  Synthetic oligonucleotide
gacaggtatattttacaaggagctttgatg

SEQ ID NO: 206644 - DNA, 30 bp, Artificial Sequence
  Synthetic oligonucleotide
gcagacccgttgaacagttgtattttgatg

SEQ ID NO: 206645 - DNA, 30 bp, Artificial Sequence
  Synthetic oligonucleotide
cattgagagcgtaatgctgtgtttttgatg

SEQ ID NO: 206646 - DNA, 30 bp, Artificial Sequence
  Synthetic oligonucleotide
tatgccacctggggtgaattggtaaatatg

SEQ ID NO: 206647 - DNA, 30 bp, Artificial Sequence
  Synthetic oligonucleotide
gcgactggcagagacggcggagccaatatg

SEQ ID NO: 206648 - DNA, 30 bp, Artificial Sequence
  Synthetic oligonucleotide
gcgttcttagcgggctaaatagggaatatg

SEQ ID NO: 206649 - DNA, 30 bp, Artificial Sequence
  Synthetic oligonucleotide
tccgcaatatagtaaggtggacctaatatg

SEQ ID NO: 206650 - DNA, 30 bp, Artificial Sequence
  Synthetic oligonucleotide
gccttccgctcaccactagactttaatatg

SEQ ID NO: 206651 - DNA, 30 bp, Artificial Sequence
  Synthetic oligonucleotide
acttgttgaccttactcgtttgtacatatg

SEQ ID NO: 206652 - DNA, 30 bp, Artificial Sequence
  Synthetic oligonucleotide
aaggttgatcccattggatactatcatatg

SEQ ID NO: 206653 - DNA, 30 bp, Artificial Sequence
  Synthetic oligonucleotide
ctgtgcggaagacggtttttccctcatatg

SEQ ID NO: 206654 - DNA, 30 bp, Artificial Sequence
  Synthetic oligonucleotide
caagactacgtgacggaaccactagatatg

SEQ ID NO: 206655 - DNA, 30 bp, Artificial Sequence
  Synthetic oligonucleotide
cagaacgggggagtcaggaccccggatatg

SEQ ID NO: 206656 - DNA, 30 bp, Artificial Sequence
  Synthetic oligonucleotide
ggaagttaggtggggttgcgtttggatatg

SEQ ID NO: 206657 - DNA, 30 bp, Artificial Sequence
  Synthetic oligonucleotide
ggacgtggccacaaatggattattgatatg

SEQ ID NO: 206658 - DNA, 30 bp, Artificial Sequence
  Synthetic oligonucleotide
cagaagggaaagctatttggcgttgatatg

SEQ ID NO: 206659 - DNA, 30 bp, Artificial Sequence
  Synthetic oligonucleotide
gtgataaaaagaacttaaatgtaatatatg

SEQ ID NO: 206660 - DNA, 30 bp, Artificial Sequence
  Synthetic oligonucleotide
gtggtcattttaatcaaacctggctatatg

SEQ ID NO: 206661 - DNA, 30 bp, Artificial Sequence
  Synthetic oligonucleotide
tgctatcaaccgaacagtcgtacttatatg

SEQ ID NO: 206662 - DNA, 30 bp, Artificial Sequence
  Synthetic oligonucleotide
aaagagcattcctggtcgcccgccactatg

SEQ ID NO: 206663 - DNA, 30 bp, Artificial Sequence
  Synthetic oligonucleotide
cgctataattagtccaatcatgcgactatg

SEQ ID NO: 206664 - DNA, 30 bp, Artificial Sequence
  Synthetic oligonucleotide
ggagacggttggaacgaatagtcgactatg

SEQ ID NO: 206665 - DNA, 30 bp, Artificial Sequence
  Synthetic oligonucleotide
ttgcgacaggtatacgtgggtagacctatg

SEQ ID NO: 206666 - DNA, 30 bp, Artificial Sequence
  Synthetic oligonucleotide
tcggtgcgcgccagttgtaactaggctatg

SEQ ID NO: 206667 - DNA, 30 bp, Artificial Sequence
  Synthetic oligonucleotide
ggaccgtaactcaccagtatgattgctatg

SEQ ID NO: 206668 - DNA, 30 bp, Artificial Sequence
  Synthetic oligonucleotide
tcggaagacaatgcatcaagaaaatctatg

SEQ ID NO: 206669 - DNA, 30 bp, Artificial Sequence
  Synthetic oligonucleotide
ggttgaggctagcgtagagtgaaatctatg

SEQ ID NO: 206670 - DNA, 30 bp, Artificial Sequence
  Synthetic oligonucleotide
tgtccagaacactgatactataaatctatg

SEQ ID NO: 206671 - DNA, 30 bp, Artificial Sequence
  Synthetic oligonucleotide
cgtaacatatatatggcgagagtatctatg

SEQ ID NO: 206672 - DNA, 30 bp, Artificial Sequence
  Synthetic oligonucleotide
cggatacgtatcgcaacctgacactctatg

SEQ ID NO: 206673 - DNA, 30 bp, Artificial Sequence
  Synthetic oligonucleotide
actgggagattagcgcaagcgatctctatg

SEQ ID NO: 206674 - DNA, 30 bp, Artificial Sequence
  Synthetic oligonucleotide
cctagaaattctcaagcacctatctctatg

SEQ ID NO: 206675 - DNA, 30 bp, Artificial Sequence
  Synthetic oligonucleotide
taaaccttatggcatgccatagtctctatg

SEQ ID NO: 206676 - DNA, 30 bp, Artificial Sequence
  Synthetic oligonucleotide
agcattcaagaccgtatcaagtagtctatg

SEQ ID NO: 206677 - DNA, 30 bp, Artificial Sequence
  Synthetic oligonucleotide
tgatagccatctgcgaggggttggtctatg

SEQ ID NO: 206678 - DNA, 30 bp, Artificial Sequence
  Synthetic oligonucleotide
agggttatgatgccacgtcgaaaaagtatg

SEQ ID NO: 206679 - DNA, 30 bp, Artificial Sequence
  Synthetic oligonucleotide
gtggctaccttcagtagtacacaaagtatg

SEQ ID NO: 206680 - DNA, 30 bp, Artificial Sequence
  Synthetic oligonucleotide
gtcatgtcaatctgttacctagcaagtatg

SEQ ID NO: 206681 - DNA, 30 bp, Artificial Sequence
  Synthetic oligonucleotide
caatgacctatagatgggaccggaagtatg

SEQ ID NO: 206682 - DNA, 30 bp, Artificial Sequence
  Synthetic oligonucleotide
caacgggcccatcccggaaacaacagtatg

SEQ ID NO: 206683 - DNA, 30 bp, Artificial Sequence
  Synthetic oligonucleotide
gatcccgtcgacatctaagatgccagtatg

SEQ ID NO: 206684 - DNA, 30 bp, Artificial Sequence
  Synthetic oligonucleotide
gggtagaataagagctcccccggcagtatg

SEQ ID NO: 206685 - DNA, 30 bp, Artificial Sequence
  Synthetic oligonucleotide
gaacacataataggagtggcactcagtatg

SEQ ID NO: 206686 - DNA, 30 bp, Artificial Sequence
  Synthetic oligonucleotide
atgtcggtttaattggcatcatcgagtatg

SEQ ID NO: 206687 - DNA, 30 bp, Artificial Sequence
  Synthetic oligonucleotide
agttgtttgaattggacgcgttcgagtatg

SEQ ID NO: 206688 - DNA, 30 bp, Artificial Sequence
  Synthetic oligonucleotide
aaaaggtcgataactcgataagttagtatg

SEQ ID NO: 206689 - DNA, 30 bp, Artificial Sequence
  Synthetic oligonucleotide
acgaacaggctgatcttgagttttcgtatg

SEQ ID NO: 206690 - DNA, 30 bp, Artificial Sequence
  Synthetic oligonucleotide
tcagtactctataccacctaggcaggtatg

SEQ ID NO: 206691 - DNA, 30 bp, Artificial Sequence
  Synthetic oligonucleotide
tatgagctaatatccagaaaattaggtatg

SEQ ID NO: 206692 - DNA, 30 bp, Artificial Sequence
  Synthetic oligonucleotide
ccagcatactgaacatgagtggtgggtatg

SEQ ID NO: 206693 - DNA, 30 bp, Artificial Sequence
  Synthetic oligonucleotide
tatacccgagcgagtaatacgttgggtatg

SEQ ID NO: 206694 - DNA, 30 bp, Artificial Sequence
  Synthetic oligonucleotide
tacggatgcagtgctcgaaattctggtatg

SEQ ID NO: 206695 - DNA, 30 bp, Artificial Sequence
  Synthetic oligonucleotide
ccgagcgccctcgatgtggcgtcatgtatg

SEQ ID NO: 206696 - DNA, 30 bp, Artificial Sequence
  Synthetic oligonucleotide
gcacttcaagtaccattctgtggatgtatg

SEQ ID NO: 206697 - DNA, 30 bp, Artificial Sequence
  Synthetic oligonucleotide
aaggcctttgtgcgcggaattctctgtatg

SEQ ID NO: 206698 - DNA, 30 bp, Artificial Sequence
  Synthetic oligonucleotide
gggtactttatctgctttggtctgtgtatg

SEQ ID NO: 206699 - DNA, 30 bp, Artificial Sequence
  Synthetic oligonucleotide
gatgagtgctataggctaggaaattgtatg

SEQ ID NO: 206700 - DNA, 30 bp, Artificial Sequence
  Synthetic oligonucleotide
tacttggtctggaccggaacatattgtatg

SEQ ID NO: 206701 - DNA, 30 bp, Artificial Sequence
  Synthetic oligonucleotide
tcagagtctcgcaaatgagggccaattatg

SEQ ID NO: 206702 - DNA, 30 bp, Artificial Sequence
  Synthetic oligonucleotide
ccgcaataaccagcaacatggtgaattatg

SEQ ID NO: 206703 - DNA, 30 bp, Artificial Sequence
  Synthetic oligonucleotide
gcattaattatagttgactctgtaattatg

SEQ ID NO: 206704 - DNA, 30 bp, Artificial Sequence
  Synthetic oligonucleotide
caggccggatcggtagtagaagccattatg

SEQ ID NO: 206705 - DNA, 30 bp, Artificial Sequence
  Synthetic oligonucleotide
tactcaggcatacactaaaaaacgattatg

SEQ ID NO: 206706 - DNA, 30 bp, Artificial Sequence
  Synthetic oligonucleotide
tatgcttctgtacagctgattgggattatg

SEQ ID NO: 206707 - DNA, 30 bp, Artificial Sequence
  Synthetic oligonucleotide
gaaggtctaaagcaagtgcaactgattatg

SEQ ID NO: 206708 - DNA, 30 bp, Artificial Sequence
  Synthetic oligonucleotide
tacagtttctatagagaataggatattatg

SEQ ID NO: 206709 - DNA, 30 bp, Artificial Sequence
  Synthetic oligonucleotide
tgaaacttaagcaactcggcgtgtattatg

SEQ ID NO: 206710 - DNA, 30 bp, Artificial Sequence
  Synthetic oligonucleotide
aacactcctcaatgtgtcagtagacttatg

SEQ ID NO: 206711 - DNA, 30 bp, Artificial Sequence
  Synthetic oligonucleotide
gacgccacctatgtcaaaaaagtgcttatg

SEQ ID NO: 206712 - DNA, 30 bp, Artificial Sequence
  Synthetic oligonucleotide
agccaagtgaggagctccagggatcttatg

SEQ ID NO: 206713 - DNA, 30 bp, Artificial Sequence
  Synthetic oligonucleotide
cataattttggtgtgggttcctatcttatg

SEQ ID NO: 206714 - DNA, 30 bp, Artificial Sequence
  Synthetic oligonucleotide
ggcttttggtcgaaattgtcaaaggttatg

SEQ ID NO: 206715 - DNA, 30 bp, Artificial Sequence
  Synthetic oligonucleotide
tgggaagattaatgatcttctaatgttatg

SEQ ID NO: 206716 - DNA, 30 bp, Artificial Sequence
  Synthetic oligonucleotide
agtaagaggaaaattaggcattcttttatg

SEQ ID NO: 206717 - DNA, 30 bp, Artificial Sequence
  Synthetic oligonucleotide
gggactcctcgtttttactgagacaaactg

SEQ ID NO: 206718 - DNA, 30 bp, Artificial Sequence
  Synthetic oligonucleotide
cagatagtgaacatagcagttcccaaactg

SEQ ID NO: 206719 - DNA, 30 bp, Artificial Sequence
  Synthetic oligonucleotide
taacggagtaacccatctgttatcaaactg

SEQ ID NO: 206720 - DNA, 30 bp, Artificial Sequence
  Synthetic oligonucleotide
tagagaattcgtagaaggcagttgaaactg

SEQ ID NO: 206721 - DNA, 30 bp, Artificial Sequence
  Synthetic oligonucleotide
tagaggatgaaataagatgttgcccaactg

SEQ ID NO: 206722 - DNA, 30 bp, Artificial Sequence
  Synthetic oligonucleotide
taggtgcgcgagtaccggccagagcaactg

SEQ ID NO: 206723 - DNA, 30 bp, Artificial Sequence
  Synthetic oligonucleotide
gccagacccagaatatatggccggcaactg

SEQ ID NO: 206724 - DNA, 30 bp, Artificial Sequence
  Synthetic oligonucleotide
ctagtgtggacaagtagacgtgggcaactg

SEQ ID NO: 206725 - DNA, 30 bp, Artificial Sequence
  Synthetic oligonucleotide
cataccaacatcgacctgatttctcaactg

SEQ ID NO: 206726 - DNA, 30 bp, Artificial Sequence
  Synthetic oligonucleotide
tgtaggctactggtaagttcaggtcaactg

SEQ ID NO: 206727 - DNA, 30 bp, Artificial Sequence
  Synthetic oligonucleotide
gctgagagttagtcccctagtggtcaactg

SEQ ID NO: 206728 - DNA, 30 bp, Artificial Sequence
  Synthetic oligonucleotide
atatttcatatgtggtacggtgcagaactg

SEQ ID NO: 206729 - DNA, 30 bp, Artificial Sequence
  Synthetic oligonucleotide
cactacagagagtgataaatacacgaactg

SEQ ID NO: 206730 - DNA, 30 bp, Artificial Sequence
  Synthetic oligonucleotide
gacgtctgtgacccaggagatcgtgaactg

SEQ ID NO: 206731 - DNA, 30 bp, Artificial Sequence
  Synthetic oligonucleotide
gtttggacaatgtagaatgatcactaactg

SEQ ID NO: 206732 - DNA, 30 bp, Artificial Sequence
  Synthetic oligonucleotide
aggggtgacaacggctttttttactaactg

SEQ ID NO: 206733 - DNA, 29 bp, Artificial Sequence
  Synthetic oligonucleotide
agtggacggagaaaaggacacgctaactg

SEQ ID NO: 206734 - DNA, 30 bp, Artificial Sequence
  Synthetic oligonucleotide
gtgtgaacttaaagtgacaggcgctaactg

SEQ ID NO: 206735 - DNA, 30 bp, Artificial Sequence
  Synthetic oligonucleotide
gtacagcgttatatcgagcatacttaactg

SEQ ID NO: 206736 - DNA, 30 bp, Artificial Sequence
  Synthetic oligonucleotide
accaagtaatacctgagacacatttaactg

SEQ ID NO: 206737 - DNA, 30 bp, Artificial Sequence
  Synthetic oligonucleotide
tatcgtctcgtcgttagggatccaacactg

SEQ ID NO: 206738 - DNA, 30 bp, Artificial Sequence
  Synthetic oligonucleotide
gaggtaaggtataatttcatatcaacactg

SEQ ID NO: 206739 - DNA, 30 bp, Artificial Sequence
  Synthetic oligonucleotide
tctctacaggcatggcttttgaagacactg

SEQ ID NO: 206740 - DNA, 30 bp, Artificial Sequence
  Synthetic oligonucleotide
aagtggtgtttaaggaaatcagtgacactg

SEQ ID NO: 206741 - DNA, 30 bp, Artificial Sequence
  Synthetic oligonucleotide
tgtcggtatgctcaaatagcgagtacactg

SEQ ID NO: 206742 - DNA, 29 bp, Artificial Sequence
  Synthetic oligonucleotide
agtgacagtctggctagaggcgtacactg

SEQ ID NO: 206743 - DNA, 30 bp, Artificial Sequence
  Synthetic oligonucleotide
gggctggcgcatattgtaatacttacactg

SEQ ID NO: 206744 - DNA, 30 bp, Artificial Sequence
  Synthetic oligonucleotide
gaacaaagtgaaggttttgctgaaccactg

SEQ ID NO: 206745 - DNA, 30 bp, Artificial Sequence
  Synthetic oligonucleotide
taaccagtgttatcttggtaaacaccactg

SEQ ID NO: 206746 - DNA, 30 bp, Artificial Sequence
  Synthetic oligonucleotide
tgaatcaatgttatgatcatcttaccactg

SEQ ID NO: 206747 - DNA, 30 bp, Artificial Sequence
  Synthetic oligonucleotide
tgtcagactgaaaactgtcgtaggccactg

SEQ ID NO: 206748 - DNA, 30 bp, Artificial Sequence
  Synthetic oligonucleotide
ctattaaagtaggagacgccgattccactg

SEQ ID NO: 206749 - DNA, 30 bp, Artificial Sequence
  Synthetic oligonucleotide
gtatacgaaactcgaggttgtatagcactg

SEQ ID NO: 206750 - DNA, 30 bp, Artificial Sequence
  Synthetic oligonucleotide
gcggtttatacgggcgtactgagggcactg

SEQ ID NO: 206751 - DNA, 30 bp, Artificial Sequence
  Synthetic oligonucleotide
tcatatggccatacgggggctgttgcactg

SEQ ID NO: 206752 - DNA, 30 bp, Artificial Sequence
  Synthetic oligonucleotide
gtgcaccgaactctgcgaccggagtcactg

SEQ ID NO: 206753 - DNA, 30 bp, Artificial Sequence
  Synthetic oligonucleotide
gtaatttactaaacgagaaactaaagactg

SEQ ID NO: 206754 - DNA, 30 bp, Artificial Sequence
  Synthetic oligonucleotide
accatttatgtgatcgcgggcccaagactg

SEQ ID NO: 206755 - DNA, 30 bp, Artificial Sequence
  Synthetic oligonucleotide
caattagacatggattagtctaccagactg

SEQ ID NO: 206756 - DNA, 30 bp, Artificial Sequence
  Synthetic oligonucleotide
attactgggaaaaatgggaccctcagactg

SEQ ID NO: 206757 - DNA, 30 bp, Artificial Sequence
  Synthetic oligonucleotide
ggtttgtagtcatcgaactagtagagactg

SEQ ID NO: 206758 - DNA, 30 bp, Artificial Sequence
  Synthetic oligonucleotide
tgcatttggtccagaaaaagccgaggactg

SEQ ID NO: 206759 - DNA, 30 bp, Artificial Sequence
  Synthetic oligonucleotide
actaactgaatagtggatccgcccggactg

SEQ ID NO: 206760 - DNA, 30 bp, Artificial Sequence
  Synthetic oligonucleotide
taccatgttagtggatccgtttaatgactg

SEQ ID NO: 206761 - DNA, 30 bp, Artificial Sequence
  Synthetic oligonucleotide
gcctacgtggcgattaatcgaggctgactg

SEQ ID NO: 206762 - DNA, 30 bp, Artificial Sequence
  Synthetic oligonucleotide
caatgctgcgcgctgggtagttagtgactg

SEQ ID NO: 206763 - DNA, 30 bp, Artificial Sequence
  Synthetic oligonucleotide
ggacgaacctactctggacgatggatactg

SEQ ID NO: 206764 - DNA, 30 bp, Artificial Sequence
  Synthetic oligonucleotide
atgatagttccgcttcgctgaaaactactg

SEQ ID NO: 206765 - DNA, 30 bp, Artificial Sequence
  Synthetic oligonucleotide
ccacgactattgcggtcgagaccactactg

SEQ ID NO: 206766 - DNA, 30 bp, Artificial Sequence
  Synthetic oligonucleotide
tctaagagatgaagtagtcgcgcactactg

SEQ ID NO: 206767 - DNA, 30 bp, Artificial Sequence
  Synthetic oligonucleotide
taagcctatatcacacgtatagtactactg

SEQ ID NO: 206768 - DNA, 30 bp, Artificial Sequence
  Synthetic oligonucleotide
caccgaacgctgctatcataaaaagtactg

SEQ ID NO: 206769 - DNA, 30 bp, Artificial Sequence
  Synthetic oligonucleotide
ttccccatgtgtgggaggatactagtactg

SEQ ID NO: 206770 - DNA, 30 bp, Artificial Sequence
  Synthetic oligonucleotide
tgatcctaggctgttaggaaccacgtactg

SEQ ID NO: 206771 - DNA, 30 bp, Artificial Sequence
  Synthetic oligonucleotide
ggatctacgcgaatatacaacaaggtactg

SEQ ID NO: 206772 - DNA, 30 bp, Artificial Sequence
  Synthetic oligonucleotide
gggcggaaaggaccgcttgtgaaggtactg

SEQ ID NO: 206773 - DNA, 30 bp, Artificial Sequence
  Synthetic oligonucleotide
tcgtaggttcgggcggaagtacgggtactg

SEQ ID NO: 206774 - DNA, 30 bp, Artificial Sequence
  Synthetic oligonucleotide
gtctacatccgtggggagagccaattactg

SEQ ID NO: 206775 - DNA, 30 bp, Artificial Sequence
  Synthetic oligonucleotide
aagagaataggaagaaagttcgtattactg

SEQ ID NO: 206776 - DNA, 30 bp, Artificial Sequence
  Synthetic oligonucleotide
ggaccagatttccctcccatggccttactg

SEQ ID NO: 206777 - DNA, 30 bp, Artificial Sequence
  Synthetic oligonucleotide
tttgcgagaaaaacgtagtgaagtttactg

SEQ ID NO: 206778 - DNA, 30 bp, Artificial Sequence
  Synthetic oligonucleotide
agttcgacggaaatactatccggtttactg

SEQ ID NO: 206779 - DNA, 30 bp, Artificial Sequence
  Synthetic oligonucleotide
ctccccatccagacggactcggaaaacctg

SEQ ID NO: 206780 - DNA, 30 bp, Artificial Sequence
  Synthetic oligonucleotide
caagagccttgcaaaggcttgacaaacctg

SEQ ID NO: 206781 - DNA, 30 bp, Artificial Sequence
  Synthetic oligonucleotide
caaggggaggagccacgggttcgaaacctg

SEQ ID NO: 206782 - DNA, 30 bp, Artificial Sequence
  Synthetic oligonucleotide
aagacgcgaactagtgacacactaaacctg

SEQ ID NO: 206783 - DNA, 30 bp, Artificial Sequence
  Synthetic oligonucleotide
tgcatcatactggtgtgtacctccaacctg

SEQ ID NO: 206784 - DNA, 30 bp, Artificial Sequence
  Synthetic oligonucleotide
aacctgacggatgcggtttccatcaacctg

SEQ ID NO: 206785 - DNA, 30 bp, Artificial Sequence
  Synthetic oligonucleotide
aggagtacaagccctttagcgtagaacctg

SEQ ID NO: 206786 - DNA, 30 bp, Artificial Sequence
  Synthetic oligonucleotide
gagagcacagttccctatgacttgaacctg

SEQ ID NO: 206787 - DNA, 30 bp, Artificial Sequence
  Synthetic oligonucleotide
cgggcaaaggagcggcaccagaaccacctg

SEQ ID NO: 206788 - DNA, 30 bp, Artificial Sequence
  Synthetic oligonucleotide
gcacactctactcggattttgtaccacctg

SEQ ID NO: 206789 - DNA, 30 bp, Artificial Sequence
  Synthetic oligonucleotide
atccatcgtaaagtgcgtagaacggacctg

SEQ ID NO: 206790 - DNA, 30 bp, Artificial Sequence
  Synthetic oligonucleotide
gggtacggcggaattggcatattatacctg

SEQ ID NO: 206791 - DNA, 30 bp, Artificial Sequence
  Synthetic oligonucleotide
gctgaaagagagaatcggccgacttacctg

SEQ ID NO: 206792 - DNA, 30 bp, Artificial Sequence
  Synthetic oligonucleotide
tactggatgtacggctcccgtggttacctg

SEQ ID NO: 206793 - DNA, 30 bp, Artificial Sequence
  Synthetic oligonucleotide
tagggtagacccaagctagggtaaaccctg

SEQ ID NO: 206794 - DNA, 30 bp, Artificial Sequence
  Synthetic oligonucleotide
agtcgtaaatggcctaagaaatcaaccctg

SEQ ID NO: 206795 - DNA, 30 bp, Artificial Sequence
  Synthetic oligonucleotide
gttaagttggcacagatacatgtcaccctg

SEQ ID NO: 206796 - DNA, 30 bp, Artificial Sequence
  Synthetic oligonucleotide
accagggcttcccaagatgaccagaccctg

SEQ ID NO: 206797 - DNA, 30 bp, Artificial Sequence
  Synthetic oligonucleotide
tgataaggcaccgtgaaagatgcgaccctg

SEQ ID NO: 206798 - DNA, 30 bp, Artificial Sequence
  Synthetic oligonucleotide
agccggggcattgcatgggagctgaccctg

SEQ ID NO: 206799 - DNA, 30 bp, Artificial Sequence
  Synthetic oligonucleotide
tagactagatccggagccccttcccccctg

SEQ ID NO: 206800 - DNA, 30 bp, Artificial Sequence
  Synthetic oligonucleotide
ttagcgtgcgcgggcttggtcaagcccctg

SEQ ID NO: 206801 - DNA, 30 bp, Artificial Sequence
  Synthetic oligonucleotide
aagaggcaaggtggcggagcttaagccctg

SEQ ID NO: 206802 - DNA, 30 bp, Artificial Sequence
  Synthetic oligonucleotide
agccctgaacgaggtgtcatatgagccctg

SEQ ID NO: 206803 - DNA, 30 bp, Artificial Sequence
  Synthetic oligonucleotide
ctcgttacaaagtgtggccgccttgccctg

SEQ ID NO: 206804 - DNA, 30 bp, Artificial Sequence
  Synthetic oligonucleotide
ggaggaaagccgacggagtatacatccctg

SEQ ID NO: 206805 - DNA, 30 bp, Artificial Sequence
  Synthetic oligonucleotide
acgacgcgcgcgaaaggcgttagatccctg

SEQ ID NO: 206806 - DNA, 30 bp, Artificial Sequence
  Synthetic oligonucleotide
gtataaatccgcttcattgcgatatccctg

SEQ ID NO: 206807 - DNA, 30 bp, Artificial Sequence
  Synthetic oligonucleotide
cggggctgtttgtcgggacctgggtccctg

SEQ ID NO: 206808 - DNA, 30 bp, Artificial Sequence
  Synthetic oligonucleotide
gttaatgttggtggggaaaatcgaagcctg

SEQ ID NO: 206809 - DNA, 31 bp, Artificial Sequence
  Synthetic oligonucleotide
attgtacgaacctggcgatgcgaagagcctg

SEQ ID NO: 206810 - DNA, 30 bp, Artificial Sequence
  Synthetic oligonucleotide
cacagacggctaggggccatctaccgcctg

SEQ ID NO: 206811 - DNA, 30 bp, Artificial Sequence
  Synthetic oligonucleotide
aaactagcgttgcacgatcaggcccgcctg

SEQ ID NO: 206812 - DNA, 30 bp, Artificial Sequence
  Synthetic oligonucleotide
cagtgttaaagtacgattatttgccgcctg

SEQ ID NO: 206813 - DNA, 30 bp, Artificial Sequence
  Synthetic oligonucleotide
actgcgggagttttagcagtactccgcctg

SEQ ID NO: 206814 - DNA, 30 bp, Artificial Sequence
  Synthetic oligonucleotide
agagtggcaaagcctcgcgtactcggcctg

SEQ ID NO: 206815 - DNA, 30 bp, Artificial Sequence
  Synthetic oligonucleotide
attccctacatactcgggaaatagggcctg

SEQ ID NO: 206816 - DNA, 30 bp, Artificial Sequence
  Synthetic oligonucleotide
aacattcagatgtgaacggtctcgggcctg

SEQ ID NO: 206817 - DNA, 30 bp, Artificial Sequence
  Synthetic oligonucleotide
ggtcaggcacaatgtagcttgcgatgcctg

SEQ ID NO: 206818 - DNA, 30 bp, Artificial Sequence
  Synthetic oligonucleotide
gcgcgtatgaacatggttgaatgatgcctg

SEQ ID NO: 206819 - DNA, 30 bp, Artificial Sequence
  Synthetic oligonucleotide
tggcgtaccaaacgccatattgcctgcctg

SEQ ID NO: 206820 - DNA, 30 bp, Artificial Sequence
  Synthetic oligonucleotide
aagagagaagtcacaccgccttagtgcctg

SEQ ID NO: 206821 - DNA, 30 bp, Artificial Sequence
  Synthetic oligonucleotide
cttaatgagaaatgaggttggttgtgcctg

SEQ ID NO: 206822 - DNA, 30 bp, Artificial Sequence
  Synthetic oligonucleotide
ggagggtggttaccgaacagtaacatcctg

SEQ ID NO: 206823 - DNA, 30 bp, Artificial Sequence
  Synthetic oligonucleotide
gagaagatgattccatccaagaacctcctg

SEQ ID NO: 206824 - DNA, 30 bp, Artificial Sequence
  Synthetic oligonucleotide
taatgagggtcctaaaggactatgctcctg

SEQ ID NO: 206825 - DNA, 30 bp, Artificial Sequence
  Synthetic oligonucleotide
ttagacaaaatatgcatgagcagtctcctg

SEQ ID NO: 206826 - DNA, 30 bp, Artificial Sequence
  Synthetic oligonucleotide
ctttcacaatttcaaccgcctatcgtcctg

SEQ ID NO: 206827 - DNA, 30 bp, Artificial Sequence
  Synthetic oligonucleotide
tggttaaaacccaagggcgtctgtgtcctg

SEQ ID NO: 206828 - DNA, 30 bp, Artificial Sequence
  Synthetic oligonucleotide
ttaggcggccggccttggtaaacattcctg

SEQ ID NO: 206829 - DNA, 30 bp, Artificial Sequence
  Synthetic oligonucleotide
tagctaccataacatgaatttagattcctg

SEQ ID NO: 206830 - DNA, 30 bp, Artificial Sequence
  Synthetic oligonucleotide
acgatggcaccggctaatcagtcgttcctg

SEQ ID NO: 206831 - DNA, 30 bp, Artificial Sequence
  Synthetic oligonucleotide
catatttataggcaccgcgaggctttcctg

SEQ ID NO: 206832 - DNA, 30 bp, Artificial Sequence
  Synthetic oligonucleotide
cagatcgtagtctccattggtcaaaagctg

SEQ ID NO: 206833 - DNA, 30 bp, Artificial Sequence
  Synthetic oligonucleotide
tcacaccagggaatcgcggattcaaagctg

SEQ ID NO: 206834 - DNA, 30 bp, Artificial Sequence
  Synthetic oligonucleotide
aaggatagaggagcgggttggaccaagctg

SEQ ID NO: 206835 - DNA, 30 bp, Artificial Sequence
  Synthetic oligonucleotide
ttgtcaacctcgaataggaggttgaagctg

SEQ ID NO: 206836 - DNA, 30 bp, Artificial Sequence
  Synthetic oligonucleotide
acacggatccctggcgattattgtaagctg

SEQ ID NO: 206837 - DNA, 30 bp, Artificial Sequence
  Synthetic oligonucleotide
ttgtagggattagaagcactaaaacagctg

SEQ ID NO: 206838 - DNA, 30 bp, Artificial Sequence
  Synthetic oligonucleotide
tcactcctgtaggtgctctaataacagctg

SEQ ID NO: 206839 - DNA, 30 bp, Artificial Sequence
  Synthetic oligonucleotide
aagaaccgaaacggaagtaggggacagctg

SEQ ID NO: 206840 - DNA, 30 bp, Artificial Sequence
  Synthetic oligonucleotide
gggccacgcatcgaatgcgatgctcagctg

SEQ ID NO: 206841 - DNA, 30 bp, Artificial Sequence
  Synthetic oligonucleotide
acacgctgctgcaaagttaagtttcagctg

SEQ ID NO: 206842 - DNA, 30 bp, Artificial Sequence
  Synthetic oligonucleotide
atgtcattgcgcggcatttaaaaagagctg

SEQ ID NO: 206843 - DNA, 30 bp, Artificial Sequence
  Synthetic oligonucleotide
cttccgccagacagagtgtctgaagagctg

SEQ ID NO: 206844 - DNA, 30 bp, Artificial Sequence
  Synthetic oligonucleotide
tgtggcttatttcacgtagcgagcgagctg

SEQ ID NO: 206845 - DNA, 30 bp, Artificial Sequence
  Synthetic oligonucleotide
gaaggtccgcatcactgcaggagcgagctg

SEQ ID NO: 206846 - DNA, 30 bp, Artificial Sequence
  Synthetic oligonucleotide
cggatctgatcatccggatgccaggagctg

SEQ ID NO: 206847 - DNA, 30 bp, Artificial Sequence
  Synthetic oligonucleotide
tcagagaattttgcaatggctccggagctg

SEQ ID NO: 206848 - DNA, 30 bp, Artificial Sequence
  Synthetic oligonucleotide
ggaactgcgacaccgtgataatggtagctg

SEQ ID NO: 206849 - DNA, 30 bp, Artificial Sequence
  Synthetic oligonucleotide
ttagctacgagggttatggggtattagctg

SEQ ID NO: 206850 - DNA, 30 bp, Artificial Sequence
  Synthetic oligonucleotide
gggagatcgggggtttagtcgccttagctg

SEQ ID NO: 206851 - DNA, 30 bp, Artificial Sequence
  Synthetic oligonucleotide
aagatactaaaacctcgttattctacgctg

SEQ ID NO: 206852 - DNA, 30 bp, Artificial Sequence
  Synthetic oligonucleotide
tcaagttagcggatatccaattaaccgctg

SEQ ID NO: 206853 - DNA, 30 bp, Artificial Sequence
  Synthetic oligonucleotide
ttccctgcccgcaaagggcagctcccgctg

SEQ ID NO: 206854 - DNA, 30 bp, Artificial Sequence
  Synthetic oligonucleotide
gatgggtcatactaaaaaaccggagcgctg

SEQ ID NO: 206855 - DNA, 30 bp, Artificial Sequence
  Synthetic oligonucleotide
gtgatgtgcgaacgatcagttccggcgctg

SEQ ID NO: 206856 - DNA, 30 bp, Artificial Sequence
  Synthetic oligonucleotide
cccattgagtgataactgacggttgcgctg

SEQ ID NO: 206857 - DNA, 30 bp, Artificial Sequence
  Synthetic oligonucleotide
agccgcctaaatttagataaaaaatcgctg

SEQ ID NO: 206858 - DNA, 30 bp, Artificial Sequence
  Synthetic oligonucleotide
cgcgctttcccggtgttctgtacatcgctg

SEQ ID NO: 206859 - DNA, 30 bp, Artificial Sequence
  Synthetic oligonucleotide
tcaagcccgaaacttgacaggtagtcgctg

SEQ ID NO: 206860 - DNA, 30 bp, Artificial Sequence
  Synthetic oligonucleotide
acaacctcgccaccgaccgagacgtcgctg

SEQ ID NO: 206861 - DNA, 30 bp, Artificial Sequence
  Synthetic oligonucleotide
tcttcgtaccgctgcttgggcgtcaggctg

SEQ ID NO: 206862 - DNA, 29 bp, Artificial Sequence
  Synthetic oligonucleotide
agaaccgctctagatgcctattcaggctg

SEQ ID NO: 206863 - DNA, 30 bp, Artificial Sequence
  Synthetic oligonucleotide
tatccgaaactgccgttgtaattccggctg

SEQ ID NO: 206864 - DNA, 30 bp, Artificial Sequence
  Synthetic oligonucleotide
gcccattggcgatttggaatatggcggctg

SEQ ID NO: 206865 - DNA, 30 bp, Artificial Sequence
  Synthetic oligonucleotide
actctgaagggcgtgggtcgggctcggctg

SEQ ID NO: 206866 - DNA, 30 bp, Artificial Sequence
  Synthetic oligonucleotide
gtatacccccgacaacagttcagtcggctg

SEQ ID NO: 206867 - DNA, 30 bp, Artificial Sequence
  Synthetic oligonucleotide
tgagtatctcgcctgcgagggtgagggctg

SEQ ID NO: 206868 - DNA, 29 bp, Artificial Sequence
  Synthetic oligonucleotide
agtatataagagagtgccgccatgggctg

SEQ ID NO: 206869 - DNA, 30 bp, Artificial Sequence
  Synthetic oligonucleotide
agctttatattaggatttcgtgcatggctg

SEQ ID NO: 206870 - DNA, 30 bp, Artificial Sequence
  Synthetic oligonucleotide
gaaggtccggtatggcataaaggatggctg

SEQ ID NO: 206871 - DNA, 30 bp, Artificial Sequence
  Synthetic oligonucleotide
taacgtccactccaaactggtagctggctg

SEQ ID NO: 206872 - DNA, 30 bp, Artificial Sequence
  Synthetic oligonucleotide
gcaacgcttaaacctgttcaaagttggctg

SEQ ID NO: 206873 - DNA, 30 bp, Artificial Sequence
  Synthetic oligonucleotide
caatgtcattacacctggaacagaatgctg

SEQ ID NO: 206874 - DNA, 30 bp, Artificial Sequence
  Synthetic oligonucleotide
ggttataactgtgacattgacgtcctgctg

SEQ ID NO: 206875 - DNA, 30 bp, Artificial Sequence
  Synthetic oligonucleotide
gcggccagaattgagcgaggtggtctgctg

SEQ ID NO: 206876 - DNA, 30 bp, Artificial Sequence
  Synthetic oligonucleotide
tggaggggttaagagatattcaaggtgctg

SEQ ID NO: 206877 - DNA, 30 bp, Artificial Sequence
  Synthetic oligonucleotide
gagtagtatgacgttatatcatcggtgctg

SEQ ID NO: 206878 - DNA, 30 bp, Artificial Sequence
  Synthetic oligonucleotide
catgctcgcgtagcggtagatcaattgctg

SEQ ID NO: 206879 - DNA, 31 bp, Artificial Sequence
  Synthetic oligonucleotide
caaacgggctggctttgccatctggttgctg

SEQ ID NO: 206880 - DNA, 30 bp, Artificial Sequence
  Synthetic oligonucleotide
ccgggtaggatacgtggcgattggaatctg

SEQ ID NO: 206881 - DNA, 30 bp, Artificial Sequence
  Synthetic oligonucleotide
tccgtaagccttcagagaatgcttaatctg

SEQ ID NO: 206882 - DNA, 30 bp, Artificial Sequence
  Synthetic oligonucleotide
acgcgtattctgtttgccatataacatctg

SEQ ID NO: 206883 - DNA, 30 bp, Artificial Sequence
  Synthetic oligonucleotide
ggctgagggatccactcagcctcacatctg

SEQ ID NO: 206884 - DNA, 29 bp, Artificial Sequence
  Synthetic oligonucleotide
catgagtctttaagcgtggacggcatctg

SEQ ID NO: 206885 - DNA, 30 bp, Artificial Sequence
  Synthetic oligonucleotide
actctgagggcattgattcacctgcatctg

SEQ ID NO: 206886 - DNA, 30 bp, Artificial Sequence
  Synthetic oligonucleotide
gtggggtttagcattgatcaggatcatctg

SEQ ID NO: 206887 - DNA, 30 bp, Artificial Sequence
  Synthetic oligonucleotide
gtgcagccgacaaagacgactcaagatctg

SEQ ID NO: 206888 - DNA, 30 bp, Artificial Sequence
  Synthetic oligonucleotide
agctggaaccttgtacgcactgcagatctg

SEQ ID NO: 206889 - DNA, 30 bp, Artificial Sequence
  Synthetic oligonucleotide
tagtggtaattggggaaagtgagtgatctg

SEQ ID NO: 206890 - DNA, 30 bp, Artificial Sequence
  Synthetic oligonucleotide
accgcgggtcaggctatgagctttgatctg

SEQ ID NO: 206891 - DNA, 30 bp, Artificial Sequence
  Synthetic oligonucleotide
tgtagcatgccgctacgggcctcatatctg

SEQ ID NO: 206892 - DNA, 30 bp, Artificial Sequence
  Synthetic oligonucleotide
cactctcgacccacgccccaccactatctg

SEQ ID NO: 206893 - DNA, 30 bp, Artificial Sequence
  Synthetic oligonucleotide
ggttccgactctagtataggggggtatctg

SEQ ID NO: 206894 - DNA, 30 bp, Artificial Sequence
  Synthetic oligonucleotide
agacaatccgcccgcctgtgaatgtatctg

SEQ ID NO: 206895 - DNA, 30 bp, Artificial Sequence
  Synthetic oligonucleotide
agggaccgccgcgataaatttgtaactctg

SEQ ID NO: 206896 - DNA, 30 bp, Artificial Sequence
  Synthetic oligonucleotide
gcaacaagtatcatgagaattaggactctg

SEQ ID NO: 206897 - DNA, 30 bp, Artificial Sequence
  Synthetic oligonucleotide
tgtacagccgtacaattacctccacctctg

SEQ ID NO: 206898 - DNA, 30 bp, Artificial Sequence
  Synthetic oligonucleotide
tccctatctgaactacgggtagcgcctctg

SEQ ID NO: 206899 - DNA, 30 bp, Artificial Sequence
  Synthetic oligonucleotide
aggtcacgcaagggtccggaactgcctctg

SEQ ID NO: 206900 - DNA, 30 bp, Artificial Sequence
  Synthetic oligonucleotide
gcgattcttagaagacacacagtgcctctg

SEQ ID NO: 206901 - DNA, 30 bp, Artificial Sequence
  Synthetic oligonucleotide
gggtaaactttatcacgctgtagcgctctg

SEQ ID NO: 206902 - DNA, 30 bp, Artificial Sequence
  Synthetic oligonucleotide
cgtctgatgctccggcaatccgcggctctg

SEQ ID NO: 206903 - DNA, 30 bp, Artificial Sequence
  Synthetic oligonucleotide
tgcaggaatggtcagtgtgcgcatgctctg

SEQ ID NO: 206904 - DNA, 30 bp, Artificial Sequence
  Synthetic oligonucleotide
gctaaagctgagcggtgaattcgtgctctg

SEQ ID NO: 206905 - DNA, 30 bp, Artificial Sequence
  Synthetic oligonucleotide
ccgcgaagcattaccggcctgtcgtctctg

SEQ ID NO: 206906 - DNA, 30 bp, Artificial Sequence
  Synthetic oligonucleotide
ctttagcagcattggaggacagattctctg

SEQ ID NO: 206907 - DNA, 30 bp, Artificial Sequence
  Synthetic oligonucleotide
taggagtccttcaaagaaaacacgagtctg

SEQ ID NO: 206908 - DNA, 30 bp, Artificial Sequence
  Synthetic oligonucleotide
ctagactcaccatccgcggcttggagtctg

SEQ ID NO: 206909 - DNA, 30 bp, Artificial Sequence
  Synthetic oligonucleotide
ctgggtccctaggggtcatgaattagtctg

SEQ ID NO: 206910 - DNA, 30 bp, Artificial Sequence
  Synthetic oligonucleotide
gtagtatattaagacgcctgggtgcgtctg

SEQ ID NO: 206911 - DNA, 30 bp, Artificial Sequence
  Synthetic oligonucleotide
gtgtgaaacagtcctgcacctaaaggtctg

SEQ ID NO: 206912 - DNA, 30 bp, Artificial Sequence
  Synthetic oligonucleotide
agctatcgaccggcataccagggaggtctg

SEQ ID NO: 206913 - DNA, 30 bp, Artificial Sequence
  Synthetic oligonucleotide
gttagcgttttatcccgagccgggggtctg

SEQ ID NO: 206914 - DNA, 30 bp, Artificial Sequence
  Synthetic oligonucleotide
gtgtcatctggagggctagggcatggtctg

SEQ ID NO: 206915 - DNA, 30 bp, Artificial Sequence
  Synthetic oligonucleotide
tataaagtaaccaaacacaagcgtggtctg

SEQ ID NO: 206916 - DNA, 30 bp, Artificial Sequence
  Synthetic oligonucleotide
gtgctggatgctacaagcaaaaattgtctg

SEQ ID NO: 206917 - DNA, 30 bp, Artificial Sequence
  Synthetic oligonucleotide
tggggcacagctgctttaaacttttgtctg

SEQ ID NO: 206918 - DNA, 30 bp, Artificial Sequence
  Synthetic oligonucleotide
catattggttcggtcgttttgtagattctg

SEQ ID NO: 206919 - DNA, 30 bp, Artificial Sequence
  Synthetic oligonucleotide
tgctcgggcgtatagttgaaattgattctg

SEQ ID NO: 206920 - DNA, 30 bp, Artificial Sequence
  Synthetic oligonucleotide
caggttcggcctaaagcagctgttattctg

SEQ ID NO: 206921 - DNA, 30 bp, Artificial Sequence
  Synthetic oligonucleotide
cctcgtggtctcatatcgggtcagcttctg

SEQ ID NO: 206922 - DNA, 30 bp, Artificial Sequence
  Synthetic oligonucleotide
tgaggccagaccttcactctggttcttctg

SEQ ID NO: 206923 - DNA, 30 bp, Artificial Sequence
  Synthetic oligonucleotide
aggaaacgttccaggatagtgtcagttctg

SEQ ID NO: 206924 - DNA, 30 bp, Artificial Sequence
  Synthetic oligonucleotide
caatgaagtaggtagctacgtaaggttctg

SEQ ID NO: 206925 - DNA, 30 bp, Artificial Sequence
  Synthetic oligonucleotide
gtggcgaaccggtcgggacgtgatgttctg

SEQ ID NO: 206926 - DNA, 30 bp, Artificial Sequence
  Synthetic oligonucleotide
tgattagtctggttcagactatgtgttctg

SEQ ID NO: 206927 - DNA, 30 bp, Artificial Sequence
  Synthetic oligonucleotide
gtggtagaccagcatcaaaactaaaaagtg

SEQ ID NO: 206928 - DNA, 30 bp, Artificial Sequence
  Synthetic oligonucleotide
taacttgtactgtgcgaagctcccaaagtg

SEQ ID NO: 206929 - DNA, 30 bp, Artificial Sequence
  Synthetic oligonucleotide
tcacgaggcacccgtaccaccctcaaagtg

SEQ ID NO: 206930 - DNA, 30 bp, Artificial Sequence
  Synthetic oligonucleotide
cgaccaacatttcctcttaactcgaaagtg

SEQ ID NO: 206931 - DNA, 30 bp, Artificial Sequence
  Synthetic oligonucleotide
agcccgactggatggcggttgttgaaagtg

SEQ ID NO: 206932 - DNA, 30 bp, Artificial Sequence
  Synthetic oligonucleotide
aggacacagggtgttctttttattaaagtg

SEQ ID NO: 206933 - DNA, 30 bp, Artificial Sequence
  Synthetic oligonucleotide
atcccagactgactcaaaacgagacaagtg

SEQ ID NO: 206934 - DNA, 30 bp, Artificial Sequence
  Synthetic oligonucleotide
tctggggaaatctttttattcaaccaagtg

SEQ ID NO: 206935 - DNA, 30 bp, Artificial Sequence
  Synthetic oligonucleotide
cttccccagcatgattaagtaatgcaagtg

SEQ ID NO: 206936 - DNA, 30 bp, Artificial Sequence
  Synthetic oligonucleotide
caccgcagtagagtatctcctgtgcaagtg

SEQ ID NO: 206937 - DNA, 30 bp, Artificial Sequence
  Synthetic oligonucleotide
ccagcgggagacggagacaacaacgaagtg

SEQ ID NO: 206938 - DNA, 30 bp, Artificial Sequence
  Synthetic oligonucleotide
gtcagttcatcggtgatgcctatcgaagtg

SEQ ID NO: 206939 - DNA, 30 bp, Artificial Sequence
  Synthetic oligonucleotide
cggggaaaagtgagggaacggaactaagtg

SEQ ID NO: 206940 - DNA, 30 bp, Artificial Sequence
  Synthetic oligonucleotide
acaaaaacctagtggccagcgtactaagtg

SEQ ID NO: 206941 - DNA, 30 bp, Artificial Sequence
  Synthetic oligonucleotide
catacagtagcgtcgtgaccgtgctaagtg

SEQ ID NO: 206942 - DNA, 30 bp, Artificial Sequence
  Synthetic oligonucleotide
ccaagtacactgccgaggtgtctctaagtg

SEQ ID NO: 206943 - DNA, 30 bp, Artificial Sequence
  Synthetic oligonucleotide
ggtggtcaggtgaagttctgatagtaagtg

SEQ ID NO: 206944 - DNA, 30 bp, Artificial Sequence
  Synthetic oligonucleotide
gagtaccagggctcgaataatgcgtaagtg

SEQ ID NO: 206945 - DNA, 30 bp, Artificial Sequence
  Synthetic oligonucleotide
cgacccgctgtacagtttagctggtaagtg

SEQ ID NO: 206946 - DNA, 30 bp, Artificial Sequence
  Synthetic oligonucleotide
tttgcttggagaaaggacataagaacagtg

SEQ ID NO: 206947 - DNA, 30 bp, Artificial Sequence
  Synthetic oligonucleotide
tttgagacatcctgggcccatataacagtg

SEQ ID NO: 206948 - DNA, 30 bp, Artificial Sequence
  Synthetic oligonucleotide
acagtatgttgaacgtaccgtagcacagtg

SEQ ID NO: 206949 - DNA, 30 bp, Artificial Sequence
  Synthetic oligonucleotide
cgcgtacacaggtgggtactgtagacagtg

SEQ ID NO: 206950 - DNA, 30 bp, Artificial Sequence
  Synthetic oligonucleotide
gtaacgcaatctacacttgtggggacagtg

SEQ ID NO: 206951 - DNA, 30 bp, Artificial Sequence
  Synthetic oligonucleotide
tgccatccgtggtacatgttgtgtacagtg

SEQ ID NO: 206952 - DNA, 30 bp, Artificial Sequence
  Synthetic oligonucleotide
cccatcatattattactgcccattacagtg

SEQ ID NO: 206953 - DNA, 30 bp, Artificial Sequence
  Synthetic oligonucleotide
gcagagtagaagttggtctaataaccagtg

SEQ ID NO: 206954 - DNA, 30 bp, Artificial Sequence
  Synthetic oligonucleotide
gattaccccgtcatagcgttgcacccagtg

SEQ ID NO: 206955 - DNA, 30 bp, Artificial Sequence
  Synthetic oligonucleotide
aggtgacaacagcactgatcgcccccagtg

SEQ ID NO: 206956 - DNA, 31 bp, Artificial Sequence
  Synthetic oligonucleotide
agtaatcgactccgtgtggccattgccagtg

SEQ ID NO: 206957 - DNA, 30 bp, Artificial Sequence
  Synthetic oligonucleotide
atgatggaagatcccctttgaggagcagtg

SEQ ID NO: 206958 - DNA, 30 bp, Artificial Sequence
  Synthetic oligonucleotide
ctcataagctgagctaataaacaggcagtg

SEQ ID NO: 206959 - DNA, 30 bp, Artificial Sequence
  Synthetic oligonucleotide
ctccataaattaaaccgtgaaaatgcagtg

SEQ ID NO: 206960 - DNA, 30 bp, Artificial Sequence
  Synthetic oligonucleotide
tactcaggtgagtgcgtttatactgcagtg

SEQ ID NO: 206961 - DNA, 30 bp, Artificial Sequence
  Synthetic oligonucleotide
actacttcatgtccccaggctactgcagtg

SEQ ID NO: 206962 - DNA, 30 bp, Artificial Sequence
  Synthetic oligonucleotide
attgggttagacatcttatgatgtgcagtg

SEQ ID NO: 206963 - DNA, 30 bp, Artificial Sequence
  Synthetic oligonucleotide
gtggacaactttcgcgaatacgaatcagtg

SEQ ID NO: 206964 - DNA, 30 bp, Artificial Sequence
  Synthetic oligonucleotide
gggaggttctgcgtacgagctgaatcagtg

SEQ ID NO: 206965 - DNA, 30 bp, Artificial Sequence
  Synthetic oligonucleotide
tgaccgaagggcctttgtgtcgtatcagtg

SEQ ID NO: 206966 - DNA, 30 bp, Artificial Sequence
  Synthetic oligonucleotide
agaggacagacctgacgcacagtctcagtg

SEQ ID NO: 206967 - DNA, 30 bp, Artificial Sequence
  Synthetic oligonucleotide
ccaggcggcaaaggtagccgcacgtcagtg

SEQ ID NO: 206968 - DNA, 30 bp, Artificial Sequence
  Synthetic oligonucleotide
gtcctcagctggttgaacggcgcgtcagtg

SEQ ID NO: 206969 - DNA, 30 bp, Artificial Sequence
  Synthetic oligonucleotide
ttaaattcggctatggtgtaaaggtcagtg

SEQ ID NO: 206970 - DNA, 30 bp, Artificial Sequence
  Synthetic oligonucleotide
gcagtagtgagcattcctatcttgtcagtg

SEQ ID NO: 206971 - DNA, 30 bp, Artificial Sequence
  Synthetic oligonucleotide
tatccctgtattatataagatggttcagtg

SEQ ID NO: 206972 - DNA, 30 bp, Artificial Sequence
  Synthetic oligonucleotide
taaagattcttacgggggtgtcaaagagtg

SEQ ID NO: 206973 - DNA, 30 bp, Artificial Sequence
  Synthetic oligonucleotide
ctgtgtcaaggggattcgccaccaagagtg

SEQ ID NO: 206974 - DNA, 30 bp, Artificial Sequence
  Synthetic oligonucleotide
aatgttgggctggaaatatttgtaagagtg

SEQ ID NO: 206975 - DNA, 30 bp, Artificial Sequence
  Synthetic oligonucleotide
caatttcaccagtgtgaagcaacgagagtg

SEQ ID NO: 206976 - DNA, 30 bp, Artificial Sequence
  Synthetic oligonucleotide
cgaggtcttgtcctacgatcaccgagagtg

SEQ ID NO: 206977 - DNA, 31 bp, Artificial Sequence
  Synthetic oligonucleotide
ttagtcaaaaaggccgccagagcctagagtg

SEQ ID NO: 206978 - DNA, 30 bp, Artificial Sequence
  Synthetic oligonucleotide
attgggagtggcaggggcctatgacgagtg

SEQ ID NO: 206979 - DNA, 30 bp, Artificial Sequence
  Synthetic oligonucleotide
tcatatgggcattaattcgggatccgagtg

SEQ ID NO: 206980 - DNA, 30 bp, Artificial Sequence
  Synthetic oligonucleotide
cagtgggatctccccggtgtggtccgagtg

SEQ ID NO: 206981 - DNA, 30 bp, Artificial Sequence
  Synthetic oligonucleotide
atagggccattaggtagtgcttggcgagtg

SEQ ID NO: 206982 - DNA, 30 bp, Artificial Sequence
  Synthetic oligonucleotide
agatgtcgctgggcgccgaaaaatcgagtg

SEQ ID NO: 206983 - DNA, 30 bp, Artificial Sequence
  Synthetic oligonucleotide
cctgattaatttaacatcattaaaggagtg

SEQ ID NO: 206984 - DNA, 30 bp, Artificial Sequence
  Synthetic oligonucleotide
caggcacctcattttgggcagtgaggagtg

SEQ ID NO: 206985 - DNA, 30 bp, Artificial Sequence
  Synthetic oligonucleotide
gttgggaaccccatggtgaagtggggagtg

SEQ ID NO: 206986 - DNA, 30 bp, Artificial Sequence
  Synthetic oligonucleotide
ttattacgcagatgtatttaagtgggagtg

SEQ ID NO: 206987 - DNA, 30 bp, Artificial Sequence
  Synthetic oligonucleotide
aagtaacacagtacaagttatgtgggagtg

SEQ ID NO: 206988 - DNA, 30 bp, Artificial Sequence
  Synthetic oligonucleotide
caggcaattaggacaactctgactggagtg

SEQ ID NO: 206989 - DNA, 30 bp, Artificial Sequence
  Synthetic oligonucleotide
tgttagtctgggttaacgtaaggtggagtg

SEQ ID NO: 206990 - DNA, 30 bp, Artificial Sequence
  Synthetic oligonucleotide
acagtggaattgggaccattacactgagtg

SEQ ID NO: 206991 - DNA, 30 bp, Artificial Sequence
  Synthetic oligonucleotide
agagaagcgtcgccacctcagaattgagtg

SEQ ID NO: 206992 - DNA, 30 bp, Artificial Sequence
  Synthetic oligonucleotide
gcactactatattctcgaaattacatagtg

SEQ ID NO: 206993 - DNA, 30 bp, Artificial Sequence
  Synthetic oligonucleotide
gcagcgcatcacccaacgaacaggatagtg

SEQ ID NO: 206994 - DNA, 30 bp, Artificial Sequence
  Synthetic oligonucleotide
actgttgacggtttacgcgtattgatagtg

SEQ ID NO: 206995 - DNA, 30 bp, Artificial Sequence
  Synthetic oligonucleotide
acgtgatctataagtggtgtattgatagtg

SEQ ID NO: 206996 - DNA, 30 bp, Artificial Sequence
  Synthetic oligonucleotide
ccggtccgtatgtgaaacattactatagtg

SEQ ID NO: 206997 - DNA, 30 bp, Artificial Sequence
  Synthetic oligonucleotide
accgagccacctacgtaccggtctctagtg

SEQ ID NO: 206998 - DNA, 30 bp, Artificial Sequence
  Synthetic oligonucleotide
tccgtccctggcaagtgtttgtctctagtg

SEQ ID NO: 206999 - DNA, 30 bp, Artificial Sequence
  Synthetic oligonucleotide
ctatgaaaggttggacattcaagagtagtg

SEQ ID NO: 207000 - DNA, 30 bp, Artificial Sequence
  Synthetic oligonucleotide
gggtcacaacctacaccataggttgtagtg

SEQ ID NO: 207001 - DNA, 30 bp, Artificial Sequence
  Synthetic oligonucleotide
tagtatacccaggtagagatgggattagtg

SEQ ID NO: 207002 - DNA, 30 bp, Artificial Sequence
  Synthetic oligonucleotide
gaatgctacgggggacgggatatcttagtg

SEQ ID NO: 207003 - DNA, 30 bp, Artificial Sequence
  Synthetic oligonucleotide
ggactattccgcaggacaatcacgttagtg

SEQ ID NO: 207004 - DNA, 30 bp, Artificial Sequence
  Synthetic oligonucleotide
cgtcacctagcctctctgacactgttagtg

SEQ ID NO: 207005 - DNA, 30 bp, Artificial Sequence
  Synthetic oligonucleotide
tactgaacgtctacgtgactagcaaacgtg

SEQ ID NO: 207006 - DNA, 30 bp, Artificial Sequence
  Synthetic oligonucleotide
gcctcgtcgtgggggtagctgcgaaacgtg

SEQ ID NO: 207007 - DNA, 30 bp, Artificial Sequence
  Synthetic oligonucleotide
cacaggatttaacacccaaggcctaacgtg

SEQ ID NO: 207008 - DNA, 30 bp, Artificial Sequence
  Synthetic oligonucleotide
ggtgagcgataccttggcgctccacacgtg

SEQ ID NO: 207009 - DNA, 30 bp, Artificial Sequence
  Synthetic oligonucleotide
gtctgcccggcggtgtacctggcacacgtg

SEQ ID NO: 207010 - DNA, 30 bp, Artificial Sequence
  Synthetic oligonucleotide
ggcgtcgtcgttctgtgttttatgcacgtg

SEQ ID NO: 207011 - DNA, 30 bp, Artificial Sequence
  Synthetic oligonucleotide
ggggcttcgagtatcattgtagaagacgtg

SEQ ID NO: 207012 - DNA, 30 bp, Artificial Sequence
  Synthetic oligonucleotide
ggggcgcaaccggttccctagtgagacgtg

SEQ ID NO: 207013 - DNA, 30 bp, Artificial Sequence
  Synthetic oligonucleotide
atgtaactgtcctagtggggacacgacgtg

SEQ ID NO: 207014 - DNA, 30 bp, Artificial Sequence
  Synthetic oligonucleotide
aaacctacctgttcaaaacagcaggacgtg

SEQ ID NO: 207015 - DNA, 30 bp, Artificial Sequence
  Synthetic oligonucleotide
ctggaactacatgctttacatacatacgtg

SEQ ID NO: 207016 - DNA, 30 bp, Artificial Sequence
  Synthetic oligonucleotide
tacgattcactagccgaagggctgtacgtg

SEQ ID NO: 207017 - DNA, 30 bp, Artificial Sequence
  Synthetic oligonucleotide
tatatcgcgaagccctcgggctattacgtg

SEQ ID NO: 207018 - DNA, 30 bp, Artificial Sequence
  Synthetic oligonucleotide
ccggataatccttcagcctcgtccaccgtg

SEQ ID NO: 207019 - DNA, 27 bp, Artificial Sequence
  Synthetic oligonucleotide
tactggggcatactgtcagggaccgtg

SEQ ID NO: 207020 - DNA, 30 bp, Artificial Sequence
  Synthetic oligonucleotide
tcttcatggttagcgcctgaagcacccgtg

SEQ ID NO: 207021 - DNA, 30 bp, Artificial Sequence
  Synthetic oligonucleotide
cgagtgtaaacactggtgcctacggccgtg

SEQ ID NO: 207022 - DNA, 30 bp, Artificial Sequence
  Synthetic oligonucleotide
ctccgagcaccgatacgatctaaatccgtg

SEQ ID NO: 207023 - DNA, 30 bp, Artificial Sequence
  Synthetic oligonucleotide
ggtctagactaacggcgttcggcctccgtg

SEQ ID NO: 207024 - DNA, 30 bp, Artificial Sequence
  Synthetic oligonucleotide
ttgcatagtatattaccaagcggttccgtg

SEQ ID NO: 207025 - DNA, 30 bp, Artificial Sequence
  Synthetic oligonucleotide
gaacgagcggcaattcggggtgtttccgtg

SEQ ID NO: 207026 - DNA, 30 bp, Artificial Sequence
  Synthetic oligonucleotide
tccttaaagcacccgactaagttttccgtg

SEQ ID NO: 207027 - DNA, 30 bp, Artificial Sequence
  Synthetic oligonucleotide
gttaataccggacttgtggtgtacagcgtg

SEQ ID NO: 207028 - DNA, 30 bp, Artificial Sequence
  Synthetic oligonucleotide
actctagtggcaacttccctgaggagcgtg

SEQ ID NO: 207029 - DNA, 30 bp, Artificial Sequence
  Synthetic oligonucleotide
ggaaacggcctgcctgcccaatgtagcgtg

SEQ ID NO: 207030 - DNA, 30 bp, Artificial Sequence
  Synthetic oligonucleotide
tcaggtccgacttttggaccattccgcgtg

SEQ ID NO: 207031 - DNA, 30 bp, Artificial Sequence
  Synthetic oligonucleotide
aggaccccgacgtacgacaaacggcgcgtg

SEQ ID NO: 207032 - DNA, 30 bp, Artificial Sequence
  Synthetic oligonucleotide
cccggccaacgagtacaggaggatcgcgtg

SEQ ID NO: 207033 - DNA, 30 bp, Artificial Sequence
  Synthetic oligonucleotide
atgtaagctgctgcgagcaattctcgcgtg

SEQ ID NO: 207034 - DNA, 30 bp, Artificial Sequence
  Synthetic oligonucleotide
aatatgggggcgcattggagacttcgcgtg

SEQ ID NO: 207035 - DNA, 30 bp, Artificial Sequence
  Synthetic oligonucleotide
aatgggattatatattaatgcacaggcgtg

SEQ ID NO: 207036 - DNA, 30 bp, Artificial Sequence
  Synthetic oligonucleotide
ttcgcgtccagaaaggatatatagggcgtg

SEQ ID NO: 207037 - DNA, 30 bp, Artificial Sequence
  Synthetic oligonucleotide
cgtgaagaacgtgggatttaatttggcgtg

SEQ ID NO: 207038 - DNA, 30 bp, Artificial Sequence
  Synthetic oligonucleotide
gttattcctgtaacgccagtcgtatgcgtg

SEQ ID NO: 207039 - DNA, 30 bp, Artificial Sequence
  Synthetic oligonucleotide
aatcgatgttacataaaagggacctgcgtg

SEQ ID NO: 207040 - DNA, 30 bp, Artificial Sequence
  Synthetic oligonucleotide
ctcatttcgagcagctgatcaagctgcgtg

SEQ ID NO: 207041 - DNA, 30 bp, Artificial Sequence
  Synthetic oligonucleotide
ccaccgatcagcctttagaggatctgcgtg

SEQ ID NO: 207042 - DNA, 30 bp, Artificial Sequence
  Synthetic oligonucleotide
ggcttcccggggtatatgtatcagtgcgtg

SEQ ID NO: 207043 - DNA, 30 bp, Artificial Sequence
  Synthetic oligonucleotide
caggggtaggtgtacacactgagttgcgtg

SEQ ID NO: 207044 - DNA, 30 bp, Artificial Sequence
  Synthetic oligonucleotide
aatggacaagctggatgcgttgtttgcgtg

SEQ ID NO: 207045 - DNA, 30 bp, Artificial Sequence
  Synthetic oligonucleotide
tgattaggctggttgagccttaccatcgtg

SEQ ID NO: 207046 - DNA, 30 bp, Artificial Sequence
  Synthetic oligonucleotide
tgtgtactaagatgtggtctggggatcgtg

SEQ ID NO: 207047 - DNA, 30 bp, Artificial Sequence
  Synthetic oligonucleotide
ctgaggggtgtaatacttgcgtggatcgtg

SEQ ID NO: 207048 - DNA, 30 bp, Artificial Sequence
  Synthetic oligonucleotide
gagaaggctctatgtgaccgggctatcgtg

SEQ ID NO: 207049 - DNA, 30 bp, Artificial Sequence
  Synthetic oligonucleotide
agtggaagtttgacagtcgtgggtatcgtg

SEQ ID NO: 207050 - DNA, 30 bp, Artificial Sequence
  Synthetic oligonucleotide
gtgaattcgtaaaaatgttgttttatcgtg

SEQ ID NO: 207051 - DNA, 30 bp, Artificial Sequence
  Synthetic oligonucleotide
ggagaacaagacgggggtccgcacctcgtg

SEQ ID NO: 207052 - DNA, 30 bp, Artificial Sequence
  Synthetic oligonucleotide
aattgtatacacttagctgtgcatctcgtg

SEQ ID NO: 207053 - DNA, 30 bp, Artificial Sequence
  Synthetic oligonucleotide
agccagggaaatagcaggccgcgtctcgtg

SEQ ID NO: 207054 - DNA, 30 bp, Artificial Sequence
  Synthetic oligonucleotide
ttctgctggttgggttaatgtctagtcgtg

SEQ ID NO: 207055 - DNA, 30 bp, Artificial Sequence
  Synthetic oligonucleotide
ttatgtgctacataataggaagtagtcgtg

SEQ ID NO: 207056 - DNA, 30 bp, Artificial Sequence
  Synthetic oligonucleotide
gccgtcatccttttttaactattggtcgtg

SEQ ID NO: 207057 - DNA, 30 bp, Artificial Sequence
  Synthetic oligonucleotide
tggttatgggtcatgaagagacctgtcgtg

SEQ ID NO: 207058 - DNA, 30 bp, Artificial Sequence
  Synthetic oligonucleotide
gaccagtgatggttagctagacttgtcgtg

SEQ ID NO: 207059 - DNA, 30 bp, Artificial Sequence
  Synthetic oligonucleotide
tccgccaatcaccacttgcacaaattcgtg

SEQ ID NO: 207060 - DNA, 30 bp, Artificial Sequence
  Synthetic oligonucleotide
gctagctactccgaaaaagcacgattcgtg

SEQ ID NO: 207061 - DNA, 30 bp, Artificial Sequence
  Synthetic oligonucleotide
tgatggaaagtggtctccttatgattcgtg

SEQ ID NO: 207062 - DNA, 30 bp, Artificial Sequence
  Synthetic oligonucleotide
ctccagtaaggatatggtgtgcgcttcgtg

SEQ ID NO: 207063 - DNA, 30 bp, Artificial Sequence
  Synthetic oligonucleotide
agtcccggattacagctgtttgcgttcgtg

SEQ ID NO: 207064 - DNA, 30 bp, Artificial Sequence
  Synthetic oligonucleotide
gatcattgacaaccagcgaatacaaaggtg

SEQ ID NO: 207065 - DNA, 30 bp, Artificial Sequence
  Synthetic oligonucleotide
tagacacgtcaagtgcgaatgtgcaaggtg

SEQ ID NO: 207066 - DNA, 30 bp, Artificial Sequence
  Synthetic oligonucleotide
gctgaacaatagtcaatcctgttcaaggtg

SEQ ID NO: 207067 - DNA, 30 bp, Artificial Sequence
  Synthetic oligonucleotide
gcgttgccttattgagggcactggaaggtg

SEQ ID NO: 207068 - DNA, 30 bp, Artificial Sequence
  Synthetic oligonucleotide
gcctgggatagaatgatgtcctctaaggtg

SEQ ID NO: 207069 - DNA, 30 bp, Artificial Sequence
  Synthetic oligonucleotide
gcattcagatgattagtacgttgtaaggtg

SEQ ID NO: 207070 - DNA, 30 bp, Artificial Sequence
  Synthetic oligonucleotide
ctcctccttggcctccggggataacaggtg

SEQ ID NO: 207071 - DNA, 30 bp, Artificial Sequence
  Synthetic oligonucleotide
agcacgtcggaacaaacttggttccaggtg

SEQ ID NO: 207072 - DNA, 30 bp, Artificial Sequence
  Synthetic oligonucleotide
cctggtctgttccagggaaaaggtcaggtg

SEQ ID NO: 207073 - DNA, 30 bp, Artificial Sequence
  Synthetic oligonucleotide
ttaataggtaagagaatgaacgaagaggtg

SEQ ID NO: 207074 - DNA, 30 bp, Artificial Sequence
  Synthetic oligonucleotide
ttagcagttacggcatttccaatagaggtg

SEQ ID NO: 207075 - DNA, 30 bp, Artificial Sequence
  Synthetic oligonucleotide
agcgacaaccccagtcgatgcccggaggtg

SEQ ID NO: 207076 - DNA, 30 bp, Artificial Sequence
  Synthetic oligonucleotide
tgcattttaaggggagtttgtagggaggtg

SEQ ID NO: 207077 - DNA, 30 bp, Artificial Sequence
  Synthetic oligonucleotide
cacgttacgaagtgcccaaatattgaggtg

SEQ ID NO: 207078 - DNA, 30 bp, Artificial Sequence
  Synthetic oligonucleotide
actgaggtacaagtcagcttagttgaggtg

SEQ ID NO: 207079 - DNA, 30 bp, Artificial Sequence
  Synthetic oligonucleotide
ctcaaagctcccagcacgagcgcataggtg

SEQ ID NO: 207080 - DNA, 30 bp, Artificial Sequence
  Synthetic oligonucleotide
gatggcgtggtcacgtgggtaacctaggtg

SEQ ID NO: 207081 - DNA, 30 bp, Artificial Sequence
  Synthetic oligonucleotide
tacaagcgtgtggttagggaacagtaggtg

SEQ ID NO: 207082 - DNA, 30 bp, Artificial Sequence
  Synthetic oligonucleotide
attagtacttaacctttgttaacgtaggtg

SEQ ID NO: 207083 - DNA, 30 bp, Artificial Sequence
  Synthetic oligonucleotide
atattggccaaacatgtcactgcgtaggtg

SEQ ID NO: 207084 - DNA, 30 bp, Artificial Sequence
  Synthetic oligonucleotide
tgcctagggataacaacgaaggggtaggtg

SEQ ID NO: 207085 - DNA, 30 bp, Artificial Sequence
  Synthetic oligonucleotide
tgtaagtcgcaccaggggcgtgcttaggtg

SEQ ID NO: 207086 - DNA, 30 bp, Artificial Sequence
  Synthetic oligonucleotide
gcgttatcgcgtaggcaagttagttaggtg

SEQ ID NO: 207087 - DNA, 30 bp, Artificial Sequence
  Synthetic oligonucleotide
tggatccaagcaactacccacctttaggtg

SEQ ID NO: 207088 - DNA, 30 bp, Artificial Sequence
  Synthetic oligonucleotide
cgtgagttaatttccgttcatgccacggtg

SEQ ID NO: 207089 - DNA, 30 bp, Artificial Sequence
  Synthetic oligonucleotide
tacacggaaaaagcatcggggtccacggtg

SEQ ID NO: 207090 - DNA, 30 bp, Artificial Sequence
  Synthetic oligonucleotide
cctatcagcatagtaatgtctggtacggtg

SEQ ID NO: 207091 - DNA, 30 bp, Artificial Sequence
  Synthetic oligonucleotide
aaagcggagtacgcttgcttttcaccggtg

SEQ ID NO: 207092 - DNA, 30 bp, Artificial Sequence
  Synthetic oligonucleotide
cggtaaccccacattacgtgttgaccggtg

SEQ ID NO: 207093 - DNA, 30 bp, Artificial Sequence
  Synthetic oligonucleotide
gctgaggcttcgacagtgtcccccccggtg

SEQ ID NO: 207094 - DNA, 30 bp, Artificial Sequence
  Synthetic oligonucleotide
gctagcgagctatgatcccaatccccggtg

SEQ ID NO: 207095 - DNA, 30 bp, Artificial Sequence
  Synthetic oligonucleotide
gtgtgcatagggcatatacggtgcccggtg

SEQ ID NO: 207096 - DNA, 30 bp, Artificial Sequence
  Synthetic oligonucleotide
ccaacgttggtttacttcaatcgagcggtg

SEQ ID NO: 207097 - DNA, 30 bp, Artificial Sequence
  Synthetic oligonucleotide
ccttcagctgaatttgcggaagaggcggtg

SEQ ID NO: 207098 - DNA, 30 bp, Artificial Sequence
  Synthetic oligonucleotide
cgtacattagttttgatcgtagaggcggtg

SEQ ID NO: 207099 - DNA, 30 bp, Artificial Sequence
  Synthetic oligonucleotide
actgatccaaattatctcgcgtatgcggtg

SEQ ID NO: 207100 - DNA, 30 bp, Artificial Sequence
  Synthetic oligonucleotide
gtccttaaaagtcagggcttcacctcggtg

SEQ ID NO: 207101 - DNA, 30 bp, Artificial Sequence
  Synthetic oligonucleotide
tttccgagagagagggcgcttaggtcggtg

SEQ ID NO: 207102 - DNA, 30 bp, Artificial Sequence
  Synthetic oligonucleotide
gtaagtcgggaatattaaggcaattcggtg

SEQ ID NO: 207103 - DNA, 30 bp, Artificial Sequence
  Synthetic oligonucleotide
attacagtactctttacatagaattcggtg

SEQ ID NO: 207104 - DNA, 30 bp, Artificial Sequence
  Synthetic oligonucleotide
ctgcatgatgctaggggatatctaagggtg

SEQ ID NO: 207105 - DNA, 30 bp, Artificial Sequence
  Synthetic oligonucleotide
gtacatcagcaactgtgtcattacagggtg

SEQ ID NO: 207106 - DNA, 30 bp, Artificial Sequence
  Synthetic oligonucleotide
caaccaacaaccaacgaccccagcagggtg

SEQ ID NO: 207107 - DNA, 30 bp, Artificial Sequence
  Synthetic oligonucleotide
gaaggtacccagagcggtggtactagggtg

SEQ ID NO: 207108 - DNA, 30 bp, Artificial Sequence
  Synthetic oligonucleotide
cagctcgtacaaacgatattacttagggtg

SEQ ID NO: 207109 - DNA, 30 bp, Artificial Sequence
  Synthetic oligonucleotide
ccgagctatacgttgtggctaggccgggtg

SEQ ID NO: 207110 - DNA, 30 bp, Artificial Sequence
  Synthetic oligonucleotide
cgagtcctaacgtggtatttgttccgggtg

SEQ ID NO: 207111 - DNA, 30 bp, Artificial Sequence
  Synthetic oligonucleotide
cggttataacgtaagcgtgcgacgcgggtg

SEQ ID NO: 207112 - DNA, 30 bp, Artificial Sequence
  Synthetic oligonucleotide
ccagggcccggaagaacttgctcaggggtg

SEQ ID NO: 207113 - DNA, 30 bp, Artificial Sequence
  Synthetic oligonucleotide
gacaatcacacttgtggctatgtcggggtg

SEQ ID NO: 207114 - DNA, 30 bp, Artificial Sequence
  Synthetic oligonucleotide
tccacaaactagaagaaaatggagggggtg

SEQ ID NO: 207115 - DNA, 31 bp, Artificial Sequence
  Synthetic oligonucleotide
accttccgttaccatgatccaagactgggtg

SEQ ID NO: 207116 - DNA, 30 bp, Artificial Sequence
  Synthetic oligonucleotide
gcatcacaggatggcgcgcctacgtgggtg

SEQ ID NO: 207117 - DNA, 30 bp, Artificial Sequence
  Synthetic oligonucleotide
cggccggcagcagtacacgccgcgtgggtg

SEQ ID NO: 207118 - DNA, 30 bp, Artificial Sequence
  Synthetic oligonucleotide
gaaagatagcgaaggccacagctgtgggtg

SEQ ID NO: 207119 - DNA, 30 bp, Artificial Sequence
  Synthetic oligonucleotide
gggttggcggtccggtcatatcaaatggtg

SEQ ID NO: 207120 - DNA, 30 bp, Artificial Sequence
  Synthetic oligonucleotide
tggcctgtttaggatagttgagagatggtg

SEQ ID NO: 207121 - DNA, 30 bp, Artificial Sequence
  Synthetic oligonucleotide
cctctggttataacgcaaagttatatggtg

SEQ ID NO: 207122 - DNA, 30 bp, Artificial Sequence
  Synthetic oligonucleotide
gcctctgtagtgtcgctgagcagtatggtg

SEQ ID NO: 207123 - DNA, 30 bp, Artificial Sequence
  Synthetic oligonucleotide
taaccgtagggcgagaggtgctgtatggtg

SEQ ID NO: 207124 - DNA, 30 bp, Artificial Sequence
  Synthetic oligonucleotide
gccctataagtcctaccgccagtactggtg

SEQ ID NO: 207125 - DNA, 30 bp, Artificial Sequence
  Synthetic oligonucleotide
ttattgactgaataccagaaggggctggtg

SEQ ID NO: 207126 - DNA, 30 bp, Artificial Sequence
  Synthetic oligonucleotide
cagtggcctatcgctacaaacactctggtg

SEQ ID NO: 207127 - DNA, 30 bp, Artificial Sequence
  Synthetic oligonucleotide
tcgagcaattttagtatttggggtctggtg

SEQ ID NO: 207128 - DNA, 30 bp, Artificial Sequence
  Synthetic oligonucleotide
tggggtaacaaacgtcgatcacttctggtg

SEQ ID NO: 207129 - DNA, 30 bp, Artificial Sequence
  Synthetic oligonucleotide
cattagttgtctactgggaatgttctggtg

SEQ ID NO: 207130 - DNA, 30 bp, Artificial Sequence
  Synthetic oligonucleotide
tgccggtccccatttatacacttagtggtg

SEQ ID NO: 207131 - DNA, 30 bp, Artificial Sequence
  Synthetic oligonucleotide
ataggtggaaaagtgggcggacttgtggtg

SEQ ID NO: 207132 - DNA, 30 bp, Artificial Sequence
  Synthetic oligonucleotide
cacagtccagaaagtaatgtacccttggtg

SEQ ID NO: 207133 - DNA, 30 bp, Artificial Sequence
  Synthetic oligonucleotide
agcacagcagattatacgagacagttggtg

SEQ ID NO: 207134 - DNA, 30 bp, Artificial Sequence
  Synthetic oligonucleotide
gccaaagcgtacagagtatacaatttggtg

SEQ ID NO: 207135 - DNA, 30 bp, Artificial Sequence
  Synthetic oligonucleotide
ggcagtgagcatcgcttacaaaaaaatgtg

SEQ ID NO: 207136 - DNA, 29 bp, Artificial Sequence
  Synthetic oligonucleotide
acgagatagaccacatcctttaaaatgtg

SEQ ID NO: 207137 - DNA, 30 bp, Artificial Sequence
  Synthetic oligonucleotide
gcgttttacgtacgttaagcggcaaatgtg

SEQ ID NO: 207138 - DNA, 30 bp, Artificial Sequence
  Synthetic oligonucleotide
ggcatccatctgggaactcatcgaaatgtg

SEQ ID NO: 207139 - DNA, 30 bp, Artificial Sequence
  Synthetic oligonucleotide
agtactgcaagccggttcctcgtaaatgtg

SEQ ID NO: 207140 - DNA, 30 bp, Artificial Sequence
  Synthetic oligonucleotide
aaagagtgtaagggggcaccatgcaatgtg

SEQ ID NO: 207141 - DNA, 30 bp, Artificial Sequence
  Synthetic oligonucleotide
cacttagaaagctctttggcatcgaatgtg

SEQ ID NO: 207142 - DNA, 30 bp, Artificial Sequence
  Synthetic oligonucleotide
cataggctcacaagtgaaaactcgaatgtg

SEQ ID NO: 207143 - DNA, 30 bp, Artificial Sequence
  Synthetic oligonucleotide
tagtgttggagagtaaacttattgaatgtg

SEQ ID NO: 207144 - DNA, 30 bp, Artificial Sequence
  Synthetic oligonucleotide
agagctagtctggcatgggtgctacatgtg

SEQ ID NO: 207145 - DNA, 30 bp, Artificial Sequence
  Synthetic oligonucleotide
caaatcttcattggtgcgacttatcatgtg

SEQ ID NO: 207146 - DNA, 30 bp, Artificial Sequence
  Synthetic oligonucleotide
gagtattccgttagcgcggactgagatgtg

SEQ ID NO: 207147 - DNA, 30 bp, Artificial Sequence
  Synthetic oligonucleotide
acataaagcataaagacctcgttagatgtg

SEQ ID NO: 207148 - DNA, 30 bp, Artificial Sequence
  Synthetic oligonucleotide
tctgaaggtcatgggccggcgtctgatgtg

SEQ ID NO: 207149 - DNA, 30 bp, Artificial Sequence
  Synthetic oligonucleotide
aggcgtcacacaaatcaagccagatatgtg

SEQ ID NO: 207150 - DNA, 30 bp, Artificial Sequence
  Synthetic oligonucleotide
caagtaatacggccctttattgtatatgtg

SEQ ID NO: 207151 - DNA, 30 bp, Artificial Sequence
  Synthetic oligonucleotide
gtatacacgtcacagtttgggcactatgtg

SEQ ID NO: 207152 - DNA, 30 bp, Artificial Sequence
  Synthetic oligonucleotide
tgcggtacggttaatgtccgggcctatgtg

SEQ ID NO: 207153 - DNA, 30 bp, Artificial Sequence
  Synthetic oligonucleotide
agaatctagtgaatatccttgcgttatgtg

SEQ ID NO: 207154 - DNA, 30 bp, Artificial Sequence
  Synthetic oligonucleotide
cgttgttttacgccatctctatgaactgtg

SEQ ID NO: 207155 - DNA, 30 bp, Artificial Sequence
  Synthetic oligonucleotide
agctcggacaactcatgtgcggggactgtg

SEQ ID NO: 207156 - DNA, 30 bp, Artificial Sequence
  Synthetic oligonucleotide
taaggaacgagagttgatatggcgcctgtg

SEQ ID NO: 207157 - DNA, 30 bp, Artificial Sequence
  Synthetic oligonucleotide
gcgcatcgcttgtaggccaagggtcctgtg

SEQ ID NO: 207158 - DNA, 30 bp, Artificial Sequence
  Synthetic oligonucleotide
gacaacatagggacgggggtcagggctgtg

SEQ ID NO: 207159 - DNA, 30 bp, Artificial Sequence
  Synthetic oligonucleotide
cgttatgctagactagctaacgcctctgtg

SEQ ID NO: 207160 - DNA, 30 bp, Artificial Sequence
  Synthetic oligonucleotide
taagccaggcaagcgtaggcttcgtctgtg

SEQ ID NO: 207161 - DNA, 30 bp, Artificial Sequence
  Synthetic oligonucleotide
cgtgcggcatacgggacggttcgttctgtg

SEQ ID NO: 207162 - DNA, 30 bp, Artificial Sequence
  Synthetic oligonucleotide
tacggtgtgacaccgggatcgaaaagtgtg

SEQ ID NO: 207163 - DNA, 30 bp, Artificial Sequence
  Synthetic oligonucleotide
ggttcatgggtgcgacgggttcaaagtgtg

SEQ ID NO: 207164 - DNA, 30 bp, Artificial Sequence
  Synthetic oligonucleotide
cgttgatccaggaaatgctcgacaagtgtg

SEQ ID NO: 207165 - DNA, 30 bp, Artificial Sequence
  Synthetic oligonucleotide
gttcacctgagttcgcccagcttaagtgtg

SEQ ID NO: 207166 - DNA, 30 bp, Artificial Sequence
  Synthetic oligonucleotide
gaacaaggaatccgggagagatggagtgtg

SEQ ID NO: 207167 - DNA, 30 bp, Artificial Sequence
  Synthetic oligonucleotide
cgtttgagatagggttcgtccgtgagtgtg

SEQ ID NO: 207168 - DNA, 30 bp, Artificial Sequence
  Synthetic oligonucleotide
accatctgctttcgtcgccgagctagtgtg

SEQ ID NO: 207169 - DNA, 30 bp, Artificial Sequence
  Synthetic oligonucleotide
aatgacccaatactatatccgaaacgtgtg

SEQ ID NO: 207170 - DNA, 30 bp, Artificial Sequence
  Synthetic oligonucleotide
acaggtgggcatagttgcttaggacgtgtg

SEQ ID NO: 207171 - DNA, 30 bp, Artificial Sequence
  Synthetic oligonucleotide
aacctagcaggtagtgtggttatacgtgtg

SEQ ID NO: 207172 - DNA, 30 bp, Artificial Sequence
  Synthetic oligonucleotide
acataggtcggcttagccgataaaggtgtg

SEQ ID NO: 207173 - DNA, 30 bp, Artificial Sequence
  Synthetic oligonucleotide
catgcatatatagtatcgatggcaggtgtg

SEQ ID NO: 207174 - DNA, 30 bp, Artificial Sequence
  Synthetic oligonucleotide
cacctgggcgttgatcttggaaacggtgtg

SEQ ID NO: 207175 - DNA, 30 bp, Artificial Sequence
  Synthetic oligonucleotide
tacggaataccggagaacaacgacggtgtg

SEQ ID NO: 207176 - DNA, 30 bp, Artificial Sequence
  Synthetic oligonucleotide
acttaacaatctatagaaataggcggtgtg

SEQ ID NO: 207177 - DNA, 29 bp, Artificial Sequence
  Synthetic oligonucleotide
tggtagacgggtgaaggaaaatgggtgtg

SEQ ID NO: 207178 - DNA, 30 bp, Artificial Sequence
  Synthetic oligonucleotide
atatggtgaataagtggatagggtggtgtg

SEQ ID NO: 207179 - DNA, 30 bp, Artificial Sequence
  Synthetic oligonucleotide
ccaaaagcggcaataggatgctcatgtgtg

SEQ ID NO: 207180 - DNA, 30 bp, Artificial Sequence
  Synthetic oligonucleotide
aaaaattacagaaacgttgcaagatgtgtg

SEQ ID NO: 207181 - DNA, 30 bp, Artificial Sequence
  Synthetic oligonucleotide
tggaatacgcaggtcctggtaggaattgtg

SEQ ID NO: 207182 - DNA, 30 bp, Artificial Sequence
  Synthetic oligonucleotide
acggaggaatttttaacgtctatacttgtg

SEQ ID NO: 207183 - DNA, 30 bp, Artificial Sequence
  Synthetic oligonucleotide
gcagtaatcaatgctaaggtcgtccttgtg

SEQ ID NO: 207184 - DNA, 30 bp, Artificial Sequence
  Synthetic oligonucleotide
aggggaatgtgagtttcatcctggcttgtg

SEQ ID NO: 207185 - DNA, 30 bp, Artificial Sequence
  Synthetic oligonucleotide
ataggcttgactaaaagttgaaatcttgtg

SEQ ID NO: 207186 - DNA, 30 bp, Artificial Sequence
  Synthetic oligonucleotide
agctgtcaaccggtgattcgaactcttgtg

SEQ ID NO: 207187 - DNA, 30 bp, Artificial Sequence
  Synthetic oligonucleotide
attcagatggctgcgtaggactgtcttgtg

SEQ ID NO: 207188 - DNA, 30 bp, Artificial Sequence
  Synthetic oligonucleotide
tccaagaacttggatcgtcgtccagttgtg

SEQ ID NO: 207189 - DNA, 31 bp, Artificial Sequence
  Synthetic oligonucleotide
gtcgttactttctatagcaatttgagttgtg

SEQ ID NO: 207190 - DNA, 30 bp, Artificial Sequence
  Synthetic oligonucleotide
taggacggcatcgctagcgcaaccgttgtg

SEQ ID NO: 207191 - DNA, 30 bp, Artificial Sequence
  Synthetic oligonucleotide
ggacgttgttcgatatattgttgcgttgtg

SEQ ID NO: 207192 - DNA, 30 bp, Artificial Sequence
  Synthetic oligonucleotide
cttaccctggcctgacaaacacgtgttgtg

SEQ ID NO: 207193 - DNA, 30 bp, Artificial Sequence
  Synthetic oligonucleotide
tacgactcaggcaagtcatattcatttgtg

SEQ ID NO: 207194 - DNA, 30 bp, Artificial Sequence
  Synthetic oligonucleotide
gaaccctgttaaaagcgaaactgatttgtg

SEQ ID NO: 207195 - DNA, 30 bp, Artificial Sequence
  Synthetic oligonucleotide
cggcttggatgcagctgataagagtttgtg

SEQ ID NO: 207196 - DNA, 30 bp, Artificial Sequence
  Synthetic oligonucleotide
ctacaattccaacgtgttgactcaaaattg

SEQ ID NO: 207197 - DNA, 30 bp, Artificial Sequence
  Synthetic oligonucleotide
atccgggattgggcacatttgttaaaattg

SEQ ID NO: 207198 - DNA, 30 bp, Artificial Sequence
  Synthetic oligonucleotide
cgagaattgaccagatttaactccaaattg

SEQ ID NO: 207199 - DNA, 30 bp, Artificial Sequence
  Synthetic oligonucleotide
acagcaaagccttgggtcagcacgaaattg

SEQ ID NO: 207200 - DNA, 30 bp, Artificial Sequence
  Synthetic oligonucleotide
tgttcatggggatacaacgtctggaaattg

SEQ ID NO: 207201 - DNA, 30 bp, Artificial Sequence
  Synthetic oligonucleotide
gttcaattaccagaagagcatatgaaattg

SEQ ID NO: 207202 - DNA, 30 bp, Artificial Sequence
  Synthetic oligonucleotide
tccgtgagattaatggcattggataaattg

SEQ ID NO: 207203 - DNA, 30 bp, Artificial Sequence
  Synthetic oligonucleotide
ccttccacctccagtcagcaaagtaaattg

SEQ ID NO: 207204 - DNA, 30 bp, Artificial Sequence
  Synthetic oligonucleotide
gcaagttatcgaaagcaggtgtgtaaattg

SEQ ID NO: 207205 - DNA, 30 bp, Artificial Sequence
  Synthetic oligonucleotide
gcgccacgggggcacgtacggtttaaattg

SEQ ID NO: 207206 - DNA, 30 bp, Artificial Sequence
  Synthetic oligonucleotide
cggtcaaggaggacgaccggcatccaattg

SEQ ID NO: 207207 - DNA, 30 bp, Artificial Sequence
  Synthetic oligonucleotide
aaggcgtactgaattatacgtaagcaattg

SEQ ID NO: 207208 - DNA, 30 bp, Artificial Sequence
  Synthetic oligonucleotide
accaagtgcagagatgattaaacgcaattg

SEQ ID NO: 207209 - DNA, 30 bp, Artificial Sequence
  Synthetic oligonucleotide
gaacggtgggccccagctgcacatcaattg

SEQ ID NO: 207210 - DNA, 30 bp, Artificial Sequence
  Synthetic oligonucleotide
ttcggttaaggaaagagctgatatcaattg

SEQ ID NO: 207211 - DNA, 30 bp, Artificial Sequence
  Synthetic oligonucleotide
attgggccatacagcctattcactcaattg

SEQ ID NO: 207212 - DNA, 30 bp, Artificial Sequence
  Synthetic oligonucleotide
gttcggccaaggtaacgagtacctcaattg

SEQ ID NO: 207213 - DNA, 30 bp, Artificial Sequence
  Synthetic oligonucleotide
ctactgtattgagaattgaaaggtcaattg

SEQ ID NO: 207214 - DNA, 30 bp, Artificial Sequence
  Synthetic oligonucleotide
caaggggacccgcatcaacttacagaattg

SEQ ID NO: 207215 - DNA, 30 bp, Artificial Sequence
  Synthetic oligonucleotide
ctgaatacgtaatcagacggggcagaattg

SEQ ID NO: 207216 - DNA, 30 bp, Artificial Sequence
  Synthetic oligonucleotide
ggtgctcagaagtgggcatggttggaattg

SEQ ID NO: 207217 - DNA, 30 bp, Artificial Sequence
  Synthetic oligonucleotide
aaaccaggaaccagtcagaccggtgaattg

SEQ ID NO: 207218 - DNA, 30 bp, Artificial Sequence
  Synthetic oligonucleotide
gcgtctgtcggacgagtcataggataattg

SEQ ID NO: 207219 - DNA, 30 bp, Artificial Sequence
  Synthetic oligonucleotide
agcttgcatacgtcacccggcgattaattg

SEQ ID NO: 207220 - DNA, 29 bp, Artificial Sequence
  Synthetic oligonucleotide
tcttttaacagtcgttgtcaccttaattg

SEQ ID NO: 207221 - DNA, 30 bp, Artificial Sequence
  Synthetic oligonucleotide
gcgtcccttcaattcgggataagttaattg

SEQ ID NO: 207222 - DNA, 30 bp, Artificial Sequence
  Synthetic oligonucleotide
cactcgacagtttggaccgaagcaacattg

SEQ ID NO: 207223 - DNA, 30 bp, Artificial Sequence
  Synthetic oligonucleotide
gccatttactgcacacttcttgtaacattg

SEQ ID NO: 207224 - DNA, 30 bp, Artificial Sequence
  Synthetic oligonucleotide
cttccagagatcgctacttcggccacattg

SEQ ID NO: 207225 - DNA, 30 bp, Artificial Sequence
  Synthetic oligonucleotide
gcccaccttgctaggtcacttcgcacattg

SEQ ID NO: 207226 - DNA, 30 bp, Artificial Sequence
  Synthetic oligonucleotide
taaagttctgaataggtgcttcagacattg

SEQ ID NO: 207227 - DNA, 30 bp, Artificial Sequence
  Synthetic oligonucleotide
aagtaacgggaccagtactccaaaccattg

SEQ ID NO: 207228 - DNA, 30 bp, Artificial Sequence
  Synthetic oligonucleotide
aaagaaagcactacaacgggatcaccattg

SEQ ID NO: 207229 - DNA, 30 bp, Artificial Sequence
  Synthetic oligonucleotide
cccaaaccattacaagacgatataccattg

SEQ ID NO: 207230 - DNA, 31 bp, Artificial Sequence
  Synthetic oligonucleotide
aaactggtataaccaggaactggagccattg

SEQ ID NO: 207231 - DNA, 30 bp, Artificial Sequence
  Synthetic oligonucleotide
aattcgaccggcgtgaggatagggccattg

SEQ ID NO: 207232 - DNA, 30 bp, Artificial Sequence
  Synthetic oligonucleotide
cggatcaatggtgagaatggcgttccattg

SEQ ID NO: 207233 - DNA, 30 bp, Artificial Sequence
  Synthetic oligonucleotide
agagatggttaggaaaatccttacgcattg

SEQ ID NO: 207234 - DNA, 30 bp, Artificial Sequence
  Synthetic oligonucleotide
ttccgataaagaattgcgacagaggcattg

SEQ ID NO: 207235 - DNA, 30 bp, Artificial Sequence
  Synthetic oligonucleotide
gtctaggttgttgagaagtgtggctcattg

SEQ ID NO: 207236 - DNA, 30 bp, Artificial Sequence
  Synthetic oligonucleotide
cgaaaagccccacggcttacattaagattg

SEQ ID NO: 207237 - DNA, 30 bp, Artificial Sequence
  Synthetic oligonucleotide
tagctgcatgcctatctacataacagattg

SEQ ID NO: 207238 - DNA, 30 bp, Artificial Sequence
  Synthetic oligonucleotide
atgcatggggaggcatgagtagacagattg

SEQ ID NO: 207239 - DNA, 30 bp, Artificial Sequence
  Synthetic oligonucleotide
aaacattgtaattctcgttactacagattg

SEQ ID NO: 207240 - DNA, 30 bp, Artificial Sequence
  Synthetic oligonucleotide
ctgcaactgttgcaggggtacggcagattg

SEQ ID NO: 207241 - DNA, 30 bp, Artificial Sequence
  Synthetic oligonucleotide
ggcattcttacacgtggagcatgcagattg

SEQ ID NO: 207242 - DNA, 30 bp, Artificial Sequence
  Synthetic oligonucleotide
agcggagcactgcacgcaggtacgagattg

SEQ ID NO: 207243 - DNA, 30 bp, Artificial Sequence
  Synthetic oligonucleotide
taatcactgttcgggctccccccacgattg

SEQ ID NO: 207244 - DNA, 30 bp, Artificial Sequence
  Synthetic oligonucleotide
tctcgggtcgcaagcaacagttcacgattg

SEQ ID NO: 207245 - DNA, 30 bp, Artificial Sequence
  Synthetic oligonucleotide
gtgcgaaatcaaactcccagcagacgattg

SEQ ID NO: 207246 - DNA, 30 bp, Artificial Sequence
  Synthetic oligonucleotide
gcgagaagatcgcggcatggcttacgattg

SEQ ID NO: 207247 - DNA, 30 bp, Artificial Sequence
  Synthetic oligonucleotide
gtgaccgatgattaaacatctcggcgattg

SEQ ID NO: 207248 - DNA, 30 bp, Artificial Sequence
  Synthetic oligonucleotide
tataaagcgactggatctggcatgcgattg

SEQ ID NO: 207249 - DNA, 30 bp, Artificial Sequence
  Synthetic oligonucleotide
ggatcacgggaatattatactcttcgattg

SEQ ID NO: 207250 - DNA, 30 bp, Artificial Sequence
  Synthetic oligonucleotide
gcgcttaatgatctaaactttagcggattg

SEQ ID NO: 207251 - DNA, 30 bp, Artificial Sequence
  Synthetic oligonucleotide
tcgggcgttggcctatggcctatcggattg

SEQ ID NO: 207252 - DNA, 30 bp, Artificial Sequence
  Synthetic oligonucleotide
actccaaggggaaggccaagggggggattg

SEQ ID NO: 207253 - DNA, 30 bp, Artificial Sequence
  Synthetic oligonucleotide
ctgctccaacatgaatctcgtgggggattg

SEQ ID NO: 207254 - DNA, 30 bp, Artificial Sequence
  Synthetic oligonucleotide
cagtacaagcttgctctccatgtgggattg

SEQ ID NO: 207255 - DNA, 30 bp, Artificial Sequence
  Synthetic oligonucleotide
tccgctgatctagtacccatacctggattg

SEQ ID NO: 207256 - DNA, 30 bp, Artificial Sequence
  Synthetic oligonucleotide
caattttagggggtctagatcgaatgattg

SEQ ID NO: 207257 - DNA, 30 bp, Artificial Sequence
  Synthetic oligonucleotide
ggcacgttataagggtgcggctgctgattg

SEQ ID NO: 207258 - DNA, 30 bp, Artificial Sequence
  Synthetic oligonucleotide
gagagcataccgggtgcttagtagtgattg

SEQ ID NO: 207259 - DNA, 30 bp, Artificial Sequence
  Synthetic oligonucleotide
ctcgagtggaccatgcaaaaggcgtgattg

SEQ ID NO: 207260 - DNA, 30 bp, Artificial Sequence
  Synthetic oligonucleotide
ccgtatagacaagacgggggacgttgattg

SEQ ID NO: 207261 - DNA, 30 bp, Artificial Sequence
  Synthetic oligonucleotide
taaatctcggaaatagccgctaacatattg

SEQ ID NO: 207262 - DNA, 30 bp, Artificial Sequence
  Synthetic oligonucleotide
gcgcggcagaaatccaaagccgacatattg

SEQ ID NO: 207263 - DNA, 30 bp, Artificial Sequence
  Synthetic oligonucleotide
tatcgtacgtcccaacttagtgtgatattg

SEQ ID NO: 207264 - DNA, 30 bp, Artificial Sequence
  Synthetic oligonucleotide
aacggattgtttgcgccgcgagttatattg

SEQ ID NO: 207265 - DNA, 30 bp, Artificial Sequence
  Synthetic oligonucleotide
agtgccaagcgtgctgcaaggacactattg

SEQ ID NO: 207266 - DNA, 30 bp, Artificial Sequence
  Synthetic oligonucleotide
caatttgagggatcccgctcgaccctattg

SEQ ID NO: 207267 - DNA, 30 bp, Artificial Sequence
  Synthetic oligonucleotide
ccacctcctgtaccgttcagaaagctattg

SEQ ID NO: 207268 - DNA, 30 bp, Artificial Sequence
  Synthetic oligonucleotide
gaggatatacgagggctatctacgctattg

SEQ ID NO: 207269 - DNA, 30 bp, Artificial Sequence
  Synthetic oligonucleotide
gtgcttagcaggtgtgtcgcgctgctattg

SEQ ID NO: 207270 - DNA, 30 bp, Artificial Sequence
  Synthetic oligonucleotide
ggctacgaaggaaaagagctgtatctattg

SEQ ID NO: 207271 - DNA, 30 bp, Artificial Sequence
  Synthetic oligonucleotide
taggcaacactttttgtaacatgcgtattg

SEQ ID NO: 207272 - DNA, 30 bp, Artificial Sequence
  Synthetic oligonucleotide
ctgtcggtggttagagtttatatcgtattg

SEQ ID NO: 207273 - DNA, 30 bp, Artificial Sequence
  Synthetic oligonucleotide
cgggcaggattttcagtggtgatggtattg

SEQ ID NO: 207274 - DNA, 30 bp, Artificial Sequence
  Synthetic oligonucleotide
gcaagagtcgaacacactatgtctgtattg

SEQ ID NO: 207275 - DNA, 30 bp, Artificial Sequence
  Synthetic oligonucleotide
cctacacatccctcgcgcttcctattattg

SEQ ID NO: 207276 - DNA, 30 bp, Artificial Sequence
  Synthetic oligonucleotide
aacgtatgtacgaaacgtagagtattattg

SEQ ID NO: 207277 - DNA, 30 bp, Artificial Sequence
  Synthetic oligonucleotide
ggctaattgtcgaggcatttgctcttattg

SEQ ID NO: 207278 - DNA, 30 bp, Artificial Sequence
  Synthetic oligonucleotide
cctaaggccgcgcatcgtgattagttattg

SEQ ID NO: 207279 - DNA, 30 bp, Artificial Sequence
  Synthetic oligonucleotide
tgggctaactacataactatgacgttattg

SEQ ID NO: 207280 - DNA, 30 bp, Artificial Sequence
  Synthetic oligonucleotide
ataacgagatacttaattatacatttattg

SEQ ID NO: 207281 - DNA, 30 bp, Artificial Sequence
  Synthetic oligonucleotide
gcagttgcataatagatacccgatttattg

SEQ ID NO: 207282 - DNA, 30 bp, Artificial Sequence
  Synthetic oligonucleotide
taacagggactccagacgaaaattttattg

SEQ ID NO: 207283 - DNA, 30 bp, Artificial Sequence
  Synthetic oligonucleotide
gtggtcgcaccagcctgtccgttaaacttg

SEQ ID NO: 207284 - DNA, 30 bp, Artificial Sequence
  Synthetic oligonucleotide
acgacgtgaatcgacattatactcaacttg

SEQ ID NO: 207285 - DNA, 30 bp, Artificial Sequence
  Synthetic oligonucleotide
ggtagctctgtaactggcgcgtataacttg

SEQ ID NO: 207286 - DNA, 30 bp, Artificial Sequence
  Synthetic oligonucleotide
cgatctggttttggaagtcgtagacacttg

SEQ ID NO: 207287 - DNA, 30 bp, Artificial Sequence
  Synthetic oligonucleotide
gcggacggttcgaggtcctctcttcacttg

SEQ ID NO: 207288 - DNA, 30 bp, Artificial Sequence
  Synthetic oligonucleotide
cagtggacgttattcgttattaaggacttg

SEQ ID NO: 207289 - DNA, 30 bp, Artificial Sequence
  Synthetic oligonucleotide
gggtagtcaatgcctaccgtgaaatacttg

SEQ ID NO: 207290 - DNA, 30 bp, Artificial Sequence
  Synthetic oligonucleotide
tggtttccaaaacttaaagcagacaccttg

SEQ ID NO: 207291 - DNA, 30 bp, Artificial Sequence
  Synthetic oligonucleotide
ttggcacgcaataaagcaccgtacaccttg

SEQ ID NO: 207292 - DNA, 30 bp, Artificial Sequence
  Synthetic oligonucleotide
atgtacccagccgtttgagggtcgaccttg

SEQ ID NO: 207293 - DNA, 30 bp, Artificial Sequence
  Synthetic oligonucleotide
gccaagctcgataatatcccactgaccttg

SEQ ID NO: 207294 - DNA, 30 bp, Artificial Sequence
  Synthetic oligonucleotide
tggtacaggcccaacttaaaccataccttg

SEQ ID NO: 207295 - DNA, 30 bp, Artificial Sequence
  Synthetic oligonucleotide
atggggtaatatgctggcttgacccccttg

SEQ ID NO: 207296 - DNA, 30 bp, Artificial Sequence
  Synthetic oligonucleotide
tggacgatatcagtatgaggatcagccttg

SEQ ID NO: 207297 - DNA, 30 bp, Artificial Sequence
  Synthetic oligonucleotide
aacaggagcttgtatatctgctcggccttg

SEQ ID NO: 207298 - DNA, 30 bp, Artificial Sequence
  Synthetic oligonucleotide
agtcaaagttgtcgatgcttttcggccttg

SEQ ID NO: 207299 - DNA, 30 bp, Artificial Sequence
  Synthetic oligonucleotide
gcttgatactgcggatcttacgatgccttg

SEQ ID NO: 207300 - DNA, 30 bp, Artificial Sequence
  Synthetic oligonucleotide
attgatgttcaggtgacggctacgtccttg

SEQ ID NO: 207301 - DNA, 30 bp, Artificial Sequence
  Synthetic oligonucleotide
gggaggtggacagcgggaagtacgtccttg

SEQ ID NO: 207302 - DNA, 30 bp, Artificial Sequence
  Synthetic oligonucleotide
agtcgaatcttgttcctatagaggtccttg

SEQ ID NO: 207303 - DNA, 30 bp, Artificial Sequence
  Synthetic oligonucleotide
acaggaaaaaatagtaagcagttgtccttg

SEQ ID NO: 207304 - DNA, 30 bp, Artificial Sequence
  Synthetic oligonucleotide
ggtccacggcaagacggcaatccttccttg

SEQ ID NO: 207305 - DNA, 30 bp, Artificial Sequence
  Synthetic oligonucleotide
agatgattaatccatcgtatggcttccttg

SEQ ID NO: 207306 - DNA, 30 bp, Artificial Sequence
  Synthetic oligonucleotide
agattctcagacagatgctctacgagcttg

SEQ ID NO: 207307 - DNA, 30 bp, Artificial Sequence
  Synthetic oligonucleotide
ctattctgaggtaccgatgaaggacgcttg

SEQ ID NO: 207308 - DNA, 30 bp, Artificial Sequence
  Synthetic oligonucleotide
tacgttaagggatttaataagggccgcttg

SEQ ID NO: 207309 - DNA, 30 bp, Artificial Sequence
  Synthetic oligonucleotide
gcggtgacgagttcgaacatagtccgcttg

SEQ ID NO: 207310 - DNA, 30 bp, Artificial Sequence
  Synthetic oligonucleotide
ataactcatgacttggtaactccatgcttg

SEQ ID NO: 207311 - DNA, 30 bp, Artificial Sequence
  Synthetic oligonucleotide
gcttgttcatgtcagtaagcaagatgcttg

SEQ ID NO: 207312 - DNA, 30 bp, Artificial Sequence
  Synthetic oligonucleotide
aagaatggtctgctggatgtactgtgcttg

SEQ ID NO: 207313 - DNA, 30 bp, Artificial Sequence
  Synthetic oligonucleotide
aaatgacggaccgggtgacccggcatcttg

SEQ ID NO: 207314 - DNA, 30 bp, Artificial Sequence
  Synthetic oligonucleotide
aactaaatggattgaactggtctgatcttg

SEQ ID NO: 207315 - DNA, 30 bp, Artificial Sequence
  Synthetic oligonucleotide
cctagctgcgccaccatgaaagtgatcttg

SEQ ID NO: 207316 - DNA, 30 bp, Artificial Sequence
  Synthetic oligonucleotide
tgctgtaaaaacagcgtagcgctactcttg

SEQ ID NO: 207317 - DNA, 30 bp, Artificial Sequence
  Synthetic oligonucleotide
cgacgtatagtcgataatcgggacctcttg

SEQ ID NO: 207318 - DNA, 30 bp, Artificial Sequence
  Synthetic oligonucleotide
caaacatgttgagtctgtgtattgctcttg

SEQ ID NO: 207319 - DNA, 31 bp, Artificial Sequence
  Synthetic oligonucleotide
gtcacagaatacgactgagtgtattctcttg

SEQ ID NO: 207320 - DNA, 30 bp, Artificial Sequence
  Synthetic oligonucleotide
ctacgcgagcgtcggcaatgtgaagtcttg

SEQ ID NO: 207321 - DNA, 30 bp, Artificial Sequence
  Synthetic oligonucleotide
tgattcattttgttcatggtcggagtcttg

SEQ ID NO: 207322 - DNA, 30 bp, Artificial Sequence
  Synthetic oligonucleotide
ccctggaggccggcatgtccaggtgtcttg

SEQ ID NO: 207323 - DNA, 30 bp, Artificial Sequence
  Synthetic oligonucleotide
ctttgttacgaccattgtcgcccattcttg

SEQ ID NO: 207324 - DNA, 30 bp, Artificial Sequence
  Synthetic oligonucleotide
atcgtgtggctagactcttggagaaagttg

SEQ ID NO: 207325 - DNA, 30 bp, Artificial Sequence
  Synthetic oligonucleotide
ccggagacctcattttgaccacgcaagttg

SEQ ID NO: 207326 - DNA, 30 bp, Artificial Sequence
  Synthetic oligonucleotide
agggttaccatggcacctacttaacagttg

SEQ ID NO: 207327 - DNA, 30 bp, Artificial Sequence
  Synthetic oligonucleotide
tgaggttaggcttaagggcaggtacagttg

SEQ ID NO: 207328 - DNA, 30 bp, Artificial Sequence
  Synthetic oligonucleotide
ggcgactgaggattcgatacagcccagttg

SEQ ID NO: 207329 - DNA, 30 bp, Artificial Sequence
  Synthetic oligonucleotide
gaaccgtcaaaatatttcggttagcagttg

SEQ ID NO: 207330 - DNA, 30 bp, Artificial Sequence
  Synthetic oligonucleotide
ataccggtcgaacccttactcacgcagttg

SEQ ID NO: 207331 - DNA, 30 bp, Artificial Sequence
  Synthetic oligonucleotide
aatgtgcggatacaatgacaaaaagagttg

SEQ ID NO: 207332 - DNA, 30 bp, Artificial Sequence
  Synthetic oligonucleotide
aacttcgattagggttgctgtcaagagttg

SEQ ID NO: 207333 - DNA, 30 bp, Artificial Sequence
  Synthetic oligonucleotide
ctgttactaagtcgatacggcttagagttg

SEQ ID NO: 207334 - DNA, 30 bp, Artificial Sequence
  Synthetic oligonucleotide
tgcaaacactgctggtttttgtacgagttg

SEQ ID NO: 207335 - DNA, 30 bp, Artificial Sequence
  Synthetic oligonucleotide
gtgtggtttagaacaaaagtggcggagttg

SEQ ID NO: 207336 - DNA, 30 bp, Artificial Sequence
  Synthetic oligonucleotide
atattagtaaaaagccatgaaaatgagttg

SEQ ID NO: 207337 - DNA, 30 bp, Artificial Sequence
  Synthetic oligonucleotide
ggccgaaaatatcacaggtccgatgagttg

SEQ ID NO: 207338 - DNA, 30 bp, Artificial Sequence
  Synthetic oligonucleotide
gctctataggtgtcaaagcgtggtgagttg

SEQ ID NO: 207339 - DNA, 30 bp, Artificial Sequence
  Synthetic oligonucleotide
cggtatcacaggttggattactactagttg

SEQ ID NO: 207340 - DNA, 30 bp, Artificial Sequence
  Synthetic oligonucleotide
ggtgatctgatcatgagccgccgctagttg

SEQ ID NO: 207341 - DNA, 30 bp, Artificial Sequence
  Synthetic oligonucleotide
gcgggactgacttgaggctatgattagttg

SEQ ID NO: 207342 - DNA, 30 bp, Artificial Sequence
  Synthetic oligonucleotide
gggtgattacgagcactaggaaagccgttg

SEQ ID NO: 207343 - DNA, 30 bp, Artificial Sequence
  Synthetic oligonucleotide
acatgacagtagttaatggccattccgttg

SEQ ID NO: 207344 - DNA, 30 bp, Artificial Sequence
  Synthetic oligonucleotide
cttccacagtgacccgtatgtaaagcgttg

SEQ ID NO: 207345 - DNA, 30 bp, Artificial Sequence
  Synthetic oligonucleotide
aacaacaacacgtcagcttttggcgcgttg

SEQ ID NO: 207346 - DNA, 30 bp, Artificial Sequence
  Synthetic oligonucleotide
ttgtaaccccacgctacacggcaggcgttg

SEQ ID NO: 207347 - DNA, 30 bp, Artificial Sequence
  Synthetic oligonucleotide
acgcgaaccatttagcggcttccggcgttg

SEQ ID NO: 207348 - DNA, 30 bp, Artificial Sequence
  Synthetic oligonucleotide
taagaccaagatacgggagcctctgcgttg

SEQ ID NO: 207349 - DNA, 30 bp, Artificial Sequence
  Synthetic oligonucleotide
ctgtcgtcgaaccggttacgccaatcgttg

SEQ ID NO: 207350 - DNA, 30 bp, Artificial Sequence
  Synthetic oligonucleotide
tcgcgcaaaggaggggtacaagcctcgttg

SEQ ID NO: 207351 - DNA, 30 bp, Artificial Sequence
  Synthetic oligonucleotide
ttgtcagcgattttatgaccgggctcgttg

SEQ ID NO: 207352 - DNA, 30 bp, Artificial Sequence
  Synthetic oligonucleotide
gcaatccaacaaatgtgtcactagtcgttg

SEQ ID NO: 207353 - DNA, 30 bp, Artificial Sequence
  Synthetic oligonucleotide
ggtaccacacctagcatttatgattcgttg

SEQ ID NO: 207354 - DNA, 30 bp, Artificial Sequence
  Synthetic oligonucleotide
tttcatgtacagccagagtgtatttcgttg

SEQ ID NO: 207355 - DNA, 30 bp, Artificial Sequence
  Synthetic oligonucleotide
aaagtgctgctggctgatcatagaaggttg

SEQ ID NO: 207356 - DNA, 30 bp, Artificial Sequence
  Synthetic oligonucleotide
aagccattctgaaaagccccaggaaggttg

SEQ ID NO: 207357 - DNA, 30 bp, Artificial Sequence
  Synthetic oligonucleotide
gtgtatgtaggcgggacggtcataaggttg

SEQ ID NO: 207358 - DNA, 30 bp, Artificial Sequence
  Synthetic oligonucleotide
agccatctcgtttagcatatggtaaggttg

SEQ ID NO: 207359 - DNA, 30 bp, Artificial Sequence
  Synthetic oligonucleotide
acatccaagcattctaggatgggcaggttg

SEQ ID NO: 207360 - DNA, 30 bp, Artificial Sequence
  Synthetic oligonucleotide
tatggttgctaccatacaaaggcacggttg

SEQ ID NO: 207361 - DNA, 30 bp, Artificial Sequence
  Synthetic oligonucleotide
gagagtaacgggaggggtgagaagcggttg

SEQ ID NO: 207362 - DNA, 30 bp, Artificial Sequence
  Synthetic oligonucleotide
acgccaccaataaatgcaaactcgcggttg

SEQ ID NO: 207363 - DNA, 30 bp, Artificial Sequence
  Synthetic oligonucleotide
acgaaaaagaggggttacaaggtcgggttg

SEQ ID NO: 207364 - DNA, 30 bp, Artificial Sequence
  Synthetic oligonucleotide
gtcaaaaacccgacactcccataggggttg

SEQ ID NO: 207365 - DNA, 30 bp, Artificial Sequence
  Synthetic oligonucleotide
ctgccgactgggacctgatttacggggttg

SEQ ID NO: 207366 - DNA, 30 bp, Artificial Sequence
  Synthetic oligonucleotide
atcaggaaagatatcaaacttagtgggttg

SEQ ID NO: 207367 - DNA, 30 bp, Artificial Sequence
  Synthetic oligonucleotide
aagtagctggtcattcaggcttgtgggttg

SEQ ID NO: 207368 - DNA, 30 bp, Artificial Sequence
  Synthetic oligonucleotide
cttttgaagacacggctatggtaatggttg

SEQ ID NO: 207369 - DNA, 30 bp, Artificial Sequence
  Synthetic oligonucleotide
cactgtggaccagattaacgagtatggttg

SEQ ID NO: 207370 - DNA, 30 bp, Artificial Sequence
  Synthetic oligonucleotide
taacagagcacaacggcgataaactggttg

SEQ ID NO: 207371 - DNA, 30 bp, Artificial Sequence
  Synthetic oligonucleotide
cctggaacacatatctagagctactggttg

SEQ ID NO: 207372 - DNA, 30 bp, Artificial Sequence
  Synthetic oligonucleotide
ggaacgctggatatgtgagcatcctggttg

SEQ ID NO: 207373 - DNA, 30 bp, Artificial Sequence
  Synthetic oligonucleotide
gcggtggacaggagcacgtaaatgtggttg

SEQ ID NO: 207374 - DNA, 30 bp, Artificial Sequence
  Synthetic oligonucleotide
cactcaagggggtaagcaatgggttggttg

SEQ ID NO: 207375 - DNA, 30 bp, Artificial Sequence
  Synthetic oligonucleotide
gcctcagacgagcacatagtaatttggttg

SEQ ID NO: 207376 - DNA, 30 bp, Artificial Sequence
  Synthetic oligonucleotide
ttgagctttacattacaagaatcaatgttg

SEQ ID NO: 207377 - DNA, 30 bp, Artificial Sequence
  Synthetic oligonucleotide
cggcaagcattctgggggggaggaatgttg

SEQ ID NO: 207378 - DNA, 30 bp, Artificial Sequence
  Synthetic oligonucleotide
cccggtccggtctatgacaaactaatgttg

SEQ ID NO: 207379 - DNA, 30 bp, Artificial Sequence
  Synthetic oligonucleotide
tcacagggtccgtgatcgcatgggatgttg

SEQ ID NO: 207380 - DNA, 30 bp, Artificial Sequence
  Synthetic oligonucleotide
gctagctcctgagccatttagtatatgttg

SEQ ID NO: 207381 - DNA, 30 bp, Artificial Sequence
  Synthetic oligonucleotide
actcagggggacgtggagtctgttatgttg

SEQ ID NO: 207382 - DNA, 30 bp, Artificial Sequence
  Synthetic oligonucleotide
gcacaagtgttcaaccattaggtactgttg

SEQ ID NO: 207383 - DNA, 30 bp, Artificial Sequence
  Synthetic oligonucleotide
caggatctatattcggaacagaacctgttg

SEQ ID NO: 207384 - DNA, 30 bp, Artificial Sequence
  Synthetic oligonucleotide
gagcttaagccggcaacgccggtcctgttg

SEQ ID NO: 207385 - DNA, 30 bp, Artificial Sequence
  Synthetic oligonucleotide
tgttgtctatcattagcatgaattctgttg

SEQ ID NO: 207386 - DNA, 30 bp, Artificial Sequence
  Synthetic oligonucleotide
tgttacaggcttgcaagtgtgtaagtgttg

SEQ ID NO: 207387 - DNA, 30 bp, Artificial Sequence
  Synthetic oligonucleotide
aaaaacgataagacctgtgcgcgcgtgttg

SEQ ID NO: 207388 - DNA, 30 bp, Artificial Sequence
  Synthetic oligonucleotide
tgttacgagatataaatgatcgccttgttg

SEQ ID NO: 207389 - DNA, 30 bp, Artificial Sequence
  Synthetic oligonucleotide
gctggggggtcacgatacgcgcagttgttg

SEQ ID NO: 207390 - DNA, 30 bp, Artificial Sequence
  Synthetic oligonucleotide
gaagccaccgaagttattcctgatttgttg

SEQ ID NO: 207391 - DNA, 30 bp, Artificial Sequence
  Synthetic oligonucleotide
ttaagtaggctgcatcggcgccttttgttg

SEQ ID NO: 207392 - DNA, 30 bp, Artificial Sequence
  Synthetic oligonucleotide
cacaagcaaatcataacatgttaaaatttg

SEQ ID NO: 207393 - DNA, 30 bp, Artificial Sequence
  Synthetic oligonucleotide
tcgcagtatgtgccggcaatgacaaatttg

SEQ ID NO: 207394 - DNA, 30 bp, Artificial Sequence
  Synthetic oligonucleotide
tatgatgcgtgccgtatgggactaaatttg

SEQ ID NO: 207395 - DNA, 30 bp, Artificial Sequence
  Synthetic oligonucleotide
tgtcatggtcgtaagtgctttgctaatttg

SEQ ID NO: 207396 - DNA, 30 bp, Artificial Sequence
  Synthetic oligonucleotide
tctctagacatgtcgccccgttctaatttg

SEQ ID NO: 207397 - DNA, 30 bp, Artificial Sequence
  Synthetic oligonucleotide
tgaattatctaatacatcccctgtaatttg

SEQ ID NO: 207398 - DNA, 30 bp, Artificial Sequence
  Synthetic oligonucleotide
cacagggccggttcgggtcgatatcatttg

SEQ ID NO: 207399 - DNA, 30 bp, Artificial Sequence
  Synthetic oligonucleotide
gattgcactaacaccgggtaggatgatttg

SEQ ID NO: 207400 - DNA, 30 bp, Artificial Sequence
  Synthetic oligonucleotide
gaccttgcctatgggggcggagttgatttg

SEQ ID NO: 207401 - DNA, 30 bp, Artificial Sequence
  Synthetic oligonucleotide
acgtcaaactgacatcagcggagatatttg

SEQ ID NO: 207402 - DNA, 30 bp, Artificial Sequence
  Synthetic oligonucleotide
gtatgacgagtcgcgggttttctatatttg

SEQ ID NO: 207403 - DNA, 30 bp, Artificial Sequence
  Synthetic oligonucleotide
atcatcgacgacgaaagctatgcttatttg

SEQ ID NO: 207404 - DNA, 30 bp, Artificial Sequence
  Synthetic oligonucleotide
gccgttgacgcggggatggtagcgactttg

SEQ ID NO: 207405 - DNA, 30 bp, Artificial Sequence
  Synthetic oligonucleotide
ggccaaaaattgtcggggtgggggactttg

SEQ ID NO: 207406 - DNA, 30 bp, Artificial Sequence
  Synthetic oligonucleotide
ccggtattggtcgcagtggaagcacctttg

SEQ ID NO: 207407 - DNA, 30 bp, Artificial Sequence
  Synthetic oligonucleotide
cgcatctgtggtggataggtggtccctttg

SEQ ID NO: 207408 - DNA, 30 bp, Artificial Sequence
  Synthetic oligonucleotide
tgagattaaaatgtacacacttaagctttg

SEQ ID NO: 207409 - DNA, 30 bp, Artificial Sequence
  Synthetic oligonucleotide
tcgttagtattattgtaggctcgtgctttg

SEQ ID NO: 207410 - DNA, 30 bp, Artificial Sequence
  Synthetic oligonucleotide
tgttccgtaaagtaagacagtggtgctttg

SEQ ID NO: 207411 - DNA, 30 bp, Artificial Sequence
  Synthetic oligonucleotide
catcaagaagtggtagtgattccatctttg

SEQ ID NO: 207412 - DNA, 30 bp, Artificial Sequence
  Synthetic oligonucleotide
gtaggatgttcgctgtatagaaactctttg

SEQ ID NO: 207413 - DNA, 30 bp, Artificial Sequence
  Synthetic oligonucleotide
tccatacggctataatagaaacgaagtttg

SEQ ID NO: 207414 - DNA, 30 bp, Artificial Sequence
  Synthetic oligonucleotide
ctaactggaatactatagtgatagagtttg

SEQ ID NO: 207415 - DNA, 30 bp, Artificial Sequence
  Synthetic oligonucleotide
gggaattaacgcgaaattcgtgtgagtttg

SEQ ID NO: 207416 - DNA, 30 bp, Artificial Sequence
  Synthetic oligonucleotide
atggaaaatcgcatgcgttgagatagtttg

SEQ ID NO: 207417 - DNA, 30 bp, Artificial Sequence
  Synthetic oligonucleotide
ccccgctcgctgcagatgccaagtagtttg

SEQ ID NO: 207418 - DNA, 30 bp, Artificial Sequence
  Synthetic oligonucleotide
agggcgtttcgcgagtcgtaaatccgtttg

SEQ ID NO: 207419 - DNA, 30 bp, Artificial Sequence
  Synthetic oligonucleotide
ttgttgcaagtttttactgggattcgtttg

SEQ ID NO: 207420 - DNA, 30 bp, Artificial Sequence
  Synthetic oligonucleotide
acctacagctgggacccgaatcttcgtttg

SEQ ID NO: 207421 - DNA, 30 bp, Artificial Sequence
  Synthetic oligonucleotide
ccactgggttcacaaagtcagtttcgtttg

SEQ ID NO: 207422 - DNA, 30 bp, Artificial Sequence
  Synthetic oligonucleotide
tctctcataagagttatgattccaggtttg

SEQ ID NO: 207423 - DNA, 30 bp, Artificial Sequence
  Synthetic oligonucleotide
ataagttgtccaatttggtaggggggtttg

SEQ ID NO: 207424 - DNA, 30 bp, Artificial Sequence
  Synthetic oligonucleotide
taagtcatcgtctagtcgttggaatgtttg

SEQ ID NO: 207425 - DNA, 30 bp, Artificial Sequence
  Synthetic oligonucleotide
agatacccgactggcgtagcgcgatgtttg

SEQ ID NO: 207426 - DNA, 30 bp, Artificial Sequence
  Synthetic oligonucleotide
cggcccctcaatccagcagccaactgtttg

SEQ ID NO: 207427 - DNA, 30 bp, Artificial Sequence
  Synthetic oligonucleotide
gggaaatggagacgtcggataacctgtttg

SEQ ID NO: 207428 - DNA, 30 bp, Artificial Sequence
  Synthetic oligonucleotide
aggcaacagcggcgtactcacagctgtttg

SEQ ID NO: 207429 - DNA, 30 bp, Artificial Sequence
  Synthetic oligonucleotide
ctataaaaagaatgacggaaatcaattttg

SEQ ID NO: 207430 - DNA, 30 bp, Artificial Sequence
  Synthetic oligonucleotide
ttacaccaagtccggacaacctgaattttg

SEQ ID NO: 207431 - DNA, 30 bp, Artificial Sequence
  Synthetic oligonucleotide
tcacacacggcttcggatcccgtaattttg

SEQ ID NO: 207432 - DNA, 30 bp, Artificial Sequence
  Synthetic oligonucleotide
ggattcgattagcaataggaacttattttg

SEQ ID NO: 207433 - DNA, 30 bp, Artificial Sequence
  Synthetic oligonucleotide
tcgagggtccgactacgaccggaccttttg

SEQ ID NO: 207434 - DNA, 30 bp, Artificial Sequence
  Synthetic oligonucleotide
ttcagactgttagtttggtgagtagttttg

SEQ ID NO: 207435 - DNA, 30 bp, Artificial Sequence
  Synthetic oligonucleotide
atctcgagtttgcatcgccccgtggttttg

SEQ ID NO: 207436 - DNA, 30 bp, Artificial Sequence
  Synthetic oligonucleotide
gtggagttcatgagttaccgtacatttttg

SEQ ID NO: 207437 - DNA, 30 bp, Artificial Sequence
  Synthetic oligonucleotide
gacgtcccaagtctatgccctgcatttttg

SEQ ID NO: 207438 - DNA, 30 bp, Artificial Sequence
  Synthetic oligonucleotide
gccgaaaaaacgtgcgagagcagatttttg

SEQ ID NO: 207439 - DNA, 30 bp, Artificial Sequence
  Synthetic oligonucleotide
aagcatagaatgcaaaggaaccgctttttg

SEQ ID NO: 207440 - DNA, 30 bp, Artificial Sequence
  Synthetic oligonucleotide
gcggcaacgcttaggcaatcaaaaaaaaat

SEQ ID NO: 207441 - DNA, 30 bp, Artificial Sequence
  Synthetic oligonucleotide
catcggcagctcgggtggtgtccgaaaaat

SEQ ID NO: 207442 - DNA, 30 bp, Artificial Sequence
  Synthetic oligonucleotide
ttcacatgaaagcacagttatatgaaaaat

SEQ ID NO: 207443 - DNA, 30 bp, Artificial Sequence
  Synthetic oligonucleotide
ggagacacggggaacggcgtcttgaaaaat

SEQ ID NO: 207444 - DNA, 30 bp, Artificial Sequence
  Synthetic oligonucleotide
tcaccgcttgtgctccagcatgttaaaaat

SEQ ID NO: 207445 - DNA, 30 bp, Artificial Sequence
  Synthetic oligonucleotide
gggctgatgaaggtgatattctttaaaaat

SEQ ID NO: 207446 - DNA, 30 bp, Artificial Sequence
  Synthetic oligonucleotide
gaaccgagcctatagccgagaggacaaaat

SEQ ID NO: 207447 - DNA, 30 bp, Artificial Sequence
  Synthetic oligonucleotide
aaaacgttaagcggcgcttggaggcaaaat

SEQ ID NO: 207448 - DNA, 30 bp, Artificial Sequence
  Synthetic oligonucleotide
ttcacaaacgggatgtagccgttgcaaaat

SEQ ID NO: 207449 - DNA, 30 bp, Artificial Sequence
  Synthetic oligonucleotide
agtcagcttctacttctgagtttgcaaaat

SEQ ID NO: 207450 - DNA, 30 bp, Artificial Sequence
  Synthetic oligonucleotide
cggtttaccgatagtaccatttatcaaaat

SEQ ID NO: 207451 - DNA, 30 bp, Artificial Sequence
  Synthetic oligonucleotide
acgaaggtaggttgacagcttaaagaaaat

SEQ ID NO: 207452 - DNA, 30 bp, Artificial Sequence
  Synthetic oligonucleotide
accgtgggatagacaagcggaacagaaaat

SEQ ID NO: 207453 - DNA, 30 bp, Artificial Sequence
  Synthetic oligonucleotide
gggtgtgcggaagcgccgcgtgtcgaaaat

SEQ ID NO: 207454 - DNA, 30 bp, Artificial Sequence
  Synthetic oligonucleotide
tcaataaaatgtcgttccctattggaaaat

SEQ ID NO: 207455 - DNA, 30 bp, Artificial Sequence
  Synthetic oligonucleotide
cgcaaggacgatttaatcatgactgaaaat

SEQ ID NO: 207456 - DNA, 30 bp, Artificial Sequence
  Synthetic oligonucleotide
gaaacgagagacgagggaccccgtgaaaat

SEQ ID NO: 207457 - DNA, 30 bp, Artificial Sequence
  Synthetic oligonucleotide
cagcttgttaaccacagggcgtagtaaaat

SEQ ID NO: 207458 - DNA, 30 bp, Artificial Sequence
  Synthetic oligonucleotide
gaaggttggtccaatcgcgtgcattaaaat

SEQ ID NO: 207459 - DNA, 30 bp, Artificial Sequence
  Synthetic oligonucleotide
gttgaatgaattacaaatcttgcttaaaat

SEQ ID NO: 207460 - DNA, 30 bp, Artificial Sequence
  Synthetic oligonucleotide
ttgccaaatgaagaccaccggaacacaaat

SEQ ID NO: 207461 - DNA, 30 bp, Artificial Sequence
  Synthetic oligonucleotide
gttatgtgttttcaggctgtggagacaaat

SEQ ID NO: 207462 - DNA, 30 bp, Artificial Sequence
  Synthetic oligonucleotide
cctgctatacctaaaagtatcctgacaaat

SEQ ID NO: 207463 - DNA, 30 bp, Artificial Sequence
  Synthetic oligonucleotide
cttgcaacggaaaatcctgacgtgacaaat

SEQ ID NO: 207464 - DNA, 30 bp, Artificial Sequence
  Synthetic oligonucleotide
gtccgtaagactaaaatggctgctacaaat

SEQ ID NO: 207465 - DNA, 30 bp, Artificial Sequence
  Synthetic oligonucleotide
gtctcgccctgtgaatctgtttgtacaaat

SEQ ID NO: 207466 - DNA, 30 bp, Artificial Sequence
  Synthetic oligonucleotide
tcagcgacactgcctatgctcattacaaat

SEQ ID NO: 207467 - DNA, 30 bp, Artificial Sequence
  Synthetic oligonucleotide
agacctcccacagccgatttcgggccaaat

SEQ ID NO: 207468 - DNA, 30 bp, Artificial Sequence
  Synthetic oligonucleotide
attatagcgtgagagcctcagatgccaaat

SEQ ID NO: 207469 - DNA, 30 bp, Artificial Sequence
  Synthetic oligonucleotide
agaagagataagcgaaattccgaagcaaat

SEQ ID NO: 207470 - DNA, 30 bp, Artificial Sequence
  Synthetic oligonucleotide
agcaataatcgaacctggatggtagcaaat

SEQ ID NO: 207471 - DNA, 30 bp, Artificial Sequence
  Synthetic oligonucleotide
ggtaatataaaccggcgaattacggcaaat

SEQ ID NO: 207472 - DNA, 31 bp, Artificial Sequence
  Synthetic oligonucleotide
tttgcgaacctttcgaaacagtattgcaaat

SEQ ID NO: 207473 - DNA, 30 bp, Artificial Sequence
  Synthetic oligonucleotide
tgatcgtggattagatatcgaccatcaaat

SEQ ID NO: 207474 - DNA, 30 bp, Artificial Sequence
  Synthetic oligonucleotide
ctgaaatggtcagcaattgccgtatcaaat

SEQ ID NO: 207475 - DNA, 30 bp, Artificial Sequence
  Synthetic oligonucleotide
attcggtctgacagaaactgcctctcaaat

SEQ ID NO: 207476 - DNA, 30 bp, Artificial Sequence
  Synthetic oligonucleotide
tctgttaacatcgtaaggggattgtcaaat

SEQ ID NO: 207477 - DNA, 30 bp, Artificial Sequence
  Synthetic oligonucleotide
taaatatcagcgcaagagctggattcaaat

SEQ ID NO: 207478 - DNA, 30 bp, Artificial Sequence
  Synthetic oligonucleotide
tgtgtgaacaaggtccgggcttgttcaaat

SEQ ID NO: 207479 - DNA, 30 bp, Artificial Sequence
  Synthetic oligonucleotide
gtagtgatcgagagcgttcagatttcaaat

SEQ ID NO: 207480 - DNA, 30 bp, Artificial Sequence
  Synthetic oligonucleotide
gagaaagcgtttcccagatcagtttcaaat

SEQ ID NO: 207481 - DNA, 30 bp, Artificial Sequence
  Synthetic oligonucleotide
ttggcgagttggtctcccagagtttcaaat

SEQ ID NO: 207482 - DNA, 30 bp, Artificial Sequence
  Synthetic oligonucleotide
tggtagcgctctggcactccagaaagaaat

SEQ ID NO: 207483 - DNA, 30 bp, Artificial Sequence
  Synthetic oligonucleotide
atatactacgatacgtaattgtacagaaat

SEQ ID NO: 207484 - DNA, 30 bp, Artificial Sequence
  Synthetic oligonucleotide
catctaaaaagcgtcgcgatgtgcagaaat

SEQ ID NO: 207485 - DNA, 30 bp, Artificial Sequence
  Synthetic oligonucleotide
gacaactcttcaactgattacttcagaaat

SEQ ID NO: 207486 - DNA, 30 bp, Artificial Sequence
  Synthetic oligonucleotide
gtagtctagcgccagcgcactcagagaaat

SEQ ID NO: 207487 - DNA, 30 bp, Artificial Sequence
  Synthetic oligonucleotide
gaccaaggggtttggcttgggaggagaaat

SEQ ID NO: 207488 - DNA, 30 bp, Artificial Sequence
  Synthetic oligonucleotide
ataaaacgggggccttggaagacacgaaat

SEQ ID NO: 207489 - DNA, 30 bp, Artificial Sequence
  Synthetic oligonucleotide
aaacagcctaaatataaatgccgacgaaat

SEQ ID NO: 207490 - DNA, 30 bp, Artificial Sequence
  Synthetic oligonucleotide
gaagtacaaacatggttgtgatgacgaaat

SEQ ID NO: 207491 - DNA, 30 bp, Artificial Sequence
  Synthetic oligonucleotide
gtccataggtactacgtggagttccgaaat

SEQ ID NO: 207492 - DNA, 30 bp, Artificial Sequence
  Synthetic oligonucleotide
tcactcgcgcacgccaacctcatgcgaaat

SEQ ID NO: 207493 - DNA, 30 bp, Artificial Sequence
  Synthetic oligonucleotide
gtacatcgaataagattttggtgtcgaaat

SEQ ID NO: 207494 - DNA, 30 bp, Artificial Sequence
  Synthetic oligonucleotide
tagtggttatccacacttgacaaaggaaat

SEQ ID NO: 207495 - DNA, 30 bp, Artificial Sequence
  Synthetic oligonucleotide
atcgacaccgcgtggttcagttgcggaaat

SEQ ID NO: 207496 - DNA, 30 bp, Artificial Sequence
  Synthetic oligonucleotide
taggagcgctgggtgggacatttcggaaat

SEQ ID NO: 207497 - DNA, 30 bp, Artificial Sequence
  Synthetic oligonucleotide
cacgaatgtagcgggaacagacgtggaaat

SEQ ID NO: 207498 - DNA, 30 bp, Artificial Sequence
  Synthetic oligonucleotide
ccagactatagcaattgttaatgtggaaat

SEQ ID NO: 207499 - DNA, 30 bp, Artificial Sequence
  Synthetic oligonucleotide
gcaactacacgtaacatgtctcttggaaat

SEQ ID NO: 207500 - DNA, 29 bp, Artificial Sequence
  Synthetic oligonucleotide
aaggaagcaaattgcggcgcacatgaaat

SEQ ID NO: 207501 - DNA, 30 bp, Artificial Sequence
  Synthetic oligonucleotide
cggacatattaaggtatagatacatgaaat

SEQ ID NO: 207502 - DNA, 30 bp, Artificial Sequence
  Synthetic oligonucleotide
ccaacgggccgtacgtgccctgtatgaaat

SEQ ID NO: 207503 - DNA, 30 bp, Artificial Sequence
  Synthetic oligonucleotide
cctgaatgagtccggcctcaaaactgaaat

SEQ ID NO: 207504 - DNA, 30 bp, Artificial Sequence
  Synthetic oligonucleotide
gtcatacaatgagcatcgctgtactgaaat

SEQ ID NO: 207505 - DNA, 30 bp, Artificial Sequence
  Synthetic oligonucleotide
attgtcatacttgcaattctagtctgaaat

SEQ ID NO: 207506 - DNA, 30 bp, Artificial Sequence
  Synthetic oligonucleotide
tactgcccaggttggacctagaagtgaaat

SEQ ID NO: 207507 - DNA, 30 bp, Artificial Sequence
  Synthetic oligonucleotide
tagtgcaaatcagctgtagcatcgtgaaat

SEQ ID NO: 207508 - DNA, 30 bp, Artificial Sequence
  Synthetic oligonucleotide
gtaagttccgtataagcagaaaggtgaaat

SEQ ID NO: 207509 - DNA, 30 bp, Artificial Sequence
  Synthetic oligonucleotide
aataagagttagccaccgacaatgtgaaat

SEQ ID NO: 207510 - DNA, 30 bp, Artificial Sequence
  Synthetic oligonucleotide
ccatagtagagcgtgggatcgcattgaaat

SEQ ID NO: 207511 - DNA, 30 bp, Artificial Sequence
  Synthetic oligonucleotide
tttggaaggcaaactcggaaaacaataaat

SEQ ID NO: 207512 - DNA, 30 bp, Artificial Sequence
  Synthetic oligonucleotide
gtggtcactctatgggttatcctaataaat

SEQ ID NO: 207513 - DNA, 30 bp, Artificial Sequence
  Synthetic oligonucleotide
ttgcagcggcagaggggggaatacataaat

SEQ ID NO: 207514 - DNA, 30 bp, Artificial Sequence
  Synthetic oligonucleotide
gtatgtcccaacggcgacagagagataaat

SEQ ID NO: 207515 - DNA, 29 bp, Artificial Sequence
  Synthetic oligonucleotide
aaccattacagggaatccataggataaat

SEQ ID NO: 207516 - DNA, 30 bp, Artificial Sequence
  Synthetic oligonucleotide
acgatgaaggtgccacgtattttgataaat

SEQ ID NO: 207517 - DNA, 30 bp, Artificial Sequence
  Synthetic oligonucleotide
gggactaacttccgcccttaggatataaat

SEQ ID NO: 207518 - DNA, 30 bp, Artificial Sequence
  Synthetic oligonucleotide
acaatacgtgcactggtatcccctataaat

SEQ ID NO: 207519 - DNA, 30 bp, Artificial Sequence
  Synthetic oligonucleotide
acacgcggcccccatagtcacagtataaat

SEQ ID NO: 207520 - DNA, 30 bp, Artificial Sequence
  Synthetic oligonucleotide
ctaaggttatcggtacgttttattataaat

SEQ ID NO: 207521 - DNA, 30 bp, Artificial Sequence
  Synthetic oligonucleotide
gaacaaccaccgcaagtaccgatactaaat

SEQ ID NO: 207522 - DNA, 30 bp, Artificial Sequence
  Synthetic oligonucleotide
aatcgcaataccatgatcaaccgcctaaat

SEQ ID NO: 207523 - DNA, 30 bp, Artificial Sequence
  Synthetic oligonucleotide
atttcggcgcgagtgttgatctagctaaat

SEQ ID NO: 207524 - DNA, 30 bp, Artificial Sequence
  Synthetic oligonucleotide
ctggcgaaacgcagttgcgtaaaagtaaat

SEQ ID NO: 207525 - DNA, 30 bp, Artificial Sequence
  Synthetic oligonucleotide
catgccacctattgcaaatattccgtaaat

SEQ ID NO: 207526 - DNA, 30 bp, Artificial Sequence
  Synthetic oligonucleotide
ataatcagtgtcattgccaaccgcgtaaat

SEQ ID NO: 207527 - DNA, 30 bp, Artificial Sequence
  Synthetic oligonucleotide
gtggatatcgaagcggctacctctgtaaat

SEQ ID NO: 207528 - DNA, 30 bp, Artificial Sequence
  Synthetic oligonucleotide
aggtagaccatagccttctggtaattaaat

SEQ ID NO: 207529 - DNA, 30 bp, Artificial Sequence
  Synthetic oligonucleotide
cagtgagcgtctttgataatggtattaaat

SEQ ID NO: 207530 - DNA, 30 bp, Artificial Sequence
  Synthetic oligonucleotide
ggggcgccgtgcaagatttcacggttaaat

SEQ ID NO: 207531 - DNA, 30 bp, Artificial Sequence
  Synthetic oligonucleotide
catctactcggcaaacgcgctgggttaaat

SEQ ID NO: 207532 - DNA, 30 bp, Artificial Sequence
  Synthetic oligonucleotide
agcagagtcccagaactgcgccgtttaaat

SEQ ID NO: 207533 - DNA, 30 bp, Artificial Sequence
  Synthetic oligonucleotide
atcaggcggcaactggtgggtcgtttaaat

SEQ ID NO: 207534 - DNA, 29 bp, Artificial Sequence
  Synthetic oligonucleotide
aagaggtgcccctcaatacatttttaaat

SEQ ID NO: 207535 - DNA, 30 bp, Artificial Sequence
  Synthetic oligonucleotide
tacatggtgggtacaatgtccgccaacaat

SEQ ID NO: 207536 - DNA, 30 bp, Artificial Sequence
  Synthetic oligonucleotide
tgtgtgtgggtggctactaattgcaacaat

SEQ ID NO: 207537 - DNA, 30 bp, Artificial Sequence
  Synthetic oligonucleotide
ccacccgtgatcggcaagtccattaacaat

SEQ ID NO: 207538 - DNA, 30 bp, Artificial Sequence
  Synthetic oligonucleotide
caagcagggtacttttgcgttgcacacaat

SEQ ID NO: 207539 - DNA, 30 bp, Artificial Sequence
  Synthetic oligonucleotide
aagtctacaataccctgggcaacccacaat

SEQ ID NO: 207540 - DNA, 30 bp, Artificial Sequence
  Synthetic oligonucleotide
cgacgctcttacatgcgggcacaagacaat

SEQ ID NO: 207541 - DNA, 30 bp, Artificial Sequence
  Synthetic oligonucleotide
ggaatttctgaggcggaatgtgaggacaat

SEQ ID NO: 207542 - DNA, 30 bp, Artificial Sequence
  Synthetic oligonucleotide
cagcctaagcgcttctacaatcgggacaat

SEQ ID NO: 207543 - DNA, 30 bp, Artificial Sequence
  Synthetic oligonucleotide
aagcagccctggttacccataggggacaat

SEQ ID NO: 207544 - DNA, 30 bp, Artificial Sequence
  Synthetic oligonucleotide
gaggtgtgagcgtgaatttcgtgtgacaat

SEQ ID NO: 207545 - DNA, 30 bp, Artificial Sequence
  Synthetic oligonucleotide
attgacggtaggctttctcttgttgacaat

SEQ ID NO: 207546 - DNA, 30 bp, Artificial Sequence
  Synthetic oligonucleotide
ctagtgattggtcgcaagagttttgacaat

SEQ ID NO: 207547 - DNA, 30 bp, Artificial Sequence
  Synthetic oligonucleotide
cttggaaaagcgggtcctttctggtacaat

SEQ ID NO: 207548 - DNA, 30 bp, Artificial Sequence
  Synthetic oligonucleotide
tacccagcgaggatcaaaggctgcaccaat

SEQ ID NO: 207549 - DNA, 30 bp, Artificial Sequence
  Synthetic oligonucleotide
tgtcaaaccgacttagataaccctaccaat

SEQ ID NO: 207550 - DNA, 29 bp, Artificial Sequence
  Synthetic oligonucleotide
gtggtttagtggctagaatcagtaccaat

SEQ ID NO: 207551 - DNA, 30 bp, Artificial Sequence
  Synthetic oligonucleotide
actaggttgactctggacgtccttaccaat

SEQ ID NO: 207552 - DNA, 30 bp, Artificial Sequence
  Synthetic oligonucleotide
agctagtgcgttctgaggcaaacagccaat

SEQ ID NO: 207553 - DNA, 30 bp, Artificial Sequence
  Synthetic oligonucleotide
aagtaataggaaaaagttcggttggccaat

SEQ ID NO: 207554 - DNA, 30 bp, Artificial Sequence
  Synthetic oligonucleotide
tgaagaggggaggacacgttgaatgccaat

SEQ ID NO: 207555 - DNA, 30 bp, Artificial Sequence
  Synthetic oligonucleotide
aagtggccaaaatatcccgaacatgccaat

SEQ ID NO: 207556 - DNA, 30 bp, Artificial Sequence
  Synthetic oligonucleotide
gacgggttgtgcagtcagtgccactccaat

SEQ ID NO: 207557 - DNA, 30 bp, Artificial Sequence
  Synthetic oligonucleotide
ccaaggtgcatggcctaaagcgaaagcaat

SEQ ID NO: 207558 - DNA, 30 bp, Artificial Sequence
  Synthetic oligonucleotide
atcgggtgcagtggcagtccttagagcaat

SEQ ID NO: 207559 - DNA, 30 bp, Artificial Sequence
  Synthetic oligonucleotide
ctaaggttgacggaacctctcaatagcaat

SEQ ID NO: 207560 - DNA, 30 bp, Artificial Sequence
  Synthetic oligonucleotide
ccaaccactagagggcgcaagccacgcaat

SEQ ID NO: 207561 - DNA, 30 bp, Artificial Sequence
  Synthetic oligonucleotide
gcgccgtctgcgtacgtcctagaaggcaat

SEQ ID NO: 207562 - DNA, 30 bp, Artificial Sequence
  Synthetic oligonucleotide
gcatatctctacataaagtacacaggcaat

SEQ ID NO: 207563 - DNA, 30 bp, Artificial Sequence
  Synthetic oligonucleotide
tgtggcgaccaccaacacgcactaggcaat

SEQ ID NO: 207564 - DNA, 30 bp, Artificial Sequence
  Synthetic oligonucleotide
atggagaaggaaccattttggatcggcaat

SEQ ID NO: 207565 - DNA, 30 bp, Artificial Sequence
  Synthetic oligonucleotide
tccaccacggctatcaaagtcgtcggcaat

SEQ ID NO: 207566 - DNA, 30 bp, Artificial Sequence
  Synthetic oligonucleotide
acggctacgacttggatgatagtgggcaat

SEQ ID NO: 207567 - DNA, 30 bp, Artificial Sequence
  Synthetic oligonucleotide
atagtcatgtccgatagcctgcgatgcaat

SEQ ID NO: 207568 - DNA, 30 bp, Artificial Sequence
  Synthetic oligonucleotide
gtaacagaggcataaaggcccgagtgcaat

SEQ ID NO: 207569 - DNA, 30 bp, Artificial Sequence
  Synthetic oligonucleotide
cggcaggatcaaatgccaactgtgtgcaat

SEQ ID NO: 207570 - DNA, 30 bp, Artificial Sequence
  Synthetic oligonucleotide
ggcgcctactccaatagaatgtattgcaat

SEQ ID NO: 207571 - DNA, 30 bp, Artificial Sequence
  Synthetic oligonucleotide
cgtcgatatcgacaagcggatgaaatcaat

SEQ ID NO: 207572 - DNA, 30 bp, Artificial Sequence
  Synthetic oligonucleotide
gcagttgcgcccggatccttgaacatcaat

SEQ ID NO: 207573 - DNA, 30 bp, Artificial Sequence
  Synthetic oligonucleotide
tcagaccagtaaggtcagcgtgatatcaat

SEQ ID NO: 207574 - DNA, 30 bp, Artificial Sequence
  Synthetic oligonucleotide
acggcgtttcgataatcgcgagtactcaat

SEQ ID NO: 207575 - DNA, 30 bp, Artificial Sequence
  Synthetic oligonucleotide
cgggcaggtggagccaggatttcgctcaat

SEQ ID NO: 207576 - DNA, 30 bp, Artificial Sequence
  Synthetic oligonucleotide
ccttgattcattacccaccatactctcaat

SEQ ID NO: 207577 - DNA, 30 bp, Artificial Sequence
  Synthetic oligonucleotide
gagtactcatgttgagtacatccagtcaat

SEQ ID NO: 207578 - DNA, 30 bp, Artificial Sequence
  Synthetic oligonucleotide
cgggattttagacaggagcgagcggtcaat

SEQ ID NO: 207579 - DNA, 30 bp, Artificial Sequence
  Synthetic oligonucleotide
ggtcgaagcgccacactgcgttcggtcaat

SEQ ID NO: 207580 - DNA, 30 bp, Artificial Sequence
  Synthetic oligonucleotide
tctcttgcaccggggtgggtgggggtcaat

SEQ ID NO: 207581 - DNA, 30 bp, Artificial Sequence
  Synthetic oligonucleotide
cagaacagcgttagactataagtggtcaat

SEQ ID NO: 207582 - DNA, 30 bp, Artificial Sequence
  Synthetic oligonucleotide
aaacgacttcgttcaactcaagtattcaat

SEQ ID NO: 207583 - DNA, 30 bp, Artificial Sequence
  Synthetic oligonucleotide
ataatacctagcaccggcccgaacttcaat

SEQ ID NO: 207584 - DNA, 29 bp, Artificial Sequence
  Synthetic oligonucleotide
caaggaaatggcaaaatataggtttcaat

SEQ ID NO: 207585 - DNA, 30 bp, Artificial Sequence
  Synthetic oligonucleotide
tggcgtacgctacggttggaatcaaagaat

SEQ ID NO: 207586 - DNA, 30 bp, Artificial Sequence
  Synthetic oligonucleotide
gggtgtcttgaataacaaagtcctaagaat

SEQ ID NO: 207587 - DNA, 30 bp, Artificial Sequence
  Synthetic oligonucleotide
ctgacactagacaagatccttgtgcagaat

SEQ ID NO: 207588 - DNA, 30 bp, Artificial Sequence
  Synthetic oligonucleotide
ttctggctctgagagggtaacggtcagaat

SEQ ID NO: 207589 - DNA, 30 bp, Artificial Sequence
  Synthetic oligonucleotide
cccacgacactagaagtaggtgcagagaat

SEQ ID NO: 207590 - DNA, 30 bp, Artificial Sequence
  Synthetic oligonucleotide
ggagaagtctagaatctcaagttggagaat

SEQ ID NO: 207591 - DNA, 30 bp, Artificial Sequence
  Synthetic oligonucleotide
acggaggttagtgggccgaatgcatagaat

SEQ ID NO: 207592 - DNA, 30 bp, Artificial Sequence
  Synthetic oligonucleotide
tattgatatcaatggtatactggctagaat

SEQ ID NO: 207593 - DNA, 30 bp, Artificial Sequence
  Synthetic oligonucleotide
tatagccagaaggtgaggttatgctagaat

SEQ ID NO: 207594 - DNA, 30 bp, Artificial Sequence
  Synthetic oligonucleotide
gtcaaggctgatacaagctctcaaacgaat

SEQ ID NO: 207595 - DNA, 30 bp, Artificial Sequence
  Synthetic oligonucleotide
cggtgtggcttaacgacgagagcaccgaat

SEQ ID NO: 207596 - DNA, 30 bp, Artificial Sequence
  Synthetic oligonucleotide
ccgtgaaccgtgatacctggacacccgaat

SEQ ID NO: 207597 - DNA, 30 bp, Artificial Sequence
  Synthetic oligonucleotide
ttcgtgaacagtcacacaagagctccgaat

SEQ ID NO: 207598 - DNA, 30 bp, Artificial Sequence
  Synthetic oligonucleotide
ctacattgcgggcacatcggagcagcgaat

SEQ ID NO: 207599 - DNA, 30 bp, Artificial Sequence
  Synthetic oligonucleotide
atactgaggaattccttggaagtagcgaat

SEQ ID NO: 207600 - DNA, 30 bp, Artificial Sequence
  Synthetic oligonucleotide
aatgtggtacgactatgttaattcgcgaat

SEQ ID NO: 207601 - DNA, 30 bp, Artificial Sequence
  Synthetic oligonucleotide
taactgtttagtgacaaccaggatgcgaat

SEQ ID NO: 207602 - DNA, 30 bp, Artificial Sequence
  Synthetic oligonucleotide
aggctgatcattgaaccagcgacatcgaat

SEQ ID NO: 207603 - DNA, 30 bp, Artificial Sequence
  Synthetic oligonucleotide
ttagaaagttgcgcagggcaccgcaggaat

SEQ ID NO: 207604 - DNA, 30 bp, Artificial Sequence
  Synthetic oligonucleotide
ggccagtctaatccatggttcccgaggaat

SEQ ID NO: 207605 - DNA, 29 bp, Artificial Sequence
  Synthetic oligonucleotide
acactgggcataatagaatgttgaggaat

SEQ ID NO: 207606 - DNA, 30 bp, Artificial Sequence
  Synthetic oligonucleotide
cccagagatgatagggcccaaactaggaat

SEQ ID NO: 207607 - DNA, 30 bp, Artificial Sequence
  Synthetic oligonucleotide
ttacagcagggaatcgggacaggtaggaat

SEQ ID NO: 207608 - DNA, 30 bp, Artificial Sequence
  Synthetic oligonucleotide
agaacacagacgacaaagtcgtcacggaat

SEQ ID NO: 207609 - DNA, 30 bp, Artificial Sequence
  Synthetic oligonucleotide
tgcccaacttatggtagcagatcccggaat

SEQ ID NO: 207610 - DNA, 30 bp, Artificial Sequence
  Synthetic oligonucleotide
tatgttgaaatacttgggcactaggggaat

SEQ ID NO: 207611 - DNA, 30 bp, Artificial Sequence
  Synthetic oligonucleotide
attgggacgatcgcatatcactatgggaat

SEQ ID NO: 207612 - DNA, 30 bp, Artificial Sequence
  Synthetic oligonucleotide
caccacagaaacttggcgacgcgtgggaat

SEQ ID NO: 207613 - DNA, 30 bp, Artificial Sequence
  Synthetic oligonucleotide
agtggggagggtacaatggtatgtgggaat

SEQ ID NO: 207614 - DNA, 30 bp, Artificial Sequence
  Synthetic oligonucleotide
atggatatccacatcacatacattgggaat

SEQ ID NO: 207615 - DNA, 30 bp, Artificial Sequence
  Synthetic oligonucleotide
tacgcctcagtggtctcttcagttgggaat

SEQ ID NO: 207616 - DNA, 30 bp, Artificial Sequence
  Synthetic oligonucleotide
gtagggcctagtgccatctaaccatggaat

SEQ ID NO: 207617 - DNA, 30 bp, Artificial Sequence
  Synthetic oligonucleotide
aaggacactatacgaacaatctgatggaat

SEQ ID NO: 207618 - DNA, 30 bp, Artificial Sequence
  Synthetic oligonucleotide
tgggtggaaacctgtactggtgattggaat

SEQ ID NO: 207619 - DNA, 30 bp, Artificial Sequence
  Synthetic oligonucleotide
ggctcgcacgaccgttcctggggttggaat

SEQ ID NO: 207620 - DNA, 30 bp, Artificial Sequence
  Synthetic oligonucleotide
agctcttacgctcccacagctcccatgaat

SEQ ID NO: 207621 - DNA, 30 bp, Artificial Sequence
  Synthetic oligonucleotide
ggacggcaagctcgagtggacgccatgaat

SEQ ID NO: 207622 - DNA, 30 bp, Artificial Sequence
  Synthetic oligonucleotide
tacggcattacatctgtaagccatatgaat

SEQ ID NO: 207623 - DNA, 30 bp, Artificial Sequence
  Synthetic oligonucleotide
aggattagtttatacggggaacttatgaat

SEQ ID NO: 207624 - DNA, 30 bp, Artificial Sequence
  Synthetic oligonucleotide
aagaaacctgcgcaccttggctcactgaat

SEQ ID NO: 207625 - DNA, 30 bp, Artificial Sequence
  Synthetic oligonucleotide
agctgtgcatggcaggaactcgtactgaat

SEQ ID NO: 207626 - DNA, 30 bp, Artificial Sequence
  Synthetic oligonucleotide
agcttttcgccagcatgcggcgccctgaat

SEQ ID NO: 207627 - DNA, 30 bp, Artificial Sequence
  Synthetic oligonucleotide
caaccagcatccaatcgtgcggggctgaat

SEQ ID NO: 207628 - DNA, 30 bp, Artificial Sequence
  Synthetic oligonucleotide
catcatccagctcgttcacccgatctgaat

SEQ ID NO: 207629 - DNA, 30 bp, Artificial Sequence
  Synthetic oligonucleotide
gggcctgataggtattacagaaccgtgaat

SEQ ID NO: 207630 - DNA, 30 bp, Artificial Sequence
  Synthetic oligonucleotide
actatctaagtctagaaaggggaggtgaat

SEQ ID NO: 207631 - DNA, 30 bp, Artificial Sequence
  Synthetic oligonucleotide
taattgcacattgaacgattgagggtgaat

SEQ ID NO: 207632 - DNA, 30 bp, Artificial Sequence
  Synthetic oligonucleotide
agaaagccttttaggcataaacaattgaat

SEQ ID NO: 207633 - DNA, 30 bp, Artificial Sequence
  Synthetic oligonucleotide
gtgtccagtggcttataaaatcaattgaat

SEQ ID NO: 207634 - DNA, 30 bp, Artificial Sequence
  Synthetic oligonucleotide
actcagggccgttagtgcacatacttgaat

SEQ ID NO: 207635 - DNA, 30 bp, Artificial Sequence
  Synthetic oligonucleotide
actacgtagagcttatttcaagcaaataat

SEQ ID NO: 207636 - DNA, 30 bp, Artificial Sequence
  Synthetic oligonucleotide
ctgcccggcttgggtgatccacgaaataat

SEQ ID NO: 207637 - DNA, 30 bp, Artificial Sequence
  Synthetic oligonucleotide
acgtcgtatgtgtcaactgcccgcaataat

SEQ ID NO: 207638 - DNA, 30 bp, Artificial Sequence
  Synthetic oligonucleotide
aaggtgcggctttcatgagtagggaataat

SEQ ID NO: 207639 - DNA, 30 bp, Artificial Sequence
  Synthetic oligonucleotide
tatacgtggcgagggctcaggtggaataat

SEQ ID NO: 207640 - DNA, 30 bp, Artificial Sequence
  Synthetic oligonucleotide
cggcaatgcttgcttcgcgttggccataat

SEQ ID NO: 207641 - DNA, 30 bp, Artificial Sequence
  Synthetic oligonucleotide
gtagcgaaatgaaattggggagtgcataat

SEQ ID NO: 207642 - DNA, 30 bp, Artificial Sequence
  Synthetic oligonucleotide
tgcggaacgcataccgaagtacctcataat

SEQ ID NO: 207643 - DNA, 30 bp, Artificial Sequence
  Synthetic oligonucleotide
ggtactgctcacatgatatagtgtcataat

SEQ ID NO: 207644 - DNA, 30 bp, Artificial Sequence
  Synthetic oligonucleotide
gggatgagtggggaatacaaggttcataat

SEQ ID NO: 207645 - DNA, 30 bp, Artificial Sequence
  Synthetic oligonucleotide
aacaaataaggtagcggtcacccagataat

SEQ ID NO: 207646 - DNA, 30 bp, Artificial Sequence
  Synthetic oligonucleotide
atctcaattacgggaattaggccagataat

SEQ ID NO: 207647 - DNA, 30 bp, Artificial Sequence
  Synthetic oligonucleotide
ctggataagtacgtgaagtaatgcgataat

SEQ ID NO: 207648 - DNA, 30 bp, Artificial Sequence
  Synthetic oligonucleotide
gactaggcgcattactgtagaaatgataat

SEQ ID NO: 207649 - DNA, 30 bp, Artificial Sequence
  Synthetic oligonucleotide
gtgtatcgggggatggccgtagatgataat

SEQ ID NO: 207650 - DNA, 30 bp, Artificial Sequence
  Synthetic oligonucleotide
ttgagcgttccagcaccgctgtactataat

SEQ ID NO: 207651 - DNA, 30 bp, Artificial Sequence
  Synthetic oligonucleotide
ctctcaagtgcctcactctccgagtataat

SEQ ID NO: 207652 - DNA, 30 bp, Artificial Sequence
  Synthetic oligonucleotide
aactgagtgataatgaactacgggtataat

SEQ ID NO: 207653 - DNA, 30 bp, Artificial Sequence
  Synthetic oligonucleotide
gtatatccagggggaataaatcgttataat

SEQ ID NO: 207654 - DNA, 30 bp, Artificial Sequence
  Synthetic oligonucleotide
cgtctaccagggtcatccggcacaactaat

SEQ ID NO: 207655 - DNA, 30 bp, Artificial Sequence
  Synthetic oligonucleotide
gtctccggtagagagaccgatagaactaat

SEQ ID NO: 207656 - DNA, 30 bp, Artificial Sequence
  Synthetic oligonucleotide
aaacatagcaaagcgccacgggacactaat

SEQ ID NO: 207657 - DNA, 30 bp, Artificial Sequence
  Synthetic oligonucleotide
gcaggacgctaaccgtatagcaagcctaat

SEQ ID NO: 207658 - DNA, 30 bp, Artificial Sequence
  Synthetic oligonucleotide
cctctgtcttatccagtgcgtcctcctaat

SEQ ID NO: 207659 - DNA, 30 bp, Artificial Sequence
  Synthetic oligonucleotide
tctgggttgagtcggggacccgtggctaat

SEQ ID NO: 207660 - DNA, 30 bp, Artificial Sequence
  Synthetic oligonucleotide
gcgaatatgcaatttcgaactactgctaat

SEQ ID NO: 207661 - DNA, 30 bp, Artificial Sequence
  Synthetic oligonucleotide
ggaataaggtagctaggttcggctgctaat

SEQ ID NO: 207662 - DNA, 30 bp, Artificial Sequence
  Synthetic oligonucleotide
gcgcgggcttcggtacccactctatctaat

SEQ ID NO: 207663 - DNA, 30 bp, Artificial Sequence
  Synthetic oligonucleotide
aggacggaacttctcacgcctggttctaat

SEQ ID NO: 207664 - DNA, 30 bp, Artificial Sequence
  Synthetic oligonucleotide
tattgaagctaattaagatacaaaagtaat

SEQ ID NO: 207665 - DNA, 30 bp, Artificial Sequence
  Synthetic oligonucleotide
ctacatcgtgacgccaggtgccaaagtaat

SEQ ID NO: 207666 - DNA, 30 bp, Artificial Sequence
  Synthetic oligonucleotide
cagattcagacctgccctttgccaagtaat

SEQ ID NO: 207667 - DNA, 30 bp, Artificial Sequence
  Synthetic oligonucleotide
cataaggctaacactcggtaggccagtaat

SEQ ID NO: 207668 - DNA, 30 bp, Artificial Sequence
  Synthetic oligonucleotide
gagcaaaggagtgcagtctacggcagtaat

SEQ ID NO: 207669 - DNA, 30 bp, Artificial Sequence
  Synthetic oligonucleotide
gaaggcccttccaataaggtgtatagtaat

SEQ ID NO: 207670 - DNA, 30 bp, Artificial Sequence
  Synthetic oligonucleotide
ggatagcgctgctcggctgacccacgtaat

SEQ ID NO: 207671 - DNA, 30 bp, Artificial Sequence
  Synthetic oligonucleotide
accataatggggaggccacggatacgtaat

SEQ ID NO: 207672 - DNA, 30 bp, Artificial Sequence
  Synthetic oligonucleotide
tttggaaaacgcgatacgataaaccgtaat

SEQ ID NO: 207673 - DNA, 30 bp, Artificial Sequence
  Synthetic oligonucleotide
cggtgtaacagtgttagtgcaacccgtaat

SEQ ID NO: 207674 - DNA, 30 bp, Artificial Sequence
  Synthetic oligonucleotide
ccaggtcagcactttaacatggagcgtaat

SEQ ID NO: 207675 - DNA, 30 bp, Artificial Sequence
  Synthetic oligonucleotide
tcagtaccatttccaagaagctggcgtaat

SEQ ID NO: 207676 - DNA, 30 bp, Artificial Sequence
  Synthetic oligonucleotide
tcacagtcaccctcggtggcgctgcgtaat

SEQ ID NO: 207677 - DNA, 30 bp, Artificial Sequence
  Synthetic oligonucleotide
caaggatgccctcgacgttatcctcgtaat

SEQ ID NO: 207678 - DNA, 30 bp, Artificial Sequence
  Synthetic oligonucleotide
gggatttggtcctcgtatggaaaaggtaat

SEQ ID NO: 207679 - DNA, 30 bp, Artificial Sequence
  Synthetic oligonucleotide
gcatgaaaatatcattcggttggaggtaat

SEQ ID NO: 207680 - DNA, 30 bp, Artificial Sequence
  Synthetic oligonucleotide
gtgaatagggcgttatgatggaccggtaat

SEQ ID NO: 207681 - DNA, 30 bp, Artificial Sequence
  Synthetic oligonucleotide
tctaaagcagtcagcggaccttggggtaat

SEQ ID NO: 207682 - DNA, 30 bp, Artificial Sequence
  Synthetic oligonucleotide
cttcaaagtgagtcctaagcagtgggtaat

SEQ ID NO: 207683 - DNA, 30 bp, Artificial Sequence
  Synthetic oligonucleotide
acgtttgagttagcaaagcatcatggtaat

SEQ ID NO: 207684 - DNA, 30 bp, Artificial Sequence
  Synthetic oligonucleotide
gccgtgggggtaatatcccgggatggtaat

SEQ ID NO: 207685 - DNA, 30 bp, Artificial Sequence
  Synthetic oligonucleotide
caggatggatacggcaagatggctggtaat

SEQ ID NO: 207686 - DNA, 30 bp, Artificial Sequence
  Synthetic oligonucleotide
ggatcggacagcgctcactattttggtaat

SEQ ID NO: 207687 - DNA, 30 bp, Artificial Sequence
  Synthetic oligonucleotide
ctgaaatcgaacagtttccggtcctgtaat

SEQ ID NO: 207688 - DNA, 30 bp, Artificial Sequence
  Synthetic oligonucleotide
caggaatatagtccatttccagtctgtaat

SEQ ID NO: 207689 - DNA, 30 bp, Artificial Sequence
  Synthetic oligonucleotide
ccaatgggcgaactagcgttagtctgtaat

SEQ ID NO: 207690 - DNA, 30 bp, Artificial Sequence
  Synthetic oligonucleotide
atagctaatcaagattattccgagtgtaat

SEQ ID NO: 207691 - DNA, 30 bp, Artificial Sequence
  Synthetic oligonucleotide
gagccatgtgttatactgggtcggtgtaat

SEQ ID NO: 207692 - DNA, 30 bp, Artificial Sequence
  Synthetic oligonucleotide
atcgcgtataagaagtagagccattgtaat

SEQ ID NO: 207693 - DNA, 30 bp, Artificial Sequence
  Synthetic oligonucleotide
acgtacgttccaaggatcgtgtaaattaat

SEQ ID NO: 207694 - DNA, 30 bp, Artificial Sequence
  Synthetic oligonucleotide
tacgagggtacaactcgccctagaattaat

SEQ ID NO: 207695 - DNA, 30 bp, Artificial Sequence
  Synthetic oligonucleotide
ggacaaagcgtttgccagtggggaattaat

SEQ ID NO: 207696 - DNA, 30 bp, Artificial Sequence
  Synthetic oligonucleotide
acacattagaaagcaacgcaactaattaat

SEQ ID NO: 207697 - DNA, 30 bp, Artificial Sequence
  Synthetic oligonucleotide
cagcaggctgataaataagtctggattaat

SEQ ID NO: 207698 - DNA, 30 bp, Artificial Sequence
  Synthetic oligonucleotide
ccgcgacacgtgattgtgacaggtattaat

SEQ ID NO: 207699 - DNA, 30 bp, Artificial Sequence
  Synthetic oligonucleotide
atggcacgcgctgctatctacgttattaat

SEQ ID NO: 207700 - DNA, 30 bp, Artificial Sequence
  Synthetic oligonucleotide
tggtattaatggatccgataaatacttaat

SEQ ID NO: 207701 - DNA, 30 bp, Artificial Sequence
  Synthetic oligonucleotide
ccgtaaccccgtcagaatgtcgtccttaat

SEQ ID NO: 207702 - DNA, 30 bp, Artificial Sequence
  Synthetic oligonucleotide
agtcactcagataggactagaaggcttaat

SEQ ID NO: 207703 - DNA, 30 bp, Artificial Sequence
  Synthetic oligonucleotide
attcgcagagagcaggaaggttaagttaat

SEQ ID NO: 207704 - DNA, 30 bp, Artificial Sequence
  Synthetic oligonucleotide
ataaagatggatacggtgccatgcgttaat

SEQ ID NO: 207705 - DNA, 30 bp, Artificial Sequence
  Synthetic oligonucleotide
ctggaccgatgtaacgacggctaggttaat

SEQ ID NO: 207706 - DNA, 30 bp, Artificial Sequence
  Synthetic oligonucleotide
tggcaataagctgaggacctggttgttaat

SEQ ID NO: 207707 - DNA, 30 bp, Artificial Sequence
  Synthetic oligonucleotide
ccaaattggtatgatttagggaaatttaat

SEQ ID NO: 207708 - DNA, 30 bp, Artificial Sequence
  Synthetic oligonucleotide
caacgtcaagcggtcatgacttcatttaat

SEQ ID NO: 207709 - DNA, 30 bp, Artificial Sequence
  Synthetic oligonucleotide
gagccagctactggacaatatctatttaat

SEQ ID NO: 207710 - DNA, 30 bp, Artificial Sequence
  Synthetic oligonucleotide
tgaaagctggcgtctgcccgtacgtttaat

SEQ ID NO: 207711 - DNA, 30 bp, Artificial Sequence
  Synthetic oligonucleotide
gatgaagcagcgacagctcctccttttaat

SEQ ID NO: 207712 - DNA, 31 bp, Artificial Sequence
  Synthetic oligonucleotide
acggctggtttgtattcagcaaccaaaacat

SEQ ID NO: 207713 - DNA, 30 bp, Artificial Sequence
  Synthetic oligonucleotide
tgtgccagctcgcatggacctgtaaaacat

SEQ ID NO: 207714 - DNA, 30 bp, Artificial Sequence
  Synthetic oligonucleotide
gcgttcagtcgtgagcattagaacaaacat

SEQ ID NO: 207715 - DNA, 30 bp, Artificial Sequence
  Synthetic oligonucleotide
taataaagtgtcacgcaggcggacaaacat

SEQ ID NO: 207716 - DNA, 30 bp, Artificial Sequence
  Synthetic oligonucleotide
gcagtgtagaataagagtgtcaagaaacat

SEQ ID NO: 207717 - DNA, 29 bp, Artificial Sequence
  Synthetic oligonucleotide
cactcgtcgtccttgtaatcggtaaacat

SEQ ID NO: 207718 - DNA, 30 bp, Artificial Sequence
  Synthetic oligonucleotide
gggtgggtttggtgggaagactcacaacat

SEQ ID NO: 207719 - DNA, 30 bp, Artificial Sequence
  Synthetic oligonucleotide
cgagttcgtgtaggagtaaggtcacaacat

SEQ ID NO: 207720 - DNA, 30 bp, Artificial Sequence
  Synthetic oligonucleotide
ctattagaaaggggtggtatctgacaacat

SEQ ID NO: 207721 - DNA, 30 bp, Artificial Sequence
  Synthetic oligonucleotide
gttgacttcggcctaaggggatggcaacat

SEQ ID NO: 207722 - DNA, 30 bp, Artificial Sequence
  Synthetic oligonucleotide
gcactatttcggaacagaacgtgtcaacat

SEQ ID NO: 207723 - DNA, 30 bp, Artificial Sequence
  Synthetic oligonucleotide
atttgacaagtacttcaactgtgagaacat

SEQ ID NO: 207724 - DNA, 30 bp, Artificial Sequence
  Synthetic oligonucleotide
acactggacttagagtcacttggcgaacat

SEQ ID NO: 207725 - DNA, 30 bp, Artificial Sequence
  Synthetic oligonucleotide
acaaaaggctccgaagggtctcttgaacat

SEQ ID NO: 207726 - DNA, 30 bp, Artificial Sequence
  Synthetic oligonucleotide
caggatcccgctgtcgaacgaatataacat

SEQ ID NO: 207727 - DNA, 30 bp, Artificial Sequence
  Synthetic oligonucleotide
ggactgcaagcccgcgaacataggtaacat

SEQ ID NO: 207728 - DNA, 30 bp, Artificial Sequence
  Synthetic oligonucleotide
agagatcgagttaatagcgtgatgtaacat

SEQ ID NO: 207729 - DNA, 30 bp, Artificial Sequence
  Synthetic oligonucleotide
gaaagggtacactgtcagcggaggacacat

SEQ ID NO: 207730 - DNA, 30 bp, Artificial Sequence
  Synthetic oligonucleotide
tcgactacacctgatcaggtacttacacat

SEQ ID NO: 207731 - DNA, 30 bp, Artificial Sequence
  Synthetic oligonucleotide
cgctcgtgtcacaggcgacgggtcccacat

SEQ ID NO: 207732 - DNA, 30 bp, Artificial Sequence
  Synthetic oligonucleotide
tcacccgggcgccgatctgtattcccacat

SEQ ID NO: 207733 - DNA, 30 bp, Artificial Sequence
  Synthetic oligonucleotide
gatgcaagtcttgttgttgatcagccacat

SEQ ID NO: 207734 - DNA, 30 bp, Artificial Sequence
  Synthetic oligonucleotide
cggtacgctttgggtcggcccaggccacat

SEQ ID NO: 207735 - DNA, 30 bp, Artificial Sequence
  Synthetic oligonucleotide
ctctatgcggtctaacagtggcaagcacat

SEQ ID NO: 207736 - DNA, 30 bp, Artificial Sequence
  Synthetic oligonucleotide
atttgatcgcgttagataggtccagcacat

SEQ ID NO: 207737 - DNA, 30 bp, Artificial Sequence
  Synthetic oligonucleotide
ggcggcgaaggggcgatgtagcccgcacat

SEQ ID NO: 207738 - DNA, 30 bp, Artificial Sequence
  Synthetic oligonucleotide
aggtactatgggagcccaaatgtcgcacat

SEQ ID NO: 207739 - DNA, 30 bp, Artificial Sequence
  Synthetic oligonucleotide
cgtggcacatagctaaggactagggcacat

SEQ ID NO: 207740 - DNA, 30 bp, Artificial Sequence
  Synthetic oligonucleotide
gcagacggcacagtactcggatgggcacat

SEQ ID NO: 207741 - DNA, 30 bp, Artificial Sequence
  Synthetic oligonucleotide
ggtccttgtctgttcaccgggtgtgcacat

SEQ ID NO: 207742 - DNA, 30 bp, Artificial Sequence
  Synthetic oligonucleotide
gtgccacgatcgtgtgaaagatttgcacat

SEQ ID NO: 207743 - DNA, 30 bp, Artificial Sequence
  Synthetic oligonucleotide
ctctagccaaaagcgtgggtaacatcacat

SEQ ID NO: 207744 - DNA, 30 bp, Artificial Sequence
  Synthetic oligonucleotide
ccaattttagggcatgtatcagtgtcacat

SEQ ID NO: 207745 - DNA, 30 bp, Artificial Sequence
  Synthetic oligonucleotide
cctaacttaagcgcataaaaccaaagacat

SEQ ID NO: 207746 - DNA, 30 bp, Artificial Sequence
  Synthetic oligonucleotide
gaacagaatgaaatcattatgcaaagacat

SEQ ID NO: 207747 - DNA, 30 bp, Artificial Sequence
  Synthetic oligonucleotide
tcttagtcaagacacggttggtaaagacat

SEQ ID NO: 207748 - DNA, 30 bp, Artificial Sequence
  Synthetic oligonucleotide
cggtagagagggacacgggtttggagacat

SEQ ID NO: 207749 - DNA, 30 bp, Artificial Sequence
  Synthetic oligonucleotide
accccgcaacgaacggaagggttgagacat

SEQ ID NO: 207750 - DNA, 30 bp, Artificial Sequence
  Synthetic oligonucleotide
aagtacgtgctctaggtctgtttacgacat

SEQ ID NO: 207751 - DNA, 30 bp, Artificial Sequence
  Synthetic oligonucleotide
cgtattgggcgctaagcctgaagccgacat

SEQ ID NO: 207752 - DNA, 30 bp, Artificial Sequence
  Synthetic oligonucleotide
tggtggagaccaagcggcctacggcgacat

SEQ ID NO: 207753 - DNA, 30 bp, Artificial Sequence
  Synthetic oligonucleotide
aacaatcttggctgagcgactttgcgacat

SEQ ID NO: 207754 - DNA, 30 bp, Artificial Sequence
  Synthetic oligonucleotide
acatcgaacgatgaagcgggaactcgacat

SEQ ID NO: 207755 - DNA, 30 bp, Artificial Sequence
  Synthetic oligonucleotide
acactcacaattaataaacgtactcgacat

SEQ ID NO: 207756 - DNA, 30 bp, Artificial Sequence
  Synthetic oligonucleotide
agcatctttgctgcgttaagaattcgacat

SEQ ID NO: 207757 - DNA, 30 bp, Artificial Sequence
  Synthetic oligonucleotide
cattcagttcgttagacagccaaaggacat

SEQ ID NO: 207758 - DNA, 30 bp, Artificial Sequence
  Synthetic oligonucleotide
gtgcgagtttccaattcaaaattaggacat

SEQ ID NO: 207759 - DNA, 30 bp, Artificial Sequence
  Synthetic oligonucleotide
tccggcgcagtgggtggagcgatcggacat

SEQ ID NO: 207760 - DNA, 30 bp, Artificial Sequence
  Synthetic oligonucleotide
aatgagtcacaaaaaacactgaagggacat

SEQ ID NO: 207761 - DNA, 30 bp, Artificial Sequence
  Synthetic oligonucleotide
ggagggcacttccggctgattccatgacat

SEQ ID NO: 207762 - DNA, 30 bp, Artificial Sequence
  Synthetic oligonucleotide
aggtggacggactacattcacagctgacat

SEQ ID NO: 207763 - DNA, 30 bp, Artificial Sequence
  Synthetic oligonucleotide
tcgccgtcttgatgattagcggcgtgacat

SEQ ID NO: 207764 - DNA, 30 bp, Artificial Sequence
  Synthetic oligonucleotide
gcacgagaagtagctaaactgttttgacat

SEQ ID NO: 207765 - DNA, 30 bp, Artificial Sequence
  Synthetic oligonucleotide
ggagtgccggatatctaggtgttttgacat

SEQ ID NO: 207766 - DNA, 30 bp, Artificial Sequence
  Synthetic oligonucleotide
ttcgcagacgcgaagttgcatacaatacat

SEQ ID NO: 207767 - DNA, 30 bp, Artificial Sequence
  Synthetic oligonucleotide
gctgtttcggggggacgataggcaatacat

SEQ ID NO: 207768 - DNA, 30 bp, Artificial Sequence
  Synthetic oligonucleotide
cttgattacctgtaggaacaaaacatacat

SEQ ID NO: 207769 - DNA, 30 bp, Artificial Sequence
  Synthetic oligonucleotide
tagtgggtaaaccccgagaccgctatacat

SEQ ID NO: 207770 - DNA, 30 bp, Artificial Sequence
  Synthetic oligonucleotide
cggcaatagtacctcagcgaacttatacat

SEQ ID NO: 207771 - DNA, 30 bp, Artificial Sequence
  Synthetic oligonucleotide
atgtcagggatggtgccgccgttactacat

SEQ ID NO: 207772 - DNA, 30 bp, Artificial Sequence
  Synthetic oligonucleotide
taagaaaggtacctaaacgaggtcctacat

SEQ ID NO: 207773 - DNA, 30 bp, Artificial Sequence
  Synthetic oligonucleotide
gaacatggagagagcaggtcctcgctacat

SEQ ID NO: 207774 - DNA, 30 bp, Artificial Sequence
  Synthetic oligonucleotide
ggatggtggttagaaacgttggttctacat

SEQ ID NO: 207775 - DNA, 30 bp, Artificial Sequence
  Synthetic oligonucleotide
ctagagaaagctatctgactttgagtacat

SEQ ID NO: 207776 - DNA, 30 bp, Artificial Sequence
  Synthetic oligonucleotide
ggtcttcaacgtgacgtcgagcccgtacat

SEQ ID NO: 207777 - DNA, 30 bp, Artificial Sequence
  Synthetic oligonucleotide
tcgtgcgaattttcgtgcggaagggtacat

SEQ ID NO: 207778 - DNA, 30 bp, Artificial Sequence
  Synthetic oligonucleotide
atagaattgtaactaggaggcagggtacat

SEQ ID NO: 207779 - DNA, 30 bp, Artificial Sequence
  Synthetic oligonucleotide
aggccacgtaacacgtcttgtatggtacat

SEQ ID NO: 207780 - DNA, 30 bp, Artificial Sequence
  Synthetic oligonucleotide
gtcactaggagagggggtagatatgtacat

SEQ ID NO: 207781 - DNA, 30 bp, Artificial Sequence
  Synthetic oligonucleotide
tctcaggtaggtgtgtgaggatctgtacat

SEQ ID NO: 207782 - DNA, 30 bp, Artificial Sequence
  Synthetic oligonucleotide
cgtcagcgcagaaatttagcgggtgtacat

SEQ ID NO: 207783 - DNA, 30 bp, Artificial Sequence
  Synthetic oligonucleotide
caagacctagtgactgtcgcaatcttacat

SEQ ID NO: 207784 - DNA, 30 bp, Artificial Sequence
  Synthetic oligonucleotide
gtgatcgcatcgtagattgcctttttacat

SEQ ID NO: 207785 - DNA, 30 bp, Artificial Sequence
  Synthetic oligonucleotide
tacgaatgtttagaagaggtcaaaaaccat

SEQ ID NO: 207786 - DNA, 30 bp, Artificial Sequence
  Synthetic oligonucleotide
aataaaaacagctaaagcaaccaaaaccat

SEQ ID NO: 207787 - DNA, 30 bp, Artificial Sequence
  Synthetic oligonucleotide
agcttacataagcgagccagcggcaaccat

SEQ ID NO: 207788 - DNA, 30 bp, Artificial Sequence
  Synthetic oligonucleotide
gcatacatctgataatcgcggtgcaaccat

SEQ ID NO: 207789 - DNA, 30 bp, Artificial Sequence
  Synthetic oligonucleotide
ccgttcagctcggctgaactttcgaaccat

SEQ ID NO: 207790 - DNA, 30 bp, Artificial Sequence
  Synthetic oligonucleotide
cgaggcttttgtattgggtctgggaaccat

SEQ ID NO: 207791 - DNA, 30 bp, Artificial Sequence
  Synthetic oligonucleotide
taggccatttagatgtccagcgcccaccat

SEQ ID NO: 207792 - DNA, 30 bp, Artificial Sequence
  Synthetic oligonucleotide
cctcgcaattgtaaagaagaaatccaccat

SEQ ID NO: 207793 - DNA, 30 bp, Artificial Sequence
  Synthetic oligonucleotide
actcctagcgtaagtgcggtagcgcaccat

SEQ ID NO: 207794 - DNA, 30 bp, Artificial Sequence
  Synthetic oligonucleotide
cagcagccagtatattgtgagttgcaccat

SEQ ID NO: 207795 - DNA, 30 bp, Artificial Sequence
  Synthetic oligonucleotide
tcgttaagtcggccaggccgtttgcaccat

SEQ ID NO: 207796 - DNA, 30 bp, Artificial Sequence
  Synthetic oligonucleotide
acagcagatagtcgctaggaaagagaccat

SEQ ID NO: 207797 - DNA, 31 bp, Artificial Sequence
  Synthetic oligonucleotide
ccgctaagcaagagcctgagcttcggaccat

SEQ ID NO: 207798 - DNA, 30 bp, Artificial Sequence
  Synthetic oligonucleotide
tcgtggtcagcaacacatacgcgtgaccat

SEQ ID NO: 207799 - DNA, 30 bp, Artificial Sequence
  Synthetic oligonucleotide
cgttctcgaccgagagtgaaaacataccat

SEQ ID NO: 207800 - DNA, 30 bp, Artificial Sequence
  Synthetic oligonucleotide
agacgtaagctatccaagtgctcataccat

SEQ ID NO: 207801 - DNA, 30 bp, Artificial Sequence
  Synthetic oligonucleotide
gggaccaaaaacaggaatggtcggtaccat

SEQ ID NO: 207802 - DNA, 30 bp, Artificial Sequence
  Synthetic oligonucleotide
aatgctgccgttggagacgttcaaacccat

SEQ ID NO: 207803 - DNA, 30 bp, Artificial Sequence
  Synthetic oligonucleotide
atgcgccattggggtagtggatagacccat

SEQ ID NO: 207804 - DNA, 30 bp, Artificial Sequence
  Synthetic oligonucleotide
ctcccaaagatctactagaccgacccccat

SEQ ID NO: 207805 - DNA, 30 bp, Artificial Sequence
  Synthetic oligonucleotide
ccattcgacctagttcccacaccgccccat

SEQ ID NO: 207806 - DNA, 30 bp, Artificial Sequence
  Synthetic oligonucleotide
actatacctaggataagtgatatgccccat

SEQ ID NO: 207807 - DNA, 30 bp, Artificial Sequence
  Synthetic oligonucleotide
acgttgttacgccacaaataaagtccccat

SEQ ID NO: 207808 - DNA, 30 bp, Artificial Sequence
  Synthetic oligonucleotide
ggcacgctggaaaggcaccgatttccccat

SEQ ID NO: 207809 - DNA, 30 bp, Artificial Sequence
  Synthetic oligonucleotide
tcataaagaggactgtatacacgagcccat

SEQ ID NO: 207810 - DNA, 30 bp, Artificial Sequence
  Synthetic oligonucleotide
agcttgtggatcgtgacacgtcgcgcccat

SEQ ID NO: 207811 - DNA, 30 bp, Artificial Sequence
  Synthetic oligonucleotide
tcaaaaaaataaggtaatctgagctcccat

SEQ ID NO: 207812 - DNA, 30 bp, Artificial Sequence
  Synthetic oligonucleotide
cgggtttctctaagtcttaatagttcccat

SEQ ID NO: 207813 - DNA, 30 bp, Artificial Sequence
  Synthetic oligonucleotide
gattctagatgagattgagcggaaagccat

SEQ ID NO: 207814 - DNA, 30 bp, Artificial Sequence
  Synthetic oligonucleotide
gctcgatgggacgtgtatggcataagccat

SEQ ID NO: 207815 - DNA, 30 bp, Artificial Sequence
  Synthetic oligonucleotide
gaacctcgctgatactaagtaacgcgccat

SEQ ID NO: 207816 - DNA, 30 bp, Artificial Sequence
  Synthetic oligonucleotide
gacaaccgattgtcatagcgccggcgccat

SEQ ID NO: 207817 - DNA, 30 bp, Artificial Sequence
  Synthetic oligonucleotide
ccctgaagtgatgattagatcgggcgccat

SEQ ID NO: 207818 - DNA, 30 bp, Artificial Sequence
  Synthetic oligonucleotide
gacaatacgtcaacctttgtttggcgccat

SEQ ID NO: 207819 - DNA, 30 bp, Artificial Sequence
  Synthetic oligonucleotide
tgcatgcaatggacatcaaatcctcgccat

SEQ ID NO: 207820 - DNA, 30 bp, Artificial Sequence
  Synthetic oligonucleotide
cgggcgcactcggaatacatcgctcgccat

SEQ ID NO: 207821 - DNA, 30 bp, Artificial Sequence
  Synthetic oligonucleotide
gctgggagggatgcataaccttgcggccat

SEQ ID NO: 207822 - DNA, 30 bp, Artificial Sequence
  Synthetic oligonucleotide
agcaagtgggcttcgcccgagttcggccat

SEQ ID NO: 207823 - DNA, 30 bp, Artificial Sequence
  Synthetic oligonucleotide
ttggctaaggggtgatagcgaaagggccat

SEQ ID NO: 207824 - DNA, 30 bp, Artificial Sequence
  Synthetic oligonucleotide
ggtcataggcttgtaaccgatcatggccat

SEQ ID NO: 207825 - DNA, 30 bp, Artificial Sequence
  Synthetic oligonucleotide
tccggcgtattcggggaagtaagtggccat

SEQ ID NO: 207826 - DNA, 30 bp, Artificial Sequence
  Synthetic oligonucleotide
aaaaacaatgaaagggtgaccatatgccat

SEQ ID NO: 207827 - DNA, 30 bp, Artificial Sequence
  Synthetic oligonucleotide
ctacgcgcctgcgtatgagttccctgccat

SEQ ID NO: 207828 - DNA, 30 bp, Artificial Sequence
  Synthetic oligonucleotide
gcgacacagcaccggtaaatacgctgccat

SEQ ID NO: 207829 - DNA, 30 bp, Artificial Sequence
  Synthetic oligonucleotide
cagtcctgtagctgctcagtgcagtgccat

SEQ ID NO: 207830 - DNA, 30 bp, Artificial Sequence
  Synthetic oligonucleotide
atggcagatccgactcgaactgcgtgccat

SEQ ID NO: 207831 - DNA, 30 bp, Artificial Sequence
  Synthetic oligonucleotide
atgcaatcgactcggccactggcaatccat

SEQ ID NO: 207832 - DNA, 30 bp, Artificial Sequence
  Synthetic oligonucleotide
aacgtattaaaggacctgagatctatccat

SEQ ID NO: 207833 - DNA, 30 bp, Artificial Sequence
  Synthetic oligonucleotide
agttaatagaatgacctgtcgggtatccat

SEQ ID NO: 207834 - DNA, 30 bp, Artificial Sequence
  Synthetic oligonucleotide
aagggcggtaagccatataaagtactccat

SEQ ID NO: 207835 - DNA, 30 bp, Artificial Sequence
  Synthetic oligonucleotide
actactgattcgtcatggctgctgctccat

SEQ ID NO: 207836 - DNA, 30 bp, Artificial Sequence
  Synthetic oligonucleotide
aggtctcgatgaaccacgccacaggtccat

SEQ ID NO: 207837 - DNA, 30 bp, Artificial Sequence
  Synthetic oligonucleotide
gcaaggtaacatggtgtctctggtgtccat

SEQ ID NO: 207838 - DNA, 30 bp, Artificial Sequence
  Synthetic oligonucleotide
ggaagcaacggcaacgcatgaaacttccat

SEQ ID NO: 207839 - DNA, 30 bp, Artificial Sequence
  Synthetic oligonucleotide
aagaacgactatatatgcataaagttccat

SEQ ID NO: 207840 - DNA, 30 bp, Artificial Sequence
  Synthetic oligonucleotide
cttgatagcggcttgcttattaagttccat

SEQ ID NO: 207841 - DNA, 30 bp, Artificial Sequence
  Synthetic oligonucleotide
aacatgccacagtatatggcttcgttccat

SEQ ID NO: 207842 - DNA, 30 bp, Artificial Sequence
  Synthetic oligonucleotide
ctgcgaacgagtctctggacctggttccat

SEQ ID NO: 207843 - DNA, 30 bp, Artificial Sequence
  Synthetic oligonucleotide
aggggaacagccatctgtgtgtatttccat

SEQ ID NO: 207844 - DNA, 30 bp, Artificial Sequence
  Synthetic oligonucleotide
atgcagactgtcacaagccaaaacaagcat

SEQ ID NO: 207845 - DNA, 30 bp, Artificial Sequence
  Synthetic oligonucleotide
cggaatctaataatcaaagtgaggaagcat

SEQ ID NO: 207846 - DNA, 30 bp, Artificial Sequence
  Synthetic oligonucleotide
ctctgtgttgtcacggtaaagaataagcat

SEQ ID NO: 207847 - DNA, 30 bp, Artificial Sequence
  Synthetic oligonucleotide
atacaagtgattggagaaacaagtaagcat

SEQ ID NO: 207848 - DNA, 30 bp, Artificial Sequence
  Synthetic oligonucleotide
cagaatgataggagtttcgacattaagcat

SEQ ID NO: 207849 - DNA, 30 bp, Artificial Sequence
  Synthetic oligonucleotide
gcggcctcggccactcttgggctacagcat

SEQ ID NO: 207850 - DNA, 30 bp, Artificial Sequence
  Synthetic oligonucleotide
ctaaaggtctgtggcgtgtgcaaagagcat

SEQ ID NO: 207851 - DNA, 30 bp, Artificial Sequence
  Synthetic oligonucleotide
aaactagtgactaggatctggtgagagcat

SEQ ID NO: 207852 - DNA, 30 bp, Artificial Sequence
  Synthetic oligonucleotide
gggtatgggttgaactttattaacgagcat

SEQ ID NO: 207853 - DNA, 30 bp, Artificial Sequence
  Synthetic oligonucleotide
gtaagagcgcactgcgacactagtgagcat

SEQ ID NO: 207854 - DNA, 30 bp, Artificial Sequence
  Synthetic oligonucleotide
tcaaacgtggcgaatttggaattatagcat

SEQ ID NO: 207855 - DNA, 30 bp, Artificial Sequence
  Synthetic oligonucleotide
tcctcgtaaaggtgtccgacaagctagcat

SEQ ID NO: 207856 - DNA, 30 bp, Artificial Sequence
  Synthetic oligonucleotide
ccaaagcattctaacacagatgtctagcat

SEQ ID NO: 207857 - DNA, 30 bp, Artificial Sequence
  Synthetic oligonucleotide
aagaagaattgcaagacaggtagttagcat

SEQ ID NO: 207858 - DNA, 30 bp, Artificial Sequence
  Synthetic oligonucleotide
tctctcgacactaactattcttcaacgcat

SEQ ID NO: 207859 - DNA, 30 bp, Artificial Sequence
  Synthetic oligonucleotide
ctagtttaggaagtatataggtgaacgcat

SEQ ID NO: 207860 - DNA, 30 bp, Artificial Sequence
  Synthetic oligonucleotide
ggtcgctgtttatatggtagggcaccgcat

SEQ ID NO: 207861 - DNA, 30 bp, Artificial Sequence
  Synthetic oligonucleotide
taagcagaagggtacaattcgtcaccgcat

SEQ ID NO: 207862 - DNA, 30 bp, Artificial Sequence
  Synthetic oligonucleotide
gaagatcgggtaatcaggcagagcccgcat

SEQ ID NO: 207863 - DNA, 30 bp, Artificial Sequence
  Synthetic oligonucleotide
taccacgaacatctctccaccccgccgcat

SEQ ID NO: 207864 - DNA, 30 bp, Artificial Sequence
  Synthetic oligonucleotide
ggatttagacacgacatccttaatccgcat

SEQ ID NO: 207865 - DNA, 30 bp, Artificial Sequence
  Synthetic oligonucleotide
aatcacgcatatgggctcactgatccgcat

SEQ ID NO: 207866 - DNA, 30 bp, Artificial Sequence
  Synthetic oligonucleotide
gcgatactagtttttcagtctcttccgcat

SEQ ID NO: 207867 - DNA, 30 bp, Artificial Sequence
  Synthetic oligonucleotide
ggtttggccgttggaataggtagagcgcat

SEQ ID NO: 207868 - DNA, 30 bp, Artificial Sequence
  Synthetic oligonucleotide
aacctagtagcgaactggcgagtagcgcat

SEQ ID NO: 207869 - DNA, 30 bp, Artificial Sequence
  Synthetic oligonucleotide
atgtaagattagagtttacctgtggcgcat

SEQ ID NO: 207870 - DNA, 30 bp, Artificial Sequence
  Synthetic oligonucleotide
cattaattcaggcaccgagctaatgcgcat

SEQ ID NO: 207871 - DNA, 30 bp, Artificial Sequence
  Synthetic oligonucleotide
agaattacatatctgggcgcgaggtcgcat

SEQ ID NO: 207872 - DNA, 30 bp, Artificial Sequence
  Synthetic oligonucleotide
gaccgaggtgaatcccttctgagttcgcat

SEQ ID NO: 207873 - DNA, 30 bp, Artificial Sequence
  Synthetic oligonucleotide
gtatggggaattggtcaacatacaaggcat

SEQ ID NO: 207874 - DNA, 30 bp, Artificial Sequence
  Synthetic oligonucleotide
cgctgagtgccggaggtgccattcaggcat

SEQ ID NO: 207875 - DNA, 30 bp, Artificial Sequence
  Synthetic oligonucleotide
ttcagcggctcaccaaacgagcgtaggcat

SEQ ID NO: 207876 - DNA, 30 bp, Artificial Sequence
  Synthetic oligonucleotide
aaactgtagcctacgtgagggcaacggcat

SEQ ID NO: 207877 - DNA, 30 bp, Artificial Sequence
  Synthetic oligonucleotide
ctctaccggctgcatgtatgagtacggcat

SEQ ID NO: 207878 - DNA, 30 bp, Artificial Sequence
  Synthetic oligonucleotide
gtgcgctcaggtcctgttgcaaaccggcat

SEQ ID NO: 207879 - DNA, 30 bp, Artificial Sequence
  Synthetic oligonucleotide
aactaaaaaggaaagccaacgaaccggcat

SEQ ID NO: 207880 - DNA, 30 bp, Artificial Sequence
  Synthetic oligonucleotide
tcgtacctatgctaacaaccgccgcggcat

SEQ ID NO: 207881 - DNA, 30 bp, Artificial Sequence
  Synthetic oligonucleotide
ggctagtggctcaattgtgcatcgcggcat

SEQ ID NO: 207882 - DNA, 30 bp, Artificial Sequence
  Synthetic oligonucleotide
actctagggggagtattcctactgcggcat

SEQ ID NO: 207883 - DNA, 30 bp, Artificial Sequence
  Synthetic oligonucleotide
tgatagctaattatcgagcccctagggcat

SEQ ID NO: 207884 - DNA, 30 bp, Artificial Sequence
  Synthetic oligonucleotide
ttgagacacccctgggagatgcacgggcat

SEQ ID NO: 207885 - DNA, 30 bp, Artificial Sequence
  Synthetic oligonucleotide
ggaactacgtacatggtataggtcgggcat

SEQ ID NO: 207886 - DNA, 30 bp, Artificial Sequence
  Synthetic oligonucleotide
tacaaacacagcgtttagtgtaggtggcat

SEQ ID NO: 207887 - DNA, 30 bp, Artificial Sequence
  Synthetic oligonucleotide
gaagttgcctgtacgacatgttggtggcat

SEQ ID NO: 207888 - DNA, 30 bp, Artificial Sequence
  Synthetic oligonucleotide
aaccgggcccgtttataaaaggattggcat

SEQ ID NO: 207889 - DNA, 30 bp, Artificial Sequence
  Synthetic oligonucleotide
ggaaaaaacagagataggtgccagatgcat

SEQ ID NO: 207890 - DNA, 30 bp, Artificial Sequence
  Synthetic oligonucleotide
tgaatcgggttgctaactgacgggatgcat

SEQ ID NO: 207891 - DNA, 30 bp, Artificial Sequence
  Synthetic oligonucleotide
ttcaggagttaacttacgtttggactgcat

SEQ ID NO: 207892 - DNA, 30 bp, Artificial Sequence
  Synthetic oligonucleotide
gatccggggaattaagtgatccagctgcat

SEQ ID NO: 207893 - DNA, 30 bp, Artificial Sequence
  Synthetic oligonucleotide
tgcctatcacgatactacctgtagctgcat

SEQ ID NO: 207894 - DNA, 30 bp, Artificial Sequence
  Synthetic oligonucleotide
tgcatatgtagcaccaattttcacgtgcat

SEQ ID NO: 207895 - DNA, 30 bp, Artificial Sequence
  Synthetic oligonucleotide
atgaagactgacctgcgatcatccgtgcat

SEQ ID NO: 207896 - DNA, 30 bp, Artificial Sequence
  Synthetic oligonucleotide
taacgcactaggggttagattcgattgcat

SEQ ID NO: 207897 - DNA, 30 bp, Artificial Sequence
  Synthetic oligonucleotide
agtgcacgggaaccacaataaggattgcat

SEQ ID NO: 207898 - DNA, 30 bp, Artificial Sequence
  Synthetic oligonucleotide
gagggataacaaaaggtggccctattgcat

SEQ ID NO: 207899 - DNA, 30 bp, Artificial Sequence
  Synthetic oligonucleotide
acttagtgagtgcagtttcggggcttgcat

SEQ ID NO: 207900 - DNA, 30 bp, Artificial Sequence
  Synthetic oligonucleotide
taaccaggacgatatttgttgttcttgcat

SEQ ID NO: 207901 - DNA, 30 bp, Artificial Sequence
  Synthetic oligonucleotide
gtgtatgggttgcgtcaggatgggttgcat

SEQ ID NO: 207902 - DNA, 30 bp, Artificial Sequence
  Synthetic oligonucleotide
ggacagagtcgtgtggctccatggttgcat

SEQ ID NO: 207903 - DNA, 30 bp, Artificial Sequence
  Synthetic oligonucleotide
tcagtctataccgcggggcaccgtttgcat

SEQ ID NO: 207904 - DNA, 30 bp, Artificial Sequence
  Synthetic oligonucleotide
aatggggggacgtttcgatattgaaatcat

SEQ ID NO: 207905 - DNA, 30 bp, Artificial Sequence
  Synthetic oligonucleotide
gctcgcttcctgggccccaagcacaatcat

SEQ ID NO: 207906 - DNA, 30 bp, Artificial Sequence
  Synthetic oligonucleotide
acgacttgtacatggcatcctaccaatcat

SEQ ID NO: 207907 - DNA, 31 bp, Artificial Sequence
  Synthetic oligonucleotide
gacgcgggacgtagcatctagagccaatcat

SEQ ID NO: 207908 - DNA, 30 bp, Artificial Sequence
  Synthetic oligonucleotide
aacataccgattggtaaggcaaggaatcat

SEQ ID NO: 207909 - DNA, 30 bp, Artificial Sequence
  Synthetic oligonucleotide
aaggcgctcgtctgcttgagtcggaatcat

SEQ ID NO: 207910 - DNA, 30 bp, Artificial Sequence
  Synthetic oligonucleotide
tgctgccctcagctttcacggttgaatcat

SEQ ID NO: 207911 - DNA, 30 bp, Artificial Sequence
  Synthetic oligonucleotide
gagggtatactgatggtaaagactaatcat

SEQ ID NO: 207912 - DNA, 30 bp, Artificial Sequence
  Synthetic oligonucleotide
acatgtcaatcaacaggatgtggtaatcat

SEQ ID NO: 207913 - DNA, 30 bp, Artificial Sequence
  Synthetic oligonucleotide
ctgccacactgggaagtcgagcaacatcat

SEQ ID NO: 207914 - DNA, 30 bp, Artificial Sequence
  Synthetic oligonucleotide
tagaagggaaccaaatcagtcgttcatcat

SEQ ID NO: 207915 - DNA, 30 bp, Artificial Sequence
  Synthetic oligonucleotide
ttatgtagcacggaccaaagacaagatcat

SEQ ID NO: 207916 - DNA, 30 bp, Artificial Sequence
  Synthetic oligonucleotide
agctcggactaaagcttaattcaagatcat

SEQ ID NO: 207917 - DNA, 30 bp, Artificial Sequence
  Synthetic oligonucleotide
cacaagatccgtcctgagacaggatatcat

SEQ ID NO: 207918 - DNA, 30 bp, Artificial Sequence
  Synthetic oligonucleotide
tcaagcgccccaacttcattacagtatcat

SEQ ID NO: 207919 - DNA, 30 bp, Artificial Sequence
  Synthetic oligonucleotide
taggccagagatgcatagatctagtatcat

SEQ ID NO: 207920 - DNA, 30 bp, Artificial Sequence
  Synthetic oligonucleotide
cccagtgacaaccgatccatagcttatcat

SEQ ID NO: 207921 - DNA, 30 bp, Artificial Sequence
  Synthetic oligonucleotide
caattgtcgaaacgggggactcacactcat

SEQ ID NO: 207922 - DNA, 30 bp, Artificial Sequence
  Synthetic oligonucleotide
ggtgcctttaagagggcattcaccactcat

SEQ ID NO: 207923 - DNA, 30 bp, Artificial Sequence
  Synthetic oligonucleotide
tttcttaggacaggtaggaacaatactcat

SEQ ID NO: 207924 - DNA, 30 bp, Artificial Sequence
  Synthetic oligonucleotide
ggcaagcttcctgctaggctggatactcat

SEQ ID NO: 207925 - DNA, 30 bp, Artificial Sequence
  Synthetic oligonucleotide
ggcccacatgaccaaggctgcaaacctcat

SEQ ID NO: 207926 - DNA, 30 bp, Artificial Sequence
  Synthetic oligonucleotide
tacgtcagtaggattcagcctaaccctcat

SEQ ID NO: 207927 - DNA, 30 bp, Artificial Sequence
  Synthetic oligonucleotide
ggggaacctcaggggctgcagtgtcctcat

SEQ ID NO: 207928 - DNA, 30 bp, Artificial Sequence
  Synthetic oligonucleotide
gaagtcataaattttcgcgatattcctcat

SEQ ID NO: 207929 - DNA, 30 bp, Artificial Sequence
  Synthetic oligonucleotide
gagtcattcagtaggcatatacttcctcat

SEQ ID NO: 207930 - DNA, 30 bp, Artificial Sequence
  Synthetic oligonucleotide
gtgtacactcagtacaaagcgcgagctcat

SEQ ID NO: 207931 - DNA, 30 bp, Artificial Sequence
  Synthetic oligonucleotide
ggcgcgtcatatcgcttgctgtgagctcat

SEQ ID NO: 207932 - DNA, 30 bp, Artificial Sequence
  Synthetic oligonucleotide
aacgacatggaatccatgtcaaccgctcat

SEQ ID NO: 207933 - DNA, 30 bp, Artificial Sequence
  Synthetic oligonucleotide
ttacctcgtccaaagtgtcagggggctcat

SEQ ID NO: 207934 - DNA, 30 bp, Artificial Sequence
  Synthetic oligonucleotide
cgatgggtcgcgtaattattcgaatctcat

SEQ ID NO: 207935 - DNA, 30 bp, Artificial Sequence
  Synthetic oligonucleotide
gggtacttggtataagggaaaccatctcat

SEQ ID NO: 207936 - DNA, 30 bp, Artificial Sequence
  Synthetic oligonucleotide
gggtgttaagccatatgtctgtcatctcat

SEQ ID NO: 207937 - DNA, 30 bp, Artificial Sequence
  Synthetic oligonucleotide
gtactgaatgagatgggttaacgatctcat

SEQ ID NO: 207938 - DNA, 30 bp, Artificial Sequence
  Synthetic oligonucleotide
gttactactcagaggaaccgcacctctcat

SEQ ID NO: 207939 - DNA, 30 bp, Artificial Sequence
  Synthetic oligonucleotide
aggggactgaggtactcctcagcctctcat

SEQ ID NO: 207940 - DNA, 30 bp, Artificial Sequence
  Synthetic oligonucleotide
accatagcggtgggggctcacacgtctcat

SEQ ID NO: 207941 - DNA, 30 bp, Artificial Sequence
  Synthetic oligonucleotide
gcgccccaagccctagaccttctgtctcat

SEQ ID NO: 207942 - DNA, 30 bp, Artificial Sequence
  Synthetic oligonucleotide
tgtgcttagttagttcggacacatagtcat

SEQ ID NO: 207943 - DNA, 30 bp, Artificial Sequence
  Synthetic oligonucleotide
gcatctagtctccaagagggtggtagtcat

SEQ ID NO: 207944 - DNA, 30 bp, Artificial Sequence
  Synthetic oligonucleotide
gggattaatattgactatgggagccgtcat

SEQ ID NO: 207945 - DNA, 30 bp, Artificial Sequence
  Synthetic oligonucleotide
gctggattcgttcaattacgggtgcgtcat

SEQ ID NO: 207946 - DNA, 30 bp, Artificial Sequence
  Synthetic oligonucleotide
aatgcatacatcaacagggaggttcgtcat

SEQ ID NO: 207947 - DNA, 30 bp, Artificial Sequence
  Synthetic oligonucleotide
tgatcggttgagggcaacatgcgaggtcat

SEQ ID NO: 207948 - DNA, 30 bp, Artificial Sequence
  Synthetic oligonucleotide
ccggtccccgtagaatatctgagcggtcat

SEQ ID NO: 207949 - DNA, 30 bp, Artificial Sequence
  Synthetic oligonucleotide
agcgtctatagtaggtcggatgggggtcat

SEQ ID NO: 207950 - DNA, 30 bp, Artificial Sequence
  Synthetic oligonucleotide
aagtgtcaactcatgcttggcagtggtcat

SEQ ID NO: 207951 - DNA, 30 bp, Artificial Sequence
  Synthetic oligonucleotide
cctctaatagcgtccccaagcggtggtcat

SEQ ID NO: 207952 - DNA, 30 bp, Artificial Sequence
  Synthetic oligonucleotide
aagtcacgtggagggtcgaacagatgtcat

SEQ ID NO: 207953 - DNA, 30 bp, Artificial Sequence
  Synthetic oligonucleotide
ccacgggggacgccgaacgcaatatgtcat

SEQ ID NO: 207954 - DNA, 30 bp, Artificial Sequence
  Synthetic oligonucleotide
ttcaacagacatgcctttgcgcactgtcat

SEQ ID NO: 207955 - DNA, 30 bp, Artificial Sequence
  Synthetic oligonucleotide
aaagattgcattaaccggcacgactgtcat

SEQ ID NO: 207956 - DNA, 30 bp, Artificial Sequence
  Synthetic oligonucleotide
ccctgaaagtttggtcttgttgtctgtcat

SEQ ID NO: 207957 - DNA, 30 bp, Artificial Sequence
  Synthetic oligonucleotide
gcttgcgcacatgcaaacccaaggtgtcat

SEQ ID NO: 207958 - DNA, 30 bp, Artificial Sequence
  Synthetic oligonucleotide
ttaataacgtgtgtggacggggggtgtcat

SEQ ID NO: 207959 - DNA, 30 bp, Artificial Sequence
  Synthetic oligonucleotide
ggcaagtcatctgagtgatctaggattcat

SEQ ID NO: 207960 - DNA, 30 bp, Artificial Sequence
  Synthetic oligonucleotide
tcgaggtcgcgttttccggtcatgattcat

SEQ ID NO: 207961 - DNA, 30 bp, Artificial Sequence
  Synthetic oligonucleotide
cataagagaacgaggaagcaacgtattcat

SEQ ID NO: 207962 - DNA, 30 bp, Artificial Sequence
  Synthetic oligonucleotide
gctccgtgcaaagcaccctaagtccttcat

SEQ ID NO: 207963 - DNA, 30 bp, Artificial Sequence
  Synthetic oligonucleotide
agtcgtgtaacatgtatgggagatcttcat

SEQ ID NO: 207964 - DNA, 30 bp, Artificial Sequence
  Synthetic oligonucleotide
ttaagcgataggggagcttaacaagttcat

SEQ ID NO: 207965 - DNA, 30 bp, Artificial Sequence
  Synthetic oligonucleotide
tcctcataagtaggttgaagtcttgttcat

SEQ ID NO: 207966 - DNA, 30 bp, Artificial Sequence
  Synthetic oligonucleotide
acataaggtgacggccttcgatagtttcat

SEQ ID NO: 207967 - DNA, 30 bp, Artificial Sequence
  Synthetic oligonucleotide
agtcattagagcgcaagcccgctaaaagat

SEQ ID NO: 207968 - DNA, 31 bp, Artificial Sequence
  Synthetic oligonucleotide
tttaacaaagagggatcaacacgccaaagat

SEQ ID NO: 207969 - DNA, 30 bp, Artificial Sequence
  Synthetic oligonucleotide
agactgtgcgacgtgatccttctcaaagat

SEQ ID NO: 207970 - DNA, 30 bp, Artificial Sequence
  Synthetic oligonucleotide
gatcccccatacactgaagaagcgaaagat

SEQ ID NO: 207971 - DNA, 30 bp, Artificial Sequence
  Synthetic oligonucleotide
acacgtgcatttgagaattctcggaaagat

SEQ ID NO: 207972 - DNA, 30 bp, Artificial Sequence
  Synthetic oligonucleotide
accgattccagcgcgcgggtcactaaagat

SEQ ID NO: 207973 - DNA, 30 bp, Artificial Sequence
  Synthetic oligonucleotide
ggtgccatgtacaaagattcgtggcaagat

SEQ ID NO: 207974 - DNA, 30 bp, Artificial Sequence
  Synthetic oligonucleotide
tgctcaactcttaagggatatactcaagat

SEQ ID NO: 207975 - DNA, 30 bp, Artificial Sequence
  Synthetic oligonucleotide
agctagcttcgtcctggtaaattagaagat

SEQ ID NO: 207976 - DNA, 30 bp, Artificial Sequence
  Synthetic oligonucleotide
tgtatgctagcccaacgccgatgtgaagat

SEQ ID NO: 207977 - DNA, 30 bp, Artificial Sequence
  Synthetic oligonucleotide
tctccctgggcaagaggtgacgtgtaagat

SEQ ID NO: 207978 - DNA, 30 bp, Artificial Sequence
  Synthetic oligonucleotide
gttggaaaaaagttgtcatcggtgtaagat

SEQ ID NO: 207979 - DNA, 29 bp, Artificial Sequence
  Synthetic oligonucleotide
gcatggtggtgataatgatgatttaagat

SEQ ID NO: 207980 - DNA, 30 bp, Artificial Sequence
  Synthetic oligonucleotide
ctgggtgcagccggcggtgcaagcacagat

SEQ ID NO: 207981 - DNA, 30 bp, Artificial Sequence
  Synthetic oligonucleotide
tccttatttccggggccccgtccgacagat

SEQ ID NO: 207982 - DNA, 30 bp, Artificial Sequence
  Synthetic oligonucleotide
ccactcctaataccggcttgtggcccagat

SEQ ID NO: 207983 - DNA, 30 bp, Artificial Sequence
  Synthetic oligonucleotide
agagatatggacttcgtcggatagccagat

SEQ ID NO: 207984 - DNA, 30 bp, Artificial Sequence
  Synthetic oligonucleotide
cgcgtaagcctatcgggcgcctagccagat

SEQ ID NO: 207985 - DNA, 30 bp, Artificial Sequence
  Synthetic oligonucleotide
agataggcgtggtgcatagtttggccagat

SEQ ID NO: 207986 - DNA, 30 bp, Artificial Sequence
  Synthetic oligonucleotide
aatacccgagaagagtgtcacgtagcagat

SEQ ID NO: 207987 - DNA, 30 bp, Artificial Sequence
  Synthetic oligonucleotide
actaatattaacagaatcaggagggcagat

SEQ ID NO: 207988 - DNA, 30 bp, Artificial Sequence
  Synthetic oligonucleotide
gatgtcctccgtcaactgcgtggggcagat

SEQ ID NO: 207989 - DNA, 30 bp, Artificial Sequence
  Synthetic oligonucleotide
atcagtacctagggcaaatcacttgcagat

SEQ ID NO: 207990 - DNA, 30 bp, Artificial Sequence
  Synthetic oligonucleotide
agtatgatgcggataacgagagtatcagat

SEQ ID NO: 207991 - DNA, 30 bp, Artificial Sequence
  Synthetic oligonucleotide
ggtggccttgcgaaatgtcggacctcagat

SEQ ID NO: 207992 - DNA, 30 bp, Artificial Sequence
  Synthetic oligonucleotide
caatgctacagcggtcaggatgggtcagat

SEQ ID NO: 207993 - DNA, 30 bp, Artificial Sequence
  Synthetic oligonucleotide
atcctggcaagaggtccctactgttcagat

SEQ ID NO: 207994 - DNA, 30 bp, Artificial Sequence
  Synthetic oligonucleotide
cccacttataagttctagattggaagagat

SEQ ID NO: 207995 - DNA, 30 bp, Artificial Sequence
  Synthetic oligonucleotide
ctggagtccagtgaaaaggttataagagat

SEQ ID NO: 207996 - DNA, 30 bp, Artificial Sequence
  Synthetic oligonucleotide
acttggtggcttcataaggcaaccagagat

SEQ ID NO: 207997 - DNA, 30 bp, Artificial Sequence
  Synthetic oligonucleotide
gggtgattcgtacaatatgaggtcagagat

SEQ ID NO: 207998 - DNA, 30 bp, Artificial Sequence
  Synthetic oligonucleotide
tccctgtagtgcggtgtgtaacagagagat

SEQ ID NO: 207999 - DNA, 30 bp, Artificial Sequence
  Synthetic oligonucleotide
ttaagccgacttttgtcctatcctagagat

SEQ ID NO: 208000 - DNA, 30 bp, Artificial Sequence
  Synthetic oligonucleotide
tactcatggactcccggctaacttagagat

SEQ ID NO: 208001 - DNA, 30 bp, Artificial Sequence
  Synthetic oligonucleotide
gccttacggaagggcggcccggcccgagat

SEQ ID NO: 208002 - DNA, 30 bp, Artificial Sequence
  Synthetic oligonucleotide
tcgaagaccgactcagttcgtgagcgagat

SEQ ID NO: 208003 - DNA, 30 bp, Artificial Sequence
  Synthetic oligonucleotide
tatgacaatatgcgggctaacccgcgagat

SEQ ID NO: 208004 - DNA, 30 bp, Artificial Sequence
  Synthetic oligonucleotide
acaatatgggacttggcatgctcaggagat

SEQ ID NO: 208005 - DNA, 30 bp, Artificial Sequence
  Synthetic oligonucleotide
atggcccaaaatcgctgttaagagggagat

SEQ ID NO: 208006 - DNA, 30 bp, Artificial Sequence
  Synthetic oligonucleotide
tatcatgcgaacagatggggttggggagat

SEQ ID NO: 208007 - DNA, 30 bp, Artificial Sequence
  Synthetic oligonucleotide
aggaagaagttcctactgttttatggagat

SEQ ID NO: 208008 - DNA, 30 bp, Artificial Sequence
  Synthetic oligonucleotide
taaggtttacgaagtgtttgcattggagat

SEQ ID NO: 208009 - DNA, 30 bp, Artificial Sequence
  Synthetic oligonucleotide
agaagaatattagacgttcttctatgagat

SEQ ID NO: 208010 - DNA, 30 bp, Artificial Sequence
  Synthetic oligonucleotide
gcatcggcggtggtaaaggaattctgagat

SEQ ID NO: 208011 - DNA, 30 bp, Artificial Sequence
  Synthetic oligonucleotide
gcaataccgtaacgcaccgttacttgagat

SEQ ID NO: 208012 - DNA, 30 bp, Artificial Sequence
  Synthetic oligonucleotide
ggatatcatctcctaaagcacatgatagat

SEQ ID NO: 208013 - DNA, 31 bp, Artificial Sequence
  Synthetic oligonucleotide
taacatacacacacgccattatgatatagat

SEQ ID NO: 208014 - DNA, 30 bp, Artificial Sequence
  Synthetic oligonucleotide
agagctagaccggtttaatatatgctagat

SEQ ID NO: 208015 - DNA, 30 bp, Artificial Sequence
  Synthetic oligonucleotide
gtactgaactgtggtgctaactgagtagat

SEQ ID NO: 208016 - DNA, 29 bp, Artificial Sequence
  Synthetic oligonucleotide
tgccataggaggagcccctgatcgtagat

SEQ ID NO: 208017 - DNA, 30 bp, Artificial Sequence
  Synthetic oligonucleotide
caaacggagtccaggccaccaatggtagat

SEQ ID NO: 208018 - DNA, 30 bp, Artificial Sequence
  Synthetic oligonucleotide
gcttttcgtcgccacagaacacgtgtagat

SEQ ID NO: 208019 - DNA, 30 bp, Artificial Sequence
  Synthetic oligonucleotide
actcttcactaaggtaagttgacattagat

SEQ ID NO: 208020 - DNA, 30 bp, Artificial Sequence
  Synthetic oligonucleotide
ctggggctatgcagaaggggttccttagat

SEQ ID NO: 208021 - DNA, 30 bp, Artificial Sequence
  Synthetic oligonucleotide
ccataatgtaccgatactcgcgtcttagat

SEQ ID NO: 208022 - DNA, 30 bp, Artificial Sequence
  Synthetic oligonucleotide
agagagaatgttaaaggaccaatgttagat

SEQ ID NO: 208023 - DNA, 30 bp, Artificial Sequence
  Synthetic oligonucleotide
tcgccttggagcgggtatatgccaaacgat

SEQ ID NO: 208024 - DNA, 30 bp, Artificial Sequence
  Synthetic oligonucleotide
gattagtcctatgtgaacgatctcaacgat

SEQ ID NO: 208025 - DNA, 30 bp, Artificial Sequence
  Synthetic oligonucleotide
gaataaatggttgtgggcgtagagaacgat

SEQ ID NO: 208026 - DNA, 30 bp, Artificial Sequence
  Synthetic oligonucleotide
ctcagggacattggaaggttatgacacgat

SEQ ID NO: 208027 - DNA, 30 bp, Artificial Sequence
  Synthetic oligonucleotide
ccaagcaggggttggactatgtctcacgat

SEQ ID NO: 208028 - DNA, 30 bp, Artificial Sequence
  Synthetic oligonucleotide
agacgactcgtcgtcattgttgaagacgat

SEQ ID NO: 208029 - DNA, 30 bp, Artificial Sequence
  Synthetic oligonucleotide
tactgaaacttttgcttcaagagagacgat

SEQ ID NO: 208030 - DNA, 30 bp, Artificial Sequence
  Synthetic oligonucleotide
agttgtacgtcccctgtgagttgggacgat

SEQ ID NO: 208031 - DNA, 29 bp, Artificial Sequence
  Synthetic oligonucleotide
atggattcagggcccatgacgtttacgat

SEQ ID NO: 208032 - DNA, 30 bp, Artificial Sequence
  Synthetic oligonucleotide
gtcggcggcccaaaacaatatggaaccgat

SEQ ID NO: 208033 - DNA, 30 bp, Artificial Sequence
  Synthetic oligonucleotide
ttaattgcaagttcctgcgaaaacaccgat

SEQ ID NO: 208034 - DNA, 30 bp, Artificial Sequence
  Synthetic oligonucleotide
ctgttaaagacaggccattcagggaccgat

SEQ ID NO: 208035 - DNA, 30 bp, Artificial Sequence
  Synthetic oligonucleotide
gcaaagggtgacattagcgcgcaacccgat

SEQ ID NO: 208036 - DNA, 30 bp, Artificial Sequence
  Synthetic oligonucleotide
cctgtgatcaaaggtggttacaccgccgat

SEQ ID NO: 208037 - DNA, 30 bp, Artificial Sequence
  Synthetic oligonucleotide
cctcagccataaggatcatgagaggccgat

SEQ ID NO: 208038 - DNA, 30 bp, Artificial Sequence
  Synthetic oligonucleotide
ttgaggacccaatctgcgtaaacctccgat

SEQ ID NO: 208039 - DNA, 30 bp, Artificial Sequence
  Synthetic oligonucleotide
gccgcggaacaaagggttcgctaaagcgat

SEQ ID NO: 208040 - DNA, 30 bp, Artificial Sequence
  Synthetic oligonucleotide
gcggcgagtagattatctaggccaagcgat

SEQ ID NO: 208041 - DNA, 30 bp, Artificial Sequence
  Synthetic oligonucleotide
gctgcaagagaagagccattcagaagcgat

SEQ ID NO: 208042 - DNA, 30 bp, Artificial Sequence
  Synthetic oligonucleotide
gatgggtgtgggcactgtctaatcagcgat

SEQ ID NO: 208043 - DNA, 30 bp, Artificial Sequence
  Synthetic oligonucleotide
gcgcacgtagggggtccacttgatagcgat

SEQ ID NO: 208044 - DNA, 30 bp, Artificial Sequence
  Synthetic oligonucleotide
ccaaataatgacgagatgtcacctagcgat

SEQ ID NO: 208045 - DNA, 30 bp, Artificial Sequence
  Synthetic oligonucleotide
tagggttcgggtcagaaactcgctagcgat

SEQ ID NO: 208046 - DNA, 30 bp, Artificial Sequence
  Synthetic oligonucleotide
tggaggagcttgttgggtaaaattagcgat

SEQ ID NO: 208047 - DNA, 30 bp, Artificial Sequence
  Synthetic oligonucleotide
aggatgtgggggggtggggagcttagcgat

SEQ ID NO: 208048 - DNA, 30 bp, Artificial Sequence
  Synthetic oligonucleotide
tgggaagagtgtgggtctctatggcgcgat

SEQ ID NO: 208049 - DNA, 30 bp, Artificial Sequence
  Synthetic oligonucleotide
ggataaacatgttcggtgcccacaggcgat

SEQ ID NO: 208050 - DNA, 30 bp, Artificial Sequence
  Synthetic oligonucleotide
agctgctaagcgctcgttcgtctaggcgat

SEQ ID NO: 208051 - DNA, 30 bp, Artificial Sequence
  Synthetic oligonucleotide
ttcaaaacggcgcacagggatcgatgcgat

SEQ ID NO: 208052 - DNA, 30 bp, Artificial Sequence
  Synthetic oligonucleotide
gggcgtcaacttctttatgtatagtgcgat

SEQ ID NO: 208053 - DNA, 30 bp, Artificial Sequence
  Synthetic oligonucleotide
agtgctctcgtaaacgttcattcgtgcgat

SEQ ID NO: 208054 - DNA, 30 bp, Artificial Sequence
  Synthetic oligonucleotide
gtgctcatttccggagggcttaattgcgat

SEQ ID NO: 208055 - DNA, 30 bp, Artificial Sequence
  Synthetic oligonucleotide
cacaccggtattggaggacagcattgcgat

SEQ ID NO: 208056 - DNA, 30 bp, Artificial Sequence
  Synthetic oligonucleotide
tcgtgcgctggcattaggaaaccgatcgat

SEQ ID NO: 208057 - DNA, 30 bp, Artificial Sequence
  Synthetic oligonucleotide
cggatctacatgcaattcgaaaggatcgat

SEQ ID NO: 208058 - DNA, 30 bp, Artificial Sequence
  Synthetic oligonucleotide
caaggtccggcgtgccctttacgcctcgat

SEQ ID NO: 208059 - DNA, 30 bp, Artificial Sequence
  Synthetic oligonucleotide
tggacacgttatgcctagccgggcctcgat

SEQ ID NO: 208060 - DNA, 30 bp, Artificial Sequence
  Synthetic oligonucleotide
aatctcctcggcttgaagaatgagctcgat

SEQ ID NO: 208061 - DNA, 30 bp, Artificial Sequence
  Synthetic oligonucleotide
gggaaagtccgtgcaacagcggacgtcgat

SEQ ID NO: 208062 - DNA, 30 bp, Artificial Sequence
  Synthetic oligonucleotide
atcataagtgcatctttaccggccgtcgat

SEQ ID NO: 208063 - DNA, 30 bp, Artificial Sequence
  Synthetic oligonucleotide
ggtggtcgctcactcaatgcgaaggtcgat

SEQ ID NO: 208064 - DNA, 30 bp, Artificial Sequence
  Synthetic oligonucleotide
ttccattggcggaggagtttacctgtcgat

SEQ ID NO: 208065 - DNA, 30 bp, Artificial Sequence
  Synthetic oligonucleotide
acgactgcctcaaaacacgcgcctgtcgat

SEQ ID NO: 208066 - DNA, 30 bp, Artificial Sequence
  Synthetic oligonucleotide
ctcgacataccgctgactagaaagttcgat

SEQ ID NO: 208067 - DNA, 30 bp, Artificial Sequence
  Synthetic oligonucleotide
ggtggcagcgtaacgctggacgaaaaggat

SEQ ID NO: 208068 - DNA, 30 bp, Artificial Sequence
  Synthetic oligonucleotide
ttgaccctacacgaggtcacgagaaaggat

SEQ ID NO: 208069 - DNA, 30 bp, Artificial Sequence
  Synthetic oligonucleotide
gacttaggcggttcatacgggtgaaaggat

SEQ ID NO: 208070 - DNA, 30 bp, Artificial Sequence
  Synthetic oligonucleotide
gacggtgcactcaatgtttcagtaaaggat

SEQ ID NO: 208071 - DNA, 30 bp, Artificial Sequence
  Synthetic oligonucleotide
gcttctgtcggtttaacatgagtaaaggat

SEQ ID NO: 208072 - DNA, 30 bp, Artificial Sequence
  Synthetic oligonucleotide
tagatgtcgacccctgattagcacaaggat

SEQ ID NO: 208073 - DNA, 30 bp, Artificial Sequence
  Synthetic oligonucleotide
taacttagtgtaactttaccaggcaaggat

SEQ ID NO: 208074 - DNA, 30 bp, Artificial Sequence
  Synthetic oligonucleotide
acatccgtactcttatgagtttgcaaggat

SEQ ID NO: 208075 - DNA, 30 bp, Artificial Sequence
  Synthetic oligonucleotide
aaagttgaatctgttatcacctagaaggat

SEQ ID NO: 208076 - DNA, 30 bp, Artificial Sequence
  Synthetic oligonucleotide
tagaaccggttagtacgccctgctaaggat

SEQ ID NO: 208077 - DNA, 30 bp, Artificial Sequence
  Synthetic oligonucleotide
gtacagctggtgcgcccttcaaaacaggat

SEQ ID NO: 208078 - DNA, 30 bp, Artificial Sequence
  Synthetic oligonucleotide
aacaagtatactgtcgcaagttgacaggat

SEQ ID NO: 208079 - DNA, 30 bp, Artificial Sequence
  Synthetic oligonucleotide
gcatcgtggcaacagtagttccggcaggat

SEQ ID NO: 208080 - DNA, 30 bp, Artificial Sequence
  Synthetic oligonucleotide
ctttggacgttctaagacctgaaggaggat

SEQ ID NO: 208081 - DNA, 30 bp, Artificial Sequence
  Synthetic oligonucleotide
gagccgcatgaccggaagagcctggaggat

SEQ ID NO: 208082 - DNA, 30 bp, Artificial Sequence
  Synthetic oligonucleotide
gcactcaccactttcaagaagacataggat

SEQ ID NO: 208083 - DNA, 30 bp, Artificial Sequence
  Synthetic oligonucleotide
tccatcatgcttcaggattgatcataggat

SEQ ID NO: 208084 - DNA, 30 bp, Artificial Sequence
  Synthetic oligonucleotide
cggcctactgcttgcctacccggataggat

SEQ ID NO: 208085 - DNA, 30 bp, Artificial Sequence
  Synthetic oligonucleotide
aaggtacagataatacctatggactaggat

SEQ ID NO: 208086 - DNA, 30 bp, Artificial Sequence
  Synthetic oligonucleotide
caggtatcaggcttgtctgaatcctaggat

SEQ ID NO: 208087 - DNA, 30 bp, Artificial Sequence
  Synthetic oligonucleotide
gtggcttgcatcttggggggcagctaggat

SEQ ID NO: 208088 - DNA, 30 bp, Artificial Sequence
  Synthetic oligonucleotide
gctggggtcagacagctcgtcatctaggat

SEQ ID NO: 208089 - DNA, 30 bp, Artificial Sequence
  Synthetic oligonucleotide
ccactgggtgtgcgcctaaattcgtaggat

SEQ ID NO: 208090 - DNA, 30 bp, Artificial Sequence
  Synthetic oligonucleotide
tgtcgagtttctggggataattggtaggat

SEQ ID NO: 208091 - DNA, 30 bp, Artificial Sequence
  Synthetic oligonucleotide
cgaaatgacgacaaacgcccgctgtaggat

SEQ ID NO: 208092 - DNA, 30 bp, Artificial Sequence
  Synthetic oligonucleotide
ggacggcgagtaggagaagggtattaggat

SEQ ID NO: 208093 - DNA, 30 bp, Artificial Sequence
  Synthetic oligonucleotide
ttatggtgttcatatgagaggccttaggat

SEQ ID NO: 208094 - DNA, 30 bp, Artificial Sequence
  Synthetic oligonucleotide
ttcaaaggattaccttatgggcatacggat

SEQ ID NO: 208095 - DNA, 30 bp, Artificial Sequence
  Synthetic oligonucleotide
gtagtactacgcgtggacaattttacggat

SEQ ID NO: 208096 - DNA, 30 bp, Artificial Sequence
  Synthetic oligonucleotide
aacagtacacgtgccactcgtgaaccggat

SEQ ID NO: 208097 - DNA, 30 bp, Artificial Sequence
  Synthetic oligonucleotide
ggaagacctgttaagcctccgttaccggat

SEQ ID NO: 208098 - DNA, 30 bp, Artificial Sequence
  Synthetic oligonucleotide
gtgcaagagcgacgcgacgccgtcccggat

SEQ ID NO: 208099 - DNA, 30 bp, Artificial Sequence
  Synthetic oligonucleotide
gcggtgtatgtatgataaagcatgccggat

SEQ ID NO: 208100 - DNA, 30 bp, Artificial Sequence
  Synthetic oligonucleotide
tgtccaagcgaaaaccggagctatccggat

SEQ ID NO: 208101 - DNA, 30 bp, Artificial Sequence
  Synthetic oligonucleotide
caaggagcattaagtacgtggtatccggat

SEQ ID NO: 208102 - DNA, 31 bp, Artificial Sequence
  Synthetic oligonucleotide
agactcagacgcgggcgtttaggaagcggat

SEQ ID NO: 208103 - DNA, 30 bp, Artificial Sequence
  Synthetic oligonucleotide
cccagacggcactaggtgagttaagcggat

SEQ ID NO: 208104 - DNA, 30 bp, Artificial Sequence
  Synthetic oligonucleotide
atcagagaggtccgtcaatggggagcggat

SEQ ID NO: 208105 - DNA, 30 bp, Artificial Sequence
  Synthetic oligonucleotide
cttgtgacctgtaaaaatcaattagcggat

SEQ ID NO: 208106 - DNA, 30 bp, Artificial Sequence
  Synthetic oligonucleotide
gagagctacaggtggcagtcaagcgcggat

SEQ ID NO: 208107 - DNA, 30 bp, Artificial Sequence
  Synthetic oligonucleotide
gtagggggtgctgaaaattgcattgcggat

SEQ ID NO: 208108 - DNA, 30 bp, Artificial Sequence
  Synthetic oligonucleotide
tgcacggagcagaaggcgcagttgtcggat

SEQ ID NO: 208109 - DNA, 30 bp, Artificial Sequence
  Synthetic oligonucleotide
ctatggataaagatggcgtcacgttcggat

SEQ ID NO: 208110 - DNA, 30 bp, Artificial Sequence
  Synthetic oligonucleotide
actgatctatgaagcttggctgaaagggat

SEQ ID NO: 208111 - DNA, 30 bp, Artificial Sequence
  Synthetic oligonucleotide
agagggaaaggacgtagtgattgtagggat

SEQ ID NO: 208112 - DNA, 30 bp, Artificial Sequence
  Synthetic oligonucleotide
gaaacgtagggttccgtacgcatacgggat

SEQ ID NO: 208113 - DNA, 30 bp, Artificial Sequence
  Synthetic oligonucleotide
gtgaacccgcgttacatagtcgtacgggat

SEQ ID NO: 208114 - DNA, 30 bp, Artificial Sequence
  Synthetic oligonucleotide
tcctgggccagtctctttcatgtccgggat

SEQ ID NO: 208115 - DNA, 30 bp, Artificial Sequence
  Synthetic oligonucleotide
tcaaaatgcatagcctctccgtaaggggat

SEQ ID NO: 208116 - DNA, 30 bp, Artificial Sequence
  Synthetic oligonucleotide
ctctcccggtgcaaaaggagggagggggat

SEQ ID NO: 208117 - DNA, 30 bp, Artificial Sequence
  Synthetic oligonucleotide
ggagtatactccagaggggtaacgggggat

SEQ ID NO: 208118 - DNA, 30 bp, Artificial Sequence
  Synthetic oligonucleotide
tcggatgcgtaacagctatcgatgggggat

SEQ ID NO: 208119 - DNA, 30 bp, Artificial Sequence
  Synthetic oligonucleotide
gggtatcggtatcgagtcactgtgggggat

SEQ ID NO: 208120 - DNA, 30 bp, Artificial Sequence
  Synthetic oligonucleotide
ggttgacccatataaccatgtgtgggggat

SEQ ID NO: 208121 - DNA, 30 bp, Artificial Sequence
  Synthetic oligonucleotide
aggttcaaatccgggtgtacaagtggggat

SEQ ID NO: 208122 - DNA, 30 bp, Artificial Sequence
  Synthetic oligonucleotide
ggtagaatctgccaacttgcggtatgggat

SEQ ID NO: 208123 - DNA, 30 bp, Artificial Sequence
  Synthetic oligonucleotide
cataggatggggagcaacatgccgtgggat

SEQ ID NO: 208124 - DNA, 30 bp, Artificial Sequence
  Synthetic oligonucleotide
atcgcaaaattccaccactcagtgtgggat

SEQ ID NO: 208125 - DNA, 30 bp, Artificial Sequence
  Synthetic oligonucleotide
ggtgcactcgtcaacagtctggtgtgggat

SEQ ID NO: 208126 - DNA, 30 bp, Artificial Sequence
  Synthetic oligonucleotide
aagcttggatacggttctaggttgtgggat

SEQ ID NO: 208127 - DNA, 30 bp, Artificial Sequence
  Synthetic oligonucleotide
gggagagttttacaaagacccaattgggat

SEQ ID NO: 208128 - DNA, 30 bp, Artificial Sequence
  Synthetic oligonucleotide
caaagggatagatagacgggtggttgggat

SEQ ID NO: 208129 - DNA, 30 bp, Artificial Sequence
  Synthetic oligonucleotide
ggtcaccgtccaggagggactacaatggat

SEQ ID NO: 208130 - DNA, 30 bp, Artificial Sequence
  Synthetic oligonucleotide
gttatcacgagactcggtgtattaatggat

SEQ ID NO: 208131 - DNA, 30 bp, Artificial Sequence
  Synthetic oligonucleotide
gcgtagatcgtattggttcaatccatggat

SEQ ID NO: 208132 - DNA, 30 bp, Artificial Sequence
  Synthetic oligonucleotide
agggattctatttgaagaggaggcatggat

SEQ ID NO: 208133 - DNA, 30 bp, Artificial Sequence
  Synthetic oligonucleotide
aacataggggcatgccgtaacccactggat

SEQ ID NO: 208134 - DNA, 30 bp, Artificial Sequence
  Synthetic oligonucleotide
gcaggcagaggaatagaatgatgcctggat

SEQ ID NO: 208135 - DNA, 30 bp, Artificial Sequence
  Synthetic oligonucleotide
tgttctaataaggtggcctcatggctggat

SEQ ID NO: 208136 - DNA, 30 bp, Artificial Sequence
  Synthetic oligonucleotide
ttgtggggagtcctgtgcgatggtctggat

SEQ ID NO: 208137 - DNA, 30 bp, Artificial Sequence
  Synthetic oligonucleotide
ccattagcgtgttacttataaattctggat

SEQ ID NO: 208138 - DNA, 30 bp, Artificial Sequence
  Synthetic oligonucleotide
cgcggtgatgtcagcgaccacaccgtggat

SEQ ID NO: 208139 - DNA, 31 bp, Artificial Sequence
  Synthetic oligonucleotide
aactacttagagtcgcggtatctcggtggat

SEQ ID NO: 208140 - DNA, 30 bp, Artificial Sequence
  Synthetic oligonucleotide
cgccgcccgtgtgtcgtgagtaacttggat

SEQ ID NO: 208141 - DNA, 30 bp, Artificial Sequence
  Synthetic oligonucleotide
tgggtacgactgatgatcgttagcttggat

SEQ ID NO: 208142 - DNA, 30 bp, Artificial Sequence
  Synthetic oligonucleotide
actggcaccaaggaatggagtacaaatgat

SEQ ID NO: 208143 - DNA, 30 bp, Artificial Sequence
  Synthetic oligonucleotide
agtatcagagtacacacgctcagaaatgat

SEQ ID NO: 208144 - DNA, 30 bp, Artificial Sequence
  Synthetic oligonucleotide
acaagcgccttaggacaggcatgaaatgat

SEQ ID NO: 208145 - DNA, 30 bp, Artificial Sequence
  Synthetic oligonucleotide
acggcacatcatatctaccccctaaatgat

SEQ ID NO: 208146 - DNA, 30 bp, Artificial Sequence
  Synthetic oligonucleotide
acagtggatctgtgaatagcatcgaatgat

SEQ ID NO: 208147 - DNA, 30 bp, Artificial Sequence
  Synthetic oligonucleotide
accgggagctaacctaattggcttaatgat

SEQ ID NO: 208148 - DNA, 30 bp, Artificial Sequence
  Synthetic oligonucleotide
ctatcagaagccgtatagggatttaatgat

SEQ ID NO: 208149 - DNA, 30 bp, Artificial Sequence
  Synthetic oligonucleotide
ggagtgaagtggcgattagaccaccatgat

SEQ ID NO: 208150 - DNA, 30 bp, Artificial Sequence
  Synthetic oligonucleotide
cgatgactcactgcgatgatgcgcgatgat

SEQ ID NO: 208151 - DNA, 30 bp, Artificial Sequence
  Synthetic oligonucleotide
tcacaaggtaatgagaagcggtatgatgat

SEQ ID NO: 208152 - DNA, 30 bp, Artificial Sequence
  Synthetic oligonucleotide
tagcgtaagtcaagtgatccacgtgatgat

SEQ ID NO: 208153 - DNA, 30 bp, Artificial Sequence
  Synthetic oligonucleotide
tgcacctggaatgtcctaggagtatatgat

SEQ ID NO: 208154 - DNA, 30 bp, Artificial Sequence
  Synthetic oligonucleotide
tctgtcccagtctaacaactgtgctatgat

SEQ ID NO: 208155 - DNA, 30 bp, Artificial Sequence
  Synthetic oligonucleotide
gttcaccgtatacttaaggcaatctatgat

SEQ ID NO: 208156 - DNA, 30 bp, Artificial Sequence
  Synthetic oligonucleotide
cttgaactcggtcgtcgcgtgcggtatgat

SEQ ID NO: 208157 - DNA, 30 bp, Artificial Sequence
  Synthetic oligonucleotide
agttagagattacgcgacggccacactgat

SEQ ID NO: 208158 - DNA, 30 bp, Artificial Sequence
  Synthetic oligonucleotide
cacaactgacagaccaactcttctactgat

SEQ ID NO: 208159 - DNA, 30 bp, Artificial Sequence
  Synthetic oligonucleotide
aaaccaagggccggacacgcgtttactgat

SEQ ID NO: 208160 - DNA, 30 bp, Artificial Sequence
  Synthetic oligonucleotide
tctggtacctatggcgggaatatacctgat

SEQ ID NO: 208161 - DNA, 30 bp, Artificial Sequence
  Synthetic oligonucleotide
cgacctccgattcagttgcaaacgcctgat

SEQ ID NO: 208162 - DNA, 30 bp, Artificial Sequence
  Synthetic oligonucleotide
tagttgggcatgtatctgagctatcctgat

SEQ ID NO: 208163 - DNA, 30 bp, Artificial Sequence
  Synthetic oligonucleotide
gacgaaaaaactctgtgacctcgtcctgat

SEQ ID NO: 208164 - DNA, 30 bp, Artificial Sequence
  Synthetic oligonucleotide
atagatagtcccgggtaaagcccagctgat

SEQ ID NO: 208165 - DNA, 30 bp, Artificial Sequence
  Synthetic oligonucleotide
gtcagtattgagattggctgcggggctgat

SEQ ID NO: 208166 - DNA, 30 bp, Artificial Sequence
  Synthetic oligonucleotide
aaagggtgtgtcaactagtctttggctgat

SEQ ID NO: 208167 - DNA, 30 bp, Artificial Sequence
  Synthetic oligonucleotide
gccggatttgtggagttctgctatgctgat

SEQ ID NO: 208168 - DNA, 30 bp, Artificial Sequence
  Synthetic oligonucleotide
tctcggtcaggagatactgtggttgctgat

SEQ ID NO: 208169 - DNA, 30 bp, Artificial Sequence
  Synthetic oligonucleotide
cctgtgcgctctgggacgtggttctctgat

SEQ ID NO: 208170 - DNA, 30 bp, Artificial Sequence
  Synthetic oligonucleotide
aacaagcatcgtcctcccatttcgtctgat

SEQ ID NO: 208171 - DNA, 30 bp, Artificial Sequence
  Synthetic oligonucleotide
ggcgaaatcataggcctatgaaccagtgat

SEQ ID NO: 208172 - DNA, 30 bp, Artificial Sequence
  Synthetic oligonucleotide
tgctcggatcgtgactcattgtgcagtgat

SEQ ID NO: 208173 - DNA, 30 bp, Artificial Sequence
  Synthetic oligonucleotide
aaccacttacgggatacgcgggagagtgat

SEQ ID NO: 208174 - DNA, 30 bp, Artificial Sequence
  Synthetic oligonucleotide
aggtggccacacgcggtctaagcgagtgat

SEQ ID NO: 208175 - DNA, 30 bp, Artificial Sequence
  Synthetic oligonucleotide
acacttctccaaaagggtctgcggagtgat

SEQ ID NO: 208176 - DNA, 30 bp, Artificial Sequence
  Synthetic oligonucleotide
tactaactataggggggagaagctagtgat

SEQ ID NO: 208177 - DNA, 30 bp, Artificial Sequence
  Synthetic oligonucleotide
aggacaagtccttcggcagtatctagtgat

SEQ ID NO: 208178 - DNA, 30 bp, Artificial Sequence
  Synthetic oligonucleotide
cggaagtctccacgagcatgaggacgtgat

SEQ ID NO: 208179 - DNA, 30 bp, Artificial Sequence
  Synthetic oligonucleotide
tgtctctatgacccgtaaatagagcgtgat

SEQ ID NO: 208180 - DNA, 30 bp, Artificial Sequence
  Synthetic oligonucleotide
tatcactatagctagctcgcacggcgtgat

SEQ ID NO: 208181 - DNA, 30 bp, Artificial Sequence
  Synthetic oligonucleotide
gggggtcgtagaagtgtcgttataggtgat

SEQ ID NO: 208182 - DNA, 30 bp, Artificial Sequence
  Synthetic oligonucleotide
gtcccaatctatcaatatagcagcggtgat

SEQ ID NO: 208183 - DNA, 30 bp, Artificial Sequence
  Synthetic oligonucleotide
gcggctgcgggtgcgtatcacttcggtgat

SEQ ID NO: 208184 - DNA, 30 bp, Artificial Sequence
  Synthetic oligonucleotide
gaaattaggtggcaatcggtcagatgtgat

SEQ ID NO: 208185 - DNA, 30 bp, Artificial Sequence
  Synthetic oligonucleotide
gtcatcataacttccagaatgtgatgtgat

SEQ ID NO: 208186 - DNA, 30 bp, Artificial Sequence
  Synthetic oligonucleotide
ggaatatgtaagcactacgaatactgtgat

SEQ ID NO: 208187 - DNA, 30 bp, Artificial Sequence
  Synthetic oligonucleotide
gactaatgaggctcggagagaatctgtgat

SEQ ID NO: 208188 - DNA, 30 bp, Artificial Sequence
  Synthetic oligonucleotide
gttcaggatgatccaccctgctagtgtgat

SEQ ID NO: 208189 - DNA, 30 bp, Artificial Sequence
  Synthetic oligonucleotide
gcattaccgggtcgtctgaactgaattgat

SEQ ID NO: 208190 - DNA, 30 bp, Artificial Sequence
  Synthetic oligonucleotide
acgcgggagattgactcattgtggcttgat

SEQ ID NO: 208191 - DNA, 30 bp, Artificial Sequence
  Synthetic oligonucleotide
caaagtattcctgcaggtttagaggttgat

SEQ ID NO: 208192 - DNA, 30 bp, Artificial Sequence
  Synthetic oligonucleotide
ggccgatgttcgacattcgatcgatttgat

SEQ ID NO: 208193 - DNA, 30 bp, Artificial Sequence
  Synthetic oligonucleotide
ttactcggccctcttctcgctacctttgat

SEQ ID NO: 208194 - DNA, 30 bp, Artificial Sequence
  Synthetic oligonucleotide
gtgggcggttcattaaggaggtggtttgat

SEQ ID NO: 208195 - DNA, 30 bp, Artificial Sequence
  Synthetic oligonucleotide
tatggtacacggtatcccggactaaaatat

SEQ ID NO: 208196 - DNA, 30 bp, Artificial Sequence
  Synthetic oligonucleotide
cagtctgcggtgtgaaaatgacataaatat

SEQ ID NO: 208197 - DNA, 30 bp, Artificial Sequence
  Synthetic oligonucleotide
catacaggatcgcgccccggggctaaatat

SEQ ID NO: 208198 - DNA, 30 bp, Artificial Sequence
  Synthetic oligonucleotide
tgtcatcgtgtaaatgtggcttgtaaatat

SEQ ID NO: 208199 - DNA, 30 bp, Artificial Sequence
  Synthetic oligonucleotide
tcaaggcgagtctgtagtgatggacaatat

SEQ ID NO: 208200 - DNA, 30 bp, Artificial Sequence
  Synthetic oligonucleotide
tgcgaaccccgccggcggatagtacaatat

SEQ ID NO: 208201 - DNA, 30 bp, Artificial Sequence
  Synthetic oligonucleotide
tggagggcgagatcagacgggtaccaatat

SEQ ID NO: 208202 - DNA, 30 bp, Artificial Sequence
  Synthetic oligonucleotide
agtgaatcaatgtgcccggcagcgcaatat

SEQ ID NO: 208203 - DNA, 30 bp, Artificial Sequence
  Synthetic oligonucleotide
gacactagctacgactgcgttgccgaatat

SEQ ID NO: 208204 - DNA, 30 bp, Artificial Sequence
  Synthetic oligonucleotide
aaacatccgggatcacggtcaggcgaatat

SEQ ID NO: 208205 - DNA, 30 bp, Artificial Sequence
  Synthetic oligonucleotide
gcgtgacaggcattcacttcctgcgaatat

SEQ ID NO: 208206 - DNA, 30 bp, Artificial Sequence
  Synthetic oligonucleotide
atacagtcctaaaaggtcgaagtcgaatat

SEQ ID NO: 208207 - DNA, 30 bp, Artificial Sequence
  Synthetic oligonucleotide
aaccgcagagttaacccgcatcaggaatat

SEQ ID NO: 208208 - DNA, 30 bp, Artificial Sequence
  Synthetic oligonucleotide
aggcgattataatcccatatggatgaatat

SEQ ID NO: 208209 - DNA, 30 bp, Artificial Sequence
  Synthetic oligonucleotide
agtcggattgcaacttctcagtatgaatat

SEQ ID NO: 208210 - DNA, 30 bp, Artificial Sequence
  Synthetic oligonucleotide
tactcctcagattgcaatgacagataatat

SEQ ID NO: 208211 - DNA, 30 bp, Artificial Sequence
  Synthetic oligonucleotide
tcctaataggcaagagtcgataggtaatat

SEQ ID NO: 208212 - DNA, 30 bp, Artificial Sequence
  Synthetic oligonucleotide
gaggggtaccggtaacacgcgagcacatat

SEQ ID NO: 208213 - DNA, 30 bp, Artificial Sequence
  Synthetic oligonucleotide
atggttgcctgtaactggcaaaggacatat

SEQ ID NO: 208214 - DNA, 30 bp, Artificial Sequence
  Synthetic oligonucleotide
cgtgtccaaagcgcgtctgctgtcccatat

SEQ ID NO: 208215 - DNA, 30 bp, Artificial Sequence
  Synthetic oligonucleotide
acttagaaaccgttagcgccggcgccatat

SEQ ID NO: 208216 - DNA, 30 bp, Artificial Sequence
  Synthetic oligonucleotide
agacttgaggggtgatctaggttgccatat

SEQ ID NO: 208217 - DNA, 30 bp, Artificial Sequence
  Synthetic oligonucleotide
tggtcagctcggtgtgcttcgacagcatat

SEQ ID NO: 208218 - DNA, 30 bp, Artificial Sequence
  Synthetic oligonucleotide
tcggtgggaacataacttgattgagcatat

SEQ ID NO: 208219 - DNA, 30 bp, Artificial Sequence
  Synthetic oligonucleotide
tcactagtggacgttctattcaaggcatat

SEQ ID NO: 208220 - DNA, 30 bp, Artificial Sequence
  Synthetic oligonucleotide
cacttgaacctaagcatgtataaggcatat

SEQ ID NO: 208221 - DNA, 30 bp, Artificial Sequence
  Synthetic oligonucleotide
gcgaccaaatgggacttggccgatgcatat

SEQ ID NO: 208222 - DNA, 30 bp, Artificial Sequence
  Synthetic oligonucleotide
tagctgaagtctccgtgtcggtttgcatat

SEQ ID NO: 208223 - DNA, 30 bp, Artificial Sequence
  Synthetic oligonucleotide
aagcctcctaggtaaatctccacatcatat

SEQ ID NO: 208224 - DNA, 30 bp, Artificial Sequence
  Synthetic oligonucleotide
cataagtaaccgtggactaatcattcatat

SEQ ID NO: 208225 - DNA, 30 bp, Artificial Sequence
  Synthetic oligonucleotide
acaaggtccactgtgctccttgattcatat

SEQ ID NO: 208226 - DNA, 30 bp, Artificial Sequence
  Synthetic oligonucleotide
cagagcgatcgcatctttcgtgcttcatat

SEQ ID NO: 208227 - DNA, 30 bp, Artificial Sequence
  Synthetic oligonucleotide
ttgcgaggagatgacaacacattaagatat

SEQ ID NO: 208228 - DNA, 30 bp, Artificial Sequence
  Synthetic oligonucleotide
atgcaaatgagtcacgctgcagacagatat

SEQ ID NO: 208229 - DNA, 30 bp, Artificial Sequence
  Synthetic oligonucleotide
tcgctcggatgaaggtaagctggcagatat

SEQ ID NO: 208230 - DNA, 30 bp, Artificial Sequence
  Synthetic oligonucleotide
taaaccaagttagcaggaccgttcagatat

SEQ ID NO: 208231 - DNA, 30 bp, Artificial Sequence
  Synthetic oligonucleotide
taaaccggagtcgcttacgtctagagatat

SEQ ID NO: 208232 - DNA, 30 bp, Artificial Sequence
  Synthetic oligonucleotide
tcatagagtaatgctctcattatgagatat

SEQ ID NO: 208233 - DNA, 30 bp, Artificial Sequence
  Synthetic oligonucleotide
ggccagcgtggcgtcttacggctgagatat

SEQ ID NO: 208234 - DNA, 30 bp, Artificial Sequence
  Synthetic oligonucleotide
ggcgctcgtgttcgaggatatactagatat

SEQ ID NO: 208235 - DNA, 30 bp, Artificial Sequence
  Synthetic oligonucleotide
gggactctgaggcgtctggggattagatat

SEQ ID NO: 208236 - DNA, 30 bp, Artificial Sequence
  Synthetic oligonucleotide
agactcgtagtatgcggaggaccccgatat

SEQ ID NO: 208237 - DNA, 30 bp, Artificial Sequence
  Synthetic oligonucleotide
aagcctatggctcaggtaaggcaaggatat

SEQ ID NO: 208238 - DNA, 30 bp, Artificial Sequence
  Synthetic oligonucleotide
tgaggacaaggagaatcgttcacgggatat

SEQ ID NO: 208239 - DNA, 30 bp, Artificial Sequence
  Synthetic oligonucleotide
aatactaacagaagtgggtcgtggggatat

SEQ ID NO: 208240 - DNA, 30 bp, Artificial Sequence
  Synthetic oligonucleotide
agctcgaatctgtgtgtacggtttggatat

SEQ ID NO: 208241 - DNA, 30 bp, Artificial Sequence
  Synthetic oligonucleotide
gcttgcacacgctgattccggttctgatat

SEQ ID NO: 208242 - DNA, 31 bp, Artificial Sequence
  Synthetic oligonucleotide
aatgaacaggatcttgacttaccattgatat

SEQ ID NO: 208243 - DNA, 30 bp, Artificial Sequence
  Synthetic oligonucleotide
gatgtgtcgcggagagatttcgtaatatat

SEQ ID NO: 208244 - DNA, 30 bp, Artificial Sequence
  Synthetic oligonucleotide
tttgggagaattagtctgcgacacatatat

SEQ ID NO: 208245 - DNA, 30 bp, Artificial Sequence
  Synthetic oligonucleotide
cacggatcgcatatttcaaaggccatatat

SEQ ID NO: 208246 - DNA, 30 bp, Artificial Sequence
  Synthetic oligonucleotide
attgcgtggcaacattgacacccgatatat

SEQ ID NO: 208247 - DNA, 30 bp, Artificial Sequence
  Synthetic oligonucleotide
gcaagcaacggcatcggcggcattatatat

SEQ ID NO: 208248 - DNA, 30 bp, Artificial Sequence
  Synthetic oligonucleotide
acgggccgcaacgtgccgcgaatactatat

SEQ ID NO: 208249 - DNA, 30 bp, Artificial Sequence
  Synthetic oligonucleotide
ccgtgagataaaaaacaggtagatctatat

SEQ ID NO: 208250 - DNA, 30 bp, Artificial Sequence
  Synthetic oligonucleotide
ccgaagtcgggggaccggaaatgtctatat

SEQ ID NO: 208251 - DNA, 30 bp, Artificial Sequence
  Synthetic oligonucleotide
tcataggggcaaatgccctgaattctatat

SEQ ID NO: 208252 - DNA, 30 bp, Artificial Sequence
  Synthetic oligonucleotide
agacacaaatgttgacctgcgttagtatat

SEQ ID NO: 208253 - DNA, 30 bp, Artificial Sequence
  Synthetic oligonucleotide
caacacgtggtaaggcgcccgatcgtatat

SEQ ID NO: 208254 - DNA, 30 bp, Artificial Sequence
  Synthetic oligonucleotide
caagtctatggtatgaaaaaactcgtatat

SEQ ID NO: 208255 - DNA, 30 bp, Artificial Sequence
  Synthetic oligonucleotide
aacggtgggtctagggcagtttcggtatat

SEQ ID NO: 208256 - DNA, 30 bp, Artificial Sequence
  Synthetic oligonucleotide
aagggtgatctacacataaatttggtatat

SEQ ID NO: 208257 - DNA, 30 bp, Artificial Sequence
  Synthetic oligonucleotide
tagcacgcatgcttgagtatcgctgtatat

SEQ ID NO: 208258 - DNA, 30 bp, Artificial Sequence
  Synthetic oligonucleotide
agtagaccacaggccataaaatctgtatat

SEQ ID NO: 208259 - DNA, 30 bp, Artificial Sequence
  Synthetic oligonucleotide
ccgacgcctcacagggaagcagacttatat

SEQ ID NO: 208260 - DNA, 30 bp, Artificial Sequence
  Synthetic oligonucleotide
tcggggacgagcctgaaaaggaccttatat

SEQ ID NO: 208261 - DNA, 30 bp, Artificial Sequence
  Synthetic oligonucleotide
tacgagcaacgaagggatggcaatttatat

SEQ ID NO: 208262 - DNA, 30 bp, Artificial Sequence
  Synthetic oligonucleotide
agcagcgtatccgaccaaatacaaaactat

SEQ ID NO: 208263 - DNA, 30 bp, Artificial Sequence
  Synthetic oligonucleotide
ggccagtagagagcacttctataacactat

SEQ ID NO: 208264 - DNA, 30 bp, Artificial Sequence
  Synthetic oligonucleotide
ttcctggggacagccggaggggcacactat

SEQ ID NO: 208265 - DNA, 30 bp, Artificial Sequence
  Synthetic oligonucleotide
acgaagatacaccttgggagcttacactat

SEQ ID NO: 208266 - DNA, 30 bp, Artificial Sequence
  Synthetic oligonucleotide
tcttcaccgggtatgagagctgcgcactat

SEQ ID NO: 208267 - DNA, 30 bp, Artificial Sequence
  Synthetic oligonucleotide
cgtggaagctagccggccggttaagactat

SEQ ID NO: 208268 - DNA, 30 bp, Artificial Sequence
  Synthetic oligonucleotide
cttatggtcacagtagttgttcacgactat

SEQ ID NO: 208269 - DNA, 30 bp, Artificial Sequence
  Synthetic oligonucleotide
agatgcggcgggaggttgtcgatcgactat

SEQ ID NO: 208270 - DNA, 30 bp, Artificial Sequence
  Synthetic oligonucleotide
aaaaccgcaaccacagaggcccctgactat

SEQ ID NO: 208271 - DNA, 30 bp, Artificial Sequence
  Synthetic oligonucleotide
gtgaggggctgtacgcgtctacgtgactat

SEQ ID NO: 208272 - DNA, 30 bp, Artificial Sequence
  Synthetic oligonucleotide
tgttcatgaggtcaattcggggtatactat

SEQ ID NO: 208273 - DNA, 30 bp, Artificial Sequence
  Synthetic oligonucleotide
cgcaatagagtaagaataatgtaaacctat

SEQ ID NO: 208274 - DNA, 30 bp, Artificial Sequence
  Synthetic oligonucleotide
agtcaaaccggcagcataaaaagaacctat

SEQ ID NO: 208275 - DNA, 30 bp, Artificial Sequence
  Synthetic oligonucleotide
aatggatgtgataccgcggaggcgacctat

SEQ ID NO: 208276 - DNA, 31 bp, Artificial Sequence
  Synthetic oligonucleotide
ttggccagagacctacaggatttggacctat

SEQ ID NO: 208277 - DNA, 30 bp, Artificial Sequence
  Synthetic oligonucleotide
gtcttatcctgtttgcttcctgtcccctat

SEQ ID NO: 208278 - DNA, 29 bp, Artificial Sequence
  Synthetic oligonucleotide
aggagcaaaactgtatattcgacgcctat

SEQ ID NO: 208279 - DNA, 30 bp, Artificial Sequence
  Synthetic oligonucleotide
tcagccgtgtacggcgagaggcgtgcctat

SEQ ID NO: 208280 - DNA, 30 bp, Artificial Sequence
  Synthetic oligonucleotide
tcgtcactcgatcatgggcgcggtgcctat

SEQ ID NO: 208281 - DNA, 30 bp, Artificial Sequence
  Synthetic oligonucleotide
gatcgggctcaaacgcggagcgcgtcctat

SEQ ID NO: 208282 - DNA, 30 bp, Artificial Sequence
  Synthetic oligonucleotide
agaccaagcaaattcgtattcgattcctat

SEQ ID NO: 208283 - DNA, 30 bp, Artificial Sequence
  Synthetic oligonucleotide
gtgtgtcgtcttaagcaggtggtaagctat

SEQ ID NO: 208284 - DNA, 30 bp, Artificial Sequence
  Synthetic oligonucleotide
ccgacaaagctttatcgaatatagagctat

SEQ ID NO: 208285 - DNA, 30 bp, Artificial Sequence
  Synthetic oligonucleotide
aggtggggcttcctccgtctcgatagctat

SEQ ID NO: 208286 - DNA, 30 bp, Artificial Sequence
  Synthetic oligonucleotide
ggaactcttaagggtttcgtctctagctat

SEQ ID NO: 208287 - DNA, 30 bp, Artificial Sequence
  Synthetic oligonucleotide
acgtatcttaatcagactaaccgtagctat

SEQ ID NO: 208288 - DNA, 30 bp, Artificial Sequence
  Synthetic oligonucleotide
ataagtaggaaaatacgcgaagtccgctat

SEQ ID NO: 208289 - DNA, 30 bp, Artificial Sequence
  Synthetic oligonucleotide
gaaggacgccgtgccgacttatagcgctat

SEQ ID NO: 208290 - DNA, 30 bp, Artificial Sequence
  Synthetic oligonucleotide
tagctcgaaggtagtccaggttgaggctat

SEQ ID NO: 208291 - DNA, 30 bp, Artificial Sequence
  Synthetic oligonucleotide
acgcataatagaggagtaggttctggctat

SEQ ID NO: 208292 - DNA, 30 bp, Artificial Sequence
  Synthetic oligonucleotide
agattgtttcgaaattcgatttttggctat

SEQ ID NO: 208293 - DNA, 30 bp, Artificial Sequence
  Synthetic oligonucleotide
aagcaaagattttgcgtgaaaggctgctat

SEQ ID NO: 208294 - DNA, 30 bp, Artificial Sequence
  Synthetic oligonucleotide
gatagagtagttgcttagacaacgtgctat

SEQ ID NO: 208295 - DNA, 30 bp, Artificial Sequence
  Synthetic oligonucleotide
cgtagcagacgatctctggggaggtgctat

SEQ ID NO: 208296 - DNA, 30 bp, Artificial Sequence
  Synthetic oligonucleotide
ttacagcgtctggtgatgttgcattgctat

SEQ ID NO: 208297 - DNA, 30 bp, Artificial Sequence
  Synthetic oligonucleotide
gagctataattggttagctctacttgctat

SEQ ID NO: 208298 - DNA, 30 bp, Artificial Sequence
  Synthetic oligonucleotide
gccaaagcgctcggcattagcgacatctat

SEQ ID NO: 208299 - DNA, 30 bp, Artificial Sequence
  Synthetic oligonucleotide
agcctgccatttgggcaagttagcatctat

SEQ ID NO: 208300 - DNA, 30 bp, Artificial Sequence
  Synthetic oligonucleotide
ttgctccaacaatctagcgctacgatctat

SEQ ID NO: 208301 - DNA, 30 bp, Artificial Sequence
  Synthetic oligonucleotide
ttgcgtaattccacggaatacggtatctat

SEQ ID NO: 208302 - DNA, 30 bp, Artificial Sequence
  Synthetic oligonucleotide
cccgagttcgtcttgttctggtaactctat

SEQ ID NO: 208303 - DNA, 30 bp, Artificial Sequence
  Synthetic oligonucleotide
aggtacgaacaccaatcaccattactctat

SEQ ID NO: 208304 - DNA, 30 bp, Artificial Sequence
  Synthetic oligonucleotide
tcagtgagccgacagtttcggcacctctat

SEQ ID NO: 208305 - DNA, 30 bp, Artificial Sequence
  Synthetic oligonucleotide
caaatatgagttagcgagcaaatcctctat

SEQ ID NO: 208306 - DNA, 30 bp, Artificial Sequence
  Synthetic oligonucleotide
cggtgcatgcggctcactggcttcctctat

SEQ ID NO: 208307 - DNA, 30 bp, Artificial Sequence
  Synthetic oligonucleotide
tggcaacggatccaatcagctcagctctat

SEQ ID NO: 208308 - DNA, 30 bp, Artificial Sequence
  Synthetic oligonucleotide
gggcgaactatacctcgcataagtctctat

SEQ ID NO: 208309 - DNA, 30 bp, Artificial Sequence
  Synthetic oligonucleotide
catataccttgcggttcattgccagtctat

SEQ ID NO: 208310 - DNA, 30 bp, Artificial Sequence
  Synthetic oligonucleotide
cgtttcacctcgatccctacataattctat

SEQ ID NO: 208311 - DNA, 25 bp, Artificial Sequence
  Synthetic oligonucleotide
cgtggagaagactgatcacttctat

SEQ ID NO: 208312 - DNA, 30 bp, Artificial Sequence
  Synthetic oligonucleotide
gggttactgcggaatcaattcactttctat

SEQ ID NO: 208313 - DNA, 30 bp, Artificial Sequence
  Synthetic oligonucleotide
tgggaaggatggttagggtgcggtttctat

SEQ ID NO: 208314 - DNA, 30 bp, Artificial Sequence
  Synthetic oligonucleotide
tggactacacgctgttacgacccaaagtat

SEQ ID NO: 208315 - DNA, 30 bp, Artificial Sequence
  Synthetic oligonucleotide
gctatgtgcgaagtcgcctgtctaaagtat

SEQ ID NO: 208316 - DNA, 30 bp, Artificial Sequence
  Synthetic oligonucleotide
ctccgcggatcgtgagccaatgacaagtat

SEQ ID NO: 208317 - DNA, 30 bp, Artificial Sequence
  Synthetic oligonucleotide
caagtatcaccgggggaggtggtgaagtat

SEQ ID NO: 208318 - DNA, 30 bp, Artificial Sequence
  Synthetic oligonucleotide
ctcacgggcgcacccgacgtttataagtat

SEQ ID NO: 208319 - DNA, 30 bp, Artificial Sequence
  Synthetic oligonucleotide
agcaatatgcaggtctctctcgaacagtat

SEQ ID NO: 208320 - DNA, 30 bp, Artificial Sequence
  Synthetic oligonucleotide
ggagatccgaattttggtagatgacagtat

SEQ ID NO: 208321 - DNA, 30 bp, Artificial Sequence
  Synthetic oligonucleotide
ccgttacgtcctagcaaacgcaaccagtat

SEQ ID NO: 208322 - DNA, 30 bp, Artificial Sequence
  Synthetic oligonucleotide
tggatgctcaagaattagcgacaccagtat

SEQ ID NO: 208323 - DNA, 30 bp, Artificial Sequence
  Synthetic oligonucleotide
actcgcgtgtgtgttttaggtgaccagtat

SEQ ID NO: 208324 - DNA, 30 bp, Artificial Sequence
  Synthetic oligonucleotide
cagcgcgcggcttcacgaacggagcagtat

SEQ ID NO: 208325 - DNA, 30 bp, Artificial Sequence
  Synthetic oligonucleotide
ctggtgtcaaagtcctgtggtaggcagtat

SEQ ID NO: 208326 - DNA, 30 bp, Artificial Sequence
  Synthetic oligonucleotide
cgagggtttaagggttaggtggatcagtat

SEQ ID NO: 208327 - DNA, 30 bp, Artificial Sequence
  Synthetic oligonucleotide
gcacaaaatagaaattccaccagtcagtat

SEQ ID NO: 208328 - DNA, 30 bp, Artificial Sequence
  Synthetic oligonucleotide
ttgcggactcccccgaacaggattcagtat

SEQ ID NO: 208329 - DNA, 30 bp, Artificial Sequence
  Synthetic oligonucleotide
ggaagtactcggcggtcgaagtaagagtat

SEQ ID NO: 208330 - DNA, 30 bp, Artificial Sequence
  Synthetic oligonucleotide
aaggacccccgtagcggcatagaggagtat

SEQ ID NO: 208331 - DNA, 30 bp, Artificial Sequence
  Synthetic oligonucleotide
tacgtttatgtagaacagtgggaggagtat

SEQ ID NO: 208332 - DNA, 30 bp, Artificial Sequence
  Synthetic oligonucleotide
agaatactacgtaggtcgctgtcggagtat

SEQ ID NO: 208333 - DNA, 30 bp, Artificial Sequence
  Synthetic oligonucleotide
cgtatagcccgttcattgaaagctgagtat

SEQ ID NO: 208334 - DNA, 30 bp, Artificial Sequence
  Synthetic oligonucleotide
tctctccagtataaaatagccaaatagtat

SEQ ID NO: 208335 - DNA, 30 bp, Artificial Sequence
  Synthetic oligonucleotide
acgcgaagctgtaaatactcgagaacgtat

SEQ ID NO: 208336 - DNA, 30 bp, Artificial Sequence
  Synthetic oligonucleotide
gggtgataaagcaaggtacttacgacgtat

SEQ ID NO: 208337 - DNA, 30 bp, Artificial Sequence
  Synthetic oligonucleotide
actattaggtgggcgggataagaaccgtat

SEQ ID NO: 208338 - DNA, 30 bp, Artificial Sequence
  Synthetic oligonucleotide
cagtggccgtatcatatgtgtgaaccgtat

SEQ ID NO: 208339 - DNA, 30 bp, Artificial Sequence
  Synthetic oligonucleotide
aggctgggagttagttgtagttaaccgtat

SEQ ID NO: 208340 - DNA, 30 bp, Artificial Sequence
  Synthetic oligonucleotide
ggtcgtcccgatagaaaaagttatgcgtat

SEQ ID NO: 208341 - DNA, 30 bp, Artificial Sequence
  Synthetic oligonucleotide
gatacagtaggtgcttcgacttgtgcgtat

SEQ ID NO: 208342 - DNA, 30 bp, Artificial Sequence
  Synthetic oligonucleotide
caccgatagcccggggccctggactcgtat

SEQ ID NO: 208343 - DNA, 30 bp, Artificial Sequence
  Synthetic oligonucleotide
ccgaatgacctgagaatctcctattcgtat

SEQ ID NO: 208344 - DNA, 30 bp, Artificial Sequence
  Synthetic oligonucleotide
cggtgaataatacggtgccgccgaaggtat

SEQ ID NO: 208345 - DNA, 30 bp, Artificial Sequence
  Synthetic oligonucleotide
agtaagtttcaactgaatattgagaggtat

SEQ ID NO: 208346 - DNA, 30 bp, Artificial Sequence
  Synthetic oligonucleotide
gctgggggatgccaaatgatagctaggtat

SEQ ID NO: 208347 - DNA, 30 bp, Artificial Sequence
  Synthetic oligonucleotide
taagtaaagcttaaacacaatgctaggtat

SEQ ID NO: 208348 - DNA, 30 bp, Artificial Sequence
  Synthetic oligonucleotide
ggcggcagaggaaggtgggactgccggtat

SEQ ID NO: 208349 - DNA, 30 bp, Artificial Sequence
  Synthetic oligonucleotide
caggtaagctgactaaagcagactcggtat

SEQ ID NO: 208350 - DNA, 30 bp, Artificial Sequence
  Synthetic oligonucleotide
ataaggtaaggggacgtaggaaaagggtat

SEQ ID NO: 208351 - DNA, 31 bp, Artificial Sequence
  Synthetic oligonucleotide
taatgttctaggcaaatcaggtagagggtat

SEQ ID NO: 208352 - DNA, 30 bp, Artificial Sequence
  Synthetic oligonucleotide
aatgatattaggacaccctggtgagggtat

SEQ ID NO: 208353 - DNA, 30 bp, Artificial Sequence
  Synthetic oligonucleotide
ccgcggaccatgttccagggacaggggtat

SEQ ID NO: 208354 - DNA, 30 bp, Artificial Sequence
  Synthetic oligonucleotide
atggggactctctaaggaaatgaggggtat

SEQ ID NO: 208355 - DNA, 30 bp, Artificial Sequence
  Synthetic oligonucleotide
cgacgtcacaggcctttaatactggggtat

SEQ ID NO: 208356 - DNA, 30 bp, Artificial Sequence
  Synthetic oligonucleotide
gcgcaacaattgataacacctgatgggtat

SEQ ID NO: 208357 - DNA, 30 bp, Artificial Sequence
  Synthetic oligonucleotide
gagagctgtatagtgcctcgatatgggtat

SEQ ID NO: 208358 - DNA, 30 bp, Artificial Sequence
  Synthetic oligonucleotide
cataggtacgtaagggtttaagctgggtat

SEQ ID NO: 208359 - DNA, 30 bp, Artificial Sequence
  Synthetic oligonucleotide
ttatgcacttggtgatagttgagtgggtat

SEQ ID NO: 208360 - DNA, 30 bp, Artificial Sequence
  Synthetic oligonucleotide
agggctgcaaggacgaaagtgcaatggtat

SEQ ID NO: 208361 - DNA, 30 bp, Artificial Sequence
  Synthetic oligonucleotide
catgaactcccggactagcgatcatggtat

SEQ ID NO: 208362 - DNA, 30 bp, Artificial Sequence
  Synthetic oligonucleotide
cgtccagcaatgattgcaagcgactggtat

SEQ ID NO: 208363 - DNA, 30 bp, Artificial Sequence
  Synthetic oligonucleotide
tacgacggaccgcgacacagttgctggtat

SEQ ID NO: 208364 - DNA, 30 bp, Artificial Sequence
  Synthetic oligonucleotide
acattagtgggtagtgacggcacttggtat

SEQ ID NO: 208365 - DNA, 30 bp, Artificial Sequence
  Synthetic oligonucleotide
tcatcaatgggatatattaacataatgtat

SEQ ID NO: 208366 - DNA, 30 bp, Artificial Sequence
  Synthetic oligonucleotide
acgggagtcctgcatgccaaaagcatgtat

SEQ ID NO: 208367 - DNA, 30 bp, Artificial Sequence
  Synthetic oligonucleotide
tcatgtaacaacgcgattagaacgatgtat

SEQ ID NO: 208368 - DNA, 30 bp, Artificial Sequence
  Synthetic oligonucleotide
gggccagcgtagtattaagtccatatgtat

SEQ ID NO: 208369 - DNA, 30 bp, Artificial Sequence
  Synthetic oligonucleotide
tagcagcagtcatcgcaaatggttatgtat

SEQ ID NO: 208370 - DNA, 30 bp, Artificial Sequence
  Synthetic oligonucleotide
gagcgaaacaggcggaattctacactgtat

SEQ ID NO: 208371 - DNA, 30 bp, Artificial Sequence
  Synthetic oligonucleotide
ctgtacgatagaaggtacacggggctgtat

SEQ ID NO: 208372 - DNA, 30 bp, Artificial Sequence
  Synthetic oligonucleotide
ttactaacagcattcgtgggcgtgctgtat

SEQ ID NO: 208373 - DNA, 30 bp, Artificial Sequence
  Synthetic oligonucleotide
tcaaccaatacacaccataagaatctgtat

SEQ ID NO: 208374 - DNA, 30 bp, Artificial Sequence
  Synthetic oligonucleotide
caagaatcacgaacctctaggaaagtgtat

SEQ ID NO: 208375 - DNA, 30 bp, Artificial Sequence
  Synthetic oligonucleotide
tgttaataaggagtctgatcgtaagtgtat

SEQ ID NO: 208376 - DNA, 30 bp, Artificial Sequence
  Synthetic oligonucleotide
ttcgtagagtcactcctaccgacagtgtat

SEQ ID NO: 208377 - DNA, 30 bp, Artificial Sequence
  Synthetic oligonucleotide
gggcacccaactcaaacatttttagtgtat

SEQ ID NO: 208378 - DNA, 30 bp, Artificial Sequence
  Synthetic oligonucleotide
agtctatttaagtcccgttagagcgtgtat

SEQ ID NO: 208379 - DNA, 30 bp, Artificial Sequence
  Synthetic oligonucleotide
gactggtctcactggtgcgtattcgtgtat

SEQ ID NO: 208380 - DNA, 30 bp, Artificial Sequence
  Synthetic oligonucleotide
tagaggctcagtggttatctctcggtgtat

SEQ ID NO: 208381 - DNA, 30 bp, Artificial Sequence
  Synthetic oligonucleotide
tcttatctggtgtgttttcctcttgtgtat

SEQ ID NO: 208382 - DNA, 30 bp, Artificial Sequence
  Synthetic oligonucleotide
gcgtactttctacgtttctgttcattgtat

SEQ ID NO: 208383 - DNA, 30 bp, Artificial Sequence
  Synthetic oligonucleotide
ttatggggcaacgggagtcaacacttgtat

SEQ ID NO: 208384 - DNA, 31 bp, Artificial Sequence
  Synthetic oligonucleotide
aacgttcaagaaccgacgccgcgccttgtat

SEQ ID NO: 208385 - DNA, 30 bp, Artificial Sequence
  Synthetic oligonucleotide
ttatggatgcatgtgtgaagaatgttgtat

SEQ ID NO: 208386 - DNA, 30 bp, Artificial Sequence
  Synthetic oligonucleotide
cacgtgcaaggtcttagcaagaatttgtat

SEQ ID NO: 208387 - DNA, 30 bp, Artificial Sequence
  Synthetic oligonucleotide
tcggtcttagccatgtttttagtaaattat

SEQ ID NO: 208388 - DNA, 30 bp, Artificial Sequence
  Synthetic oligonucleotide
agtgttagcttgtgcagaaccagcaattat

SEQ ID NO: 208389 - DNA, 30 bp, Artificial Sequence
  Synthetic oligonucleotide
acaccagtgcagtaggaacatggcaattat

SEQ ID NO: 208390 - DNA, 30 bp, Artificial Sequence
  Synthetic oligonucleotide
cctcgatagatcgtgcctcccagtaattat

SEQ ID NO: 208391 - DNA, 30 bp, Artificial Sequence
  Synthetic oligonucleotide
cgcggtgtctcgtttgaacgttaccattat

SEQ ID NO: 208392 - DNA, 30 bp, Artificial Sequence
  Synthetic oligonucleotide
catcaaaacgatacttagcatagccattat

SEQ ID NO: 208393 - DNA, 30 bp, Artificial Sequence
  Synthetic oligonucleotide
gcaagaagcgcaaagagagcttgccattat

SEQ ID NO: 208394 - DNA, 30 bp, Artificial Sequence
  Synthetic oligonucleotide
tatggggcccagtcctgtctaacgcattat

SEQ ID NO: 208395 - DNA, 30 bp, Artificial Sequence
  Synthetic oligonucleotide
tcagccagatcctttctggccacgcattat

SEQ ID NO: 208396 - DNA, 30 bp, Artificial Sequence
  Synthetic oligonucleotide
agtgaatgtaagaggatccaaaatcattat

SEQ ID NO: 208397 - DNA, 30 bp, Artificial Sequence
  Synthetic oligonucleotide
atgactgcacgtcacctccataatcattat

SEQ ID NO: 208398 - DNA, 30 bp, Artificial Sequence
  Synthetic oligonucleotide
tgaaggcggctaaaagtataaacagattat

SEQ ID NO: 208399 - DNA, 30 bp, Artificial Sequence
  Synthetic oligonucleotide
acatctgggctaaccgtgtataaggattat

SEQ ID NO: 208400 - DNA, 30 bp, Artificial Sequence
  Synthetic oligonucleotide
tgacacagcggaggattgactgaggattat

SEQ ID NO: 208401 - DNA, 30 bp, Artificial Sequence
  Synthetic oligonucleotide
gacactcaggggaagggcccactggattat

SEQ ID NO: 208402 - DNA, 30 bp, Artificial Sequence
  Synthetic oligonucleotide
ctcccgtactgttctttagcgtatgattat

SEQ ID NO: 208403 - DNA, 30 bp, Artificial Sequence
  Synthetic oligonucleotide
gtggtggtggggctggcggaggttgattat

SEQ ID NO: 208404 - DNA, 30 bp, Artificial Sequence
  Synthetic oligonucleotide
acagtttcaaacagacgtcgccgctattat

SEQ ID NO: 208405 - DNA, 30 bp, Artificial Sequence
  Synthetic oligonucleotide
gcgtgaggaaacgtccgcctgccgtattat

SEQ ID NO: 208406 - DNA, 30 bp, Artificial Sequence
  Synthetic oligonucleotide
gcaacgactcgaatgacatactcttattat

SEQ ID NO: 208407 - DNA, 30 bp, Artificial Sequence
  Synthetic oligonucleotide
tcaagtggggcacatccacaagaaacttat

SEQ ID NO: 208408 - DNA, 30 bp, Artificial Sequence
  Synthetic oligonucleotide
tctagtaatagacactagagctaaacttat

SEQ ID NO: 208409 - DNA, 30 bp, Artificial Sequence
  Synthetic oligonucleotide
taaaccagattgcgctgatgttagacttat

SEQ ID NO: 208410 - DNA, 30 bp, Artificial Sequence
  Synthetic oligonucleotide
ccagcgcatacacacctactccttacttat

SEQ ID NO: 208411 - DNA, 30 bp, Artificial Sequence
  Synthetic oligonucleotide
actagttaacctggatggcaacagccttat

SEQ ID NO: 208412 - DNA, 30 bp, Artificial Sequence
  Synthetic oligonucleotide
gcttcacacgtattgcggggaaatccttat

SEQ ID NO: 208413 - DNA, 30 bp, Artificial Sequence
  Synthetic oligonucleotide
taggtgaggtggattcgcttcaaagcttat

SEQ ID NO: 208414 - DNA, 30 bp, Artificial Sequence
  Synthetic oligonucleotide
cacgatctaaagaatgcccgcaccgcttat

SEQ ID NO: 208415 - DNA, 30 bp, Artificial Sequence
  Synthetic oligonucleotide
cacaggggaactcgttccatgaccgcttat

SEQ ID NO: 208416 - DNA, 30 bp, Artificial Sequence
  Synthetic oligonucleotide
agctagctctggttgggaccagctgcttat

SEQ ID NO: 208417 - DNA, 30 bp, Artificial Sequence
  Synthetic oligonucleotide
cgtcaaaagagttctggcgatcacagttat

SEQ ID NO: 208418 - DNA, 30 bp, Artificial Sequence
  Synthetic oligonucleotide
ggggcacggctaccctttcttagcagttat

SEQ ID NO: 208419 - DNA, 30 bp, Artificial Sequence
  Synthetic oligonucleotide
tacaggaaaacagagcactgttagagttat

SEQ ID NO: 208420 - DNA, 30 bp, Artificial Sequence
  Synthetic oligonucleotide
aagaatagaacaagtattactgggagttat

SEQ ID NO: 208421 - DNA, 30 bp, Artificial Sequence
  Synthetic oligonucleotide
caactaaggaaaacaggttcttggagttat

SEQ ID NO: 208422 - DNA, 30 bp, Artificial Sequence
  Synthetic oligonucleotide
gtagggatgagcttttgaaaagcccgttat

SEQ ID NO: 208423 - DNA, 30 bp, Artificial Sequence
  Synthetic oligonucleotide
aagactacggtaccatgctttaagcgttat

SEQ ID NO: 208424 - DNA, 30 bp, Artificial Sequence
  Synthetic oligonucleotide
ggcagcgattaaaagattctgcagcgttat

SEQ ID NO: 208425 - DNA, 30 bp, Artificial Sequence
  Synthetic oligonucleotide
gtaagaagcagtgacaggtttctgcgttat

SEQ ID NO: 208426 - DNA, 30 bp, Artificial Sequence
  Synthetic oligonucleotide
aacggatactacacatagtacgctcgttat

SEQ ID NO: 208427 - DNA, 30 bp, Artificial Sequence
  Synthetic oligonucleotide
tgtgaagatgatgcgaaccaacgtcgttat

SEQ ID NO: 208428 - DNA, 30 bp, Artificial Sequence
  Synthetic oligonucleotide
tcatacagtgcgaaaagcagtaccggttat

SEQ ID NO: 208429 - DNA, 30 bp, Artificial Sequence
  Synthetic oligonucleotide
cagccgcatatgttgaattaaaatggttat

SEQ ID NO: 208430 - DNA, 30 bp, Artificial Sequence
  Synthetic oligonucleotide
actgttagtattgtgatcggggatggttat

SEQ ID NO: 208431 - DNA, 30 bp, Artificial Sequence
  Synthetic oligonucleotide
ccgatacgattaaagcgagcgcgtggttat

SEQ ID NO: 208432 - DNA, 30 bp, Artificial Sequence
  Synthetic oligonucleotide
tgcacattgccaaagtgttcaacatgttat

SEQ ID NO: 208433 - DNA, 30 bp, Artificial Sequence
  Synthetic oligonucleotide
gtggatcgcgcgagctccaatacctgttat

SEQ ID NO: 208434 - DNA, 30 bp, Artificial Sequence
  Synthetic oligonucleotide
agaaaaggctgagaatacaggacttgttat

SEQ ID NO: 208435 - DNA, 30 bp, Artificial Sequence
  Synthetic oligonucleotide
tcgtacacagggtctgtcgtagcttgttat

SEQ ID NO: 208436 - DNA, 30 bp, Artificial Sequence
  Synthetic oligonucleotide
gctaggaaggaccccaacaaccaaatttat

SEQ ID NO: 208437 - DNA, 30 bp, Artificial Sequence
  Synthetic oligonucleotide
gtatgacagagatataggatgcgaatttat

SEQ ID NO: 208438 - DNA, 30 bp, Artificial Sequence
  Synthetic oligonucleotide
acgctcctcacgcttctaaaaaggatttat

SEQ ID NO: 208439 - DNA, 30 bp, Artificial Sequence
  Synthetic oligonucleotide
catgcactagcattgtcgtgtagtatttat

SEQ ID NO: 208440 - DNA, 30 bp, Artificial Sequence
  Synthetic oligonucleotide
gtgggcacaaacgaactgaaatgtatttat

SEQ ID NO: 208441 - DNA, 30 bp, Artificial Sequence
  Synthetic oligonucleotide
agaggactcggctgttgtaaaagcctttat

SEQ ID NO: 208442 - DNA, 30 bp, Artificial Sequence
  Synthetic oligonucleotide
ataatataacctcgaattgttatcgtttat

SEQ ID NO: 208443 - DNA, 30 bp, Artificial Sequence
  Synthetic oligonucleotide
gacaaaactgtattactctgccaggtttat

SEQ ID NO: 208444 - DNA, 30 bp, Artificial Sequence
  Synthetic oligonucleotide
ggaagtatgaagattgttaattctgtttat

SEQ ID NO: 208445 - DNA, 30 bp, Artificial Sequence
  Synthetic oligonucleotide
cacattgaggatacttcaacgtttgtttat

SEQ ID NO: 208446 - DNA, 30 bp, Artificial Sequence
  Synthetic oligonucleotide
aaggttattcgcacaaacacggaattttat

SEQ ID NO: 208447 - DNA, 30 bp, Artificial Sequence
  Synthetic oligonucleotide
attaggtgccaagcgtagacgacattttat

SEQ ID NO: 208448 - DNA, 30 bp, Artificial Sequence
  Synthetic oligonucleotide
ttatccggactatgattagtccgcttttat

SEQ ID NO: 208449 - DNA, 30 bp, Artificial Sequence
  Synthetic oligonucleotide
gaaagcctgcaccgagatgtaagcaaaact

SEQ ID NO: 208450 - DNA, 30 bp, Artificial Sequence
  Synthetic oligonucleotide
tacgtgctggtctaataatacgtcaaaact

SEQ ID NO: 208451 - DNA, 30 bp, Artificial Sequence
  Synthetic oligonucleotide
gacacttgcccttctgaagctccgaaaact

SEQ ID NO: 208452 - DNA, 30 bp, Artificial Sequence
  Synthetic oligonucleotide
aacctctgaaaggggtgcagtcggaaaact

SEQ ID NO: 208453 - DNA, 30 bp, Artificial Sequence
  Synthetic oligonucleotide
cgcgccctacttgggacacctgtgaaaact

SEQ ID NO: 208454 - DNA, 30 bp, Artificial Sequence
  Synthetic oligonucleotide
gtaacttctggatagagcgagcataaaact

SEQ ID NO: 208455 - DNA, 30 bp, Artificial Sequence
  Synthetic oligonucleotide
ggcggacagatacctataaacatacaaact

SEQ ID NO: 208456 - DNA, 30 bp, Artificial Sequence
  Synthetic oligonucleotide
cgtagcctgacctgtgttaataggcaaact

SEQ ID NO: 208457 - DNA, 30 bp, Artificial Sequence
  Synthetic oligonucleotide
tacaagcacataataagtgcgatgcaaact

SEQ ID NO: 208458 - DNA, 30 bp, Artificial Sequence
  Synthetic oligonucleotide
tattcgagcgaagaggccaaaattcaaact

SEQ ID NO: 208459 - DNA, 30 bp, Artificial Sequence
  Synthetic oligonucleotide
cttcactataaatttctaggaaacgaaact

SEQ ID NO: 208460 - DNA, 30 bp, Artificial Sequence
  Synthetic oligonucleotide
gtcgggtcttgataccgtcagggcgaaact

SEQ ID NO: 208461 - DNA, 30 bp, Artificial Sequence
  Synthetic oligonucleotide
atccgcaatttggctaccagccgggaaact

SEQ ID NO: 208462 - DNA, 30 bp, Artificial Sequence
  Synthetic oligonucleotide
tgagctgtgcccatcccctgtttggaaact

SEQ ID NO: 208463 - DNA, 30 bp, Artificial Sequence
  Synthetic oligonucleotide
ggatgaatggcaccagggagcttctaaact

SEQ ID NO: 208464 - DNA, 30 bp, Artificial Sequence
  Synthetic oligonucleotide
ttaagataagctcttaaggagcagtaaact

SEQ ID NO: 208465 - DNA, 30 bp, Artificial Sequence
  Synthetic oligonucleotide
agtttgctatccgactgacctgcttaaact

SEQ ID NO: 208466 - DNA, 30 bp, Artificial Sequence
  Synthetic oligonucleotide
gatgtcatggtgactgacgcgtcttaaact

SEQ ID NO: 208467 - DNA, 30 bp, Artificial Sequence
  Synthetic oligonucleotide
ggcttagaacgagtatgtgtggtttaaact

SEQ ID NO: 208468 - DNA, 30 bp, Artificial Sequence
  Synthetic oligonucleotide
ggggattagttggttaggggttaaacaact

SEQ ID NO: 208469 - DNA, 30 bp, Artificial Sequence
  Synthetic oligonucleotide
ccgcgggcgagtaaagcccggctaacaact

SEQ ID NO: 208470 - DNA, 30 bp, Artificial Sequence
  Synthetic oligonucleotide
tatgtgggacgatatcgattcctcacaact

SEQ ID NO: 208471 - DNA, 30 bp, Artificial Sequence
  Synthetic oligonucleotide
tacgtaagggagacccgctcgctcacaact

SEQ ID NO: 208472 - DNA, 30 bp, Artificial Sequence
  Synthetic oligonucleotide
ttagcaagatcgcaaggatccacgacaact

SEQ ID NO: 208473 - DNA, 30 bp, Artificial Sequence
  Synthetic oligonucleotide
tgaaatatccagcccttaatggggacaact

SEQ ID NO: 208474 - DNA, 30 bp, Artificial Sequence
  Synthetic oligonucleotide
tgaatgtatttttcttgggcctctacaact

SEQ ID NO: 208475 - DNA, 30 bp, Artificial Sequence
  Synthetic oligonucleotide
cgtaaagtttcttcagttcgctctacaact

SEQ ID NO: 208476 - DNA, 30 bp, Artificial Sequence
  Synthetic oligonucleotide
ggatgatcggaggtcaagtgcttaccaact

SEQ ID NO: 208477 - DNA, 30 bp, Artificial Sequence
  Synthetic oligonucleotide
gtacctgccaagtgaacctcccagccaact

SEQ ID NO: 208478 - DNA, 30 bp, Artificial Sequence
  Synthetic oligonucleotide
atccgaaagtgcgatcccggtccgccaact

SEQ ID NO: 208479 - DNA, 30 bp, Artificial Sequence
  Synthetic oligonucleotide
tacagtgtaatagttatctgaaggccaact

SEQ ID NO: 208480 - DNA, 30 bp, Artificial Sequence
  Synthetic oligonucleotide
catcagagaagttaagtagttgttccaact

SEQ ID NO: 208481 - DNA, 30 bp, Artificial Sequence
  Synthetic oligonucleotide
acgtgggaaaaaacgcaagattttccaact

SEQ ID NO: 208482 - DNA, 30 bp, Artificial Sequence
  Synthetic oligonucleotide
gaagagtctcgcaagatgtgtaccgcaact

SEQ ID NO: 208483 - DNA, 30 bp, Artificial Sequence
  Synthetic oligonucleotide
ctctgtgggacgtgtctaaaaaaggcaact

SEQ ID NO: 208484 - DNA, 30 bp, Artificial Sequence
  Synthetic oligonucleotide
ctttctgcgtgtcaatggaatccggcaact

SEQ ID NO: 208485 - DNA, 30 bp, Artificial Sequence
  Synthetic oligonucleotide
ggtgccaagagtatcctcatggcgtcaact

SEQ ID NO: 208486 - DNA, 30 bp, Artificial Sequence
  Synthetic oligonucleotide
tcatcaacaattggctggctacggtcaact

SEQ ID NO: 208487 - DNA, 30 bp, Artificial Sequence
  Synthetic oligonucleotide
ggaaagcaaaaagggcatctcgcaagaact

SEQ ID NO: 208488 - DNA, 30 bp, Artificial Sequence
  Synthetic oligonucleotide
agttcgaggagcgaataagattgaagaact

SEQ ID NO: 208489 - DNA, 30 bp, Artificial Sequence
  Synthetic oligonucleotide
ccgtccaaccttgaacagctagatcgaact

SEQ ID NO: 208490 - DNA, 30 bp, Artificial Sequence
  Synthetic oligonucleotide
acgatgtgcaataagtgaaagcgaggaact

SEQ ID NO: 208491 - DNA, 30 bp, Artificial Sequence
  Synthetic oligonucleotide
gcccgagataagaatcgaatcttcggaact

SEQ ID NO: 208492 - DNA, 30 bp, Artificial Sequence
  Synthetic oligonucleotide
cgttcggacgacaatgattcccttggaact

SEQ ID NO: 208493 - DNA, 30 bp, Artificial Sequence
  Synthetic oligonucleotide
agaacagtcagctagcagaaataatgaact

SEQ ID NO: 208494 - DNA, 30 bp, Artificial Sequence
  Synthetic oligonucleotide
ataggagcgcacggctcccatagatgaact

SEQ ID NO: 208495 - DNA, 30 bp, Artificial Sequence
  Synthetic oligonucleotide
aaccaaaggaatcaacgcaacaaaataact

SEQ ID NO: 208496 - DNA, 30 bp, Artificial Sequence
  Synthetic oligonucleotide
atgtctccacgtcacgtcgaaacaataact

SEQ ID NO: 208497 - DNA, 30 bp, Artificial Sequence
  Synthetic oligonucleotide
ggacagttaattaatccacggtgaataact

SEQ ID NO: 208498 - DNA, 30 bp, Artificial Sequence
  Synthetic oligonucleotide
gctccagtgctaagcggaaaggacataact

SEQ ID NO: 208499 - DNA, 30 bp, Artificial Sequence
  Synthetic oligonucleotide
acaacacgggccacgtaggtccccataact

SEQ ID NO: 208500 - DNA, 30 bp, Artificial Sequence
  Synthetic oligonucleotide
aaggtcgaacagtttctttatcagctaact

SEQ ID NO: 208501 - DNA, 30 bp, Artificial Sequence
  Synthetic oligonucleotide
tactcgatggggcggatgttcactctaact

SEQ ID NO: 208502 - DNA, 30 bp, Artificial Sequence
  Synthetic oligonucleotide
cttcgcacctggtgaaagaccggtctaact

SEQ ID NO: 208503 - DNA, 30 bp, Artificial Sequence
  Synthetic oligonucleotide
atagtgtgtatgcgaccgatcacagtaact

SEQ ID NO: 208504 - DNA, 30 bp, Artificial Sequence
  Synthetic oligonucleotide
cagaaatacatgggctgccgtagagtaact

SEQ ID NO: 208505 - DNA, 30 bp, Artificial Sequence
  Synthetic oligonucleotide
aaaccatcatagtttgcggcgtgcgtaact

SEQ ID NO: 208506 - DNA, 30 bp, Artificial Sequence
  Synthetic oligonucleotide
ccttaaagcagtcccattacaagtgtaact

SEQ ID NO: 208507 - DNA, 30 bp, Artificial Sequence
  Synthetic oligonucleotide
cgacacttcggggaatatatcctattaact

SEQ ID NO: 208508 - DNA, 30 bp, Artificial Sequence
  Synthetic oligonucleotide
tttcgcgtcacgaggaggagaaccttaact

SEQ ID NO: 208509 - DNA, 30 bp, Artificial Sequence
  Synthetic oligonucleotide
tgcaattgagcccgatgtagtccgttaact

SEQ ID NO: 208510 - DNA, 30 bp, Artificial Sequence
  Synthetic oligonucleotide
tcgatagaaataacacgcggtttaaacact

SEQ ID NO: 208511 - DNA, 30 bp, Artificial Sequence
  Synthetic oligonucleotide
gaacactgggtgcccaagcttaataacact

SEQ ID NO: 208512 - DNA, 30 bp, Artificial Sequence
  Synthetic oligonucleotide
taaaaaggaagtggcattggttgccacact

SEQ ID NO: 208513 - DNA, 30 bp, Artificial Sequence
  Synthetic oligonucleotide
aactatcgcgtgaacacgagtgcgcacact

SEQ ID NO: 208514 - DNA, 30 bp, Artificial Sequence
  Synthetic oligonucleotide
gctggcgtgaattaacagattcatcacact

SEQ ID NO: 208515 - DNA, 30 bp, Artificial Sequence
  Synthetic oligonucleotide
gcgacaagaagcgtgcagcgtcctcacact

SEQ ID NO: 208516 - DNA, 30 bp, Artificial Sequence
  Synthetic oligonucleotide
atggaagcgggtattgactgggctcacact

SEQ ID NO: 208517 - DNA, 30 bp, Artificial Sequence
  Synthetic oligonucleotide
cgcgatgcattgctctggagttgtgacact

SEQ ID NO: 208518 - DNA, 30 bp, Artificial Sequence
  Synthetic oligonucleotide
atttagtacaaaatttctcggcaatacact

SEQ ID NO: 208519 - DNA, 30 bp, Artificial Sequence
  Synthetic oligonucleotide
attcgaatcatcggcgggaatgagtacact

SEQ ID NO: 208520 - DNA, 30 bp, Artificial Sequence
  Synthetic oligonucleotide
cgacagggtggtattttgccctattacact

SEQ ID NO: 208521 - DNA, 30 bp, Artificial Sequence
  Synthetic oligonucleotide
tggagtctatggtcacctagagtttacact

SEQ ID NO: 208522 - DNA, 30 bp, Artificial Sequence
  Synthetic oligonucleotide
gcaaaacatcattagggcccgcgaaccact

SEQ ID NO: 208523 - DNA, 30 bp, Artificial Sequence
  Synthetic oligonucleotide
gtatcgcgaccattggcagctgtcaccact

SEQ ID NO: 208524 - DNA, 30 bp, Artificial Sequence
  Synthetic oligonucleotide
ccgatttcagaaaagtctgataggaccact

SEQ ID NO: 208525 - DNA, 30 bp, Artificial Sequence
  Synthetic oligonucleotide
cgtgggacaccacgcgcacaattgcccact

SEQ ID NO: 208526 - DNA, 30 bp, Artificial Sequence
  Synthetic oligonucleotide
gtctgcccgtggactcgatatattcccact

SEQ ID NO: 208527 - DNA, 30 bp, Artificial Sequence
  Synthetic oligonucleotide
gcgaactgctaatcatttaggtccgccact

SEQ ID NO: 208528 - DNA, 30 bp, Artificial Sequence
  Synthetic oligonucleotide
tggacagtggaaaatcacttgtgatccact

SEQ ID NO: 208529 - DNA, 30 bp, Artificial Sequence
  Synthetic oligonucleotide
ggttccccaacacggtcacacccgtccact

SEQ ID NO: 208530 - DNA, 30 bp, Artificial Sequence
  Synthetic oligonucleotide
tataacaaaaataggtttacagcttccact

SEQ ID NO: 208531 - DNA, 30 bp, Artificial Sequence
  Synthetic oligonucleotide
ccagagtcaatcaggcagactcgttccact

SEQ ID NO: 208532 - DNA, 30 bp, Artificial Sequence
  Synthetic oligonucleotide
aatagtcgaggccttgtcacacacagcact

SEQ ID NO: 208533 - DNA, 30 bp, Artificial Sequence
  Synthetic oligonucleotide
tatatcggtggtaattcagcggcaggcact

SEQ ID NO: 208534 - DNA, 30 bp, Artificial Sequence
  Synthetic oligonucleotide
atccatccgaggatggttgttttttgcact

SEQ ID NO: 208535 - DNA, 30 bp, Artificial Sequence
  Synthetic oligonucleotide
tccatagtgtctgagtgagcttatatcact

SEQ ID NO: 208536 - DNA, 30 bp, Artificial Sequence
  Synthetic oligonucleotide
gaacggggtaaatgatgcgtctaactcact

SEQ ID NO: 208537 - DNA, 30 bp, Artificial Sequence
  Synthetic oligonucleotide
gtttcccgcactacgcccgattccctcact

SEQ ID NO: 208538 - DNA, 30 bp, Artificial Sequence
  Synthetic oligonucleotide
tgagaataatgcccctggataattctcact

SEQ ID NO: 208539 - DNA, 30 bp, Artificial Sequence
  Synthetic oligonucleotide
ttccgtaagccgtattaaacaagcgtcact

SEQ ID NO: 208540 - DNA, 30 bp, Artificial Sequence
  Synthetic oligonucleotide
acacgtgcagggaaggaggccacattcact

SEQ ID NO: 208541 - DNA, 30 bp, Artificial Sequence
  Synthetic oligonucleotide
ttaagtggcggctaaataagcgcattcact

SEQ ID NO: 208542 - DNA, 30 bp, Artificial Sequence
  Synthetic oligonucleotide
tgaatctggtgaaccatggaactattcact

SEQ ID NO: 208543 - DNA, 30 bp, Artificial Sequence
  Synthetic oligonucleotide
tttgacgagaattccgacactatcttcact

SEQ ID NO: 208544 - DNA, 30 bp, Artificial Sequence
  Synthetic oligonucleotide
accacgcagtaaaatcccctcaagttcact

SEQ ID NO: 208545 - DNA, 30 bp, Artificial Sequence
  Synthetic oligonucleotide
tgatgccctagaaaccctattgtgttcact

SEQ ID NO: 208546 - DNA, 30 bp, Artificial Sequence
  Synthetic oligonucleotide
tcattgcgcccaactacctcgcctttcact

SEQ ID NO: 208547 - DNA, 30 bp, Artificial Sequence
  Synthetic oligonucleotide
ttgggtgaactgcgaaagtttgaaaagact

SEQ ID NO: 208548 - DNA, 30 bp, Artificial Sequence
  Synthetic oligonucleotide
ccagtataatgcgtttgcgggtaaaagact

SEQ ID NO: 208549 - DNA, 30 bp, Artificial Sequence
  Synthetic oligonucleotide
agcatcggtccatctgactccgggaagact

SEQ ID NO: 208550 - DNA, 30 bp, Artificial Sequence
  Synthetic oligonucleotide
tcaggtaacgtataagtacggtggaagact

SEQ ID NO: 208551 - DNA, 30 bp, Artificial Sequence
  Synthetic oligonucleotide
gatcggacattagcctagcctgtacagact

SEQ ID NO: 208552 - DNA, 30 bp, Artificial Sequence
  Synthetic oligonucleotide
ggtaactcaaggctaggtgtaagccagact

SEQ ID NO: 208553 - DNA, 30 bp, Artificial Sequence
  Synthetic oligonucleotide
caatcatgaatcaacaccaatgtccagact

SEQ ID NO: 208554 - DNA, 30 bp, Artificial Sequence
  Synthetic oligonucleotide
cactagctaggtaaagcggtggagcagact

SEQ ID NO: 208555 - DNA, 30 bp, Artificial Sequence
  Synthetic oligonucleotide
tcacctctataaccccggccctcgcagact

SEQ ID NO: 208556 - DNA, 30 bp, Artificial Sequence
  Synthetic oligonucleotide
gcagaggacgatcgtaccggtcgtcagact

SEQ ID NO: 208557 - DNA, 30 bp, Artificial Sequence
  Synthetic oligonucleotide
gcttaggtggcatagcattgctttcagact

SEQ ID NO: 208558 - DNA, 30 bp, Artificial Sequence
  Synthetic oligonucleotide
gcatcataggcagcagggtcgtaagagact

SEQ ID NO: 208559 - DNA, 30 bp, Artificial Sequence
  Synthetic oligonucleotide
tagctaccatttcaccgacgttaagagact

SEQ ID NO: 208560 - DNA, 30 bp, Artificial Sequence
  Synthetic oligonucleotide
gtcgtccgtcgttaacgaaacatagagact

SEQ ID NO: 208561 - DNA, 30 bp, Artificial Sequence
  Synthetic oligonucleotide
cccagggttgtcggagctgagtcggagact

SEQ ID NO: 208562 - DNA, 30 bp, Artificial Sequence
  Synthetic oligonucleotide
tagcaccgcggagagcctttgagggagact

SEQ ID NO: 208563 - DNA, 30 bp, Artificial Sequence
  Synthetic oligonucleotide
caaagaaatcaatcggaggactgggagact

SEQ ID NO: 208564 - DNA, 30 bp, Artificial Sequence
  Synthetic oligonucleotide
gaaaaagctggagaagtatgactggagact

SEQ ID NO: 208565 - DNA, 30 bp, Artificial Sequence
  Synthetic oligonucleotide
ccccgtcaccgagcgtgaaaagggtagact

SEQ ID NO: 208566 - DNA, 30 bp, Artificial Sequence
  Synthetic oligonucleotide
gaggtgtgagaatgtagggctccaacgact

SEQ ID NO: 208567 - DNA, 30 bp, Artificial Sequence
  Synthetic oligonucleotide
aatgtaaagcggcgggcacgccgaacgact

SEQ ID NO: 208568 - DNA, 30 bp, Artificial Sequence
  Synthetic oligonucleotide
tgtcgagtcaggaggtaggtttgaacgact

SEQ ID NO: 208569 - DNA, 30 bp, Artificial Sequence
  Synthetic oligonucleotide
gaagtggtagttcaagattggataacgact

SEQ ID NO: 208570 - DNA, 30 bp, Artificial Sequence
  Synthetic oligonucleotide
gtcggaaatgggtcattaggtcctacgact

SEQ ID NO: 208571 - DNA, 30 bp, Artificial Sequence
  Synthetic oligonucleotide
ttcccacgtgaaactggtctggttacgact

SEQ ID NO: 208572 - DNA, 30 bp, Artificial Sequence
  Synthetic oligonucleotide
attcggtggattacgaaaaagggcccgact

SEQ ID NO: 208573 - DNA, 30 bp, Artificial Sequence
  Synthetic oligonucleotide
ctgaagacaggctactgtacttatccgact

SEQ ID NO: 208574 - DNA, 30 bp, Artificial Sequence
  Synthetic oligonucleotide
ggagttacaactacgctgtcatgagcgact

SEQ ID NO: 208575 - DNA, 30 bp, Artificial Sequence
  Synthetic oligonucleotide
ggtgttttatcattggtgggtctatcgact

SEQ ID NO: 208576 - DNA, 30 bp, Artificial Sequence
  Synthetic oligonucleotide
cttagacggtatgtggggcagtattcgact

SEQ ID NO: 208577 - DNA, 30 bp, Artificial Sequence
  Synthetic oligonucleotide
ccaccgtcttcgcatgttttgtgttcgact

SEQ ID NO: 208578 - DNA, 30 bp, Artificial Sequence
  Synthetic oligonucleotide
ggatcaccgctactggtacctaaaaggact

SEQ ID NO: 208579 - DNA, 30 bp, Artificial Sequence
  Synthetic oligonucleotide
atcaaggtcaagatagctatccgcaggact

SEQ ID NO: 208580 - DNA, 30 bp, Artificial Sequence
  Synthetic oligonucleotide
aaggactcaataaggtcgcactgtaggact

SEQ ID NO: 208581 - DNA, 30 bp, Artificial Sequence
  Synthetic oligonucleotide
agggcaatttcacatctcaaagaacggact

SEQ ID NO: 208582 - DNA, 30 bp, Artificial Sequence
  Synthetic oligonucleotide
gaggcgcgaatgaagtgccgggcacggact

SEQ ID NO: 208583 - DNA, 30 bp, Artificial Sequence
  Synthetic oligonucleotide
gggcatgggtacatacagacattacggact

SEQ ID NO: 208584 - DNA, 30 bp, Artificial Sequence
  Synthetic oligonucleotide
accccaggtatagcacagagatagcggact

SEQ ID NO: 208585 - DNA, 30 bp, Artificial Sequence
  Synthetic oligonucleotide
tatctacaggggggaatctgatagcggact

SEQ ID NO: 208586 - DNA, 30 bp, Artificial Sequence
  Synthetic oligonucleotide
tatggcaaatcagggacatcaccgcggact

SEQ ID NO: 208587 - DNA, 30 bp, Artificial Sequence
  Synthetic oligonucleotide
ccacaggtatgagtaaagcaagatgggact

SEQ ID NO: 208588 - DNA, 30 bp, Artificial Sequence
  Synthetic oligonucleotide
aggctagtgtcttatcgcgtctatgggact

SEQ ID NO: 208589 - DNA, 30 bp, Artificial Sequence
  Synthetic oligonucleotide
ggggctagcgtggacaatcggcttgggact

SEQ ID NO: 208590 - DNA, 30 bp, Artificial Sequence
  Synthetic oligonucleotide
acctgcgcatgcagcgcagattgatggact

SEQ ID NO: 208591 - DNA, 30 bp, Artificial Sequence
  Synthetic oligonucleotide
acatcttattccgataatccgaagtggact

SEQ ID NO: 208592 - DNA, 30 bp, Artificial Sequence
  Synthetic oligonucleotide
tcgcttttagggaatccgtcgtggatgact

SEQ ID NO: 208593 - DNA, 30 bp, Artificial Sequence
  Synthetic oligonucleotide
ttggcacagggccattccggcttgatgact

SEQ ID NO: 208594 - DNA, 30 bp, Artificial Sequence
  Synthetic oligonucleotide
gttccctaagatgggaggggacttatgact

SEQ ID NO: 208595 - DNA, 30 bp, Artificial Sequence
  Synthetic oligonucleotide
acgatggataaggcttcgaacatactgact

SEQ ID NO: 208596 - DNA, 30 bp, Artificial Sequence
  Synthetic oligonucleotide
aaggacttggagactgttacgcaagtgact

SEQ ID NO: 208597 - DNA, 30 bp, Artificial Sequence
  Synthetic oligonucleotide
gcgctattcttacgtcccccaatagtgact

SEQ ID NO: 208598 - DNA, 30 bp, Artificial Sequence
  Synthetic oligonucleotide
gtataaattctataagactacatagtgact

SEQ ID NO: 208599 - DNA, 30 bp, Artificial Sequence
  Synthetic oligonucleotide
gtactccaaggagagtagatgtacgtgact

SEQ ID NO: 208600 - DNA, 30 bp, Artificial Sequence
  Synthetic oligonucleotide
ctccaaatcgctccaattcaaagggtgact

SEQ ID NO: 208601 - DNA, 30 bp, Artificial Sequence
  Synthetic oligonucleotide
tgtgtaggagctctgatcataacattgact

SEQ ID NO: 208602 - DNA, 30 bp, Artificial Sequence
  Synthetic oligonucleotide
cgtcaggggtatgtgttgttccatttgact

SEQ ID NO: 208603 - DNA, 30 bp, Artificial Sequence
  Synthetic oligonucleotide
caaggatatctggggtttaatcgcaatact

SEQ ID NO: 208604 - DNA, 30 bp, Artificial Sequence
  Synthetic oligonucleotide
gtcgcctggaacgtactcgtgacccatact

SEQ ID NO: 208605 - DNA, 30 bp, Artificial Sequence
  Synthetic oligonucleotide
tgggcgcttggttcaagcctttggcatact

SEQ ID NO: 208606 - DNA, 30 bp, Artificial Sequence
  Synthetic oligonucleotide
gtaaaagctctcgttggtgcgactcatact

SEQ ID NO: 208607 - DNA, 30 bp, Artificial Sequence
  Synthetic oligonucleotide
tcgcctcgcatgggacagaaatcagatact

SEQ ID NO: 208608 - DNA, 30 bp, Artificial Sequence
  Synthetic oligonucleotide
tcgacaaggacttgatcggcccgagatact

SEQ ID NO: 208609 - DNA, 30 bp, Artificial Sequence
  Synthetic oligonucleotide
gtcagcgcttgatgtggctatctggatact

SEQ ID NO: 208610 - DNA, 30 bp, Artificial Sequence
  Synthetic oligonucleotide
ccaaatacaagcaccaataaagatgatact

SEQ ID NO: 208611 - DNA, 30 bp, Artificial Sequence
  Synthetic oligonucleotide
aacaatcgtgacagaacgtccagatatact

SEQ ID NO: 208612 - DNA, 30 bp, Artificial Sequence
  Synthetic oligonucleotide
cagcaacaacaaatcatggttggatatact

SEQ ID NO: 208613 - DNA, 30 bp, Artificial Sequence
  Synthetic oligonucleotide
tacgcttattccggagtacacccgtatact

SEQ ID NO: 208614 - DNA, 30 bp, Artificial Sequence
  Synthetic oligonucleotide
gaagacaggaggactctgtcgggaactact

SEQ ID NO: 208615 - DNA, 30 bp, Artificial Sequence
  Synthetic oligonucleotide
gagaggagtgctcttgaatgctcacctact

SEQ ID NO: 208616 - DNA, 30 bp, Artificial Sequence
  Synthetic oligonucleotide
acgcgttgggtccaacggttatatcctact

SEQ ID NO: 208617 - DNA, 30 bp, Artificial Sequence
  Synthetic oligonucleotide
aacgtctcctgaataatctctattcctact

SEQ ID NO: 208618 - DNA, 30 bp, Artificial Sequence
  Synthetic oligonucleotide
gtgagaaagttgacatgtgtacgctctact

SEQ ID NO: 208619 - DNA, 30 bp, Artificial Sequence
  Synthetic oligonucleotide
ggccgaattgggtagggtcgtcgttctact

SEQ ID NO: 208620 - DNA, 30 bp, Artificial Sequence
  Synthetic oligonucleotide
gcgtacgtgtcaacttcggtcacaagtact

SEQ ID NO: 208621 - DNA, 30 bp, Artificial Sequence
  Synthetic oligonucleotide
tgatgtttcatctcgcgtggtaatagtact

SEQ ID NO: 208622 - DNA, 30 bp, Artificial Sequence
  Synthetic oligonucleotide
tggtaagggttcgaggtctaactccgtact

SEQ ID NO: 208623 - DNA, 30 bp, Artificial Sequence
  Synthetic oligonucleotide
aaatcggaattgtgctaagagttccgtact

SEQ ID NO: 208624 - DNA, 30 bp, Artificial Sequence
  Synthetic oligonucleotide
aaacagtgtggaggctgcgcgccgcgtact

SEQ ID NO: 208625 - DNA, 30 bp, Artificial Sequence
  Synthetic oligonucleotide
acttcggatagattctgttagcctcgtact

SEQ ID NO: 208626 - DNA, 30 bp, Artificial Sequence
  Synthetic oligonucleotide
cgcgtaatgcaacacagacgcggtggtact

SEQ ID NO: 208627 - DNA, 30 bp, Artificial Sequence
  Synthetic oligonucleotide
cagtagaaaaagccttcaaggtttggtact

SEQ ID NO: 208628 - DNA, 30 bp, Artificial Sequence
  Synthetic oligonucleotide
tagggcaactgatgcttttgactctgtact

SEQ ID NO: 208629 - DNA, 30 bp, Artificial Sequence
  Synthetic oligonucleotide
tcgaaagtatacacagaaagtgtctgtact

SEQ ID NO: 208630 - DNA, 30 bp, Artificial Sequence
  Synthetic oligonucleotide
gcagagcctagtagtccactgcattgtact

SEQ ID NO: 208631 - DNA, 30 bp, Artificial Sequence
  Synthetic oligonucleotide
gccgtaagagacatagagatactaattact

SEQ ID NO: 208632 - DNA, 30 bp, Artificial Sequence
  Synthetic oligonucleotide
ggaagtggtttcatagctcgcaagattact

SEQ ID NO: 208633 - DNA, 30 bp, Artificial Sequence
  Synthetic oligonucleotide
gttaggccgtcggaggactatgagattact

SEQ ID NO: 208634 - DNA, 30 bp, Artificial Sequence
  Synthetic oligonucleotide
tgtgacgttcaattaggatagccgattact

SEQ ID NO: 208635 - DNA, 30 bp, Artificial Sequence
  Synthetic oligonucleotide
gcgtgcgtatagaggcctgtgcatattact

SEQ ID NO: 208636 - DNA, 30 bp, Artificial Sequence
  Synthetic oligonucleotide
aagggagagtctcagttacacgatcttact

SEQ ID NO: 208637 - DNA, 30 bp, Artificial Sequence
  Synthetic oligonucleotide
ggggatgtttaatcgtccagcactgttact

SEQ ID NO: 208638 - DNA, 30 bp, Artificial Sequence
  Synthetic oligonucleotide
tgaaaatgacccaggtcccgctctgttact

SEQ ID NO: 208639 - DNA, 30 bp, Artificial Sequence
  Synthetic oligonucleotide
ccaggcgcgtcgagtcgaatatcatttact

SEQ ID NO: 208640 - DNA, 30 bp, Artificial Sequence
  Synthetic oligonucleotide
cgttctctcggttagtagtatggatttact

SEQ ID NO: 208641 - DNA, 30 bp, Artificial Sequence
  Synthetic oligonucleotide
ctgtctccgacaacaactctgtgatttact

SEQ ID NO: 208642 - DNA, 30 bp, Artificial Sequence
  Synthetic oligonucleotide
agagggcgcgtgagattgtgaccgtttact

SEQ ID NO: 208643 - DNA, 30 bp, Artificial Sequence
  Synthetic oligonucleotide
acggtaagatagaaaaactatagttttact

SEQ ID NO: 208644 - DNA, 30 bp, Artificial Sequence
  Synthetic oligonucleotide
tacgcactatgatatggcgcggcgaaacct

SEQ ID NO: 208645 - DNA, 30 bp, Artificial Sequence
  Synthetic oligonucleotide
ccgtaacatattaggggcctgggacaacct

SEQ ID NO: 208646 - DNA, 30 bp, Artificial Sequence
  Synthetic oligonucleotide
taataattgatctagaagtttaaccaacct

SEQ ID NO: 208647 - DNA, 30 bp, Artificial Sequence
  Synthetic oligonucleotide
tccatctttaggggtgctggtgatcaacct

SEQ ID NO: 208648 - DNA, 30 bp, Artificial Sequence
  Synthetic oligonucleotide
gagcggtcgacgggacctatgcctcaacct

SEQ ID NO: 208649 - DNA, 30 bp, Artificial Sequence
  Synthetic oligonucleotide
agctgggtcctcaactgatttctcgaacct

SEQ ID NO: 208650 - DNA, 30 bp, Artificial Sequence
  Synthetic oligonucleotide
tagaatgagcgggcgtagtgcatggaacct

SEQ ID NO: 208651 - DNA, 30 bp, Artificial Sequence
  Synthetic oligonucleotide
tagggacgcaacggagcgtgatcataacct

SEQ ID NO: 208652 - DNA, 30 bp, Artificial Sequence
  Synthetic oligonucleotide
gccggtccgaattacaataatgggtaacct

SEQ ID NO: 208653 - DNA, 30 bp, Artificial Sequence
  Synthetic oligonucleotide
aactccctaatgtggtggaggatgtaacct

SEQ ID NO: 208654 - DNA, 30 bp, Artificial Sequence
  Synthetic oligonucleotide
ctacgttcagtaacgactcgcacttaacct

SEQ ID NO: 208655 - DNA, 30 bp, Artificial Sequence
  Synthetic oligonucleotide
aggaattctggggacattgaggtttaacct

SEQ ID NO: 208656 - DNA, 30 bp, Artificial Sequence
  Synthetic oligonucleotide
tcgcccattctccagcgcttaaaaacacct

SEQ ID NO: 208657 - DNA, 30 bp, Artificial Sequence
  Synthetic oligonucleotide
ctgcttatccggtgaagctgacaaacacct

SEQ ID NO: 208658 - DNA, 30 bp, Artificial Sequence
  Synthetic oligonucleotide
ggtaagcttttcaagtaatagttaccacct

SEQ ID NO: 208659 - DNA, 30 bp, Artificial Sequence
  Synthetic oligonucleotide
gagaagaaactgccagactttgacccacct

SEQ ID NO: 208660 - DNA, 30 bp, Artificial Sequence
  Synthetic oligonucleotide
tgatcgcgatgcgagcgcaatatcccacct

SEQ ID NO: 208661 - DNA, 30 bp, Artificial Sequence
  Synthetic oligonucleotide
aagccagggccgccgttgacacgagcacct

SEQ ID NO: 208662 - DNA, 30 bp, Artificial Sequence
  Synthetic oligonucleotide
gctattacgcttggtagtcggggagcacct

SEQ ID NO: 208663 - DNA, 30 bp, Artificial Sequence
  Synthetic oligonucleotide
gcacagagcagttttgtcgagtctgcacct

SEQ ID NO: 208664 - DNA, 30 bp, Artificial Sequence
  Synthetic oligonucleotide
tacttggatacataaaggcagcgtgcacct

SEQ ID NO: 208665 - DNA, 30 bp, Artificial Sequence
  Synthetic oligonucleotide
gaggaagattcaaatagcagactatcacct

SEQ ID NO: 208666 - DNA, 30 bp, Artificial Sequence
  Synthetic oligonucleotide
tgccgtgactagtaggatattgcgtcacct

SEQ ID NO: 208667 - DNA, 30 bp, Artificial Sequence
  Synthetic oligonucleotide
tggcttgtacagaggttcttcagttcacct

SEQ ID NO: 208668 - DNA, 30 bp, Artificial Sequence
  Synthetic oligonucleotide
tgtgcaggctggcggacaagaataagacct

SEQ ID NO: 208669 - DNA, 30 bp, Artificial Sequence
  Synthetic oligonucleotide
ggtaactttataaaccactcccctagacct

SEQ ID NO: 208670 - DNA, 30 bp, Artificial Sequence
  Synthetic oligonucleotide
cgagcagcccacaggaagagtagtagacct

SEQ ID NO: 208671 - DNA, 30 bp, Artificial Sequence
  Synthetic oligonucleotide
aggtgccgcctgagacttccgtttagacct

SEQ ID NO: 208672 - DNA, 30 bp, Artificial Sequence
  Synthetic oligonucleotide
gttcaaggcgattgctgaaatcaacgacct

SEQ ID NO: 208673 - DNA, 30 bp, Artificial Sequence
  Synthetic oligonucleotide
cgttaggctgcggatgcttgaccacgacct

SEQ ID NO: 208674 - DNA, 30 bp, Artificial Sequence
  Synthetic oligonucleotide
tcggaaaaataatcgaaaccgacccgacct

SEQ ID NO: 208675 - DNA, 30 bp, Artificial Sequence
  Synthetic oligonucleotide
acaattaggggggcaaagactttgcgacct

SEQ ID NO: 208676 - DNA, 30 bp, Artificial Sequence
  Synthetic oligonucleotide
tagatcctgtagtgtcaagccgatcgacct

SEQ ID NO: 208677 - DNA, 30 bp, Artificial Sequence
  Synthetic oligonucleotide
ggaccccccaaagggtaaaaatttcgacct

SEQ ID NO: 208678 - DNA, 30 bp, Artificial Sequence
  Synthetic oligonucleotide
aacatgacatgttagtactcccaaggacct

SEQ ID NO: 208679 - DNA, 30 bp, Artificial Sequence
  Synthetic oligonucleotide
tagtcggcgggatagaggcaatcgggacct

SEQ ID NO: 208680 - DNA, 30 bp, Artificial Sequence
  Synthetic oligonucleotide
ctgtagaatggtataccgtgaatgggacct

SEQ ID NO: 208681 - DNA, 30 bp, Artificial Sequence
  Synthetic oligonucleotide
gacttgttgtctgctcagcgatctggacct

SEQ ID NO: 208682 - DNA, 30 bp, Artificial Sequence
  Synthetic oligonucleotide
ggggacaccagggaatctttaggtggacct

SEQ ID NO: 208683 - DNA, 30 bp, Artificial Sequence
  Synthetic oligonucleotide
gaggtgcgtttcgaaataaaacgatgacct

SEQ ID NO: 208684 - DNA, 30 bp, Artificial Sequence
  Synthetic oligonucleotide
ttcttcttgcacccaatctggcagtgacct

SEQ ID NO: 208685 - DNA, 30 bp, Artificial Sequence
  Synthetic oligonucleotide
actcagagttcttaaggctagtcaatacct

SEQ ID NO: 208686 - DNA, 30 bp, Artificial Sequence
  Synthetic oligonucleotide
gcgagacacaagaaggtcgacagcatacct

SEQ ID NO: 208687 - DNA, 30 bp, Artificial Sequence
  Synthetic oligonucleotide
gtctaggaagatatcacagcttaactacct

SEQ ID NO: 208688 - DNA, 30 bp, Artificial Sequence
  Synthetic oligonucleotide
tagaatccaagacgggagtagatactacct

SEQ ID NO: 208689 - DNA, 30 bp, Artificial Sequence
  Synthetic oligonucleotide
agtaccaggttcgcagtacccaacctacct

SEQ ID NO: 208690 - DNA, 30 bp, Artificial Sequence
  Synthetic oligonucleotide
taagacggcatactggaatgtagcctacct

SEQ ID NO: 208691 - DNA, 30 bp, Artificial Sequence
  Synthetic oligonucleotide
caaagtgagtaaaattgaaattcagtacct

SEQ ID NO: 208692 - DNA, 30 bp, Artificial Sequence
  Synthetic oligonucleotide
gaggtcgtgaattcatactctccggtacct

SEQ ID NO: 208693 - DNA, 30 bp, Artificial Sequence
  Synthetic oligonucleotide
ccgtacgttggcaatgtcacgcgtgtacct

SEQ ID NO: 208694 - DNA, 30 bp, Artificial Sequence
  Synthetic oligonucleotide
caaacatgaggcgcgaggaatgttgtacct

SEQ ID NO: 208695 - DNA, 30 bp, Artificial Sequence
  Synthetic oligonucleotide
cctggggcggctgatgggaagtcattacct

SEQ ID NO: 208696 - DNA, 30 bp, Artificial Sequence
  Synthetic oligonucleotide
aagtaaataacctagacggggacgttacct

SEQ ID NO: 208697 - DNA, 30 bp, Artificial Sequence
  Synthetic oligonucleotide
agaaaagggtttacgttctgggtgaaccct

SEQ ID NO: 208698 - DNA, 30 bp, Artificial Sequence
  Synthetic oligonucleotide
ggataacgtcaactgagccgctctcaccct

SEQ ID NO: 208699 - DNA, 30 bp, Artificial Sequence
  Synthetic oligonucleotide
tgaggtcgcgcattgctcacgtgtcaccct

SEQ ID NO: 208700 - DNA, 30 bp, Artificial Sequence
  Synthetic oligonucleotide
ttcgacgatcaggggtagttgtaggaccct

SEQ ID NO: 208701 - DNA, 30 bp, Artificial Sequence
  Synthetic oligonucleotide
gtacaaaaagaatcagacctaacggaccct

SEQ ID NO: 208702 - DNA, 30 bp, Artificial Sequence
  Synthetic oligonucleotide
ctcggaccggaccagacgacacgataccct

SEQ ID NO: 208703 - DNA, 30 bp, Artificial Sequence
  Synthetic oligonucleotide
attggactacaattctcacccgcgtaccct

SEQ ID NO: 208704 - DNA, 30 bp, Artificial Sequence
  Synthetic oligonucleotide
ttgacgttctgtcgcatctgtcggtaccct

SEQ ID NO: 208705 - DNA, 30 bp, Artificial Sequence
  Synthetic oligonucleotide
tggacagtattagtgatgtatagtacccct

SEQ ID NO: 208706 - DNA, 30 bp, Artificial Sequence
  Synthetic oligonucleotide
tctgggtgttatgagacgcccggtacccct

SEQ ID NO: 208707 - DNA, 30 bp, Artificial Sequence
  Synthetic oligonucleotide
actttgataaagaccgaacagaaaccccct

SEQ ID NO: 208708 - DNA, 30 bp, Artificial Sequence
  Synthetic oligonucleotide
gctcgggtgacaagaattacaagcccccct

SEQ ID NO: 208709 - DNA, 30 bp, Artificial Sequence
  Synthetic oligonucleotide
gtggaatgcaaccttgtcaggtggccccct

SEQ ID NO: 208710 - DNA, 30 bp, Artificial Sequence
  Synthetic oligonucleotide
actggtgcccgaggttttctaagtccccct

SEQ ID NO: 208711 - DNA, 30 bp, Artificial Sequence
  Synthetic oligonucleotide
actctcgcgctacagagaccacaagcccct

SEQ ID NO: 208712 - DNA, 30 bp, Artificial Sequence
  Synthetic oligonucleotide
agactctatttcgtaaggctaagagcccct

SEQ ID NO: 208713 - DNA, 30 bp, Artificial Sequence
  Synthetic oligonucleotide
cgcgacgagagcgatagggacaactcccct

SEQ ID NO: 208714 - DNA, 30 bp, Artificial Sequence
  Synthetic oligonucleotide
ggtcagtcttgctatcttcacgcctcccct

SEQ ID NO: 208715 - DNA, 30 bp, Artificial Sequence
  Synthetic oligonucleotide
cgagaggaatctgcaaagggtgcctcccct

SEQ ID NO: 208716 - DNA, 30 bp, Artificial Sequence
  Synthetic oligonucleotide
ccataggatggtcttgtgaggttcagccct

SEQ ID NO: 208717 - DNA, 30 bp, Artificial Sequence
  Synthetic oligonucleotide
tgacggtaggggaggccagatgggagccct

SEQ ID NO: 208718 - DNA, 30 bp, Artificial Sequence
  Synthetic oligonucleotide
atctgagcgagtcacaatcttgtgagccct

SEQ ID NO: 208719 - DNA, 30 bp, Artificial Sequence
  Synthetic oligonucleotide
aaccgccggatggtctcgattcctagccct

SEQ ID NO: 208720 - DNA, 30 bp, Artificial Sequence
  Synthetic oligonucleotide
agagactgcttattctcgtgagttagccct

SEQ ID NO: 208721 - DNA, 30 bp, Artificial Sequence
  Synthetic oligonucleotide
taaaggaacagtctttgaccaaaacgccct

SEQ ID NO: 208722 - DNA, 30 bp, Artificial Sequence
  Synthetic oligonucleotide
ctgggacttgcaacagtaaactaacgccct

SEQ ID NO: 208723 - DNA, 30 bp, Artificial Sequence
  Synthetic oligonucleotide
gacagccgcctaaggagagacctacgccct

SEQ ID NO: 208724 - DNA, 30 bp, Artificial Sequence
  Synthetic oligonucleotide
gttcttggagccggtaacagcaatcgccct

SEQ ID NO: 208725 - DNA, 30 bp, Artificial Sequence
  Synthetic oligonucleotide
gcaccggcataatatatactgaatcgccct

SEQ ID NO: 208726 - DNA, 30 bp, Artificial Sequence
  Synthetic oligonucleotide
ggacgctatcaatagtactggagaggccct

SEQ ID NO: 208727 - DNA, 30 bp, Artificial Sequence
  Synthetic oligonucleotide
actcggagtccagacggcgccacgggccct

SEQ ID NO: 208728 - DNA, 30 bp, Artificial Sequence
  Synthetic oligonucleotide
ctctgaagtaggtatacgccaggatgccct

SEQ ID NO: 208729 - DNA, 30 bp, Artificial Sequence
  Synthetic oligonucleotide
cgccgactgacttttcttacgaactgccct

SEQ ID NO: 208730 - DNA, 30 bp, Artificial Sequence
  Synthetic oligonucleotide
ctgcataatggaatttgtgttacctgccct

SEQ ID NO: 208731 - DNA, 30 bp, Artificial Sequence
  Synthetic oligonucleotide
tcggatccagccgaggcctgcggcatccct

SEQ ID NO: 208732 - DNA, 30 bp, Artificial Sequence
  Synthetic oligonucleotide
gctaatgctgttagatggaactagatccct

SEQ ID NO: 208733 - DNA, 31 bp, Artificial Sequence
  Synthetic oligonucleotide
agggtaagtaactcaggtattccgtatccct

SEQ ID NO: 208734 - DNA, 30 bp, Artificial Sequence
  Synthetic oligonucleotide
gtgggtatcaagctgctgcgcaacctccct

SEQ ID NO: 208735 - DNA, 30 bp, Artificial Sequence
  Synthetic oligonucleotide
ccaggccaacagggacgccatgacctccct

SEQ ID NO: 208736 - DNA, 30 bp, Artificial Sequence
  Synthetic oligonucleotide
ccctgagggcacgaaggcgtgctgctccct

SEQ ID NO: 208737 - DNA, 30 bp, Artificial Sequence
  Synthetic oligonucleotide
atccaaagtcgatgttcaaaaattctccct

SEQ ID NO: 208738 - DNA, 30 bp, Artificial Sequence
  Synthetic oligonucleotide
tgaggggcgcatctctctatgtcaaagcct

SEQ ID NO: 208739 - DNA, 30 bp, Artificial Sequence
  Synthetic oligonucleotide
atacgtcactttggggcaacaaccaagcct

SEQ ID NO: 208740 - DNA, 30 bp, Artificial Sequence
  Synthetic oligonucleotide
aggtacggaaattggtatgggaagaagcct

SEQ ID NO: 208741 - DNA, 30 bp, Artificial Sequence
  Synthetic oligonucleotide
atcccgcgcatgaaagtagacatgaagcct

SEQ ID NO: 208742 - DNA, 30 bp, Artificial Sequence
  Synthetic oligonucleotide
atggctgtaaacgtgtaaattgttaagcct

SEQ ID NO: 208743 - DNA, 30 bp, Artificial Sequence
  Synthetic oligonucleotide
cctgcgttgagcaagatacgaatgcagcct

SEQ ID NO: 208744 - DNA, 30 bp, Artificial Sequence
  Synthetic oligonucleotide
actgctggactgtagaaccctgttcagcct

SEQ ID NO: 208745 - DNA, 30 bp, Artificial Sequence
  Synthetic oligonucleotide
cctataatatgcacattcgaaggagagcct

SEQ ID NO: 208746 - DNA, 30 bp, Artificial Sequence
  Synthetic oligonucleotide
ctcgtatgtttaggtggcatgggctagcct

SEQ ID NO: 208747 - DNA, 30 bp, Artificial Sequence
  Synthetic oligonucleotide
cattgtagagtacaggtaagccagtagcct

SEQ ID NO: 208748 - DNA, 30 bp, Artificial Sequence
  Synthetic oligonucleotide
aaaacgtgagccaacatcccaatgtagcct

SEQ ID NO: 208749 - DNA, 30 bp, Artificial Sequence
  Synthetic oligonucleotide
cgactcgccacaaaacgttccaacacgcct

SEQ ID NO: 208750 - DNA, 30 bp, Artificial Sequence
  Synthetic oligonucleotide
agcgggggggacaccgactgacagacgcct

SEQ ID NO: 208751 - DNA, 30 bp, Artificial Sequence
  Synthetic oligonucleotide
aaacgagtggtaggtaagaagacaccgcct

SEQ ID NO: 208752 - DNA, 30 bp, Artificial Sequence
  Synthetic oligonucleotide
tgctttgaaagaggaacttggccgccgcct

SEQ ID NO: 208753 - DNA, 30 bp, Artificial Sequence
  Synthetic oligonucleotide
cggggcaaagtaaacgcatatgtgccgcct

SEQ ID NO: 208754 - DNA, 30 bp, Artificial Sequence
  Synthetic oligonucleotide
gttggatagcttcggaactgacctccgcct

SEQ ID NO: 208755 - DNA, 30 bp, Artificial Sequence
  Synthetic oligonucleotide
tgcgaatatcgtatgtagtttcaggcgcct

SEQ ID NO: 208756 - DNA, 30 bp, Artificial Sequence
  Synthetic oligonucleotide
ttggtggaccgccctcccaggaatgcgcct

SEQ ID NO: 208757 - DNA, 30 bp, Artificial Sequence
  Synthetic oligonucleotide
gtactgtccggtgaccagattgatgcgcct

SEQ ID NO: 208758 - DNA, 30 bp, Artificial Sequence
  Synthetic oligonucleotide
agggcataggatagttatcgaggtgcgcct

SEQ ID NO: 208759 - DNA, 30 bp, Artificial Sequence
  Synthetic oligonucleotide
gcacaaagccaggtaccggcacgctcgcct

SEQ ID NO: 208760 - DNA, 30 bp, Artificial Sequence
  Synthetic oligonucleotide
agacaggtcccatatggccacctttcgcct

SEQ ID NO: 208761 - DNA, 30 bp, Artificial Sequence
  Synthetic oligonucleotide
cttggatcacccctgaagagcgaaaggcct

SEQ ID NO: 208762 - DNA, 30 bp, Artificial Sequence
  Synthetic oligonucleotide
cgcgatggtatgatactagggccaaggcct

SEQ ID NO: 208763 - DNA, 30 bp, Artificial Sequence
  Synthetic oligonucleotide
agaaaggacgtagggttagctctcaggcct

SEQ ID NO: 208764 - DNA, 30 bp, Artificial Sequence
  Synthetic oligonucleotide
tggatgggttccgcgtagacagtgcggcct

SEQ ID NO: 208765 - DNA, 30 bp, Artificial Sequence
  Synthetic oligonucleotide
gtaagatgagagtatcgccctgatcggcct

SEQ ID NO: 208766 - DNA, 30 bp, Artificial Sequence
  Synthetic oligonucleotide
aggagtgtgatcgctgttccacttcggcct

SEQ ID NO: 208767 - DNA, 30 bp, Artificial Sequence
  Synthetic oligonucleotide
atgaagggcataatagttcagggagggcct

SEQ ID NO: 208768 - DNA, 30 bp, Artificial Sequence
  Synthetic oligonucleotide
atgagggagaccggctcaccccacgggcct

SEQ ID NO: 208769 - DNA, 30 bp, Artificial Sequence
  Synthetic oligonucleotide
ctaggcgccgtacttcgtaccttggggcct

SEQ ID NO: 208770 - DNA, 30 bp, Artificial Sequence
  Synthetic oligonucleotide
gctatacactttgtccggaagtgatggcct

SEQ ID NO: 208771 - DNA, 30 bp, Artificial Sequence
  Synthetic oligonucleotide
tggatctgaacctgcaaagacacaatgcct

SEQ ID NO: 208772 - DNA, 30 bp, Artificial Sequence
  Synthetic oligonucleotide
agggggtattaagcaaagcggctaatgcct

SEQ ID NO: 208773 - DNA, 30 bp, Artificial Sequence
  Synthetic oligonucleotide
gaggtatacatgtggacttgacgtatgcct

SEQ ID NO: 208774 - DNA, 30 bp, Artificial Sequence
  Synthetic oligonucleotide
ggtgagtctaggaacaatgaaattatgcct

SEQ ID NO: 208775 - DNA, 30 bp, Artificial Sequence
  Synthetic oligonucleotide
acataacggtcgatgcgggcccacctgcct

SEQ ID NO: 208776 - DNA, 30 bp, Artificial Sequence
  Synthetic oligonucleotide
aggaataccgcatgcctctggaccctgcct

SEQ ID NO: 208777 - DNA, 30 bp, Artificial Sequence
  Synthetic oligonucleotide
gccgaatgatagtgtctgaaaaatctgcct

SEQ ID NO: 208778 - DNA, 30 bp, Artificial Sequence
  Synthetic oligonucleotide
caatatgcggattgagaagccaaagtgcct

SEQ ID NO: 208779 - DNA, 30 bp, Artificial Sequence
  Synthetic oligonucleotide
ggccaagtgtgggacggaaggtaagtgcct

SEQ ID NO: 208780 - DNA, 30 bp, Artificial Sequence
  Synthetic oligonucleotide
ctccaaacatgcgatttatcaggcgtgcct

SEQ ID NO: 208781 - DNA, 30 bp, Artificial Sequence
  Synthetic oligonucleotide
ttcgagaagtctatatagggcctattgcct

SEQ ID NO: 208782 - DNA, 30 bp, Artificial Sequence
  Synthetic oligonucleotide
tcatcagacatcgactctcaagggttgcct

SEQ ID NO: 208783 - DNA, 30 bp, Artificial Sequence
  Synthetic oligonucleotide
gcatcggaaggcaaaaaacgatggttgcct

SEQ ID NO: 208784 - DNA, 30 bp, Artificial Sequence
  Synthetic oligonucleotide
cctttagtgatcctacgtttacatttgcct

SEQ ID NO: 208785 - DNA, 30 bp, Artificial Sequence
  Synthetic oligonucleotide
tcgctgtggatgcaagataatcaaaatcct

SEQ ID NO: 208786 - DNA, 30 bp, Artificial Sequence
  Synthetic oligonucleotide
tgtcgtcgcgcgtaagggcacgccaatcct

SEQ ID NO: 208787 - DNA, 30 bp, Artificial Sequence
  Synthetic oligonucleotide
cactttggacagggtctactacataatcct

SEQ ID NO: 208788 - DNA, 30 bp, Artificial Sequence
  Synthetic oligonucleotide
cagtcggcagacactaaggtgtgtaatcct

SEQ ID NO: 208789 - DNA, 30 bp, Artificial Sequence
  Synthetic oligonucleotide
accgcccttattccgtacccatttaatcct

SEQ ID NO: 208790 - DNA, 30 bp, Artificial Sequence
  Synthetic oligonucleotide
acatatgacagcaataaaacaaaacatcct

SEQ ID NO: 208791 - DNA, 30 bp, Artificial Sequence
  Synthetic oligonucleotide
gagggtgtagcggaagtaatgtcccatcct

SEQ ID NO: 208792 - DNA, 30 bp, Artificial Sequence
  Synthetic oligonucleotide
acgttaagattcctctccaagcagcatcct

SEQ ID NO: 208793 - DNA, 30 bp, Artificial Sequence
  Synthetic oligonucleotide
tagttacgacagactacattcccgcatcct

SEQ ID NO: 208794 - DNA, 30 bp, Artificial Sequence
  Synthetic oligonucleotide
ttcttatgatagcactggagtgtgcatcct

SEQ ID NO: 208795 - DNA, 30 bp, Artificial Sequence
  Synthetic oligonucleotide
gtgataagtctcaatagatcattgcatcct

SEQ ID NO: 208796 - DNA, 30 bp, Artificial Sequence
  Synthetic oligonucleotide
ttgcgcgaaacaacctttgtccaagatcct

SEQ ID NO: 208797 - DNA, 30 bp, Artificial Sequence
  Synthetic oligonucleotide
gggatagcatcaagaacgagcgtagatcct

SEQ ID NO: 208798 - DNA, 30 bp, Artificial Sequence
  Synthetic oligonucleotide
atacacacacagagaaaaccaatcgatcct

SEQ ID NO: 208799 - DNA, 30 bp, Artificial Sequence
  Synthetic oligonucleotide
tatataaaaacacgtcggaaggcggatcct

SEQ ID NO: 208800 - DNA, 30 bp, Artificial Sequence
  Synthetic oligonucleotide
ctaaataacagtagacagcatggggatcct

SEQ ID NO: 208801 - DNA, 30 bp, Artificial Sequence
  Synthetic oligonucleotide
agggaccagcagtgaactaatatggatcct

SEQ ID NO: 208802 - DNA, 30 bp, Artificial Sequence
  Synthetic oligonucleotide
gcgaatgaaccagttgcaggctgctatcct

SEQ ID NO: 208803 - DNA, 28 bp, Artificial Sequence
  Synthetic oligonucleotide
caacgagatcccttgaatgaagtatcct

SEQ ID NO: 208804 - DNA, 30 bp, Artificial Sequence
  Synthetic oligonucleotide
aacagatcgataagacaggggtagtatcct

SEQ ID NO: 208805 - DNA, 30 bp, Artificial Sequence
  Synthetic oligonucleotide
ctagattaccaacggcgaaaagcgtatcct

SEQ ID NO: 208806 - DNA, 30 bp, Artificial Sequence
  Synthetic oligonucleotide
tagtaccctcaagcttaggaaattactcct

SEQ ID NO: 208807 - DNA, 30 bp, Artificial Sequence
  Synthetic oligonucleotide
tgcgaccgaacatctgatggtacccctcct

SEQ ID NO: 208808 - DNA, 30 bp, Artificial Sequence
  Synthetic oligonucleotide
ggatagagatccgcacctaacaagcctcct

SEQ ID NO: 208809 - DNA, 30 bp, Artificial Sequence
  Synthetic oligonucleotide
taaccgcaagaccacctgtacaagcctcct

SEQ ID NO: 208810 - DNA, 30 bp, Artificial Sequence
  Synthetic oligonucleotide
gggctatggcaagcggaatgcagcgctcct

SEQ ID NO: 208811 - DNA, 30 bp, Artificial Sequence
  Synthetic oligonucleotide
tagaactacaagaggcctagggcggctcct

SEQ ID NO: 208812 - DNA, 30 bp, Artificial Sequence
  Synthetic oligonucleotide
tcgcaataatccaatgagagagggagtcct

SEQ ID NO: 208813 - DNA, 30 bp, Artificial Sequence
  Synthetic oligonucleotide
ctccgatgtgtgcgtaatccaaggcgtcct

SEQ ID NO: 208814 - DNA, 30 bp, Artificial Sequence
  Synthetic oligonucleotide
agtgacttcaatgcatgaaaccagggtcct

SEQ ID NO: 208815 - DNA, 30 bp, Artificial Sequence
  Synthetic oligonucleotide
gttcattacactgaagtaaaatagggtcct

SEQ ID NO: 208816 - DNA, 30 bp, Artificial Sequence
  Synthetic oligonucleotide
tgcgttgcatatgtaggcctaggatgtcct

SEQ ID NO: 208817 - DNA, 30 bp, Artificial Sequence
  Synthetic oligonucleotide
accggtataaggctacaaatctgatgtcct

SEQ ID NO: 208818 - DNA, 30 bp, Artificial Sequence
  Synthetic oligonucleotide
tcacaaacaatctaccacatgtactgtcct

SEQ ID NO: 208819 - DNA, 30 bp, Artificial Sequence
  Synthetic oligonucleotide
gattacgtggtgtcgctccgccagtgtcct

SEQ ID NO: 208820 - DNA, 30 bp, Artificial Sequence
  Synthetic oligonucleotide
ttgggcacttcggtcaccatttggtgtcct

SEQ ID NO: 208821 - DNA, 30 bp, Artificial Sequence
  Synthetic oligonucleotide
caaggcataaacttatgggtgcaaattcct

SEQ ID NO: 208822 - DNA, 29 bp, Artificial Sequence
  Synthetic oligonucleotide
acgaagacaagtatccagaaaacattcct

SEQ ID NO: 208823 - DNA, 30 bp, Artificial Sequence
  Synthetic oligonucleotide
gacgggagatgaaagctcttcacagttcct

SEQ ID NO: 208824 - DNA, 30 bp, Artificial Sequence
  Synthetic oligonucleotide
ctccggatgccttctgtaaagatagttcct

SEQ ID NO: 208825 - DNA, 30 bp, Artificial Sequence
  Synthetic oligonucleotide
acggtcatggttcacatcaactgggttcct

SEQ ID NO: 208826 - DNA, 30 bp, Artificial Sequence
  Synthetic oligonucleotide
ggggccgttcgaaaggttcctagtgttcct

SEQ ID NO: 208827 - DNA, 30 bp, Artificial Sequence
  Synthetic oligonucleotide
ggggggcaggttgcgcattctgcatttcct

SEQ ID NO: 208828 - DNA, 30 bp, Artificial Sequence
  Synthetic oligonucleotide
ggtgtcactcggcatgttcaacggtttcct

SEQ ID NO: 208829 - DNA, 30 bp, Artificial Sequence
  Synthetic oligonucleotide
ggaagtgcactaaaatcttgggaaaaagct

SEQ ID NO: 208830 - DNA, 30 bp, Artificial Sequence
  Synthetic oligonucleotide
acaatgcatataagaccttgtagaaaagct

SEQ ID NO: 208831 - DNA, 30 bp, Artificial Sequence
  Synthetic oligonucleotide
ataagagaagacggaggcccttgaaaagct

SEQ ID NO: 208832 - DNA, 30 bp, Artificial Sequence
  Synthetic oligonucleotide
atccgcgccgtggtgaaggtttgaaaagct

SEQ ID NO: 208833 - DNA, 30 bp, Artificial Sequence
  Synthetic oligonucleotide
cgcagtaaactacgagtctgagtaaaagct

SEQ ID NO: 208834 - DNA, 30 bp, Artificial Sequence
  Synthetic oligonucleotide
gccaaccggctatcgaggacattaaaagct

SEQ ID NO: 208835 - DNA, 30 bp, Artificial Sequence
  Synthetic oligonucleotide
gacaagcgactgccagaatcaaacaaagct

SEQ ID NO: 208836 - DNA, 30 bp, Artificial Sequence
  Synthetic oligonucleotide
tgagcttcaaattaattaatggagaaagct

SEQ ID NO: 208837 - DNA, 30 bp, Artificial Sequence
  Synthetic oligonucleotide
caccgacatttggcaccgatgggacaagct

SEQ ID NO: 208838 - DNA, 30 bp, Artificial Sequence
  Synthetic oligonucleotide
cgaaggagttcgcgccacgatgtacaagct

SEQ ID NO: 208839 - DNA, 30 bp, Artificial Sequence
  Synthetic oligonucleotide
ataatcaattgataccagacgtgccaagct

SEQ ID NO: 208840 - DNA, 30 bp, Artificial Sequence
  Synthetic oligonucleotide
acggagtgtatcggtgggtttttccaagct

SEQ ID NO: 208841 - DNA, 30 bp, Artificial Sequence
  Synthetic oligonucleotide
tcatcgttatgacccttcaaaagtcaagct

SEQ ID NO: 208842 - DNA, 30 bp, Artificial Sequence
  Synthetic oligonucleotide
gcgaacttcactactcgagcctgtcaagct

SEQ ID NO: 208843 - DNA, 30 bp, Artificial Sequence
  Synthetic oligonucleotide
acttgagtgaatattattgtaaccgaagct

SEQ ID NO: 208844 - DNA, 30 bp, Artificial Sequence
  Synthetic oligonucleotide
tacgtacgaataggtttacgtaccgaagct

SEQ ID NO: 208845 - DNA, 30 bp, Artificial Sequence
  Synthetic oligonucleotide
tcagaccaactgcaaatttgtaccgaagct

SEQ ID NO: 208846 - DNA, 30 bp, Artificial Sequence
  Synthetic oligonucleotide
tgatgcacctgtcagtgtcagtccgaagct

SEQ ID NO: 208847 - DNA, 30 bp, Artificial Sequence
  Synthetic oligonucleotide
ttacgcgggacacccacctatagcgaagct

SEQ ID NO: 208848 - DNA, 30 bp, Artificial Sequence
  Synthetic oligonucleotide
tctacccacaaatctcgcgagcgcgaagct

SEQ ID NO: 208849 - DNA, 30 bp, Artificial Sequence
  Synthetic oligonucleotide
gctggattccccgggggaccgtatgaagct

SEQ ID NO: 208850 - DNA, 30 bp, Artificial Sequence
  Synthetic oligonucleotide
tccatccagataatgaggggggactaagct

SEQ ID NO: 208851 - DNA, 30 bp, Artificial Sequence
  Synthetic oligonucleotide
gtggtcccgttgagacacactagctaagct

SEQ ID NO: 208852 - DNA, 30 bp, Artificial Sequence
  Synthetic oligonucleotide
gagataggttgcctgttagaaggctaagct

SEQ ID NO: 208853 - DNA, 30 bp, Artificial Sequence
  Synthetic oligonucleotide
cattctgaaccgtgaaagagggattaagct

SEQ ID NO: 208854 - DNA, 30 bp, Artificial Sequence
  Synthetic oligonucleotide
gactaatctgcccacactctgtattaagct

SEQ ID NO: 208855 - DNA, 30 bp, Artificial Sequence
  Synthetic oligonucleotide
ccagaaaatgtaccaagcagttcttaagct

SEQ ID NO: 208856 - DNA, 30 bp, Artificial Sequence
  Synthetic oligonucleotide
ggtccggtaataagcaaaacggtttaagct

SEQ ID NO: 208857 - DNA, 30 bp, Artificial Sequence
  Synthetic oligonucleotide
gcgtgcggcccatgcacaatctggacagct

SEQ ID NO: 208858 - DNA, 30 bp, Artificial Sequence
  Synthetic oligonucleotide
attgaggggcgtagagattaccttacagct

SEQ ID NO: 208859 - DNA, 30 bp, Artificial Sequence
  Synthetic oligonucleotide
atgaggttcaaagtgtcggttcttccagct

SEQ ID NO: 208860 - DNA, 30 bp, Artificial Sequence
  Synthetic oligonucleotide
tgagtcgagttcccggatctctgggcagct

SEQ ID NO: 208861 - DNA, 30 bp, Artificial Sequence
  Synthetic oligonucleotide
gccgggtacggtcctaaaaattcatcagct

SEQ ID NO: 208862 - DNA, 30 bp, Artificial Sequence
  Synthetic oligonucleotide
gaggtgcgcgtcagcaggaggtgatcagct

SEQ ID NO: 208863 - DNA, 30 bp, Artificial Sequence
  Synthetic oligonucleotide
tcactctacggccggcttcacagttcagct

SEQ ID NO: 208864 - DNA, 30 bp, Artificial Sequence
  Synthetic oligonucleotide
gtcggaaagcgagcggtaaaaatacgagct

SEQ ID NO: 208865 - DNA, 30 bp, Artificial Sequence
  Synthetic oligonucleotide
gcgcaagagctagttgacccggatcgagct

SEQ ID NO: 208866 - DNA, 30 bp, Artificial Sequence
  Synthetic oligonucleotide
acgaggttgcttgatcgtgactcaggagct

SEQ ID NO: 208867 - DNA, 30 bp, Artificial Sequence
  Synthetic oligonucleotide
aggatatacgtaatcaattgtatcggagct

SEQ ID NO: 208868 - DNA, 30 bp, Artificial Sequence
  Synthetic oligonucleotide
catcatagtacatcctgaccaaggggagct

SEQ ID NO: 208869 - DNA, 30 bp, Artificial Sequence
  Synthetic oligonucleotide
actagtatggggaatgtgaggaactgagct

SEQ ID NO: 208870 - DNA, 30 bp, Artificial Sequence
  Synthetic oligonucleotide
atggcgtagaaccatgtagcattctgagct

SEQ ID NO: 208871 - DNA, 30 bp, Artificial Sequence
  Synthetic oligonucleotide
ctttcgtatacagtgtgcgctaagtgagct

SEQ ID NO: 208872 - DNA, 30 bp, Artificial Sequence
  Synthetic oligonucleotide
tatggcgatcgcaaactatataggtgagct

SEQ ID NO: 208873 - DNA, 30 bp, Artificial Sequence
  Synthetic oligonucleotide
cttgtgcgccaaggtccaggagattgagct

SEQ ID NO: 208874 - DNA, 30 bp, Artificial Sequence
  Synthetic oligonucleotide
aggtgaccctgcccttactagccttgagct

SEQ ID NO: 208875 - DNA, 30 bp, Artificial Sequence
  Synthetic oligonucleotide
ctcggaggacaagacggttactgtatagct

SEQ ID NO: 208876 - DNA, 30 bp, Artificial Sequence
  Synthetic oligonucleotide
acgacagttagttaagagaaccttatagct

SEQ ID NO: 208877 - DNA, 30 bp, Artificial Sequence
  Synthetic oligonucleotide
ccgcaaggcgcgtttactggtatggtagct

SEQ ID NO: 208878 - DNA, 30 bp, Artificial Sequence
  Synthetic oligonucleotide
gtgccaactgcgtcatcaacgcgattagct

SEQ ID NO: 208879 - DNA, 30 bp, Artificial Sequence
  Synthetic oligonucleotide
gctaatccagggtgtcataaacggttagct

SEQ ID NO: 208880 - DNA, 30 bp, Artificial Sequence
  Synthetic oligonucleotide
cgtggcctaaccagaatctctagcaacgct

SEQ ID NO: 208881 - DNA, 30 bp, Artificial Sequence
  Synthetic oligonucleotide
tcttgcacactgcaagttaatgtgaacgct

SEQ ID NO: 208882 - DNA, 30 bp, Artificial Sequence
  Synthetic oligonucleotide
gcgatacccccagttctaaaatatcacgct

SEQ ID NO: 208883 - DNA, 30 bp, Artificial Sequence
  Synthetic oligonucleotide
caagcctggcaagggtaagatcattacgct

SEQ ID NO: 208884 - DNA, 30 bp, Artificial Sequence
  Synthetic oligonucleotide
agtctcactggccgcctacgaagaaccgct

SEQ ID NO: 208885 - DNA, 30 bp, Artificial Sequence
  Synthetic oligonucleotide
cgtgtggctacacttaacgatgacaccgct

SEQ ID NO: 208886 - DNA, 30 bp, Artificial Sequence
  Synthetic oligonucleotide
attgtaggtgtaaagcgtaaaagtaccgct

SEQ ID NO: 208887 - DNA, 30 bp, Artificial Sequence
  Synthetic oligonucleotide
tatggtagacctgatagggagttacccgct

SEQ ID NO: 208888 - DNA, 30 bp, Artificial Sequence
  Synthetic oligonucleotide
tttcgggatgtaatcaaaggcgtgcccgct

SEQ ID NO: 208889 - DNA, 30 bp, Artificial Sequence
  Synthetic oligonucleotide
gctcccctggaactgagtttcgtagccgct

SEQ ID NO: 208890 - DNA, 30 bp, Artificial Sequence
  Synthetic oligonucleotide
tcttaggagttatccactggttatgccgct

SEQ ID NO: 208891 - DNA, 30 bp, Artificial Sequence
  Synthetic oligonucleotide
gaactgagggtccgtcagttcggtgccgct

SEQ ID NO: 208892 - DNA, 30 bp, Artificial Sequence
  Synthetic oligonucleotide
ctacgcggattcagtgttgcgagatccgct

SEQ ID NO: 208893 - DNA, 30 bp, Artificial Sequence
  Synthetic oligonucleotide
actaggtgggcaactttaatttgatccgct

SEQ ID NO: 208894 - DNA, 31 bp, Artificial Sequence
  Synthetic oligonucleotide
cgcttcataatacacatcggtggcaagcgct

SEQ ID NO: 208895 - DNA, 30 bp, Artificial Sequence
  Synthetic oligonucleotide
tcacatcggaccttaaagattagaagcgct

SEQ ID NO: 208896 - DNA, 30 bp, Artificial Sequence
  Synthetic oligonucleotide
ataaacgtaaacgcgcgaataagcagcgct

SEQ ID NO: 208897 - DNA, 30 bp, Artificial Sequence
  Synthetic oligonucleotide
aaatggggcactaagaaatgtaggagcgct

SEQ ID NO: 208898 - DNA, 30 bp, Artificial Sequence
  Synthetic oligonucleotide
acagatgagaccgccggatcgcctagcgct

SEQ ID NO: 208899 - DNA, 30 bp, Artificial Sequence
  Synthetic oligonucleotide
tccaaagcagacagcacaacaacacgcgct

SEQ ID NO: 208900 - DNA, 30 bp, Artificial Sequence
  Synthetic oligonucleotide
acattagtgttgaagagaccacaccgcgct

SEQ ID NO: 208901 - DNA, 30 bp, Artificial Sequence
  Synthetic oligonucleotide
gcccgtaaattgaaacgataagcccgcgct

SEQ ID NO: 208902 - DNA, 30 bp, Artificial Sequence
  Synthetic oligonucleotide
tgagtaagtgtaacatacaatggccgcgct

SEQ ID NO: 208903 - DNA, 30 bp, Artificial Sequence
  Synthetic oligonucleotide
atcacggactgataggatgttttcggcgct

SEQ ID NO: 208904 - DNA, 30 bp, Artificial Sequence
  Synthetic oligonucleotide
gctggcggtactcgttagaaccagggcgct

SEQ ID NO: 208905 - DNA, 30 bp, Artificial Sequence
  Synthetic oligonucleotide
caaagttccattatttaaagttgctgcgct

SEQ ID NO: 208906 - DNA, 30 bp, Artificial Sequence
  Synthetic oligonucleotide
atggaaatgcccccatttgatacgtgcgct

SEQ ID NO: 208907 - DNA, 30 bp, Artificial Sequence
  Synthetic oligonucleotide
tgtgtgcatgcaaagccagatgcgtgcgct

SEQ ID NO: 208908 - DNA, 30 bp, Artificial Sequence
  Synthetic oligonucleotide
atgccgcggggggctttatatcgttgcgct

SEQ ID NO: 208909 - DNA, 30 bp, Artificial Sequence
  Synthetic oligonucleotide
atcgtgggggcgccctccctgcaaatcgct

SEQ ID NO: 208910 - DNA, 30 bp, Artificial Sequence
  Synthetic oligonucleotide
agaatgacggacaaccaagcaacaatcgct

SEQ ID NO: 208911 - DNA, 30 bp, Artificial Sequence
  Synthetic oligonucleotide
tactaaaatggggccgggggtgtcatcgct

SEQ ID NO: 208912 - DNA, 30 bp, Artificial Sequence
  Synthetic oligonucleotide
tacagggtatatggccgatctttactcgct

SEQ ID NO: 208913 - DNA, 30 bp, Artificial Sequence
  Synthetic oligonucleotide
gtgcctgcacaggaaacctgaggagtcgct

SEQ ID NO: 208914 - DNA, 30 bp, Artificial Sequence
  Synthetic oligonucleotide
gcatgaaataaaggagttgccaccgtcgct

SEQ ID NO: 208915 - DNA, 30 bp, Artificial Sequence
  Synthetic oligonucleotide
cacatagcacgcctgaaaatagctttcgct

SEQ ID NO: 208916 - DNA, 30 bp, Artificial Sequence
  Synthetic oligonucleotide
ccgtcggaccccgttacgtcacaaaaggct

SEQ ID NO: 208917 - DNA, 30 bp, Artificial Sequence
  Synthetic oligonucleotide
agaggggagagaagtcatctctgaaaggct

SEQ ID NO: 208918 - DNA, 30 bp, Artificial Sequence
  Synthetic oligonucleotide
agggcggctcgcatagtaaggcgtaaggct

SEQ ID NO: 208919 - DNA, 30 bp, Artificial Sequence
  Synthetic oligonucleotide
aatagggtatgccaatcaaacaggcaggct

SEQ ID NO: 208920 - DNA, 30 bp, Artificial Sequence
  Synthetic oligonucleotide
agttaattacggtggaataggcctcaggct

SEQ ID NO: 208921 - DNA, 30 bp, Artificial Sequence
  Synthetic oligonucleotide
acgtgtgatcttctaattcttcctcaggct

SEQ ID NO: 208922 - DNA, 30 bp, Artificial Sequence
  Synthetic oligonucleotide
acgatacgaccaacgcgttttattcaggct

SEQ ID NO: 208923 - DNA, 30 bp, Artificial Sequence
  Synthetic oligonucleotide
cctcaataaagaacatgtgtggtagaggct

SEQ ID NO: 208924 - DNA, 30 bp, Artificial Sequence
  Synthetic oligonucleotide
cgcgtgagagcagaattgagattagaggct

SEQ ID NO: 208925 - DNA, 30 bp, Artificial Sequence
  Synthetic oligonucleotide
gcgcggtccctttagaacccataggaggct

SEQ ID NO: 208926 - DNA, 30 bp, Artificial Sequence
  Synthetic oligonucleotide
attgttaaccttcattctccgcgtgaggct

SEQ ID NO: 208927 - DNA, 30 bp, Artificial Sequence
  Synthetic oligonucleotide
attatacaatttaaacttggtcaataggct

SEQ ID NO: 208928 - DNA, 30 bp, Artificial Sequence
  Synthetic oligonucleotide
agacaatccgaacggcatcctaattaggct

SEQ ID NO: 208929 - DNA, 30 bp, Artificial Sequence
  Synthetic oligonucleotide
tcatacaatcccacaggttgcagaacggct

SEQ ID NO: 208930 - DNA, 30 bp, Artificial Sequence
  Synthetic oligonucleotide
actatcaatgacaagagtagcctaacggct

SEQ ID NO: 208931 - DNA, 30 bp, Artificial Sequence
  Synthetic oligonucleotide
tggcgtccccaaggttatcacgcaccggct

SEQ ID NO: 208932 - DNA, 30 bp, Artificial Sequence
  Synthetic oligonucleotide
gaacgaggtttcaagggagggagaccggct

SEQ ID NO: 208933 - DNA, 30 bp, Artificial Sequence
  Synthetic oligonucleotide
cacgacacttaggctgatataaacccggct

SEQ ID NO: 208934 - DNA, 30 bp, Artificial Sequence
  Synthetic oligonucleotide
tcgtattgcgttcttacgtaacatccggct

SEQ ID NO: 208935 - DNA, 30 bp, Artificial Sequence
  Synthetic oligonucleotide
ttagcgagaggaattgaaagacgtccggct

SEQ ID NO: 208936 - DNA, 30 bp, Artificial Sequence
  Synthetic oligonucleotide
atgatgacttgcctcgatgtccgagcggct

SEQ ID NO: 208937 - DNA, 30 bp, Artificial Sequence
  Synthetic oligonucleotide
tgcaaactcgtcggtatatccgtggcggct

SEQ ID NO: 208938 - DNA, 30 bp, Artificial Sequence
  Synthetic oligonucleotide
tccaaacagcttgccatagcgattgcggct

SEQ ID NO: 208939 - DNA, 30 bp, Artificial Sequence
  Synthetic oligonucleotide
tcgacgactgacgcttgtggacgatcggct

SEQ ID NO: 208940 - DNA, 30 bp, Artificial Sequence
  Synthetic oligonucleotide
tgtcaggttaatagacatcagttctcggct

SEQ ID NO: 208941 - DNA, 35 bp, Artificial Sequence
  Synthetic oligonucleotide
cggtgggaataattggaagaacggctcggtcggct

SEQ ID NO: 208942 - DNA, 30 bp, Artificial Sequence
  Synthetic oligonucleotide
agacaactccgttcgactagctcaagggct

SEQ ID NO: 208943 - DNA, 30 bp, Artificial Sequence
  Synthetic oligonucleotide
ttgtgtggctaaactttctgtgtaagggct

SEQ ID NO: 208944 - DNA, 30 bp, Artificial Sequence
  Synthetic oligonucleotide
cgaaaggctcactatttgttgcggagggct

SEQ ID NO: 208945 - DNA, 30 bp, Artificial Sequence
  Synthetic oligonucleotide
gaacgcgtcgggatgtcatctttgagggct

SEQ ID NO: 208946 - DNA, 30 bp, Artificial Sequence
  Synthetic oligonucleotide
agacttggcgataccaacatagatagggct

SEQ ID NO: 208947 - DNA, 30 bp, Artificial Sequence
  Synthetic oligonucleotide
tgttaaacgataacggatacggtacgggct

SEQ ID NO: 208948 - DNA, 30 bp, Artificial Sequence
  Synthetic oligonucleotide
ggtggggtgtaggactgagttaggcgggct

SEQ ID NO: 208949 - DNA, 30 bp, Artificial Sequence
  Synthetic oligonucleotide
ggagatttagtagtccggcgtagtcgggct

SEQ ID NO: 208950 - DNA, 30 bp, Artificial Sequence
  Synthetic oligonucleotide
atactgcagaagtatcgcagaccaggggct

SEQ ID NO: 208951 - DNA, 30 bp, Artificial Sequence
  Synthetic oligonucleotide
agtggtgcccccacgttgttcaaatgggct

SEQ ID NO: 208952 - DNA, 30 bp, Artificial Sequence
  Synthetic oligonucleotide
acagcggggcggaagcttgtgacctgggct

SEQ ID NO: 208953 - DNA, 30 bp, Artificial Sequence
  Synthetic oligonucleotide
gttcaaggcgtagccgttgctgcgtgggct

SEQ ID NO: 208954 - DNA, 30 bp, Artificial Sequence
  Synthetic oligonucleotide
agagaggggaaataggaccggcattgggct

SEQ ID NO: 208955 - DNA, 30 bp, Artificial Sequence
  Synthetic oligonucleotide
cacaacccaaataagcctacctcttgggct

SEQ ID NO: 208956 - DNA, 30 bp, Artificial Sequence
  Synthetic oligonucleotide
cacaacggatggtgtccgcgacccatggct

SEQ ID NO: 208957 - DNA, 30 bp, Artificial Sequence
  Synthetic oligonucleotide
atgaaacctcactgtggaagaagcatggct

SEQ ID NO: 208958 - DNA, 30 bp, Artificial Sequence
  Synthetic oligonucleotide
accgctcttaggacacacgaaggcatggct

SEQ ID NO: 208959 - DNA, 30 bp, Artificial Sequence
  Synthetic oligonucleotide
cagcgtaagacttccttaaagagactggct

SEQ ID NO: 208960 - DNA, 30 bp, Artificial Sequence
  Synthetic oligonucleotide
ataaacccgcgaatatcgcaatagctggct

SEQ ID NO: 208961 - DNA, 30 bp, Artificial Sequence
  Synthetic oligonucleotide
ctagatgcaagctgtgagtatgggctggct

SEQ ID NO: 208962 - DNA, 30 bp, Artificial Sequence
  Synthetic oligonucleotide
aataccgtatgttcgagtgaactagtggct

SEQ ID NO: 208963 - DNA, 30 bp, Artificial Sequence
  Synthetic oligonucleotide
aggctgtttgctaactcagtgagattggct

SEQ ID NO: 208964 - DNA, 30 bp, Artificial Sequence
  Synthetic oligonucleotide
cgattccacgtcggatctacatcgttggct

SEQ ID NO: 208965 - DNA, 30 bp, Artificial Sequence
  Synthetic oligonucleotide
tcgctcagaacccgtaaataggatttggct

SEQ ID NO: 208966 - DNA, 30 bp, Artificial Sequence
  Synthetic oligonucleotide
gtagggagaccgccctcgtcgcaaaatgct

SEQ ID NO: 208967 - DNA, 30 bp, Artificial Sequence
  Synthetic oligonucleotide
accacgttaatcttgttacttcgaaatgct

SEQ ID NO: 208968 - DNA, 30 bp, Artificial Sequence
  Synthetic oligonucleotide
acagtcttgtatacttcaaccggaaatgct

SEQ ID NO: 208969 - DNA, 30 bp, Artificial Sequence
  Synthetic oligonucleotide
gggatgcaacaggggtgctaagctaatgct

SEQ ID NO: 208970 - DNA, 30 bp, Artificial Sequence
  Synthetic oligonucleotide
tcagagcacgtaatcaggcattctaatgct

SEQ ID NO: 208971 - DNA, 30 bp, Artificial Sequence
  Synthetic oligonucleotide
ctctgtctcgaacatctccctgaccatgct

SEQ ID NO: 208972 - DNA, 30 bp, Artificial Sequence
  Synthetic oligonucleotide
cagagttgatggcacaggcatcctcatgct

SEQ ID NO: 208973 - DNA, 30 bp, Artificial Sequence
  Synthetic oligonucleotide
gcagacctaagaattgtacctaaagatgct

SEQ ID NO: 208974 - DNA, 30 bp, Artificial Sequence
  Synthetic oligonucleotide
gccaacaggggaatcaagccgccagatgct

SEQ ID NO: 208975 - DNA, 30 bp, Artificial Sequence
  Synthetic oligonucleotide
atcgtgctccaaaccacctccccggatgct

SEQ ID NO: 208976 - DNA, 30 bp, Artificial Sequence
  Synthetic oligonucleotide
cctgagttatggctggatgctactgatgct

SEQ ID NO: 208977 - DNA, 30 bp, Artificial Sequence
  Synthetic oligonucleotide
acaggtctaactgcgagtacgtcatatgct

SEQ ID NO: 208978 - DNA, 30 bp, Artificial Sequence
  Synthetic oligonucleotide
ggctgagggatttttatagttgtctatgct

SEQ ID NO: 208979 - DNA, 30 bp, Artificial Sequence
  Synthetic oligonucleotide
acgcagggccaactttattacttttatgct

SEQ ID NO: 208980 - DNA, 30 bp, Artificial Sequence
  Synthetic oligonucleotide
ctgtcaaagtagatgtgtagttagactgct

SEQ ID NO: 208981 - DNA, 30 bp, Artificial Sequence
  Synthetic oligonucleotide
ccagggcaagggcagtccggataacctgct

SEQ ID NO: 208982 - DNA, 30 bp, Artificial Sequence
  Synthetic oligonucleotide
tctcagtaattatttagtaccattcctgct

SEQ ID NO: 208983 - DNA, 30 bp, Artificial Sequence
  Synthetic oligonucleotide
cccctcgtgcgggtccagttcaaagctgct

SEQ ID NO: 208984 - DNA, 30 bp, Artificial Sequence
  Synthetic oligonucleotide
cgaacccgccgtgttgaccatccagctgct

SEQ ID NO: 208985 - DNA, 30 bp, Artificial Sequence
  Synthetic oligonucleotide
ggagaggggcgtaacccacgcctggctgct

SEQ ID NO: 208986 - DNA, 30 bp, Artificial Sequence
  Synthetic oligonucleotide
ttgctacctaacattggttcctactctgct

SEQ ID NO: 208987 - DNA, 30 bp, Artificial Sequence
  Synthetic oligonucleotide
gacggactactcacaagcatgccctctgct

SEQ ID NO: 208988 - DNA, 30 bp, Artificial Sequence
  Synthetic oligonucleotide
tacggaacacgtagagtaagaagctctgct

SEQ ID NO: 208989 - DNA, 30 bp, Artificial Sequence
  Synthetic oligonucleotide
ttatgtactggggtcgggatccgctctgct

SEQ ID NO: 208990 - DNA, 30 bp, Artificial Sequence
  Synthetic oligonucleotide
tgttgtcgcactttatgttagtgctctgct

SEQ ID NO: 208991 - DNA, 30 bp, Artificial Sequence
  Synthetic oligonucleotide
ataacgaggaaattatttggaggttctgct

SEQ ID NO: 208992 - DNA, 30 bp, Artificial Sequence
  Synthetic oligonucleotide
tgagtttcgcgtaagccaaaccgaagtgct

SEQ ID NO: 208993 - DNA, 30 bp, Artificial Sequence
  Synthetic oligonucleotide
agtgtcgaattccgtgctctctgaagtgct

SEQ ID NO: 208994 - DNA, 30 bp, Artificial Sequence
  Synthetic oligonucleotide
tgtcagagtgtcttgtgggtgcacagtgct

SEQ ID NO: 208995 - DNA, 30 bp, Artificial Sequence
  Synthetic oligonucleotide
cccatttgggggacaaacctactcagtgct

SEQ ID NO: 208996 - DNA, 30 bp, Artificial Sequence
  Synthetic oligonucleotide
tgccagcaacttgggggagttcagagtgct

SEQ ID NO: 208997 - DNA, 30 bp, Artificial Sequence
  Synthetic oligonucleotide
tctggattccagggatttaggtcgagtgct

SEQ ID NO: 208998 - DNA, 30 bp, Artificial Sequence
  Synthetic oligonucleotide
ctacaccttcaccaacgtggcgtgagtgct

SEQ ID NO: 208999 - DNA, 30 bp, Artificial Sequence
  Synthetic oligonucleotide
tttgctgaagtgtcctgccgtcaacgtgct

SEQ ID NO: 209000 - DNA, 30 bp, Artificial Sequence
  Synthetic oligonucleotide
ctcagtgtgcaatgagcttaagtacgtgct

SEQ ID NO: 209001 - DNA, 30 bp, Artificial Sequence
  Synthetic oligonucleotide
cgtacgcctacgtcccaattcagccgtgct

SEQ ID NO: 209002 - DNA, 30 bp, Artificial Sequence
  Synthetic oligonucleotide
ttctcgttggggttcggtgctccgcgtgct

SEQ ID NO: 209003 - DNA, 30 bp, Artificial Sequence
  Synthetic oligonucleotide
attagaagacgtccgcaggagaggcgtgct

SEQ ID NO: 209004 - DNA, 30 bp, Artificial Sequence
  Synthetic oligonucleotide
ctggactggtgggacgcctctcacggtgct

SEQ ID NO: 209005 - DNA, 30 bp, Artificial Sequence
  Synthetic oligonucleotide
tagcgggtctaggtctctcaagccggtgct

SEQ ID NO: 209006 - DNA, 30 bp, Artificial Sequence
  Synthetic oligonucleotide
ctacacgagcacagacatcgttcgggtgct

SEQ ID NO: 209007 - DNA, 30 bp, Artificial Sequence
  Synthetic oligonucleotide
gcgggtgaaaccggccgtaagtatggtgct

SEQ ID NO: 209008 - DNA, 30 bp, Artificial Sequence
  Synthetic oligonucleotide
tattatgcgcggggtggtcggcctggtgct

SEQ ID NO: 209009 - DNA, 30 bp, Artificial Sequence
  Synthetic oligonucleotide
cgggatttatggttcgaaagaggatgtgct

SEQ ID NO: 209010 - DNA, 30 bp, Artificial Sequence
  Synthetic oligonucleotide
gacatagtgtgactgaataactgaattgct

SEQ ID NO: 209011 - DNA, 30 bp, Artificial Sequence
  Synthetic oligonucleotide
tcatggaaaagctaactacctaatattgct

SEQ ID NO: 209012 - DNA, 30 bp, Artificial Sequence
  Synthetic oligonucleotide
gcacttgagtcggaattcgtgggacttgct

SEQ ID NO: 209013 - DNA, 30 bp, Artificial Sequence
  Synthetic oligonucleotide
gagccatgcaggagaatggatgtgcttgct

SEQ ID NO: 209014 - DNA, 30 bp, Artificial Sequence
  Synthetic oligonucleotide
aggtacaggactgccacgacagtagttgct

SEQ ID NO: 209015 - DNA, 30 bp, Artificial Sequence
  Synthetic oligonucleotide
ccatggatcgtctggtgcgtacacgttgct

SEQ ID NO: 209016 - DNA, 30 bp, Artificial Sequence
  Synthetic oligonucleotide
acagtaacatcacgtttctagcacgttgct

SEQ ID NO: 209017 - DNA, 30 bp, Artificial Sequence
  Synthetic oligonucleotide
tggttgcttggtcagtccaccgaggttgct

SEQ ID NO: 209018 - DNA, 30 bp, Artificial Sequence
  Synthetic oligonucleotide
gcgaccgaatagaagtcacgcttggttgct

SEQ ID NO: 209019 - DNA, 30 bp, Artificial Sequence
  Synthetic oligonucleotide
ctattcaggggctatgcacccgagtttgct

SEQ ID NO: 209020 - DNA, 30 bp, Artificial Sequence
  Synthetic oligonucleotide
tgttaggtggaggtatagtgggcgtttgct

SEQ ID NO: 209021 - DNA, 30 bp, Artificial Sequence
  Synthetic oligonucleotide
cgaatacccgagtgaacagtccaaaaatct

SEQ ID NO: 209022 - DNA, 30 bp, Artificial Sequence
  Synthetic oligonucleotide
cgcgtttcgagggcgcgactggcaaaatct

SEQ ID NO: 209023 - DNA, 30 bp, Artificial Sequence
  Synthetic oligonucleotide
aggtggactagaacattattatgaaaatct

SEQ ID NO: 209024 - DNA, 30 bp, Artificial Sequence
  Synthetic oligonucleotide
tcactaaggaacaccgttactgtcaaatct

SEQ ID NO: 209025 - DNA, 30 bp, Artificial Sequence
  Synthetic oligonucleotide
gtcagttatgagtaaagattcatgaaatct

SEQ ID NO: 209026 - DNA, 30 bp, Artificial Sequence
  Synthetic oligonucleotide
caccaaaccgacttaagtggtagacaatct

SEQ ID NO: 209027 - DNA, 30 bp, Artificial Sequence
  Synthetic oligonucleotide
aagccaataccttgcttatggatacaatct

SEQ ID NO: 209028 - DNA, 30 bp, Artificial Sequence
  Synthetic oligonucleotide
gatgttctgatttggctcagagtgcaatct

SEQ ID NO: 209029 - DNA, 30 bp, Artificial Sequence
  Synthetic oligonucleotide
caaacacttagtgtgtacgcgagtgaatct

SEQ ID NO: 209030 - DNA, 30 bp, Artificial Sequence
  Synthetic oligonucleotide
gcccacggccacgctaagcacgcataatct

SEQ ID NO: 209031 - DNA, 30 bp, Artificial Sequence
  Synthetic oligonucleotide
gatataaaaacaataccgcggctataatct

SEQ ID NO: 209032 - DNA, 30 bp, Artificial Sequence
  Synthetic oligonucleotide
tacatcacgtctaggaactttcagtaatct

SEQ ID NO: 209033 - DNA, 30 bp, Artificial Sequence
  Synthetic oligonucleotide
tggttgccttcacggaactctgcgtaatct

SEQ ID NO: 209034 - DNA, 30 bp, Artificial Sequence
  Synthetic oligonucleotide
ggcggcacgtaaacagtttctacgacatct

SEQ ID NO: 209035 - DNA, 30 bp, Artificial Sequence
  Synthetic oligonucleotide
ctgcgtaaggccactagacggatgacatct

SEQ ID NO: 209036 - DNA, 30 bp, Artificial Sequence
  Synthetic oligonucleotide
tcggttatgtacccttctcaaagtacatct

SEQ ID NO: 209037 - DNA, 30 bp, Artificial Sequence
  Synthetic oligonucleotide
tatcagtgctaatcgttgtccttgccatct

SEQ ID NO: 209038 - DNA, 30 bp, Artificial Sequence
  Synthetic oligonucleotide
tatgtgtcggaggaataacgtgttccatct

SEQ ID NO: 209039 - DNA, 30 bp, Artificial Sequence
  Synthetic oligonucleotide
ccttaaagatcattgtggtgaagagcatct

SEQ ID NO: 209040 - DNA, 30 bp, Artificial Sequence
  Synthetic oligonucleotide
ttccacggaaagacagtaggcagcgcatct

SEQ ID NO: 209041 - DNA, 30 bp, Artificial Sequence
  Synthetic oligonucleotide
aagtgagtaacaggggtgcgtagatcatct

SEQ ID NO: 209042 - DNA, 30 bp, Artificial Sequence
  Synthetic oligonucleotide
aagcgctcaattgttggtgtacagtcatct

SEQ ID NO: 209043 - DNA, 30 bp, Artificial Sequence
  Synthetic oligonucleotide
gtaggcggggagaggtcataagattcatct

SEQ ID NO: 209044 - DNA, 30 bp, Artificial Sequence
  Synthetic oligonucleotide
gcacataaggttgcgacaaagttttcatct

SEQ ID NO: 209045 - DNA, 30 bp, Artificial Sequence
  Synthetic oligonucleotide
gacgacctctggtcacgctaagcgagatct

SEQ ID NO: 209046 - DNA, 30 bp, Artificial Sequence
  Synthetic oligonucleotide
tgtagaacttgaactggtgtcgcgagatct

SEQ ID NO: 209047 - DNA, 31 bp, Artificial Sequence
  Synthetic oligonucleotide
ggcgtccatgattaacgctgcgcggagatct

SEQ ID NO: 209048 - DNA, 30 bp, Artificial Sequence
  Synthetic oligonucleotide
gtagcggataagtgaagcgcaatgagatct

SEQ ID NO: 209049 - DNA, 30 bp, Artificial Sequence
  Synthetic oligonucleotide
atcttattggattcaaaatccggacgatct

SEQ ID NO: 209050 - DNA, 30 bp, Artificial Sequence
  Synthetic oligonucleotide
gtgatgccgttcgagtattctgagcgatct

SEQ ID NO: 209051 - DNA, 30 bp, Artificial Sequence
  Synthetic oligonucleotide
tcacacttacagggatacgcctcgcgatct

SEQ ID NO: 209052 - DNA, 30 bp, Artificial Sequence
  Synthetic oligonucleotide
ttcttaagtaccatcatgactcatcgatct

SEQ ID NO: 209053 - DNA, 30 bp, Artificial Sequence
  Synthetic oligonucleotide
ggctagtgacgtgctcccaaaaaaggatct

SEQ ID NO: 209054 - DNA, 30 bp, Artificial Sequence
  Synthetic oligonucleotide
acagctcatcgtgtatcatccgagggatct

SEQ ID NO: 209055 - DNA, 30 bp, Artificial Sequence
  Synthetic oligonucleotide
atgaggccttgttgccgaagaccatgatct

SEQ ID NO: 209056 - DNA, 30 bp, Artificial Sequence
  Synthetic oligonucleotide
gtgcgcatgtatgttttgtactgctgatct

SEQ ID NO: 209057 - DNA, 30 bp, Artificial Sequence
  Synthetic oligonucleotide
gtgaaagtcgctttacttaatttttgatct

SEQ ID NO: 209058 - DNA, 30 bp, Artificial Sequence
  Synthetic oligonucleotide
aacacagaagttgaaatggcgaaaatatct

SEQ ID NO: 209059 - DNA, 30 bp, Artificial Sequence
  Synthetic oligonucleotide
cgtttttggcatgggtgcttgagaatatct

SEQ ID NO: 209060 - DNA, 30 bp, Artificial Sequence
  Synthetic oligonucleotide
cgttcctcatgctcctcttttgcgatatct

SEQ ID NO: 209061 - DNA, 30 bp, Artificial Sequence
  Synthetic oligonucleotide
tgcccgagccctgactggtcgatcctatct

SEQ ID NO: 209062 - DNA, 30 bp, Artificial Sequence
  Synthetic oligonucleotide
cccagaatgaattttagcatgtctctatct

SEQ ID NO: 209063 - DNA, 30 bp, Artificial Sequence
  Synthetic oligonucleotide
ttgatcctcgagacgatatggtaagtatct

SEQ ID NO: 209064 - DNA, 30 bp, Artificial Sequence
  Synthetic oligonucleotide
agactgcgggcttaggtaccataggtatct

SEQ ID NO: 209065 - DNA, 30 bp, Artificial Sequence
  Synthetic oligonucleotide
gaattacattgaaaggggagagatgtatct

SEQ ID NO: 209066 - DNA, 30 bp, Artificial Sequence
  Synthetic oligonucleotide
gtcacgtccatggcttggtacagtgtatct

SEQ ID NO: 209067 - DNA, 30 bp, Artificial Sequence
  Synthetic oligonucleotide
gaagggcagttctttccatcgcgtgtatct

SEQ ID NO: 209068 - DNA, 30 bp, Artificial Sequence
  Synthetic oligonucleotide
cgtcgacattcaggttctaataggttatct

SEQ ID NO: 209069 - DNA, 30 bp, Artificial Sequence
  Synthetic oligonucleotide
aaacgcgcaatcagagcatcgaatttatct

SEQ ID NO: 209070 - DNA, 30 bp, Artificial Sequence
  Synthetic oligonucleotide
tcactaaaacccacaatggcgattttatct

SEQ ID NO: 209071 - DNA, 30 bp, Artificial Sequence
  Synthetic oligonucleotide
ggggcgcacttaagcaagaataacaactct

SEQ ID NO: 209072 - DNA, 30 bp, Artificial Sequence
  Synthetic oligonucleotide
tgccttcgcgcccctctggaaaagaactct

SEQ ID NO: 209073 - DNA, 29 bp, Artificial Sequence
  Synthetic oligonucleotide
tcgcctctgtccttgcgaaataacactct

SEQ ID NO: 209074 - DNA, 30 bp, Artificial Sequence
  Synthetic oligonucleotide
tattgcctcagtacgactcacagacactct

SEQ ID NO: 209075 - DNA, 30 bp, Artificial Sequence
  Synthetic oligonucleotide
ccatgttactctcatgcatatcggcactct

SEQ ID NO: 209076 - DNA, 30 bp, Artificial Sequence
  Synthetic oligonucleotide
tgataggacatcatatcggctgggcactct

SEQ ID NO: 209077 - DNA, 30 bp, Artificial Sequence
  Synthetic oligonucleotide
ggtccgtactttataggggtgttgcactct

SEQ ID NO: 209078 - DNA, 30 bp, Artificial Sequence
  Synthetic oligonucleotide
gaaattacagggctacaagaagccgactct

SEQ ID NO: 209079 - DNA, 30 bp, Artificial Sequence
  Synthetic oligonucleotide
tcgttaattacggttcaacactaggactct

SEQ ID NO: 209080 - DNA, 30 bp, Artificial Sequence
  Synthetic oligonucleotide
gctaaaagctggatcaccactcgtgactct

SEQ ID NO: 209081 - DNA, 30 bp, Artificial Sequence
  Synthetic oligonucleotide
ccctaaagtacaagcaggtatgaatactct

SEQ ID NO: 209082 - DNA, 30 bp, Artificial Sequence
  Synthetic oligonucleotide
acgatccctccttcctggaccttatactct

SEQ ID NO: 209083 - DNA, 30 bp, Artificial Sequence
  Synthetic oligonucleotide
tcgcccggtccgggctcacacagctactct

SEQ ID NO: 209084 - DNA, 30 bp, Artificial Sequence
  Synthetic oligonucleotide
atccgtgagaaatctggatacaagtactct

SEQ ID NO: 209085 - DNA, 30 bp, Artificial Sequence
  Synthetic oligonucleotide
agaatccagatgctatacttagcgacctct

SEQ ID NO: 209086 - DNA, 30 bp, Artificial Sequence
  Synthetic oligonucleotide
acggtaaacggtcattgcgactggacctct

SEQ ID NO: 209087 - DNA, 30 bp, Artificial Sequence
  Synthetic oligonucleotide
cgggggcgcacaagctcgttcgttacctct

SEQ ID NO: 209088 - DNA, 30 bp, Artificial Sequence
  Synthetic oligonucleotide
ctctgcacggtgagtgagtcgtttacctct

SEQ ID NO: 209089 - DNA, 30 bp, Artificial Sequence
  Synthetic oligonucleotide
actatcccggcacgtaagctacaagcctct

SEQ ID NO: 209090 - DNA, 30 bp, Artificial Sequence
  Synthetic oligonucleotide
tgtagaacggtgatggaacatcaggcctct

SEQ ID NO: 209091 - DNA, 30 bp, Artificial Sequence
  Synthetic oligonucleotide
gcgcacggtttctacagccttgaggcctct

SEQ ID NO: 209092 - DNA, 30 bp, Artificial Sequence
  Synthetic oligonucleotide
atcccaggccattctaaaagcaatgcctct

SEQ ID NO: 209093 - DNA, 30 bp, Artificial Sequence
  Synthetic oligonucleotide
cttcctcaggcgacggccaggagctcctct

SEQ ID NO: 209094 - DNA, 30 bp, Artificial Sequence
  Synthetic oligonucleotide
gtgcataagacggacggatgggcttcctct

SEQ ID NO: 209095 - DNA, 30 bp, Artificial Sequence
  Synthetic oligonucleotide
ttgtcgtgtacaccgactgaaagcagctct

SEQ ID NO: 209096 - DNA, 30 bp, Artificial Sequence
  Synthetic oligonucleotide
gacgccatccaccgggcgaacgtgagctct

SEQ ID NO: 209097 - DNA, 30 bp, Artificial Sequence
  Synthetic oligonucleotide
cttgagagtcgatggctcggatgtcgctct

SEQ ID NO: 209098 - DNA, 30 bp, Artificial Sequence
  Synthetic oligonucleotide
taattaacattcatatgaaattcaggctct

SEQ ID NO: 209099 - DNA, 30 bp, Artificial Sequence
  Synthetic oligonucleotide
caccacccattcaagggtttaaatggctct

SEQ ID NO: 209100 - DNA, 30 bp, Artificial Sequence
  Synthetic oligonucleotide
gtggagattttgggcacggtcaatggctct

SEQ ID NO: 209101 - DNA, 30 bp, Artificial Sequence
  Synthetic oligonucleotide
gtcaaagagccatgttattcataatgctct

SEQ ID NO: 209102 - DNA, 30 bp, Artificial Sequence
  Synthetic oligonucleotide
acatgtatctcgacctcgtcccagtgctct

SEQ ID NO: 209103 - DNA, 30 bp, Artificial Sequence
  Synthetic oligonucleotide
aacatgaagctactttaggaaggcatctct

SEQ ID NO: 209104 - DNA, 30 bp, Artificial Sequence
  Synthetic oligonucleotide
gacccggggaggaaatctccaaacgtctct

SEQ ID NO: 209105 - DNA, 30 bp, Artificial Sequence
  Synthetic oligonucleotide
gtgcgatcagacagcactatgtttgtctct

SEQ ID NO: 209106 - DNA, 30 bp, Artificial Sequence
  Synthetic oligonucleotide
gccgaggttactgtcttagaccaattctct

SEQ ID NO: 209107 - DNA, 30 bp, Artificial Sequence
  Synthetic oligonucleotide
cgatgacgatttcgaacatggagtttctct

SEQ ID NO: 209108 - DNA, 30 bp, Artificial Sequence
  Synthetic oligonucleotide
tagtgtatggggatacgtctcgtaaagtct

SEQ ID NO: 209109 - DNA, 30 bp, Artificial Sequence
  Synthetic oligonucleotide
accagtgtcattttcacatctgagaagtct

SEQ ID NO: 209110 - DNA, 30 bp, Artificial Sequence
  Synthetic oligonucleotide
tttcagaaggtcatataccagtataagtct

SEQ ID NO: 209111 - DNA, 30 bp, Artificial Sequence
  Synthetic oligonucleotide
tcagagtcccgctgggcgggtagtaagtct

SEQ ID NO: 209112 - DNA, 30 bp, Artificial Sequence
  Synthetic oligonucleotide
atggggggctgaagagagtgggggcagtct

SEQ ID NO: 209113 - DNA, 30 bp, Artificial Sequence
  Synthetic oligonucleotide
attaacggaggtgttaatgaaactcagtct

SEQ ID NO: 209114 - DNA, 30 bp, Artificial Sequence
  Synthetic oligonucleotide
ggccaagggggagctatccagtctcagtct

SEQ ID NO: 209115 - DNA, 30 bp, Artificial Sequence
  Synthetic oligonucleotide
tttagggacgacacataagcagttcagtct

SEQ ID NO: 209116 - DNA, 30 bp, Artificial Sequence
  Synthetic oligonucleotide
agggatgattgttatctatctatagagtct

SEQ ID NO: 209117 - DNA, 30 bp, Artificial Sequence
  Synthetic oligonucleotide
cgaagcactttgactacgctagacgagtct

SEQ ID NO: 209118 - DNA, 30 bp, Artificial Sequence
  Synthetic oligonucleotide
agagtgccgccgattgagtacgcggagtct

SEQ ID NO: 209119 - DNA, 30 bp, Artificial Sequence
  Synthetic oligonucleotide
ttgggtatagggcgcggatgtgatgagtct

SEQ ID NO: 209120 - DNA, 30 bp, Artificial Sequence
  Synthetic oligonucleotide
ggccaacccgggtacagcccttactagtct

SEQ ID NO: 209121 - DNA, 30 bp, Artificial Sequence
  Synthetic oligonucleotide
ctcactggacgacggatatgcgaaacgtct

SEQ ID NO: 209122 - DNA, 30 bp, Artificial Sequence
  Synthetic oligonucleotide
cctttgaggtgatctcagcacaacacgtct

SEQ ID NO: 209123 - DNA, 30 bp, Artificial Sequence
  Synthetic oligonucleotide
agactagttacattcccaatctggacgtct

SEQ ID NO: 209124 - DNA, 30 bp, Artificial Sequence
  Synthetic oligonucleotide
ttagtaagttgtcacacttcgaatacgtct

SEQ ID NO: 209125 - DNA, 30 bp, Artificial Sequence
  Synthetic oligonucleotide
catactcgtccagctgttcaaactacgtct

SEQ ID NO: 209126 - DNA, 30 bp, Artificial Sequence
  Synthetic oligonucleotide
tttgatcggccgtgagatcggtctacgtct

SEQ ID NO: 209127 - DNA, 30 bp, Artificial Sequence
  Synthetic oligonucleotide
aattagggcatccgattcaacccaccgtct

SEQ ID NO: 209128 - DNA, 30 bp, Artificial Sequence
  Synthetic oligonucleotide
caagtaacggccacaccaaaaggcccgtct

SEQ ID NO: 209129 - DNA, 30 bp, Artificial Sequence
  Synthetic oligonucleotide
acgggggaaatcattataagatttccgtct

SEQ ID NO: 209130 - DNA, 30 bp, Artificial Sequence
  Synthetic oligonucleotide
acagtctctagagtttgctcctttccgtct

SEQ ID NO: 209131 - DNA, 30 bp, Artificial Sequence
  Synthetic oligonucleotide
aggggaaagcgcagcatcggtccagcgtct

SEQ ID NO: 209132 - DNA, 30 bp, Artificial Sequence
  Synthetic oligonucleotide
aggatgcttcgaaagattcagcacgcgtct

SEQ ID NO: 209133 - DNA, 30 bp, Artificial Sequence
  Synthetic oligonucleotide
taaattggctagtgttcaacttaggcgtct

SEQ ID NO: 209134 - DNA, 30 bp, Artificial Sequence
  Synthetic oligonucleotide
gattcctaagtttcttaattgacatcgtct

SEQ ID NO: 209135 - DNA, 30 bp, Artificial Sequence
  Synthetic oligonucleotide
cgtcacggcgctgaaatttatccatcgtct

SEQ ID NO: 209136 - DNA, 30 bp, Artificial Sequence
  Synthetic oligonucleotide
tacaacccctgttccgcgcatccttcgtct

SEQ ID NO: 209137 - DNA, 30 bp, Artificial Sequence
  Synthetic oligonucleotide
ccaatactatagttccaatattccaggtct

SEQ ID NO: 209138 - DNA, 30 bp, Artificial Sequence
  Synthetic oligonucleotide
aggcggcctacatttagcattcataggtct

SEQ ID NO: 209139 - DNA, 30 bp, Artificial Sequence
  Synthetic oligonucleotide
ctcgtggaggtgatagtcaaatgtaggtct

SEQ ID NO: 209140 - DNA, 30 bp, Artificial Sequence
  Synthetic oligonucleotide
acagacactatgatcctagactttaggtct

SEQ ID NO: 209141 - DNA, 30 bp, Artificial Sequence
  Synthetic oligonucleotide
gccatacgtactacacaagatgcccggtct

SEQ ID NO: 209142 - DNA, 30 bp, Artificial Sequence
  Synthetic oligonucleotide
gtctaaatgcaggagccccgcccagggtct

SEQ ID NO: 209143 - DNA, 30 bp, Artificial Sequence
  Synthetic oligonucleotide
attaaagtaaatctgatacgcctcgggtct

SEQ ID NO: 209144 - DNA, 30 bp, Artificial Sequence
  Synthetic oligonucleotide
tggtatgactgataaacctcagcatggtct

SEQ ID NO: 209145 - DNA, 30 bp, Artificial Sequence
  Synthetic oligonucleotide
ttcaacaacgtcacactattcttatggtct

SEQ ID NO: 209146 - DNA, 30 bp, Artificial Sequence
  Synthetic oligonucleotide
gtatgatctcgcagggcgctactgtggtct

SEQ ID NO: 209147 - DNA, 30 bp, Artificial Sequence
  Synthetic oligonucleotide
gaaaagcgcatgccgggctctacaatgtct

SEQ ID NO: 209148 - DNA, 30 bp, Artificial Sequence
  Synthetic oligonucleotide
aaaggcagtctactgcctctgggaatgtct

SEQ ID NO: 209149 - DNA, 30 bp, Artificial Sequence
  Synthetic oligonucleotide
agaagggtctagtggttttggtagatgtct

SEQ ID NO: 209150 - DNA, 30 bp, Artificial Sequence
  Synthetic oligonucleotide
cggataaccagttggtgtacagtgatgtct

SEQ ID NO: 209151 - DNA, 30 bp, Artificial Sequence
  Synthetic oligonucleotide
tcctgaaccgcaagaacaaaacgtatgtct

SEQ ID NO: 209152 - DNA, 30 bp, Artificial Sequence
  Synthetic oligonucleotide
tttgaagcccatgtgtctaagattatgtct

SEQ ID NO: 209153 - DNA, 30 bp, Artificial Sequence
  Synthetic oligonucleotide
ggctggggaatttcgccttttattatgtct

SEQ ID NO: 209154 - DNA, 30 bp, Artificial Sequence
  Synthetic oligonucleotide
catggtaatcagatagcagaagttatgtct

SEQ ID NO: 209155 - DNA, 30 bp, Artificial Sequence
  Synthetic oligonucleotide
tgggcactcccttggtcaccgtgactgtct

SEQ ID NO: 209156 - DNA, 30 bp, Artificial Sequence
  Synthetic oligonucleotide
attaggtggtacagcatgcgtctagtgtct

SEQ ID NO: 209157 - DNA, 30 bp, Artificial Sequence
  Synthetic oligonucleotide
tctttgacggctcggggaatgcgattgtct

SEQ ID NO: 209158 - DNA, 30 bp, Artificial Sequence
  Synthetic oligonucleotide
ggcttcaggccgattaaatgctgattgtct

SEQ ID NO: 209159 - DNA, 30 bp, Artificial Sequence
  Synthetic oligonucleotide
ggcaaaggtcgttaggaggatatcttgtct

SEQ ID NO: 209160 - DNA, 30 bp, Artificial Sequence
  Synthetic oligonucleotide
gagatggaaatatcaagggttaagttgtct

SEQ ID NO: 209161 - DNA, 30 bp, Artificial Sequence
  Synthetic oligonucleotide
acgcccttctcgatcagggattgaaattct

SEQ ID NO: 209162 - DNA, 30 bp, Artificial Sequence
  Synthetic oligonucleotide
catttgtgaaacctcgtgcgctccaattct

SEQ ID NO: 209163 - DNA, 30 bp, Artificial Sequence
  Synthetic oligonucleotide
cggagttattcattaggtaatttcaattct

SEQ ID NO: 209164 - DNA, 30 bp, Artificial Sequence
  Synthetic oligonucleotide
tacgtacgattgaaaattcatcggaattct

SEQ ID NO: 209165 - DNA, 30 bp, Artificial Sequence
  Synthetic oligonucleotide
atatgggaggaatcggtggatcataattct

SEQ ID NO: 209166 - DNA, 30 bp, Artificial Sequence
  Synthetic oligonucleotide
gactagagtgatactagcggttttaattct

SEQ ID NO: 209167 - DNA, 30 bp, Artificial Sequence
  Synthetic oligonucleotide
acggcccgccccatagaccagtaacattct

SEQ ID NO: 209168 - DNA, 30 bp, Artificial Sequence
  Synthetic oligonucleotide
atgcggtcagtccgggctcgttaccattct

SEQ ID NO: 209169 - DNA, 30 bp, Artificial Sequence
  Synthetic oligonucleotide
tggggcgattggaatggctaagcgcattct

SEQ ID NO: 209170 - DNA, 30 bp, Artificial Sequence
  Synthetic oligonucleotide
catgacttaggctattcgaatcggcattct

SEQ ID NO: 209171 - DNA, 30 bp, Artificial Sequence
  Synthetic oligonucleotide
tcgaacacagttaaatgtactgggcattct

SEQ ID NO: 209172 - DNA, 30 bp, Artificial Sequence
  Synthetic oligonucleotide
tgtcattcgatttatgcaagcgtgcattct

SEQ ID NO: 209173 - DNA, 30 bp, Artificial Sequence
  Synthetic oligonucleotide
tgatggtttgttgtctagaaagacgattct

SEQ ID NO: 209174 - DNA, 30 bp, Artificial Sequence
  Synthetic oligonucleotide
acgtgtcacccaagaacaggggatgattct

SEQ ID NO: 209175 - DNA, 30 bp, Artificial Sequence
  Synthetic oligonucleotide
tcataaaaccacagcagtcttggatattct

SEQ ID NO: 209176 - DNA, 30 bp, Artificial Sequence
  Synthetic oligonucleotide
cctaagccggctatgtgcaggaactattct

SEQ ID NO: 209177 - DNA, 30 bp, Artificial Sequence
  Synthetic oligonucleotide
ccgcaggtacagcatagaatcacctattct

SEQ ID NO: 209178 - DNA, 30 bp, Artificial Sequence
  Synthetic oligonucleotide
atctgctaagatagagaaccggaaacttct

SEQ ID NO: 209179 - DNA, 30 bp, Artificial Sequence
  Synthetic oligonucleotide
gctgtcagtctggtcctccacataacttct

SEQ ID NO: 209180 - DNA, 30 bp, Artificial Sequence
  Synthetic oligonucleotide
ctgaaaggccaagcgtatctaaacacttct

SEQ ID NO: 209181 - DNA, 30 bp, Artificial Sequence
  Synthetic oligonucleotide
tgacgatagtttacactgtttgtgacttct

SEQ ID NO: 209182 - DNA, 30 bp, Artificial Sequence
  Synthetic oligonucleotide
ccagggtcgtggttgcgaacctgtacttct

SEQ ID NO: 209183 - DNA, 30 bp, Artificial Sequence
  Synthetic oligonucleotide
tcgtgctcaagaaatgctactcttacttct

SEQ ID NO: 209184 - DNA, 30 bp, Artificial Sequence
  Synthetic oligonucleotide
gatgcatctccccatccgatttgaccttct

SEQ ID NO: 209185 - DNA, 30 bp, Artificial Sequence
  Synthetic oligonucleotide
gttagtgggaccatatataggctaccttct

SEQ ID NO: 209186 - DNA, 30 bp, Artificial Sequence
  Synthetic oligonucleotide
tcgtccgataataccagatggaacccttct

SEQ ID NO: 209187 - DNA, 30 bp, Artificial Sequence
  Synthetic oligonucleotide
gctatagcgtacagattaaactcgccttct

SEQ ID NO: 209188 - DNA, 30 bp, Artificial Sequence
  Synthetic oligonucleotide
gaataattgccaaaacagagcaggccttct

SEQ ID NO: 209189 - DNA, 30 bp, Artificial Sequence
  Synthetic oligonucleotide
accatcttgaatttgctctatttgccttct

SEQ ID NO: 209190 - DNA, 30 bp, Artificial Sequence
  Synthetic oligonucleotide
agtaaattaatttctaacaagtacgcttct

SEQ ID NO: 209191 - DNA, 30 bp, Artificial Sequence
  Synthetic oligonucleotide
actgtcgactactacagaggggccgcttct

SEQ ID NO: 209192 - DNA, 30 bp, Artificial Sequence
  Synthetic oligonucleotide
cggggggcactaaaatagtcctcatcttct

SEQ ID NO: 209193 - DNA, 30 bp, Artificial Sequence
  Synthetic oligonucleotide
atgatcaaatagaactgtttcagatcttct

SEQ ID NO: 209194 - DNA, 30 bp, Artificial Sequence
  Synthetic oligonucleotide
aggcaaacggctggggtcgtgatatcttct

SEQ ID NO: 209195 - DNA, 30 bp, Artificial Sequence
  Synthetic oligonucleotide
gcggataggttacagctgcacacaagttct

SEQ ID NO: 209196 - DNA, 30 bp, Artificial Sequence
  Synthetic oligonucleotide
aaggatgccggattcattactacaagttct

SEQ ID NO: 209197 - DNA, 30 bp, Artificial Sequence
  Synthetic oligonucleotide
tagcgatcacaatcccccagttgaagttct

SEQ ID NO: 209198 - DNA, 30 bp, Artificial Sequence
  Synthetic oligonucleotide
aactgccgcgcagcgcggggtgtaagttct

SEQ ID NO: 209199 - DNA, 30 bp, Artificial Sequence
  Synthetic oligonucleotide
atagaaatacatgggtaagtacaccgttct

SEQ ID NO: 209200 - DNA, 30 bp, Artificial Sequence
  Synthetic oligonucleotide
ctttaagggtgagactccccgtaccgttct

SEQ ID NO: 209201 - DNA, 30 bp, Artificial Sequence
  Synthetic oligonucleotide
aaattggcttacaagggagtgcaaggttct

SEQ ID NO: 209202 - DNA, 30 bp, Artificial Sequence
  Synthetic oligonucleotide
ggcgtctaatcgtaagagtagtatggttct

SEQ ID NO: 209203 - DNA, 30 bp, Artificial Sequence
  Synthetic oligonucleotide
taacagctcgagtatcggaagagtggttct

SEQ ID NO: 209204 - DNA, 30 bp, Artificial Sequence
  Synthetic oligonucleotide
cacattgggtaaatgaggggtgcatgttct

SEQ ID NO: 209205 - DNA, 30 bp, Artificial Sequence
  Synthetic oligonucleotide
cacaaccaacgtacggttccactatgttct

SEQ ID NO: 209206 - DNA, 30 bp, Artificial Sequence
  Synthetic oligonucleotide
gtcagcgaacagttggtgaagttatgttct

SEQ ID NO: 209207 - DNA, 30 bp, Artificial Sequence
  Synthetic oligonucleotide
acagggcctaatgttgatgggttatgttct

SEQ ID NO: 209208 - DNA, 30 bp, Artificial Sequence
  Synthetic oligonucleotide
aggagcagaatagtttcaacggtgtgttct

SEQ ID NO: 209209 - DNA, 30 bp, Artificial Sequence
  Synthetic oligonucleotide
cccggctggaccttaggcaaatcaatttct

SEQ ID NO: 209210 - DNA, 30 bp, Artificial Sequence
  Synthetic oligonucleotide
gcggattaacagcggctatccagtatttct

SEQ ID NO: 209211 - DNA, 30 bp, Artificial Sequence
  Synthetic oligonucleotide
atacagtaatacactcaaccatgtctttct

SEQ ID NO: 209212 - DNA, 30 bp, Artificial Sequence
  Synthetic oligonucleotide
aatcgggtgaaggcgggagtcgcagtttct

SEQ ID NO: 209213 - DNA, 30 bp, Artificial Sequence
  Synthetic oligonucleotide
gggccacaggcatacgagaaggtcttttct

SEQ ID NO: 209214 - DNA, 30 bp, Artificial Sequence
  Synthetic oligonucleotide
tgccccgacgactcacctgagaataaaagt

SEQ ID NO: 209215 - DNA, 30 bp, Artificial Sequence
  Synthetic oligonucleotide
gagcttaacatactcctaattactaaaagt

SEQ ID NO: 209216 - DNA, 30 bp, Artificial Sequence
  Synthetic oligonucleotide
tacgtccctatagacaaggtcaaacaaagt

SEQ ID NO: 209217 - DNA, 30 bp, Artificial Sequence
  Synthetic oligonucleotide
tctatcgtactcctctagtgttcccaaagt

SEQ ID NO: 209218 - DNA, 30 bp, Artificial Sequence
  Synthetic oligonucleotide
gtcagacgaaaaaacgtgtttgcgcaaagt

SEQ ID NO: 209219 - DNA, 30 bp, Artificial Sequence
  Synthetic oligonucleotide
aaaaattattacgagggggggtggcaaagt

SEQ ID NO: 209220 - DNA, 30 bp, Artificial Sequence
  Synthetic oligonucleotide
aacatttgagatctgtgcgaacgagaaagt

SEQ ID NO: 209221 - DNA, 30 bp, Artificial Sequence
  Synthetic oligonucleotide
actgacagaagaatcatgaaggccgaaagt

SEQ ID NO: 209222 - DNA, 30 bp, Artificial Sequence
  Synthetic oligonucleotide
tggttaggtcttttacacgtcagcgaaagt

SEQ ID NO: 209223 - DNA, 30 bp, Artificial Sequence
  Synthetic oligonucleotide
atcgttataacacattcaggtgaggaaagt

SEQ ID NO: 209224 - DNA, 30 bp, Artificial Sequence
  Synthetic oligonucleotide
tgcgtttgtggacagaaacgtagggaaagt

SEQ ID NO: 209225 - DNA, 30 bp, Artificial Sequence
  Synthetic oligonucleotide
gtaacttggttaaggatagtccgggaaagt

SEQ ID NO: 209226 - DNA, 30 bp, Artificial Sequence
  Synthetic oligonucleotide
tacggagagtaagggattattgttgaaagt

SEQ ID NO: 209227 - DNA, 30 bp, Artificial Sequence
  Synthetic oligonucleotide
tacatcatgtacatagcacgaacataaagt

SEQ ID NO: 209228 - DNA, 30 bp, Artificial Sequence
  Synthetic oligonucleotide
cagatggcaattgcaagccccccataaagt

SEQ ID NO: 209229 - DNA, 30 bp, Artificial Sequence
  Synthetic oligonucleotide
ggtggattggaatgacttgcaagataaagt

SEQ ID NO: 209230 - DNA, 30 bp, Artificial Sequence
  Synthetic oligonucleotide
taattggatcagaacgcggaagcctaaagt

SEQ ID NO: 209231 - DNA, 30 bp, Artificial Sequence
  Synthetic oligonucleotide
atgtggcgccatacagagtccaagtaaagt

SEQ ID NO: 209232 - DNA, 30 bp, Artificial Sequence
  Synthetic oligonucleotide
ggtcagtgccattttccatagtggtaaagt

SEQ ID NO: 209233 - DNA, 30 bp, Artificial Sequence
  Synthetic oligonucleotide
gtgtgcaccgtaagctcttcattgtaaagt

SEQ ID NO: 209234 - DNA, 30 bp, Artificial Sequence
  Synthetic oligonucleotide
tcgcggttgtcataatagaagcattaaagt

SEQ ID NO: 209235 - DNA, 30 bp, Artificial Sequence
  Synthetic oligonucleotide
tgttcaaagctgctcccagttgattaaagt

SEQ ID NO: 209236 - DNA, 30 bp, Artificial Sequence
  Synthetic oligonucleotide
agagaggactcgtccctctcgcgaacaagt

SEQ ID NO: 209237 - DNA, 30 bp, Artificial Sequence
  Synthetic oligonucleotide
tgcgcacatatgaagtctcatagcacaagt

SEQ ID NO: 209238 - DNA, 30 bp, Artificial Sequence
  Synthetic oligonucleotide
tggggcttatcggatcgaaagccgacaagt

SEQ ID NO: 209239 - DNA, 30 bp, Artificial Sequence
  Synthetic oligonucleotide
cgacgaggaagaacgacgatagcgacaagt

SEQ ID NO: 209240 - DNA, 30 bp, Artificial Sequence
  Synthetic oligonucleotide
gcgatgaggccactacgtataagtacaagt

SEQ ID NO: 209241 - DNA, 30 bp, Artificial Sequence
  Synthetic oligonucleotide
ggggctgtgcggaaactgaagcaaccaagt

SEQ ID NO: 209242 - DNA, 30 bp, Artificial Sequence
  Synthetic oligonucleotide
atggaaatctcttcaaattgagagccaagt

SEQ ID NO: 209243 - DNA, 30 bp, Artificial Sequence
  Synthetic oligonucleotide
gatatgtcggccgcaggccagcgagcaagt

SEQ ID NO: 209244 - DNA, 30 bp, Artificial Sequence
  Synthetic oligonucleotide
agaaagcagagctacggggtgggcgcaagt

SEQ ID NO: 209245 - DNA, 30 bp, Artificial Sequence
  Synthetic oligonucleotide
gggaaatgtaagcgaattcacatcgcaagt

SEQ ID NO: 209246 - DNA, 30 bp, Artificial Sequence
  Synthetic oligonucleotide
gtagtttgggaattcgctgagttcgcaagt

SEQ ID NO: 209247 - DNA, 30 bp, Artificial Sequence
  Synthetic oligonucleotide
cgcctcacgtgtaaagtatactgctcaagt

SEQ ID NO: 209248 - DNA, 30 bp, Artificial Sequence
  Synthetic oligonucleotide
aaaggttaatccgatcagtggaagtcaagt

SEQ ID NO: 209249 - DNA, 30 bp, Artificial Sequence
  Synthetic oligonucleotide
acaaacttatctcagcggatgcattcaagt

SEQ ID NO: 209250 - DNA, 30 bp, Artificial Sequence
  Synthetic oligonucleotide
gcacgcgcttcgtatagcgttagttcaagt

SEQ ID NO: 209251 - DNA, 30 bp, Artificial Sequence
  Synthetic oligonucleotide
cggaatcactgtggcggccctgaaagaagt

SEQ ID NO: 209252 - DNA, 30 bp, Artificial Sequence
  Synthetic oligonucleotide
gcactgtttgtacggaagcgatcaagaagt

SEQ ID NO: 209253 - DNA, 30 bp, Artificial Sequence
  Synthetic oligonucleotide
gtaggttcggaagccgttggtaggagaagt

SEQ ID NO: 209254 - DNA, 30 bp, Artificial Sequence
  Synthetic oligonucleotide
acactttgttatgaaaaaggtcatagaagt

SEQ ID NO: 209255 - DNA, 30 bp, Artificial Sequence
  Synthetic oligonucleotide
ctagccaagcgagggagagggagtagaagt

SEQ ID NO: 209256 - DNA, 30 bp, Artificial Sequence
  Synthetic oligonucleotide
acaatgagtcgttctcggtaatgacgaagt

SEQ ID NO: 209257 - DNA, 30 bp, Artificial Sequence
  Synthetic oligonucleotide
acaggggatcggcttcgcggggttcgaagt

SEQ ID NO: 209258 - DNA, 30 bp, Artificial Sequence
  Synthetic oligonucleotide
aatgtctcatagtgtggcaacccaggaagt

SEQ ID NO: 209259 - DNA, 30 bp, Artificial Sequence
  Synthetic oligonucleotide
gcgttactacaaattccctcattaggaagt

SEQ ID NO: 209260 - DNA, 30 bp, Artificial Sequence
  Synthetic oligonucleotide
cccgttccaagccggcccaaagacggaagt

SEQ ID NO: 209261 - DNA, 30 bp, Artificial Sequence
  Synthetic oligonucleotide
ggaatgctcatagattacgaggacggaagt

SEQ ID NO: 209262 - DNA, 30 bp, Artificial Sequence
  Synthetic oligonucleotide
atggtgtgcaggatcccccgggacggaagt

SEQ ID NO: 209263 - DNA, 30 bp, Artificial Sequence
  Synthetic oligonucleotide
ccagaatggggttgactctgcgtcggaagt

SEQ ID NO: 209264 - DNA, 30 bp, Artificial Sequence
  Synthetic oligonucleotide
gtgacactcacaaaatcaggtcggggaagt

SEQ ID NO: 209265 - DNA, 30 bp, Artificial Sequence
  Synthetic oligonucleotide
cgcacaagaaagtggccttatgactgaagt

SEQ ID NO: 209266 - DNA, 30 bp, Artificial Sequence
  Synthetic oligonucleotide
gtcagatacagttataatattacctgaagt

SEQ ID NO: 209267 - DNA, 30 bp, Artificial Sequence
  Synthetic oligonucleotide
gcacatcattaagactttcgacaaataagt

SEQ ID NO: 209268 - DNA, 30 bp, Artificial Sequence
  Synthetic oligonucleotide
cagtgcgtcgaccccccgcattccataagt

SEQ ID NO: 209269 - DNA, 30 bp, Artificial Sequence
  Synthetic oligonucleotide
actgcccggggagcgctgacgtagataagt

SEQ ID NO: 209270 - DNA, 30 bp, Artificial Sequence
  Synthetic oligonucleotide
acttacggagttttcaaccgagtgataagt

SEQ ID NO: 209271 - DNA, 30 bp, Artificial Sequence
  Synthetic oligonucleotide
cctgaggaagctctgtcttaaagtataagt

SEQ ID NO: 209272 - DNA, 30 bp, Artificial Sequence
  Synthetic oligonucleotide
ataaactgctcgagaacctgattgctaagt

SEQ ID NO: 209273 - DNA, 30 bp, Artificial Sequence
  Synthetic oligonucleotide
aatcctcaatcaaagtacgtgaaagtaagt

SEQ ID NO: 209274 - DNA, 30 bp, Artificial Sequence
  Synthetic oligonucleotide
tatgcccactcggatgccgctctagtaagt

SEQ ID NO: 209275 - DNA, 30 bp, Artificial Sequence
  Synthetic oligonucleotide
tgataaattctaagcgaacgttaggtaagt

SEQ ID NO: 209276 - DNA, 30 bp, Artificial Sequence
  Synthetic oligonucleotide
ctcgcggggcattaagggctaacggtaagt

SEQ ID NO: 209277 - DNA, 30 bp, Artificial Sequence
  Synthetic oligonucleotide
gcttggacctccccagtttccgtggtaagt

SEQ ID NO: 209278 - DNA, 30 bp, Artificial Sequence
  Synthetic oligonucleotide
atacatagttatgggcctgtcggtgtaagt

SEQ ID NO: 209279 - DNA, 30 bp, Artificial Sequence
  Synthetic oligonucleotide
tgacagggagccagtaggccgggtgtaagt

SEQ ID NO: 209280 - DNA, 30 bp, Artificial Sequence
  Synthetic oligonucleotide
tcctcctaagccgagggatatcttgtaagt

SEQ ID NO: 209281 - DNA, 30 bp, Artificial Sequence
  Synthetic oligonucleotide
ctaaaatgcatccgaatacatgaattaagt

SEQ ID NO: 209282 - DNA, 30 bp, Artificial Sequence
  Synthetic oligonucleotide
cactcgtagcgatcatcaagaacattaagt

SEQ ID NO: 209283 - DNA, 30 bp, Artificial Sequence
  Synthetic oligonucleotide
aagattaccaacaccggaatccagttaagt

SEQ ID NO: 209284 - DNA, 30 bp, Artificial Sequence
  Synthetic oligonucleotide
cgattcttttcccaccgagtcccgttaagt

SEQ ID NO: 209285 - DNA, 30 bp, Artificial Sequence
  Synthetic oligonucleotide
tcaatcgcgtgatctactctgcggttaagt

SEQ ID NO: 209286 - DNA, 30 bp, Artificial Sequence
  Synthetic oligonucleotide
ccatatccttaaatatagacgatgttaagt

SEQ ID NO: 209287 - DNA, 30 bp, Artificial Sequence
  Synthetic oligonucleotide
ggagtcacgagccaaggactacgtttaagt

SEQ ID NO: 209288 - DNA, 30 bp, Artificial Sequence
  Synthetic oligonucleotide
tacacaactgcaaggcataaacaaaacagt

SEQ ID NO: 209289 - DNA, 30 bp, Artificial Sequence
  Synthetic oligonucleotide
gaataacatcatgtatgaagcgaaaacagt

SEQ ID NO: 209290 - DNA, 30 bp, Artificial Sequence
  Synthetic oligonucleotide
gttcaaacgttgacttgtagggcaaacagt

SEQ ID NO: 209291 - DNA, 30 bp, Artificial Sequence
  Synthetic oligonucleotide
ctcataggtacacgataaagtgagaacagt

SEQ ID NO: 209292 - DNA, 30 bp, Artificial Sequence
  Synthetic oligonucleotide
agcgcaggtgactcaaaacgaaggaacagt

SEQ ID NO: 209293 - DNA, 30 bp, Artificial Sequence
  Synthetic oligonucleotide
cgcgaaacatgcgcaggtgaagctaacagt

SEQ ID NO: 209294 - DNA, 30 bp, Artificial Sequence
  Synthetic oligonucleotide
aaatggtactgttggttggatcttaacagt

SEQ ID NO: 209295 - DNA, 30 bp, Artificial Sequence
  Synthetic oligonucleotide
aaaagggtcgagtaggcaagtttacacagt

SEQ ID NO: 209296 - DNA, 30 bp, Artificial Sequence
  Synthetic oligonucleotide
acgtaattgattaatggtctgacccacagt

SEQ ID NO: 209297 - DNA, 30 bp, Artificial Sequence
  Synthetic oligonucleotide
ctaataaataagcgcatatacgtccacagt

SEQ ID NO: 209298 - DNA, 30 bp, Artificial Sequence
  Synthetic oligonucleotide
cagtgaggattatatactatgcagcacagt

SEQ ID NO: 209299 - DNA, 30 bp, Artificial Sequence
  Synthetic oligonucleotide
aagaccaagctcacattcgattggcacagt

SEQ ID NO: 209300 - DNA, 30 bp, Artificial Sequence
  Synthetic oligonucleotide
ccaagattacctcggcacaactccgacagt

SEQ ID NO: 209301 - DNA, 30 bp, Artificial Sequence
  Synthetic oligonucleotide
gcataggatggatgggattatctcgacagt

SEQ ID NO: 209302 - DNA, 30 bp, Artificial Sequence
  Synthetic oligonucleotide
ctacggatttggagtgcttctgatgacagt

SEQ ID NO: 209303 - DNA, 30 bp, Artificial Sequence
  Synthetic oligonucleotide
aacgttcaaacacatagttatcctgacagt

SEQ ID NO: 209304 - DNA, 30 bp, Artificial Sequence
  Synthetic oligonucleotide
gatcgcataactagaccaggcgcctacagt

SEQ ID NO: 209305 - DNA, 30 bp, Artificial Sequence
  Synthetic oligonucleotide
cacccgacgaatggctatgtgtagtacagt

SEQ ID NO: 209306 - DNA, 30 bp, Artificial Sequence
  Synthetic oligonucleotide
agaccgatgaacttaattgagtattacagt

SEQ ID NO: 209307 - DNA, 30 bp, Artificial Sequence
  Synthetic oligonucleotide
cttcgaaagctgtcctcagttccttacagt

SEQ ID NO: 209308 - DNA, 30 bp, Artificial Sequence
  Synthetic oligonucleotide
aataaaaaaccattactgggaccgaccagt

SEQ ID NO: 209309 - DNA, 30 bp, Artificial Sequence
  Synthetic oligonucleotide
gattcaaggtgtaagggagattctaccagt

SEQ ID NO: 209310 - DNA, 30 bp, Artificial Sequence
  Synthetic oligonucleotide
ggcggtttatgagcaaatcgcacacccagt

SEQ ID NO: 209311 - DNA, 30 bp, Artificial Sequence
  Synthetic oligonucleotide
atatgtaacgaaaaggaatcctagcccagt

SEQ ID NO: 209312 - DNA, 30 bp, Artificial Sequence
  Synthetic oligonucleotide
tagtcagggtgggggtcggataatcccagt

SEQ ID NO: 209313 - DNA, 30 bp, Artificial Sequence
  Synthetic oligonucleotide
aaacgcgcgtagactatcagttcagccagt

SEQ ID NO: 209314 - DNA, 30 bp, Artificial Sequence
  Synthetic oligonucleotide
ttagtaggggtaaatctccagggagccagt

SEQ ID NO: 209315 - DNA, 30 bp, Artificial Sequence
  Synthetic oligonucleotide
gaaagtcagcatacagtacattacgccagt

SEQ ID NO: 209316 - DNA, 30 bp, Artificial Sequence
  Synthetic oligonucleotide
tgtcttgtcgagcaaaaggaaggcgccagt

SEQ ID NO: 209317 - DNA, 30 bp, Artificial Sequence
  Synthetic oligonucleotide
gtcccgggtaaaaaactagcgtcggccagt

SEQ ID NO: 209318 - DNA, 30 bp, Artificial Sequence
  Synthetic oligonucleotide
gtcacaccccgcgccagatccatggccagt

SEQ ID NO: 209319 - DNA, 30 bp, Artificial Sequence
  Synthetic oligonucleotide
agacccgtagatatccgtctagtatccagt

SEQ ID NO: 209320 - DNA, 30 bp, Artificial Sequence
  Synthetic oligonucleotide
tcaggaggcactcccagcatgaacagcagt

SEQ ID NO: 209321 - DNA, 30 bp, Artificial Sequence
  Synthetic oligonucleotide
agggaatagtgtacataattttctagcagt

SEQ ID NO: 209322 - DNA, 30 bp, Artificial Sequence
  Synthetic oligonucleotide
gttgaacagaaactcagctcaattagcagt

SEQ ID NO: 209323 - DNA, 30 bp, Artificial Sequence
  Synthetic oligonucleotide
tccggattcacacgaagttagtcacgcagt

SEQ ID NO: 209324 - DNA, 30 bp, Artificial Sequence
  Synthetic oligonucleotide
aagaacatcaaattggatcactaccgcagt

SEQ ID NO: 209325 - DNA, 30 bp, Artificial Sequence
  Synthetic oligonucleotide
taatctgcgatccgcacgacctagcgcagt

SEQ ID NO: 209326 - DNA, 30 bp, Artificial Sequence
  Synthetic oligonucleotide
ctggctagcatctatgtaattaatcgcagt

SEQ ID NO: 209327 - DNA, 30 bp, Artificial Sequence
  Synthetic oligonucleotide
ccaaccacatcgtggccgacgcaaggcagt

SEQ ID NO: 209328 - DNA, 30 bp, Artificial Sequence
  Synthetic oligonucleotide
ttagggagtaaggtacactagtaaggcagt

SEQ ID NO: 209329 - DNA, 30 bp, Artificial Sequence
  Synthetic oligonucleotide
cagggatggtcgaagactttaagcggcagt

SEQ ID NO: 209330 - DNA, 30 bp, Artificial Sequence
  Synthetic oligonucleotide
gcttaaagggaaacagccgcagtcggcagt

SEQ ID NO: 209331 - DNA, 30 bp, Artificial Sequence
  Synthetic oligonucleotide
gtgtaacgggaatattattgtgtcggcagt

SEQ ID NO: 209332 - DNA, 30 bp, Artificial Sequence
  Synthetic oligonucleotide
gttcggtttcgtattcgatgggcgggcagt

SEQ ID NO: 209333 - DNA, 30 bp, Artificial Sequence
  Synthetic oligonucleotide
acactgaaaattaacaagaataatggcagt

SEQ ID NO: 209334 - DNA, 30 bp, Artificial Sequence
  Synthetic oligonucleotide
acaccggcaccgtgcgagggaactggcagt

SEQ ID NO: 209335 - DNA, 30 bp, Artificial Sequence
  Synthetic oligonucleotide
agaagattaaatgtggggacggttggcagt

SEQ ID NO: 209336 - DNA, 30 bp, Artificial Sequence
  Synthetic oligonucleotide
gtctcagggaaaagaagctcacgatgcagt

SEQ ID NO: 209337 - DNA, 30 bp, Artificial Sequence
  Synthetic oligonucleotide
cacggcgacccaagggagactatctgcagt

SEQ ID NO: 209338 - DNA, 30 bp, Artificial Sequence
  Synthetic oligonucleotide
gttaagacatccgtacgtcctgagtgcagt

SEQ ID NO: 209339 - DNA, 30 bp, Artificial Sequence
  Synthetic oligonucleotide
ttgccacaattgcacgtgcgagaaatcagt

SEQ ID NO: 209340 - DNA, 30 bp, Artificial Sequence
  Synthetic oligonucleotide
ttggcatcagcctactcagtcaacatcagt

SEQ ID NO: 209341 - DNA, 30 bp, Artificial Sequence
  Synthetic oligonucleotide
agcgtattccgcagcggccagaacatcagt

SEQ ID NO: 209342 - DNA, 30 bp, Artificial Sequence
  Synthetic oligonucleotide
gtcggccgaataggctggttatacatcagt

SEQ ID NO: 209343 - DNA, 30 bp, Artificial Sequence
  Synthetic oligonucleotide
ggcgagactgattgaggtcaaacactcagt

SEQ ID NO: 209344 - DNA, 30 bp, Artificial Sequence
  Synthetic oligonucleotide
tactgaaactgcagttattaccgcctcagt

SEQ ID NO: 209345 - DNA, 30 bp, Artificial Sequence
  Synthetic oligonucleotide
tctttgatgcgatacacaaataggctcagt

SEQ ID NO: 209346 - DNA, 30 bp, Artificial Sequence
  Synthetic oligonucleotide
aacaggattaagacgctaggcgtgctcagt

SEQ ID NO: 209347 - DNA, 30 bp, Artificial Sequence
  Synthetic oligonucleotide
ctggatccagcactaatagcgcgcgtcagt

SEQ ID NO: 209348 - DNA, 30 bp, Artificial Sequence
  Synthetic oligonucleotide
aaatggtgatcgttgtgaacagcggtcagt

SEQ ID NO: 209349 - DNA, 30 bp, Artificial Sequence
  Synthetic oligonucleotide
ggatattgcaccgacccgttgaatgtcagt

SEQ ID NO: 209350 - DNA, 30 bp, Artificial Sequence
  Synthetic oligonucleotide
acgccgatacgatagcgctaatcattcagt

SEQ ID NO: 209351 - DNA, 30 bp, Artificial Sequence
  Synthetic oligonucleotide
tcttagtgaaacggttacgagtgattcagt

SEQ ID NO: 209352 - DNA, 30 bp, Artificial Sequence
  Synthetic oligonucleotide
taaaagatcttctgctctcgggtgttcagt

SEQ ID NO: 209353 - DNA, 30 bp, Artificial Sequence
  Synthetic oligonucleotide
gtactatgctcccagcgggtaacaaagagt

SEQ ID NO: 209354 - DNA, 31 bp, Artificial Sequence
  Synthetic oligonucleotide
tagggtgtaattttccccctctgcgaagagt

SEQ ID NO: 209355 - DNA, 30 bp, Artificial Sequence
  Synthetic oligonucleotide
tattcttaccggcgttgtaagggacagagt

SEQ ID NO: 209356 - DNA, 30 bp, Artificial Sequence
  Synthetic oligonucleotide
ctgagtccttcttggaggctggtccagagt

SEQ ID NO: 209357 - DNA, 30 bp, Artificial Sequence
  Synthetic oligonucleotide
actagttactggacgtgttgattccagagt

SEQ ID NO: 209358 - DNA, 30 bp, Artificial Sequence
  Synthetic oligonucleotide
gatcgcgtaacttaccaagacatgcagagt

SEQ ID NO: 209359 - DNA, 30 bp, Artificial Sequence
  Synthetic oligonucleotide
tctgatacagctcggcatgctatgcagagt

SEQ ID NO: 209360 - DNA, 30 bp, Artificial Sequence
  Synthetic oligonucleotide
ctcgtctaggggtcgtacaccgtgcagagt

SEQ ID NO: 209361 - DNA, 30 bp, Artificial Sequence
  Synthetic oligonucleotide
actacgataggcgtggtactgggtcagagt

SEQ ID NO: 209362 - DNA, 30 bp, Artificial Sequence
  Synthetic oligonucleotide
ggtagggaagcgtgggcctttgcagagagt

SEQ ID NO: 209363 - DNA, 30 bp, Artificial Sequence
  Synthetic oligonucleotide
tgtgtatacctagcgaatgctttagagagt

SEQ ID NO: 209364 - DNA, 30 bp, Artificial Sequence
  Synthetic oligonucleotide
tcagtcttgtttcattccacctccgagagt

SEQ ID NO: 209365 - DNA, 30 bp, Artificial Sequence
  Synthetic oligonucleotide
gtgaaacttaaggttaggagctgggagagt

SEQ ID NO: 209366 - DNA, 30 bp, Artificial Sequence
  Synthetic oligonucleotide
gcactggttatggaggaaaacatggagagt

SEQ ID NO: 209367 - DNA, 30 bp, Artificial Sequence
  Synthetic oligonucleotide
ttgcaatgctaggattccaggtatgagagt

SEQ ID NO: 209368 - DNA, 30 bp, Artificial Sequence
  Synthetic oligonucleotide
tacggattactcatcgaatgtattgagagt

SEQ ID NO: 209369 - DNA, 30 bp, Artificial Sequence
  Synthetic oligonucleotide
tcattacctgttcctgtggttctctagagt

SEQ ID NO: 209370 - DNA, 30 bp, Artificial Sequence
  Synthetic oligonucleotide
ggtcaggaaaatttcgctacagcgtagagt

SEQ ID NO: 209371 - DNA, 30 bp, Artificial Sequence
  Synthetic oligonucleotide
tagacttcgcgactgaacgagtattagagt

SEQ ID NO: 209372 - DNA, 30 bp, Artificial Sequence
  Synthetic oligonucleotide
atctgactcataacttccggcgtaacgagt

SEQ ID NO: 209373 - DNA, 30 bp, Artificial Sequence
  Synthetic oligonucleotide
cgggtaagagccggtatggctactacgagt

SEQ ID NO: 209374 - DNA, 29 bp, Artificial Sequence
  Synthetic oligonucleotide
agctgtaggaaatccgttcttgtacgagt

SEQ ID NO: 209375 - DNA, 30 bp, Artificial Sequence
  Synthetic oligonucleotide
aagggcaagagcgggcagccgtccccgagt

SEQ ID NO: 209376 - DNA, 30 bp, Artificial Sequence
  Synthetic oligonucleotide
tgtatattgcaccacctgcgaatcccgagt

SEQ ID NO: 209377 - DNA, 30 bp, Artificial Sequence
  Synthetic oligonucleotide
tacagataaggggcatcgtgagagccgagt

SEQ ID NO: 209378 - DNA, 30 bp, Artificial Sequence
  Synthetic oligonucleotide
ctggttttacatgaaggtcgtgatccgagt

SEQ ID NO: 209379 - DNA, 30 bp, Artificial Sequence
  Synthetic oligonucleotide
cttagaataacaatggcactctaagcgagt

SEQ ID NO: 209380 - DNA, 30 bp, Artificial Sequence
  Synthetic oligonucleotide
tagagccgcggcgggggtggaatggcgagt

SEQ ID NO: 209381 - DNA, 30 bp, Artificial Sequence
  Synthetic oligonucleotide
actggccactttatgggttaacaatcgagt

SEQ ID NO: 209382 - DNA, 30 bp, Artificial Sequence
  Synthetic oligonucleotide
tgggatcggatgatcgcattgtcatcgagt

SEQ ID NO: 209383 - DNA, 30 bp, Artificial Sequence
  Synthetic oligonucleotide
gagggcacccgcagacgaataggctcgagt

SEQ ID NO: 209384 - DNA, 30 bp, Artificial Sequence
  Synthetic oligonucleotide
gccaatgaagcttagtcaaccttctcgagt

SEQ ID NO: 209385 - DNA, 30 bp, Artificial Sequence
  Synthetic oligonucleotide
ttatgtatcgagttctcgtattaaaggagt

SEQ ID NO: 209386 - DNA, 30 bp, Artificial Sequence
  Synthetic oligonucleotide
tagtcgtatacgaatggacctcccaggagt

SEQ ID NO: 209387 - DNA, 30 bp, Artificial Sequence
  Synthetic oligonucleotide
atgaccatcattggttaggatcagaggagt

SEQ ID NO: 209388 - DNA, 30 bp, Artificial Sequence
  Synthetic oligonucleotide
gccattaggatggagtgggtaaataggagt

SEQ ID NO: 209389 - DNA, 30 bp, Artificial Sequence
  Synthetic oligonucleotide
tatcgtaagggcatcacatcagctaggagt

SEQ ID NO: 209390 - DNA, 30 bp, Artificial Sequence
  Synthetic oligonucleotide
taccaagcaccagatcccgggtgtaggagt

SEQ ID NO: 209391 - DNA, 30 bp, Artificial Sequence
  Synthetic oligonucleotide
cgctagtttctcggaataagtacgcggagt

SEQ ID NO: 209392 - DNA, 30 bp, Artificial Sequence
  Synthetic oligonucleotide
ttggatccagagcggttacatccgcggagt

SEQ ID NO: 209393 - DNA, 30 bp, Artificial Sequence
  Synthetic oligonucleotide
gctccctcggctgagaagtccattcggagt

SEQ ID NO: 209394 - DNA, 30 bp, Artificial Sequence
  Synthetic oligonucleotide
tgcgactcacaataacatgtgttggggagt

SEQ ID NO: 209395 - DNA, 30 bp, Artificial Sequence
  Synthetic oligonucleotide
agtggcgggtagcatggcgcagtaatgagt

SEQ ID NO: 209396 - DNA, 30 bp, Artificial Sequence
  Synthetic oligonucleotide
ggtcgagggacaaattccctagagatgagt

SEQ ID NO: 209397 - DNA, 30 bp, Artificial Sequence
  Synthetic oligonucleotide
cggccctgtttggttcggtcggagatgagt

SEQ ID NO: 209398 - DNA, 30 bp, Artificial Sequence
  Synthetic oligonucleotide
gacctcgggtgcctaagatagccgatgagt

SEQ ID NO: 209399 - DNA, 30 bp, Artificial Sequence
  Synthetic oligonucleotide
tgaagaatgacgccccttttgtggatgagt

SEQ ID NO: 209400 - DNA, 30 bp, Artificial Sequence
  Synthetic oligonucleotide
accaggccgatggttcatcattggatgagt

SEQ ID NO: 209401 - DNA, 30 bp, Artificial Sequence
  Synthetic oligonucleotide
atgagactgagtcgagttcttcatatgagt

SEQ ID NO: 209402 - DNA, 30 bp, Artificial Sequence
  Synthetic oligonucleotide
tataacactgaatggccgtaagatatgagt

SEQ ID NO: 209403 - DNA, 30 bp, Artificial Sequence
  Synthetic oligonucleotide
ggtcgcctgggagggggcttcagtatgagt

SEQ ID NO: 209404 - DNA, 30 bp, Artificial Sequence
  Synthetic oligonucleotide
tgcctacgggcaccctcttcccaactgagt

SEQ ID NO: 209405 - DNA, 30 bp, Artificial Sequence
  Synthetic oligonucleotide
gtaaaagcccgcgtaggtctaggcctgagt

SEQ ID NO: 209406 - DNA, 30 bp, Artificial Sequence
  Synthetic oligonucleotide
aagcagggggtattcttccattcagtgagt

SEQ ID NO: 209407 - DNA, 30 bp, Artificial Sequence
  Synthetic oligonucleotide
tttgattgaatcgggaagggacgtgtgagt

SEQ ID NO: 209408 - DNA, 30 bp, Artificial Sequence
  Synthetic oligonucleotide
gacttagttcagagtaacgtgcagttgagt

SEQ ID NO: 209409 - DNA, 30 bp, Artificial Sequence
  Synthetic oligonucleotide
ggccccgcgtcaccgtggtcacgtttgagt

SEQ ID NO: 209410 - DNA, 30 bp, Artificial Sequence
  Synthetic oligonucleotide
gtgactgaggtgcaatcatcaggtttgagt

SEQ ID NO: 209411 - DNA, 30 bp, Artificial Sequence
  Synthetic oligonucleotide
gatgcaccgatgtaggctgacggaaatagt

SEQ ID NO: 209412 - DNA, 30 bp, Artificial Sequence
  Synthetic oligonucleotide
aaacgtcatacaactaacgtggacaatagt

SEQ ID NO: 209413 - DNA, 30 bp, Artificial Sequence
  Synthetic oligonucleotide
cccccttcaatcaaacatgaacccaatagt

SEQ ID NO: 209414 - DNA, 30 bp, Artificial Sequence
  Synthetic oligonucleotide
gttctctggaagaaaacgcgcctcaatagt

SEQ ID NO: 209415 - DNA, 30 bp, Artificial Sequence
  Synthetic oligonucleotide
tgtaggcctcgtttggcgacatagaatagt

SEQ ID NO: 209416 - DNA, 30 bp, Artificial Sequence
  Synthetic oligonucleotide
aattagatacatcgctatcccgcgaatagt

SEQ ID NO: 209417 - DNA, 30 bp, Artificial Sequence
  Synthetic oligonucleotide
aggagtcgtgaaattgtccagacgcatagt

SEQ ID NO: 209418 - DNA, 30 bp, Artificial Sequence
  Synthetic oligonucleotide
aggcggtagtttaaatctgtatcgcatagt

SEQ ID NO: 209419 - DNA, 30 bp, Artificial Sequence
  Synthetic oligonucleotide
ctaaacctacagtcgagactgtggcatagt

SEQ ID NO: 209420 - DNA, 30 bp, Artificial Sequence
  Synthetic oligonucleotide
gactaccatcggaaaactagaattcatagt

SEQ ID NO: 209421 - DNA, 30 bp, Artificial Sequence
  Synthetic oligonucleotide
tgcaaaagtttatagggctagcaagatagt

SEQ ID NO: 209422 - DNA, 30 bp, Artificial Sequence
  Synthetic oligonucleotide
taccaagaaagttcactccgaccagatagt

SEQ ID NO: 209423 - DNA, 30 bp, Artificial Sequence
  Synthetic oligonucleotide
agaggagaccaccttccggtttcagatagt

SEQ ID NO: 209424 - DNA, 30 bp, Artificial Sequence
  Synthetic oligonucleotide
gagactgggacgccgtgtgtgcgtgatagt

SEQ ID NO: 209425 - DNA, 30 bp, Artificial Sequence
  Synthetic oligonucleotide
atgccgacctcacacatctggagctatagt

SEQ ID NO: 209426 - DNA, 30 bp, Artificial Sequence
  Synthetic oligonucleotide
cgataccgagcagtattgggatcttatagt

SEQ ID NO: 209427 - DNA, 30 bp, Artificial Sequence
  Synthetic oligonucleotide
ggactgagaggtcaaatatgggtgactagt

SEQ ID NO: 209428 - DNA, 30 bp, Artificial Sequence
  Synthetic oligonucleotide
agggcctggaggaattaactgactactagt

SEQ ID NO: 209429 - DNA, 30 bp, Artificial Sequence
  Synthetic oligonucleotide
cgcaaccgaaactatgtgtagtaacctagt

SEQ ID NO: 209430 - DNA, 31 bp, Artificial Sequence
  Synthetic oligonucleotide
ctgatcagagttcagactggtcaatcctagt

SEQ ID NO: 209431 - DNA, 30 bp, Artificial Sequence
  Synthetic oligonucleotide
tataggaaggcgggcatcgtcgaatctagt

SEQ ID NO: 209432 - DNA, 30 bp, Artificial Sequence
  Synthetic oligonucleotide
caatgtttatctgggacaatacgctctagt

SEQ ID NO: 209433 - DNA, 30 bp, Artificial Sequence
  Synthetic oligonucleotide
gtttgttggtcatgaggtgagaagtctagt

SEQ ID NO: 209434 - DNA, 30 bp, Artificial Sequence
  Synthetic oligonucleotide
cagcgggcaaaaaggttccgctattctagt

SEQ ID NO: 209435 - DNA, 30 bp, Artificial Sequence
  Synthetic oligonucleotide
ttcgaaggtggctacaatgcctagagtagt

SEQ ID NO: 209436 - DNA, 30 bp, Artificial Sequence
  Synthetic oligonucleotide
tatatggcgcctaaaatcttgacgagtagt

SEQ ID NO: 209437 - DNA, 30 bp, Artificial Sequence
  Synthetic oligonucleotide
atgttgaattccgaagggacccggagtagt

SEQ ID NO: 209438 - DNA, 30 bp, Artificial Sequence
  Synthetic oligonucleotide
aacgtgttataaggctacggaaatagtagt

SEQ ID NO: 209439 - DNA, 30 bp, Artificial Sequence
  Synthetic oligonucleotide
ccacggatatagggtctttgccatagtagt

SEQ ID NO: 209440 - DNA, 30 bp, Artificial Sequence
  Synthetic oligonucleotide
acacattcaggggatagggcttcacgtagt

SEQ ID NO: 209441 - DNA, 30 bp, Artificial Sequence
  Synthetic oligonucleotide
atatcatacaacgcgtcacgccggcgtagt

SEQ ID NO: 209442 - DNA, 30 bp, Artificial Sequence
  Synthetic oligonucleotide
ctaaatgtgtatcgtaacgggtctcgtagt

SEQ ID NO: 209443 - DNA, 30 bp, Artificial Sequence
  Synthetic oligonucleotide
agggtcctaccctcgtcagtttaaggtagt

SEQ ID NO: 209444 - DNA, 30 bp, Artificial Sequence
  Synthetic oligonucleotide
ttggcagatcaattgacgggttacggtagt

SEQ ID NO: 209445 - DNA, 30 bp, Artificial Sequence
  Synthetic oligonucleotide
gatcgcctgacaataaagccctagggtagt

SEQ ID NO: 209446 - DNA, 30 bp, Artificial Sequence
  Synthetic oligonucleotide
gccaccatctcacgacaccaacggggtagt

SEQ ID NO: 209447 - DNA, 30 bp, Artificial Sequence
  Synthetic oligonucleotide
actaggcaagtactttccgatattggtagt

SEQ ID NO: 209448 - DNA, 30 bp, Artificial Sequence
  Synthetic oligonucleotide
tcttgtagatgcttcatagacgggtgtagt

SEQ ID NO: 209449 - DNA, 30 bp, Artificial Sequence
  Synthetic oligonucleotide
ttggctcgtcgtccacttttgataattagt

SEQ ID NO: 209450 - DNA, 30 bp, Artificial Sequence
  Synthetic oligonucleotide
atgcttagagaggcatggcacaacattagt

SEQ ID NO: 209451 - DNA, 30 bp, Artificial Sequence
  Synthetic oligonucleotide
agataagctacgtgataaggggtcattagt

SEQ ID NO: 209452 - DNA, 30 bp, Artificial Sequence
  Synthetic oligonucleotide
ggtgaacacatgccttcggagacgattagt

SEQ ID NO: 209453 - DNA, 30 bp, Artificial Sequence
  Synthetic oligonucleotide
atcacaaaggaaaaattaagtggacttagt

SEQ ID NO: 209454 - DNA, 30 bp, Artificial Sequence
  Synthetic oligonucleotide
tctcgggatctcctgctcccaagagttagt

SEQ ID NO: 209455 - DNA, 30 bp, Artificial Sequence
  Synthetic oligonucleotide
ggggctttcgaccccgtttcgatagttagt

SEQ ID NO: 209456 - DNA, 30 bp, Artificial Sequence
  Synthetic oligonucleotide
agttgtgatagctgtgcttcccgcgttagt

SEQ ID NO: 209457 - DNA, 30 bp, Artificial Sequence
  Synthetic oligonucleotide
actattgagcaggtactcgacggggttagt

SEQ ID NO: 209458 - DNA, 30 bp, Artificial Sequence
  Synthetic oligonucleotide
ccacacgtgggcaagctcgacgatgttagt

SEQ ID NO: 209459 - DNA, 30 bp, Artificial Sequence
  Synthetic oligonucleotide
agcagtaggggcacggcgtggctctttagt

SEQ ID NO: 209460 - DNA, 30 bp, Artificial Sequence
  Synthetic oligonucleotide
ttaagtgataacccgggccgactgtttagt

SEQ ID NO: 209461 - DNA, 30 bp, Artificial Sequence
  Synthetic oligonucleotide
gaaaaatgtatcttacgggcttgaaaacgt

SEQ ID NO: 209462 - DNA, 30 bp, Artificial Sequence
  Synthetic oligonucleotide
cgagtgtatggcgaccaacgattaaaacgt

SEQ ID NO: 209463 - DNA, 30 bp, Artificial Sequence
  Synthetic oligonucleotide
ggaacagacgagatctcacccggcaaacgt

SEQ ID NO: 209464 - DNA, 30 bp, Artificial Sequence
  Synthetic oligonucleotide
ccggacccgaacacaggcagcaggaaacgt

SEQ ID NO: 209465 - DNA, 30 bp, Artificial Sequence
  Synthetic oligonucleotide
gttcggagacgatacgcttaccataaacgt

SEQ ID NO: 209466 - DNA, 30 bp, Artificial Sequence
  Synthetic oligonucleotide
catccttggcacacgcgccaggaacaacgt

SEQ ID NO: 209467 - DNA, 30 bp, Artificial Sequence
  Synthetic oligonucleotide
ctgttcactcgtacccgcgaagggcaacgt

SEQ ID NO: 209468 - DNA, 30 bp, Artificial Sequence
  Synthetic oligonucleotide
agctagcgagtaccggctaagtatcaacgt

SEQ ID NO: 209469 - DNA, 30 bp, Artificial Sequence
  Synthetic oligonucleotide
ggaaatatcacccggcaatcttttcaacgt

SEQ ID NO: 209470 - DNA, 30 bp, Artificial Sequence
  Synthetic oligonucleotide
aaacctggtctggcatcaatggcagaacgt

SEQ ID NO: 209471 - DNA, 30 bp, Artificial Sequence
  Synthetic oligonucleotide
gaatgcgaaagcacagataatacggaacgt

SEQ ID NO: 209472 - DNA, 30 bp, Artificial Sequence
  Synthetic oligonucleotide
cgacgcgatggtgaggcacagcctgaacgt

SEQ ID NO: 209473 - DNA, 30 bp, Artificial Sequence
  Synthetic oligonucleotide
cgagtcttgtattcgtgaggcagataacgt

SEQ ID NO: 209474 - DNA, 30 bp, Artificial Sequence
  Synthetic oligonucleotide
tctgggccgacgcatgtcaaaggttaacgt

SEQ ID NO: 209475 - DNA, 30 bp, Artificial Sequence
  Synthetic oligonucleotide
ctagtaagggcgtagttgggtataacacgt

SEQ ID NO: 209476 - DNA, 30 bp, Artificial Sequence
  Synthetic oligonucleotide
tagataggcgctgaccattgttacacacgt

SEQ ID NO: 209477 - DNA, 30 bp, Artificial Sequence
  Synthetic oligonucleotide
aagtcgtgcagctggtcgactgtgacacgt

SEQ ID NO: 209478 - DNA, 30 bp, Artificial Sequence
  Synthetic oligonucleotide
aagacggtagtttcctcagaaggtacacgt

SEQ ID NO: 209479 - DNA, 30 bp, Artificial Sequence
  Synthetic oligonucleotide
caccagtggctgaggtaaataattacacgt

SEQ ID NO: 209480 - DNA, 30 bp, Artificial Sequence
  Synthetic oligonucleotide
aggcaatatgtcagacatgtttttacacgt

SEQ ID NO: 209481 - DNA, 30 bp, Artificial Sequence
  Synthetic oligonucleotide
ttgagcagtgtgcggtgccatagaccacgt

SEQ ID NO: 209482 - DNA, 30 bp, Artificial Sequence
  Synthetic oligonucleotide
ccgaggcgtttggaaggggtccgtccacgt

SEQ ID NO: 209483 - DNA, 30 bp, Artificial Sequence
  Synthetic oligonucleotide
atgctatgttcgactagcgaacccgcacgt

SEQ ID NO: 209484 - DNA, 30 bp, Artificial Sequence
  Synthetic oligonucleotide
tgaaatggacgaggcggacatgctgcacgt

SEQ ID NO: 209485 - DNA, 30 bp, Artificial Sequence
  Synthetic oligonucleotide
gactaagacttagcgctatactttgcacgt

SEQ ID NO: 209486 - DNA, 30 bp, Artificial Sequence
  Synthetic oligonucleotide
tcttggtaagctattctgtcttaatcacgt

SEQ ID NO: 209487 - DNA, 30 bp, Artificial Sequence
  Synthetic oligonucleotide
gtctagatgataactaaaccgtagtcacgt

SEQ ID NO: 209488 - DNA, 30 bp, Artificial Sequence
  Synthetic oligonucleotide
cctcccacctctaaatgtaaattgtcacgt

SEQ ID NO: 209489 - DNA, 30 bp, Artificial Sequence
  Synthetic oligonucleotide
ggcagagtaattgaattgaacccttcacgt

SEQ ID NO: 209490 - DNA, 30 bp, Artificial Sequence
  Synthetic oligonucleotide
tgcaatcataaaaagtgaccaagttcacgt

SEQ ID NO: 209491 - DNA, 30 bp, Artificial Sequence
  Synthetic oligonucleotide
tggttcaataatacggtgagtcgttcacgt

SEQ ID NO: 209492 - DNA, 30 bp, Artificial Sequence
  Synthetic oligonucleotide
atatcacggttttatatccagccaagacgt

SEQ ID NO: 209493 - DNA, 30 bp, Artificial Sequence
  Synthetic oligonucleotide
ggagttgggacagtactacagtatagacgt

SEQ ID NO: 209494 - DNA, 30 bp, Artificial Sequence
  Synthetic oligonucleotide
gaggttaacatcccggcctgacaccgacgt

SEQ ID NO: 209495 - DNA, 30 bp, Artificial Sequence
  Synthetic oligonucleotide
agatttagcaaatatcgacaggaccgacgt

SEQ ID NO: 209496 - DNA, 30 bp, Artificial Sequence
  Synthetic oligonucleotide
acgcggcacaacatgacacaagcccgacgt

SEQ ID NO: 209497 - DNA, 30 bp, Artificial Sequence
  Synthetic oligonucleotide
ccttggacattgagaataagccggcgacgt

SEQ ID NO: 209498 - DNA, 30 bp, Artificial Sequence
  Synthetic oligonucleotide
ttgggttgactgcaaggatagtggcgacgt

SEQ ID NO: 209499 - DNA, 30 bp, Artificial Sequence
  Synthetic oligonucleotide
acaagaggtgatgtcacccactgtcgacgt

SEQ ID NO: 209500 - DNA, 30 bp, Artificial Sequence
  Synthetic oligonucleotide
accgtggttcaccgtcaggtcgtaggacgt

SEQ ID NO: 209501 - DNA, 30 bp, Artificial Sequence
  Synthetic oligonucleotide
tggagcgaagacaggacagtaaagggacgt

SEQ ID NO: 209502 - DNA, 30 bp, Artificial Sequence
  Synthetic oligonucleotide
gcttacacaagaggcataacccatggacgt

SEQ ID NO: 209503 - DNA, 30 bp, Artificial Sequence
  Synthetic oligonucleotide
ggaacctatctccccttgtgagttggacgt

SEQ ID NO: 209504 - DNA, 30 bp, Artificial Sequence
  Synthetic oligonucleotide
ttatccggtggtaacgggtatccctgacgt

SEQ ID NO: 209505 - DNA, 30 bp, Artificial Sequence
  Synthetic oligonucleotide
tccgagaactgatcttccctgctgtgacgt

SEQ ID NO: 209506 - DNA, 30 bp, Artificial Sequence
  Synthetic oligonucleotide
agctgatttcttccgacgtgccgtatacgt

SEQ ID NO: 209507 - DNA, 30 bp, Artificial Sequence
  Synthetic oligonucleotide
gagtacaaggccagacttgacttcctacgt

SEQ ID NO: 209508 - DNA, 30 bp, Artificial Sequence
  Synthetic oligonucleotide
ctggtcggtgctgtcgcagtcaggctacgt

SEQ ID NO: 209509 - DNA, 30 bp, Artificial Sequence
  Synthetic oligonucleotide
gaagtagatttacaaactccgggagtacgt

SEQ ID NO: 209510 - DNA, 30 bp, Artificial Sequence
  Synthetic oligonucleotide
ctgggaaacctcgaggaaacaatagtacgt

SEQ ID NO: 209511 - DNA, 30 bp, Artificial Sequence
  Synthetic oligonucleotide
tcagtgcacacggtcgtaggcaccgtacgt

SEQ ID NO: 209512 - DNA, 30 bp, Artificial Sequence
  Synthetic oligonucleotide
ccggcgtggcgatggggcagatgcgtacgt

SEQ ID NO: 209513 - DNA, 30 bp, Artificial Sequence
  Synthetic oligonucleotide
tcgtaattcgttgcgtgaataatcgtacgt

SEQ ID NO: 209514 - DNA, 30 bp, Artificial Sequence
  Synthetic oligonucleotide
gtggacacttgaggtagtagctcattacgt

SEQ ID NO: 209515 - DNA, 30 bp, Artificial Sequence
  Synthetic oligonucleotide
gctcaggaaaactgtatgggacgtttacgt

SEQ ID NO: 209516 - DNA, 30 bp, Artificial Sequence
  Synthetic oligonucleotide
aacgggacggcttacttctgtcttttacgt

SEQ ID NO: 209517 - DNA, 30 bp, Artificial Sequence
  Synthetic oligonucleotide
cgacccttcgggctgcgaacataaaaccgt

SEQ ID NO: 209518 - DNA, 30 bp, Artificial Sequence
  Synthetic oligonucleotide
tgtaataatcggatatgccaacgcaaccgt

SEQ ID NO: 209519 - DNA, 30 bp, Artificial Sequence
  Synthetic oligonucleotide
accagggacatacttgaagacgcgaaccgt

SEQ ID NO: 209520 - DNA, 30 bp, Artificial Sequence
  Synthetic oligonucleotide
ggggtaccctccccctctgccactaaccgt

SEQ ID NO: 209521 - DNA, 30 bp, Artificial Sequence
  Synthetic oligonucleotide
gctaggtctaacgactagggtcctaaccgt

SEQ ID NO: 209522 - DNA, 30 bp, Artificial Sequence
  Synthetic oligonucleotide
cgatgctcgatcgttacgatacttaaccgt

SEQ ID NO: 209523 - DNA, 30 bp, Artificial Sequence
  Synthetic oligonucleotide
tacagttaataccagcgcacccgacaccgt

SEQ ID NO: 209524 - DNA, 30 bp, Artificial Sequence
  Synthetic oligonucleotide
gtatgatactaccatcgcgagtcgcaccgt

SEQ ID NO: 209525 - DNA, 30 bp, Artificial Sequence
  Synthetic oligonucleotide
aatccagagcagctctcggcgcgagaccgt

SEQ ID NO: 209526 - DNA, 30 bp, Artificial Sequence
  Synthetic oligonucleotide
tagggcttagggcgacattgtgtagaccgt

SEQ ID NO: 209527 - DNA, 30 bp, Artificial Sequence
  Synthetic oligonucleotide
tgcaagttatatatcaaaataagttaccgt

SEQ ID NO: 209528 - DNA, 30 bp, Artificial Sequence
  Synthetic oligonucleotide
gagaatccggtgggatataagtgttaccgt

SEQ ID NO: 209529 - DNA, 30 bp, Artificial Sequence
  Synthetic oligonucleotide
gtaatcctgaagcgtgcgaaattaacccgt

SEQ ID NO: 209530 - DNA, 30 bp, Artificial Sequence
  Synthetic oligonucleotide
acccttaataggatgacctcgtgcacccgt

SEQ ID NO: 209531 - DNA, 30 bp, Artificial Sequence
  Synthetic oligonucleotide
gcgtggcttggaaaaccagataagacccgt

SEQ ID NO: 209532 - DNA, 30 bp, Artificial Sequence
  Synthetic oligonucleotide
gctgtaccacaggatctcaaggagacccgt

SEQ ID NO: 209533 - DNA, 30 bp, Artificial Sequence
  Synthetic oligonucleotide
actgaacactcgcctagttattggacccgt

SEQ ID NO: 209534 - DNA, 30 bp, Artificial Sequence
  Synthetic oligonucleotide
tgctatatgggatatttgaatcaaccccgt

SEQ ID NO: 209535 - DNA, 30 bp, Artificial Sequence
  Synthetic oligonucleotide
tgattcgaaagagggtacggagaaccccgt

SEQ ID NO: 209536 - DNA, 30 bp, Artificial Sequence
  Synthetic oligonucleotide
tcactcacctttgcaaacgcacggccccgt

SEQ ID NO: 209537 - DNA, 30 bp, Artificial Sequence
  Synthetic oligonucleotide
taaaaaattggctcggactcgaacgcccgt

SEQ ID NO: 209538 - DNA, 30 bp, Artificial Sequence
  Synthetic oligonucleotide
ttggctcctggccattaggatcgggcccgt

SEQ ID NO: 209539 - DNA, 30 bp, Artificial Sequence
  Synthetic oligonucleotide
aaaacgataaaatctgccggcggggcccgt

SEQ ID NO: 209540 - DNA, 30 bp, Artificial Sequence
  Synthetic oligonucleotide
caggttaagccgatgttgtaacaaagccgt

SEQ ID NO: 209541 - DNA, 30 bp, Artificial Sequence
  Synthetic oligonucleotide
agcaaaggtatatccaccaccatcagccgt

SEQ ID NO: 209542 - DNA, 30 bp, Artificial Sequence
  Synthetic oligonucleotide
tcagacgattgtgccaagtcttagagccgt

SEQ ID NO: 209543 - DNA, 30 bp, Artificial Sequence
  Synthetic oligonucleotide
cttatgtaagttaaggcattaaatagccgt

SEQ ID NO: 209544 - DNA, 30 bp, Artificial Sequence
  Synthetic oligonucleotide
gcgccaaggccggggtttgaacgaggccgt

SEQ ID NO: 209545 - DNA, 30 bp, Artificial Sequence
  Synthetic oligonucleotide
aagcgatcaaccgtgttaaggcggggccgt

SEQ ID NO: 209546 - DNA, 31 bp, Artificial Sequence
  Synthetic oligonucleotide
ccaatggggactcacagagtgagctggccgt

SEQ ID NO: 209547 - DNA, 30 bp, Artificial Sequence
  Synthetic oligonucleotide
taatccccacactagccggcaagctgccgt

SEQ ID NO: 209548 - DNA, 30 bp, Artificial Sequence
  Synthetic oligonucleotide
ttacgctgtttcaccacaccgttcatccgt

SEQ ID NO: 209549 - DNA, 30 bp, Artificial Sequence
  Synthetic oligonucleotide
tcagagagcgaccgagcgcttcggctccgt

SEQ ID NO: 209550 - DNA, 30 bp, Artificial Sequence
  Synthetic oligonucleotide
cgatcgattaacaaccacttgcgtctccgt

SEQ ID NO: 209551 - DNA, 30 bp, Artificial Sequence
  Synthetic oligonucleotide
agagtattaaggcgagatatcttagtccgt

SEQ ID NO: 209552 - DNA, 30 bp, Artificial Sequence
  Synthetic oligonucleotide
accagagcgtgatcttttataaccgtccgt

SEQ ID NO: 209553 - DNA, 30 bp, Artificial Sequence
  Synthetic oligonucleotide
gctgactgtcaagatttccgtcctgtccgt

SEQ ID NO: 209554 - DNA, 30 bp, Artificial Sequence
  Synthetic oligonucleotide
tgatgtaagagatacggcattacaaagcgt

SEQ ID NO: 209555 - DNA, 30 bp, Artificial Sequence
  Synthetic oligonucleotide
cttagtgacttgtgctattgtggcaagcgt

SEQ ID NO: 209556 - DNA, 30 bp, Artificial Sequence
  Synthetic oligonucleotide
ttcctagcggacgaacttaatcagaagcgt

SEQ ID NO: 209557 - DNA, 30 bp, Artificial Sequence
  Synthetic oligonucleotide
cggagttacaacgaagatcgagagaagcgt

SEQ ID NO: 209558 - DNA, 30 bp, Artificial Sequence
  Synthetic oligonucleotide
gagcgacctgacggaaatcctgaacagcgt

SEQ ID NO: 209559 - DNA, 30 bp, Artificial Sequence
  Synthetic oligonucleotide
tggccgcgtgcaaagggattccgacagcgt

SEQ ID NO: 209560 - DNA, 30 bp, Artificial Sequence
  Synthetic oligonucleotide
ccgcctggagaagtgaggggtcaccagcgt

SEQ ID NO: 209561 - DNA, 30 bp, Artificial Sequence
  Synthetic oligonucleotide
agccgaaccaaggaaccctagaagcagcgt

SEQ ID NO: 209562 - DNA, 30 bp, Artificial Sequence
  Synthetic oligonucleotide
cagtaagttcctcatgggcatagtcagcgt

SEQ ID NO: 209563 - DNA, 30 bp, Artificial Sequence
  Synthetic oligonucleotide
ctgatggcaacatgtccttaccgtcagcgt

SEQ ID NO: 209564 - DNA, 31 bp, Artificial Sequence
  Synthetic oligonucleotide
catcatcacccacgactcatctcgagagcgt

SEQ ID NO: 209565 - DNA, 30 bp, Artificial Sequence
  Synthetic oligonucleotide
acaggggaacatgacaaattgcactagcgt

SEQ ID NO: 209566 - DNA, 30 bp, Artificial Sequence
  Synthetic oligonucleotide
cacacaaccaagaacggtaaaccctagcgt

SEQ ID NO: 209567 - DNA, 31 bp, Artificial Sequence
  Synthetic oligonucleotide
ctctcccggcattataatcagagcaacgcgt

SEQ ID NO: 209568 - DNA, 30 bp, Artificial Sequence
  Synthetic oligonucleotide
gtcaacgaacaagggtagtcacgaacgcgt

SEQ ID NO: 209569 - DNA, 30 bp, Artificial Sequence
  Synthetic oligonucleotide
tggtgtatcagaaagaatgatgccacgcgt

SEQ ID NO: 209570 - DNA, 30 bp, Artificial Sequence
  Synthetic oligonucleotide
caacatccgcaccctggattggaaccgcgt

SEQ ID NO: 209571 - DNA, 30 bp, Artificial Sequence
  Synthetic oligonucleotide
gcatcgtcaggtcgtcgggaaattccgcgt

SEQ ID NO: 209572 - DNA, 30 bp, Artificial Sequence
  Synthetic oligonucleotide
ggagttgagttaaaagggctgacagcgcgt

SEQ ID NO: 209573 - DNA, 30 bp, Artificial Sequence
  Synthetic oligonucleotide
aaattaagttcacggtaggcctacgcgcgt

SEQ ID NO: 209574 - DNA, 30 bp, Artificial Sequence
  Synthetic oligonucleotide
gtggcgagctgggtctactctcatgcgcgt

SEQ ID NO: 209575 - DNA, 30 bp, Artificial Sequence
  Synthetic oligonucleotide
agttagggggtctgctcgtactatgcgcgt

SEQ ID NO: 209576 - DNA, 30 bp, Artificial Sequence
  Synthetic oligonucleotide
gatgtggcgtctggatggacttctgcgcgt

SEQ ID NO: 209577 - DNA, 30 bp, Artificial Sequence
  Synthetic oligonucleotide
tgataaaattcataatatgtctgctcgcgt

SEQ ID NO: 209578 - DNA, 30 bp, Artificial Sequence
  Synthetic oligonucleotide
gcgtcattaagagtcttcaggaagtcgcgt

SEQ ID NO: 209579 - DNA, 30 bp, Artificial Sequence
  Synthetic oligonucleotide
aacaaccgatgctaagacccctgttcgcgt

SEQ ID NO: 209580 - DNA, 30 bp, Artificial Sequence
  Synthetic oligonucleotide
cataataacggaattatctacttttcgcgt

SEQ ID NO: 209581 - DNA, 30 bp, Artificial Sequence
  Synthetic oligonucleotide
accgcgtgctattgtcagtcagaaaggcgt

SEQ ID NO: 209582 - DNA, 30 bp, Artificial Sequence
  Synthetic oligonucleotide
gacctgtgtcatgtcagcgaatggaggcgt

SEQ ID NO: 209583 - DNA, 30 bp, Artificial Sequence
  Synthetic oligonucleotide
ctgagttccgtattcgcagagtataggcgt

SEQ ID NO: 209584 - DNA, 30 bp, Artificial Sequence
  Synthetic oligonucleotide
aagtagggactgatatgcctataccggcgt

SEQ ID NO: 209585 - DNA, 30 bp, Artificial Sequence
  Synthetic oligonucleotide
accaatgccctgactaattataatcggcgt

SEQ ID NO: 209586 - DNA, 30 bp, Artificial Sequence
  Synthetic oligonucleotide
tggccggtgtagtccagctggtcggggcgt

SEQ ID NO: 209587 - DNA, 30 bp, Artificial Sequence
  Synthetic oligonucleotide
tcacacgggctactgatcgtgtgggggcgt

SEQ ID NO: 209588 - DNA, 30 bp, Artificial Sequence
  Synthetic oligonucleotide
cccagtattctacgcaaaatacagtggcgt

SEQ ID NO: 209589 - DNA, 30 bp, Artificial Sequence
  Synthetic oligonucleotide
ttacaagatatcattggcagtatgtggcgt

SEQ ID NO: 209590 - DNA, 30 bp, Artificial Sequence
  Synthetic oligonucleotide
gctgcgagtttctagagggcggattggcgt

SEQ ID NO: 209591 - DNA, 30 bp, Artificial Sequence
  Synthetic oligonucleotide
atttaaggcggtattatagagtcttggcgt

SEQ ID NO: 209592 - DNA, 30 bp, Artificial Sequence
  Synthetic oligonucleotide
gttaccgctacacaaagtgtggaaatgcgt

SEQ ID NO: 209593 - DNA, 30 bp, Artificial Sequence
  Synthetic oligonucleotide
gcacaagaccgggccatcgaattaatgcgt

SEQ ID NO: 209594 - DNA, 30 bp, Artificial Sequence
  Synthetic oligonucleotide
gctttaatagtcaagtctcattcgatgcgt

SEQ ID NO: 209595 - DNA, 30 bp, Artificial Sequence
  Synthetic oligonucleotide
ggtgctaagttctaaagcggagctatgcgt

SEQ ID NO: 209596 - DNA, 30 bp, Artificial Sequence
  Synthetic oligonucleotide
agaaatgaagttttcaggaagattctgcgt

SEQ ID NO: 209597 - DNA, 30 bp, Artificial Sequence
  Synthetic oligonucleotide
taggcgctggtttgatacatccttctgcgt

SEQ ID NO: 209598 - DNA, 30 bp, Artificial Sequence
  Synthetic oligonucleotide
aaaagccaactatatgccggtagagtgcgt

SEQ ID NO: 209599 - DNA, 30 bp, Artificial Sequence
  Synthetic oligonucleotide
agagtcttatgaccgcaaaacaatgtgcgt

SEQ ID NO: 209600 - DNA, 30 bp, Artificial Sequence
  Synthetic oligonucleotide
atgacgattcaatgtcgggctcatgtgcgt

SEQ ID NO: 209601 - DNA, 30 bp, Artificial Sequence
  Synthetic oligonucleotide
acaagggttccacggtagaagtcgaatcgt

SEQ ID NO: 209602 - DNA, 30 bp, Artificial Sequence
  Synthetic oligonucleotide
aaggttagcaagtacctagccattcatcgt

SEQ ID NO: 209603 - DNA, 30 bp, Artificial Sequence
  Synthetic oligonucleotide
acagcaaagtcaggaaggtttacagatcgt

SEQ ID NO: 209604 - DNA, 30 bp, Artificial Sequence
  Synthetic oligonucleotide
tacgggtacattcgcctggggctcgatcgt

SEQ ID NO: 209605 - DNA, 30 bp, Artificial Sequence
  Synthetic oligonucleotide
aagcggttggggcttcatcttctggatcgt

SEQ ID NO: 209606 - DNA, 30 bp, Artificial Sequence
  Synthetic oligonucleotide
cagatttaaggtaaaacattgtttgatcgt

SEQ ID NO: 209607 - DNA, 30 bp, Artificial Sequence
  Synthetic oligonucleotide
ggagccagagaacgtgatagcagctatcgt

SEQ ID NO: 209608 - DNA, 30 bp, Artificial Sequence
  Synthetic oligonucleotide
caagcgaaaatagcgagcacttcttatcgt

SEQ ID NO: 209609 - DNA, 30 bp, Artificial Sequence
  Synthetic oligonucleotide
tgccgaactcatctcatatagagttatcgt

SEQ ID NO: 209610 - DNA, 30 bp, Artificial Sequence
  Synthetic oligonucleotide
ccggggcagctgagagaacctggttatcgt

SEQ ID NO: 209611 - DNA, 30 bp, Artificial Sequence
  Synthetic oligonucleotide
ggcgagttgaactagcgtacgagaactcgt

SEQ ID NO: 209612 - DNA, 30 bp, Artificial Sequence
  Synthetic oligonucleotide
cgctcactcctccaactaaatcgaactcgt

SEQ ID NO: 209613 - DNA, 30 bp, Artificial Sequence
  Synthetic oligonucleotide
tttgcgtggagtgttggtacttggactcgt

SEQ ID NO: 209614 - DNA, 30 bp, Artificial Sequence
  Synthetic oligonucleotide
gtgatccagtggctgtacagaatgactcgt

SEQ ID NO: 209615 - DNA, 30 bp, Artificial Sequence
  Synthetic oligonucleotide
gtcagatggttctctggagtggatactcgt

SEQ ID NO: 209616 - DNA, 30 bp, Artificial Sequence
  Synthetic oligonucleotide
gtccccaaacgggcaaaacacaaccctcgt

SEQ ID NO: 209617 - DNA, 30 bp, Artificial Sequence
  Synthetic oligonucleotide
taggataaaggtaggctgtaagccgctcgt

SEQ ID NO: 209618 - DNA, 30 bp, Artificial Sequence
  Synthetic oligonucleotide
ggttggcttatcggaattcgggaggctcgt

SEQ ID NO: 209619 - DNA, 30 bp, Artificial Sequence
  Synthetic oligonucleotide
tctgacaccataagagattaagcggctcgt

SEQ ID NO: 209620 - DNA, 30 bp, Artificial Sequence
  Synthetic oligonucleotide
tgagatttaaacgtcctcgagatgtctcgt

SEQ ID NO: 209621 - DNA, 30 bp, Artificial Sequence
  Synthetic oligonucleotide
agtactagaagctcatctcagttttctcgt

SEQ ID NO: 209622 - DNA, 30 bp, Artificial Sequence
  Synthetic oligonucleotide
tcgtcatgagaacgtgcggtgtcaagtcgt

SEQ ID NO: 209623 - DNA, 30 bp, Artificial Sequence
  Synthetic oligonucleotide
tagggccgcgaagttgcgacgaggagtcgt

SEQ ID NO: 209624 - DNA, 30 bp, Artificial Sequence
  Synthetic oligonucleotide
tatggttaaaccaatgtctccctacgtcgt

SEQ ID NO: 209625 - DNA, 30 bp, Artificial Sequence
  Synthetic oligonucleotide
tcacatccgtatgccagttcattccgtcgt

SEQ ID NO: 209626 - DNA, 30 bp, Artificial Sequence
  Synthetic oligonucleotide
gatgtaatatgcgtgtatcgggatcgtcgt

SEQ ID NO: 209627 - DNA, 30 bp, Artificial Sequence
  Synthetic oligonucleotide
atacctgagaacgactagcatgacggtcgt

SEQ ID NO: 209628 - DNA, 30 bp, Artificial Sequence
  Synthetic oligonucleotide
atgacgtatgacaacccgcaatgatgtcgt

SEQ ID NO: 209629 - DNA, 30 bp, Artificial Sequence
  Synthetic oligonucleotide
aattgtcgtgggggtacatcagcttgtcgt

SEQ ID NO: 209630 - DNA, 30 bp, Artificial Sequence
  Synthetic oligonucleotide
acgattcatacatcgcgtcattgaattcgt

SEQ ID NO: 209631 - DNA, 30 bp, Artificial Sequence
  Synthetic oligonucleotide
gtcagggtatacggcgcatcgctcattcgt

SEQ ID NO: 209632 - DNA, 30 bp, Artificial Sequence
  Synthetic oligonucleotide
gagagaatgaagaaaacggtggtcattcgt

SEQ ID NO: 209633 - DNA, 30 bp, Artificial Sequence
  Synthetic oligonucleotide
tgtaacgacatccgttattcaacgattcgt

SEQ ID NO: 209634 - DNA, 30 bp, Artificial Sequence
  Synthetic oligonucleotide
aaatgtacgactcgggaatagccacttcgt

SEQ ID NO: 209635 - DNA, 30 bp, Artificial Sequence
  Synthetic oligonucleotide
ttggaacagagaaactaggatcggcttcgt

SEQ ID NO: 209636 - DNA, 29 bp, Artificial Sequence
  Synthetic oligonucleotide
actattctaagaagagtaagcaagttcgt

SEQ ID NO: 209637 - DNA, 30 bp, Artificial Sequence
  Synthetic oligonucleotide
atatcaattgacttaaacgagtaagttcgt

SEQ ID NO: 209638 - DNA, 30 bp, Artificial Sequence
  Synthetic oligonucleotide
gccgggcggatatgctctcggtcagttcgt

SEQ ID NO: 209639 - DNA, 30 bp, Artificial Sequence
  Synthetic oligonucleotide
aggtggggtcgtgtatagaacgtagttcgt

SEQ ID NO: 209640 - DNA, 30 bp, Artificial Sequence
  Synthetic oligonucleotide
tgacataggttgaggaagccccccgttcgt

SEQ ID NO: 209641 - DNA, 30 bp, Artificial Sequence
  Synthetic oligonucleotide
atgttcccgctgtcaggggactaggttcgt

SEQ ID NO: 209642 - DNA, 30 bp, Artificial Sequence
  Synthetic oligonucleotide
tcaagagttggctgcgtttgccactttcgt

SEQ ID NO: 209643 - DNA, 30 bp, Artificial Sequence
  Synthetic oligonucleotide
cacacatcggctaaactaatactctttcgt

SEQ ID NO: 209644 - DNA, 30 bp, Artificial Sequence
  Synthetic oligonucleotide
tgctatcgtggaagggaacagttctttcgt

SEQ ID NO: 209645 - DNA, 30 bp, Artificial Sequence
  Synthetic oligonucleotide
atggggacaattaggtcggccgggtttcgt

SEQ ID NO: 209646 - DNA, 30 bp, Artificial Sequence
  Synthetic oligonucleotide
tactcacgcctacaccaatgggattttcgt

SEQ ID NO: 209647 - DNA, 30 bp, Artificial Sequence
  Synthetic oligonucleotide
gaagttggaggcactatcgttaacaaaggt

SEQ ID NO: 209648 - DNA, 30 bp, Artificial Sequence
  Synthetic oligonucleotide
attgcggctgtcctgattttggacaaaggt

SEQ ID NO: 209649 - DNA, 30 bp, Artificial Sequence
  Synthetic oligonucleotide
ataatcgagggggtattgatgtataaaggt

SEQ ID NO: 209650 - DNA, 30 bp, Artificial Sequence
  Synthetic oligonucleotide
actagccgaattgctttatatgaacaaggt

SEQ ID NO: 209651 - DNA, 30 bp, Artificial Sequence
  Synthetic oligonucleotide
tgatcggcgaccaaaatcttttaccaaggt

SEQ ID NO: 209652 - DNA, 30 bp, Artificial Sequence
  Synthetic oligonucleotide
gtagtaaacagagctaggaaggcccaaggt

SEQ ID NO: 209653 - DNA, 30 bp, Artificial Sequence
  Synthetic oligonucleotide
atagaaaagattgtcatagagatccaaggt

SEQ ID NO: 209654 - DNA, 30 bp, Artificial Sequence
  Synthetic oligonucleotide
tttgaattctaaaagctcaagctccaaggt

SEQ ID NO: 209655 - DNA, 30 bp, Artificial Sequence
  Synthetic oligonucleotide
gactttgttggtctgcgcgtgaatcaaggt

SEQ ID NO: 209656 - DNA, 30 bp, Artificial Sequence
  Synthetic oligonucleotide
tccacaatacacagtagatatcaagaaggt

SEQ ID NO: 209657 - DNA, 30 bp, Artificial Sequence
  Synthetic oligonucleotide
atgaaatccaacatttcgatggcagaaggt

SEQ ID NO: 209658 - DNA, 30 bp, Artificial Sequence
  Synthetic oligonucleotide
agacgtataaaggaactctcgtaggaaggt

SEQ ID NO: 209659 - DNA, 30 bp, Artificial Sequence
  Synthetic oligonucleotide
cctgacttaatccaggggtactcggaaggt

SEQ ID NO: 209660 - DNA, 30 bp, Artificial Sequence
  Synthetic oligonucleotide
acagcatggatctatccgaagtcggaaggt

SEQ ID NO: 209661 - DNA, 30 bp, Artificial Sequence
  Synthetic oligonucleotide
acctggtgtgcgtcttaacttcaataaggt

SEQ ID NO: 209662 - DNA, 30 bp, Artificial Sequence
  Synthetic oligonucleotide
aaggtcatttgtaggtacaggggctaaggt

SEQ ID NO: 209663 - DNA, 30 bp, Artificial Sequence
  Synthetic oligonucleotide
agtgaacgcgatagtagatcaatctaaggt

SEQ ID NO: 209664 - DNA, 30 bp, Artificial Sequence
  Synthetic oligonucleotide
gccgataccggagcgcggggggagtaaggt

SEQ ID NO: 209665 - DNA, 31 bp, Artificial Sequence
  Synthetic oligonucleotide
tgggtgacgggcacagtctacgaggtaaggt

SEQ ID NO: 209666 - DNA, 30 bp, Artificial Sequence
  Synthetic oligonucleotide
aaagcagtaccaaaggtgtataggtaaggt

SEQ ID NO: 209667 - DNA, 30 bp, Artificial Sequence
  Synthetic oligonucleotide
ggattctagtgtggagtacattggtaaggt

SEQ ID NO: 209668 - DNA, 30 bp, Artificial Sequence
  Synthetic oligonucleotide
actccgcctttcttaccacgaaaaacaggt

SEQ ID NO: 209669 - DNA, 30 bp, Artificial Sequence
  Synthetic oligonucleotide
ataatctattggaggcgaaaacgaacaggt

SEQ ID NO: 209670 - DNA, 30 bp, Artificial Sequence
  Synthetic oligonucleotide
tgagtgtctacatggtacgagtccacaggt

SEQ ID NO: 209671 - DNA, 30 bp, Artificial Sequence
  Synthetic oligonucleotide
cgacaggttctgagtgctgtaaagccaggt

SEQ ID NO: 209672 - DNA, 30 bp, Artificial Sequence
  Synthetic oligonucleotide
acactgaaaggtggctacagaatgccaggt

SEQ ID NO: 209673 - DNA, 30 bp, Artificial Sequence
  Synthetic oligonucleotide
ggttacgatcgtatcaaggatcgtccaggt

SEQ ID NO: 209674 - DNA, 30 bp, Artificial Sequence
  Synthetic oligonucleotide
gccgggctcagcgcaagagtcacagcaggt

SEQ ID NO: 209675 - DNA, 30 bp, Artificial Sequence
  Synthetic oligonucleotide
ctatgtatcgggtagtgagacagagcaggt

SEQ ID NO: 209676 - DNA, 30 bp, Artificial Sequence
  Synthetic oligonucleotide
gagccgatgcgactgacattgggtgcaggt

SEQ ID NO: 209677 - DNA, 30 bp, Artificial Sequence
  Synthetic oligonucleotide
ataatacagcaaacctagggaattgcaggt

SEQ ID NO: 209678 - DNA, 30 bp, Artificial Sequence
  Synthetic oligonucleotide
tataggcctacgaaaacggcccgatcaggt

SEQ ID NO: 209679 - DNA, 30 bp, Artificial Sequence
  Synthetic oligonucleotide
tgacctgatctcccgtggctaagctcaggt

SEQ ID NO: 209680 - DNA, 30 bp, Artificial Sequence
  Synthetic oligonucleotide
acgcataactgattgaacaatatctcaggt

SEQ ID NO: 209681 - DNA, 30 bp, Artificial Sequence
  Synthetic oligonucleotide
gatggagattctcgttgccagaggtcaggt

SEQ ID NO: 209682 - DNA, 30 bp, Artificial Sequence
  Synthetic oligonucleotide
aggatagcctcagtgtagcgccaaagaggt

SEQ ID NO: 209683 - DNA, 31 bp, Artificial Sequence
  Synthetic oligonucleotide
cgacttaataatatgtcttgtataaagaggt

SEQ ID NO: 209684 - DNA, 30 bp, Artificial Sequence
  Synthetic oligonucleotide
gcagtaatcttcgaccgagatcctagaggt

SEQ ID NO: 209685 - DNA, 30 bp, Artificial Sequence
  Synthetic oligonucleotide
atttcgcccagagactcgtggtttagaggt

SEQ ID NO: 209686 - DNA, 30 bp, Artificial Sequence
  Synthetic oligonucleotide
atcggaagcggtaccacgcacggacgaggt

SEQ ID NO: 209687 - DNA, 30 bp, Artificial Sequence
  Synthetic oligonucleotide
ggcctatgaagaacggttcatccgcgaggt

SEQ ID NO: 209688 - DNA, 30 bp, Artificial Sequence
  Synthetic oligonucleotide
cgggacgttcccattataacgcatcgaggt

SEQ ID NO: 209689 - DNA, 30 bp, Artificial Sequence
  Synthetic oligonucleotide
gaggatcgggttagccaactcgacggaggt

SEQ ID NO: 209690 - DNA, 30 bp, Artificial Sequence
  Synthetic oligonucleotide
agtcagtgaagattactggttgccggaggt

SEQ ID NO: 209691 - DNA, 30 bp, Artificial Sequence
  Synthetic oligonucleotide
ttatgataggtaaagaggcaacgcggaggt

SEQ ID NO: 209692 - DNA, 31 bp, Artificial Sequence
  Synthetic oligonucleotide
accttgttcgaacaaaattgaaaatggaggt

SEQ ID NO: 209693 - DNA, 30 bp, Artificial Sequence
  Synthetic oligonucleotide
ccgatgttatttgaaagagggggtggaggt

SEQ ID NO: 209694 - DNA, 30 bp, Artificial Sequence
  Synthetic oligonucleotide
tcacaaagggcaatgttcggtaaatgaggt

SEQ ID NO: 209695 - DNA, 30 bp, Artificial Sequence
  Synthetic oligonucleotide
tagcatacgaagttttatatagtgtgaggt

SEQ ID NO: 209696 - DNA, 30 bp, Artificial Sequence
  Synthetic oligonucleotide
atcacacaagttctgccgattgtgtgaggt

SEQ ID NO: 209697 - DNA, 30 bp, Artificial Sequence
  Synthetic oligonucleotide
ctcgttcagcggtgagaggttttttgaggt

SEQ ID NO: 209698 - DNA, 31 bp, Artificial Sequence
  Synthetic oligonucleotide
cgaattggataagggcgggttgctgataggt

SEQ ID NO: 209699 - DNA, 30 bp, Artificial Sequence
  Synthetic oligonucleotide
gtggccggaagggctgggcgacatataggt

SEQ ID NO: 209700 - DNA, 30 bp, Artificial Sequence
  Synthetic oligonucleotide
tcggacaggcgacacatacggcagctaggt

SEQ ID NO: 209701 - DNA, 30 bp, Artificial Sequence
  Synthetic oligonucleotide
aatggagcactactcaggacgtatctaggt

SEQ ID NO: 209702 - DNA, 30 bp, Artificial Sequence
  Synthetic oligonucleotide
ctgaggggagtgtaatctcgggctctaggt

SEQ ID NO: 209703 - DNA, 30 bp, Artificial Sequence
  Synthetic oligonucleotide
ctagtttggcataaaaacaagggtctaggt

SEQ ID NO: 209704 - DNA, 31 bp, Artificial Sequence
  Synthetic oligonucleotide
gacaacaggagggttgtcaagtaaagtaggt

SEQ ID NO: 209705 - DNA, 30 bp, Artificial Sequence
  Synthetic oligonucleotide
tctcacaagtgggacactaaaaaggtaggt

SEQ ID NO: 209706 - DNA, 30 bp, Artificial Sequence
  Synthetic oligonucleotide
gatatcagacgccgtatagtaatggtaggt

SEQ ID NO: 209707 - DNA, 30 bp, Artificial Sequence
  Synthetic oligonucleotide
gcagagcgtacatagcattaaactgtaggt

SEQ ID NO: 209708 - DNA, 30 bp, Artificial Sequence
  Synthetic oligonucleotide
gctagagtatgcgcattatggactgtaggt

SEQ ID NO: 209709 - DNA, 30 bp, Artificial Sequence
  Synthetic oligonucleotide
gtcaaatcggacgcaagtgtgaccttaggt

SEQ ID NO: 209710 - DNA, 30 bp, Artificial Sequence
  Synthetic oligonucleotide
aggccggcccgtggcgtaatgagcttaggt

SEQ ID NO: 209711 - DNA, 30 bp, Artificial Sequence
  Synthetic oligonucleotide
atagtgcagagagctacggcgcagttaggt

SEQ ID NO: 209712 - DNA, 30 bp, Artificial Sequence
  Synthetic oligonucleotide
cgtagtgaagtgatccctttctagttaggt

SEQ ID NO: 209713 - DNA, 30 bp, Artificial Sequence
  Synthetic oligonucleotide
ttgttcgtaaagggatatcggatgttaggt

SEQ ID NO: 209714 - DNA, 30 bp, Artificial Sequence
  Synthetic oligonucleotide
ctaggtggtttacttagaccaacaaacggt

SEQ ID NO: 209715 - DNA, 30 bp, Artificial Sequence
  Synthetic oligonucleotide
ggagagcgatagaaagtcgtagcaaacggt

SEQ ID NO: 209716 - DNA, 30 bp, Artificial Sequence
  Synthetic oligonucleotide
ggccatgaaattccaagattttcaaacggt

SEQ ID NO: 209717 - DNA, 30 bp, Artificial Sequence
  Synthetic oligonucleotide
cggatggcgagtttgctagataacaacggt

SEQ ID NO: 209718 - DNA, 30 bp, Artificial Sequence
  Synthetic oligonucleotide
cccagattactttggagtctttccaacggt

SEQ ID NO: 209719 - DNA, 30 bp, Artificial Sequence
  Synthetic oligonucleotide
tgttgggacttgggactatcaagcaacggt

SEQ ID NO: 209720 - DNA, 30 bp, Artificial Sequence
  Synthetic oligonucleotide
gcctaagcataggtatacggaagcaacggt

SEQ ID NO: 209721 - DNA, 30 bp, Artificial Sequence
  Synthetic oligonucleotide
caggggaacccagcgtacgccggcaacggt

SEQ ID NO: 209722 - DNA, 30 bp, Artificial Sequence
  Synthetic oligonucleotide
accaatatgtgctcgaagggagtcaacggt

SEQ ID NO: 209723 - DNA, 30 bp, Artificial Sequence
  Synthetic oligonucleotide
agtatgtaggaatgagatctaatgaacggt

SEQ ID NO: 209724 - DNA, 30 bp, Artificial Sequence
  Synthetic oligonucleotide
gaccacccaggaactaagcagcgtaacggt

SEQ ID NO: 209725 - DNA, 30 bp, Artificial Sequence
  Synthetic oligonucleotide
caatgcgattaaaaacgggggcaacacggt

SEQ ID NO: 209726 - DNA, 30 bp, Artificial Sequence
  Synthetic oligonucleotide
atatgatagatgcggtgcggttcacacggt

SEQ ID NO: 209727 - DNA, 30 bp, Artificial Sequence
  Synthetic oligonucleotide
gactgacccgctagatctgaccaccacggt

SEQ ID NO: 209728 - DNA, 30 bp, Artificial Sequence
  Synthetic oligonucleotide
gtgagcaagggggagggattgcaccacggt

SEQ ID NO: 209729 - DNA, 30 bp, Artificial Sequence
  Synthetic oligonucleotide
ccgcaaactcagtcatcagggctccacggt

SEQ ID NO: 209730 - DNA, 30 bp, Artificial Sequence
  Synthetic oligonucleotide
caactggctcagacgtaggggtagcacggt

SEQ ID NO: 209731 - DNA, 30 bp, Artificial Sequence
  Synthetic oligonucleotide
accagcactgcatgacaagtccggcacggt

SEQ ID NO: 209732 - DNA, 30 bp, Artificial Sequence
  Synthetic oligonucleotide
ctggattaatcaagcgagacaaaggacggt

SEQ ID NO: 209733 - DNA, 30 bp, Artificial Sequence
  Synthetic oligonucleotide
agctcgaactaattctttacgtactacggt

SEQ ID NO: 209734 - DNA, 30 bp, Artificial Sequence
  Synthetic oligonucleotide
aggcaagcacaaggattctacagctacggt

SEQ ID NO: 209735 - DNA, 30 bp, Artificial Sequence
  Synthetic oligonucleotide
gttaaacgtgagttcatgaggggctacggt

SEQ ID NO: 209736 - DNA, 30 bp, Artificial Sequence
  Synthetic oligonucleotide
agggccaggaatcgggggcataagtacggt

SEQ ID NO: 209737 - DNA, 30 bp, Artificial Sequence
  Synthetic oligonucleotide
gtccactattggtaagcgagggggtacggt

SEQ ID NO: 209738 - DNA, 30 bp, Artificial Sequence
  Synthetic oligonucleotide
gtgatttcgagggtcggatgttgttacggt

SEQ ID NO: 209739 - DNA, 30 bp, Artificial Sequence
  Synthetic oligonucleotide
gggctttaccacgtcgtgagcgacaccggt

SEQ ID NO: 209740 - DNA, 30 bp, Artificial Sequence
  Synthetic oligonucleotide
ttaaagattaggtaaagggtgacacccggt

SEQ ID NO: 209741 - DNA, 30 bp, Artificial Sequence
  Synthetic oligonucleotide
taatagagacggactacgagagggcccggt

SEQ ID NO: 209742 - DNA, 30 bp, Artificial Sequence
  Synthetic oligonucleotide
tccaggataggcggcattcgagggcccggt

SEQ ID NO: 209743 - DNA, 30 bp, Artificial Sequence
  Synthetic oligonucleotide
tatgaggtggtgtatgaccccttagccggt

SEQ ID NO: 209744 - DNA, 30 bp, Artificial Sequence
  Synthetic oligonucleotide
taaacgagccggacataacttagggccggt

SEQ ID NO: 209745 - DNA, 30 bp, Artificial Sequence
  Synthetic oligonucleotide
cgacaaacagatgaacacgtcagtgccggt

SEQ ID NO: 209746 - DNA, 30 bp, Artificial Sequence
  Synthetic oligonucleotide
gagattcctcttaatatcaccattgccggt

SEQ ID NO: 209747 - DNA, 30 bp, Artificial Sequence
  Synthetic oligonucleotide
ccagtggagttgcgtacaattcggtccggt

SEQ ID NO: 209748 - DNA, 30 bp, Artificial Sequence
  Synthetic oligonucleotide
catctgcgagaacaggcagtgtattccggt

SEQ ID NO: 209749 - DNA, 30 bp, Artificial Sequence
  Synthetic oligonucleotide
gaggaacgacttatcatctataaaagcggt

SEQ ID NO: 209750 - DNA, 30 bp, Artificial Sequence
  Synthetic oligonucleotide
tcacgtggcttatcctataagccaagcggt

SEQ ID NO: 209751 - DNA, 30 bp, Artificial Sequence
  Synthetic oligonucleotide
aagcattgtagctcacagttgtcgagcggt

SEQ ID NO: 209752 - DNA, 30 bp, Artificial Sequence
  Synthetic oligonucleotide
aagggaacgaaatccccccgatggagcggt

SEQ ID NO: 209753 - DNA, 30 bp, Artificial Sequence
  Synthetic oligonucleotide
tatggtaaatctcacgtcgtccttagcggt

SEQ ID NO: 209754 - DNA, 30 bp, Artificial Sequence
  Synthetic oligonucleotide
tatgtaggacaaatggcaagatagcgcggt

SEQ ID NO: 209755 - DNA, 30 bp, Artificial Sequence
  Synthetic oligonucleotide
ggtactgtcttagttctacattagcgcggt

SEQ ID NO: 209756 - DNA, 30 bp, Artificial Sequence
  Synthetic oligonucleotide
cgtctggcgaattggtggaggggtcgcggt

SEQ ID NO: 209757 - DNA, 30 bp, Artificial Sequence
  Synthetic oligonucleotide
agaaggaagccggctcgcgttagcggcggt

SEQ ID NO: 209758 - DNA, 30 bp, Artificial Sequence
  Synthetic oligonucleotide
gtcaggacagtcgagtgatcatgcggcggt

SEQ ID NO: 209759 - DNA, 30 bp, Artificial Sequence
  Synthetic oligonucleotide
tgaagacagttaacacatatacatggcggt

SEQ ID NO: 209760 - DNA, 30 bp, Artificial Sequence
  Synthetic oligonucleotide
ggagttttgtttataacatcaccctgcggt

SEQ ID NO: 209761 - DNA, 30 bp, Artificial Sequence
  Synthetic oligonucleotide
ccaacaaacgtgttataggtaaagtgcggt

SEQ ID NO: 209762 - DNA, 30 bp, Artificial Sequence
  Synthetic oligonucleotide
gttgaaataaacgagcgggaagtaatcggt

SEQ ID NO: 209763 - DNA, 30 bp, Artificial Sequence
  Synthetic oligonucleotide
gtctgcctttggttgggttagaccatcggt

SEQ ID NO: 209764 - DNA, 30 bp, Artificial Sequence
  Synthetic oligonucleotide
tggactgcccccaaggagatgatcatcggt

SEQ ID NO: 209765 - DNA, 30 bp, Artificial Sequence
  Synthetic oligonucleotide
gctgttgccagactttgaagggagatcggt

SEQ ID NO: 209766 - DNA, 30 bp, Artificial Sequence
  Synthetic oligonucleotide
tgtggaatggctgagcattctccgatcggt

SEQ ID NO: 209767 - DNA, 30 bp, Artificial Sequence
  Synthetic oligonucleotide
caatatgatttatgtacgagatcgatcggt

SEQ ID NO: 209768 - DNA, 31 bp, Artificial Sequence
  Synthetic oligonucleotide
gagggttggacaggggcctcctaggatcggt

SEQ ID NO: 209769 - DNA, 30 bp, Artificial Sequence
  Synthetic oligonucleotide
gggcaatcatgcgttaattaacggatcggt

SEQ ID NO: 209770 - DNA, 30 bp, Artificial Sequence
  Synthetic oligonucleotide
tgcgaatcagcccgttactggccactcggt

SEQ ID NO: 209771 - DNA, 30 bp, Artificial Sequence
  Synthetic oligonucleotide
actagcgtgacatagtataagatgctcggt

SEQ ID NO: 209772 - DNA, 30 bp, Artificial Sequence
  Synthetic oligonucleotide
cgtggacccaaaggacccaccagagtcggt

SEQ ID NO: 209773 - DNA, 30 bp, Artificial Sequence
  Synthetic oligonucleotide
tggtggtatgcggagggtaccatagtcggt

SEQ ID NO: 209774 - DNA, 30 bp, Artificial Sequence
  Synthetic oligonucleotide
cccgttgactgctacagcgagcacgtcggt

SEQ ID NO: 209775 - DNA, 30 bp, Artificial Sequence
  Synthetic oligonucleotide
gcttgaggatattatttgtagtaggtcggt

SEQ ID NO: 209776 - DNA, 30 bp, Artificial Sequence
  Synthetic oligonucleotide
ttaggtgaatggctcaattgtagattcggt

SEQ ID NO: 209777 - DNA, 30 bp, Artificial Sequence
  Synthetic oligonucleotide
cgagcgcagcagtgtcgggcaaacttcggt

SEQ ID NO: 209778 - DNA, 30 bp, Artificial Sequence
  Synthetic oligonucleotide
tagatgcaacttgaggccacagaaaagggt

SEQ ID NO: 209779 - DNA, 30 bp, Artificial Sequence
  Synthetic oligonucleotide
gctacgacgtatgttttgcacataaagggt

SEQ ID NO: 209780 - DNA, 30 bp, Artificial Sequence
  Synthetic oligonucleotide
gtgcgagttgcaatatagtgggtaaagggt

SEQ ID NO: 209781 - DNA, 30 bp, Artificial Sequence
  Synthetic oligonucleotide
ccagagttcttcggagagagtgtaaagggt

SEQ ID NO: 209782 - DNA, 30 bp, Artificial Sequence
  Synthetic oligonucleotide
aaggtcatagtacaaactttcttcaagggt

SEQ ID NO: 209783 - DNA, 30 bp, Artificial Sequence
  Synthetic oligonucleotide
gacctcacataaagatgtatggggaagggt

SEQ ID NO: 209784 - DNA, 30 bp, Artificial Sequence
  Synthetic oligonucleotide
gaaaggcctaaatccggcccgttacagggt

SEQ ID NO: 209785 - DNA, 30 bp, Artificial Sequence
  Synthetic oligonucleotide
gcttgcacactcccacccgaagaccagggt

SEQ ID NO: 209786 - DNA, 30 bp, Artificial Sequence
  Synthetic oligonucleotide
ctacatgggatgaggctcgtataccagggt

SEQ ID NO: 209787 - DNA, 30 bp, Artificial Sequence
  Synthetic oligonucleotide
tcgcagcctagccgagacttatgccagggt

SEQ ID NO: 209788 - DNA, 30 bp, Artificial Sequence
  Synthetic oligonucleotide
tttagcgttccgtatgctacatggcagggt

SEQ ID NO: 209789 - DNA, 30 bp, Artificial Sequence
  Synthetic oligonucleotide
gtaagacaaggaccttaatttcttcagggt

SEQ ID NO: 209790 - DNA, 30 bp, Artificial Sequence
  Synthetic oligonucleotide
actagtgtcgcgacaccctagtgagagggt

SEQ ID NO: 209791 - DNA, 30 bp, Artificial Sequence
  Synthetic oligonucleotide
aacgtgatggccatcgtgctctaggagggt

SEQ ID NO: 209792 - DNA, 30 bp, Artificial Sequence
  Synthetic oligonucleotide
agtgtgcggtgatcgaggtcttgggagggt

SEQ ID NO: 209793 - DNA, 30 bp, Artificial Sequence
  Synthetic oligonucleotide
atgctgaacccaaactttggtatggagggt

SEQ ID NO: 209794 - DNA, 30 bp, Artificial Sequence
  Synthetic oligonucleotide
gttattgatctaacaaccagtattgagggt

SEQ ID NO: 209795 - DNA, 30 bp, Artificial Sequence
  Synthetic oligonucleotide
gtggtgtctataagccggaaacagtagggt

SEQ ID NO: 209796 - DNA, 30 bp, Artificial Sequence
  Synthetic oligonucleotide
ccttgcgcgtgaatcccaagtgcgtagggt

SEQ ID NO: 209797 - DNA, 30 bp, Artificial Sequence
  Synthetic oligonucleotide
gtctgtgtaccagcccgtagatcgtagggt

SEQ ID NO: 209798 - DNA, 30 bp, Artificial Sequence
  Synthetic oligonucleotide
cactaaggggggacccatggagggtagggt

SEQ ID NO: 209799 - DNA, 30 bp, Artificial Sequence
  Synthetic oligonucleotide
ctgagttcgggggctggtctatggtagggt

SEQ ID NO: 209800 - DNA, 30 bp, Artificial Sequence
  Synthetic oligonucleotide
tatgagccagtaggaaacagtgcgacgggt

SEQ ID NO: 209801 - DNA, 30 bp, Artificial Sequence
  Synthetic oligonucleotide
caaactctgcccgtaccctggaggacgggt

SEQ ID NO: 209802 - DNA, 30 bp, Artificial Sequence
  Synthetic oligonucleotide
tgccaagatacgggatccagacttacgggt

SEQ ID NO: 209803 - DNA, 30 bp, Artificial Sequence
  Synthetic oligonucleotide
tgctctggcgcggagggaatcatcccgggt

SEQ ID NO: 209804 - DNA, 30 bp, Artificial Sequence
  Synthetic oligonucleotide
gttcagtggcatgagtcagctggcgcgggt

SEQ ID NO: 209805 - DNA, 30 bp, Artificial Sequence
  Synthetic oligonucleotide
caaacggaagggttgtggtaagcggcgggt

SEQ ID NO: 209806 - DNA, 30 bp, Artificial Sequence
  Synthetic oligonucleotide
ggaacccgcgtatgtccggactgatcgggt

SEQ ID NO: 209807 - DNA, 30 bp, Artificial Sequence
  Synthetic oligonucleotide
tacgttctagcgacttacaacacttcgggt

SEQ ID NO: 209808 - DNA, 30 bp, Artificial Sequence
  Synthetic oligonucleotide
cggcgcgtgcgctcgcacttgtgaaggggt

SEQ ID NO: 209809 - DNA, 30 bp, Artificial Sequence
  Synthetic oligonucleotide
gccgaagattcgttatgagacctaaggggt

SEQ ID NO: 209810 - DNA, 30 bp, Artificial Sequence
  Synthetic oligonucleotide
agccggaatgtggagtacagtgctaggggt

SEQ ID NO: 209811 - DNA, 30 bp, Artificial Sequence
  Synthetic oligonucleotide
gatgaatctgtgtagtacgtgtgtaggggt

SEQ ID NO: 209812 - DNA, 30 bp, Artificial Sequence
  Synthetic oligonucleotide
ctacctggcgcaatgggtcatatacggggt

SEQ ID NO: 209813 - DNA, 30 bp, Artificial Sequence
  Synthetic oligonucleotide
tgtgaaagcgaacggatcggaccccggggt

SEQ ID NO: 209814 - DNA, 30 bp, Artificial Sequence
  Synthetic oligonucleotide
tgcgccaagagactaccttatttgcggggt

SEQ ID NO: 209815 - DNA, 30 bp, Artificial Sequence
  Synthetic oligonucleotide
ctccaggcatgctgaacttcaagcgggggt

SEQ ID NO: 209816 - DNA, 30 bp, Artificial Sequence
  Synthetic oligonucleotide
gttgtggaaacgagaatatacggggggggt

SEQ ID NO: 209817 - DNA, 30 bp, Artificial Sequence
  Synthetic oligonucleotide
cgggagtggatggctctcgctatggggggt

SEQ ID NO: 209818 - DNA, 30 bp, Artificial Sequence
  Synthetic oligonucleotide
caaggtcaactaaacacacggaatgggggt

SEQ ID NO: 209819 - DNA, 31 bp, Artificial Sequence
  Synthetic oligonucleotide
tccaacagtttaaccacgcatcagtgggggt

SEQ ID NO: 209820 - DNA, 30 bp, Artificial Sequence
  Synthetic oligonucleotide
aactaggcgaaaaggcagtgatttgggggt

SEQ ID NO: 209821 - DNA, 30 bp, Artificial Sequence
  Synthetic oligonucleotide
cagatcaaaaacaaggggatttttgggggt

SEQ ID NO: 209822 - DNA, 30 bp, Artificial Sequence
  Synthetic oligonucleotide
tagaccttgaaggaacaatgcaactggggt

SEQ ID NO: 209823 - DNA, 30 bp, Artificial Sequence
  Synthetic oligonucleotide
caagttggcgtgcctccaggttcgtggggt

SEQ ID NO: 209824 - DNA, 30 bp, Artificial Sequence
  Synthetic oligonucleotide
cacaagctcagtcacgagctgttgtggggt

SEQ ID NO: 209825 - DNA, 30 bp, Artificial Sequence
  Synthetic oligonucleotide
tgagcgctctgggctgcgttgacgatgggt

SEQ ID NO: 209826 - DNA, 30 bp, Artificial Sequence
  Synthetic oligonucleotide
cctcggtatgtagtttaacgtgatatgggt

SEQ ID NO: 209827 - DNA, 30 bp, Artificial Sequence
  Synthetic oligonucleotide
aatgtaagaggcgagccacagtatatgggt

SEQ ID NO: 209828 - DNA, 30 bp, Artificial Sequence
  Synthetic oligonucleotide
aatctaccgtccactcagattagtatgggt

SEQ ID NO: 209829 - DNA, 30 bp, Artificial Sequence
  Synthetic oligonucleotide
ttgccccagttggttgtgcctcgactgggt

SEQ ID NO: 209830 - DNA, 30 bp, Artificial Sequence
  Synthetic oligonucleotide
gagatactaggacactgggataccctgggt

SEQ ID NO: 209831 - DNA, 30 bp, Artificial Sequence
  Synthetic oligonucleotide
gtgaatcacacctggataacggcagtgggt

SEQ ID NO: 209832 - DNA, 30 bp, Artificial Sequence
  Synthetic oligonucleotide
tggggtgacaatgatcggactaacgtgggt

SEQ ID NO: 209833 - DNA, 30 bp, Artificial Sequence
  Synthetic oligonucleotide
tcaactgcattatttccgctcatggtgggt

SEQ ID NO: 209834 - DNA, 30 bp, Artificial Sequence
  Synthetic oligonucleotide
acgcagtgtagcaaaataggctgtgtgggt

SEQ ID NO: 209835 - DNA, 30 bp, Artificial Sequence
  Synthetic oligonucleotide
ttatcttgtcttggaagattgccaaatggt

SEQ ID NO: 209836 - DNA, 30 bp, Artificial Sequence
  Synthetic oligonucleotide
aaccccaagcccatcggcgaacacaatggt

SEQ ID NO: 209837 - DNA, 30 bp, Artificial Sequence
  Synthetic oligonucleotide
aaaggacttttttgtacggacaggaatggt

SEQ ID NO: 209838 - DNA, 30 bp, Artificial Sequence
  Synthetic oligonucleotide
gtgaggctcttaagccggataatgaatggt

SEQ ID NO: 209839 - DNA, 30 bp, Artificial Sequence
  Synthetic oligonucleotide
acctcgtacgattctatcagtatgaatggt

SEQ ID NO: 209840 - DNA, 30 bp, Artificial Sequence
  Synthetic oligonucleotide
acccaccgtatgcaacccacaaggcatggt

SEQ ID NO: 209841 - DNA, 30 bp, Artificial Sequence
  Synthetic oligonucleotide
cgtcagtcgcttactgcggctagtcatggt

SEQ ID NO: 209842 - DNA, 30 bp, Artificial Sequence
  Synthetic oligonucleotide
cctgaacagggcaggcgcaatatagatggt

SEQ ID NO: 209843 - DNA, 30 bp, Artificial Sequence
  Synthetic oligonucleotide
atgggttcctctgtgtgatttcacgatggt

SEQ ID NO: 209844 - DNA, 30 bp, Artificial Sequence
  Synthetic oligonucleotide
ttaagtcgtgccagccctcagcccgatggt

SEQ ID NO: 209845 - DNA, 30 bp, Artificial Sequence
  Synthetic oligonucleotide
cgagagggcgctacggtaaggagcgatggt

SEQ ID NO: 209846 - DNA, 30 bp, Artificial Sequence
  Synthetic oligonucleotide
gcaagacggagttggacaagtatcgatggt

SEQ ID NO: 209847 - DNA, 30 bp, Artificial Sequence
  Synthetic oligonucleotide
aggcacgtagcgtaggaatatcatgatggt

SEQ ID NO: 209848 - DNA, 30 bp, Artificial Sequence
  Synthetic oligonucleotide
cggggacattgccgcgtttaaccatatggt

SEQ ID NO: 209849 - DNA, 30 bp, Artificial Sequence
  Synthetic oligonucleotide
agtctgcaaaagaagaacttccgctatggt

SEQ ID NO: 209850 - DNA, 30 bp, Artificial Sequence
  Synthetic oligonucleotide
gaaggggagaagtcttcttccaagtatggt

SEQ ID NO: 209851 - DNA, 30 bp, Artificial Sequence
  Synthetic oligonucleotide
gaaggcgcaaggtccgtcctgaaaactggt

SEQ ID NO: 209852 - DNA, 30 bp, Artificial Sequence
  Synthetic oligonucleotide
caatggcgccatcgaagttcgacgactggt

SEQ ID NO: 209853 - DNA, 30 bp, Artificial Sequence
  Synthetic oligonucleotide
cggtcaggtggagcaatgtcgacgtctggt

SEQ ID NO: 209854 - DNA, 30 bp, Artificial Sequence
  Synthetic oligonucleotide
gtaacgcacttcttcgaggatgattctggt

SEQ ID NO: 209855 - DNA, 30 bp, Artificial Sequence
  Synthetic oligonucleotide
tttggcgggtggaactaacgtcgcagtggt

SEQ ID NO: 209856 - DNA, 30 bp, Artificial Sequence
  Synthetic oligonucleotide
caagctactctgatagtcttgggcagtggt

SEQ ID NO: 209857 - DNA, 30 bp, Artificial Sequence
  Synthetic oligonucleotide
cggacgcgactcttcctagcaaggagtggt

SEQ ID NO: 209858 - DNA, 30 bp, Artificial Sequence
  Synthetic oligonucleotide
catcctctgacttttgggcgtgaccgtggt

SEQ ID NO: 209859 - DNA, 30 bp, Artificial Sequence
  Synthetic oligonucleotide
gctcgaatagttgggtttttggagcgtggt

SEQ ID NO: 209860 - DNA, 30 bp, Artificial Sequence
  Synthetic oligonucleotide
ctaaccaatctcccaagcgcctagcgtggt

SEQ ID NO: 209861 - DNA, 30 bp, Artificial Sequence
  Synthetic oligonucleotide
ttatacggtccattacgattcatgcgtggt

SEQ ID NO: 209862 - DNA, 30 bp, Artificial Sequence
  Synthetic oligonucleotide
gggtctaccagcaaaatgcgccatcgtggt

SEQ ID NO: 209863 - DNA, 30 bp, Artificial Sequence
  Synthetic oligonucleotide
cacaaaacatgtgtaaggggtccaggtggt

SEQ ID NO: 209864 - DNA, 30 bp, Artificial Sequence
  Synthetic oligonucleotide
agcgatcaacagagtgtcagtcgcggtggt

SEQ ID NO: 209865 - DNA, 30 bp, Artificial Sequence
  Synthetic oligonucleotide
tcgaacggaaaaattagaatagggggtggt

SEQ ID NO: 209866 - DNA, 30 bp, Artificial Sequence
  Synthetic oligonucleotide
gaacaggtgcaccataacgcgtgtggtggt

SEQ ID NO: 209867 - DNA, 30 bp, Artificial Sequence
  Synthetic oligonucleotide
taagtggtggtaaatcgagacgcatgtggt

SEQ ID NO: 209868 - DNA, 30 bp, Artificial Sequence
  Synthetic oligonucleotide
ctaagtaagatcaatctacgacactgtggt

SEQ ID NO: 209869 - DNA, 30 bp, Artificial Sequence
  Synthetic oligonucleotide
cgatctgccgcaaaaacgcctaagtgtggt

SEQ ID NO: 209870 - DNA, 30 bp, Artificial Sequence
  Synthetic oligonucleotide
tcgcacggggcgttcgggatatcgtgtggt

SEQ ID NO: 209871 - DNA, 30 bp, Artificial Sequence
  Synthetic oligonucleotide
tgggtaagaactcgtacgcactcttgtggt

SEQ ID NO: 209872 - DNA, 30 bp, Artificial Sequence
  Synthetic oligonucleotide
cgaggtccaaaccttctatatgcaattggt

SEQ ID NO: 209873 - DNA, 30 bp, Artificial Sequence
  Synthetic oligonucleotide
aacagcatgttctggtgatagagaattggt

SEQ ID NO: 209874 - DNA, 30 bp, Artificial Sequence
  Synthetic oligonucleotide
caatcagggaggcattggaataacattggt

SEQ ID NO: 209875 - DNA, 30 bp, Artificial Sequence
  Synthetic oligonucleotide
cggcgaccgttagttttttgccagattggt

SEQ ID NO: 209876 - DNA, 30 bp, Artificial Sequence
  Synthetic oligonucleotide
aatgctagccaggcatatggtcatattggt

SEQ ID NO: 209877 - DNA, 30 bp, Artificial Sequence
  Synthetic oligonucleotide
agagtgatccaacgtcccggtcctattggt

SEQ ID NO: 209878 - DNA, 30 bp, Artificial Sequence
  Synthetic oligonucleotide
tccggcatatagattctacttcgtcttggt

SEQ ID NO: 209879 - DNA, 30 bp, Artificial Sequence
  Synthetic oligonucleotide
ttcaggggcatcggatcagtctaggttggt

SEQ ID NO: 209880 - DNA, 30 bp, Artificial Sequence
  Synthetic oligonucleotide
tctgcgcaaggctgaaggcgatttgttggt

SEQ ID NO: 209881 - DNA, 30 bp, Artificial Sequence
  Synthetic oligonucleotide
tttggggaaatgattacatatcaatttggt

SEQ ID NO: 209882 - DNA, 30 bp, Artificial Sequence
  Synthetic oligonucleotide
cgcgaagtgacagaattggcccagtttggt

SEQ ID NO: 209883 - DNA, 30 bp, Artificial Sequence
  Synthetic oligonucleotide
cgtttaacccccgaaaccgaagggtttggt

SEQ ID NO: 209884 - DNA, 30 bp, Artificial Sequence
  Synthetic oligonucleotide
gcgatagacttgcccttctcatcaaaatgt

SEQ ID NO: 209885 - DNA, 30 bp, Artificial Sequence
  Synthetic oligonucleotide
gtggcaatagcgttacagatttcaaaatgt

SEQ ID NO: 209886 - DNA, 30 bp, Artificial Sequence
  Synthetic oligonucleotide
ggcgatcgtaccaggcgatagtccaaatgt

SEQ ID NO: 209887 - DNA, 30 bp, Artificial Sequence
  Synthetic oligonucleotide
ttgttctggaatacggttagcagcaaatgt

SEQ ID NO: 209888 - DNA, 30 bp, Artificial Sequence
  Synthetic oligonucleotide
aacatagagactagacgaagcgcccaatgt

SEQ ID NO: 209889 - DNA, 30 bp, Artificial Sequence
  Synthetic oligonucleotide
cgcctggcacggaggtacgtctcccaatgt

SEQ ID NO: 209890 - DNA, 30 bp, Artificial Sequence
  Synthetic oligonucleotide
ttgcgctgctatgaaatagacttgcaatgt

SEQ ID NO: 209891 - DNA, 30 bp, Artificial Sequence
  Synthetic oligonucleotide
gcatgacgtcttcattgcacactagaatgt

SEQ ID NO: 209892 - DNA, 30 bp, Artificial Sequence
  Synthetic oligonucleotide
acatcggagctgcttactgcattagaatgt

SEQ ID NO: 209893 - DNA, 30 bp, Artificial Sequence
  Synthetic oligonucleotide
taagggcgatggccatgtcctctttaatgt

SEQ ID NO: 209894 - DNA, 30 bp, Artificial Sequence
  Synthetic oligonucleotide
cggaaggagcgggggttgccgcgaacatgt

SEQ ID NO: 209895 - DNA, 30 bp, Artificial Sequence
  Synthetic oligonucleotide
gctcggggtcaatggttctcttgaacatgt

SEQ ID NO: 209896 - DNA, 30 bp, Artificial Sequence
  Synthetic oligonucleotide
ggtaggaataagcggacctaacccacatgt

SEQ ID NO: 209897 - DNA, 30 bp, Artificial Sequence
  Synthetic oligonucleotide
tctagggctgtaaaaaggcgctggacatgt

SEQ ID NO: 209898 - DNA, 30 bp, Artificial Sequence
  Synthetic oligonucleotide
ttcagggtaataaaagtaaagtggacatgt

SEQ ID NO: 209899 - DNA, 30 bp, Artificial Sequence
  Synthetic oligonucleotide
tagcactactgcaaccaggtgagtacatgt

SEQ ID NO: 209900 - DNA, 30 bp, Artificial Sequence
  Synthetic oligonucleotide
aggcctccaagagatagaacgcgtacatgt

SEQ ID NO: 209901 - DNA, 30 bp, Artificial Sequence
  Synthetic oligonucleotide
gttaataagttgacattacgagtgccatgt

SEQ ID NO: 209902 - DNA, 30 bp, Artificial Sequence
  Synthetic oligonucleotide
tctcttcaactcgacgttgtgagagcatgt

SEQ ID NO: 209903 - DNA, 30 bp, Artificial Sequence
  Synthetic oligonucleotide
ccgaagaaatataaccatgaacgagcatgt

SEQ ID NO: 209904 - DNA, 30 bp, Artificial Sequence
  Synthetic oligonucleotide
aactgactgtggcctaccacgccggcatgt

SEQ ID NO: 209905 - DNA, 30 bp, Artificial Sequence
  Synthetic oligonucleotide
gtcagtaatagaacccaagtggtggcatgt

SEQ ID NO: 209906 - DNA, 30 bp, Artificial Sequence
  Synthetic oligonucleotide
tgctacatcgctcctggcattacttcatgt

SEQ ID NO: 209907 - DNA, 30 bp, Artificial Sequence
  Synthetic oligonucleotide
cttggataagcggagggagagtcttcatgt

SEQ ID NO: 209908 - DNA, 30 bp, Artificial Sequence
  Synthetic oligonucleotide
tgactccgtgtgggggatagccgttcatgt

SEQ ID NO: 209909 - DNA, 30 bp, Artificial Sequence
  Synthetic oligonucleotide
gcagggtaggttaggtattggtgttcatgt

SEQ ID NO: 209910 - DNA, 30 bp, Artificial Sequence
  Synthetic oligonucleotide
ctatatgttaagtaccgatctcacagatgt

SEQ ID NO: 209911 - DNA, 30 bp, Artificial Sequence
  Synthetic oligonucleotide
cccccgtaaatgtagccgtaaaccagatgt

SEQ ID NO: 209912 - DNA, 30 bp, Artificial Sequence
  Synthetic oligonucleotide
tattgaggtataaaccggaaatcacgatgt

SEQ ID NO: 209913 - DNA, 30 bp, Artificial Sequence
  Synthetic oligonucleotide
agtcatgatgcctcgtagggattacgatgt

SEQ ID NO: 209914 - DNA, 30 bp, Artificial Sequence
  Synthetic oligonucleotide
ctatgatccggcttggaattgatccgatgt

SEQ ID NO: 209915 - DNA, 30 bp, Artificial Sequence
  Synthetic oligonucleotide
actaaggcaacaagttaaatccagcgatgt

SEQ ID NO: 209916 - DNA, 30 bp, Artificial Sequence
  Synthetic oligonucleotide
attgtagctccacaggaaaaataaggatgt

SEQ ID NO: 209917 - DNA, 30 bp, Artificial Sequence
  Synthetic oligonucleotide
ttcaggacgtcatcagttaaagcatgatgt

SEQ ID NO: 209918 - DNA, 29 bp, Artificial Sequence
  Synthetic oligonucleotide
gggttacagactataggcgcccctgatgt

SEQ ID NO: 209919 - DNA, 30 bp, Artificial Sequence
  Synthetic oligonucleotide
gcatcgtggatggtgtaacccctgatatgt

SEQ ID NO: 209920 - DNA, 30 bp, Artificial Sequence
  Synthetic oligonucleotide
atcgcaaactccacaccgaattatatatgt

SEQ ID NO: 209921 - DNA, 30 bp, Artificial Sequence
  Synthetic oligonucleotide
ctgtgcggctgaatcgataatcgtatatgt

SEQ ID NO: 209922 - DNA, 30 bp, Artificial Sequence
  Synthetic oligonucleotide
gatctgcaaaagtgtacaccagtactatgt

SEQ ID NO: 209923 - DNA, 30 bp, Artificial Sequence
  Synthetic oligonucleotide
acaatagcaattcggctccaaaacctatgt

SEQ ID NO: 209924 - DNA, 30 bp, Artificial Sequence
  Synthetic oligonucleotide
gccattataggtgagttcgacgatctatgt

SEQ ID NO: 209925 - DNA, 30 bp, Artificial Sequence
  Synthetic oligonucleotide
catgtgggggtcggttggagagtagtatgt

SEQ ID NO: 209926 - DNA, 30 bp, Artificial Sequence
  Synthetic oligonucleotide
taaatcagcttcatgtttagaaacgtatgt

SEQ ID NO: 209927 - DNA, 30 bp, Artificial Sequence
  Synthetic oligonucleotide
actccaagacttcccaaaccgagcgtatgt

SEQ ID NO: 209928 - DNA, 30 bp, Artificial Sequence
  Synthetic oligonucleotide
aaaggtccagtacctattggccatgtatgt

SEQ ID NO: 209929 - DNA, 30 bp, Artificial Sequence
  Synthetic oligonucleotide
acgggagagcagattcttatcgttgtatgt

SEQ ID NO: 209930 - DNA, 30 bp, Artificial Sequence
  Synthetic oligonucleotide
tcatggagcgatgacattgttggcaactgt

SEQ ID NO: 209931 - DNA, 30 bp, Artificial Sequence
  Synthetic oligonucleotide
cgggaatactgtgaaaacgggccgaactgt

SEQ ID NO: 209932 - DNA, 30 bp, Artificial Sequence
  Synthetic oligonucleotide
aaaaggacaaaatgagagaggtaacactgt

SEQ ID NO: 209933 - DNA, 30 bp, Artificial Sequence
  Synthetic oligonucleotide
ccgcgttcacacattcggggtaaccactgt

SEQ ID NO: 209934 - DNA, 30 bp, Artificial Sequence
  Synthetic oligonucleotide
ttgagctcgtaaagtgacaagtggcactgt

SEQ ID NO: 209935 - DNA, 30 bp, Artificial Sequence
  Synthetic oligonucleotide
aactcgcgtagggaggaggagaaagactgt

SEQ ID NO: 209936 - DNA, 30 bp, Artificial Sequence
  Synthetic oligonucleotide
gtgggtgctcagcactgcgaagaggactgt

SEQ ID NO: 209937 - DNA, 30 bp, Artificial Sequence
  Synthetic oligonucleotide
ttacgaatgtgacataaaccaatatactgt

SEQ ID NO: 209938 - DNA, 30 bp, Artificial Sequence
  Synthetic oligonucleotide
aatatgtgccttaagggtgacggctactgt

SEQ ID NO: 209939 - DNA, 30 bp, Artificial Sequence
  Synthetic oligonucleotide
gtgcaaggttttgtacacatatcgtactgt

SEQ ID NO: 209940 - DNA, 30 bp, Artificial Sequence
  Synthetic oligonucleotide
acgtttaaatcggatggatccgggtactgt

SEQ ID NO: 209941 - DNA, 30 bp, Artificial Sequence
  Synthetic oligonucleotide
tagcaagggggatcctttcaaatgtactgt

SEQ ID NO: 209942 - DNA, 30 bp, Artificial Sequence
  Synthetic oligonucleotide
tcgaagacgcgggctcaaataggaacctgt

SEQ ID NO: 209943 - DNA, 30 bp, Artificial Sequence
  Synthetic oligonucleotide
cgtaggcacaagatgtagacttcgacctgt

SEQ ID NO: 209944 - DNA, 30 bp, Artificial Sequence
  Synthetic oligonucleotide
gtcggagaatacgtcgatagttatacctgt

SEQ ID NO: 209945 - DNA, 30 bp, Artificial Sequence
  Synthetic oligonucleotide
gtaggtcttcgtcttccctatggaccctgt

SEQ ID NO: 209946 - DNA, 30 bp, Artificial Sequence
  Synthetic oligonucleotide
ggtgcaatgactcgcgtggactgcccctgt

SEQ ID NO: 209947 - DNA, 30 bp, Artificial Sequence
  Synthetic oligonucleotide
taagaataagcctgctgaccgtgcgcctgt

SEQ ID NO: 209948 - DNA, 30 bp, Artificial Sequence
  Synthetic oligonucleotide
catcggcgtgttctttaccatcaatcctgt

SEQ ID NO: 209949 - DNA, 30 bp, Artificial Sequence
  Synthetic oligonucleotide
ctgtaaactttcgcacggagttgatcctgt

SEQ ID NO: 209950 - DNA, 30 bp, Artificial Sequence
  Synthetic oligonucleotide
gacgagtgttaatgacaaactaactcctgt

SEQ ID NO: 209951 - DNA, 30 bp, Artificial Sequence
  Synthetic oligonucleotide
cggttactggaggttgtgcagtgctcctgt

SEQ ID NO: 209952 - DNA, 30 bp, Artificial Sequence
  Synthetic oligonucleotide
cgtgacgcataacggagaatagcaagctgt

SEQ ID NO: 209953 - DNA, 30 bp, Artificial Sequence
  Synthetic oligonucleotide
tccgctagagagccggctacgttcagctgt

SEQ ID NO: 209954 - DNA, 30 bp, Artificial Sequence
  Synthetic oligonucleotide
agcgaaccttaggagggaccccctagctgt

SEQ ID NO: 209955 - DNA, 30 bp, Artificial Sequence
  Synthetic oligonucleotide
acaaacccgtcatagcagcgagcacgctgt

SEQ ID NO: 209956 - DNA, 30 bp, Artificial Sequence
  Synthetic oligonucleotide
cgttataccgtgctagggctatgtcgctgt

SEQ ID NO: 209957 - DNA, 30 bp, Artificial Sequence
  Synthetic oligonucleotide
tacccatgtaattctgcaaaattaggctgt

SEQ ID NO: 209958 - DNA, 30 bp, Artificial Sequence
  Synthetic oligonucleotide
gcagctgaaacatgcggagtagttggctgt

SEQ ID NO: 209959 - DNA, 30 bp, Artificial Sequence
  Synthetic oligonucleotide
gtaactgctcgtaaagcctggagatgctgt

SEQ ID NO: 209960 - DNA, 30 bp, Artificial Sequence
  Synthetic oligonucleotide
gccgatactaaagtggcgagtctatgctgt

SEQ ID NO: 209961 - DNA, 30 bp, Artificial Sequence
  Synthetic oligonucleotide
ggagtcgcggtcgtaggcagactttgctgt

SEQ ID NO: 209962 - DNA, 30 bp, Artificial Sequence
  Synthetic oligonucleotide
agtccgtggataacgtcatagtcaatctgt

SEQ ID NO: 209963 - DNA, 30 bp, Artificial Sequence
  Synthetic oligonucleotide
tgccgcgaacgaatgtcgtggtgaatctgt

SEQ ID NO: 209964 - DNA, 30 bp, Artificial Sequence
  Synthetic oligonucleotide
cgacggagaacagcaggttcaaagatctgt

SEQ ID NO: 209965 - DNA, 30 bp, Artificial Sequence
  Synthetic oligonucleotide
tcggagaaaaaatactccgtagatatctgt

SEQ ID NO: 209966 - DNA, 30 bp, Artificial Sequence
  Synthetic oligonucleotide
gagacgtagaagaatagaacgggtatctgt

SEQ ID NO: 209967 - DNA, 30 bp, Artificial Sequence
  Synthetic oligonucleotide
tgcgtatgtataaggctattacttatctgt

SEQ ID NO: 209968 - DNA, 30 bp, Artificial Sequence
  Synthetic oligonucleotide
cttagacgttcttgtatacatccactctgt

SEQ ID NO: 209969 - DNA, 30 bp, Artificial Sequence
  Synthetic oligonucleotide
cgaattaaattcccggcaaactacctctgt

SEQ ID NO: 209970 - DNA, 30 bp, Artificial Sequence
  Synthetic oligonucleotide
accggggccagacatacaacccgcctctgt

SEQ ID NO: 209971 - DNA, 30 bp, Artificial Sequence
  Synthetic oligonucleotide
agttgttataactaagtatcagagctctgt

SEQ ID NO: 209972 - DNA, 30 bp, Artificial Sequence
  Synthetic oligonucleotide
gactgggaagaggtccgatgcccgctctgt

SEQ ID NO: 209973 - DNA, 30 bp, Artificial Sequence
  Synthetic oligonucleotide
taaagcctcaattcaacattccgtctctgt

SEQ ID NO: 209974 - DNA, 30 bp, Artificial Sequence
  Synthetic oligonucleotide
ggccactaagagaatctctggaccgtctgt

SEQ ID NO: 209975 - DNA, 30 bp, Artificial Sequence
  Synthetic oligonucleotide
ggtacgcactgtggggcataactggtctgt

SEQ ID NO: 209976 - DNA, 30 bp, Artificial Sequence
  Synthetic oligonucleotide
agaggggtctaatagaggcccgtggtctgt

SEQ ID NO: 209977 - DNA, 30 bp, Artificial Sequence
  Synthetic oligonucleotide
caaataaacgtggttgaagaatgattctgt

SEQ ID NO: 209978 - DNA, 30 bp, Artificial Sequence
  Synthetic oligonucleotide
tgtgcgactgcgccaaataaaatcttctgt

SEQ ID NO: 209979 - DNA, 30 bp, Artificial Sequence
  Synthetic oligonucleotide
acaccgtgccatgccagtttcaggttctgt

SEQ ID NO: 209980 - DNA, 30 bp, Artificial Sequence
  Synthetic oligonucleotide
ctgtatacgttgacacatgttaggttctgt

SEQ ID NO: 209981 - DNA, 30 bp, Artificial Sequence
  Synthetic oligonucleotide
cccacaggcgagcaattgactcgcaagtgt

SEQ ID NO: 209982 - DNA, 30 bp, Artificial Sequence
  Synthetic oligonucleotide
tcggtgcttgtcctggcaaataggaagtgt

SEQ ID NO: 209983 - DNA, 30 bp, Artificial Sequence
  Synthetic oligonucleotide
cggggtgtggactaagacaggcctaagtgt

SEQ ID NO: 209984 - DNA, 30 bp, Artificial Sequence
  Synthetic oligonucleotide
gatgatcccatctatttagtcgtccagtgt

SEQ ID NO: 209985 - DNA, 30 bp, Artificial Sequence
  Synthetic oligonucleotide
aatgaccaacgtagtcaccctgagcagtgt

SEQ ID NO: 209986 - DNA, 30 bp, Artificial Sequence
  Synthetic oligonucleotide
agaatatatggaaagtgtaaaaggcagtgt

SEQ ID NO: 209987 - DNA, 30 bp, Artificial Sequence
  Synthetic oligonucleotide
tcgtggcctttataaaaactcaatcagtgt

SEQ ID NO: 209988 - DNA, 30 bp, Artificial Sequence
  Synthetic oligonucleotide
caccgtaagaccgcgtctcgccccgagtgt

SEQ ID NO: 209989 - DNA, 30 bp, Artificial Sequence
  Synthetic oligonucleotide
tctatatactagtcctcacgttgcgagtgt

SEQ ID NO: 209990 - DNA, 30 bp, Artificial Sequence
  Synthetic oligonucleotide
catggctaatactgttagggtactgagtgt

SEQ ID NO: 209991 - DNA, 30 bp, Artificial Sequence
  Synthetic oligonucleotide
cacaagtatgaaaccaacgcgccatagtgt

SEQ ID NO: 209992 - DNA, 30 bp, Artificial Sequence
  Synthetic oligonucleotide
ggtccatctcgttcggggatggcatagtgt

SEQ ID NO: 209993 - DNA, 30 bp, Artificial Sequence
  Synthetic oligonucleotide
gattcgggcaggttgtagtgtcactagtgt

SEQ ID NO: 209994 - DNA, 30 bp, Artificial Sequence
  Synthetic oligonucleotide
ttacacgtcattatacctgaaatgtagtgt

SEQ ID NO: 209995 - DNA, 30 bp, Artificial Sequence
  Synthetic oligonucleotide
catgcgcgagtaccaacttagacttagtgt

SEQ ID NO: 209996 - DNA, 30 bp, Artificial Sequence
  Synthetic oligonucleotide
ctggtagtagctggagaattttgaacgtgt

SEQ ID NO: 209997 - DNA, 30 bp, Artificial Sequence
  Synthetic oligonucleotide
aaagcctgcatgggtgtttggatgacgtgt

SEQ ID NO: 209998 - DNA, 30 bp, Artificial Sequence
  Synthetic oligonucleotide
atatcaagtgaatattcccaaaatacgtgt

SEQ ID NO: 209999 - DNA, 30 bp, Artificial Sequence
  Synthetic oligonucleotide
acggcggccctaatcctatgaataccgtgt

SEQ ID NO: 210000 - DNA, 30 bp, Artificial Sequence
  Synthetic oligonucleotide
ggatggaaattccagagacgggcgccgtgt

SEQ ID NO: 210001 - DNA, 30 bp, Artificial Sequence
  Synthetic oligonucleotide
cgaatcgacaataacgtagtcgctccgtgt

SEQ ID NO: 210002 - DNA, 30 bp, Artificial Sequence
  Synthetic oligonucleotide
taagccggctagggaacagatacagcgtgt

SEQ ID NO: 210003 - DNA, 30 bp, Artificial Sequence
  Synthetic oligonucleotide
aagagattaggatatccggagtcagcgtgt

SEQ ID NO: 210004 - DNA, 30 bp, Artificial Sequence
  Synthetic oligonucleotide
tgttacctccgcccgggcagaacggcgtgt

SEQ ID NO: 210005 - DNA, 30 bp, Artificial Sequence
  Synthetic oligonucleotide
tgatgttcatagttttcgtgtttggcgtgt

SEQ ID NO: 210006 - DNA, 30 bp, Artificial Sequence
  Synthetic oligonucleotide
ccaggtgacgacgccgaattgggatcgtgt

SEQ ID NO: 210007 - DNA, 30 bp, Artificial Sequence
  Synthetic oligonucleotide
tgggagatgattaggaagagatcctcgtgt

SEQ ID NO: 210008 - DNA, 30 bp, Artificial Sequence
  Synthetic oligonucleotide
aggtttcagtctcgctggtctacgtcgtgt

SEQ ID NO: 210009 - DNA, 30 bp, Artificial Sequence
  Synthetic oligonucleotide
cctaggaatccttaaaccagtaattcgtgt

SEQ ID NO: 210010 - DNA, 30 bp, Artificial Sequence
  Synthetic oligonucleotide
gtcaaccgatataggtcggggctaaggtgt

SEQ ID NO: 210011 - DNA, 30 bp, Artificial Sequence
  Synthetic oligonucleotide
caagaacggtcatgaattaagttaaggtgt

SEQ ID NO: 210012 - DNA, 31 bp, Artificial Sequence
  Synthetic oligonucleotide
agtccacactccgagacaaatatacaggtgt

SEQ ID NO: 210013 - DNA, 30 bp, Artificial Sequence
  Synthetic oligonucleotide
acagtcccgaggacgcgatgggccaggtgt

SEQ ID NO: 210014 - DNA, 30 bp, Artificial Sequence
  Synthetic oligonucleotide
tgtaacatgcctcccggaaaactcaggtgt

SEQ ID NO: 210015 - DNA, 30 bp, Artificial Sequence
  Synthetic oligonucleotide
gcagagcgttctaaaggtaagttgaggtgt

SEQ ID NO: 210016 - DNA, 30 bp, Artificial Sequence
  Synthetic oligonucleotide
cttagtggcgtgacacaacctagagggtgt

SEQ ID NO: 210017 - DNA, 30 bp, Artificial Sequence
  Synthetic oligonucleotide
ctggaagtggtatcccatacaatagggtgt

SEQ ID NO: 210018 - DNA, 30 bp, Artificial Sequence
  Synthetic oligonucleotide
aaatgggctgtgattgggcagtacgggtgt

SEQ ID NO: 210019 - DNA, 30 bp, Artificial Sequence
  Synthetic oligonucleotide
gaaaggagccagctgatccattccgggtgt

SEQ ID NO: 210020 - DNA, 30 bp, Artificial Sequence
  Synthetic oligonucleotide
acaactgctgacactttacctccggggtgt

SEQ ID NO: 210021 - DNA, 30 bp, Artificial Sequence
  Synthetic oligonucleotide
gcactactcatgtagtaccacagggggtgt

SEQ ID NO: 210022 - DNA, 30 bp, Artificial Sequence
  Synthetic oligonucleotide
tacaacggtggggcgatgagtattgggtgt

SEQ ID NO: 210023 - DNA, 30 bp, Artificial Sequence
  Synthetic oligonucleotide
cgaaggatgcaggcctagagagaatggtgt

SEQ ID NO: 210024 - DNA, 30 bp, Artificial Sequence
  Synthetic oligonucleotide
tcaggtaataaagccgcgttcacctggtgt

SEQ ID NO: 210025 - DNA, 30 bp, Artificial Sequence
  Synthetic oligonucleotide
ctgaatccgtcctcggtgttggggtggtgt

SEQ ID NO: 210026 - DNA, 30 bp, Artificial Sequence
  Synthetic oligonucleotide
tttgatatcaaatactgggcaatgtggtgt

SEQ ID NO: 210027 - DNA, 30 bp, Artificial Sequence
  Synthetic oligonucleotide
gttcgagcgttataagccccaggaatgtgt

SEQ ID NO: 210028 - DNA, 30 bp, Artificial Sequence
  Synthetic oligonucleotide
gttctaagtttcgacaccgacctaatgtgt

SEQ ID NO: 210029 - DNA, 30 bp, Artificial Sequence
  Synthetic oligonucleotide
cttatgccaataccgggaaggcccatgtgt

SEQ ID NO: 210030 - DNA, 30 bp, Artificial Sequence
  Synthetic oligonucleotide
taatcgctaggtcttatggtagtcatgtgt

SEQ ID NO: 210031 - DNA, 30 bp, Artificial Sequence
  Synthetic oligonucleotide
ggcagtacaggacgaaatcgactgatgtgt

SEQ ID NO: 210032 - DNA, 29 bp, Artificial Sequence
  Synthetic oligonucleotide
ccacaagcccacggtgagtcgatatgtgt

SEQ ID NO: 210033 - DNA, 30 bp, Artificial Sequence
  Synthetic oligonucleotide
ttcatcgctgaagcactcggggatatgtgt

SEQ ID NO: 210034 - DNA, 30 bp, Artificial Sequence
  Synthetic oligonucleotide
gctcgttatatgaaatcaggacgtatgtgt

SEQ ID NO: 210035 - DNA, 30 bp, Artificial Sequence
  Synthetic oligonucleotide
atatcaaactcgccaggtgaacgcctgtgt

SEQ ID NO: 210036 - DNA, 30 bp, Artificial Sequence
  Synthetic oligonucleotide
gaaacaccaagattcccattcaaggtgtgt

SEQ ID NO: 210037 - DNA, 30 bp, Artificial Sequence
  Synthetic oligonucleotide
ggaagtagcatgtttaaattgctggtgtgt

SEQ ID NO: 210038 - DNA, 30 bp, Artificial Sequence
  Synthetic oligonucleotide
ccatgcggcacgaaagggtaccctgtgtgt

SEQ ID NO: 210039 - DNA, 30 bp, Artificial Sequence
  Synthetic oligonucleotide
cgaggatctttattgcttttctctgtgtgt

SEQ ID NO: 210040 - DNA, 30 bp, Artificial Sequence
  Synthetic oligonucleotide
gcaggtgcaaattttgggtgttcattgtgt

SEQ ID NO: 210041 - DNA, 30 bp, Artificial Sequence
  Synthetic oligonucleotide
tgcacagtgtactagcagctaggattgtgt

SEQ ID NO: 210042 - DNA, 30 bp, Artificial Sequence
  Synthetic oligonucleotide
atggaattcacccgtgacaggatcttgtgt

SEQ ID NO: 210043 - DNA, 30 bp, Artificial Sequence
  Synthetic oligonucleotide
tccactattaggccgataattccgttgtgt

SEQ ID NO: 210044 - DNA, 30 bp, Artificial Sequence
  Synthetic oligonucleotide
ggagagacgatcgcgaatggtctccattgt

SEQ ID NO: 210045 - DNA, 30 bp, Artificial Sequence
  Synthetic oligonucleotide
aggaggcacaggtactttagggggcattgt

SEQ ID NO: 210046 - DNA, 30 bp, Artificial Sequence
  Synthetic oligonucleotide
cggtaagagcatcaccctctggggcattgt

SEQ ID NO: 210047 - DNA, 30 bp, Artificial Sequence
  Synthetic oligonucleotide
caaaagcggtggttacgtttggcagattgt

SEQ ID NO: 210048 - DNA, 30 bp, Artificial Sequence
  Synthetic oligonucleotide
acctccagagtctacaaattcagagattgt

SEQ ID NO: 210049 - DNA, 30 bp, Artificial Sequence
  Synthetic oligonucleotide
cggacgaaatcaaacgtttgcctctattgt

SEQ ID NO: 210050 - DNA, 30 bp, Artificial Sequence
  Synthetic oligonucleotide
ggtacattgggcaaataaagtccgtattgt

SEQ ID NO: 210051 - DNA, 30 bp, Artificial Sequence
  Synthetic oligonucleotide
accgcacagcggtacctgtgttcgtattgt

SEQ ID NO: 210052 - DNA, 30 bp, Artificial Sequence
  Synthetic oligonucleotide
taggatgctgtcagctaaagaaggtattgt

SEQ ID NO: 210053 - DNA, 30 bp, Artificial Sequence
  Synthetic oligonucleotide
gctccctaaaatacttggcgtgtcacttgt

SEQ ID NO: 210054 - DNA, 30 bp, Artificial Sequence
  Synthetic oligonucleotide
gtgacatctttggtctgaagacatacttgt

SEQ ID NO: 210055 - DNA, 30 bp, Artificial Sequence
  Synthetic oligonucleotide
cacgagtataacctcttcgaatttccttgt

SEQ ID NO: 210056 - DNA, 30 bp, Artificial Sequence
  Synthetic oligonucleotide
cgacaatttggagccagcctaaaagcttgt

SEQ ID NO: 210057 - DNA, 30 bp, Artificial Sequence
  Synthetic oligonucleotide
tgtgtcatttgaaacacattcatggcttgt

SEQ ID NO: 210058 - DNA, 30 bp, Artificial Sequence
  Synthetic oligonucleotide
acagctgggattgagctttgaaagtcttgt

SEQ ID NO: 210059 - DNA, 30 bp, Artificial Sequence
  Synthetic oligonucleotide
ggcgataacggatgacagtgctagtcttgt

SEQ ID NO: 210060 - DNA, 30 bp, Artificial Sequence
  Synthetic oligonucleotide
actgagtaaacgacaggaatcggttcttgt

SEQ ID NO: 210061 - DNA, 30 bp, Artificial Sequence
  Synthetic oligonucleotide
cgtaaatatgcgcttctatacttttcttgt

SEQ ID NO: 210062 - DNA, 30 bp, Artificial Sequence
  Synthetic oligonucleotide
tacacatgggatagatctagagacagttgt

SEQ ID NO: 210063 - DNA, 30 bp, Artificial Sequence
  Synthetic oligonucleotide
ccgttccgaagaacttgggcatgcagttgt

SEQ ID NO: 210064 - DNA, 30 bp, Artificial Sequence
  Synthetic oligonucleotide
aatggcattagcgtgacaggtgtcagttgt

SEQ ID NO: 210065 - DNA, 30 bp, Artificial Sequence
  Synthetic oligonucleotide
tttgcacgaaacagggtgcgcaaacgttgt

SEQ ID NO: 210066 - DNA, 30 bp, Artificial Sequence
  Synthetic oligonucleotide
tcgctacataaatgcttccgattacgttgt

SEQ ID NO: 210067 - DNA, 30 bp, Artificial Sequence
  Synthetic oligonucleotide
acaaatgggcactgaagcgtatcccgttgt

SEQ ID NO: 210068 - DNA, 30 bp, Artificial Sequence
  Synthetic oligonucleotide
ccagctctttgacaataacagagaggttgt

SEQ ID NO: 210069 - DNA, 30 bp, Artificial Sequence
  Synthetic oligonucleotide
ctagcatgtaaaatagacgtaggaggttgt

SEQ ID NO: 210070 - DNA, 30 bp, Artificial Sequence
  Synthetic oligonucleotide
gatggggagtgcgaatacgggcacggttgt

SEQ ID NO: 210071 - DNA, 30 bp, Artificial Sequence
  Synthetic oligonucleotide
acaccggtaggggcctaaaagtacggttgt

SEQ ID NO: 210072 - DNA, 30 bp, Artificial Sequence
  Synthetic oligonucleotide
ggtgcagatccaaggatgttggactgttgt

SEQ ID NO: 210073 - DNA, 30 bp, Artificial Sequence
  Synthetic oligonucleotide
ggaaagtttagctggtcgtttagttgttgt

SEQ ID NO: 210074 - DNA, 30 bp, Artificial Sequence
  Synthetic oligonucleotide
atgggacagcctgcctacaagataatttgt

SEQ ID NO: 210075 - DNA, 30 bp, Artificial Sequence
  Synthetic oligonucleotide
tggtaatgccactaatttattataatttgt

SEQ ID NO: 210076 - DNA, 30 bp, Artificial Sequence
  Synthetic oligonucleotide
ttcattactaggaaagagccctacatttgt

SEQ ID NO: 210077 - DNA, 30 bp, Artificial Sequence
  Synthetic oligonucleotide
ccttgcaccaaggtacaagtgtggatttgt

SEQ ID NO: 210078 - DNA, 30 bp, Artificial Sequence
  Synthetic oligonucleotide
ggggccagggaccgtagaatcaatatttgt

SEQ ID NO: 210079 - DNA, 30 bp, Artificial Sequence
  Synthetic oligonucleotide
ctacttcatgtcttgtaacttcgactttgt

SEQ ID NO: 210080 - DNA, 30 bp, Artificial Sequence
  Synthetic oligonucleotide
ggccgtacataactcggatggtgactttgt

SEQ ID NO: 210081 - DNA, 30 bp, Artificial Sequence
  Synthetic oligonucleotide
cggagtattaatagatgtgtgaaggtttgt

SEQ ID NO: 210082 - DNA, 30 bp, Artificial Sequence
  Synthetic oligonucleotide
tctgccggtaggcgaacctttcctgtttgt

SEQ ID NO: 210083 - DNA, 30 bp, Artificial Sequence
  Synthetic oligonucleotide
ggaaggagtagagactcaagtgtcttttgt

SEQ ID NO: 210084 - DNA, 30 bp, Artificial Sequence
  Synthetic oligonucleotide
ggatggcgttcaataccgatccagttttgt

SEQ ID NO: 210085 - DNA, 30 bp, Artificial Sequence
  Synthetic oligonucleotide
agtggaggtcgtaggaggaacccaaaaatt

SEQ ID NO: 210086 - DNA, 30 bp, Artificial Sequence
  Synthetic oligonucleotide
ggccttacacttcgagatggaatcaaaatt

SEQ ID NO: 210087 - DNA, 30 bp, Artificial Sequence
  Synthetic oligonucleotide
tctgagcacgtgagggaacgtaagaaaatt

SEQ ID NO: 210088 - DNA, 30 bp, Artificial Sequence
  Synthetic oligonucleotide
aggaactggatactgcgatccctgaaaatt

SEQ ID NO: 210089 - DNA, 30 bp, Artificial Sequence
  Synthetic oligonucleotide
aatcagtgggtgctcggcttatgtaaaatt

SEQ ID NO: 210090 - DNA, 30 bp, Artificial Sequence
  Synthetic oligonucleotide
gtaggcctgacgagtacatacctccaaatt

SEQ ID NO: 210091 - DNA, 30 bp, Artificial Sequence
  Synthetic oligonucleotide
gctgggtatagagggtggttatagcaaatt

SEQ ID NO: 210092 - DNA, 30 bp, Artificial Sequence
  Synthetic oligonucleotide
gctgttcaattacgaccagaacggcaaatt

SEQ ID NO: 210093 - DNA, 30 bp, Artificial Sequence
  Synthetic oligonucleotide
aagatatcacgccaggggagcgggcaaatt

SEQ ID NO: 210094 - DNA, 30 bp, Artificial Sequence
  Synthetic oligonucleotide
aggagagtcgccgggcagggtttgcaaatt

SEQ ID NO: 210095 - DNA, 30 bp, Artificial Sequence
  Synthetic oligonucleotide
tgtttccggcacaacacaatgcctcaaatt

SEQ ID NO: 210096 - DNA, 30 bp, Artificial Sequence
  Synthetic oligonucleotide
cggtataagaggagaacagtctctcaaatt

SEQ ID NO: 210097 - DNA, 30 bp, Artificial Sequence
  Synthetic oligonucleotide
agaatagattaaggagtcatagtagaaatt

SEQ ID NO: 210098 - DNA, 30 bp, Artificial Sequence
  Synthetic oligonucleotide
atagtcatgggtgatagagccgtagaaatt

SEQ ID NO: 210099 - DNA, 30 bp, Artificial Sequence
  Synthetic oligonucleotide
cccgctgtcacgaagagtacaaccgaaatt

SEQ ID NO: 210100 - DNA, 30 bp, Artificial Sequence
  Synthetic oligonucleotide
gggtcggagaacgggcgggaggtcgaaatt

SEQ ID NO: 210101 - DNA, 30 bp, Artificial Sequence
  Synthetic oligonucleotide
cagttgtcttcagaatatcggttcgaaatt

SEQ ID NO: 210102 - DNA, 30 bp, Artificial Sequence
  Synthetic oligonucleotide
cccggggttcactgaaataatttggaaatt

SEQ ID NO: 210103 - DNA, 30 bp, Artificial Sequence
  Synthetic oligonucleotide
aggggacacttatctctatcgagtgaaatt

SEQ ID NO: 210104 - DNA, 30 bp, Artificial Sequence
  Synthetic oligonucleotide
tagcgggctatccggtagtgaggtgaaatt

SEQ ID NO: 210105 - DNA, 30 bp, Artificial Sequence
  Synthetic oligonucleotide
tcatcggaccccgaacgcgcgtgataaatt

SEQ ID NO: 210106 - DNA, 30 bp, Artificial Sequence
  Synthetic oligonucleotide
gaacggtcgtgcgtaaaatgggagtaaatt

SEQ ID NO: 210107 - DNA, 30 bp, Artificial Sequence
  Synthetic oligonucleotide
gcgttgaattctggtggtccagcttaaatt

SEQ ID NO: 210108 - DNA, 30 bp, Artificial Sequence
  Synthetic oligonucleotide
tacatcgtagtctgcgttcaggcaacaatt

SEQ ID NO: 210109 - DNA, 30 bp, Artificial Sequence
  Synthetic oligonucleotide
cctacgctaaaggaggttatttgaacaatt

SEQ ID NO: 210110 - DNA, 30 bp, Artificial Sequence
  Synthetic oligonucleotide
caagcagttatatgcgtaacagacacaatt

SEQ ID NO: 210111 - DNA, 30 bp, Artificial Sequence
  Synthetic oligonucleotide
atacccttatcgtagcgtcgtgccacaatt

SEQ ID NO: 210112 - DNA, 30 bp, Artificial Sequence
  Synthetic oligonucleotide
tacgagacatgttcagcgcagtcgacaatt

SEQ ID NO: 210113 - DNA, 30 bp, Artificial Sequence
  Synthetic oligonucleotide
tctgagcctacaagctttataatgacaatt

SEQ ID NO: 210114 - DNA, 30 bp, Artificial Sequence
  Synthetic oligonucleotide
gcgatggggtcttagtagaagtttacaatt

SEQ ID NO: 210115 - DNA, 30 bp, Artificial Sequence
  Synthetic oligonucleotide
ggaaatgagggatgcgcttcggcgccaatt

SEQ ID NO: 210116 - DNA, 30 bp, Artificial Sequence
  Synthetic oligonucleotide
ctaagaaaagaataagcgtcttgtccaatt

SEQ ID NO: 210117 - DNA, 30 bp, Artificial Sequence
  Synthetic oligonucleotide
ggacgcatacgtaagggtagtccagcaatt

SEQ ID NO: 210118 - DNA, 30 bp, Artificial Sequence
  Synthetic oligonucleotide
attcttaacaggggtatcactagagcaatt

SEQ ID NO: 210119 - DNA, 30 bp, Artificial Sequence
  Synthetic oligonucleotide
taacgtctatctatcgccaggatagcaatt

SEQ ID NO: 210120 - DNA, 30 bp, Artificial Sequence
  Synthetic oligonucleotide
cggacagcgtcatactctctttacgcaatt

SEQ ID NO: 210121 - DNA, 30 bp, Artificial Sequence
  Synthetic oligonucleotide
gtggaagccttgtagctattctccgcaatt

SEQ ID NO: 210122 - DNA, 30 bp, Artificial Sequence
  Synthetic oligonucleotide
gccaatctcagttagccccaaactgcaatt

SEQ ID NO: 210123 - DNA, 30 bp, Artificial Sequence
  Synthetic oligonucleotide
gagattatcgggttcggactccgtgcaatt

SEQ ID NO: 210124 - DNA, 30 bp, Artificial Sequence
  Synthetic oligonucleotide
tcgcaagagtggttattggggacatcaatt

SEQ ID NO: 210125 - DNA, 30 bp, Artificial Sequence
  Synthetic oligonucleotide
tagcattgtaacaatcacgacgactcaatt

SEQ ID NO: 210126 - DNA, 30 bp, Artificial Sequence
  Synthetic oligonucleotide
aacactgcgcaattgaaaacgtgcagaatt

SEQ ID NO: 210127 - DNA, 30 bp, Artificial Sequence
  Synthetic oligonucleotide
tggatacgatcgcgcatagcagtgagaatt

SEQ ID NO: 210128 - DNA, 30 bp, Artificial Sequence
  Synthetic oligonucleotide
gctaagaagcactccgtgtgtgctagaatt

SEQ ID NO: 210129 - DNA, 30 bp, Artificial Sequence
  Synthetic oligonucleotide
tggggactacgtgatcttgtctttagaatt

SEQ ID NO: 210130 - DNA, 30 bp, Artificial Sequence
  Synthetic oligonucleotide
gataggaccaggtctgcgcacggacgaatt

SEQ ID NO: 210131 - DNA, 30 bp, Artificial Sequence
  Synthetic oligonucleotide
ctgccgagtgggggggacgtggcccgaatt

SEQ ID NO: 210132 - DNA, 30 bp, Artificial Sequence
  Synthetic oligonucleotide
ggttcaaacagtgagcttgggggccgaatt

SEQ ID NO: 210133 - DNA, 30 bp, Artificial Sequence
  Synthetic oligonucleotide
catagaataccacgggcgagactgcgaatt

SEQ ID NO: 210134 - DNA, 30 bp, Artificial Sequence
  Synthetic oligonucleotide
tccacatacgttcttactaacattcgaatt

SEQ ID NO: 210135 - DNA, 30 bp, Artificial Sequence
  Synthetic oligonucleotide
gggcacgcacgaacgtaacatggcggaatt

SEQ ID NO: 210136 - DNA, 30 bp, Artificial Sequence
  Synthetic oligonucleotide
ggtggggcgatgtcccagaaactcggaatt

SEQ ID NO: 210137 - DNA, 30 bp, Artificial Sequence
  Synthetic oligonucleotide
acacgtatagaagcctgtacacagggaatt

SEQ ID NO: 210138 - DNA, 30 bp, Artificial Sequence
  Synthetic oligonucleotide
aacagtatagtcaacaagcgaccaataatt

SEQ ID NO: 210139 - DNA, 30 bp, Artificial Sequence
  Synthetic oligonucleotide
aaccggtgaggataggccattgtgataatt

SEQ ID NO: 210140 - DNA, 30 bp, Artificial Sequence
  Synthetic oligonucleotide
tctagggagttcgccctgttataactaatt

SEQ ID NO: 210141 - DNA, 30 bp, Artificial Sequence
  Synthetic oligonucleotide
cgcattaggatttcatcgtcttagctaatt

SEQ ID NO: 210142 - DNA, 30 bp, Artificial Sequence
  Synthetic oligonucleotide
ctacatgttcacaacgcttatacagtaatt

SEQ ID NO: 210143 - DNA, 30 bp, Artificial Sequence
  Synthetic oligonucleotide
aggtttagaggatgacccccgaacgtaatt

SEQ ID NO: 210144 - DNA, 30 bp, Artificial Sequence
  Synthetic oligonucleotide
aacgtaatatacaccaatcgccacgtaatt

SEQ ID NO: 210145 - DNA, 30 bp, Artificial Sequence
  Synthetic oligonucleotide
tagtccaacggaacaagcgtgcaggtaatt

SEQ ID NO: 210146 - DNA, 30 bp, Artificial Sequence
  Synthetic oligonucleotide
gcatcttttcaaagggtgcaagatgtaatt

SEQ ID NO: 210147 - DNA, 30 bp, Artificial Sequence
  Synthetic oligonucleotide
cttggcgcccgttatgcaaacactgtaatt

SEQ ID NO: 210148 - DNA, 30 bp, Artificial Sequence
  Synthetic oligonucleotide
agttcgaccgctcattctgcttcattaatt

SEQ ID NO: 210149 - DNA, 30 bp, Artificial Sequence
  Synthetic oligonucleotide
agtgaatccgatacgaggtaagaaaacatt

SEQ ID NO: 210150 - DNA, 30 bp, Artificial Sequence
  Synthetic oligonucleotide
aaaaacgggtccgtggtcgaaggaaacatt

SEQ ID NO: 210151 - DNA, 30 bp, Artificial Sequence
  Synthetic oligonucleotide
cagatattaaccgcctatctcgtaaacatt

SEQ ID NO: 210152 - DNA, 30 bp, Artificial Sequence
  Synthetic oligonucleotide
gcaagaagacacaacataaaggtaaacatt

SEQ ID NO: 210153 - DNA, 30 bp, Artificial Sequence
  Synthetic oligonucleotide
caacctgccgaactcaacggtcggaacatt

SEQ ID NO: 210154 - DNA, 30 bp, Artificial Sequence
  Synthetic oligonucleotide
tggagtcacccggggcaacataaacacatt

SEQ ID NO: 210155 - DNA, 30 bp, Artificial Sequence
  Synthetic oligonucleotide
tctgtatgcatattaaagggactacacatt

SEQ ID NO: 210156 - DNA, 30 bp, Artificial Sequence
  Synthetic oligonucleotide
ccatatcccggtaactataagaaccacatt

SEQ ID NO: 210157 - DNA, 30 bp, Artificial Sequence
  Synthetic oligonucleotide
ctaaatggatcactagtatctacccacatt

SEQ ID NO: 210158 - DNA, 30 bp, Artificial Sequence
  Synthetic oligonucleotide
cttagctgattaaaatgatcactgcacatt

SEQ ID NO: 210159 - DNA, 30 bp, Artificial Sequence
  Synthetic oligonucleotide
tccatgtaaaggagatccctgagagacatt

SEQ ID NO: 210160 - DNA, 30 bp, Artificial Sequence
  Synthetic oligonucleotide
ggctattacttggaatgcgattaatacatt

SEQ ID NO: 210161 - DNA, 30 bp, Artificial Sequence
  Synthetic oligonucleotide
cgagccaactgcccgtatcagtcatacatt

SEQ ID NO: 210162 - DNA, 30 bp, Artificial Sequence
  Synthetic oligonucleotide
cccagtcgcaagacaataaggatctacatt

SEQ ID NO: 210163 - DNA, 30 bp, Artificial Sequence
  Synthetic oligonucleotide
cctggtcacagcatcctatacgaacccatt

SEQ ID NO: 210164 - DNA, 30 bp, Artificial Sequence
  Synthetic oligonucleotide
atccgagccggagacgttaaaaggcccatt

SEQ ID NO: 210165 - DNA, 30 bp, Artificial Sequence
  Synthetic oligonucleotide
acgtttcggcgatggggcggccgagccatt

SEQ ID NO: 210166 - DNA, 30 bp, Artificial Sequence
  Synthetic oligonucleotide
gtgaggagggaattctaggcactagccatt

SEQ ID NO: 210167 - DNA, 30 bp, Artificial Sequence
  Synthetic oligonucleotide
agccggcagatatttgtatcagcggccatt

SEQ ID NO: 210168 - DNA, 30 bp, Artificial Sequence
  Synthetic oligonucleotide
gtcgatgagtatagatactaatgctccatt

SEQ ID NO: 210169 - DNA, 30 bp, Artificial Sequence
  Synthetic oligonucleotide
tactcaacatgccaggggtatccgtccatt

SEQ ID NO: 210170 - DNA, 30 bp, Artificial Sequence
  Synthetic oligonucleotide
ccggccctaatttaaagcctgcattccatt

SEQ ID NO: 210171 - DNA, 30 bp, Artificial Sequence
  Synthetic oligonucleotide
ggcgcaaaaacttccaaacaatattccatt

SEQ ID NO: 210172 - DNA, 30 bp, Artificial Sequence
  Synthetic oligonucleotide
ctcaggtgctactggccctaatggagcatt

SEQ ID NO: 210173 - DNA, 30 bp, Artificial Sequence
  Synthetic oligonucleotide
tgcaccacaccatgtgcccgacttagcatt

SEQ ID NO: 210174 - DNA, 30 bp, Artificial Sequence
  Synthetic oligonucleotide
actacatgagttcatcgttgccgacgcatt

SEQ ID NO: 210175 - DNA, 30 bp, Artificial Sequence
  Synthetic oligonucleotide
taataagcgaccagctaggggaggcgcatt

SEQ ID NO: 210176 - DNA, 30 bp, Artificial Sequence
  Synthetic oligonucleotide
gaagaatgtagggagagtcatttgcgcatt

SEQ ID NO: 210177 - DNA, 30 bp, Artificial Sequence
  Synthetic oligonucleotide
ggatgaatcatctgcgtcagctatcgcatt

SEQ ID NO: 210178 - DNA, 30 bp, Artificial Sequence
  Synthetic oligonucleotide
gctagagctgaggaaaggggacctcgcatt

SEQ ID NO: 210179 - DNA, 30 bp, Artificial Sequence
  Synthetic oligonucleotide
tggctgtgttgaaaatcttcgaaaggcatt

SEQ ID NO: 210180 - DNA, 30 bp, Artificial Sequence
  Synthetic oligonucleotide
ccgagttgggcacaatcttaatacggcatt

SEQ ID NO: 210181 - DNA, 30 bp, Artificial Sequence
  Synthetic oligonucleotide
tagggtagaatccagcgcaaggatggcatt

SEQ ID NO: 210182 - DNA, 30 bp, Artificial Sequence
  Synthetic oligonucleotide
acttaaaaccccaccgccaggagtggcatt

SEQ ID NO: 210183 - DNA, 30 bp, Artificial Sequence
  Synthetic oligonucleotide
gataacgttacgtacgacggcagatgcatt

SEQ ID NO: 210184 - DNA, 30 bp, Artificial Sequence
  Synthetic oligonucleotide
tctcaggcctcagacgtcaatcgatgcatt

SEQ ID NO: 210185 - DNA, 30 bp, Artificial Sequence
  Synthetic oligonucleotide
cgaataattctgtcgaacaaaaccatcatt

SEQ ID NO: 210186 - DNA, 30 bp, Artificial Sequence
  Synthetic oligonucleotide
gagcagctcctcggcgaatggaccatcatt

SEQ ID NO: 210187 - DNA, 30 bp, Artificial Sequence
  Synthetic oligonucleotide
ctcggcgtgtgatagctagtaagtatcatt

SEQ ID NO: 210188 - DNA, 30 bp, Artificial Sequence
  Synthetic oligonucleotide
ggccttcaaggcgagaggcaaggtatcatt

SEQ ID NO: 210189 - DNA, 30 bp, Artificial Sequence
  Synthetic oligonucleotide
gtcggaaacgtcttaagtagagttatcatt

SEQ ID NO: 210190 - DNA, 30 bp, Artificial Sequence
  Synthetic oligonucleotide
cgcgtaggcagccggtgagtagttatcatt

SEQ ID NO: 210191 - DNA, 30 bp, Artificial Sequence
  Synthetic oligonucleotide
agtgtccagaaagctcacggaatcctcatt

SEQ ID NO: 210192 - DNA, 30 bp, Artificial Sequence
  Synthetic oligonucleotide
gtattgatcatggggcgcactctcgtcatt

SEQ ID NO: 210193 - DNA, 30 bp, Artificial Sequence
  Synthetic oligonucleotide
caggtctagatggcgctttgtcaggtcatt

SEQ ID NO: 210194 - DNA, 30 bp, Artificial Sequence
  Synthetic oligonucleotide
cctgcatcccacacgaaaaactcggtcatt

SEQ ID NO: 210195 - DNA, 30 bp, Artificial Sequence
  Synthetic oligonucleotide
ggggtcgtgcaaacgcaacacagtgtcatt

SEQ ID NO: 210196 - DNA, 30 bp, Artificial Sequence
  Synthetic oligonucleotide
ctaggaatatattcaatttgttttgtcatt

SEQ ID NO: 210197 - DNA, 30 bp, Artificial Sequence
  Synthetic oligonucleotide
aaggatagcatcataaagaacgcattcatt

SEQ ID NO: 210198 - DNA, 30 bp, Artificial Sequence
  Synthetic oligonucleotide
aggacactaaggtccctcactatcttcatt

SEQ ID NO: 210199 - DNA, 30 bp, Artificial Sequence
  Synthetic oligonucleotide
ctaacatcacttacctgactcataaagatt

SEQ ID NO: 210200 - DNA, 30 bp, Artificial Sequence
  Synthetic oligonucleotide
gggatacatacatacgtcggagacaagatt

SEQ ID NO: 210201 - DNA, 30 bp, Artificial Sequence
  Synthetic oligonucleotide
atcgtatgtccagagcgcagtgccaagatt

SEQ ID NO: 210202 - DNA, 30 bp, Artificial Sequence
  Synthetic oligonucleotide
tatacaccctgttctaaaaaacggaagatt

SEQ ID NO: 210203 - DNA, 30 bp, Artificial Sequence
  Synthetic oligonucleotide
taaaaccggaccacactgcttcggaagatt

SEQ ID NO: 210204 - DNA, 30 bp, Artificial Sequence
  Synthetic oligonucleotide
acgtgcctggaactgcaaataatacagatt

SEQ ID NO: 210205 - DNA, 30 bp, Artificial Sequence
  Synthetic oligonucleotide
aaggtagaaccacgtaggcgtattcagatt

SEQ ID NO: 210206 - DNA, 30 bp, Artificial Sequence
  Synthetic oligonucleotide
ggaatgatatgaacctagtatgttcagatt

SEQ ID NO: 210207 - DNA, 30 bp, Artificial Sequence
  Synthetic oligonucleotide
cattagacgacgcgaagcggacaagagatt

SEQ ID NO: 210208 - DNA, 30 bp, Artificial Sequence
  Synthetic oligonucleotide
tgaaaactctacacagcaaagaacgagatt

SEQ ID NO: 210209 - DNA, 30 bp, Artificial Sequence
  Synthetic oligonucleotide
taacgtgtcgtaggcgcccgattggagatt

SEQ ID NO: 210210 - DNA, 30 bp, Artificial Sequence
  Synthetic oligonucleotide
tatcggcagggagacgtagtttttgagatt

SEQ ID NO: 210211 - DNA, 30 bp, Artificial Sequence
  Synthetic oligonucleotide
aagcagccgctgtacacaatacattagatt

SEQ ID NO: 210212 - DNA, 30 bp, Artificial Sequence
  Synthetic oligonucleotide
tagaaactcaacccgtatcgggcttagatt

SEQ ID NO: 210213 - DNA, 30 bp, Artificial Sequence
  Synthetic oligonucleotide
tgagaactcaaacaggttggttcttagatt

SEQ ID NO: 210214 - DNA, 30 bp, Artificial Sequence
  Synthetic oligonucleotide
gcgttcaatatccccgggctcaaaacgatt

SEQ ID NO: 210215 - DNA, 30 bp, Artificial Sequence
  Synthetic oligonucleotide
ggtatcgcagagcgatccacgaggacgatt

SEQ ID NO: 210216 - DNA, 30 bp, Artificial Sequence
  Synthetic oligonucleotide
tgaaaagagatccaggctgtcgtgacgatt

SEQ ID NO: 210217 - DNA, 30 bp, Artificial Sequence
  Synthetic oligonucleotide
gctacagtactctgaatacgctgtacgatt

SEQ ID NO: 210218 - DNA, 29 bp, Artificial Sequence
  Synthetic oligonucleotide
tcattatatatcctgcattagtaccgatt

SEQ ID NO: 210219 - DNA, 30 bp, Artificial Sequence
  Synthetic oligonucleotide
gatactacggggatggttcatttgccgatt

SEQ ID NO: 210220 - DNA, 30 bp, Artificial Sequence
  Synthetic oligonucleotide
gaggaaacagtgaaaccccgtggagcgatt

SEQ ID NO: 210221 - DNA, 30 bp, Artificial Sequence
  Synthetic oligonucleotide
gggagcatacgctccgtagtctatgcgatt

SEQ ID NO: 210222 - DNA, 30 bp, Artificial Sequence
  Synthetic oligonucleotide
acggcttgggcaaggccgccgtcatcgatt

SEQ ID NO: 210223 - DNA, 30 bp, Artificial Sequence
  Synthetic oligonucleotide
acactcgtctatgtgaagtgcttcaggatt

SEQ ID NO: 210224 - DNA, 30 bp, Artificial Sequence
  Synthetic oligonucleotide
gtggatatcagaatgtattgacggaggatt

SEQ ID NO: 210225 - DNA, 30 bp, Artificial Sequence
  Synthetic oligonucleotide
gtggcgggttaggagatgggggataggatt

SEQ ID NO: 210226 - DNA, 30 bp, Artificial Sequence
  Synthetic oligonucleotide
ttatgatctgcgagagtaaacctacggatt

SEQ ID NO: 210227 - DNA, 30 bp, Artificial Sequence
  Synthetic oligonucleotide
actggtgacccgtcataacgctaccggatt

SEQ ID NO: 210228 - DNA, 30 bp, Artificial Sequence
  Synthetic oligonucleotide
tacagtagggaagaaattgcttaccggatt

SEQ ID NO: 210229 - DNA, 30 bp, Artificial Sequence
  Synthetic oligonucleotide
aggtcatctaattcaatgtgttgccggatt

SEQ ID NO: 210230 - DNA, 30 bp, Artificial Sequence
  Synthetic oligonucleotide
tcggtagtaacagcccgtgaaaagcggatt

SEQ ID NO: 210231 - DNA, 30 bp, Artificial Sequence
  Synthetic oligonucleotide
aatggagacgcagagtgagcgacagggatt

SEQ ID NO: 210232 - DNA, 30 bp, Artificial Sequence
  Synthetic oligonucleotide
tcgaaggagtcctgaaaacctctagggatt

SEQ ID NO: 210233 - DNA, 30 bp, Artificial Sequence
  Synthetic oligonucleotide
cttacgattatggatcaagatgtagggatt

SEQ ID NO: 210234 - DNA, 30 bp, Artificial Sequence
  Synthetic oligonucleotide
ggggcaatggccgagagagtctgggggatt

SEQ ID NO: 210235 - DNA, 30 bp, Artificial Sequence
  Synthetic oligonucleotide
aatggccaacaaatgcggcctgtggggatt

SEQ ID NO: 210236 - DNA, 30 bp, Artificial Sequence
  Synthetic oligonucleotide
atctattaagctcacgtattggctgggatt

SEQ ID NO: 210237 - DNA, 30 bp, Artificial Sequence
  Synthetic oligonucleotide
agggttctctgagcttagacgtgtgggatt

SEQ ID NO: 210238 - DNA, 30 bp, Artificial Sequence
  Synthetic oligonucleotide
acgtacaggcgcctgagattgtttgggatt

SEQ ID NO: 210239 - DNA, 30 bp, Artificial Sequence
  Synthetic oligonucleotide
cgggttatgtgtaagctactttaatggatt

SEQ ID NO: 210240 - DNA, 30 bp, Artificial Sequence
  Synthetic oligonucleotide
gagcttggcccatgtgagaactcatggatt

SEQ ID NO: 210241 - DNA, 30 bp, Artificial Sequence
  Synthetic oligonucleotide
aatgtcatgcgtggaaagccttcctggatt

SEQ ID NO: 210242 - DNA, 30 bp, Artificial Sequence
  Synthetic oligonucleotide
aacgtctcggacgagttttaagattggatt

SEQ ID NO: 210243 - DNA, 30 bp, Artificial Sequence
  Synthetic oligonucleotide
agaataggcatcttccggctcgaaatgatt

SEQ ID NO: 210244 - DNA, 30 bp, Artificial Sequence
  Synthetic oligonucleotide
cctcgagcatcagaaagctacgcaatgatt

SEQ ID NO: 210245 - DNA, 30 bp, Artificial Sequence
  Synthetic oligonucleotide
aggaatcgtacccttacggggtcaatgatt

SEQ ID NO: 210246 - DNA, 30 bp, Artificial Sequence
  Synthetic oligonucleotide
ggctatatcgacacgaccaagcagatgatt

SEQ ID NO: 210247 - DNA, 30 bp, Artificial Sequence
  Synthetic oligonucleotide
tttgaggattggaaaagattattgatgatt

SEQ ID NO: 210248 - DNA, 30 bp, Artificial Sequence
  Synthetic oligonucleotide
cctcaattaactcgatatgccacactgatt

SEQ ID NO: 210249 - DNA, 30 bp, Artificial Sequence
  Synthetic oligonucleotide
tagtggatcgaggacaagttgggactgatt

SEQ ID NO: 210250 - DNA, 30 bp, Artificial Sequence
  Synthetic oligonucleotide
agcggcaggagcagtggcaggttgctgatt

SEQ ID NO: 210251 - DNA, 30 bp, Artificial Sequence
  Synthetic oligonucleotide
atgcacccgatgttaataatttaagtgatt

SEQ ID NO: 210252 - DNA, 30 bp, Artificial Sequence
  Synthetic oligonucleotide
tactaaggggctctgatataccgagtgatt

SEQ ID NO: 210253 - DNA, 30 bp, Artificial Sequence
  Synthetic oligonucleotide
atcgcagcagtggcagcaatagtcgtgatt

SEQ ID NO: 210254 - DNA, 30 bp, Artificial Sequence
  Synthetic oligonucleotide
ctggtcagacggctcgacagtagggtgatt

SEQ ID NO: 210255 - DNA, 30 bp, Artificial Sequence
  Synthetic oligonucleotide
caggcaaagcatgggtatggttgggtgatt

SEQ ID NO: 210256 - DNA, 30 bp, Artificial Sequence
  Synthetic oligonucleotide
agccggtggaagatccgaaggactgtgatt

SEQ ID NO: 210257 - DNA, 30 bp, Artificial Sequence
  Synthetic oligonucleotide
atgagagaccgaactacatagtgtgtgatt

SEQ ID NO: 210258 - DNA, 30 bp, Artificial Sequence
  Synthetic oligonucleotide
aatttggtgggtaagatcaatgtcttgatt

SEQ ID NO: 210259 - DNA, 30 bp, Artificial Sequence
  Synthetic oligonucleotide
tttatattcattccgcccctcttgttgatt

SEQ ID NO: 210260 - DNA, 30 bp, Artificial Sequence
  Synthetic oligonucleotide
cggcgaaatcgcgcagtgcactcaaatatt

SEQ ID NO: 210261 - DNA, 30 bp, Artificial Sequence
  Synthetic oligonucleotide
ggcgcaaagggcttaacgttccagaatatt

SEQ ID NO: 210262 - DNA, 30 bp, Artificial Sequence
  Synthetic oligonucleotide
tatccaacaggggagaagccaaggaatatt

SEQ ID NO: 210263 - DNA, 30 bp, Artificial Sequence
  Synthetic oligonucleotide
gccatctgatcaaggtcgcgcaggaatatt

SEQ ID NO: 210264 - DNA, 30 bp, Artificial Sequence
  Synthetic oligonucleotide
acagaatcatactgacgtatgatgaatatt

SEQ ID NO: 210265 - DNA, 30 bp, Artificial Sequence
  Synthetic oligonucleotide
gttgaacgactaccgggacatcaacatatt

SEQ ID NO: 210266 - DNA, 30 bp, Artificial Sequence
  Synthetic oligonucleotide
acctcagggatttggacggcacgacatatt

SEQ ID NO: 210267 - DNA, 30 bp, Artificial Sequence
  Synthetic oligonucleotide
tagcgcagccacaaccaatagaggcatatt

SEQ ID NO: 210268 - DNA, 30 bp, Artificial Sequence
  Synthetic oligonucleotide
ggggaacacgtaactttaggcatgcatatt

SEQ ID NO: 210269 - DNA, 30 bp, Artificial Sequence
  Synthetic oligonucleotide
gccttggtacgacttggtccgactcatatt

SEQ ID NO: 210270 - DNA, 30 bp, Artificial Sequence
  Synthetic oligonucleotide
tattctgcactgcggaaatcttacgatatt

SEQ ID NO: 210271 - DNA, 30 bp, Artificial Sequence
  Synthetic oligonucleotide
gtggccacataccatagccatggcgatatt

SEQ ID NO: 210272 - DNA, 30 bp, Artificial Sequence
  Synthetic oligonucleotide
ccgcgtggcctgaaaagtcggtgggatatt

SEQ ID NO: 210273 - DNA, 30 bp, Artificial Sequence
  Synthetic oligonucleotide
aacaacgccagtctgacgcggactgatatt

SEQ ID NO: 210274 - DNA, 30 bp, Artificial Sequence
  Synthetic oligonucleotide
agactcctaaatgccgtttactagtatatt

SEQ ID NO: 210275 - DNA, 30 bp, Artificial Sequence
  Synthetic oligonucleotide
tatgagagaacactccccgacggaactatt

SEQ ID NO: 210276 - DNA, 30 bp, Artificial Sequence
  Synthetic oligonucleotide
tatatagcatggaaagaatggagcactatt

SEQ ID NO: 210277 - DNA, 30 bp, Artificial Sequence
  Synthetic oligonucleotide
ccagagagtcagggggagaccccacctatt

SEQ ID NO: 210278 - DNA, 30 bp, Artificial Sequence
  Synthetic oligonucleotide
ccgcagagaggaccatccgccaatcctatt

SEQ ID NO: 210279 - DNA, 30 bp, Artificial Sequence
  Synthetic oligonucleotide
acggaacgggttaactgcagattagctatt

SEQ ID NO: 210280 - DNA, 30 bp, Artificial Sequence
  Synthetic oligonucleotide
gtccgcgtaagaatttcaaatgtggctatt

SEQ ID NO: 210281 - DNA, 30 bp, Artificial Sequence
  Synthetic oligonucleotide
gagaggtatgttctaacgcctgattctatt

SEQ ID NO: 210282 - DNA, 30 bp, Artificial Sequence
  Synthetic oligonucleotide
gcttcagatggcacaaacctacaaagtatt

SEQ ID NO: 210283 - DNA, 30 bp, Artificial Sequence
  Synthetic oligonucleotide
agaacactctaatggcgtacggtaagtatt

SEQ ID NO: 210284 - DNA, 30 bp, Artificial Sequence
  Synthetic oligonucleotide
tcttgttaaggtgagtgtacctcgagtatt

SEQ ID NO: 210285 - DNA, 30 bp, Artificial Sequence
  Synthetic oligonucleotide
gaaggccatagcagttcgaatgggagtatt

SEQ ID NO: 210286 - DNA, 30 bp, Artificial Sequence
  Synthetic oligonucleotide
ttagtcactggaacggaagccccacgtatt

SEQ ID NO: 210287 - DNA, 30 bp, Artificial Sequence
  Synthetic oligonucleotide
cgattctttacacccagtcagccacgtatt

SEQ ID NO: 210288 - DNA, 30 bp, Artificial Sequence
  Synthetic oligonucleotide
tcgggataatatagaggtctcgaccgtatt

SEQ ID NO: 210289 - DNA, 30 bp, Artificial Sequence
  Synthetic oligonucleotide
taacaatctccatttcaccggactcgtatt

SEQ ID NO: 210290 - DNA, 30 bp, Artificial Sequence
  Synthetic oligonucleotide
ttgatatcgtttgtagaaaggtgtcgtatt

SEQ ID NO: 210291 - DNA, 30 bp, Artificial Sequence
  Synthetic oligonucleotide
aaccgtaggcgaggtcaaaggtacggtatt

SEQ ID NO: 210292 - DNA, 30 bp, Artificial Sequence
  Synthetic oligonucleotide
ccacagatcacatcatttccgtgcggtatt

SEQ ID NO: 210293 - DNA, 30 bp, Artificial Sequence
  Synthetic oligonucleotide
gggacgtttacctagtctacatgatgtatt

SEQ ID NO: 210294 - DNA, 30 bp, Artificial Sequence
  Synthetic oligonucleotide
agcaaatcaagactgacacgttgctgtatt

SEQ ID NO: 210295 - DNA, 30 bp, Artificial Sequence
  Synthetic oligonucleotide
cgaaaaatgttagtaatgtattggtgtatt

SEQ ID NO: 210296 - DNA, 30 bp, Artificial Sequence
  Synthetic oligonucleotide
acacgccagacccgataataataaattatt

SEQ ID NO: 210297 - DNA, 30 bp, Artificial Sequence
  Synthetic oligonucleotide
aacgtggggtctgcaatggtacgcattatt

SEQ ID NO: 210298 - DNA, 30 bp, Artificial Sequence
  Synthetic oligonucleotide
cacacaataaagatgcttccactcattatt

SEQ ID NO: 210299 - DNA, 30 bp, Artificial Sequence
  Synthetic oligonucleotide
gcgagaagagtgatgataaggaagattatt

SEQ ID NO: 210300 - DNA, 30 bp, Artificial Sequence
  Synthetic oligonucleotide
aaagtggcaacggctaaatcacggattatt

SEQ ID NO: 210301 - DNA, 30 bp, Artificial Sequence
  Synthetic oligonucleotide
cataacaccagtgacatcggaaaacttatt

SEQ ID NO: 210302 - DNA, 30 bp, Artificial Sequence
  Synthetic oligonucleotide
gggtcatcgggaacaaacggtcaacttatt

SEQ ID NO: 210303 - DNA, 30 bp, Artificial Sequence
  Synthetic oligonucleotide
ggtcaggctcatgcggaggtaatccttatt

SEQ ID NO: 210304 - DNA, 30 bp, Artificial Sequence
  Synthetic oligonucleotide
aggtgatttacttgttgccactcgcttatt

SEQ ID NO: 210305 - DNA, 30 bp, Artificial Sequence
  Synthetic oligonucleotide
tagaaattccaaggacagtcggccgttatt

SEQ ID NO: 210306 - DNA, 30 bp, Artificial Sequence
  Synthetic oligonucleotide
tctccgagttcaatggataaagaggttatt

SEQ ID NO: 210307 - DNA, 31 bp, Artificial Sequence
  Synthetic oligonucleotide
agcagcggccttggactggtagcactttatt

SEQ ID NO: 210308 - DNA, 30 bp, Artificial Sequence
  Synthetic oligonucleotide
ctgggcatgaagatttgaggcaattttatt

SEQ ID NO: 210309 - DNA, 30 bp, Artificial Sequence
  Synthetic oligonucleotide
aatgctcgaaacagggcaaattagaaactt

SEQ ID NO: 210310 - DNA, 30 bp, Artificial Sequence
  Synthetic oligonucleotide
agctggcatgcttgaatgtggaaacaactt

SEQ ID NO: 210311 - DNA, 30 bp, Artificial Sequence
  Synthetic oligonucleotide
gatgagggaatctgcggtagaacacaactt

SEQ ID NO: 210312 - DNA, 30 bp, Artificial Sequence
  Synthetic oligonucleotide
ggcacatcccagagcgggttatctcaactt

SEQ ID NO: 210313 - DNA, 30 bp, Artificial Sequence
  Synthetic oligonucleotide
cgagaacgtatgtcatgctgggttcaactt

SEQ ID NO: 210314 - DNA, 30 bp, Artificial Sequence
  Synthetic oligonucleotide
aaaaccggagatatttagacacatgaactt

SEQ ID NO: 210315 - DNA, 30 bp, Artificial Sequence
  Synthetic oligonucleotide
aagacggtaagcttaatcaggtatgaactt

SEQ ID NO: 210316 - DNA, 30 bp, Artificial Sequence
  Synthetic oligonucleotide
ccgcaactaatccacgaatatcaaacactt

SEQ ID NO: 210317 - DNA, 30 bp, Artificial Sequence
  Synthetic oligonucleotide
acacaagcgtcctgctggcctccaacactt

SEQ ID NO: 210318 - DNA, 30 bp, Artificial Sequence
  Synthetic oligonucleotide
atacatggcgggaagaattggctcacactt

SEQ ID NO: 210319 - DNA, 30 bp, Artificial Sequence
  Synthetic oligonucleotide
acaagacacttcgtttcgcgatagacactt

SEQ ID NO: 210320 - DNA, 30 bp, Artificial Sequence
  Synthetic oligonucleotide
ggaccaccaactgcaatctgaatgacactt

SEQ ID NO: 210321 - DNA, 30 bp, Artificial Sequence
  Synthetic oligonucleotide
cccgcgtgaaaggcaaagacgatgacactt

SEQ ID NO: 210322 - DNA, 30 bp, Artificial Sequence
  Synthetic oligonucleotide
tctgcaagtcagctagagcgcactacactt

SEQ ID NO: 210323 - DNA, 30 bp, Artificial Sequence
  Synthetic oligonucleotide
tgagaagccacttatagctcatccccactt

SEQ ID NO: 210324 - DNA, 30 bp, Artificial Sequence
  Synthetic oligonucleotide
gcgtggataaattaaaggtatagagcactt

SEQ ID NO: 210325 - DNA, 30 bp, Artificial Sequence
  Synthetic oligonucleotide
aagtggaggttaacgccacgttgagcactt

SEQ ID NO: 210326 - DNA, 30 bp, Artificial Sequence
  Synthetic oligonucleotide
tgggcggggtctcaattctagaacgcactt

SEQ ID NO: 210327 - DNA, 30 bp, Artificial Sequence
  Synthetic oligonucleotide
gacaactgacttggccgtgggaccgcactt

SEQ ID NO: 210328 - DNA, 30 bp, Artificial Sequence
  Synthetic oligonucleotide
tcatgtttcggttacgacactttggcactt

SEQ ID NO: 210329 - DNA, 30 bp, Artificial Sequence
  Synthetic oligonucleotide
acgtacgtactgtcagcccagccatcactt

SEQ ID NO: 210330 - DNA, 30 bp, Artificial Sequence
  Synthetic oligonucleotide
gggcagtagggaaccattaccaagtcactt

SEQ ID NO: 210331 - DNA, 30 bp, Artificial Sequence
  Synthetic oligonucleotide
gtagttggacacaacagtccccattcactt

SEQ ID NO: 210332 - DNA, 30 bp, Artificial Sequence
  Synthetic oligonucleotide
atcttcgagccaccgagcatgggttcactt

SEQ ID NO: 210333 - DNA, 30 bp, Artificial Sequence
  Synthetic oligonucleotide
gtctactgatcgaagggaattgtcagactt

SEQ ID NO: 210334 - DNA, 30 bp, Artificial Sequence
  Synthetic oligonucleotide
cgactaaccggcctcctcgttaagagactt

SEQ ID NO: 210335 - DNA, 30 bp, Artificial Sequence
  Synthetic oligonucleotide
acaagagtggcttaaaggacagagagactt

SEQ ID NO: 210336 - DNA, 30 bp, Artificial Sequence
  Synthetic oligonucleotide
cgtaaaactgtgtgttaaagttgccgactt

SEQ ID NO: 210337 - DNA, 30 bp, Artificial Sequence
  Synthetic oligonucleotide
tgacaaaaagacaatttactactccgactt

SEQ ID NO: 210338 - DNA, 30 bp, Artificial Sequence
  Synthetic oligonucleotide
cgccagggaactcgatatacaatgcgactt

SEQ ID NO: 210339 - DNA, 30 bp, Artificial Sequence
  Synthetic oligonucleotide
cctgatacggacacgggtcatagtcgactt

SEQ ID NO: 210340 - DNA, 30 bp, Artificial Sequence
  Synthetic oligonucleotide
gatacctataaaactttagtccaatgactt

SEQ ID NO: 210341 - DNA, 30 bp, Artificial Sequence
  Synthetic oligonucleotide
tgcgacggggaaaacgggtggcaatgactt

SEQ ID NO: 210342 - DNA, 30 bp, Artificial Sequence
  Synthetic oligonucleotide
ggggaccgtaagcgctataacagctgactt

SEQ ID NO: 210343 - DNA, 30 bp, Artificial Sequence
  Synthetic oligonucleotide
gtagttcgtataaagtgaaaggtctgactt

SEQ ID NO: 210344 - DNA, 29 bp, Artificial Sequence
  Synthetic oligonucleotide
atggagcgtaatgttgtgccccgtgactt

SEQ ID NO: 210345 - DNA, 30 bp, Artificial Sequence
  Synthetic oligonucleotide
agtacacaacatatgctaggagggtgactt

SEQ ID NO: 210346 - DNA, 30 bp, Artificial Sequence
  Synthetic oligonucleotide
tcgtgttctcactctggctgaaattgactt

SEQ ID NO: 210347 - DNA, 30 bp, Artificial Sequence
  Synthetic oligonucleotide
tgtcttgggccaaatgcattcgggatactt

SEQ ID NO: 210348 - DNA, 30 bp, Artificial Sequence
  Synthetic oligonucleotide
aactggctgggaagttatgtaatgatactt

SEQ ID NO: 210349 - DNA, 30 bp, Artificial Sequence
  Synthetic oligonucleotide
tgttcattaaccgactgtttggaactactt

SEQ ID NO: 210350 - DNA, 30 bp, Artificial Sequence
  Synthetic oligonucleotide
cctataatacatcccaaccgaggactactt

SEQ ID NO: 210351 - DNA, 30 bp, Artificial Sequence
  Synthetic oligonucleotide
gaaacgtgaataggaaatagttccctactt

SEQ ID NO: 210352 - DNA, 30 bp, Artificial Sequence
  Synthetic oligonucleotide
gcggtccgttggatagtagggcgtctactt

SEQ ID NO: 210353 - DNA, 30 bp, Artificial Sequence
  Synthetic oligonucleotide
agtaccagtctactcttaatgcaagtactt

SEQ ID NO: 210354 - DNA, 30 bp, Artificial Sequence
  Synthetic oligonucleotide
aagccagggcaaacctgaagggtcgtactt

SEQ ID NO: 210355 - DNA, 30 bp, Artificial Sequence
  Synthetic oligonucleotide
cattccaaatggtatttagttattgtactt

SEQ ID NO: 210356 - DNA, 30 bp, Artificial Sequence
  Synthetic oligonucleotide
attatgctcgtgacgtgtcatgttgtactt

SEQ ID NO: 210357 - DNA, 30 bp, Artificial Sequence
  Synthetic oligonucleotide
gctaagagggtacactgaacttaattactt

SEQ ID NO: 210358 - DNA, 30 bp, Artificial Sequence
  Synthetic oligonucleotide
gggggcccagtaaacccgggtgcattactt

SEQ ID NO: 210359 - DNA, 30 bp, Artificial Sequence
  Synthetic oligonucleotide
tcgggtccgacataaaccctgcacttactt

SEQ ID NO: 210360 - DNA, 30 bp, Artificial Sequence
  Synthetic oligonucleotide
gtgcatatccccctagatgtaaatttactt

SEQ ID NO: 210361 - DNA, 30 bp, Artificial Sequence
  Synthetic oligonucleotide
gtaatactagcgcaggataccctcaacctt

SEQ ID NO: 210362 - DNA, 30 bp, Artificial Sequence
  Synthetic oligonucleotide
gggttatgatgagtaactaatctgaacctt

SEQ ID NO: 210363 - DNA, 30 bp, Artificial Sequence
  Synthetic oligonucleotide
agtattgatgtcacctcacattaacacctt

SEQ ID NO: 210364 - DNA, 30 bp, Artificial Sequence
  Synthetic oligonucleotide
ttgaggcattatcttgtaacaaaccacctt

SEQ ID NO: 210365 - DNA, 30 bp, Artificial Sequence
  Synthetic oligonucleotide
ttgtagagagtaagattagacgaccacctt

SEQ ID NO: 210366 - DNA, 30 bp, Artificial Sequence
  Synthetic oligonucleotide
agcaccggataatgcgcataaagtcacctt

SEQ ID NO: 210367 - DNA, 29 bp, Artificial Sequence
  Synthetic oligonucleotide
accgtggcggagtagctacgggtcacctt

SEQ ID NO: 210368 - DNA, 30 bp, Artificial Sequence
  Synthetic oligonucleotide
ttgattgaggttgagccctctgccgacctt

SEQ ID NO: 210369 - DNA, 30 bp, Artificial Sequence
  Synthetic oligonucleotide
aagagacggattgataaggccctggacctt

SEQ ID NO: 210370 - DNA, 30 bp, Artificial Sequence
  Synthetic oligonucleotide
tcagggggggggccgtagccagcatacctt

SEQ ID NO: 210371 - DNA, 30 bp, Artificial Sequence
  Synthetic oligonucleotide
tcagtgacattatcggttagcctgtacctt

SEQ ID NO: 210372 - DNA, 30 bp, Artificial Sequence
  Synthetic oligonucleotide
gcggagagatccgggtcccgggattacctt

SEQ ID NO: 210373 - DNA, 30 bp, Artificial Sequence
  Synthetic oligonucleotide
acagcaggtgtacgtcgagccttcaccctt

SEQ ID NO: 210374 - DNA, 30 bp, Artificial Sequence
  Synthetic oligonucleotide
cgttgcagcgaatagagctacaaacccctt

SEQ ID NO: 210375 - DNA, 30 bp, Artificial Sequence
  Synthetic oligonucleotide
cgcaacgcggagatgacactacaccccctt

SEQ ID NO: 210376 - DNA, 30 bp, Artificial Sequence
  Synthetic oligonucleotide
tactgtatgcgtcatccttagacccccctt

SEQ ID NO: 210377 - DNA, 30 bp, Artificial Sequence
  Synthetic oligonucleotide
agagcaccctcgctgtggaacaagcccctt

SEQ ID NO: 210378 - DNA, 30 bp, Artificial Sequence
  Synthetic oligonucleotide
ggggccaacaatgagttcatatagcccctt

SEQ ID NO: 210379 - DNA, 30 bp, Artificial Sequence
  Synthetic oligonucleotide
gtgatcgaaaacggcgagagggcagccctt

SEQ ID NO: 210380 - DNA, 30 bp, Artificial Sequence
  Synthetic oligonucleotide
agccacatttcaccatgagtgccctccctt

SEQ ID NO: 210381 - DNA, 30 bp, Artificial Sequence
  Synthetic oligonucleotide
accttaagggtgatactggtgaattccctt

SEQ ID NO: 210382 - DNA, 30 bp, Artificial Sequence
  Synthetic oligonucleotide
gtctataggatgacaacgtcacattccctt

SEQ ID NO: 210383 - DNA, 30 bp, Artificial Sequence
  Synthetic oligonucleotide
tgttcccaacgataggaccttgattccctt

SEQ ID NO: 210384 - DNA, 30 bp, Artificial Sequence
  Synthetic oligonucleotide
ctgggggatcctactgaccgtgttagcctt

SEQ ID NO: 210385 - DNA, 30 bp, Artificial Sequence
  Synthetic oligonucleotide
tagtgtaacagaaacaaagtcacacgcctt

SEQ ID NO: 210386 - DNA, 30 bp, Artificial Sequence
  Synthetic oligonucleotide
ctgcatatgtccgggcgggttgggcgcctt

SEQ ID NO: 210387 - DNA, 30 bp, Artificial Sequence
  Synthetic oligonucleotide
ttcgcggacgccctgactgacgtcggcctt

SEQ ID NO: 210388 - DNA, 30 bp, Artificial Sequence
  Synthetic oligonucleotide
gcttgggaagaaggcaactgggcgggcctt

SEQ ID NO: 210389 - DNA, 30 bp, Artificial Sequence
  Synthetic oligonucleotide
cgctaagaaggcatgctcacctgactcctt

SEQ ID NO: 210390 - DNA, 30 bp, Artificial Sequence
  Synthetic oligonucleotide
tgaggccacttttacctagttccagtcctt

SEQ ID NO: 210391 - DNA, 30 bp, Artificial Sequence
  Synthetic oligonucleotide
tgcgtgtgtgtatcagctcgactagtcctt

SEQ ID NO: 210392 - DNA, 30 bp, Artificial Sequence
  Synthetic oligonucleotide
gccagatggagcatataagtgagcgtcctt

SEQ ID NO: 210393 - DNA, 30 bp, Artificial Sequence
  Synthetic oligonucleotide
ctgacttcaacggcataagttcgcgtcctt

SEQ ID NO: 210394 - DNA, 30 bp, Artificial Sequence
  Synthetic oligonucleotide
ggctagtgaccgatgagctaagaattcctt

SEQ ID NO: 210395 - DNA, 30 bp, Artificial Sequence
  Synthetic oligonucleotide
cgggccggcatatctactccaaacttcctt

SEQ ID NO: 210396 - DNA, 30 bp, Artificial Sequence
  Synthetic oligonucleotide
tgggatcgtaaatggtgtacctacttcctt

SEQ ID NO: 210397 - DNA, 30 bp, Artificial Sequence
  Synthetic oligonucleotide
tagcttcatggtgatgtggggctcttcctt

SEQ ID NO: 210398 - DNA, 30 bp, Artificial Sequence
  Synthetic oligonucleotide
accgtaattacaagagccaagactttcctt

SEQ ID NO: 210399 - DNA, 30 bp, Artificial Sequence
  Synthetic oligonucleotide
gggaggactgggctttcgtacgctttcctt

SEQ ID NO: 210400 - DNA, 30 bp, Artificial Sequence
  Synthetic oligonucleotide
tggaggccatgcctgcgcagcgaaaagctt

SEQ ID NO: 210401 - DNA, 30 bp, Artificial Sequence
  Synthetic oligonucleotide
aactacgggcgcccgtgtaaccgtaagctt

SEQ ID NO: 210402 - DNA, 30 bp, Artificial Sequence
  Synthetic oligonucleotide
aagcagtatgggtccatttaatttaagctt

SEQ ID NO: 210403 - DNA, 30 bp, Artificial Sequence
  Synthetic oligonucleotide
ttagtgaacctaccacatatactccagctt

SEQ ID NO: 210404 - DNA, 30 bp, Artificial Sequence
  Synthetic oligonucleotide
attctagaactacaggatggttccgagctt

SEQ ID NO: 210405 - DNA, 30 bp, Artificial Sequence
  Synthetic oligonucleotide
ttgtgaagggttctttcatattaggagctt

SEQ ID NO: 210406 - DNA, 30 bp, Artificial Sequence
  Synthetic oligonucleotide
atacggtagacaacttgaacgcgtgagctt

SEQ ID NO: 210407 - DNA, 30 bp, Artificial Sequence
  Synthetic oligonucleotide
cctgaagacggctctgtggttaagtagctt

SEQ ID NO: 210408 - DNA, 30 bp, Artificial Sequence
  Synthetic oligonucleotide
tcaaagcgctggatgtctaaaaggtagctt

SEQ ID NO: 210409 - DNA, 30 bp, Artificial Sequence
  Synthetic oligonucleotide
tcctccgcgaaacggagatggaggtagctt

SEQ ID NO: 210410 - DNA, 30 bp, Artificial Sequence
  Synthetic oligonucleotide
ctctcatcagggcgactcgttaggtagctt

SEQ ID NO: 210411 - DNA, 30 bp, Artificial Sequence
  Synthetic oligonucleotide
cttgccgagggtaaggattgcgacacgctt

SEQ ID NO: 210412 - DNA, 30 bp, Artificial Sequence
  Synthetic oligonucleotide
tcgccgcggtggaagaaactcggtacgctt

SEQ ID NO: 210413 - DNA, 30 bp, Artificial Sequence
  Synthetic oligonucleotide
cagtggggatcagggttacaaacaccgctt

SEQ ID NO: 210414 - DNA, 30 bp, Artificial Sequence
  Synthetic oligonucleotide
aagaggcccaagcgtatgctggtaccgctt

SEQ ID NO: 210415 - DNA, 30 bp, Artificial Sequence
  Synthetic oligonucleotide
ggtatgtcttgcatacaagcacacccgctt

SEQ ID NO: 210416 - DNA, 30 bp, Artificial Sequence
  Synthetic oligonucleotide
ccgacatgaatcctggctgtgcaggcgctt

SEQ ID NO: 210417 - DNA, 30 bp, Artificial Sequence
  Synthetic oligonucleotide
tatcattaatgaatgcttaccacatcgctt

SEQ ID NO: 210418 - DNA, 30 bp, Artificial Sequence
  Synthetic oligonucleotide
gtcaaagctatcgtcttaatccactcgctt

SEQ ID NO: 210419 - DNA, 30 bp, Artificial Sequence
  Synthetic oligonucleotide
cggcggtggtaattctaaggcccctcgctt

SEQ ID NO: 210420 - DNA, 30 bp, Artificial Sequence
  Synthetic oligonucleotide
tgcaaaggcaaaagtggatatagaaggctt

SEQ ID NO: 210421 - DNA, 30 bp, Artificial Sequence
  Synthetic oligonucleotide
tgctgttatgcttccgggtcggggaggctt

SEQ ID NO: 210422 - DNA, 30 bp, Artificial Sequence
  Synthetic oligonucleotide
tggatttcaagtaattgtaggaataggctt

SEQ ID NO: 210423 - DNA, 30 bp, Artificial Sequence
  Synthetic oligonucleotide
tatggaagacagcgagtactgaataggctt

SEQ ID NO: 210424 - DNA, 30 bp, Artificial Sequence
  Synthetic oligonucleotide
ttcaacgacagataggaccgtccgcggctt

SEQ ID NO: 210425 - DNA, 30 bp, Artificial Sequence
  Synthetic oligonucleotide
atggtatacccgccgtgtgtggctcggctt

SEQ ID NO: 210426 - DNA, 30 bp, Artificial Sequence
  Synthetic oligonucleotide
tcaccggtatggtggcatgcttcagggctt

SEQ ID NO: 210427 - DNA, 30 bp, Artificial Sequence
  Synthetic oligonucleotide
ggatttccagtaacggaatttaacgggctt

SEQ ID NO: 210428 - DNA, 30 bp, Artificial Sequence
  Synthetic oligonucleotide
taacgttctgaaggtgacctaaaggggctt

SEQ ID NO: 210429 - DNA, 30 bp, Artificial Sequence
  Synthetic oligonucleotide
ggtttcgcactggggcaacaaggggggctt

SEQ ID NO: 210430 - DNA, 30 bp, Artificial Sequence
  Synthetic oligonucleotide
tacaggagactaatcagttgaatggggctt

SEQ ID NO: 210431 - DNA, 30 bp, Artificial Sequence
  Synthetic oligonucleotide
gaaagaaagagtcaaagcattggatggctt

SEQ ID NO: 210432 - DNA, 30 bp, Artificial Sequence
  Synthetic oligonucleotide
ctatgaataacccaacatgcgctgtggctt

SEQ ID NO: 210433 - DNA, 30 bp, Artificial Sequence
  Synthetic oligonucleotide
tcggtttgaaatgttacggttaattggctt

SEQ ID NO: 210434 - DNA, 30 bp, Artificial Sequence
  Synthetic oligonucleotide
gagaataggcgtccgggcatacgttggctt

SEQ ID NO: 210435 - DNA, 30 bp, Artificial Sequence
  Synthetic oligonucleotide
agcttattacggtctagcttacaaatgctt

SEQ ID NO: 210436 - DNA, 30 bp, Artificial Sequence
  Synthetic oligonucleotide
tacagcattttacgctaattgaacatgctt

SEQ ID NO: 210437 - DNA, 30 bp, Artificial Sequence
  Synthetic oligonucleotide
aacccgacgacaggaagactcgtgatgctt

SEQ ID NO: 210438 - DNA, 30 bp, Artificial Sequence
  Synthetic oligonucleotide
tatagtaatcgtaaaaggtgacgactgctt

SEQ ID NO: 210439 - DNA, 30 bp, Artificial Sequence
  Synthetic oligonucleotide
gacataaagacttataaagtttggctgctt

SEQ ID NO: 210440 - DNA, 30 bp, Artificial Sequence
  Synthetic oligonucleotide
gtagaatcagactgcccatgtcgagtgctt

SEQ ID NO: 210441 - DNA, 30 bp, Artificial Sequence
  Synthetic oligonucleotide
tctagccctcgttgagccagctgagtgctt

SEQ ID NO: 210442 - DNA, 30 bp, Artificial Sequence
  Synthetic oligonucleotide
agggagacacattcgtgtagctcggtgctt

SEQ ID NO: 210443 - DNA, 30 bp, Artificial Sequence
  Synthetic oligonucleotide
gggtgaatggccggaaatatagacttgctt

SEQ ID NO: 210444 - DNA, 30 bp, Artificial Sequence
  Synthetic oligonucleotide
tgctcattctgagggacgcaccccttgctt

SEQ ID NO: 210445 - DNA, 30 bp, Artificial Sequence
  Synthetic oligonucleotide
actagaattcgccattactatgtgttgctt

SEQ ID NO: 210446 - DNA, 30 bp, Artificial Sequence
  Synthetic oligonucleotide
ggacccccgtttcagatgactcttttgctt

SEQ ID NO: 210447 - DNA, 30 bp, Artificial Sequence
  Synthetic oligonucleotide
tggagtttcaataacctgtgggacaatctt

SEQ ID NO: 210448 - DNA, 30 bp, Artificial Sequence
  Synthetic oligonucleotide
cagtgatttaagactgccttcaagaatctt

SEQ ID NO: 210449 - DNA, 30 bp, Artificial Sequence
  Synthetic oligonucleotide
aggcatcagcacgacgcgaggcgacatctt

SEQ ID NO: 210450 - DNA, 30 bp, Artificial Sequence
  Synthetic oligonucleotide
aatgtttggcggccaaacccgagccatctt

SEQ ID NO: 210451 - DNA, 30 bp, Artificial Sequence
  Synthetic oligonucleotide
tccggggtggatcagttacaggtgcatctt

SEQ ID NO: 210452 - DNA, 30 bp, Artificial Sequence
  Synthetic oligonucleotide
ttggcgggttccgctggtcaaacagatctt

SEQ ID NO: 210453 - DNA, 30 bp, Artificial Sequence
  Synthetic oligonucleotide
agtgggttggaaagaaggcagcacgatctt

SEQ ID NO: 210454 - DNA, 30 bp, Artificial Sequence
  Synthetic oligonucleotide
tatctgaaggaacccggtcgtggtgatctt

SEQ ID NO: 210455 - DNA, 30 bp, Artificial Sequence
  Synthetic oligonucleotide
ccagcgctgcttgaatatagcggatatctt

SEQ ID NO: 210456 - DNA, 30 bp, Artificial Sequence
  Synthetic oligonucleotide
accgaaggtagtagtggtatcgggtatctt

SEQ ID NO: 210457 - DNA, 30 bp, Artificial Sequence
  Synthetic oligonucleotide
gctgggtacagaaggaggccgtaaactctt

SEQ ID NO: 210458 - DNA, 30 bp, Artificial Sequence
  Synthetic oligonucleotide
atctgcaaaggacggaacagctggactctt

SEQ ID NO: 210459 - DNA, 30 bp, Artificial Sequence
  Synthetic oligonucleotide
ggaagaaatgccttgaacctaagacctctt

SEQ ID NO: 210460 - DNA, 30 bp, Artificial Sequence
  Synthetic oligonucleotide
ccagcatgccacgaattgtaaatacctctt

SEQ ID NO: 210461 - DNA, 30 bp, Artificial Sequence
  Synthetic oligonucleotide
aagacactaaagtgggactgatcgcctctt

SEQ ID NO: 210462 - DNA, 30 bp, Artificial Sequence
  Synthetic oligonucleotide
aagccggagaaagtcataatggaagctctt

SEQ ID NO: 210463 - DNA, 30 bp, Artificial Sequence
  Synthetic oligonucleotide
tgtcataggctaaatacacttccggctctt

SEQ ID NO: 210464 - DNA, 30 bp, Artificial Sequence
  Synthetic oligonucleotide
gcgcggccggcgtacataagttactctctt

SEQ ID NO: 210465 - DNA, 30 bp, Artificial Sequence
  Synthetic oligonucleotide
ccgagagatatgttattcttcacgtctctt

SEQ ID NO: 210466 - DNA, 30 bp, Artificial Sequence
  Synthetic oligonucleotide
aagcctctacggcttcaacaattgtctctt

SEQ ID NO: 210467 - DNA, 30 bp, Artificial Sequence
  Synthetic oligonucleotide
aagacttagcacggaataagcgcttctctt

SEQ ID NO: 210468 - DNA, 30 bp, Artificial Sequence
  Synthetic oligonucleotide
cgtgcacccgttaatagctcttgttctctt

SEQ ID NO: 210469 - DNA, 30 bp, Artificial Sequence
  Synthetic oligonucleotide
cgccttatcagcattatccacttaagtctt

SEQ ID NO: 210470 - DNA, 30 bp, Artificial Sequence
  Synthetic oligonucleotide
gttcgggagcgggatatacaacacagtctt

SEQ ID NO: 210471 - DNA, 30 bp, Artificial Sequence
  Synthetic oligonucleotide
tagggttgtaaaggaattcgatcgagtctt

SEQ ID NO: 210472 - DNA, 30 bp, Artificial Sequence
  Synthetic oligonucleotide
agtcacccatatctgttatggttgagtctt

SEQ ID NO: 210473 - DNA, 30 bp, Artificial Sequence
  Synthetic oligonucleotide
aaacaaaaatcagttcgcccacatagtctt

SEQ ID NO: 210474 - DNA, 30 bp, Artificial Sequence
  Synthetic oligonucleotide
ccgtcctagtcattagagattgatagtctt

SEQ ID NO: 210475 - DNA, 30 bp, Artificial Sequence
  Synthetic oligonucleotide
cgaaaggcctgcagatggaaaattagtctt

SEQ ID NO: 210476 - DNA, 30 bp, Artificial Sequence
  Synthetic oligonucleotide
gtagagcatatcggggttgagattagtctt

SEQ ID NO: 210477 - DNA, 30 bp, Artificial Sequence
  Synthetic oligonucleotide
cgagggtgcgcaattacatcagtacgtctt

SEQ ID NO: 210478 - DNA, 30 bp, Artificial Sequence
  Synthetic oligonucleotide
tcgccgcctggataccagcttggtcgtctt

SEQ ID NO: 210479 - DNA, 30 bp, Artificial Sequence
  Synthetic oligonucleotide
acgctatgtaggccgcgtaaacaaggtctt

SEQ ID NO: 210480 - DNA, 30 bp, Artificial Sequence
  Synthetic oligonucleotide
gcgactttttagctgatagtgcgaggtctt

SEQ ID NO: 210481 - DNA, 30 bp, Artificial Sequence
  Synthetic oligonucleotide
cccagtgaagcgcttaaaccgcacggtctt

SEQ ID NO: 210482 - DNA, 30 bp, Artificial Sequence
  Synthetic oligonucleotide
gccagtactacctcactatgtgacggtctt

SEQ ID NO: 210483 - DNA, 30 bp, Artificial Sequence
  Synthetic oligonucleotide
ggcaatagtgggcgcgccctacggggtctt

SEQ ID NO: 210484 - DNA, 30 bp, Artificial Sequence
  Synthetic oligonucleotide
cgggcagctgctcggcttatgcggtgtctt

SEQ ID NO: 210485 - DNA, 30 bp, Artificial Sequence
  Synthetic oligonucleotide
ggtagggccgggatattagtgggttgtctt

SEQ ID NO: 210486 - DNA, 30 bp, Artificial Sequence
  Synthetic oligonucleotide
agagtgctttggaaaaacaggttttgtctt

SEQ ID NO: 210487 - DNA, 30 bp, Artificial Sequence
  Synthetic oligonucleotide
tctcaacagccgggactggtcaaaattctt

SEQ ID NO: 210488 - DNA, 30 bp, Artificial Sequence
  Synthetic oligonucleotide
tgcgggctctacatccgttgtcagattctt

SEQ ID NO: 210489 - DNA, 30 bp, Artificial Sequence
  Synthetic oligonucleotide
tcatggccttacaagcctcacacacttctt

SEQ ID NO: 210490 - DNA, 30 bp, Artificial Sequence
  Synthetic oligonucleotide
cacataactggtagccaaaattgacttctt

SEQ ID NO: 210491 - DNA, 30 bp, Artificial Sequence
  Synthetic oligonucleotide
cactgacaggttaaggtgccgccccttctt

SEQ ID NO: 210492 - DNA, 30 bp, Artificial Sequence
  Synthetic oligonucleotide
aaggaattcggttgtaagtagacagttctt

SEQ ID NO: 210493 - DNA, 30 bp, Artificial Sequence
  Synthetic oligonucleotide
tgaggggaactctagtccagcaaatttctt

SEQ ID NO: 210494 - DNA, 30 bp, Artificial Sequence
  Synthetic oligonucleotide
aacagaagtgagcaagtgttaggatttctt

SEQ ID NO: 210495 - DNA, 30 bp, Artificial Sequence
  Synthetic oligonucleotide
aagctatggtgtcacatcatcatatttctt

SEQ ID NO: 210496 - DNA, 30 bp, Artificial Sequence
  Synthetic oligonucleotide
ttgggcacaatggaagttggttactttctt

SEQ ID NO: 210497 - DNA, 30 bp, Artificial Sequence
  Synthetic oligonucleotide
acagcgcgactagaccaagactgctttctt

SEQ ID NO: 210498 - DNA, 30 bp, Artificial Sequence
  Synthetic oligonucleotide
ttggtgcgggggaggagctaggtctttctt

SEQ ID NO: 210499 - DNA, 30 bp, Artificial Sequence
  Synthetic oligonucleotide
tggtcttatcgacctttcttaacttttctt

SEQ ID NO: 210500 - DNA, 30 bp, Artificial Sequence
  Synthetic oligonucleotide
atcatgcgttggaacatatgataaaaagtt

SEQ ID NO: 210501 - DNA, 30 bp, Artificial Sequence
  Synthetic oligonucleotide
ctagtttctactaagtgtcatgccaaagtt

SEQ ID NO: 210502 - DNA, 30 bp, Artificial Sequence
  Synthetic oligonucleotide
atatccgagatggcagtgcattcgaaagtt

SEQ ID NO: 210503 - DNA, 30 bp, Artificial Sequence
  Synthetic oligonucleotide
agtctattgatagttgtgtagggtaaagtt

SEQ ID NO: 210504 - DNA, 30 bp, Artificial Sequence
  Synthetic oligonucleotide
acgcgtttacagtcgaggccccaccaagtt

SEQ ID NO: 210505 - DNA, 30 bp, Artificial Sequence
  Synthetic oligonucleotide
gacacattcaatatattgaaggagcaagtt

SEQ ID NO: 210506 - DNA, 30 bp, Artificial Sequence
  Synthetic oligonucleotide
acgcaactcataaaataggtgtctcaagtt

SEQ ID NO: 210507 - DNA, 31 bp, Artificial Sequence
  Synthetic oligonucleotide
acctagatcatactaagctgcatttcaagtt

SEQ ID NO: 210508 - DNA, 30 bp, Artificial Sequence
  Synthetic oligonucleotide
cacgaagcctccaagtggttatcagaagtt

SEQ ID NO: 210509 - DNA, 30 bp, Artificial Sequence
  Synthetic oligonucleotide
ttagaagtcgggccaaggtaacaggaagtt

SEQ ID NO: 210510 - DNA, 30 bp, Artificial Sequence
  Synthetic oligonucleotide
tagttaacgaattcgcgttgtgctgaagtt

SEQ ID NO: 210511 - DNA, 30 bp, Artificial Sequence
  Synthetic oligonucleotide
gagatagtcatgcgaacaggaccctaagtt

SEQ ID NO: 210512 - DNA, 30 bp, Artificial Sequence
  Synthetic oligonucleotide
agcttgcgcttgaaacggtaagagtaagtt

SEQ ID NO: 210513 - DNA, 30 bp, Artificial Sequence
  Synthetic oligonucleotide
tcgtttcggtatagggtcgacgcgtaagtt

SEQ ID NO: 210514 - DNA, 30 bp, Artificial Sequence
  Synthetic oligonucleotide
agaagtaggatggtaacgacggcgtaagtt

SEQ ID NO: 210515 - DNA, 30 bp, Artificial Sequence
  Synthetic oligonucleotide
cgtagggagcgtacgttcaccaggtaagtt

SEQ ID NO: 210516 - DNA, 30 bp, Artificial Sequence
  Synthetic oligonucleotide
tgataatggtgatgagatcactgttaagtt

SEQ ID NO: 210517 - DNA, 30 bp, Artificial Sequence
  Synthetic oligonucleotide
tgggaatccgattgtcaattccaaacagtt

SEQ ID NO: 210518 - DNA, 30 bp, Artificial Sequence
  Synthetic oligonucleotide
catctagcaatatacctcttggtaacagtt

SEQ ID NO: 210519 - DNA, 30 bp, Artificial Sequence
  Synthetic oligonucleotide
tgcaagtggcacagcagttatagcacagtt

SEQ ID NO: 210520 - DNA, 30 bp, Artificial Sequence
  Synthetic oligonucleotide
ttgggcgccctgcgactaactcgcacagtt

SEQ ID NO: 210521 - DNA, 30 bp, Artificial Sequence
  Synthetic oligonucleotide
agctcggggatgctcggccttcgcacagtt

SEQ ID NO: 210522 - DNA, 30 bp, Artificial Sequence
  Synthetic oligonucleotide
agcatggtaggttagagcgtttgcacagtt

SEQ ID NO: 210523 - DNA, 30 bp, Artificial Sequence
  Synthetic oligonucleotide
tagggacttcgttgagtgttcctcacagtt

SEQ ID NO: 210524 - DNA, 30 bp, Artificial Sequence
  Synthetic oligonucleotide
gctgttaaattggtaagctgccgtacagtt

SEQ ID NO: 210525 - DNA, 30 bp, Artificial Sequence
  Synthetic oligonucleotide
ttcgcaatttaattgatattagacccagtt

SEQ ID NO: 210526 - DNA, 30 bp, Artificial Sequence
  Synthetic oligonucleotide
ccttattacgaattaatatggacgccagtt

SEQ ID NO: 210527 - DNA, 30 bp, Artificial Sequence
  Synthetic oligonucleotide
aaaggggagataatcttagtggaagcagtt

SEQ ID NO: 210528 - DNA, 30 bp, Artificial Sequence
  Synthetic oligonucleotide
cttaaaatatagcaaggggtggaagcagtt

SEQ ID NO: 210529 - DNA, 30 bp, Artificial Sequence
  Synthetic oligonucleotide
cactgacgggttgtgcgcttcacggcagtt

SEQ ID NO: 210530 - DNA, 30 bp, Artificial Sequence
  Synthetic oligonucleotide
tggatgtggttcaccgtatcgagtgcagtt

SEQ ID NO: 210531 - DNA, 30 bp, Artificial Sequence
  Synthetic oligonucleotide
gtacatgcatgattcaataggtgatcagtt

SEQ ID NO: 210532 - DNA, 30 bp, Artificial Sequence
  Synthetic oligonucleotide
gggatttgtcactgaattcgcaaaagagtt

SEQ ID NO: 210533 - DNA, 30 bp, Artificial Sequence
  Synthetic oligonucleotide
ttgcgatgaaggtgaggtacacacagagtt

SEQ ID NO: 210534 - DNA, 30 bp, Artificial Sequence
  Synthetic oligonucleotide
aattgtcattctgcaagctagcggagagtt

SEQ ID NO: 210535 - DNA, 30 bp, Artificial Sequence
  Synthetic oligonucleotide
gatcggacgctttaacgtaaggggagagtt

SEQ ID NO: 210536 - DNA, 30 bp, Artificial Sequence
  Synthetic oligonucleotide
gccgctctggactttgtatgctcacgagtt

SEQ ID NO: 210537 - DNA, 30 bp, Artificial Sequence
  Synthetic oligonucleotide
ggtagcatggattccacctattgacgagtt

SEQ ID NO: 210538 - DNA, 30 bp, Artificial Sequence
  Synthetic oligonucleotide
taggtacactatgtctgtttagcgcgagtt

SEQ ID NO: 210539 - DNA, 30 bp, Artificial Sequence
  Synthetic oligonucleotide
gggagtttggcgaaggacgagtgtcgagtt

SEQ ID NO: 210540 - DNA, 30 bp, Artificial Sequence
  Synthetic oligonucleotide
aagcctcgctgacgaaggggcaccggagtt

SEQ ID NO: 210541 - DNA, 30 bp, Artificial Sequence
  Synthetic oligonucleotide
gcggagcgacatagtcagtacggcggagtt

SEQ ID NO: 210542 - DNA, 30 bp, Artificial Sequence
  Synthetic oligonucleotide
agccgaccaaccgctcagtgttggggagtt

SEQ ID NO: 210543 - DNA, 30 bp, Artificial Sequence
  Synthetic oligonucleotide
cccgtgcgtagggaaacggtctatggagtt

SEQ ID NO: 210544 - DNA, 30 bp, Artificial Sequence
  Synthetic oligonucleotide
cattcgatatcgcaccatagagctggagtt

SEQ ID NO: 210545 - DNA, 30 bp, Artificial Sequence
  Synthetic oligonucleotide
tgtacccgaccctacactgtccagtgagtt

SEQ ID NO: 210546 - DNA, 30 bp, Artificial Sequence
  Synthetic oligonucleotide
tcaagtacaacggttgctccgtcgtgagtt

SEQ ID NO: 210547 - DNA, 30 bp, Artificial Sequence
  Synthetic oligonucleotide
gttcgaaggattctcgtcgttgcaatagtt

SEQ ID NO: 210548 - DNA, 30 bp, Artificial Sequence
  Synthetic oligonucleotide
cctgttcacaatcacgtgatcatcatagtt

SEQ ID NO: 210549 - DNA, 30 bp, Artificial Sequence
  Synthetic oligonucleotide
actaaaggtattggtgtccaatggatagtt

SEQ ID NO: 210550 - DNA, 30 bp, Artificial Sequence
  Synthetic oligonucleotide
gtgctaaaataggggagatttcatatagtt

SEQ ID NO: 210551 - DNA, 30 bp, Artificial Sequence
  Synthetic oligonucleotide
ttacaataagactgggttaccgagctagtt

SEQ ID NO: 210552 - DNA, 30 bp, Artificial Sequence
  Synthetic oligonucleotide
cgtttaaagccgaataatgagtgggtagtt

SEQ ID NO: 210553 - DNA, 30 bp, Artificial Sequence
  Synthetic oligonucleotide
tccatcaatagggaaatatggtgggtagtt

SEQ ID NO: 210554 - DNA, 30 bp, Artificial Sequence
  Synthetic oligonucleotide
atcgtacgaacggttgtgaacaagttagtt

SEQ ID NO: 210555 - DNA, 30 bp, Artificial Sequence
  Synthetic oligonucleotide
acgtaacggcgggcctaccttcagttagtt

SEQ ID NO: 210556 - DNA, 30 bp, Artificial Sequence
  Synthetic oligonucleotide
gctaggaagttattctcgctgtggttagtt

SEQ ID NO: 210557 - DNA, 30 bp, Artificial Sequence
  Synthetic oligonucleotide
tcgggagcttgaccaagaggctacaacgtt

SEQ ID NO: 210558 - DNA, 30 bp, Artificial Sequence
  Synthetic oligonucleotide
ggtcccgaattgtaccacttttccaacgtt

SEQ ID NO: 210559 - DNA, 30 bp, Artificial Sequence
  Synthetic oligonucleotide
atagcacttggaaccggtacaatgcacgtt

SEQ ID NO: 210560 - DNA, 30 bp, Artificial Sequence
  Synthetic oligonucleotide
aagcggtagttcgttgccatataagacgtt

SEQ ID NO: 210561 - DNA, 30 bp, Artificial Sequence
  Synthetic oligonucleotide
atcgacatagtgcttccatagctcgacgtt

SEQ ID NO: 210562 - DNA, 30 bp, Artificial Sequence
  Synthetic oligonucleotide
aagagggccacagtccgcaactgtgacgtt

SEQ ID NO: 210563 - DNA, 30 bp, Artificial Sequence
  Synthetic oligonucleotide
gccgggttgtaacttaagccgtgtgacgtt

SEQ ID NO: 210564 - DNA, 30 bp, Artificial Sequence
  Synthetic oligonucleotide
gtggcgcattcgtgtcgtatcaaatacgtt

SEQ ID NO: 210565 - DNA, 30 bp, Artificial Sequence
  Synthetic oligonucleotide
tacccatcatggtaattataagaatacgtt

SEQ ID NO: 210566 - DNA, 30 bp, Artificial Sequence
  Synthetic oligonucleotide
cagtgtgcgcagcgtgagaaaacatacgtt

SEQ ID NO: 210567 - DNA, 30 bp, Artificial Sequence
  Synthetic oligonucleotide
gcgaatgacttgcgaggcgggatttacgtt

SEQ ID NO: 210568 - DNA, 30 bp, Artificial Sequence
  Synthetic oligonucleotide
ccaccactttacttgttgtttaagaccgtt

SEQ ID NO: 210569 - DNA, 30 bp, Artificial Sequence
  Synthetic oligonucleotide
agccgtgcagctagctggcctggtaccgtt

SEQ ID NO: 210570 - DNA, 30 bp, Artificial Sequence
  Synthetic oligonucleotide
ttgggaggaatataagagttaccacccgtt

SEQ ID NO: 210571 - DNA, 30 bp, Artificial Sequence
  Synthetic oligonucleotide
agtatcaccccgaccgtaggtgagcccgtt

SEQ ID NO: 210572 - DNA, 30 bp, Artificial Sequence
  Synthetic oligonucleotide
ggcaatggcgcaatgcagcgcgacgccgtt

SEQ ID NO: 210573 - DNA, 30 bp, Artificial Sequence
  Synthetic oligonucleotide
aaaacgtgggtccccccgatgggcgccgtt

SEQ ID NO: 210574 - DNA, 30 bp, Artificial Sequence
  Synthetic oligonucleotide
tacgataagagccgggggagaatggccgtt

SEQ ID NO: 210575 - DNA, 30 bp, Artificial Sequence
  Synthetic oligonucleotide
aaggcagcgagggggggtgccacgtccgtt

SEQ ID NO: 210576 - DNA, 30 bp, Artificial Sequence
  Synthetic oligonucleotide
cattatccccttctgttacgtcgttccgtt

SEQ ID NO: 210577 - DNA, 30 bp, Artificial Sequence
  Synthetic oligonucleotide
ctagagtcactcaccctggatgtttccgtt

SEQ ID NO: 210578 - DNA, 30 bp, Artificial Sequence
  Synthetic oligonucleotide
acatctaacttctcgtagatcttaagcgtt

SEQ ID NO: 210579 - DNA, 30 bp, Artificial Sequence
  Synthetic oligonucleotide
agccgcgagccgcttagaacatggagcgtt

SEQ ID NO: 210580 - DNA, 30 bp, Artificial Sequence
  Synthetic oligonucleotide
gacgggagggagttttctcactcacgcgtt

SEQ ID NO: 210581 - DNA, 30 bp, Artificial Sequence
  Synthetic oligonucleotide
gcgtgtctttcagtagatttctaccgcgtt

SEQ ID NO: 210582 - DNA, 30 bp, Artificial Sequence
  Synthetic oligonucleotide
ggatgcgtgttactggtacaaggccgcgtt

SEQ ID NO: 210583 - DNA, 30 bp, Artificial Sequence
  Synthetic oligonucleotide
actcatgcttacctaccggaaccgcgcgtt

SEQ ID NO: 210584 - DNA, 30 bp, Artificial Sequence
  Synthetic oligonucleotide
cattcggtagacggatagatcttcggcgtt

SEQ ID NO: 210585 - DNA, 30 bp, Artificial Sequence
  Synthetic oligonucleotide
acatggcgagttgctccagcggagggcgtt

SEQ ID NO: 210586 - DNA, 30 bp, Artificial Sequence
  Synthetic oligonucleotide
actgaagaaccatttaagcgcctgggcgtt

SEQ ID NO: 210587 - DNA, 30 bp, Artificial Sequence
  Synthetic oligonucleotide
atggaaccatattacggaacgctctgcgtt

SEQ ID NO: 210588 - DNA, 30 bp, Artificial Sequence
  Synthetic oligonucleotide
agcagggtcttcactaggtcattttgcgtt

SEQ ID NO: 210589 - DNA, 30 bp, Artificial Sequence
  Synthetic oligonucleotide
aaggctataatcggatgtcgtagaatcgtt

SEQ ID NO: 210590 - DNA, 30 bp, Artificial Sequence
  Synthetic oligonucleotide
aatagatgcaaaccgagatcgtcgatcgtt

SEQ ID NO: 210591 - DNA, 30 bp, Artificial Sequence
  Synthetic oligonucleotide
gcgaaagagcggagaaattatatgatcgtt

SEQ ID NO: 210592 - DNA, 30 bp, Artificial Sequence
  Synthetic oligonucleotide
gggcgcagggtatagggagcggcactcgtt

SEQ ID NO: 210593 - DNA, 30 bp, Artificial Sequence
  Synthetic oligonucleotide
tgtagcggcgtaaatagtttcatactcgtt

SEQ ID NO: 210594 - DNA, 30 bp, Artificial Sequence
  Synthetic oligonucleotide
accggggcacgatcagcccgccgtctcgtt

SEQ ID NO: 210595 - DNA, 30 bp, Artificial Sequence
  Synthetic oligonucleotide
tgcgttttaaagccggacgcgggagtcgtt

SEQ ID NO: 210596 - DNA, 30 bp, Artificial Sequence
  Synthetic oligonucleotide
atccgtgaaatattaatgcaaggtgtcgtt

SEQ ID NO: 210597 - DNA, 30 bp, Artificial Sequence
  Synthetic oligonucleotide
ttagattggtcatgccatccgcaattcgtt

SEQ ID NO: 210598 - DNA, 30 bp, Artificial Sequence
  Synthetic oligonucleotide
ggatcagatttaaaacagctcggtttcgtt

SEQ ID NO: 210599 - DNA, 30 bp, Artificial Sequence
  Synthetic oligonucleotide
ggtgaggtcggttcatttggcgttttcgtt

SEQ ID NO: 210600 - DNA, 30 bp, Artificial Sequence
  Synthetic oligonucleotide
tgacagtgcggtatacaatgtgaaaaggtt

SEQ ID NO: 210601 - DNA, 30 bp, Artificial Sequence
  Synthetic oligonucleotide
aagtgacaaggcacagggcggataaaggtt

SEQ ID NO: 210602 - DNA, 30 bp, Artificial Sequence
  Synthetic oligonucleotide
tgtcaaccgggatattcggttatcaaggtt

SEQ ID NO: 210603 - DNA, 30 bp, Artificial Sequence
  Synthetic oligonucleotide
gtgtaagtacgtagagacggccggaaggtt

SEQ ID NO: 210604 - DNA, 30 bp, Artificial Sequence
  Synthetic oligonucleotide
tcgactattggtaagctctggtataaggtt

SEQ ID NO: 210605 - DNA, 30 bp, Artificial Sequence
  Synthetic oligonucleotide
atttgtagagaaagatacatcgcacaggtt

SEQ ID NO: 210606 - DNA, 30 bp, Artificial Sequence
  Synthetic oligonucleotide
cccgacaggcgcatatccttattccaggtt

SEQ ID NO: 210607 - DNA, 30 bp, Artificial Sequence
  Synthetic oligonucleotide
gtaaccgaagaccggctaagagaggaggtt

SEQ ID NO: 210608 - DNA, 30 bp, Artificial Sequence
  Synthetic oligonucleotide
atctatcagcgtacgtcgtgcacggaggtt

SEQ ID NO: 210609 - DNA, 30 bp, Artificial Sequence
  Synthetic oligonucleotide
gtaggagacggcgacaaggagtcggaggtt

SEQ ID NO: 210610 - DNA, 30 bp, Artificial Sequence
  Synthetic oligonucleotide
ggaacatatcgatctcttgagcgggaggtt

SEQ ID NO: 210611 - DNA, 30 bp, Artificial Sequence
  Synthetic oligonucleotide
tcacgaagccaacgtgaactttcataggtt

SEQ ID NO: 210612 - DNA, 30 bp, Artificial Sequence
  Synthetic oligonucleotide
aagggatacgcattattgtttggataggtt

SEQ ID NO: 210613 - DNA, 30 bp, Artificial Sequence
  Synthetic oligonucleotide
cgtgacgattcgggtcgtgtagcgtaggtt

SEQ ID NO: 210614 - DNA, 30 bp, Artificial Sequence
  Synthetic oligonucleotide
tagtggtggccatatgactactcttaggtt

SEQ ID NO: 210615 - DNA, 30 bp, Artificial Sequence
  Synthetic oligonucleotide
ataaaagaggtcgaaatgtaactttaggtt

SEQ ID NO: 210616 - DNA, 30 bp, Artificial Sequence
  Synthetic oligonucleotide
actttgcgactggagcgtggcataacggtt

SEQ ID NO: 210617 - DNA, 30 bp, Artificial Sequence
  Synthetic oligonucleotide
gtcgaccctgttgagctgggagtcacggtt

SEQ ID NO: 210618 - DNA, 30 bp, Artificial Sequence
  Synthetic oligonucleotide
ggcggccccttgtagtgacgatggacggtt

SEQ ID NO: 210619 - DNA, 30 bp, Artificial Sequence
  Synthetic oligonucleotide
ccgacactgcttccgggtggtcatacggtt

SEQ ID NO: 210620 - DNA, 30 bp, Artificial Sequence
  Synthetic oligonucleotide
ccggaaagtttaaatctgtgtactacggtt

SEQ ID NO: 210621 - DNA, 30 bp, Artificial Sequence
  Synthetic oligonucleotide
cgtggcgcctacgcggttcacgctacggtt

SEQ ID NO: 210622 - DNA, 30 bp, Artificial Sequence
  Synthetic oligonucleotide
ttccaccatcgacaaaagggctagccggtt

SEQ ID NO: 210623 - DNA, 30 bp, Artificial Sequence
  Synthetic oligonucleotide
gacgtctaagtaggacaccgtagtccggtt

SEQ ID NO: 210624 - DNA, 30 bp, Artificial Sequence
  Synthetic oligonucleotide
gaacgataagggtgataactggtagcggtt

SEQ ID NO: 210625 - DNA, 30 bp, Artificial Sequence
  Synthetic oligonucleotide
acaccctcgagcccctaggtgttagcggtt

SEQ ID NO: 210626 - DNA, 30 bp, Artificial Sequence
  Synthetic oligonucleotide
actctgtggataagtgtcaagagcgcggtt

SEQ ID NO: 210627 - DNA, 30 bp, Artificial Sequence
  Synthetic oligonucleotide
ctattcggaataaggctacacaaggcggtt

SEQ ID NO: 210628 - DNA, 30 bp, Artificial Sequence
  Synthetic oligonucleotide
gttctgcgtgaccgtacgtcaagggcggtt

SEQ ID NO: 210629 - DNA, 30 bp, Artificial Sequence
  Synthetic oligonucleotide
aacatcaggcgatagcacaacaatgcggtt

SEQ ID NO: 210630 - DNA, 30 bp, Artificial Sequence
  Synthetic oligonucleotide
gcgctaatgaggagcgtttcctctgcggtt

SEQ ID NO: 210631 - DNA, 30 bp, Artificial Sequence
  Synthetic oligonucleotide
ggtggtgggtgtcctggtcgaattgcggtt

SEQ ID NO: 210632 - DNA, 30 bp, Artificial Sequence
  Synthetic oligonucleotide
acgagggagttcccagagatacgatcggtt

SEQ ID NO: 210633 - DNA, 30 bp, Artificial Sequence
  Synthetic oligonucleotide
ggcagtgtgcataatttttacctctcggtt

SEQ ID NO: 210634 - DNA, 30 bp, Artificial Sequence
  Synthetic oligonucleotide
agagagtattttaaagtagatctaagggtt

SEQ ID NO: 210635 - DNA, 30 bp, Artificial Sequence
  Synthetic oligonucleotide
tggtcaggtaagatctaggtggacagggtt

SEQ ID NO: 210636 - DNA, 30 bp, Artificial Sequence
  Synthetic oligonucleotide
tttcaagtcgaaagggatagtcagagggtt

SEQ ID NO: 210637 - DNA, 30 bp, Artificial Sequence
  Synthetic oligonucleotide
atcggtgtccggttcatccaagagagggtt

SEQ ID NO: 210638 - DNA, 30 bp, Artificial Sequence
  Synthetic oligonucleotide
tgtatagatgaatgcataacacggagggtt

SEQ ID NO: 210639 - DNA, 30 bp, Artificial Sequence
  Synthetic oligonucleotide
ctacctgatcgaaaagaaccaatgagggtt

SEQ ID NO: 210640 - DNA, 30 bp, Artificial Sequence
  Synthetic oligonucleotide
cactataggctccggcatcgtactagggtt

SEQ ID NO: 210641 - DNA, 30 bp, Artificial Sequence
  Synthetic oligonucleotide
aaggtaagaggtgagcgatagtcccgggtt

SEQ ID NO: 210642 - DNA, 30 bp, Artificial Sequence
  Synthetic oligonucleotide
tatggtcgggacacacatatcctccgggtt

SEQ ID NO: 210643 - DNA, 30 bp, Artificial Sequence
  Synthetic oligonucleotide
cgcggggatattggaaaacgccagcgggtt

SEQ ID NO: 210644 - DNA, 30 bp, Artificial Sequence
  Synthetic oligonucleotide
ggtgatgtcattgctatgtgcacgcgggtt

SEQ ID NO: 210645 - DNA, 30 bp, Artificial Sequence
  Synthetic oligonucleotide
tcgcggaatcactgtgctacggggcgggtt

SEQ ID NO: 210646 - DNA, 30 bp, Artificial Sequence
  Synthetic oligonucleotide
ctaacaagagcgatgaattgaccaggggtt

SEQ ID NO: 210647 - DNA, 30 bp, Artificial Sequence
  Synthetic oligonucleotide
taacgccttggtgtacagagaagcggggtt

SEQ ID NO: 210648 - DNA, 30 bp, Artificial Sequence
  Synthetic oligonucleotide
ctcgtggaattcaaactggacttcggggtt

SEQ ID NO: 210649 - DNA, 30 bp, Artificial Sequence
  Synthetic oligonucleotide
gacaaacgcctattcagcactcgctgggtt

SEQ ID NO: 210650 - DNA, 30 bp, Artificial Sequence
  Synthetic oligonucleotide
gagctaagagctaacttcgaacccatggtt

SEQ ID NO: 210651 - DNA, 30 bp, Artificial Sequence
  Synthetic oligonucleotide
cgcgcgggataggtcgggaacgggatggtt

SEQ ID NO: 210652 - DNA, 30 bp, Artificial Sequence
  Synthetic oligonucleotide
cgtggaatccgggatggtaggtatatggtt

SEQ ID NO: 210653 - DNA, 30 bp, Artificial Sequence
  Synthetic oligonucleotide
caccatgaacgggaacagaagactatggtt

SEQ ID NO: 210654 - DNA, 30 bp, Artificial Sequence
  Synthetic oligonucleotide
gcttgcaagttggattagttatgtatggtt

SEQ ID NO: 210655 - DNA, 30 bp, Artificial Sequence
  Synthetic oligonucleotide
gcttgaaactcatcacgaggtaaactggtt

SEQ ID NO: 210656 - DNA, 30 bp, Artificial Sequence
  Synthetic oligonucleotide
cgatcggtgctcttccgcaagaccctggtt

SEQ ID NO: 210657 - DNA, 30 bp, Artificial Sequence
  Synthetic oligonucleotide
gaaagactatcagttacactttccgtggtt

SEQ ID NO: 210658 - DNA, 30 bp, Artificial Sequence
  Synthetic oligonucleotide
gtactgtggggttcatgaattgtggtggtt

SEQ ID NO: 210659 - DNA, 30 bp, Artificial Sequence
  Synthetic oligonucleotide
agctcaggaggagctcgccagccattggtt

SEQ ID NO: 210660 - DNA, 30 bp, Artificial Sequence
  Synthetic oligonucleotide
gatcaagcgtgatgcccgcgaagcttggtt

SEQ ID NO: 210661 - DNA, 30 bp, Artificial Sequence
  Synthetic oligonucleotide
ggcccggaagatagcacatcatatttggtt

SEQ ID NO: 210662 - DNA, 30 bp, Artificial Sequence
  Synthetic oligonucleotide
aagcaaagcacgtaatccattagaaatgtt

SEQ ID NO: 210663 - DNA, 30 bp, Artificial Sequence
  Synthetic oligonucleotide
gttggaacatcattcaatgggtccaatgtt

SEQ ID NO: 210664 - DNA, 30 bp, Artificial Sequence
  Synthetic oligonucleotide
ttgtcatctgtttcacttcgtttgaatgtt

SEQ ID NO: 210665 - DNA, 30 bp, Artificial Sequence
  Synthetic oligonucleotide
cggttgggaaggacagtgccctataatgtt

SEQ ID NO: 210666 - DNA, 30 bp, Artificial Sequence
  Synthetic oligonucleotide
tcgcccctaatgtcatggctacctcatgtt

SEQ ID NO: 210667 - DNA, 30 bp, Artificial Sequence
  Synthetic oligonucleotide
gcaccaatccacgaggagggcagagatgtt

SEQ ID NO: 210668 - DNA, 30 bp, Artificial Sequence
  Synthetic oligonucleotide
gggtgagctggttcatgtgacctatatgtt

SEQ ID NO: 210669 - DNA, 30 bp, Artificial Sequence
  Synthetic oligonucleotide
ctattgggcgaacaggagattaactatgtt

SEQ ID NO: 210670 - DNA, 30 bp, Artificial Sequence
  Synthetic oligonucleotide
cactagcgaaggtgcactttctactatgtt

SEQ ID NO: 210671 - DNA, 30 bp, Artificial Sequence
  Synthetic oligonucleotide
acaagaagccactaataccggacctatgtt

SEQ ID NO: 210672 - DNA, 30 bp, Artificial Sequence
  Synthetic oligonucleotide
cggtagtgtgaggaagggcagtgctatgtt

SEQ ID NO: 210673 - DNA, 30 bp, Artificial Sequence
  Synthetic oligonucleotide
gcacagtatgtcccatacgtcgattatgtt

SEQ ID NO: 210674 - DNA, 30 bp, Artificial Sequence
  Synthetic oligonucleotide
acactggtctagattggaataagcactgtt

SEQ ID NO: 210675 - DNA, 30 bp, Artificial Sequence
  Synthetic oligonucleotide
gttctggactaggcacctgtcgtcactgtt

SEQ ID NO: 210676 - DNA, 30 bp, Artificial Sequence
  Synthetic oligonucleotide
tctgtgcagcagactaaagataaacctgtt

SEQ ID NO: 210677 - DNA, 30 bp, Artificial Sequence
  Synthetic oligonucleotide
agtgcaggatccgctctgttcgtacctgtt

SEQ ID NO: 210678 - DNA, 30 bp, Artificial Sequence
  Synthetic oligonucleotide
cacttctatccagaatacttctatgctgtt

SEQ ID NO: 210679 - DNA, 30 bp, Artificial Sequence
  Synthetic oligonucleotide
gcgggttagaattcggttggtctatctgtt

SEQ ID NO: 210680 - DNA, 30 bp, Artificial Sequence
  Synthetic oligonucleotide
gatctatgggactgcatcacaagaagtgtt

SEQ ID NO: 210681 - DNA, 30 bp, Artificial Sequence
  Synthetic oligonucleotide
ggaccgtgcgttatcaaagataacagtgtt

SEQ ID NO: 210682 - DNA, 30 bp, Artificial Sequence
  Synthetic oligonucleotide
aaagggggtatatctttttactcgagtgtt

SEQ ID NO: 210683 - DNA, 30 bp, Artificial Sequence
  Synthetic oligonucleotide
cacgtttagtactatgtcttgtttagtgtt

SEQ ID NO: 210684 - DNA, 30 bp, Artificial Sequence
  Synthetic oligonucleotide
catgacgacggaatttagtagctcggtgtt

SEQ ID NO: 210685 - DNA, 30 bp, Artificial Sequence
  Synthetic oligonucleotide
caatgttcggccattgcaggagagggtgtt

SEQ ID NO: 210686 - DNA, 30 bp, Artificial Sequence
  Synthetic oligonucleotide
gacagtcgaatataaacctgcaatggtgtt

SEQ ID NO: 210687 - DNA, 30 bp, Artificial Sequence
  Synthetic oligonucleotide
tccgagccttgtgcgcatagctctggtgtt

SEQ ID NO: 210688 - DNA, 30 bp, Artificial Sequence
  Synthetic oligonucleotide
aatgaactcgcctcgttccgcccctgtgtt

SEQ ID NO: 210689 - DNA, 30 bp, Artificial Sequence
  Synthetic oligonucleotide
ccattctggaaaagcccacaaaacattgtt

SEQ ID NO: 210690 - DNA, 30 bp, Artificial Sequence
  Synthetic oligonucleotide
aatggcggatatccaatcaataagattgtt

SEQ ID NO: 210691 - DNA, 30 bp, Artificial Sequence
  Synthetic oligonucleotide
tacctacgcgtagctccttcatcgattgtt

SEQ ID NO: 210692 - DNA, 30 bp, Artificial Sequence
  Synthetic oligonucleotide
cacacctgccgaacagcgttcaatattgtt

SEQ ID NO: 210693 - DNA, 30 bp, Artificial Sequence
  Synthetic oligonucleotide
acacaaaaagggccactgtgcattattgtt

SEQ ID NO: 210694 - DNA, 30 bp, Artificial Sequence
  Synthetic oligonucleotide
ggcacagggtgtctaaccgttattattgtt

SEQ ID NO: 210695 - DNA, 30 bp, Artificial Sequence
  Synthetic oligonucleotide
ggaagaagatgagttcatgacaggcttgtt

SEQ ID NO: 210696 - DNA, 30 bp, Artificial Sequence
  Synthetic oligonucleotide
cataatacgtattcaaaaagtgtgcttgtt

SEQ ID NO: 210697 - DNA, 30 bp, Artificial Sequence
  Synthetic oligonucleotide
cacttcgccccctgatattcgctagttgtt

SEQ ID NO: 210698 - DNA, 30 bp, Artificial Sequence
  Synthetic oligonucleotide
ggattgagaggtctgtggcgccatgttgtt

SEQ ID NO: 210699 - DNA, 30 bp, Artificial Sequence
  Synthetic oligonucleotide
caaggacgaaagttaataaatagtgttgtt

SEQ ID NO: 210700 - DNA, 30 bp, Artificial Sequence
  Synthetic oligonucleotide
gcggatcttaaaacccaggagagatttgtt

SEQ ID NO: 210701 - DNA, 30 bp, Artificial Sequence
  Synthetic oligonucleotide
cgcactgcagggacatcggcttgatttgtt

SEQ ID NO: 210702 - DNA, 30 bp, Artificial Sequence
  Synthetic oligonucleotide
tcattctgattttctccgagctactttgtt

SEQ ID NO: 210703 - DNA, 30 bp, Artificial Sequence
  Synthetic oligonucleotide
ggtggggatcttgacacaaaaacctttgtt

SEQ ID NO: 210704 - DNA, 30 bp, Artificial Sequence
  Synthetic oligonucleotide
tgactggtattcttcgttaatctctttgtt

SEQ ID NO: 210705 - DNA, 30 bp, Artificial Sequence
  Synthetic oligonucleotide
gtgcgtattgaacagttgagtgtgtttgtt

SEQ ID NO: 210706 - DNA, 30 bp, Artificial Sequence
  Synthetic oligonucleotide
aaggccagccggccattagcggattttgtt

SEQ ID NO: 210707 - DNA, 30 bp, Artificial Sequence
  Synthetic oligonucleotide
cgagtttccagacacaacagggcttttgtt

SEQ ID NO: 210708 - DNA, 30 bp, Artificial Sequence
  Synthetic oligonucleotide
aatagataagcctcgtaccagagttttgtt

SEQ ID NO: 210709 - DNA, 30 bp, Artificial Sequence
  Synthetic oligonucleotide
cgtcgtagttgcgttcttacccaaaaattt

SEQ ID NO: 210710 - DNA, 30 bp, Artificial Sequence
  Synthetic oligonucleotide
aaaagctcgaaaacggtcaatgaacaattt

SEQ ID NO: 210711 - DNA, 30 bp, Artificial Sequence
  Synthetic oligonucleotide
acatgagtgagattcaagctgagccaattt

SEQ ID NO: 210712 - DNA, 30 bp, Artificial Sequence
  Synthetic oligonucleotide
tggatcttttcacggtacaaagggcaattt

SEQ ID NO: 210713 - DNA, 30 bp, Artificial Sequence
  Synthetic oligonucleotide
gtaatcgtcaggagggggcatatagaattt

SEQ ID NO: 210714 - DNA, 30 bp, Artificial Sequence
  Synthetic oligonucleotide
acaatcgggatcaaatagggacacgaattt

SEQ ID NO: 210715 - DNA, 30 bp, Artificial Sequence
  Synthetic oligonucleotide
acctcttgtggataacgggtgagcgaattt

SEQ ID NO: 210716 - DNA, 30 bp, Artificial Sequence
  Synthetic oligonucleotide
cggccatttgtgagaacagagatcgaattt

SEQ ID NO: 210717 - DNA, 30 bp, Artificial Sequence
  Synthetic oligonucleotide
agagggatgcgttgttcgtagatcgaattt

SEQ ID NO: 210718 - DNA, 30 bp, Artificial Sequence
  Synthetic oligonucleotide
atacatggtccctgaggaaggacggaattt

SEQ ID NO: 210719 - DNA, 30 bp, Artificial Sequence
  Synthetic oligonucleotide
ttggttcgggatgcttagctatgtgaattt

SEQ ID NO: 210720 - DNA, 30 bp, Artificial Sequence
  Synthetic oligonucleotide
gcggacacggctataagctaaccctaattt

SEQ ID NO: 210721 - DNA, 30 bp, Artificial Sequence
  Synthetic oligonucleotide
ccgccgtgtagggtggctcaaacgtaattt

SEQ ID NO: 210722 - DNA, 30 bp, Artificial Sequence
  Synthetic oligonucleotide
acatagcattttatctgtacaacgtaattt

SEQ ID NO: 210723 - DNA, 30 bp, Artificial Sequence
  Synthetic oligonucleotide
ggaagggggcatgtctatagatattaattt

SEQ ID NO: 210724 - DNA, 30 bp, Artificial Sequence
  Synthetic oligonucleotide
tctgaggtaaagtagtaatacccttaattt

SEQ ID NO: 210725 - DNA, 30 bp, Artificial Sequence
  Synthetic oligonucleotide
aatagcatacacagagggaaaacaacattt

SEQ ID NO: 210726 - DNA, 30 bp, Artificial Sequence
  Synthetic oligonucleotide
aaccaaaaaggatcgacgggtcgtacattt

SEQ ID NO: 210727 - DNA, 30 bp, Artificial Sequence
  Synthetic oligonucleotide
taggcgcgtcattaaaagtaggcaccattt

SEQ ID NO: 210728 - DNA, 30 bp, Artificial Sequence
  Synthetic oligonucleotide
ctggactaccccgtacataattagccattt

SEQ ID NO: 210729 - DNA, 30 bp, Artificial Sequence
  Synthetic oligonucleotide
gggaacggcgcgtcatcttatatgccattt

SEQ ID NO: 210730 - DNA, 30 bp, Artificial Sequence
  Synthetic oligonucleotide
cgaaagagtgggtttaatcatttgccattt

SEQ ID NO: 210731 - DNA, 30 bp, Artificial Sequence
  Synthetic oligonucleotide
cgaattgtagtcggttaaagtcgtccattt

SEQ ID NO: 210732 - DNA, 30 bp, Artificial Sequence
  Synthetic oligonucleotide
taaggatggtagatcacagctagagcattt

SEQ ID NO: 210733 - DNA, 30 bp, Artificial Sequence
  Synthetic oligonucleotide
tgatgtgcgccataggcagatctcgcattt

SEQ ID NO: 210734 - DNA, 30 bp, Artificial Sequence
  Synthetic oligonucleotide
acgaccggaagctggatgcgccgggcattt

SEQ ID NO: 210735 - DNA, 30 bp, Artificial Sequence
  Synthetic oligonucleotide
gcagccatgcgagataagatagtggcattt

SEQ ID NO: 210736 - DNA, 30 bp, Artificial Sequence
  Synthetic oligonucleotide
atcagataaaaggcaacactcaggtcattt

SEQ ID NO: 210737 - DNA, 30 bp, Artificial Sequence
  Synthetic oligonucleotide
ggatgcatgtctcactttcgaagttcattt

SEQ ID NO: 210738 - DNA, 30 bp, Artificial Sequence
  Synthetic oligonucleotide
aacgttgtggtgattgcttgagtttcattt

SEQ ID NO: 210739 - DNA, 30 bp, Artificial Sequence
  Synthetic oligonucleotide
ggagagtgttatatcgtcaagagcagattt

SEQ ID NO: 210740 - DNA, 30 bp, Artificial Sequence
  Synthetic oligonucleotide
actctagtgagagttgaagtatgcagattt

SEQ ID NO: 210741 - DNA, 30 bp, Artificial Sequence
  Synthetic oligonucleotide
gcaagggacttatcgattcttcagagattt

SEQ ID NO: 210742 - DNA, 30 bp, Artificial Sequence
  Synthetic oligonucleotide
tagggatagagttcctgaaccgcgagattt

SEQ ID NO: 210743 - DNA, 30 bp, Artificial Sequence
  Synthetic oligonucleotide
aaagcgcagatcttggtgtgatcccgattt

SEQ ID NO: 210744 - DNA, 30 bp, Artificial Sequence
  Synthetic oligonucleotide
agaatttgggcgtttaacaagagccgattt

SEQ ID NO: 210745 - DNA, 30 bp, Artificial Sequence
  Synthetic oligonucleotide
gcaccgctgctcgtttagatgtggcgattt

SEQ ID NO: 210746 - DNA, 30 bp, Artificial Sequence
  Synthetic oligonucleotide
acgggtttggattataattgtggcggattt

SEQ ID NO: 210747 - DNA, 30 bp, Artificial Sequence
  Synthetic oligonucleotide
ttgcgcgggatttgcaacgcgttgggattt

SEQ ID NO: 210748 - DNA, 30 bp, Artificial Sequence
  Synthetic oligonucleotide
agcgggtagcacccatgaaggttgggattt

SEQ ID NO: 210749 - DNA, 30 bp, Artificial Sequence
  Synthetic oligonucleotide
gcggctataagaaggggaataatatgattt

SEQ ID NO: 210750 - DNA, 30 bp, Artificial Sequence
  Synthetic oligonucleotide
caaagtagattttggtcactcatctgattt

SEQ ID NO: 210751 - DNA, 30 bp, Artificial Sequence
  Synthetic oligonucleotide
tcaggatcgatcagcactctgaggtgattt

SEQ ID NO: 210752 - DNA, 30 bp, Artificial Sequence
  Synthetic oligonucleotide
cgtaacagtattggttctacctgttgattt

SEQ ID NO: 210753 - DNA, 30 bp, Artificial Sequence
  Synthetic oligonucleotide
aaccgggttcagaacgaaactacaatattt

SEQ ID NO: 210754 - DNA, 30 bp, Artificial Sequence
  Synthetic oligonucleotide
accactagtagtggatcttagcgcatattt

SEQ ID NO: 210755 - DNA, 30 bp, Artificial Sequence
  Synthetic oligonucleotide
gacaatgttagtcaagtacgggcactattt

SEQ ID NO: 210756 - DNA, 30 bp, Artificial Sequence
  Synthetic oligonucleotide
tggcaagacagttagcaactgatactattt

SEQ ID NO: 210757 - DNA, 29 bp, Artificial Sequence
  Synthetic oligonucleotide
actcagatagagtgctaggcaatctattt

SEQ ID NO: 210758 - DNA, 30 bp, Artificial Sequence
  Synthetic oligonucleotide
agagagtgattgctcgcgggattagtattt

SEQ ID NO: 210759 - DNA, 30 bp, Artificial Sequence
  Synthetic oligonucleotide
ttggccgtgtgggtctatgccctcgtattt

SEQ ID NO: 210760 - DNA, 30 bp, Artificial Sequence
  Synthetic oligonucleotide
ggacaacagtcgaactctcaggtcgtattt

SEQ ID NO: 210761 - DNA, 30 bp, Artificial Sequence
  Synthetic oligonucleotide
tccgagactggactctgctaattcgtattt

SEQ ID NO: 210762 - DNA, 30 bp, Artificial Sequence
  Synthetic oligonucleotide
ttagcgccaagggcgacaacgaaaaacttt

SEQ ID NO: 210763 - DNA, 30 bp, Artificial Sequence
  Synthetic oligonucleotide
agccgcctgcatgtgacctaaaaagacttt

SEQ ID NO: 210764 - DNA, 30 bp, Artificial Sequence
  Synthetic oligonucleotide
atagcgtatttgggcagtcgctgtgacttt

SEQ ID NO: 210765 - DNA, 30 bp, Artificial Sequence
  Synthetic oligonucleotide
cctcagcagttagagtttggaattgacttt

SEQ ID NO: 210766 - DNA, 30 bp, Artificial Sequence
  Synthetic oligonucleotide
atcgttggaactgagatgttatcctacttt

SEQ ID NO: 210767 - DNA, 30 bp, Artificial Sequence
  Synthetic oligonucleotide
cgactcgcgtagatttggttccgctacttt

SEQ ID NO: 210768 - DNA, 30 bp, Artificial Sequence
  Synthetic oligonucleotide
catgggggttcggcacgggggaagtacttt

SEQ ID NO: 210769 - DNA, 30 bp, Artificial Sequence
  Synthetic oligonucleotide
gtctgtcgcttatcgacgtatgggtacttt

SEQ ID NO: 210770 - DNA, 30 bp, Artificial Sequence
  Synthetic oligonucleotide
cgtcggacaaagccagggcaatattacttt

SEQ ID NO: 210771 - DNA, 30 bp, Artificial Sequence
  Synthetic oligonucleotide
tctccgggaaactattagcggtattacttt

SEQ ID NO: 210772 - DNA, 30 bp, Artificial Sequence
  Synthetic oligonucleotide
ggggaggctttttagcagatgacaaccttt

SEQ ID NO: 210773 - DNA, 30 bp, Artificial Sequence
  Synthetic oligonucleotide
cgctaatatgaacatagacgcgtaaccttt

SEQ ID NO: 210774 - DNA, 30 bp, Artificial Sequence
  Synthetic oligonucleotide
gcgctgacgtacgtgagttaccgcaccttt

SEQ ID NO: 210775 - DNA, 30 bp, Artificial Sequence
  Synthetic oligonucleotide
aacgcagacagcatgtccgccttacccttt

SEQ ID NO: 210776 - DNA, 30 bp, Artificial Sequence
  Synthetic oligonucleotide
tcggtaagcgactttgtgtccaatcccttt

SEQ ID NO: 210777 - DNA, 30 bp, Artificial Sequence
  Synthetic oligonucleotide
tgatcggaagctcttgtgcggaatcccttt

SEQ ID NO: 210778 - DNA, 30 bp, Artificial Sequence
  Synthetic oligonucleotide
agcggcagagcggatctcgatgttcccttt

SEQ ID NO: 210779 - DNA, 31 bp, Artificial Sequence
  Synthetic oligonucleotide
taggtgttcggtgctggaagacagagccttt

SEQ ID NO: 210780 - DNA, 30 bp, Artificial Sequence
  Synthetic oligonucleotide
ctcaatcttgtttttaataagctagccttt

SEQ ID NO: 210781 - DNA, 30 bp, Artificial Sequence
  Synthetic oligonucleotide
taaactatagttgcaaataattgcgccttt

SEQ ID NO: 210782 - DNA, 30 bp, Artificial Sequence
  Synthetic oligonucleotide
cggggaagagctttgtcactatttgccttt

SEQ ID NO: 210783 - DNA, 30 bp, Artificial Sequence
  Synthetic oligonucleotide
agataatccatatgattacaattatccttt

SEQ ID NO: 210784 - DNA, 30 bp, Artificial Sequence
  Synthetic oligonucleotide
cgttgattagattgcacaccagagtccttt

SEQ ID NO: 210785 - DNA, 30 bp, Artificial Sequence
  Synthetic oligonucleotide
gaaggatccagcggttaagggaattccttt

SEQ ID NO: 210786 - DNA, 30 bp, Artificial Sequence
  Synthetic oligonucleotide
ccttgtcgggaatacagtgtttacagcttt

SEQ ID NO: 210787 - DNA, 30 bp, Artificial Sequence
  Synthetic oligonucleotide
ttgggattaagtaagtaacctcccagcttt

SEQ ID NO: 210788 - DNA, 31 bp, Artificial Sequence
  Synthetic oligonucleotide
ctgaaaatacctagatcggcggccgagcttt

SEQ ID NO: 210789 - DNA, 30 bp, Artificial Sequence
  Synthetic oligonucleotide
cagtcatgcaagacacttcacttgagcttt

SEQ ID NO: 210790 - DNA, 30 bp, Artificial Sequence
  Synthetic oligonucleotide
gcgcgtggagccccgcgtagggaccgcttt

SEQ ID NO: 210791 - DNA, 30 bp, Artificial Sequence
  Synthetic oligonucleotide
ttcacaaagacaccacgccgtgtccgcttt

SEQ ID NO: 210792 - DNA, 31 bp, Artificial Sequence
  Synthetic oligonucleotide
gggccaactcataagaatctaacagcgcttt

SEQ ID NO: 210793 - DNA, 31 bp, Artificial Sequence
  Synthetic oligonucleotide
cggagacagggtcaatcgaaagcagcgcttt

SEQ ID NO: 210794 - DNA, 30 bp, Artificial Sequence
  Synthetic oligonucleotide
tgatgttggagctatattgtagtgcgcttt

SEQ ID NO: 210795 - DNA, 30 bp, Artificial Sequence
  Synthetic oligonucleotide
cacgagaggggtgatagatgatgtcgcttt

SEQ ID NO: 210796 - DNA, 30 bp, Artificial Sequence
  Synthetic oligonucleotide
ccgtacgccatgtaggcacgaaaaggcttt

SEQ ID NO: 210797 - DNA, 30 bp, Artificial Sequence
  Synthetic oligonucleotide
cataacagaaataggtctgagaacggcttt

SEQ ID NO: 210798 - DNA, 30 bp, Artificial Sequence
  Synthetic oligonucleotide
tgagaatagggggcctagacgtacggcttt

SEQ ID NO: 210799 - DNA, 30 bp, Artificial Sequence
  Synthetic oligonucleotide
gcgtagcccacatcgcgtacgatcggcttt

SEQ ID NO: 210800 - DNA, 30 bp, Artificial Sequence
  Synthetic oligonucleotide
taaccggcagtgatgggaatagtgggcttt

SEQ ID NO: 210801 - DNA, 30 bp, Artificial Sequence
  Synthetic oligonucleotide
ttcagcggtgatctctgttaatctggcttt

SEQ ID NO: 210802 - DNA, 30 bp, Artificial Sequence
  Synthetic oligonucleotide
ttagtggccagcggctctgccaaatgcttt

SEQ ID NO: 210803 - DNA, 30 bp, Artificial Sequence
  Synthetic oligonucleotide
ataccatccagtcacggatgaaggtgcttt

SEQ ID NO: 210804 - DNA, 30 bp, Artificial Sequence
  Synthetic oligonucleotide
tcaggcgattgaaggttgttcaggtgcttt

SEQ ID NO: 210805 - DNA, 30 bp, Artificial Sequence
  Synthetic oligonucleotide
ctgtgttgtctattaaggaataattgcttt

SEQ ID NO: 210806 - DNA, 30 bp, Artificial Sequence
  Synthetic oligonucleotide
ccggcaaagggagaacggagtacttgcttt

SEQ ID NO: 210807 - DNA, 30 bp, Artificial Sequence
  Synthetic oligonucleotide
tgcgccagggtctggatatatctaatcttt

SEQ ID NO: 210808 - DNA, 30 bp, Artificial Sequence
  Synthetic oligonucleotide
tgtgtgtacgtatgcgggaagtgcatcttt

SEQ ID NO: 210809 - DNA, 30 bp, Artificial Sequence
  Synthetic oligonucleotide
cagggctaccccaccagatgcatcatcttt

SEQ ID NO: 210810 - DNA, 30 bp, Artificial Sequence
  Synthetic oligonucleotide
cgttgcgtttaattagaagttgttatcttt

SEQ ID NO: 210811 - DNA, 30 bp, Artificial Sequence
  Synthetic oligonucleotide
acgtaagccaggtagtggataagactcttt

SEQ ID NO: 210812 - DNA, 30 bp, Artificial Sequence
  Synthetic oligonucleotide
gatgggctcgagcagcccagcctgctcttt

SEQ ID NO: 210813 - DNA, 30 bp, Artificial Sequence
  Synthetic oligonucleotide
gcgttatcgatcacggcattaaatctcttt

SEQ ID NO: 210814 - DNA, 30 bp, Artificial Sequence
  Synthetic oligonucleotide
gctagtagggcgtgtacaggaaccgtcttt

SEQ ID NO: 210815 - DNA, 30 bp, Artificial Sequence
  Synthetic oligonucleotide
caggtaggtcggtggctgtcttgcgtcttt

SEQ ID NO: 210816 - DNA, 30 bp, Artificial Sequence
  Synthetic oligonucleotide
taacacgcggcagcactcgcaatcgtcttt

SEQ ID NO: 210817 - DNA, 30 bp, Artificial Sequence
  Synthetic oligonucleotide
tagttctagtccacccatcacacattcttt

SEQ ID NO: 210818 - DNA, 30 bp, Artificial Sequence
  Synthetic oligonucleotide
ctgagagcaaaagtctaaaactggttcttt

SEQ ID NO: 210819 - DNA, 30 bp, Artificial Sequence
  Synthetic oligonucleotide
gatggtccagggtggttgtcgcgaaagttt

SEQ ID NO: 210820 - DNA, 30 bp, Artificial Sequence
  Synthetic oligonucleotide
gcgtatataaaggaggaaggggacaagttt

SEQ ID NO: 210821 - DNA, 30 bp, Artificial Sequence
  Synthetic oligonucleotide
gatcggacagtagtcaccggaattaagttt

SEQ ID NO: 210822 - DNA, 30 bp, Artificial Sequence
  Synthetic oligonucleotide
gacgtacataaaagcaataggatacagttt

SEQ ID NO: 210823 - DNA, 30 bp, Artificial Sequence
  Synthetic oligonucleotide
attgggtcatcctatcaaattctacagttt

SEQ ID NO: 210824 - DNA, 30 bp, Artificial Sequence
  Synthetic oligonucleotide
ctatagctaggtaacccactatggcagttt

SEQ ID NO: 210825 - DNA, 30 bp, Artificial Sequence
  Synthetic oligonucleotide
gcggatctgatcgtgagtagcgctcagttt

SEQ ID NO: 210826 - DNA, 30 bp, Artificial Sequence
  Synthetic oligonucleotide
ggaggggtgttagttcagtgttgagagttt

SEQ ID NO: 210827 - DNA, 30 bp, Artificial Sequence
  Synthetic oligonucleotide
gcgaaaccgggagcctacataaacgagttt

SEQ ID NO: 210828 - DNA, 30 bp, Artificial Sequence
  Synthetic oligonucleotide
aagcgcttacgagtgagatgctccgagttt

SEQ ID NO: 210829 - DNA, 30 bp, Artificial Sequence
  Synthetic oligonucleotide
agacgacactctcaagtaagtaaggagttt

SEQ ID NO: 210830 - DNA, 30 bp, Artificial Sequence
  Synthetic oligonucleotide
tcactcgagttgcgaataaatggggagttt

SEQ ID NO: 210831 - DNA, 30 bp, Artificial Sequence
  Synthetic oligonucleotide
acgcgggccacgtcagggggatcatagttt

SEQ ID NO: 210832 - DNA, 30 bp, Artificial Sequence
  Synthetic oligonucleotide
caataaatcgcctagaatgcaaggtagttt

SEQ ID NO: 210833 - DNA, 30 bp, Artificial Sequence
  Synthetic oligonucleotide
gccgaagtacaatggtatccatggtagttt

SEQ ID NO: 210834 - DNA, 30 bp, Artificial Sequence
  Synthetic oligonucleotide
ggtgatcgtgcaagggattccaattagttt

SEQ ID NO: 210835 - DNA, 30 bp, Artificial Sequence
  Synthetic oligonucleotide
tggttgaatgcatcgatctagcccacgttt

SEQ ID NO: 210836 - DNA, 30 bp, Artificial Sequence
  Synthetic oligonucleotide
accaaaaggggagccacgatctgcacgttt

SEQ ID NO: 210837 - DNA, 30 bp, Artificial Sequence
  Synthetic oligonucleotide
acgcgcccaaacccgcaataaaggacgttt

SEQ ID NO: 210838 - DNA, 30 bp, Artificial Sequence
  Synthetic oligonucleotide
cacaattgtgttgaccttcccaaaccgttt

SEQ ID NO: 210839 - DNA, 30 bp, Artificial Sequence
  Synthetic oligonucleotide
acctgatccagggggtgcgatagaccgttt

SEQ ID NO: 210840 - DNA, 30 bp, Artificial Sequence
  Synthetic oligonucleotide
gccacgattatgtttaataaatacccgttt

SEQ ID NO: 210841 - DNA, 30 bp, Artificial Sequence
  Synthetic oligonucleotide
ggaaggattgatctttttgccccgccgttt

SEQ ID NO: 210842 - DNA, 30 bp, Artificial Sequence
  Synthetic oligonucleotide
agaaggtgcggactcgctaagactccgttt

SEQ ID NO: 210843 - DNA, 30 bp, Artificial Sequence
  Synthetic oligonucleotide
taagcgtgggacaccagggcttgagcgttt

SEQ ID NO: 210844 - DNA, 30 bp, Artificial Sequence
  Synthetic oligonucleotide
gtcgcctgcatcagaggtgaatacgcgttt

SEQ ID NO: 210845 - DNA, 30 bp, Artificial Sequence
  Synthetic oligonucleotide
taatgataccgagaatccgcactctcgttt

SEQ ID NO: 210846 - DNA, 30 bp, Artificial Sequence
  Synthetic oligonucleotide
gtaggtacttatgtgatggtaaggtcgttt

SEQ ID NO: 210847 - DNA, 30 bp, Artificial Sequence
  Synthetic oligonucleotide
cacgtttcattgctttaagtgcaaaggttt

SEQ ID NO: 210848 - DNA, 30 bp, Artificial Sequence
  Synthetic oligonucleotide
aggggtccgggcgttcacaaataaaggttt

SEQ ID NO: 210849 - DNA, 30 bp, Artificial Sequence
  Synthetic oligonucleotide
tcgagggtatgtcgtgtcaggctaaggttt

SEQ ID NO: 210850 - DNA, 30 bp, Artificial Sequence
  Synthetic oligonucleotide
catgcctaaactcgtaacagtcccaggttt

SEQ ID NO: 210851 - DNA, 30 bp, Artificial Sequence
  Synthetic oligonucleotide
gcgtggccggggtcgggctaagcgaggttt

SEQ ID NO: 210852 - DNA, 30 bp, Artificial Sequence
  Synthetic oligonucleotide
atagggaatcatacggtacgacttaggttt

SEQ ID NO: 210853 - DNA, 30 bp, Artificial Sequence
  Synthetic oligonucleotide
gactgaagctggttaaggcacgaccggttt

SEQ ID NO: 210854 - DNA, 30 bp, Artificial Sequence
  Synthetic oligonucleotide
ataggtggtgttatcctcacttatcggttt

SEQ ID NO: 210855 - DNA, 30 bp, Artificial Sequence
  Synthetic oligonucleotide
ggcacggatctggtcgtacacatagggttt

SEQ ID NO: 210856 - DNA, 30 bp, Artificial Sequence
  Synthetic oligonucleotide
gcataatctagtgttattagtaaggggttt

SEQ ID NO: 210857 - DNA, 30 bp, Artificial Sequence
  Synthetic oligonucleotide
ccaagacaatcggggatggcttaggggttt

SEQ ID NO: 210858 - DNA, 30 bp, Artificial Sequence
  Synthetic oligonucleotide
agggtgacgtttaggtcttgcacggggttt

SEQ ID NO: 210859 - DNA, 30 bp, Artificial Sequence
  Synthetic oligonucleotide
atatcgtcattcaaaaagagtactgggttt

SEQ ID NO: 210860 - DNA, 30 bp, Artificial Sequence
  Synthetic oligonucleotide
aggggggtataggagtccccagttgggttt

SEQ ID NO: 210861 - DNA, 30 bp, Artificial Sequence
  Synthetic oligonucleotide
cacagaatataaaccgcctcaatatggttt

SEQ ID NO: 210862 - DNA, 30 bp, Artificial Sequence
  Synthetic oligonucleotide
gcaagattggcgctaaatagatcgtggttt

SEQ ID NO: 210863 - DNA, 30 bp, Artificial Sequence
  Synthetic oligonucleotide
gaactgtcataccacttgttccattggttt

SEQ ID NO: 210864 - DNA, 30 bp, Artificial Sequence
  Synthetic oligonucleotide
ccacgaagaaagaatatctgtcaaatgttt

SEQ ID NO: 210865 - DNA, 30 bp, Artificial Sequence
  Synthetic oligonucleotide
accagtgtcagggacgcacgatggatgttt

SEQ ID NO: 210866 - DNA, 30 bp, Artificial Sequence
  Synthetic oligonucleotide
atatcgttaagcaatgagatcaagctgttt

SEQ ID NO: 210867 - DNA, 30 bp, Artificial Sequence
  Synthetic oligonucleotide
aagtctgtggtgcaagggtcacatctgttt

SEQ ID NO: 210868 - DNA, 30 bp, Artificial Sequence
  Synthetic oligonucleotide
aagggcaaaccttcggcttcccccgtgttt

SEQ ID NO: 210869 - DNA, 30 bp, Artificial Sequence
  Synthetic oligonucleotide
ggggcctccactaaaagttagggcgtgttt

SEQ ID NO: 210870 - DNA, 30 bp, Artificial Sequence
  Synthetic oligonucleotide
cggctttataacagctttgggggggtgttt

SEQ ID NO: 210871 - DNA, 30 bp, Artificial Sequence
  Synthetic oligonucleotide
tgttgcggaagtcaaacaatagtggtgttt

SEQ ID NO: 210872 - DNA, 30 bp, Artificial Sequence
  Synthetic oligonucleotide
ttacacagggattgacgcaccgatgtgttt

SEQ ID NO: 210873 - DNA, 30 bp, Artificial Sequence
  Synthetic oligonucleotide
catactcaacactacattagccctgtgttt

SEQ ID NO: 210874 - DNA, 30 bp, Artificial Sequence
  Synthetic oligonucleotide
gtacgaggggatgtgccagcttccttgttt

SEQ ID NO: 210875 - DNA, 30 bp, Artificial Sequence
  Synthetic oligonucleotide
ggtaaacttatgggctatactcgcttgttt

SEQ ID NO: 210876 - DNA, 30 bp, Artificial Sequence
  Synthetic oligonucleotide
aggaacaagccaacatcgatatagttgttt

SEQ ID NO: 210877 - DNA, 30 bp, Artificial Sequence
  Synthetic oligonucleotide
attcaacagcatggattagtgtaaaatttt

SEQ ID NO: 210878 - DNA, 30 bp, Artificial Sequence
  Synthetic oligonucleotide
acggaagacgcggatggcctactaaatttt

SEQ ID NO: 210879 - DNA, 30 bp, Artificial Sequence
  Synthetic oligonucleotide
ccgagcgctgtctctcagtctcggaatttt

SEQ ID NO: 210880 - DNA, 30 bp, Artificial Sequence
  Synthetic oligonucleotide
ttgctgggaaacagttccctaggccatttt

SEQ ID NO: 210881 - DNA, 30 bp, Artificial Sequence
  Synthetic oligonucleotide
atcgatctgggcactcgaaacggccatttt

SEQ ID NO: 210882 - DNA, 30 bp, Artificial Sequence
  Synthetic oligonucleotide
atcgaagaatataaggggacctaggatttt

SEQ ID NO: 210883 - DNA, 30 bp, Artificial Sequence
  Synthetic oligonucleotide
cagcagagcaatggagtctcgtcagctttt

SEQ ID NO: 210884 - DNA, 30 bp, Artificial Sequence
  Synthetic oligonucleotide
ggtggtcatagccacagccaccgagctttt

SEQ ID NO: 210885 - DNA, 30 bp, Artificial Sequence
  Synthetic oligonucleotide
atgacggacccgacaaaccagaaggctttt

SEQ ID NO: 210886 - DNA, 30 bp, Artificial Sequence
  Synthetic oligonucleotide
ttgagctagttcgttccgcggggggctttt

SEQ ID NO: 210887 - DNA, 30 bp, Artificial Sequence
  Synthetic oligonucleotide
cagtgggaatatgctgatcgtcattctttt

SEQ ID NO: 210888 - DNA, 30 bp, Artificial Sequence
  Synthetic oligonucleotide
tggcattagggaaatttgtgtttgagtttt

SEQ ID NO: 210889 - DNA, 30 bp, Artificial Sequence
  Synthetic oligonucleotide
cacacaagttctgtctcataagcgcgtttt

SEQ ID NO: 210890 - DNA, 30 bp, Artificial Sequence
  Synthetic oligonucleotide
cggacaccgcaacgggtgttgacaggtttt

SEQ ID NO: 210891 - DNA, 30 bp, Artificial Sequence
  Synthetic oligonucleotide
cgaacattgctggccggggcgcccggtttt

SEQ ID NO: 210892 - DNA, 30 bp, Artificial Sequence
  Synthetic oligonucleotide
caggaatatcctaaattggagcgatgtttt

SEQ ID NO: 210893 - DNA, 30 bp, Artificial Sequence
  Synthetic oligonucleotide
tcatagatctgccttgttctgggatgtttt

SEQ ID NO: 210894 - DNA, 30 bp, Artificial Sequence
  Synthetic oligonucleotide
ctctggaactgtgacgtgtccttatgtttt

SEQ ID NO: 210895 - DNA, 30 bp, Artificial Sequence
  Synthetic oligonucleotide
tgcgtaaaagcggggggagaaagaattttt

SEQ ID NO: 210896 - DNA, 30 bp, Artificial Sequence
  Synthetic oligonucleotide
cgtaagggtgcaggaggtcaaatgattttt

SEQ ID NO: 210897 - DNA, 30 bp, Artificial Sequence
  Synthetic oligonucleotide
ccctcaggggttggcataatcaatattttt

SEQ ID NO: 210898 - DNA, 30 bp, Artificial Sequence
  Synthetic oligonucleotide
tgtacttaggggaaacgagttaatattttt

SEQ ID NO: 210899 - DNA, 30 bp, Artificial Sequence
  Synthetic oligonucleotide
ggcggcgactttgcgtaactttacgttttt

SEQ ID NO: 210900 - DNA, 30 bp, Artificial Sequence
  Synthetic oligonucleotide
taagttgagtgagtcttcaagactgttttt

SEQ ID NO: 210901 - DNA, 30 bp, Artificial Sequence
  Synthetic oligonucleotide
ttacgagtgacttattcatcggttgttttt

SEQ ID NO: 210902 - DNA, 30 bp, Artificial Sequence
  Synthetic oligonucleotide
cacaaacatgacgactggtttacctttttt

SEQ ID NO: 210903 - DNA, 30 bp, Artificial Sequence
  Synthetic oligonucleotide
cgtaacaagggggaccgtgactcctttttt

SEQ ID NO: 210904 - DNA, 30 bp, Artificial Sequence
  Synthetic oligonucleotide
ccgctcgtaggggaggggctacattttttt

SEQ ID NO: 210905 - DNA, 30 bp, Artificial Sequence
  Synthetic oligonucleotide
gggaaggaggaaagatcagactcaaaaaaa

SEQ ID NO: 210906 - DNA, 30 bp, Artificial Sequence
  Synthetic oligonucleotide
gctaaggatttggggatgtacataaaaaaa

SEQ ID NO: 210907 - DNA, 30 bp, Artificial Sequence
  Synthetic oligonucleotide
gaggattgggacggcgaaccccccaaaaaa

SEQ ID NO: 210908 - DNA, 30 bp, Artificial Sequence
  Synthetic oligonucleotide
gtgctcggaagtaagcagaagggcaaaaaa

SEQ ID NO: 210909 - DNA, 30 bp, Artificial Sequence
  Synthetic oligonucleotide
tcaggtagccgcggtccaaactgcaaaaaa

SEQ ID NO: 210910 - DNA, 30 bp, Artificial Sequence
  Synthetic oligonucleotide
agacacttcattataacgggtctcaaaaaa

SEQ ID NO: 210911 - DNA, 30 bp, Artificial Sequence
  Synthetic oligonucleotide
tagcatctggtgccactgttagtcaaaaaa

SEQ ID NO: 210912 - DNA, 30 bp, Artificial Sequence
  Synthetic oligonucleotide
ccacaagtcatgcttgctcctaagaaaaaa

SEQ ID NO: 210913 - DNA, 30 bp, Artificial Sequence
  Synthetic oligonucleotide
ccattataattacaaaaagcaacgaaaaaa

SEQ ID NO: 210914 - DNA, 30 bp, Artificial Sequence
  Synthetic oligonucleotide
atcctcggcagtcagtgtggggggaaaaaa

SEQ ID NO: 210915 - DNA, 30 bp, Artificial Sequence
  Synthetic oligonucleotide
accccacggcaagcccggcctatgaaaaaa

SEQ ID NO: 210916 - DNA, 31 bp, Artificial Sequence
  Synthetic oligonucleotide
cgcgtgccgattagcttgtgctgataaaaaa

SEQ ID NO: 210917 - DNA, 30 bp, Artificial Sequence
  Synthetic oligonucleotide
cggcctgggagacagcagtagactaaaaaa

SEQ ID NO: 210918 - DNA, 30 bp, Artificial Sequence
  Synthetic oligonucleotide
aaggaattagtataagacaggagtaaaaaa

SEQ ID NO: 210919 - DNA, 30 bp, Artificial Sequence
  Synthetic oligonucleotide
gggtctccggctgtcactcaccttaaaaaa

SEQ ID NO: 210920 - DNA, 30 bp, Artificial Sequence
  Synthetic oligonucleotide
ttcgatagtggaaaactaggtacacaaaaa

SEQ ID NO: 210921 - DNA, 30 bp, Artificial Sequence
  Synthetic oligonucleotide
gccgtaaggggaattcccagttcacaaaaa

SEQ ID NO: 210922 - DNA, 30 bp, Artificial Sequence
  Synthetic oligonucleotide
aaacaggcatagagtcctttactacaaaaa

SEQ ID NO: 210923 - DNA, 30 bp, Artificial Sequence
  Synthetic oligonucleotide
ataggaggagtcggaaactaaatccaaaaa

SEQ ID NO: 210924 - DNA, 30 bp, Artificial Sequence
  Synthetic oligonucleotide
ggacggaatgacgtgcacgaattgcaaaaa

SEQ ID NO: 210925 - DNA, 30 bp, Artificial Sequence
  Synthetic oligonucleotide
acgggcagggccttcccagtaactcaaaaa

SEQ ID NO: 210926 - DNA, 30 bp, Artificial Sequence
  Synthetic oligonucleotide
gaagagtgtcgtgcttaagccttagaaaaa

SEQ ID NO: 210927 - DNA, 30 bp, Artificial Sequence
  Synthetic oligonucleotide
caaccgagagagtagtggcgcttagaaaaa

SEQ ID NO: 210928 - DNA, 30 bp, Artificial Sequence
  Synthetic oligonucleotide
gaaccttcgtcctcgtcaacctacgaaaaa

SEQ ID NO: 210929 - DNA, 30 bp, Artificial Sequence
  Synthetic oligonucleotide
cgatattatttagctaataccccggaaaaa

SEQ ID NO: 210930 - DNA, 30 bp, Artificial Sequence
  Synthetic oligonucleotide
aaggcttgttacgcctcccggagggaaaaa

SEQ ID NO: 210931 - DNA, 30 bp, Artificial Sequence
  Synthetic oligonucleotide
gcgtcacagcgagttgtatagcctgaaaaa

SEQ ID NO: 210932 - DNA, 30 bp, Artificial Sequence
  Synthetic oligonucleotide
acagaacttttgttcaggtcggttgaaaaa

SEQ ID NO: 210933 - DNA, 30 bp, Artificial Sequence
  Synthetic oligonucleotide
cgttcggacgagcaattggagggataaaaa

SEQ ID NO: 210934 - DNA, 31 bp, Artificial Sequence
  Synthetic oligonucleotide
ggttggtctgcatcacggcaactagtaaaaa

SEQ ID NO: 210935 - DNA, 30 bp, Artificial Sequence
  Synthetic oligonucleotide
acaatcgaagtagcactagccctgtaaaaa

SEQ ID NO: 210936 - DNA, 30 bp, Artificial Sequence
  Synthetic oligonucleotide
tgtagggtcccactggatagggattaaaaa

SEQ ID NO: 210937 - DNA, 30 bp, Artificial Sequence
  Synthetic oligonucleotide
aagcataaaccacaatctaattgaacaaaa

SEQ ID NO: 210938 - DNA, 30 bp, Artificial Sequence
  Synthetic oligonucleotide
tggcacgacaattcaaaggccatcacaaaa

SEQ ID NO: 210939 - DNA, 30 bp, Artificial Sequence
  Synthetic oligonucleotide
ccatcttcggaagggcgtgcgccaccaaaa

SEQ ID NO: 210940 - DNA, 30 bp, Artificial Sequence
  Synthetic oligonucleotide
aagacatcgttcgttataccggtaccaaaa

SEQ ID NO: 210941 - DNA, 30 bp, Artificial Sequence
  Synthetic oligonucleotide
gtggttctgggaagtattttgcccccaaaa

SEQ ID NO: 210942 - DNA, 30 bp, Artificial Sequence
  Synthetic oligonucleotide
tgttgtaaccgggtctttagaatcccaaaa

SEQ ID NO: 210943 - DNA, 30 bp, Artificial Sequence
  Synthetic oligonucleotide
ttaagaggacccggcaggtcgttgccaaaa

SEQ ID NO: 210944 - DNA, 30 bp, Artificial Sequence
  Synthetic oligonucleotide
agcgggctttctaagggcaccgatccaaaa

SEQ ID NO: 210945 - DNA, 30 bp, Artificial Sequence
  Synthetic oligonucleotide
cttggcggttaagatcgcgtgtgagcaaaa

SEQ ID NO: 210946 - DNA, 30 bp, Artificial Sequence
  Synthetic oligonucleotide
cacgcagctgaaggcttcggcggcgcaaaa

SEQ ID NO: 210947 - DNA, 30 bp, Artificial Sequence
  Synthetic oligonucleotide
aacatggcgctgtcacgatacatcgcaaaa

SEQ ID NO: 210948 - DNA, 30 bp, Artificial Sequence
  Synthetic oligonucleotide
cctctctgcggggcaatcatctctgcaaaa

SEQ ID NO: 210949 - DNA, 30 bp, Artificial Sequence
  Synthetic oligonucleotide
atgaagtctatataagggagtgaatcaaaa

SEQ ID NO: 210950 - DNA, 30 bp, Artificial Sequence
  Synthetic oligonucleotide
tcacaattccttacattcggtacatcaaaa

SEQ ID NO: 210951 - DNA, 30 bp, Artificial Sequence
  Synthetic oligonucleotide
agagtagccggctcgtgcgtatgatcaaaa

SEQ ID NO: 210952 - DNA, 30 bp, Artificial Sequence
  Synthetic oligonucleotide
ccacataactgtacaacttataggtcaaaa

SEQ ID NO: 210953 - DNA, 30 bp, Artificial Sequence
  Synthetic oligonucleotide
tgcactcatgagttcagtcttctgtcaaaa

SEQ ID NO: 210954 - DNA, 30 bp, Artificial Sequence
  Synthetic oligonucleotide
tgagcctctacaagaggcaccgcaagaaaa

SEQ ID NO: 210955 - DNA, 30 bp, Artificial Sequence
  Synthetic oligonucleotide
atggtatgcgcagtgggagattacagaaaa

SEQ ID NO: 210956 - DNA, 30 bp, Artificial Sequence
  Synthetic oligonucleotide
ggggtgagcgttttgtctcagtcacgaaaa

SEQ ID NO: 210957 - DNA, 30 bp, Artificial Sequence
  Synthetic oligonucleotide
accactcaggatgatctataaggacgaaaa

SEQ ID NO: 210958 - DNA, 30 bp, Artificial Sequence
  Synthetic oligonucleotide
gagctttgcggcgccccgcgtatacgaaaa

SEQ ID NO: 210959 - DNA, 30 bp, Artificial Sequence
  Synthetic oligonucleotide
agttctcacaggcacagacacaaccgaaaa

SEQ ID NO: 210960 - DNA, 30 bp, Artificial Sequence
  Synthetic oligonucleotide
gacatggaaaggtccaactcaacccgaaaa

SEQ ID NO: 210961 - DNA, 30 bp, Artificial Sequence
  Synthetic oligonucleotide
tgtcattacccgagagccttatgccgaaaa

SEQ ID NO: 210962 - DNA, 30 bp, Artificial Sequence
  Synthetic oligonucleotide
gcacttagggtctagtaatgcctccgaaaa

SEQ ID NO: 210963 - DNA, 30 bp, Artificial Sequence
  Synthetic oligonucleotide
tcaatagggcaaattatcgagttccgaaaa

SEQ ID NO: 210964 - DNA, 30 bp, Artificial Sequence
  Synthetic oligonucleotide
cggcctctgttttattggtgacatcgaaaa

SEQ ID NO: 210965 - DNA, 30 bp, Artificial Sequence
  Synthetic oligonucleotide
ggagtgggatggcccacatcaggtcgaaaa

SEQ ID NO: 210966 - DNA, 30 bp, Artificial Sequence
  Synthetic oligonucleotide
ggcgggcagctggcgaggcaatgaggaaaa

SEQ ID NO: 210967 - DNA, 30 bp, Artificial Sequence
  Synthetic oligonucleotide
ctcgggaaccatcgtaaatggggcggaaaa

SEQ ID NO: 210968 - DNA, 30 bp, Artificial Sequence
  Synthetic oligonucleotide
ctgtacgtcacgctaggggtgatcggaaaa

SEQ ID NO: 210969 - DNA, 30 bp, Artificial Sequence
  Synthetic oligonucleotide
gagcgatctaaccttccgcgtatcggaaaa

SEQ ID NO: 210970 - DNA, 30 bp, Artificial Sequence
  Synthetic oligonucleotide
tggagttatcgtctcagatcacagggaaaa

SEQ ID NO: 210971 - DNA, 30 bp, Artificial Sequence
  Synthetic oligonucleotide
ggtgatcattcgaaagtctataggggaaaa

SEQ ID NO: 210972 - DNA, 30 bp, Artificial Sequence
  Synthetic oligonucleotide
cctaggcatgtgtgcagctcgagatgaaaa

SEQ ID NO: 210973 - DNA, 30 bp, Artificial Sequence
  Synthetic oligonucleotide
ggtaacaggtccaggttattcgagtgaaaa

SEQ ID NO: 210974 - DNA, 30 bp, Artificial Sequence
  Synthetic oligonucleotide
tcttacagattgaatcgtaacccaataaaa

SEQ ID NO: 210975 - DNA, 30 bp, Artificial Sequence
  Synthetic oligonucleotide
ccatgatctcagagtgatggccccataaaa

SEQ ID NO: 210976 - DNA, 30 bp, Artificial Sequence
  Synthetic oligonucleotide
gagtgaatgtcggttccggtggagataaaa

SEQ ID NO: 210977 - DNA, 30 bp, Artificial Sequence
  Synthetic oligonucleotide
agcttaggaggttgtttcagcgcgataaaa

SEQ ID NO: 210978 - DNA, 30 bp, Artificial Sequence
  Synthetic oligonucleotide
agttgtcagatgggatttgtctcgataaaa

SEQ ID NO: 210979 - DNA, 30 bp, Artificial Sequence
  Synthetic oligonucleotide
gctgtccgggcggtcagtcttatgataaaa

SEQ ID NO: 210980 - DNA, 30 bp, Artificial Sequence
  Synthetic oligonucleotide
actcgactggcggggtggttagtgataaaa

SEQ ID NO: 210981 - DNA, 30 bp, Artificial Sequence
  Synthetic oligonucleotide
acgtctcgtcaacttaaatggcatataaaa

SEQ ID NO: 210982 - DNA, 30 bp, Artificial Sequence
  Synthetic oligonucleotide
tgcgtttaactagtggtcttagatataaaa

SEQ ID NO: 210983 - DNA, 30 bp, Artificial Sequence
  Synthetic oligonucleotide
cgccttcaatacgttaagtaaatactaaaa

SEQ ID NO: 210984 - DNA, 30 bp, Artificial Sequence
  Synthetic oligonucleotide
tagggggaccaccgaagagcggagctaaaa

SEQ ID NO: 210985 - DNA, 30 bp, Artificial Sequence
  Synthetic oligonucleotide
aatggtagcacgacataggcgtagctaaaa

SEQ ID NO: 210986 - DNA, 30 bp, Artificial Sequence
  Synthetic oligonucleotide
cttgtgtttatgaaaccaaaaccgctaaaa

SEQ ID NO: 210987 - DNA, 30 bp, Artificial Sequence
  Synthetic oligonucleotide
gtcagcttggtcaatgagccaaggctaaaa

SEQ ID NO: 210988 - DNA, 30 bp, Artificial Sequence
  Synthetic oligonucleotide
taagttaccgtcacgacccgaaggctaaaa

SEQ ID NO: 210989 - DNA, 30 bp, Artificial Sequence
  Synthetic oligonucleotide
aggataactggggcttattcatggctaaaa

SEQ ID NO: 210990 - DNA, 30 bp, Artificial Sequence
  Synthetic oligonucleotide
gggcgaccgacattgagcgtgctgctaaaa

SEQ ID NO: 210991 - DNA, 30 bp, Artificial Sequence
  Synthetic oligonucleotide
agtgcgccaataacccaggccggtctaaaa

SEQ ID NO: 210992 - DNA, 30 bp, Artificial Sequence
  Synthetic oligonucleotide
gcctcattaagtgggacgcatggtctaaaa

SEQ ID NO: 210993 - DNA, 30 bp, Artificial Sequence
  Synthetic oligonucleotide
catcgtcttgtcagtagaaatcgagtaaaa

SEQ ID NO: 210994 - DNA, 29 bp, Artificial Sequence
  Synthetic oligonucleotide
ggtacccaataaaaaattctgacgtaaaa

SEQ ID NO: 210995 - DNA, 30 bp, Artificial Sequence
  Synthetic oligonucleotide
cgtcctcgttctactccaagttacgtaaaa

SEQ ID NO: 210996 - DNA, 30 bp, Artificial Sequence
  Synthetic oligonucleotide
tatcggtaaaccagctgaaattatgtaaaa

SEQ ID NO: 210997 - DNA, 30 bp, Artificial Sequence
  Synthetic oligonucleotide
aagcggtggaaatcaaagtgccagttaaaa

SEQ ID NO: 210998 - DNA, 30 bp, Artificial Sequence
  Synthetic oligonucleotide
cgaaaacgaaacccgggtacgctgttaaaa

SEQ ID NO: 210999 - DNA, 30 bp, Artificial Sequence
  Synthetic oligonucleotide
cgtaggtatttacagcaggtcactttaaaa

SEQ ID NO: 211000 - DNA, 30 bp, Artificial Sequence
  Synthetic oligonucleotide
aagtcgggggcacgtcgccctcctttaaaa

SEQ ID NO: 211001 - DNA, 30 bp, Artificial Sequence
  Synthetic oligonucleotide
cccaaccggtacattcgatcatctttaaaa

SEQ ID NO: 211002 - DNA, 30 bp, Artificial Sequence
  Synthetic oligonucleotide
tagtcaacgagatgagggccttaaaacaaa

SEQ ID NO: 211003 - DNA, 30 bp, Artificial Sequence
  Synthetic oligonucleotide
tagggcgtgatcggagggctcctcaacaaa

SEQ ID NO: 211004 - DNA, 30 bp, Artificial Sequence
  Synthetic oligonucleotide
tccacctagcgcggccgtggcggtaacaaa

SEQ ID NO: 211005 - DNA, 30 bp, Artificial Sequence
  Synthetic oligonucleotide
aaggggtactctcccgagattgtacacaaa

SEQ ID NO: 211006 - DNA, 30 bp, Artificial Sequence
  Synthetic oligonucleotide
gtaactaccatcgcaagacgctcgcacaaa

SEQ ID NO: 211007 - DNA, 30 bp, Artificial Sequence
  Synthetic oligonucleotide
aacggtgccgcgaagcgtccagggcacaaa

SEQ ID NO: 211008 - DNA, 30 bp, Artificial Sequence
  Synthetic oligonucleotide
tctcgaccgtactgaatccacactcacaaa

SEQ ID NO: 211009 - DNA, 30 bp, Artificial Sequence
  Synthetic oligonucleotide
aacacctctatctcacgggaggtagacaaa

SEQ ID NO: 211010 - DNA, 30 bp, Artificial Sequence
  Synthetic oligonucleotide
ccttctggggaccggctcccagacgacaaa

SEQ ID NO: 211011 - DNA, 30 bp, Artificial Sequence
  Synthetic oligonucleotide
tttctacctccgttaggatggggcgacaaa

SEQ ID NO: 211012 - DNA, 30 bp, Artificial Sequence
  Synthetic oligonucleotide
tgaaaggcctccaaaagagacggtgacaaa

SEQ ID NO: 211013 - DNA, 30 bp, Artificial Sequence
  Synthetic oligonucleotide
gtcttgaagaaaggtttttgcacatacaaa

SEQ ID NO: 211014 - DNA, 30 bp, Artificial Sequence
  Synthetic oligonucleotide
ccaatgtagggatgataaggctcatacaaa

SEQ ID NO: 211015 - DNA, 30 bp, Artificial Sequence
  Synthetic oligonucleotide
tctgtcgaaatattggcataactatacaaa

SEQ ID NO: 211016 - DNA, 30 bp, Artificial Sequence
  Synthetic oligonucleotide
atttataacttgagattatcggtctacaaa

SEQ ID NO: 211017 - DNA, 31 bp, Artificial Sequence
  Synthetic oligonucleotide
tttaacgcgatttcttccgtttgagtacaaa

SEQ ID NO: 211018 - DNA, 30 bp, Artificial Sequence
  Synthetic oligonucleotide
cctgattaagaccctagttagtggtacaaa

SEQ ID NO: 211019 - DNA, 30 bp, Artificial Sequence
  Synthetic oligonucleotide
ctaagctagaacgcttgcggaaattacaaa

SEQ ID NO: 211020 - DNA, 30 bp, Artificial Sequence
  Synthetic oligonucleotide
gaagtggacgtggtactgagccgaaccaaa

SEQ ID NO: 211021 - DNA, 30 bp, Artificial Sequence
  Synthetic oligonucleotide
ctaagtatctaaggaaaatcggtaaccaaa

SEQ ID NO: 211022 - DNA, 30 bp, Artificial Sequence
  Synthetic oligonucleotide
acggtccgatgacgctgatccgggaccaaa

SEQ ID NO: 211023 - DNA, 30 bp, Artificial Sequence
  Synthetic oligonucleotide
ccgtcgcaagtgaagagcagagtgaccaaa

SEQ ID NO: 211024 - DNA, 30 bp, Artificial Sequence
  Synthetic oligonucleotide
ttgagatccgtccacactcgaaataccaaa

SEQ ID NO: 211025 - DNA, 30 bp, Artificial Sequence
  Synthetic oligonucleotide
aaccgtgccaagttcgacttacgtaccaaa

SEQ ID NO: 211026 - DNA, 30 bp, Artificial Sequence
  Synthetic oligonucleotide
catgaccgtcgacgcataaagcgtaccaaa

SEQ ID NO: 211027 - DNA, 30 bp, Artificial Sequence
  Synthetic oligonucleotide
tagcgacgtgccctcgttagatgtaccaaa

SEQ ID NO: 211028 - DNA, 30 bp, Artificial Sequence
  Synthetic oligonucleotide
tacggcaatcattcggtgggacgccccaaa

SEQ ID NO: 211029 - DNA, 30 bp, Artificial Sequence
  Synthetic oligonucleotide
gcacggaggttgggttactcatgccccaaa

SEQ ID NO: 211030 - DNA, 30 bp, Artificial Sequence
  Synthetic oligonucleotide
gttgtacagtacaaggggtatcggcccaaa

SEQ ID NO: 211031 - DNA, 30 bp, Artificial Sequence
  Synthetic oligonucleotide
tgcggggtgtcgtatgcagtgccagccaaa

SEQ ID NO: 211032 - DNA, 30 bp, Artificial Sequence
  Synthetic oligonucleotide
gcgcaagcgattaatttacagctagccaaa

SEQ ID NO: 211033 - DNA, 30 bp, Artificial Sequence
  Synthetic oligonucleotide
cttgttgggattcataaactttacgccaaa

SEQ ID NO: 211034 - DNA, 30 bp, Artificial Sequence
  Synthetic oligonucleotide
atgctatcagggccttaggggaatgccaaa

SEQ ID NO: 211035 - DNA, 30 bp, Artificial Sequence
  Synthetic oligonucleotide
atgtagtaaaaggtatcgacaagatccaaa

SEQ ID NO: 211036 - DNA, 30 bp, Artificial Sequence
  Synthetic oligonucleotide
accctggtgcgaatgctgacaagctccaaa

SEQ ID NO: 211037 - DNA, 30 bp, Artificial Sequence
  Synthetic oligonucleotide
taaaatgacgcctagacgcataggtccaaa

SEQ ID NO: 211038 - DNA, 30 bp, Artificial Sequence
  Synthetic oligonucleotide
tatgcggagtgcttaaagtcgcggtccaaa

SEQ ID NO: 211039 - DNA, 30 bp, Artificial Sequence
  Synthetic oligonucleotide
ctacgatattgagtaaagcgaaattccaaa

SEQ ID NO: 211040 - DNA, 30 bp, Artificial Sequence
  Synthetic oligonucleotide
tggactatatataaattgcacgaaagcaaa

SEQ ID NO: 211041 - DNA, 30 bp, Artificial Sequence
  Synthetic oligonucleotide
cccatgggtctacggtcagtgctgagcaaa

SEQ ID NO: 211042 - DNA, 30 bp, Artificial Sequence
  Synthetic oligonucleotide
aatgtatatagatactcgaggaatagcaaa

SEQ ID NO: 211043 - DNA, 30 bp, Artificial Sequence
  Synthetic oligonucleotide
aagaggttaatatagacccaccatagcaaa

SEQ ID NO: 211044 - DNA, 30 bp, Artificial Sequence
  Synthetic oligonucleotide
gggcataatcattaactcagaattagcaaa

SEQ ID NO: 211045 - DNA, 30 bp, Artificial Sequence
  Synthetic oligonucleotide
gaaaggatagaggatggctggtgccgcaaa

SEQ ID NO: 211046 - DNA, 30 bp, Artificial Sequence
  Synthetic oligonucleotide
ctccgaagctcctcggggcgaatccgcaaa

SEQ ID NO: 211047 - DNA, 30 bp, Artificial Sequence
  Synthetic oligonucleotide
cgaagaacgttcggctacttaacgcgcaaa

SEQ ID NO: 211048 - DNA, 30 bp, Artificial Sequence
  Synthetic oligonucleotide
acatgcctttttggtcaggtactgcgcaaa

SEQ ID NO: 211049 - DNA, 30 bp, Artificial Sequence
  Synthetic oligonucleotide
tcacgtatatggtccatctgatctcgcaaa

SEQ ID NO: 211050 - DNA, 30 bp, Artificial Sequence
  Synthetic oligonucleotide
acatcagggttcatccagtatgccggcaaa

SEQ ID NO: 211051 - DNA, 30 bp, Artificial Sequence
  Synthetic oligonucleotide
gtaagtcgaattcatttcactagtggcaaa

SEQ ID NO: 211052 - DNA, 30 bp, Artificial Sequence
  Synthetic oligonucleotide
aagaataaacgcgttggcaaggtatgcaaa

SEQ ID NO: 211053 - DNA, 30 bp, Artificial Sequence
  Synthetic oligonucleotide
atagggttgatgttgccacggacctgcaaa

SEQ ID NO: 211054 - DNA, 30 bp, Artificial Sequence
  Synthetic oligonucleotide
cggataaaaggtgaatattggtcctgcaaa

SEQ ID NO: 211055 - DNA, 30 bp, Artificial Sequence
  Synthetic oligonucleotide
ggtataatatcgtccaaccaccgctgcaaa

SEQ ID NO: 211056 - DNA, 30 bp, Artificial Sequence
  Synthetic oligonucleotide
caaaggattgtccaagccctgaaaatcaaa

SEQ ID NO: 211057 - DNA, 30 bp, Artificial Sequence
  Synthetic oligonucleotide
gcttgcttgtcccccaaacgtcgaatcaaa

SEQ ID NO: 211058 - DNA, 30 bp, Artificial Sequence
  Synthetic oligonucleotide
atacaattagggatcagccagagactcaaa

SEQ ID NO: 211059 - DNA, 30 bp, Artificial Sequence
  Synthetic oligonucleotide
ggccttcaaccatacttgtgaaacctcaaa

SEQ ID NO: 211060 - DNA, 30 bp, Artificial Sequence
  Synthetic oligonucleotide
gggaaatgtgaaacgttccgtctgctcaaa

SEQ ID NO: 211061 - DNA, 30 bp, Artificial Sequence
  Synthetic oligonucleotide
ccaagatctttatcttctcacgtgctcaaa

SEQ ID NO: 211062 - DNA, 30 bp, Artificial Sequence
  Synthetic oligonucleotide
cgctgctctcgagtccaagagaatctcaaa

SEQ ID NO: 211063 - DNA, 30 bp, Artificial Sequence
  Synthetic oligonucleotide
gaggttcgaccgtagattgctgctctcaaa

SEQ ID NO: 211064 - DNA, 30 bp, Artificial Sequence
  Synthetic oligonucleotide
taggcataacgttcagcccaaagtctcaaa

SEQ ID NO: 211065 - DNA, 30 bp, Artificial Sequence
  Synthetic oligonucleotide
ctaccacaacatacttccactcttctcaaa

SEQ ID NO: 211066 - DNA, 30 bp, Artificial Sequence
  Synthetic oligonucleotide
aaaagtagctgggagataataagagtcaaa

SEQ ID NO: 211067 - DNA, 30 bp, Artificial Sequence
  Synthetic oligonucleotide
ctgttaacgcttcaggtgggagcggtcaaa

SEQ ID NO: 211068 - DNA, 30 bp, Artificial Sequence
  Synthetic oligonucleotide
cgttccaaaatttgtaaggagcgtgtcaaa

SEQ ID NO: 211069 - DNA, 30 bp, Artificial Sequence
  Synthetic oligonucleotide
ccctcaccttcatgttcggcgtgtgtcaaa

SEQ ID NO: 211070 - DNA, 30 bp, Artificial Sequence
  Synthetic oligonucleotide
tgtgcccacgttgatctatgatgattcaaa

SEQ ID NO: 211071 - DNA, 30 bp, Artificial Sequence
  Synthetic oligonucleotide
ggtggtgatataagcctggcacacttcaaa

SEQ ID NO: 211072 - DNA, 30 bp, Artificial Sequence
  Synthetic oligonucleotide
caggaattaccaccgtcgaaaaagttcaaa

SEQ ID NO: 211073 - DNA, 30 bp, Artificial Sequence
  Synthetic oligonucleotide
gagtcgtagaagttggagcatacgttcaaa

SEQ ID NO: 211074 - DNA, 30 bp, Artificial Sequence
  Synthetic oligonucleotide
ctgctatagtgatacccgccccggttcaaa

SEQ ID NO: 211075 - DNA, 30 bp, Artificial Sequence
  Synthetic oligonucleotide
tgttagcatgcaagaggcaagactttcaaa

SEQ ID NO: 211076 - DNA, 30 bp, Artificial Sequence
  Synthetic oligonucleotide
aggggttatataacgcaaggccaaaagaaa

SEQ ID NO: 211077 - DNA, 30 bp, Artificial Sequence
  Synthetic oligonucleotide
ggactccgctgtccacaacggccaaagaaa

SEQ ID NO: 211078 - DNA, 30 bp, Artificial Sequence
  Synthetic oligonucleotide
agcctttataaccgagccacctcaaagaaa

SEQ ID NO: 211079 - DNA, 30 bp, Artificial Sequence
  Synthetic oligonucleotide
tggccggaccaatcgtggctagagaagaaa

SEQ ID NO: 211080 - DNA, 30 bp, Artificial Sequence
  Synthetic oligonucleotide
tccggtttaggcggtagattcaggaagaaa

SEQ ID NO: 211081 - DNA, 30 bp, Artificial Sequence
  Synthetic oligonucleotide
ccgacatcctacggttccgggatgaagaaa

SEQ ID NO: 211082 - DNA, 30 bp, Artificial Sequence
  Synthetic oligonucleotide
ttaatgagactccagtacagtcaacagaaa

SEQ ID NO: 211083 - DNA, 30 bp, Artificial Sequence
  Synthetic oligonucleotide
gcccttgggatttgtcacatagcacagaaa

SEQ ID NO: 211084 - DNA, 30 bp, Artificial Sequence
  Synthetic oligonucleotide
acgatatatggctggagtctgagacagaaa

SEQ ID NO: 211085 - DNA, 30 bp, Artificial Sequence
  Synthetic oligonucleotide
attaataatgcgatgataggggcccagaaa

SEQ ID NO: 211086 - DNA, 30 bp, Artificial Sequence
  Synthetic oligonucleotide
agtcgtgtggtgggttcggtcaggcagaaa

SEQ ID NO: 211087 - DNA, 30 bp, Artificial Sequence
  Synthetic oligonucleotide
gttggctgcaaattccaccggttgcagaaa

SEQ ID NO: 211088 - DNA, 30 bp, Artificial Sequence
  Synthetic oligonucleotide
aggtcggtgtaactctttgaaattcagaaa

SEQ ID NO: 211089 - DNA, 30 bp, Artificial Sequence
  Synthetic oligonucleotide
catagttactcgaagcaaaaacaagagaaa

SEQ ID NO: 211090 - DNA, 30 bp, Artificial Sequence
  Synthetic oligonucleotide
gtgcctaatgaagtagaagatgcagagaaa

SEQ ID NO: 211091 - DNA, 30 bp, Artificial Sequence
  Synthetic oligonucleotide
acgacccttttgcacatattcgtagagaaa

SEQ ID NO: 211092 - DNA, 30 bp, Artificial Sequence
  Synthetic oligonucleotide
catagcataggaggcttctgggcggagaaa

SEQ ID NO: 211093 - DNA, 30 bp, Artificial Sequence
  Synthetic oligonucleotide
ctaatcatcgactgaataaatagtgagaaa

SEQ ID NO: 211094 - DNA, 30 bp, Artificial Sequence
  Synthetic oligonucleotide
agtgacctggattcaccattgcaatagaaa

SEQ ID NO: 211095 - DNA, 30 bp, Artificial Sequence
  Synthetic oligonucleotide
ctaggtttacgtccgaaggcaacatagaaa

SEQ ID NO: 211096 - DNA, 30 bp, Artificial Sequence
  Synthetic oligonucleotide
ccgctgataagccgtagtaagggatagaaa

SEQ ID NO: 211097 - DNA, 30 bp, Artificial Sequence
  Synthetic oligonucleotide
atacatagttcaaatcgagtcatatagaaa

SEQ ID NO: 211098 - DNA, 30 bp, Artificial Sequence
  Synthetic oligonucleotide
ctagagggagctgttgaaaaattatagaaa

SEQ ID NO: 211099 - DNA, 29 bp, Artificial Sequence
  Synthetic oligonucleotide
tagtttatggtagggaattgagctagaaa

SEQ ID NO: 211100 - DNA, 30 bp, Artificial Sequence
  Synthetic oligonucleotide
ccttccaattacctatgaaaccattagaaa

SEQ ID NO: 211101 - DNA, 30 bp, Artificial Sequence
  Synthetic oligonucleotide
ggttcttcgcgtagttaatattgaacgaaa

SEQ ID NO: 211102 - DNA, 30 bp, Artificial Sequence
  Synthetic oligonucleotide
gaagagacgagagcagtactgcgcacgaaa

SEQ ID NO: 211103 - DNA, 30 bp, Artificial Sequence
  Synthetic oligonucleotide
catacaagtaactttaagtctacgacgaaa

SEQ ID NO: 211104 - DNA, 30 bp, Artificial Sequence
  Synthetic oligonucleotide
tgtggcggcaggccatacttcgcgacgaaa

SEQ ID NO: 211105 - DNA, 30 bp, Artificial Sequence
  Synthetic oligonucleotide
gcgggaactcttagaatgtgtagtacgaaa

SEQ ID NO: 211106 - DNA, 30 bp, Artificial Sequence
  Synthetic oligonucleotide
gcttactttagtcgggaaacttgtacgaaa

SEQ ID NO: 211107 - DNA, 30 bp, Artificial Sequence
  Synthetic oligonucleotide
tcatgattcgggcattgagaatgggcgaaa

SEQ ID NO: 211108 - DNA, 30 bp, Artificial Sequence
  Synthetic oligonucleotide
atctacaacattaggctttaaagatcgaaa

SEQ ID NO: 211109 - DNA, 30 bp, Artificial Sequence
  Synthetic oligonucleotide
gcatcacctcatacgcgacgggggtcgaaa

SEQ ID NO: 211110 - DNA, 30 bp, Artificial Sequence
  Synthetic oligonucleotide
gtgggcaatcaggacctcgcaaattcgaaa

SEQ ID NO: 211111 - DNA, 30 bp, Artificial Sequence
  Synthetic oligonucleotide
gtgaagtttcgaacctaagtcagttcgaaa

SEQ ID NO: 211112 - DNA, 30 bp, Artificial Sequence
  Synthetic oligonucleotide
gctaggtcgttaggctgaaaagtcaggaaa

SEQ ID NO: 211113 - DNA, 30 bp, Artificial Sequence
  Synthetic oligonucleotide
aaagaggcagccccggaaaatgtcaggaaa

SEQ ID NO: 211114 - DNA, 30 bp, Artificial Sequence
  Synthetic oligonucleotide
caattcgcctagaggcggggaccgcggaaa

SEQ ID NO: 211115 - DNA, 30 bp, Artificial Sequence
  Synthetic oligonucleotide
atatccaggtcattggactgaaatcggaaa

SEQ ID NO: 211116 - DNA, 30 bp, Artificial Sequence
  Synthetic oligonucleotide
ctgaatactaagtgggtataggatcggaaa

SEQ ID NO: 211117 - DNA, 30 bp, Artificial Sequence
  Synthetic oligonucleotide
tgtttgatacgctcccgtcggaaagggaaa

SEQ ID NO: 211118 - DNA, 30 bp, Artificial Sequence
  Synthetic oligonucleotide
gctttaggtagcagccccaagctagggaaa

SEQ ID NO: 211119 - DNA, 30 bp, Artificial Sequence
  Synthetic oligonucleotide
cttgtttagtgtgatatttagctagggaaa

SEQ ID NO: 211120 - DNA, 30 bp, Artificial Sequence
  Synthetic oligonucleotide
gcgaagataaccgaaccagcaaacgggaaa

SEQ ID NO: 211121 - DNA, 30 bp, Artificial Sequence
  Synthetic oligonucleotide
atgaatagggcgctaccagaccgggggaaa

SEQ ID NO: 211122 - DNA, 30 bp, Artificial Sequence
  Synthetic oligonucleotide
gctatacttcggacccaagatattgggaaa

SEQ ID NO: 211123 - DNA, 30 bp, Artificial Sequence
  Synthetic oligonucleotide
ttattaggtcagtagtctgttctctggaaa

SEQ ID NO: 211124 - DNA, 30 bp, Artificial Sequence
  Synthetic oligonucleotide
cgttcgacatagagtctcgacaagtggaaa

SEQ ID NO: 211125 - DNA, 30 bp, Artificial Sequence
  Synthetic oligonucleotide
aactgtagtttcgaaggaggatcttggaaa

SEQ ID NO: 211126 - DNA, 30 bp, Artificial Sequence
  Synthetic oligonucleotide
aattataggtagcctggtttagtttggaaa

SEQ ID NO: 211127 - DNA, 30 bp, Artificial Sequence
  Synthetic oligonucleotide
caacggccttgaacataaatattttggaaa

SEQ ID NO: 211128 - DNA, 30 bp, Artificial Sequence
  Synthetic oligonucleotide
gaccggattgccgtgcacgcacaaatgaaa

SEQ ID NO: 211129 - DNA, 30 bp, Artificial Sequence
  Synthetic oligonucleotide
ttacacatttcggttttgaggcgaatgaaa

SEQ ID NO: 211130 - DNA, 30 bp, Artificial Sequence
  Synthetic oligonucleotide
cccctgcaatgccacaagcgcctaatgaaa

SEQ ID NO: 211131 - DNA, 30 bp, Artificial Sequence
  Synthetic oligonucleotide
tgtccacgaaatctatagtgattaatgaaa

SEQ ID NO: 211132 - DNA, 30 bp, Artificial Sequence
  Synthetic oligonucleotide
ccaacttgcaatagggtcctggccatgaaa

SEQ ID NO: 211133 - DNA, 30 bp, Artificial Sequence
  Synthetic oligonucleotide
gtagtttccgggacgatcggtctcatgaaa

SEQ ID NO: 211134 - DNA, 30 bp, Artificial Sequence
  Synthetic oligonucleotide
cgtcgggcgctgatcatatggaggatgaaa

SEQ ID NO: 211135 - DNA, 30 bp, Artificial Sequence
  Synthetic oligonucleotide
cttgaactacgctgtgcaagggggatgaaa

SEQ ID NO: 211136 - DNA, 30 bp, Artificial Sequence
  Synthetic oligonucleotide
atgctatcttattctcatcgactgatgaaa

SEQ ID NO: 211137 - DNA, 30 bp, Artificial Sequence
  Synthetic oligonucleotide
tcaggactttaaggcggtctaggactgaaa

SEQ ID NO: 211138 - DNA, 30 bp, Artificial Sequence
  Synthetic oligonucleotide
atcgcactgctgtaccgaccatagctgaaa

SEQ ID NO: 211139 - DNA, 30 bp, Artificial Sequence
  Synthetic oligonucleotide
cttagcaagtcgctagtaacgtcgctgaaa

SEQ ID NO: 211140 - DNA, 30 bp, Artificial Sequence
  Synthetic oligonucleotide
aaagcagcagataatgagatttatctgaaa

SEQ ID NO: 211141 - DNA, 30 bp, Artificial Sequence
  Synthetic oligonucleotide
tatacgccgggcaaagcgcggaaagtgaaa

SEQ ID NO: 211142 - DNA, 30 bp, Artificial Sequence
  Synthetic oligonucleotide
catatagacccttaacgtttcatcgtgaaa

SEQ ID NO: 211143 - DNA, 30 bp, Artificial Sequence
  Synthetic oligonucleotide
cggttattcggactagcatcccgggtgaaa

SEQ ID NO: 211144 - DNA, 30 bp, Artificial Sequence
  Synthetic oligonucleotide
actggcgtaaaatagtcgacgactgtgaaa

SEQ ID NO: 211145 - DNA, 30 bp, Artificial Sequence
  Synthetic oligonucleotide
ttacaagagtttgagtctagggctgtgaaa

SEQ ID NO: 211146 - DNA, 30 bp, Artificial Sequence
  Synthetic oligonucleotide
atcatgaatggggtgtgtgagtacttgaaa

SEQ ID NO: 211147 - DNA, 30 bp, Artificial Sequence
  Synthetic oligonucleotide
tagctttcaggggaatttaccggaaataaa

SEQ ID NO: 211148 - DNA, 30 bp, Artificial Sequence
  Synthetic oligonucleotide
actccgatccttcagaggtagataaataaa

SEQ ID NO: 211149 - DNA, 30 bp, Artificial Sequence
  Synthetic oligonucleotide
ctccagagcagtctgtagctgataaataaa

SEQ ID NO: 211150 - DNA, 30 bp, Artificial Sequence
  Synthetic oligonucleotide
cgctgaataggctcactgtatataaataaa

SEQ ID NO: 211151 - DNA, 30 bp, Artificial Sequence
  Synthetic oligonucleotide
cgccttgatgtgtgaggtgagacgaataaa

SEQ ID NO: 211152 - DNA, 31 bp, Artificial Sequence
  Synthetic oligonucleotide
gtcggttacggtgataaggcgttggaataaa

SEQ ID NO: 211153 - DNA, 30 bp, Artificial Sequence
  Synthetic oligonucleotide
tactttcaaagagatacaaggcataataaa

SEQ ID NO: 211154 - DNA, 30 bp, Artificial Sequence
  Synthetic oligonucleotide
agattgtagccaggtagattatgtaataaa

SEQ ID NO: 211155 - DNA, 30 bp, Artificial Sequence
  Synthetic oligonucleotide
aagcgttcagctacagcgacaacacataaa

SEQ ID NO: 211156 - DNA, 30 bp, Artificial Sequence
  Synthetic oligonucleotide
ccaactcggtagtgtttggaggtccataaa

SEQ ID NO: 211157 - DNA, 30 bp, Artificial Sequence
  Synthetic oligonucleotide
gaaggctgtattgtagtcaaaacgcataaa

SEQ ID NO: 211158 - DNA, 30 bp, Artificial Sequence
  Synthetic oligonucleotide
atggcgctgcgggataatcaaactcataaa

SEQ ID NO: 211159 - DNA, 30 bp, Artificial Sequence
  Synthetic oligonucleotide
aagctcttaaagcttcaccacattcataaa

SEQ ID NO: 211160 - DNA, 30 bp, Artificial Sequence
  Synthetic oligonucleotide
gaatggtttgagtcctggagtgcagataaa

SEQ ID NO: 211161 - DNA, 30 bp, Artificial Sequence
  Synthetic oligonucleotide
tttcaaatgagcttgagggccaacgataaa

SEQ ID NO: 211162 - DNA, 30 bp, Artificial Sequence
  Synthetic oligonucleotide
gtgatcaaggaacgaaggatgcaggataaa

SEQ ID NO: 211163 - DNA, 30 bp, Artificial Sequence
  Synthetic oligonucleotide
gaaattgtattgttgtagacagaggataaa

SEQ ID NO: 211164 - DNA, 30 bp, Artificial Sequence
  Synthetic oligonucleotide
ctatgaggtcaaatcgattgtgaggataaa

SEQ ID NO: 211165 - DNA, 30 bp, Artificial Sequence
  Synthetic oligonucleotide
cccaggagaccttacggcgcatctgataaa

SEQ ID NO: 211166 - DNA, 30 bp, Artificial Sequence
  Synthetic oligonucleotide
aatgggggtgggacagggcgaagatataaa

SEQ ID NO: 211167 - DNA, 30 bp, Artificial Sequence
  Synthetic oligonucleotide
cggctcgcagctcgtaagcaaggatataaa

SEQ ID NO: 211168 - DNA, 30 bp, Artificial Sequence
  Synthetic oligonucleotide
gcatcgcgctggtagtgtgggatatataaa

SEQ ID NO: 211169 - DNA, 30 bp, Artificial Sequence
  Synthetic oligonucleotide
ccaggaaggggttcacgtgaaaactataaa

SEQ ID NO: 211170 - DNA, 30 bp, Artificial Sequence
  Synthetic oligonucleotide
gcgttaaagtttaacgaggatcagtataaa

SEQ ID NO: 211171 - DNA, 30 bp, Artificial Sequence
  Synthetic oligonucleotide
aatcatcagttaggcatgctcgagtataaa

SEQ ID NO: 211172 - DNA, 30 bp, Artificial Sequence
  Synthetic oligonucleotide
ttcgggtgaaggcacctttttcggtataaa

SEQ ID NO: 211173 - DNA, 30 bp, Artificial Sequence
  Synthetic oligonucleotide
cagtgtaaaaaatggagcaggctttataaa

SEQ ID NO: 211174 - DNA, 30 bp, Artificial Sequence
  Synthetic oligonucleotide
ggctatgcttgctactaccagagaactaaa

SEQ ID NO: 211175 - DNA, 30 bp, Artificial Sequence
  Synthetic oligonucleotide
gagcgggaccgatgacgaatgaacactaaa

SEQ ID NO: 211176 - DNA, 30 bp, Artificial Sequence
  Synthetic oligonucleotide
gcaaacaaagaataatggacttacactaaa

SEQ ID NO: 211177 - DNA, 30 bp, Artificial Sequence
  Synthetic oligonucleotide
gggtcagacatgacgtaatgccagactaaa

SEQ ID NO: 211178 - DNA, 30 bp, Artificial Sequence
  Synthetic oligonucleotide
atcgaccttggtatctgcgttgtgactaaa

SEQ ID NO: 211179 - DNA, 30 bp, Artificial Sequence
  Synthetic oligonucleotide
caccacaactatcgtcatggaccccctaaa

SEQ ID NO: 211180 - DNA, 30 bp, Artificial Sequence
  Synthetic oligonucleotide
cgggcctatagcgagcttctcttccctaaa

SEQ ID NO: 211181 - DNA, 30 bp, Artificial Sequence
  Synthetic oligonucleotide
gtagtataaatcggaaccgtggggcctaaa

SEQ ID NO: 211182 - DNA, 30 bp, Artificial Sequence
  Synthetic oligonucleotide
tccagtgcgcgccaccaagcgaacgctaaa

SEQ ID NO: 211183 - DNA, 30 bp, Artificial Sequence
  Synthetic oligonucleotide
tcatctataagcacgacaccgtgcgctaaa

SEQ ID NO: 211184 - DNA, 30 bp, Artificial Sequence
  Synthetic oligonucleotide
aaacagcagtagtctcgccaatcggctaaa

SEQ ID NO: 211185 - DNA, 30 bp, Artificial Sequence
  Synthetic oligonucleotide
gtcatacagtgcgacggattatcggctaaa

SEQ ID NO: 211186 - DNA, 30 bp, Artificial Sequence
  Synthetic oligonucleotide
gatcgatctagcgagcgaaacatggctaaa

SEQ ID NO: 211187 - DNA, 30 bp, Artificial Sequence
  Synthetic oligonucleotide
ctaggtccagatgaagtctatattgctaaa

SEQ ID NO: 211188 - DNA, 30 bp, Artificial Sequence
  Synthetic oligonucleotide
taatggggttgctaccattcgaaatctaaa

SEQ ID NO: 211189 - DNA, 30 bp, Artificial Sequence
  Synthetic oligonucleotide
ccagtggaattgagagggtgataatctaaa

SEQ ID NO: 211190 - DNA, 30 bp, Artificial Sequence
  Synthetic oligonucleotide
gactacgggctccggcctcgaccctctaaa

SEQ ID NO: 211191 - DNA, 30 bp, Artificial Sequence
  Synthetic oligonucleotide
cttacgaacgccatgcaggtgctctctaaa

SEQ ID NO: 211192 - DNA, 30 bp, Artificial Sequence
  Synthetic oligonucleotide
ttctgggatgccggcccacttaagtctaaa

SEQ ID NO: 211193 - DNA, 30 bp, Artificial Sequence
  Synthetic oligonucleotide
cttctcgcgacaggatagttctaaagtaaa

SEQ ID NO: 211194 - DNA, 30 bp, Artificial Sequence
  Synthetic oligonucleotide
aggatatcttagtgtaacttagcaagtaaa

SEQ ID NO: 211195 - DNA, 30 bp, Artificial Sequence
  Synthetic oligonucleotide
tgtcgccggtgatttagaacacccagtaaa

SEQ ID NO: 211196 - DNA, 30 bp, Artificial Sequence
  Synthetic oligonucleotide
attacacgacccgtaataaggggacgtaaa

SEQ ID NO: 211197 - DNA, 30 bp, Artificial Sequence
  Synthetic oligonucleotide
aacattagtcaagaggtggaggtccgtaaa

SEQ ID NO: 211198 - DNA, 30 bp, Artificial Sequence
  Synthetic oligonucleotide
gaccgaagacaaactcccttcgggcgtaaa

SEQ ID NO: 211199 - DNA, 30 bp, Artificial Sequence
  Synthetic oligonucleotide
gctcattagctgtggtggaagttgcgtaaa

SEQ ID NO: 211200 - DNA, 30 bp, Artificial Sequence
  Synthetic oligonucleotide
agtggcttcgtagtaattaaccttcgtaaa

SEQ ID NO: 211201 - DNA, 30 bp, Artificial Sequence
  Synthetic oligonucleotide
gtcccaccggaagatgcccggcttcgtaaa

SEQ ID NO: 211202 - DNA, 30 bp, Artificial Sequence
  Synthetic oligonucleotide
ctacatgcatgagcggctatgtgaggtaaa

SEQ ID NO: 211203 - DNA, 30 bp, Artificial Sequence
  Synthetic oligonucleotide
aaagtgtgaaagcagccttttgagggtaaa

SEQ ID NO: 211204 - DNA, 30 bp, Artificial Sequence
  Synthetic oligonucleotide
tgcaagcagtgtattgggtgatagggtaaa

SEQ ID NO: 211205 - DNA, 30 bp, Artificial Sequence
  Synthetic oligonucleotide
atgaggctgtgccaagggttgacgggtaaa

SEQ ID NO: 211206 - DNA, 30 bp, Artificial Sequence
  Synthetic oligonucleotide
atggataatgggaggtagtggtctggtaaa

SEQ ID NO: 211207 - DNA, 30 bp, Artificial Sequence
  Synthetic oligonucleotide
tcgggcacgggtgatcgtaggtcatgtaaa

SEQ ID NO: 211208 - DNA, 30 bp, Artificial Sequence
  Synthetic oligonucleotide
gagaccccagtttcgtcagcggtatgtaaa

SEQ ID NO: 211209 - DNA, 30 bp, Artificial Sequence
  Synthetic oligonucleotide
tgcctaaatgataatctgtatttctgtaaa

SEQ ID NO: 211210 - DNA, 30 bp, Artificial Sequence
  Synthetic oligonucleotide
aacagttcgaaatatcggattgcttgtaaa

SEQ ID NO: 211211 - DNA, 30 bp, Artificial Sequence
  Synthetic oligonucleotide
caaacctaaggattcagggcaatttgtaaa

SEQ ID NO: 211212 - DNA, 30 bp, Artificial Sequence
  Synthetic oligonucleotide
ggcaacagtgatatcatacagttttgtaaa

SEQ ID NO: 211213 - DNA, 30 bp, Artificial Sequence
  Synthetic oligonucleotide
ggcgagtccggaagttatctcctaattaaa

SEQ ID NO: 211214 - DNA, 30 bp, Artificial Sequence
  Synthetic oligonucleotide
aagtgccggctagttgcaattagcattaaa

SEQ ID NO: 211215 - DNA, 30 bp, Artificial Sequence
  Synthetic oligonucleotide
gtgttttagcctatatgggcaaggattaaa

SEQ ID NO: 211216 - DNA, 30 bp, Artificial Sequence
  Synthetic oligonucleotide
cagccgaaagggtagcggttatatattaaa

SEQ ID NO: 211217 - DNA, 30 bp, Artificial Sequence
  Synthetic oligonucleotide
cgagtcgtcttagtaggggcagagcttaaa

SEQ ID NO: 211218 - DNA, 30 bp, Artificial Sequence
  Synthetic oligonucleotide
gttgacaggatcgctgtgtatctagttaaa

SEQ ID NO: 211219 - DNA, 30 bp, Artificial Sequence
  Synthetic oligonucleotide
aagcacggaaatattgacgaccgcgttaaa

SEQ ID NO: 211220 - DNA, 30 bp, Artificial Sequence
  Synthetic oligonucleotide
ctgtctcataggaatctaccaccggttaaa

SEQ ID NO: 211221 - DNA, 30 bp, Artificial Sequence
  Synthetic oligonucleotide
aaagagttagagagtaagcctgcggttaaa

SEQ ID NO: 211222 - DNA, 30 bp, Artificial Sequence
  Synthetic oligonucleotide
taccattgtaagcttaaaaaagcatttaaa

SEQ ID NO: 211223 - DNA, 30 bp, Artificial Sequence
  Synthetic oligonucleotide
ccctcggaccagaagccgtcgtcctttaaa

SEQ ID NO: 211224 - DNA, 30 bp, Artificial Sequence
  Synthetic oligonucleotide
gggtattcaaagaggaacctcatgtttaaa

SEQ ID NO: 211225 - DNA, 30 bp, Artificial Sequence
  Synthetic oligonucleotide
cttcgcggactaggcaggacagattttaaa

SEQ ID NO: 211226 - DNA, 30 bp, Artificial Sequence
  Synthetic oligonucleotide
gcataacaaagtatacttagaccaaaacaa

SEQ ID NO: 211227 - DNA, 30 bp, Artificial Sequence
  Synthetic oligonucleotide
gttagtgttcgtggggtctcatgaaaacaa

SEQ ID NO: 211228 - DNA, 30 bp, Artificial Sequence
  Synthetic oligonucleotide
tgcataggatatcgtttttggcccaaacaa

SEQ ID NO: 211229 - DNA, 30 bp, Artificial Sequence
  Synthetic oligonucleotide
cgaatagaatgtttagcatcaggtaaacaa

SEQ ID NO: 211230 - DNA, 30 bp, Artificial Sequence
  Synthetic oligonucleotide
ctacactatgaataacccccggaacaacaa

SEQ ID NO: 211231 - DNA, 30 bp, Artificial Sequence
  Synthetic oligonucleotide
ggagaatcaggtctggcgtgatcacaacaa

SEQ ID NO: 211232 - DNA, 30 bp, Artificial Sequence
  Synthetic oligonucleotide
gaccccggagttgaactgaaaggacaacaa

SEQ ID NO: 211233 - DNA, 30 bp, Artificial Sequence
  Synthetic oligonucleotide
caaagggcccgctgagtaaccttacaacaa

SEQ ID NO: 211234 - DNA, 30 bp, Artificial Sequence
  Synthetic oligonucleotide
ccttaaagatgcgtattgaagtaccaacaa

SEQ ID NO: 211235 - DNA, 30 bp, Artificial Sequence
  Synthetic oligonucleotide
tgttcatcacacaagtacggaacccaacaa

SEQ ID NO: 211236 - DNA, 30 bp, Artificial Sequence
  Synthetic oligonucleotide
atgccccatgattccggccgtcaagaacaa

SEQ ID NO: 211237 - DNA, 30 bp, Artificial Sequence
  Synthetic oligonucleotide
ttcgcaatggatgatgctacagacgaacaa

SEQ ID NO: 211238 - DNA, 30 bp, Artificial Sequence
  Synthetic oligonucleotide
cttcgttgacgatcagtggatggcgaacaa

SEQ ID NO: 211239 - DNA, 30 bp, Artificial Sequence
  Synthetic oligonucleotide
agagcattttacggcctggattcggaacaa

SEQ ID NO: 211240 - DNA, 30 bp, Artificial Sequence
  Synthetic oligonucleotide
aaagaatagtaaacaagtgtttgggaacaa

SEQ ID NO: 211241 - DNA, 30 bp, Artificial Sequence
  Synthetic oligonucleotide
gatcgtggaacgatatagagactataacaa

SEQ ID NO: 211242 - DNA, 30 bp, Artificial Sequence
  Synthetic oligonucleotide
caattacgactagcgaccttgacgtaacaa

SEQ ID NO: 211243 - DNA, 30 bp, Artificial Sequence
  Synthetic oligonucleotide
agattttgttccgacggggaaaattaacaa

SEQ ID NO: 211244 - DNA, 30 bp, Artificial Sequence
  Synthetic oligonucleotide
tagaaacgtcgagacgacgccacttaacaa

SEQ ID NO: 211245 - DNA, 30 bp, Artificial Sequence
  Synthetic oligonucleotide
tatcatagcgttaggtattactcttaacaa

SEQ ID NO: 211246 - DNA, 30 bp, Artificial Sequence
  Synthetic oligonucleotide
ggtcaggaggctcattctgcagaaacacaa

SEQ ID NO: 211247 - DNA, 30 bp, Artificial Sequence
  Synthetic oligonucleotide
gaatcctacttcaggcacccgccaacacaa

SEQ ID NO: 211248 - DNA, 30 bp, Artificial Sequence
  Synthetic oligonucleotide
gaggttcaaaatgacacctcaggaacacaa

SEQ ID NO: 211249 - DNA, 30 bp, Artificial Sequence
  Synthetic oligonucleotide
tggagtcaagcaatcacagtgttcacacaa

SEQ ID NO: 211250 - DNA, 30 bp, Artificial Sequence
  Synthetic oligonucleotide
taggctgatgcgatatatgcaagtacacaa

SEQ ID NO: 211251 - DNA, 30 bp, Artificial Sequence
  Synthetic oligonucleotide
cggcactcggatcgattgactggtacacaa

SEQ ID NO: 211252 - DNA, 30 bp, Artificial Sequence
  Synthetic oligonucleotide
tctggaaaaaacttttgagggatcccacaa

SEQ ID NO: 211253 - DNA, 30 bp, Artificial Sequence
  Synthetic oligonucleotide
ctgactaacagaacatagggaaagccacaa

SEQ ID NO: 211254 - DNA, 30 bp, Artificial Sequence
  Synthetic oligonucleotide
gtataaacgtggtcagttatacagccacaa

SEQ ID NO: 211255 - DNA, 30 bp, Artificial Sequence
  Synthetic oligonucleotide
gcattgcctaacccagtcattcttccacaa

SEQ ID NO: 211256 - DNA, 30 bp, Artificial Sequence
  Synthetic oligonucleotide
aagctatggcaattgcaggctaacgcacaa

SEQ ID NO: 211257 - DNA, 30 bp, Artificial Sequence
  Synthetic oligonucleotide
atggactgttagtgagtagtgcacgcacaa

SEQ ID NO: 211258 - DNA, 30 bp, Artificial Sequence
  Synthetic oligonucleotide
cgtttccgattaattaatcaccaggcacaa

SEQ ID NO: 211259 - DNA, 30 bp, Artificial Sequence
  Synthetic oligonucleotide
atggtaccggtacactgcgtgtaatcacaa

SEQ ID NO: 211260 - DNA, 30 bp, Artificial Sequence
  Synthetic oligonucleotide
cgactgctagtaggacgactttgatcacaa

SEQ ID NO: 211261 - DNA, 30 bp, Artificial Sequence
  Synthetic oligonucleotide
gatactgagccgtagtgagatgtgtcacaa

SEQ ID NO: 211262 - DNA, 30 bp, Artificial Sequence
  Synthetic oligonucleotide
gtaggatacgttgtcatacgagacagacaa

SEQ ID NO: 211263 - DNA, 30 bp, Artificial Sequence
  Synthetic oligonucleotide
ggagcacaagactagtatttaagcagacaa

SEQ ID NO: 211264 - DNA, 30 bp, Artificial Sequence
  Synthetic oligonucleotide
gcagtctaccattgcacgccagatagacaa

SEQ ID NO: 211265 - DNA, 30 bp, Artificial Sequence
  Synthetic oligonucleotide
cgggccttgtacgtaatagtcattagacaa

SEQ ID NO: 211266 - DNA, 30 bp, Artificial Sequence
  Synthetic oligonucleotide
gaagtggcatccaacgatatgccacgacaa

SEQ ID NO: 211267 - DNA, 30 bp, Artificial Sequence
  Synthetic oligonucleotide
aaggacctcggtgctttcttcctacgacaa

SEQ ID NO: 211268 - DNA, 30 bp, Artificial Sequence
  Synthetic oligonucleotide
gcggaggttggtttgaagaaaatccgacaa

SEQ ID NO: 211269 - DNA, 30 bp, Artificial Sequence
  Synthetic oligonucleotide
ggctcacgttgtgccgttattttccgacaa

SEQ ID NO: 211270 - DNA, 30 bp, Artificial Sequence
  Synthetic oligonucleotide
taagcataaggaacgcttgaggagcgacaa

SEQ ID NO: 211271 - DNA, 29 bp, Artificial Sequence
  Synthetic oligonucleotide
acgaccgatctgaagtcaccccgcgacaa

SEQ ID NO: 211272 - DNA, 30 bp, Artificial Sequence
  Synthetic oligonucleotide
acgaggaacggcttgtcccttttgcgacaa

SEQ ID NO: 211273 - DNA, 30 bp, Artificial Sequence
  Synthetic oligonucleotide
tcatggcacttacgctattctgccggacaa

SEQ ID NO: 211274 - DNA, 30 bp, Artificial Sequence
  Synthetic oligonucleotide
actgttggggacccacgcgactgcggacaa

SEQ ID NO: 211275 - DNA, 30 bp, Artificial Sequence
  Synthetic oligonucleotide
gggagaagcgacagagggtgatggggacaa

SEQ ID NO: 211276 - DNA, 30 bp, Artificial Sequence
  Synthetic oligonucleotide
cgcttctgaggcacgcccccgagtggacaa

SEQ ID NO: 211277 - DNA, 30 bp, Artificial Sequence
  Synthetic oligonucleotide
acgagcatagatccgaaggcatcatgacaa

SEQ ID NO: 211278 - DNA, 30 bp, Artificial Sequence
  Synthetic oligonucleotide
gctatcctcgagctatccgtaggctgacaa

SEQ ID NO: 211279 - DNA, 30 bp, Artificial Sequence
  Synthetic oligonucleotide
acggggtgacgacaacccaccttctgacaa

SEQ ID NO: 211280 - DNA, 30 bp, Artificial Sequence
  Synthetic oligonucleotide
gtactagcaaaggcaaaaggtttctgacaa

SEQ ID NO: 211281 - DNA, 30 bp, Artificial Sequence
  Synthetic oligonucleotide
tatcagcgctgcgtgtgggccaattgacaa

SEQ ID NO: 211282 - DNA, 30 bp, Artificial Sequence
  Synthetic oligonucleotide
tacaatcccgtcaaggctgctgaaatacaa

SEQ ID NO: 211283 - DNA, 30 bp, Artificial Sequence
  Synthetic oligonucleotide
ctctcccgttgtactaaatggtaaatacaa

SEQ ID NO: 211284 - DNA, 30 bp, Artificial Sequence
  Synthetic oligonucleotide
gctagaccaaaaacccgttatataatacaa

SEQ ID NO: 211285 - DNA, 30 bp, Artificial Sequence
  Synthetic oligonucleotide
cgcgctccctacgtacgtctgctaatacaa

SEQ ID NO: 211286 - DNA, 30 bp, Artificial Sequence
  Synthetic oligonucleotide
taactagcccgagcccagccagacatacaa

SEQ ID NO: 211287 - DNA, 30 bp, Artificial Sequence
  Synthetic oligonucleotide
acacagaatgtattacatcgagagatacaa

SEQ ID NO: 211288 - DNA, 31 bp, Artificial Sequence
  Synthetic oligonucleotide
gcaaaaaaagtcgcaatcgtagtatatacaa

SEQ ID NO: 211289 - DNA, 30 bp, Artificial Sequence
  Synthetic oligonucleotide
gtcatatgtacgtaaactgggggtatacaa

SEQ ID NO: 211290 - DNA, 30 bp, Artificial Sequence
  Synthetic oligonucleotide
ccacaagtatgtggtgatagagaactacaa

SEQ ID NO: 211291 - DNA, 30 bp, Artificial Sequence
  Synthetic oligonucleotide
ttctggttcagaaattgactagaactacaa

SEQ ID NO: 211292 - DNA, 30 bp, Artificial Sequence
  Synthetic oligonucleotide
aatccaatgggcgatatcgggatactacaa

SEQ ID NO: 211293 - DNA, 30 bp, Artificial Sequence
  Synthetic oligonucleotide
aaagccggggacgtagtgataaacctacaa

SEQ ID NO: 211294 - DNA, 30 bp, Artificial Sequence
  Synthetic oligonucleotide
ggtatgtggcagatgatagcttccctacaa

SEQ ID NO: 211295 - DNA, 30 bp, Artificial Sequence
  Synthetic oligonucleotide
cagcccgccaagagaaattcatgtctacaa

SEQ ID NO: 211296 - DNA, 30 bp, Artificial Sequence
  Synthetic oligonucleotide
ataagcccggggtccgagtcataagtacaa

SEQ ID NO: 211297 - DNA, 30 bp, Artificial Sequence
  Synthetic oligonucleotide
ccatcgatcctagattaggattcggtacaa

SEQ ID NO: 211298 - DNA, 30 bp, Artificial Sequence
  Synthetic oligonucleotide
tataaatctaaatgcggagaaagggtacaa

SEQ ID NO: 211299 - DNA, 30 bp, Artificial Sequence
  Synthetic oligonucleotide
gagatactctgttatataagccgggtacaa

SEQ ID NO: 211300 - DNA, 30 bp, Artificial Sequence
  Synthetic oligonucleotide
agtgcacgcggaggcgttgattatgtacaa

SEQ ID NO: 211301 - DNA, 30 bp, Artificial Sequence
  Synthetic oligonucleotide
cagagaacggttccacggcttgaattacaa

SEQ ID NO: 211302 - DNA, 30 bp, Artificial Sequence
  Synthetic oligonucleotide
caatctcaagttcctctgtaaacattacaa

SEQ ID NO: 211303 - DNA, 30 bp, Artificial Sequence
  Synthetic oligonucleotide
cgttggggcagtgacgttacgaacttacaa

SEQ ID NO: 211304 - DNA, 30 bp, Artificial Sequence
  Synthetic oligonucleotide
ctgtatgtcgctaggtcatgcgtcttacaa

SEQ ID NO: 211305 - DNA, 30 bp, Artificial Sequence
  Synthetic oligonucleotide
agttactcaatactctagtcccagttacaa

SEQ ID NO: 211306 - DNA, 30 bp, Artificial Sequence
  Synthetic oligonucleotide
tatttgagcatggtggtcggtacgttacaa

SEQ ID NO: 211307 - DNA, 30 bp, Artificial Sequence
  Synthetic oligonucleotide
gaatgctatgcggttaggcaccggttacaa

SEQ ID NO: 211308 - DNA, 30 bp, Artificial Sequence
  Synthetic oligonucleotide
gctcggtggagaaaaacccatggaaaccaa

SEQ ID NO: 211309 - DNA, 30 bp, Artificial Sequence
  Synthetic oligonucleotide
gtttaatgtggagaggatatagtaaaccaa

SEQ ID NO: 211310 - DNA, 30 bp, Artificial Sequence
  Synthetic oligonucleotide
ccgtcggattcacgatttacgttaaaccaa

SEQ ID NO: 211311 - DNA, 30 bp, Artificial Sequence
  Synthetic oligonucleotide
tctcaccctggggtgggtttgcccaaccaa

SEQ ID NO: 211312 - DNA, 30 bp, Artificial Sequence
  Synthetic oligonucleotide
ggggatggggttatgatcttgtggaaccaa

SEQ ID NO: 211313 - DNA, 30 bp, Artificial Sequence
  Synthetic oligonucleotide
tcacggaactttagaagtataaataaccaa

SEQ ID NO: 211314 - DNA, 30 bp, Artificial Sequence
  Synthetic oligonucleotide
ggcgccacgtgggactgcttccgtaaccaa

SEQ ID NO: 211315 - DNA, 30 bp, Artificial Sequence
  Synthetic oligonucleotide
attgttatagcgaaagctcccagacaccaa

SEQ ID NO: 211316 - DNA, 30 bp, Artificial Sequence
  Synthetic oligonucleotide
gagtctgaatttacggtactacgccaccaa

SEQ ID NO: 211317 - DNA, 30 bp, Artificial Sequence
  Synthetic oligonucleotide
ttgaacaaatttagagtggtgggccaccaa

SEQ ID NO: 211318 - DNA, 30 bp, Artificial Sequence
  Synthetic oligonucleotide
attggacccgggcacaacggatgagaccaa

SEQ ID NO: 211319 - DNA, 30 bp, Artificial Sequence
  Synthetic oligonucleotide
cctggatcatgtagtaaaatcatcgaccaa

SEQ ID NO: 211320 - DNA, 30 bp, Artificial Sequence
  Synthetic oligonucleotide
cccctgccgccttctgtgctcgtcgaccaa

SEQ ID NO: 211321 - DNA, 30 bp, Artificial Sequence
  Synthetic oligonucleotide
ggatctccggggtaggtcgggtaggaccaa

SEQ ID NO: 211322 - DNA, 30 bp, Artificial Sequence
  Synthetic oligonucleotide
ggcgtcttattctgcgggatccactaccaa

SEQ ID NO: 211323 - DNA, 30 bp, Artificial Sequence
  Synthetic oligonucleotide
tagtcatcgtaaagacagctcttctaccaa

SEQ ID NO: 211324 - DNA, 30 bp, Artificial Sequence
  Synthetic oligonucleotide
ggtatcaatcagtctttaatcctgtaccaa

SEQ ID NO: 211325 - DNA, 30 bp, Artificial Sequence
  Synthetic oligonucleotide
cctcgcagggtttaatcctgttcttaccaa

SEQ ID NO: 211326 - DNA, 30 bp, Artificial Sequence
  Synthetic oligonucleotide
gaacgtggctacgcgtcacattgaacccaa

SEQ ID NO: 211327 - DNA, 30 bp, Artificial Sequence
  Synthetic oligonucleotide
gcttttggcagagtactttgcataacccaa

SEQ ID NO: 211328 - DNA, 30 bp, Artificial Sequence
  Synthetic oligonucleotide
ggcatgtatagggaaacgatcgccacccaa

SEQ ID NO: 211329 - DNA, 30 bp, Artificial Sequence
  Synthetic oligonucleotide
cgcgggcccgctatgttagaagtcacccaa

SEQ ID NO: 211330 - DNA, 30 bp, Artificial Sequence
  Synthetic oligonucleotide
gatgagcgtatacgcgttacgttgacccaa

SEQ ID NO: 211331 - DNA, 30 bp, Artificial Sequence
  Synthetic oligonucleotide
acgtcgacgacgcgtgctgaacaaccccaa

SEQ ID NO: 211332 - DNA, 30 bp, Artificial Sequence
  Synthetic oligonucleotide
cgccagaaccccgtaaaagtgaccccccaa

SEQ ID NO: 211333 - DNA, 30 bp, Artificial Sequence
  Synthetic oligonucleotide
tggcagtcatgagcagtcaaaaaagcccaa

SEQ ID NO: 211334 - DNA, 30 bp, Artificial Sequence
  Synthetic oligonucleotide
ttgagcatagagaaagggcaaattgcccaa

SEQ ID NO: 211335 - DNA, 30 bp, Artificial Sequence
  Synthetic oligonucleotide
cagtcaaatctcgtctaacataaatcccaa

SEQ ID NO: 211336 - DNA, 31 bp, Artificial Sequence
  Synthetic oligonucleotide
tccaggaaagggtaagtggttcgaatcccaa

SEQ ID NO: 211337 - DNA, 30 bp, Artificial Sequence
  Synthetic oligonucleotide
cacgagtcttctcccactaagttctcccaa

SEQ ID NO: 211338 - DNA, 30 bp, Artificial Sequence
  Synthetic oligonucleotide
tcgccagttttggaaatgtgatggtcccaa

SEQ ID NO: 211339 - DNA, 30 bp, Artificial Sequence
  Synthetic oligonucleotide
agcaaagcatgtggtgtcggaaacagccaa

SEQ ID NO: 211340 - DNA, 30 bp, Artificial Sequence
  Synthetic oligonucleotide
aaaccagtgttggtgctgctagacagccaa

SEQ ID NO: 211341 - DNA, 30 bp, Artificial Sequence
  Synthetic oligonucleotide
ttgtcggacaacgcggtataaaccagccaa

SEQ ID NO: 211342 - DNA, 30 bp, Artificial Sequence
  Synthetic oligonucleotide
aacgcctgcccgtcaacgggccatagccaa

SEQ ID NO: 211343 - DNA, 30 bp, Artificial Sequence
  Synthetic oligonucleotide
ggatgaaccgatgcagcgtgtagacgccaa

SEQ ID NO: 211344 - DNA, 30 bp, Artificial Sequence
  Synthetic oligonucleotide
ctgttatgggctataaagcagccccgccaa

SEQ ID NO: 211345 - DNA, 30 bp, Artificial Sequence
  Synthetic oligonucleotide
aagacatcgggtggcagaaatttccgccaa

SEQ ID NO: 211346 - DNA, 30 bp, Artificial Sequence
  Synthetic oligonucleotide
cattcaacgcgtcgcgagtacttaggccaa

SEQ ID NO: 211347 - DNA, 30 bp, Artificial Sequence
  Synthetic oligonucleotide
atgcccacgtatcgtgagaacatcggccaa

SEQ ID NO: 211348 - DNA, 30 bp, Artificial Sequence
  Synthetic oligonucleotide
tgttagggattattcggacataagggccaa

SEQ ID NO: 211349 - DNA, 30 bp, Artificial Sequence
  Synthetic oligonucleotide
tgctagtggcgctccataatatcatgccaa

SEQ ID NO: 211350 - DNA, 30 bp, Artificial Sequence
  Synthetic oligonucleotide
aaggcgtcttgtcccttttttggctgccaa

SEQ ID NO: 211351 - DNA, 30 bp, Artificial Sequence
  Synthetic oligonucleotide
cgcttgggcggactcgcttggacgtgccaa

SEQ ID NO: 211352 - DNA, 30 bp, Artificial Sequence
  Synthetic oligonucleotide
cgcgccagaatgagtgcctaaaaaatccaa

SEQ ID NO: 211353 - DNA, 30 bp, Artificial Sequence
  Synthetic oligonucleotide
ttgagcgattcggaagagtcaagaatccaa

SEQ ID NO: 211354 - DNA, 30 bp, Artificial Sequence
  Synthetic oligonucleotide
atggcgtgcactcgaaatgacagaatccaa

SEQ ID NO: 211355 - DNA, 30 bp, Artificial Sequence
  Synthetic oligonucleotide
gacgggtaaaacggtaaatgatgaatccaa

SEQ ID NO: 211356 - DNA, 30 bp, Artificial Sequence
  Synthetic oligonucleotide
cgtcgacccgtggccactaaatcgatccaa

SEQ ID NO: 211357 - DNA, 30 bp, Artificial Sequence
  Synthetic oligonucleotide
agaggagaatggcttaagcgccctatccaa

SEQ ID NO: 211358 - DNA, 30 bp, Artificial Sequence
  Synthetic oligonucleotide
gcggtagaacgtgtcttgaccgttatccaa

SEQ ID NO: 211359 - DNA, 30 bp, Artificial Sequence
  Synthetic oligonucleotide
gcttaaccaagtttatagggtccactccaa

SEQ ID NO: 211360 - DNA, 30 bp, Artificial Sequence
  Synthetic oligonucleotide
tttcacgctctagaacagatatgcctccaa

SEQ ID NO: 211361 - DNA, 30 bp, Artificial Sequence
  Synthetic oligonucleotide
tacaacgcgtcctactggtgagggctccaa

SEQ ID NO: 211362 - DNA, 30 bp, Artificial Sequence
  Synthetic oligonucleotide
attgtggggaatacaatacataatctccaa

SEQ ID NO: 211363 - DNA, 30 bp, Artificial Sequence
  Synthetic oligonucleotide
tgtccagcgtgggtgtcatccagcgtccaa

SEQ ID NO: 211364 - DNA, 30 bp, Artificial Sequence
  Synthetic oligonucleotide
acttctggcgaaggtgcatttatcgtccaa

SEQ ID NO: 211365 - DNA, 30 bp, Artificial Sequence
  Synthetic oligonucleotide
tctgggcgatcctatcttgccacattccaa

SEQ ID NO: 211366 - DNA, 30 bp, Artificial Sequence
  Synthetic oligonucleotide
actctacagacccagtataagcgattccaa

SEQ ID NO: 211367 - DNA, 30 bp, Artificial Sequence
  Synthetic oligonucleotide
aagtctcggactgtttggatacagttccaa

SEQ ID NO: 211368 - DNA, 30 bp, Artificial Sequence
  Synthetic oligonucleotide
cggaacgttaattgaaacttctagttccaa

SEQ ID NO: 211369 - DNA, 30 bp, Artificial Sequence
  Synthetic oligonucleotide
gtgatgctaataggttggaatgtgttccaa

SEQ ID NO: 211370 - DNA, 30 bp, Artificial Sequence
  Synthetic oligonucleotide
tgcggaaaacatggtttggattgtttccaa

SEQ ID NO: 211371 - DNA, 30 bp, Artificial Sequence
  Synthetic oligonucleotide
gggagcgggtacttcatattaggaaagcaa

SEQ ID NO: 211372 - DNA, 30 bp, Artificial Sequence
  Synthetic oligonucleotide
tgtaacctgataaccctacaggtaaagcaa

SEQ ID NO: 211373 - DNA, 30 bp, Artificial Sequence
  Synthetic oligonucleotide
tatgtagcgtgatatgagagctagaagcaa

SEQ ID NO: 211374 - DNA, 30 bp, Artificial Sequence
  Synthetic oligonucleotide
tggtcataagtttttaatcagattaagcaa

SEQ ID NO: 211375 - DNA, 30 bp, Artificial Sequence
  Synthetic oligonucleotide
tcggttagccgtactggtgtacaacagcaa

SEQ ID NO: 211376 - DNA, 30 bp, Artificial Sequence
  Synthetic oligonucleotide
ctcagcagcattccccaaaagcaacagcaa

SEQ ID NO: 211377 - DNA, 30 bp, Artificial Sequence
  Synthetic oligonucleotide
ctttgtcttacaatggtatcaatagagcaa

SEQ ID NO: 211378 - DNA, 30 bp, Artificial Sequence
  Synthetic oligonucleotide
gtaggtactcggccggcctgtctagagcaa

SEQ ID NO: 211379 - DNA, 30 bp, Artificial Sequence
  Synthetic oligonucleotide
tactgagtactgcgactcgacgtagagcaa

SEQ ID NO: 211380 - DNA, 30 bp, Artificial Sequence
  Synthetic oligonucleotide
cagatactcaggttagatgagatcgagcaa

SEQ ID NO: 211381 - DNA, 30 bp, Artificial Sequence
  Synthetic oligonucleotide
accttaggcgcagggaacagtttcgagcaa

SEQ ID NO: 211382 - DNA, 30 bp, Artificial Sequence
  Synthetic oligonucleotide
cagcagttctagtaccaccactcggagcaa

SEQ ID NO: 211383 - DNA, 30 bp, Artificial Sequence
  Synthetic oligonucleotide
atatgcaccagtccggcaatccgggagcaa

SEQ ID NO: 211384 - DNA, 30 bp, Artificial Sequence
  Synthetic oligonucleotide
gcgcaggggatagaaaagccccttgagcaa

SEQ ID NO: 211385 - DNA, 30 bp, Artificial Sequence
  Synthetic oligonucleotide
gacgggagcataggaccgcaactatagcaa

SEQ ID NO: 211386 - DNA, 30 bp, Artificial Sequence
  Synthetic oligonucleotide
aagttagcgagaatatgattcaactagcaa

SEQ ID NO: 211387 - DNA, 30 bp, Artificial Sequence
  Synthetic oligonucleotide
tcgcaatctgccgattgcagtacgtagcaa

SEQ ID NO: 211388 - DNA, 30 bp, Artificial Sequence
  Synthetic oligonucleotide
gataacagtgtgagaggtgaacgttagcaa

SEQ ID NO: 211389 - DNA, 30 bp, Artificial Sequence
  Synthetic oligonucleotide
gtcacggcaagacgactcttcacaacgcaa

SEQ ID NO: 211390 - DNA, 30 bp, Artificial Sequence
  Synthetic oligonucleotide
cacattgtatacggtaagaatataacgcaa

SEQ ID NO: 211391 - DNA, 30 bp, Artificial Sequence
  Synthetic oligonucleotide
tctagggcgtacgccccaaaatagacgcaa

SEQ ID NO: 211392 - DNA, 30 bp, Artificial Sequence
  Synthetic oligonucleotide
ctatccagtgaaaagtgagtgcctacgcaa

SEQ ID NO: 211393 - DNA, 30 bp, Artificial Sequence
  Synthetic oligonucleotide
gtactatagtgctacagggaagaaccgcaa

SEQ ID NO: 211394 - DNA, 30 bp, Artificial Sequence
  Synthetic oligonucleotide
ctaagctctactgtgccgtgggcaccgcaa

SEQ ID NO: 211395 - DNA, 30 bp, Artificial Sequence
  Synthetic oligonucleotide
gagaatccataacacaagataaacccgcaa

SEQ ID NO: 211396 - DNA, 31 bp, Artificial Sequence
  Synthetic oligonucleotide
ccgcgagaagtgtcgttagtataatccgcaa

SEQ ID NO: 211397 - DNA, 30 bp, Artificial Sequence
  Synthetic oligonucleotide
cttcaatccttggaggcaagaactccgcaa

SEQ ID NO: 211398 - DNA, 30 bp, Artificial Sequence
  Synthetic oligonucleotide
gtcgtccatagtgaacgtggactagcgcaa

SEQ ID NO: 211399 - DNA, 30 bp, Artificial Sequence
  Synthetic oligonucleotide
gttacagcagtaaacgctcgtctagcgcaa

SEQ ID NO: 211400 - DNA, 30 bp, Artificial Sequence
  Synthetic oligonucleotide
ttcagcggcgaaggggagaaccgcgcgcaa

SEQ ID NO: 211401 - DNA, 30 bp, Artificial Sequence
  Synthetic oligonucleotide
tccgggcatcgtatacatcaggtggcgcaa

SEQ ID NO: 211402 - DNA, 30 bp, Artificial Sequence
  Synthetic oligonucleotide
cgaacccaaatcctgggtcggttggcgcaa

SEQ ID NO: 211403 - DNA, 30 bp, Artificial Sequence
  Synthetic oligonucleotide
tggggaacgtgctgggttagtgtctcgcaa

SEQ ID NO: 211404 - DNA, 30 bp, Artificial Sequence
  Synthetic oligonucleotide
tctacatagtaaccgaaatggcggtcgcaa

SEQ ID NO: 211405 - DNA, 30 bp, Artificial Sequence
  Synthetic oligonucleotide
ttttagggccccagacgaatcgaaaggcaa

SEQ ID NO: 211406 - DNA, 30 bp, Artificial Sequence
  Synthetic oligonucleotide
ttccagtcttgataacagctgctaaggcaa

SEQ ID NO: 211407 - DNA, 30 bp, Artificial Sequence
  Synthetic oligonucleotide
taacaggggcatggtcccatgatcaggcaa

SEQ ID NO: 211408 - DNA, 30 bp, Artificial Sequence
  Synthetic oligonucleotide
accctcacttataaagtcacgttcaggcaa

SEQ ID NO: 211409 - DNA, 30 bp, Artificial Sequence
  Synthetic oligonucleotide
ggaaccaatttagtcctcatagttaggcaa

SEQ ID NO: 211410 - DNA, 30 bp, Artificial Sequence
  Synthetic oligonucleotide
ccctccaactgggcgatctcatcgcggcaa

SEQ ID NO: 211411 - DNA, 30 bp, Artificial Sequence
  Synthetic oligonucleotide
ctggtctaaaaaagacgtggatggcggcaa

SEQ ID NO: 211412 - DNA, 30 bp, Artificial Sequence
  Synthetic oligonucleotide
gcaaatgacggcgcggttgtatggcggcaa

SEQ ID NO: 211413 - DNA, 30 bp, Artificial Sequence
  Synthetic oligonucleotide
gcgggttggcgggacatggaagatcggcaa

SEQ ID NO: 211414 - DNA, 30 bp, Artificial Sequence
  Synthetic oligonucleotide
ttaagtaaagcccagcgtagggttcggcaa

SEQ ID NO: 211415 - DNA, 30 bp, Artificial Sequence
  Synthetic oligonucleotide
ggtctcaacgaatacttgtcgcaagggcaa

SEQ ID NO: 211416 - DNA, 30 bp, Artificial Sequence
  Synthetic oligonucleotide
ccaagcagtactcgtagtaacacagggcaa

SEQ ID NO: 211417 - DNA, 30 bp, Artificial Sequence
  Synthetic oligonucleotide
caagtgaacgccccgagcctaaacgggcaa

SEQ ID NO: 211418 - DNA, 30 bp, Artificial Sequence
  Synthetic oligonucleotide
gcgctcacgggaggaatgcccgaggggcaa

SEQ ID NO: 211419 - DNA, 30 bp, Artificial Sequence
  Synthetic oligonucleotide
tgcctaaaagcccacagagacagggggcaa

SEQ ID NO: 211420 - DNA, 30 bp, Artificial Sequence
  Synthetic oligonucleotide
aataactcattaagacaaacccgggggcaa

SEQ ID NO: 211421 - DNA, 30 bp, Artificial Sequence
  Synthetic oligonucleotide
atggagcagccctgtagggccggggggcaa

SEQ ID NO: 211422 - DNA, 30 bp, Artificial Sequence
  Synthetic oligonucleotide
ggggttgtccgcttggacgggcgatggcaa

SEQ ID NO: 211423 - DNA, 30 bp, Artificial Sequence
  Synthetic oligonucleotide
acttgtaggtgatgagtcgacggctggcaa

SEQ ID NO: 211424 - DNA, 30 bp, Artificial Sequence
  Synthetic oligonucleotide
tgatcgacacggggtcctaaggagtggcaa

SEQ ID NO: 211425 - DNA, 30 bp, Artificial Sequence
  Synthetic oligonucleotide
gatgggtacgagattgggcgcatgtggcaa

SEQ ID NO: 211426 - DNA, 30 bp, Artificial Sequence
  Synthetic oligonucleotide
gaccggctctatttactcacaggttggcaa

SEQ ID NO: 211427 - DNA, 30 bp, Artificial Sequence
  Synthetic oligonucleotide
ctgtcgttgtctacggataatgtttggcaa

SEQ ID NO: 211428 - DNA, 30 bp, Artificial Sequence
  Synthetic oligonucleotide
cggaagggattatatagacgcgtaatgcaa

SEQ ID NO: 211429 - DNA, 30 bp, Artificial Sequence
  Synthetic oligonucleotide
aacatttgtgaaccggacctacacatgcaa

SEQ ID NO: 211430 - DNA, 30 bp, Artificial Sequence
  Synthetic oligonucleotide
agatacggccatgtaagagttttcatgcaa

SEQ ID NO: 211431 - DNA, 30 bp, Artificial Sequence
  Synthetic oligonucleotide
atgacccaatcctagacaggcaagatgcaa

SEQ ID NO: 211432 - DNA, 30 bp, Artificial Sequence
  Synthetic oligonucleotide
atctgcactgtctagccaagtaagatgcaa

SEQ ID NO: 211433 - DNA, 30 bp, Artificial Sequence
  Synthetic oligonucleotide
tagatgttagtagggtggctacagatgcaa

SEQ ID NO: 211434 - DNA, 30 bp, Artificial Sequence
  Synthetic oligonucleotide
ccgagatgccggggcgtacgcgcgatgcaa

SEQ ID NO: 211435 - DNA, 30 bp, Artificial Sequence
  Synthetic oligonucleotide
cctagtcaatcagtaaccgcggatatgcaa

SEQ ID NO: 211436 - DNA, 30 bp, Artificial Sequence
  Synthetic oligonucleotide
cgtcggggtttgctgtgagctaaactgcaa

SEQ ID NO: 211437 - DNA, 30 bp, Artificial Sequence
  Synthetic oligonucleotide
caacatcgctggatataacacgggctgcaa

SEQ ID NO: 211438 - DNA, 30 bp, Artificial Sequence
  Synthetic oligonucleotide
atttcgtaattctgaatcgtcagtctgcaa

SEQ ID NO: 211439 - DNA, 30 bp, Artificial Sequence
  Synthetic oligonucleotide
actgttctacttatcatctatggtctgcaa

SEQ ID NO: 211440 - DNA, 30 bp, Artificial Sequence
  Synthetic oligonucleotide
taacccagagggtgcagtatatccgtgcaa

SEQ ID NO: 211441 - DNA, 30 bp, Artificial Sequence
  Synthetic oligonucleotide
gaaagtcaagctccggacctagcggtgcaa

SEQ ID NO: 211442 - DNA, 30 bp, Artificial Sequence
  Synthetic oligonucleotide
agtgaataaaaggagcgctgatcggtgcaa

SEQ ID NO: 211443 - DNA, 31 bp, Artificial Sequence
  Synthetic oligonucleotide
acagtatgcccacgggtatgcctttgtgcaa

SEQ ID NO: 211444 - DNA, 30 bp, Artificial Sequence
  Synthetic oligonucleotide
gtaactgccacacctcttcgacaattgcaa

SEQ ID NO: 211445 - DNA, 28 bp, Artificial Sequence
  Synthetic oligonucleotide
cggagggtcttgcattgcatacttgcaa

SEQ ID NO: 211446 - DNA, 31 bp, Artificial Sequence
  Synthetic oligonucleotide
acagttaggtggatagacttagcggttgcaa

SEQ ID NO: 211447 - DNA, 30 bp, Artificial Sequence
  Synthetic oligonucleotide
ctgctagattctcggtggcgctatttgcaa

SEQ ID NO: 211448 - DNA, 30 bp, Artificial Sequence
  Synthetic oligonucleotide
ggaagaagaggcccatggtattgtttgcaa

SEQ ID NO: 211449 - DNA, 30 bp, Artificial Sequence
  Synthetic oligonucleotide
ccctatcgtaagcttatacggaagaatcaa

SEQ ID NO: 211450 - DNA, 31 bp, Artificial Sequence
  Synthetic oligonucleotide
tcttaataagaaggcgtgtgtttctaatcaa

SEQ ID NO: 211451 - DNA, 30 bp, Artificial Sequence
  Synthetic oligonucleotide
aggcgtatagcagaatagggtagtaatcaa

SEQ ID NO: 211452 - DNA, 30 bp, Artificial Sequence
  Synthetic oligonucleotide
gcactcctccaaaacaggcacaaacatcaa

SEQ ID NO: 211453 - DNA, 30 bp, Artificial Sequence
  Synthetic oligonucleotide
gtttcgagggatgtaccattctagcatcaa

SEQ ID NO: 211454 - DNA, 30 bp, Artificial Sequence
  Synthetic oligonucleotide
tgtaggcgaaagtattttgcagcagatcaa

SEQ ID NO: 211455 - DNA, 30 bp, Artificial Sequence
  Synthetic oligonucleotide
gtgtgtcttatcgggagtttccgagatcaa

SEQ ID NO: 211456 - DNA, 30 bp, Artificial Sequence
  Synthetic oligonucleotide
gcagagccgcatcattctatgggagatcaa

SEQ ID NO: 211457 - DNA, 30 bp, Artificial Sequence
  Synthetic oligonucleotide
atctgagatactgtgttcatggtagatcaa

SEQ ID NO: 211458 - DNA, 30 bp, Artificial Sequence
  Synthetic oligonucleotide
gccactgtatttttaaggacactcgatcaa

SEQ ID NO: 211459 - DNA, 30 bp, Artificial Sequence
  Synthetic oligonucleotide
tcgtatcccctaccccgcctactcgatcaa

SEQ ID NO: 211460 - DNA, 30 bp, Artificial Sequence
  Synthetic oligonucleotide
cgccgagttccctcgcatggctcggatcaa

SEQ ID NO: 211461 - DNA, 30 bp, Artificial Sequence
  Synthetic oligonucleotide
taaagtagaatacttgtcagcggtgatcaa

SEQ ID NO: 211462 - DNA, 30 bp, Artificial Sequence
  Synthetic oligonucleotide
gtgcacaattttgtctttccgtgtgatcaa

SEQ ID NO: 211463 - DNA, 30 bp, Artificial Sequence
  Synthetic oligonucleotide
gcattgtggtaacccgaccttgttgatcaa

SEQ ID NO: 211464 - DNA, 30 bp, Artificial Sequence
  Synthetic oligonucleotide
ggaaataggctcatgcttcgaggatatcaa

SEQ ID NO: 211465 - DNA, 30 bp, Artificial Sequence
  Synthetic oligonucleotide
ggagcgaatgcacgtattgggggatatcaa

SEQ ID NO: 211466 - DNA, 30 bp, Artificial Sequence
  Synthetic oligonucleotide
gtatgtgagcctgattaacttgtatatcaa

SEQ ID NO: 211467 - DNA, 30 bp, Artificial Sequence
  Synthetic oligonucleotide
agggccgctcaacaatttaaaacgtatcaa

SEQ ID NO: 211468 - DNA, 30 bp, Artificial Sequence
  Synthetic oligonucleotide
cagggggcggggtttgaatgtcattatcaa

SEQ ID NO: 211469 - DNA, 30 bp, Artificial Sequence
  Synthetic oligonucleotide
gcgccctgtcatcgagttgttagttatcaa

SEQ ID NO: 211470 - DNA, 30 bp, Artificial Sequence
  Synthetic oligonucleotide
aatgcatttcagggtatcgagatttatcaa

SEQ ID NO: 211471 - DNA, 30 bp, Artificial Sequence
  Synthetic oligonucleotide
ggcgagatggtctaacgcaggacaactcaa

SEQ ID NO: 211472 - DNA, 30 bp, Artificial Sequence
  Synthetic oligonucleotide
tgatgtcgcataggtcgggatacaactcaa

SEQ ID NO: 211473 - DNA, 30 bp, Artificial Sequence
  Synthetic oligonucleotide
atcgatgcatgcgccgcacctacaactcaa

SEQ ID NO: 211474 - DNA, 30 bp, Artificial Sequence
  Synthetic oligonucleotide
gcgacgtgttttggatcacaatgaactcaa

SEQ ID NO: 211475 - DNA, 30 bp, Artificial Sequence
  Synthetic oligonucleotide
tttagggtgcggatggctggactaactcaa

SEQ ID NO: 211476 - DNA, 31 bp, Artificial Sequence
  Synthetic oligonucleotide
cggtcgcgtcagatttgcgataatgactcaa

SEQ ID NO: 211477 - DNA, 30 bp, Artificial Sequence
  Synthetic oligonucleotide
aactacattttatacgtaaccaatactcaa

SEQ ID NO: 211478 - DNA, 30 bp, Artificial Sequence
  Synthetic oligonucleotide
agactggagatgaagcaaaggtctactcaa

SEQ ID NO: 211479 - DNA, 30 bp, Artificial Sequence
  Synthetic oligonucleotide
gccccacgtcgagtggtagtccttactcaa

SEQ ID NO: 211480 - DNA, 30 bp, Artificial Sequence
  Synthetic oligonucleotide
gactaccgtgcatccttagctcaacctcaa

SEQ ID NO: 211481 - DNA, 30 bp, Artificial Sequence
  Synthetic oligonucleotide
gcgcagttctgacctcggttaacccctcaa

SEQ ID NO: 211482 - DNA, 30 bp, Artificial Sequence
  Synthetic oligonucleotide
ctgcaactcccagacagctatgagcctcaa

SEQ ID NO: 211483 - DNA, 30 bp, Artificial Sequence
  Synthetic oligonucleotide
aggagaacattttttgcatggaggcctcaa

SEQ ID NO: 211484 - DNA, 30 bp, Artificial Sequence
  Synthetic oligonucleotide
gatcatggagggtcctcataacccgctcaa

SEQ ID NO: 211485 - DNA, 30 bp, Artificial Sequence
  Synthetic oligonucleotide
tgaccgtgaacctatgcaaatgctgctcaa

SEQ ID NO: 211486 - DNA, 30 bp, Artificial Sequence
  Synthetic oligonucleotide
gtttcaaagactgatggggcccactctcaa

SEQ ID NO: 211487 - DNA, 30 bp, Artificial Sequence
  Synthetic oligonucleotide
atgggtcctgtcataccatgtctctctcaa

SEQ ID NO: 211488 - DNA, 30 bp, Artificial Sequence
  Synthetic oligonucleotide
ttgtacgaatggtccagggtggagtctcaa

SEQ ID NO: 211489 - DNA, 30 bp, Artificial Sequence
  Synthetic oligonucleotide
agcataccgtgagtatggtgggcttctcaa

SEQ ID NO: 211490 - DNA, 30 bp, Artificial Sequence
  Synthetic oligonucleotide
ctttcaacaggacaactggtagtaagtcaa

SEQ ID NO: 211491 - DNA, 30 bp, Artificial Sequence
  Synthetic oligonucleotide
taatgacagtgcatgggtgtcgacagtcaa

SEQ ID NO: 211492 - DNA, 30 bp, Artificial Sequence
  Synthetic oligonucleotide
ggacccgagccaaagggttctggcagtcaa

SEQ ID NO: 211493 - DNA, 30 bp, Artificial Sequence
  Synthetic oligonucleotide
tataaagcttgcatatcaacggggagtcaa

SEQ ID NO: 211494 - DNA, 30 bp, Artificial Sequence
  Synthetic oligonucleotide
cccaggtcgaccaatttgtggtggagtcaa

SEQ ID NO: 211495 - DNA, 30 bp, Artificial Sequence
  Synthetic oligonucleotide
ttgaggatcggatgtattcggaatagtcaa

SEQ ID NO: 211496 - DNA, 30 bp, Artificial Sequence
  Synthetic oligonucleotide
tacaccgcgaaagcctgtacttctagtcaa

SEQ ID NO: 211497 - DNA, 30 bp, Artificial Sequence
  Synthetic oligonucleotide
gggtatatcaaacggaaatctcgtagtcaa

SEQ ID NO: 211498 - DNA, 30 bp, Artificial Sequence
  Synthetic oligonucleotide
catcgacaaaccgtttttactaaccgtcaa

SEQ ID NO: 211499 - DNA, 30 bp, Artificial Sequence
  Synthetic oligonucleotide
tagtcttcctgtataaagccccaccgtcaa

SEQ ID NO: 211500 - DNA, 30 bp, Artificial Sequence
  Synthetic oligonucleotide
tcatcgtttcttcacaggttagggcgtcaa

SEQ ID NO: 211501 - DNA, 30 bp, Artificial Sequence
  Synthetic oligonucleotide
tcactatctggttagccacaataaggtcaa

SEQ ID NO: 211502 - DNA, 30 bp, Artificial Sequence
  Synthetic oligonucleotide
gccacttactagcacagaggtaacggtcaa

SEQ ID NO: 211503 - DNA, 30 bp, Artificial Sequence
  Synthetic oligonucleotide
cacggacggacctcactacgacgctgtcaa

SEQ ID NO: 211504 - DNA, 30 bp, Artificial Sequence
  Synthetic oligonucleotide
tggatcactttacgaggtgatcggtgtcaa

SEQ ID NO: 211505 - DNA, 30 bp, Artificial Sequence
  Synthetic oligonucleotide
tagccgactgtcatcagctgtggcattcaa

SEQ ID NO: 211506 - DNA, 30 bp, Artificial Sequence
  Synthetic oligonucleotide
gcctctattagacaaatagtagagattcaa

SEQ ID NO: 211507 - DNA, 30 bp, Artificial Sequence
  Synthetic oligonucleotide
gagatgagaacttagactcatgtgattcaa

SEQ ID NO: 211508 - DNA, 30 bp, Artificial Sequence
  Synthetic oligonucleotide
acttgtgcggtaggataggcagatattcaa

SEQ ID NO: 211509 - DNA, 30 bp, Artificial Sequence
  Synthetic oligonucleotide
atccaaactacggaccaaaaaggccttcaa

SEQ ID NO: 211510 - DNA, 30 bp, Artificial Sequence
  Synthetic oligonucleotide
aaggggcactaatagctagcaactcttcaa

SEQ ID NO: 211511 - DNA, 30 bp, Artificial Sequence
  Synthetic oligonucleotide
gagagcacaattccgaaagaaattcttcaa

SEQ ID NO: 211512 - DNA, 30 bp, Artificial Sequence
  Synthetic oligonucleotide
accacggagacggtctatggatgagttcaa

SEQ ID NO: 211513 - DNA, 30 bp, Artificial Sequence
  Synthetic oligonucleotide
aatgaactttgcagagtaaagccggttcaa

SEQ ID NO: 211514 - DNA, 30 bp, Artificial Sequence
  Synthetic oligonucleotide
ctggccaatggcagtaaccgaggggttcaa

SEQ ID NO: 211515 - DNA, 30 bp, Artificial Sequence
  Synthetic oligonucleotide
gggctttttagccctttgcaaatatttcaa

SEQ ID NO: 211516 - DNA, 30 bp, Artificial Sequence
  Synthetic oligonucleotide
tgaccaaaacttatgacaatctactttcaa

SEQ ID NO: 211517 - DNA, 30 bp, Artificial Sequence
  Synthetic oligonucleotide
tatgcgcaacggcaggtggaattctttcaa

SEQ ID NO: 211518 - DNA, 30 bp, Artificial Sequence
  Synthetic oligonucleotide
acgcacgggtgatcgttagttcagtttcaa

SEQ ID NO: 211519 - DNA, 30 bp, Artificial Sequence
  Synthetic oligonucleotide
ccacgctattacatattaggggattttcaa

SEQ ID NO: 211520 - DNA, 30 bp, Artificial Sequence
  Synthetic oligonucleotide
gagatatacgtcagctcggtagccaaagaa

SEQ ID NO: 211521 - DNA, 30 bp, Artificial Sequence
  Synthetic oligonucleotide
ttgtcaagcggtccgtaaggggcgaaagaa

SEQ ID NO: 211522 - DNA, 30 bp, Artificial Sequence
  Synthetic oligonucleotide
tcgtggtcccgtactggcaacggtaaagaa

SEQ ID NO: 211523 - DNA, 30 bp, Artificial Sequence
  Synthetic oligonucleotide
tacctccactccatttgccggggtaaagaa

SEQ ID NO: 211524 - DNA, 30 bp, Artificial Sequence
  Synthetic oligonucleotide
gcatcacctaggctaggcaagattaaagaa

SEQ ID NO: 211525 - DNA, 30 bp, Artificial Sequence
  Synthetic oligonucleotide
ctttgacctaccgggaatcttcgacaagaa

SEQ ID NO: 211526 - DNA, 30 bp, Artificial Sequence
  Synthetic oligonucleotide
acgcctccgtacgccaaggccgtacaagaa

SEQ ID NO: 211527 - DNA, 30 bp, Artificial Sequence
  Synthetic oligonucleotide
cagtttgctacagacttgccaaaagaagaa

SEQ ID NO: 211528 - DNA, 30 bp, Artificial Sequence
  Synthetic oligonucleotide
tggccactagtttgaacgatcggagaagaa

SEQ ID NO: 211529 - DNA, 30 bp, Artificial Sequence
  Synthetic oligonucleotide
aagggggtcggatgtggcgggggagaagaa

SEQ ID NO: 211530 - DNA, 30 bp, Artificial Sequence
  Synthetic oligonucleotide
atttcggaacagccggcgggattagaagaa

SEQ ID NO: 211531 - DNA, 30 bp, Artificial Sequence
  Synthetic oligonucleotide
gcgcgctacaccgagtttcctatcgaagaa

SEQ ID NO: 211532 - DNA, 30 bp, Artificial Sequence
  Synthetic oligonucleotide
gcacagggacgtctttcctagaaataagaa

SEQ ID NO: 211533 - DNA, 30 bp, Artificial Sequence
  Synthetic oligonucleotide
tggtcgctgtctcgtgcggatttataagaa

SEQ ID NO: 211534 - DNA, 30 bp, Artificial Sequence
  Synthetic oligonucleotide
agttcagacacagacgtgctcagctaagaa

SEQ ID NO: 211535 - DNA, 30 bp, Artificial Sequence
  Synthetic oligonucleotide
tgatatcaattggcgacgggcgtctaagaa

SEQ ID NO: 211536 - DNA, 30 bp, Artificial Sequence
  Synthetic oligonucleotide
ccgatttggattggctggaccctaacagaa

SEQ ID NO: 211537 - DNA, 30 bp, Artificial Sequence
  Synthetic oligonucleotide
ggactaaccgacccagtgtcacgcacagaa

SEQ ID NO: 211538 - DNA, 30 bp, Artificial Sequence
  Synthetic oligonucleotide
cggggaatcttcagatccttcaagacagaa

SEQ ID NO: 211539 - DNA, 30 bp, Artificial Sequence
  Synthetic oligonucleotide
ctcggcgctagtagacatactaagacagaa

SEQ ID NO: 211540 - DNA, 30 bp, Artificial Sequence
  Synthetic oligonucleotide
tggcaattgacccctcccgcttagacagaa

SEQ ID NO: 211541 - DNA, 30 bp, Artificial Sequence
  Synthetic oligonucleotide
tctcagggtataaaaatagcgttgacagaa

SEQ ID NO: 211542 - DNA, 29 bp, Artificial Sequence
  Synthetic oligonucleotide
ttagcggcatccctgcgtaggatacagaa

SEQ ID NO: 211543 - DNA, 30 bp, Artificial Sequence
  Synthetic oligonucleotide
atgcaacaggagacggggttgccaccagaa

SEQ ID NO: 211544 - DNA, 30 bp, Artificial Sequence
  Synthetic oligonucleotide
tgtgacgagtgcttaattagcagaccagaa

SEQ ID NO: 211545 - DNA, 30 bp, Artificial Sequence
  Synthetic oligonucleotide
caggctactccccgacttcaccgcccagaa

SEQ ID NO: 211546 - DNA, 30 bp, Artificial Sequence
  Synthetic oligonucleotide
ggactggtagcggcttatggaaatccagaa

SEQ ID NO: 211547 - DNA, 30 bp, Artificial Sequence
  Synthetic oligonucleotide
cacttgtagcagggtgccggacctccagaa

SEQ ID NO: 211548 - DNA, 30 bp, Artificial Sequence
  Synthetic oligonucleotide
atagatgctttttagattaggatagcagaa

SEQ ID NO: 211549 - DNA, 30 bp, Artificial Sequence
  Synthetic oligonucleotide
tagatatcactaaggcccacagcggcagaa

SEQ ID NO: 211550 - DNA, 30 bp, Artificial Sequence
  Synthetic oligonucleotide
tacacatagataggcaggggggcggcagaa

SEQ ID NO: 211551 - DNA, 30 bp, Artificial Sequence
  Synthetic oligonucleotide
tccaggttcaagcggaaaggacgggcagaa

SEQ ID NO: 211552 - DNA, 30 bp, Artificial Sequence
  Synthetic oligonucleotide
ccgtggcctgcgggccttcacaactcagaa

SEQ ID NO: 211553 - DNA, 30 bp, Artificial Sequence
  Synthetic oligonucleotide
ggagcagacgcatcgtagaagtactcagaa

SEQ ID NO: 211554 - DNA, 30 bp, Artificial Sequence
  Synthetic oligonucleotide
gagggagctcggtagaaacgcgcctcagaa

SEQ ID NO: 211555 - DNA, 30 bp, Artificial Sequence
  Synthetic oligonucleotide
agaagggctcctaaggtttttgcgtcagaa

SEQ ID NO: 211556 - DNA, 30 bp, Artificial Sequence
  Synthetic oligonucleotide
atgatacggtcttgtatcacatcgtcagaa

SEQ ID NO: 211557 - DNA, 30 bp, Artificial Sequence
  Synthetic oligonucleotide
acgaccgatccgtgatcgaagaggtcagaa

SEQ ID NO: 211558 - DNA, 30 bp, Artificial Sequence
  Synthetic oligonucleotide
gacatccgcgcatcgtcacttacttcagaa

SEQ ID NO: 211559 - DNA, 30 bp, Artificial Sequence
  Synthetic oligonucleotide
ggcccggagtactgtcgcaaggaaagagaa

SEQ ID NO: 211560 - DNA, 30 bp, Artificial Sequence
  Synthetic oligonucleotide
atcattggttggaaatgggcttaaagagaa

SEQ ID NO: 211561 - DNA, 31 bp, Artificial Sequence
  Synthetic oligonucleotide
aacaagataagggtacccaggttcccgagaa

SEQ ID NO: 211562 - DNA, 30 bp, Artificial Sequence
  Synthetic oligonucleotide
tcgggatttaataattttcctaggcgagaa

SEQ ID NO: 211563 - DNA, 30 bp, Artificial Sequence
  Synthetic oligonucleotide
tatggaacgggggagaatttcatgcgagaa

SEQ ID NO: 211564 - DNA, 30 bp, Artificial Sequence
  Synthetic oligonucleotide
ctgggtgactctttgccttatcgtcgagaa

SEQ ID NO: 211565 - DNA, 30 bp, Artificial Sequence
  Synthetic oligonucleotide
gtgggcatgtgccataaccgcccaggagaa

SEQ ID NO: 211566 - DNA, 30 bp, Artificial Sequence
  Synthetic oligonucleotide
cataaaaaactactttccggtataggagaa

SEQ ID NO: 211567 - DNA, 30 bp, Artificial Sequence
  Synthetic oligonucleotide
tggcggatactgtaatattgggacggagaa

SEQ ID NO: 211568 - DNA, 30 bp, Artificial Sequence
  Synthetic oligonucleotide
aagtttagatattgaaactgctagggagaa

SEQ ID NO: 211569 - DNA, 30 bp, Artificial Sequence
  Synthetic oligonucleotide
ccttagatgtatgatggctattagggagaa

SEQ ID NO: 211570 - DNA, 30 bp, Artificial Sequence
  Synthetic oligonucleotide
gatcaagaaaccctgtctgtcacgggagaa

SEQ ID NO: 211571 - DNA, 30 bp, Artificial Sequence
  Synthetic oligonucleotide
acgggtcagcttcgtgtttgtaggggagaa

SEQ ID NO: 211572 - DNA, 30 bp, Artificial Sequence
  Synthetic oligonucleotide
atcctgtataaacggcattcaccatgagaa

SEQ ID NO: 211573 - DNA, 30 bp, Artificial Sequence
  Synthetic oligonucleotide
aggtggcaccgagggtgctgctgatgagaa

SEQ ID NO: 211574 - DNA, 30 bp, Artificial Sequence
  Synthetic oligonucleotide
tcccacaaatggagaaaatccgtatgagaa

SEQ ID NO: 211575 - DNA, 30 bp, Artificial Sequence
  Synthetic oligonucleotide
aatatgatgagcacggctagagactgagaa

SEQ ID NO: 211576 - DNA, 30 bp, Artificial Sequence
  Synthetic oligonucleotide
gtgtttccttcgagtaagtgagtttgagaa

SEQ ID NO: 211577 - DNA, 30 bp, Artificial Sequence
  Synthetic oligonucleotide
cattctttgagagctgaaccaaagatagaa

SEQ ID NO: 211578 - DNA, 30 bp, Artificial Sequence
  Synthetic oligonucleotide
acattggggctgttctgatatgggatagaa

SEQ ID NO: 211579 - DNA, 30 bp, Artificial Sequence
  Synthetic oligonucleotide
tcagagaggacttaaaaatcgtctatagaa

SEQ ID NO: 211580 - DNA, 30 bp, Artificial Sequence
  Synthetic oligonucleotide
acccaagggcgaatgatatatcgtatagaa

SEQ ID NO: 211581 - DNA, 30 bp, Artificial Sequence
  Synthetic oligonucleotide
gccatgggaaagactagtccaggtatagaa

SEQ ID NO: 211582 - DNA, 30 bp, Artificial Sequence
  Synthetic oligonucleotide
tgtgtctcagtaaccactcttggtatagaa

SEQ ID NO: 211583 - DNA, 30 bp, Artificial Sequence
  Synthetic oligonucleotide
aaagacgctgagcagtgagcccttatagaa

SEQ ID NO: 211584 - DNA, 30 bp, Artificial Sequence
  Synthetic oligonucleotide
agcttacgactggaatgtctataactagaa

SEQ ID NO: 211585 - DNA, 30 bp, Artificial Sequence
  Synthetic oligonucleotide
gcccgaaatgcaccgccagccttcctagaa

SEQ ID NO: 211586 - DNA, 31 bp, Artificial Sequence
  Synthetic oligonucleotide
ccctgagataaaggttggggctcagctagaa

SEQ ID NO: 211587 - DNA, 30 bp, Artificial Sequence
  Synthetic oligonucleotide
gaaggatctccggagtaagattatctagaa

SEQ ID NO: 211588 - DNA, 30 bp, Artificial Sequence
  Synthetic oligonucleotide
acacacatataggctagcgtacaagtagaa

SEQ ID NO: 211589 - DNA, 30 bp, Artificial Sequence
  Synthetic oligonucleotide
gtatacagagtggaaactcctgaagtagaa

SEQ ID NO: 211590 - DNA, 30 bp, Artificial Sequence
  Synthetic oligonucleotide
gtcgaaaattcaaatacggcaacagtagaa

SEQ ID NO: 211591 - DNA, 30 bp, Artificial Sequence
  Synthetic oligonucleotide
gcgtgctgtccgaagatcacgtcagtagaa

SEQ ID NO: 211592 - DNA, 30 bp, Artificial Sequence
  Synthetic oligonucleotide
gtttgcatgtcaagtggcgcggtagtagaa

SEQ ID NO: 211593 - DNA, 30 bp, Artificial Sequence
  Synthetic oligonucleotide
tggttatggtgcatttaataacacgtagaa

SEQ ID NO: 211594 - DNA, 30 bp, Artificial Sequence
  Synthetic oligonucleotide
ggagtagcgactcgcacccagggcgtagaa

SEQ ID NO: 211595 - DNA, 30 bp, Artificial Sequence
  Synthetic oligonucleotide
ctaggtaaacggaattaattgtgcgtagaa

SEQ ID NO: 211596 - DNA, 30 bp, Artificial Sequence
  Synthetic oligonucleotide
cgtagcataatttttaatagtctcgtagaa

SEQ ID NO: 211597 - DNA, 31 bp, Artificial Sequence
  Synthetic oligonucleotide
caggacgccatgcctaggcatgcgtgtagaa

SEQ ID NO: 211598 - DNA, 30 bp, Artificial Sequence
  Synthetic oligonucleotide
cctggtgcggctgcacacaaatttgtagaa

SEQ ID NO: 211599 - DNA, 30 bp, Artificial Sequence
  Synthetic oligonucleotide
tggcggacgatgcgcgatattacattagaa

SEQ ID NO: 211600 - DNA, 30 bp, Artificial Sequence
  Synthetic oligonucleotide
gactactaacagtactatgcaagattagaa

SEQ ID NO: 211601 - DNA, 30 bp, Artificial Sequence
  Synthetic oligonucleotide
catgtgccgagcagctaagcaaccttagaa

SEQ ID NO: 211602 - DNA, 30 bp, Artificial Sequence
  Synthetic oligonucleotide
tgtacagtgagggtgcgctgaacgttagaa

SEQ ID NO: 211603 - DNA, 30 bp, Artificial Sequence
  Synthetic oligonucleotide
acggaggtacgaggttgcattccgttagaa

SEQ ID NO: 211604 - DNA, 30 bp, Artificial Sequence
  Synthetic oligonucleotide
gcatgctcatttcataaaaagcggttagaa

SEQ ID NO: 211605 - DNA, 30 bp, Artificial Sequence
  Synthetic oligonucleotide
acaacagcttcggcggctgcggggttagaa

SEQ ID NO: 211606 - DNA, 30 bp, Artificial Sequence
  Synthetic oligonucleotide
cgaatgattgaattaggcttagtgttagaa

SEQ ID NO: 211607 - DNA, 30 bp, Artificial Sequence
  Synthetic oligonucleotide
tgcccttggcccggctcaggtaaaaacgaa

SEQ ID NO: 211608 - DNA, 30 bp, Artificial Sequence
  Synthetic oligonucleotide
tttacctcaaagtttgcggaccgaaacgaa

SEQ ID NO: 211609 - DNA, 30 bp, Artificial Sequence
  Synthetic oligonucleotide
gggtgggggatggagtacagtcacaacgaa

SEQ ID NO: 211610 - DNA, 30 bp, Artificial Sequence
  Synthetic oligonucleotide
ctctgtagtaccctcgggcaatacaacgaa

SEQ ID NO: 211611 - DNA, 30 bp, Artificial Sequence
  Synthetic oligonucleotide
ccacccacaaccagtcggacgccgaacgaa

SEQ ID NO: 211612 - DNA, 30 bp, Artificial Sequence
  Synthetic oligonucleotide
ctttggttagtgccaggtctctgtaacgaa

SEQ ID NO: 211613 - DNA, 30 bp, Artificial Sequence
  Synthetic oligonucleotide
atcataatggttcgcgttcgaatacacgaa

SEQ ID NO: 211614 - DNA, 31 bp, Artificial Sequence
  Synthetic oligonucleotide
gcagttagccctagagaaccgctatcacgaa

SEQ ID NO: 211615 - DNA, 30 bp, Artificial Sequence
  Synthetic oligonucleotide
aggcgcaacatctagttcagcccagacgaa

SEQ ID NO: 211616 - DNA, 30 bp, Artificial Sequence
  Synthetic oligonucleotide
aaggtgtttccaaatctctccatcgacgaa

SEQ ID NO: 211617 - DNA, 30 bp, Artificial Sequence
  Synthetic oligonucleotide
gggacaatgcgggtgcagtcataggacgaa

SEQ ID NO: 211618 - DNA, 30 bp, Artificial Sequence
  Synthetic oligonucleotide
agcggttatggcctacagtgcgatgacgaa

SEQ ID NO: 211619 - DNA, 30 bp, Artificial Sequence
  Synthetic oligonucleotide
cacgcgcaactgagaaacggacctgacgaa

SEQ ID NO: 211620 - DNA, 30 bp, Artificial Sequence
  Synthetic oligonucleotide
gacaccaaaccttatgtaaatgttgacgaa

SEQ ID NO: 211621 - DNA, 30 bp, Artificial Sequence
  Synthetic oligonucleotide
tatccttcaagagcgatccgcagttacgaa

SEQ ID NO: 211622 - DNA, 30 bp, Artificial Sequence
  Synthetic oligonucleotide
ggatactagatggctttcaccggttacgaa

SEQ ID NO: 211623 - DNA, 30 bp, Artificial Sequence
  Synthetic oligonucleotide
atcagtttagtgggttcggcctacaccgaa

SEQ ID NO: 211624 - DNA, 30 bp, Artificial Sequence
  Synthetic oligonucleotide
ttggcgaacgcgacccacatcgagaccgaa

SEQ ID NO: 211625 - DNA, 30 bp, Artificial Sequence
  Synthetic oligonucleotide
ccgcagccggggaaagggataccgaccgaa

SEQ ID NO: 211626 - DNA, 30 bp, Artificial Sequence
  Synthetic oligonucleotide
gaccaaacgtcgggggtcaggtttaccgaa

SEQ ID NO: 211627 - DNA, 30 bp, Artificial Sequence
  Synthetic oligonucleotide
gttggcggataacgtcgcaaagtacccgaa

SEQ ID NO: 211628 - DNA, 30 bp, Artificial Sequence
  Synthetic oligonucleotide
ggtcggaatgcgactttggttaggcccgaa

SEQ ID NO: 211629 - DNA, 30 bp, Artificial Sequence
  Synthetic oligonucleotide
gggttgaagtccgcgttaatccttcccgaa

SEQ ID NO: 211630 - DNA, 30 bp, Artificial Sequence
  Synthetic oligonucleotide
tgcgacgtatctgcttttcatctagccgaa

SEQ ID NO: 211631 - DNA, 30 bp, Artificial Sequence
  Synthetic oligonucleotide
caaacagatggcccagtctgatccgccgaa

SEQ ID NO: 211632 - DNA, 30 bp, Artificial Sequence
  Synthetic oligonucleotide
tagaacatgcgttatcgacttaaggccgaa

SEQ ID NO: 211633 - DNA, 30 bp, Artificial Sequence
  Synthetic oligonucleotide
ctcttccactcgatgggatggccggccgaa

SEQ ID NO: 211634 - DNA, 30 bp, Artificial Sequence
  Synthetic oligonucleotide
cagcaacttagccactaaggccaatccgaa

SEQ ID NO: 211635 - DNA, 30 bp, Artificial Sequence
  Synthetic oligonucleotide
gtctcaacgatatattcaaataggtccgaa

SEQ ID NO: 211636 - DNA, 30 bp, Artificial Sequence
  Synthetic oligonucleotide
agttccaggtagcatgaatgaataagcgaa

SEQ ID NO: 211637 - DNA, 30 bp, Artificial Sequence
  Synthetic oligonucleotide
cgcagtgtgatgatcgcaaaggacagcgaa

SEQ ID NO: 211638 - DNA, 30 bp, Artificial Sequence
  Synthetic oligonucleotide
atgcttgcagtacctataatggccagcgaa

SEQ ID NO: 211639 - DNA, 30 bp, Artificial Sequence
  Synthetic oligonucleotide
ttactgcttcgagaaccgcctcatagcgaa

SEQ ID NO: 211640 - DNA, 30 bp, Artificial Sequence
  Synthetic oligonucleotide
gaatccacctggaaattgtaatatagcgaa

SEQ ID NO: 211641 - DNA, 30 bp, Artificial Sequence
  Synthetic oligonucleotide
tggttgattcagagtatgtgaattagcgaa

SEQ ID NO: 211642 - DNA, 30 bp, Artificial Sequence
  Synthetic oligonucleotide
aaagctcgcagtatgagttaatttagcgaa

SEQ ID NO: 211643 - DNA, 30 bp, Artificial Sequence
  Synthetic oligonucleotide
gctgtgagcaactcggaagtcagacgcgaa

SEQ ID NO: 211644 - DNA, 30 bp, Artificial Sequence
  Synthetic oligonucleotide
aagggatttaaatgccgttgtttccgcgaa

SEQ ID NO: 211645 - DNA, 30 bp, Artificial Sequence
  Synthetic oligonucleotide
tagaggtcgatccttactcatcctcgcgaa

SEQ ID NO: 211646 - DNA, 30 bp, Artificial Sequence
  Synthetic oligonucleotide
gagtagcacacaggacaacgtagtcgcgaa

SEQ ID NO: 211647 - DNA, 30 bp, Artificial Sequence
  Synthetic oligonucleotide
attcgctaacgggttttgacatttcgcgaa

SEQ ID NO: 211648 - DNA, 30 bp, Artificial Sequence
  Synthetic oligonucleotide
cccatatatagactcggggttaaaggcgaa

SEQ ID NO: 211649 - DNA, 30 bp, Artificial Sequence
  Synthetic oligonucleotide
agggtgtaaaacatctgtgggccaggcgaa

SEQ ID NO: 211650 - DNA, 30 bp, Artificial Sequence
  Synthetic oligonucleotide
gagctcaatgttatcccctctgtaggcgaa

SEQ ID NO: 211651 - DNA, 30 bp, Artificial Sequence
  Synthetic oligonucleotide
ggcggaacaatcaggactagccgcggcgaa

SEQ ID NO: 211652 - DNA, 30 bp, Artificial Sequence
  Synthetic oligonucleotide
aagagaagccagacctgatacgtcggcgaa

SEQ ID NO: 211653 - DNA, 30 bp, Artificial Sequence
  Synthetic oligonucleotide
aaacgctcactaatgcgagacagtggcgaa

SEQ ID NO: 211654 - DNA, 30 bp, Artificial Sequence
  Synthetic oligonucleotide
gctgaggtacgaatatgactcccatgcgaa

SEQ ID NO: 211655 - DNA, 30 bp, Artificial Sequence
  Synthetic oligonucleotide
cgatgaccgctttaagcggtattatgcgaa

SEQ ID NO: 211656 - DNA, 30 bp, Artificial Sequence
  Synthetic oligonucleotide
gatccgcagggagtcagggctggctgcgaa

SEQ ID NO: 211657 - DNA, 30 bp, Artificial Sequence
  Synthetic oligonucleotide
gctggaagtcggatgagaagtcattgcgaa

SEQ ID NO: 211658 - DNA, 30 bp, Artificial Sequence
  Synthetic oligonucleotide
gctcacaacaacaatctaaaggcttgcgaa

SEQ ID NO: 211659 - DNA, 30 bp, Artificial Sequence
  Synthetic oligonucleotide
tatgtagcttaggcattcctgctttgcgaa

SEQ ID NO: 211660 - DNA, 30 bp, Artificial Sequence
  Synthetic oligonucleotide
ctacttcgtaataataataggagaatcgaa

SEQ ID NO: 211661 - DNA, 30 bp, Artificial Sequence
  Synthetic oligonucleotide
gaccgcggccctagatacgagaacatcgaa

SEQ ID NO: 211662 - DNA, 30 bp, Artificial Sequence
  Synthetic oligonucleotide
gcctaatggggtccaacgataatcatcgaa

SEQ ID NO: 211663 - DNA, 30 bp, Artificial Sequence
  Synthetic oligonucleotide
gtactcatacatcagtgaactcagatcgaa

SEQ ID NO: 211664 - DNA, 30 bp, Artificial Sequence
  Synthetic oligonucleotide
cgaagttccctttgtaggtacgagatcgaa

SEQ ID NO: 211665 - DNA, 30 bp, Artificial Sequence
  Synthetic oligonucleotide
acctcgcggttctcgagcaaggggatcgaa

SEQ ID NO: 211666 - DNA, 30 bp, Artificial Sequence
  Synthetic oligonucleotide
aaaactagcaatttgcgcccaatgatcgaa

SEQ ID NO: 211667 - DNA, 30 bp, Artificial Sequence
  Synthetic oligonucleotide
cacggttagcgaagcggcatcttgatcgaa

SEQ ID NO: 211668 - DNA, 30 bp, Artificial Sequence
  Synthetic oligonucleotide
cgacgttacaattattcgtgctccctcgaa

SEQ ID NO: 211669 - DNA, 30 bp, Artificial Sequence
  Synthetic oligonucleotide
ctagctgattcccgcgatttcagtctcgaa

SEQ ID NO: 211670 - DNA, 30 bp, Artificial Sequence
  Synthetic oligonucleotide
gctgagtcgaacgaatctgcctttctcgaa

SEQ ID NO: 211671 - DNA, 30 bp, Artificial Sequence
  Synthetic oligonucleotide
acgcctgtatggtcttaacggccagtcgaa

SEQ ID NO: 211672 - DNA, 30 bp, Artificial Sequence
  Synthetic oligonucleotide
aagttgtagaagattcaccgcctagtcgaa

SEQ ID NO: 211673 - DNA, 30 bp, Artificial Sequence
  Synthetic oligonucleotide
cgaggattaagggtgtatctgatggtcgaa

SEQ ID NO: 211674 - DNA, 30 bp, Artificial Sequence
  Synthetic oligonucleotide
gcctctcagggcggtagagccagtgtcgaa

SEQ ID NO: 211675 - DNA, 30 bp, Artificial Sequence
  Synthetic oligonucleotide
gacgtcgtctcatgggcaacgaatttcgaa

SEQ ID NO: 211676 - DNA, 30 bp, Artificial Sequence
  Synthetic oligonucleotide
cttagggcagtcatataagaataaaaggaa

SEQ ID NO: 211677 - DNA, 30 bp, Artificial Sequence
  Synthetic oligonucleotide
caacggttcacatcgctcaagaccaaggaa

SEQ ID NO: 211678 - DNA, 30 bp, Artificial Sequence
  Synthetic oligonucleotide
aatatcaatgatgaaacgccatagaaggaa

SEQ ID NO: 211679 - DNA, 30 bp, Artificial Sequence
  Synthetic oligonucleotide
atccgtatccgtagcgtcatggataaggaa

SEQ ID NO: 211680 - DNA, 30 bp, Artificial Sequence
  Synthetic oligonucleotide
atgctatcttaacctgaacttcctaaggaa

SEQ ID NO: 211681 - DNA, 30 bp, Artificial Sequence
  Synthetic oligonucleotide
aagcggtgtaccaccgattcctctaaggaa

SEQ ID NO: 211682 - DNA, 30 bp, Artificial Sequence
  Synthetic oligonucleotide
agagataaaattcatggggacatccaggaa

SEQ ID NO: 211683 - DNA, 30 bp, Artificial Sequence
  Synthetic oligonucleotide
gccgcatctttaggggtgagctcgcaggaa

SEQ ID NO: 211684 - DNA, 30 bp, Artificial Sequence
  Synthetic oligonucleotide
cctgcgaacacgcattgcgtagtgcaggaa

SEQ ID NO: 211685 - DNA, 30 bp, Artificial Sequence
  Synthetic oligonucleotide
aaacttgtggcagccgaaaggactcaggaa

SEQ ID NO: 211686 - DNA, 30 bp, Artificial Sequence
  Synthetic oligonucleotide
tcatcggaacaacggttggctgctcaggaa

SEQ ID NO: 211687 - DNA, 30 bp, Artificial Sequence
  Synthetic oligonucleotide
aaaggcacgcgccatccgtcatgagaggaa

SEQ ID NO: 211688 - DNA, 29 bp, Artificial Sequence
  Synthetic oligonucleotide
ttgggccgtcggcgaagtggcgggaggaa

SEQ ID NO: 211689 - DNA, 30 bp, Artificial Sequence
  Synthetic oligonucleotide
ggccagcctattggatgtgtgtgtgaggaa

SEQ ID NO: 211690 - DNA, 30 bp, Artificial Sequence
  Synthetic oligonucleotide
tgttccgcagagttgctgctacaaacggaa

SEQ ID NO: 211691 - DNA, 30 bp, Artificial Sequence
  Synthetic oligonucleotide
cacaatgatccgagtgtctatggaacggaa

SEQ ID NO: 211692 - DNA, 30 bp, Artificial Sequence
  Synthetic oligonucleotide
gacatcgctttctcaccttgtataacggaa

SEQ ID NO: 211693 - DNA, 30 bp, Artificial Sequence
  Synthetic oligonucleotide
aactcagtcagtatggagtattacacggaa

SEQ ID NO: 211694 - DNA, 30 bp, Artificial Sequence
  Synthetic oligonucleotide
cagaaacgtagtgttagccgttcgacggaa

SEQ ID NO: 211695 - DNA, 30 bp, Artificial Sequence
  Synthetic oligonucleotide
acacattggcgtccatactgcgtgacggaa

SEQ ID NO: 211696 - DNA, 30 bp, Artificial Sequence
  Synthetic oligonucleotide
gcgcttacaagttagcgaagcgatacggaa

SEQ ID NO: 211697 - DNA, 30 bp, Artificial Sequence
  Synthetic oligonucleotide
aaggacgcattgctacggaacaaaccggaa

SEQ ID NO: 211698 - DNA, 30 bp, Artificial Sequence
  Synthetic oligonucleotide
agtagctcagtgtaatggaggacaccggaa

SEQ ID NO: 211699 - DNA, 30 bp, Artificial Sequence
  Synthetic oligonucleotide
cagggtgctttatcggaaactaagccggaa

SEQ ID NO: 211700 - DNA, 30 bp, Artificial Sequence
  Synthetic oligonucleotide
atccgggtgcctgagtatcgcggtccggaa

SEQ ID NO: 211701 - DNA, 30 bp, Artificial Sequence
  Synthetic oligonucleotide
gtctcattgtgagacgagtcgcttccggaa

SEQ ID NO: 211702 - DNA, 30 bp, Artificial Sequence
  Synthetic oligonucleotide
gagccataggaaggcgaattaggagcggaa

SEQ ID NO: 211703 - DNA, 30 bp, Artificial Sequence
  Synthetic oligonucleotide
gcaccgcgtccttggacgtgactagcggaa

SEQ ID NO: 211704 - DNA, 30 bp, Artificial Sequence
  Synthetic oligonucleotide
cttaaaggctgatagtggcagagggcggaa

SEQ ID NO: 211705 - DNA, 30 bp, Artificial Sequence
  Synthetic oligonucleotide
cataagcactacatggtatgtagggcggaa

SEQ ID NO: 211706 - DNA, 30 bp, Artificial Sequence
  Synthetic oligonucleotide
tgagatgtgttgtttccaaaaagtgcggaa

SEQ ID NO: 211707 - DNA, 30 bp, Artificial Sequence
  Synthetic oligonucleotide
gcctgtctgggtgatatacacggatcggaa

SEQ ID NO: 211708 - DNA, 30 bp, Artificial Sequence
  Synthetic oligonucleotide
tcatccgatgtccctactataaagtcggaa

SEQ ID NO: 211709 - DNA, 30 bp, Artificial Sequence
  Synthetic oligonucleotide
agtgtgttgaactagacccaaatgtcggaa

SEQ ID NO: 211710 - DNA, 30 bp, Artificial Sequence
  Synthetic oligonucleotide
ccgtgcttcttgctcataggcgaaagggaa

SEQ ID NO: 211711 - DNA, 30 bp, Artificial Sequence
  Synthetic oligonucleotide
aagtatagcagtaattgagcctcaagggaa

SEQ ID NO: 211712 - DNA, 30 bp, Artificial Sequence
  Synthetic oligonucleotide
gtcgaagttgctcatagagccctaagggaa

SEQ ID NO: 211713 - DNA, 30 bp, Artificial Sequence
  Synthetic oligonucleotide
aaagtatacggtaggcgcctaaccagggaa

SEQ ID NO: 211714 - DNA, 30 bp, Artificial Sequence
  Synthetic oligonucleotide
atctagtacgttttataaatgagcagggaa

SEQ ID NO: 211715 - DNA, 30 bp, Artificial Sequence
  Synthetic oligonucleotide
tcgggaatttcgccagaacggctcagggaa

SEQ ID NO: 211716 - DNA, 30 bp, Artificial Sequence
  Synthetic oligonucleotide
ccgacacaggatagcgcttcccaacgggaa

SEQ ID NO: 211717 - DNA, 30 bp, Artificial Sequence
  Synthetic oligonucleotide
gcagtgaccaaaaccggggtggcccgggaa

SEQ ID NO: 211718 - DNA, 30 bp, Artificial Sequence
  Synthetic oligonucleotide
tgtcgaggtagggatgtctggatgcgggaa

SEQ ID NO: 211719 - DNA, 30 bp, Artificial Sequence
  Synthetic oligonucleotide
acagagcctgaatttatcttttctcgggaa

SEQ ID NO: 211720 - DNA, 30 bp, Artificial Sequence
  Synthetic oligonucleotide
taccaaaaagtttgctgagagagtcgggaa

SEQ ID NO: 211721 - DNA, 30 bp, Artificial Sequence
  Synthetic oligonucleotide
gggtcggtaatgaagagtggccgtcgggaa

SEQ ID NO: 211722 - DNA, 30 bp, Artificial Sequence
  Synthetic oligonucleotide
agaatcttgaggctggaggtacaaggggaa

SEQ ID NO: 211723 - DNA, 30 bp, Artificial Sequence
  Synthetic oligonucleotide
tagcagtgtttcgtcaaaatacacggggaa

SEQ ID NO: 211724 - DNA, 30 bp, Artificial Sequence
  Synthetic oligonucleotide
catcaccgcactgtcggcacgtccggggaa

SEQ ID NO: 211725 - DNA, 30 bp, Artificial Sequence
  Synthetic oligonucleotide
ctgattcagggcagtatgcagctcggggaa

SEQ ID NO: 211726 - DNA, 31 bp, Artificial Sequence
  Synthetic oligonucleotide
gataagtatttactggtagaagcaatgggaa

SEQ ID NO: 211727 - DNA, 30 bp, Artificial Sequence
  Synthetic oligonucleotide
acggtgtagttccctgtgaactcatgggaa

SEQ ID NO: 211728 - DNA, 30 bp, Artificial Sequence
  Synthetic oligonucleotide
accagcagccttcaacggtccaagtgggaa

SEQ ID NO: 211729 - DNA, 30 bp, Artificial Sequence
  Synthetic oligonucleotide
tatggtgttatctgtccagcgccgtgggaa

SEQ ID NO: 211730 - DNA, 30 bp, Artificial Sequence
  Synthetic oligonucleotide
gtgtaaattatgcaatcgcaaatgtgggaa

SEQ ID NO: 211731 - DNA, 30 bp, Artificial Sequence
  Synthetic oligonucleotide
gttcattactgaacgaaacatgcttgggaa

SEQ ID NO: 211732 - DNA, 30 bp, Artificial Sequence
  Synthetic oligonucleotide
ggtatggacggtattgcacaatgttgggaa

SEQ ID NO: 211733 - DNA, 30 bp, Artificial Sequence
  Synthetic oligonucleotide
atactagataatataaaatacgatatggaa

SEQ ID NO: 211734 - DNA, 30 bp, Artificial Sequence
  Synthetic oligonucleotide
ttgaacccggaggatcgtaatcgactggaa

SEQ ID NO: 211735 - DNA, 30 bp, Artificial Sequence
  Synthetic oligonucleotide
agtcgaagactggcgctctggtgactggaa

SEQ ID NO: 211736 - DNA, 30 bp, Artificial Sequence
  Synthetic oligonucleotide
ggccactgcattggtttactctacctggaa

SEQ ID NO: 211737 - DNA, 30 bp, Artificial Sequence
  Synthetic oligonucleotide
tgtgcgaatgtgggcgcgcgggccctggaa

SEQ ID NO: 211738 - DNA, 30 bp, Artificial Sequence
  Synthetic oligonucleotide
gtaaagttcccatttggtgaccaagtggaa

SEQ ID NO: 211739 - DNA, 30 bp, Artificial Sequence
  Synthetic oligonucleotide
ggagaatggatactacacggcgaagtggaa

SEQ ID NO: 211740 - DNA, 30 bp, Artificial Sequence
  Synthetic oligonucleotide
tgaagatatcatagacatatacgagtggaa

SEQ ID NO: 211741 - DNA, 30 bp, Artificial Sequence
  Synthetic oligonucleotide
ggacgctcctactcaagtagatgagtggaa

SEQ ID NO: 211742 - DNA, 30 bp, Artificial Sequence
  Synthetic oligonucleotide
ggcagttacctgtcagtgatatgagtggaa

SEQ ID NO: 211743 - DNA, 30 bp, Artificial Sequence
  Synthetic oligonucleotide
tctcggggaacatgcctctgggtagtggaa

SEQ ID NO: 211744 - DNA, 30 bp, Artificial Sequence
  Synthetic oligonucleotide
tcgattaggtatcatggaggccccgtggaa

SEQ ID NO: 211745 - DNA, 30 bp, Artificial Sequence
  Synthetic oligonucleotide
gaggtattaaaactagagttgtccgtggaa

SEQ ID NO: 211746 - DNA, 30 bp, Artificial Sequence
  Synthetic oligonucleotide
cgggtatgggcatcatgccgttccgtggaa

SEQ ID NO: 211747 - DNA, 30 bp, Artificial Sequence
  Synthetic oligonucleotide
tcatgggtagtcctcgaagtattcgtggaa

SEQ ID NO: 211748 - DNA, 30 bp, Artificial Sequence
  Synthetic oligonucleotide
aagatgcagcttgcggaagggcaggtggaa

SEQ ID NO: 211749 - DNA, 30 bp, Artificial Sequence
  Synthetic oligonucleotide
atattggatccagggactgaagaggtggaa

SEQ ID NO: 211750 - DNA, 30 bp, Artificial Sequence
  Synthetic oligonucleotide
taaatcgaattgttggtgcaggcggtggaa

SEQ ID NO: 211751 - DNA, 30 bp, Artificial Sequence
  Synthetic oligonucleotide
ggagtcagcaattatgttagctcggtggaa

SEQ ID NO: 211752 - DNA, 30 bp, Artificial Sequence
  Synthetic oligonucleotide
ggcttatgatgtcagttctgtggggtggaa

SEQ ID NO: 211753 - DNA, 30 bp, Artificial Sequence
  Synthetic oligonucleotide
gctgacatcctaaatccctggtttgtggaa

SEQ ID NO: 211754 - DNA, 30 bp, Artificial Sequence
  Synthetic oligonucleotide
caaccgacggctcatcgaacctgattggaa

SEQ ID NO: 211755 - DNA, 30 bp, Artificial Sequence
  Synthetic oligonucleotide
gtgtacgtatcggcgttaatggggttggaa

SEQ ID NO: 211756 - DNA, 30 bp, Artificial Sequence
  Synthetic oligonucleotide
cggggtaactgtcagaagaataatttggaa

SEQ ID NO: 211757 - DNA, 30 bp, Artificial Sequence
  Synthetic oligonucleotide
gcatctgaaaagaagactagtcctttggaa

SEQ ID NO: 211758 - DNA, 30 bp, Artificial Sequence
  Synthetic oligonucleotide
agatggggcattgtaggacccagtttggaa

SEQ ID NO: 211759 - DNA, 30 bp, Artificial Sequence
  Synthetic oligonucleotide
tagtaccatttagtcgccccggaaaatgaa

SEQ ID NO: 211760 - DNA, 30 bp, Artificial Sequence
  Synthetic oligonucleotide
tgaagagagtctacggagcgcacaaatgaa

SEQ ID NO: 211761 - DNA, 30 bp, Artificial Sequence
  Synthetic oligonucleotide
gaattcacggcagtggaaaaatcaaatgaa

SEQ ID NO: 211762 - DNA, 30 bp, Artificial Sequence
  Synthetic oligonucleotide
agcgtgctacccgtgcgagagagcaatgaa

SEQ ID NO: 211763 - DNA, 30 bp, Artificial Sequence
  Synthetic oligonucleotide
gacaaacgcgagagttcctctgtcaatgaa

SEQ ID NO: 211764 - DNA, 30 bp, Artificial Sequence
  Synthetic oligonucleotide
ttggctgtcaaggtattaggggtgaatgaa

SEQ ID NO: 211765 - DNA, 29 bp, Artificial Sequence
  Synthetic oligonucleotide
agtaaaggtcagcgaagaagttgaatgaa

SEQ ID NO: 211766 - DNA, 30 bp, Artificial Sequence
  Synthetic oligonucleotide
tgagcacatttgctgaactatttgaatgaa

SEQ ID NO: 211767 - DNA, 30 bp, Artificial Sequence
  Synthetic oligonucleotide
cgactaagctgactctgttcaggacatgaa

SEQ ID NO: 211768 - DNA, 30 bp, Artificial Sequence
  Synthetic oligonucleotide
acccgcagtataaaattaggacatcatgaa

SEQ ID NO: 211769 - DNA, 30 bp, Artificial Sequence
  Synthetic oligonucleotide
caggaaataaaatttaccgcttatcatgaa

SEQ ID NO: 211770 - DNA, 30 bp, Artificial Sequence
  Synthetic oligonucleotide
tctgatcgtggggaagcgtagcgtcatgaa

SEQ ID NO: 211771 - DNA, 30 bp, Artificial Sequence
  Synthetic oligonucleotide
ggagtgtaatgtggtcataaaaaagatgaa

SEQ ID NO: 211772 - DNA, 30 bp, Artificial Sequence
  Synthetic oligonucleotide
acaccgtgtgtgatttttcccgtagatgaa

SEQ ID NO: 211773 - DNA, 30 bp, Artificial Sequence
  Synthetic oligonucleotide
aacggaccttagagcagccatcgggatgaa

SEQ ID NO: 211774 - DNA, 30 bp, Artificial Sequence
  Synthetic oligonucleotide
ggcggtatctcgttgggagagggtgatgaa

SEQ ID NO: 211775 - DNA, 30 bp, Artificial Sequence
  Synthetic oligonucleotide
atgggtgtggggatcggcaggacatatgaa

SEQ ID NO: 211776 - DNA, 30 bp, Artificial Sequence
  Synthetic oligonucleotide
ataatgcgtatcaatgtctgtgcctatgaa

SEQ ID NO: 211777 - DNA, 30 bp, Artificial Sequence
  Synthetic oligonucleotide
atcatatagggttcagtaggtaagtatgaa

SEQ ID NO: 211778 - DNA, 31 bp, Artificial Sequence
  Synthetic oligonucleotide
gtctacgttgtgtgaaacaaagcattatgaa

SEQ ID NO: 211779 - DNA, 30 bp, Artificial Sequence
  Synthetic oligonucleotide
tagactcggatggcatatgggtcttatgaa

SEQ ID NO: 211780 - DNA, 30 bp, Artificial Sequence
  Synthetic oligonucleotide
ttgcttaaaaacactgatcaactttatgaa

SEQ ID NO: 211781 - DNA, 30 bp, Artificial Sequence
  Synthetic oligonucleotide
ggaagataagtacatctgacaacaactgaa

SEQ ID NO: 211782 - DNA, 30 bp, Artificial Sequence
  Synthetic oligonucleotide
gtaggcctgaattcagcgaggtacactgaa

SEQ ID NO: 211783 - DNA, 30 bp, Artificial Sequence
  Synthetic oligonucleotide
gagggcattatttaacctattattcctgaa

SEQ ID NO: 211784 - DNA, 30 bp, Artificial Sequence
  Synthetic oligonucleotide
ttggaataaatcttagggacgggagctgaa

SEQ ID NO: 211785 - DNA, 30 bp, Artificial Sequence
  Synthetic oligonucleotide
ctcatggaactcttataaagatacgctgaa

SEQ ID NO: 211786 - DNA, 30 bp, Artificial Sequence
  Synthetic oligonucleotide
cagggacctaaatcgccggtcgcggctgaa

SEQ ID NO: 211787 - DNA, 30 bp, Artificial Sequence
  Synthetic oligonucleotide
atggtaccacaacctgacgagttggctgaa

SEQ ID NO: 211788 - DNA, 30 bp, Artificial Sequence
  Synthetic oligonucleotide
cggcgatccgccggactgtctttggctgaa

SEQ ID NO: 211789 - DNA, 30 bp, Artificial Sequence
  Synthetic oligonucleotide
gttacatattgaggccgtcggcctgctgaa

SEQ ID NO: 211790 - DNA, 30 bp, Artificial Sequence
  Synthetic oligonucleotide
tgcatcattgctaaaggtctaatatctgaa

SEQ ID NO: 211791 - DNA, 30 bp, Artificial Sequence
  Synthetic oligonucleotide
tatgggtccaacactgccgagttatctgaa

SEQ ID NO: 211792 - DNA, 30 bp, Artificial Sequence
  Synthetic oligonucleotide
cgacgtgtcggtggtagcttatgctctgaa

SEQ ID NO: 211793 - DNA, 30 bp, Artificial Sequence
  Synthetic oligonucleotide
gccaacgcgtctatggagcgcaagtctgaa

SEQ ID NO: 211794 - DNA, 30 bp, Artificial Sequence
  Synthetic oligonucleotide
tgaacttgaagctccgccttgaacagtgaa

SEQ ID NO: 211795 - DNA, 30 bp, Artificial Sequence
  Synthetic oligonucleotide
catatggagaaacagttaaacatcagtgaa

SEQ ID NO: 211796 - DNA, 30 bp, Artificial Sequence
  Synthetic oligonucleotide
tcgcagcttacaaacaggtaacagagtgaa

SEQ ID NO: 211797 - DNA, 30 bp, Artificial Sequence
  Synthetic oligonucleotide
acaatgaccctccgtaaagcggagagtgaa

SEQ ID NO: 211798 - DNA, 30 bp, Artificial Sequence
  Synthetic oligonucleotide
ttggcccatggcttgaggtcctcgagtgaa

SEQ ID NO: 211799 - DNA, 30 bp, Artificial Sequence
  Synthetic oligonucleotide
gagcaagcgcaacacgtaatgtcgagtgaa

SEQ ID NO: 211800 - DNA, 30 bp, Artificial Sequence
  Synthetic oligonucleotide
aaagtgtgggttgaccagccagatagtgaa

SEQ ID NO: 211801 - DNA, 30 bp, Artificial Sequence
  Synthetic oligonucleotide
taaaaaataatctataatgccatacgtgaa

SEQ ID NO: 211802 - DNA, 30 bp, Artificial Sequence
  Synthetic oligonucleotide
ctagcaacacagccccccgacattcgtgaa

SEQ ID NO: 211803 - DNA, 30 bp, Artificial Sequence
  Synthetic oligonucleotide
atactcatgagtgagtggaatgaaggtgaa

SEQ ID NO: 211804 - DNA, 30 bp, Artificial Sequence
  Synthetic oligonucleotide
tctgctaataactacaaaacgtacggtgaa

SEQ ID NO: 211805 - DNA, 30 bp, Artificial Sequence
  Synthetic oligonucleotide
gtacttagcgaatctagtgtccagtgtgaa

SEQ ID NO: 211806 - DNA, 30 bp, Artificial Sequence
  Synthetic oligonucleotide
cctgaaaggctaaagctgccacggtgtgaa

SEQ ID NO: 211807 - DNA, 30 bp, Artificial Sequence
  Synthetic oligonucleotide
cagggccaggttggcaaacgctggtgtgaa

SEQ ID NO: 211808 - DNA, 30 bp, Artificial Sequence
  Synthetic oligonucleotide
atgttccatgcctcgagaggcatgtgtgaa

SEQ ID NO: 211809 - DNA, 30 bp, Artificial Sequence
  Synthetic oligonucleotide
atcaggttatcgaagtggagtttgtgtgaa

SEQ ID NO: 211810 - DNA, 30 bp, Artificial Sequence
  Synthetic oligonucleotide
ttgtgagggctccccgatagaataattgaa

SEQ ID NO: 211811 - DNA, 30 bp, Artificial Sequence
  Synthetic oligonucleotide
gagttcttgcctccaaagggagcgattgaa

SEQ ID NO: 211812 - DNA, 30 bp, Artificial Sequence
  Synthetic oligonucleotide
gtcaacgttgtgcgctgaaactggattgaa

SEQ ID NO: 211813 - DNA, 30 bp, Artificial Sequence
  Synthetic oligonucleotide
gcccgatagtttctggcctgtatgattgaa

SEQ ID NO: 211814 - DNA, 30 bp, Artificial Sequence
  Synthetic oligonucleotide
tgtgataatgagttacaacagggtattgaa

SEQ ID NO: 211815 - DNA, 30 bp, Artificial Sequence
  Synthetic oligonucleotide
taaggcgaatacaccgttaactgtattgaa

SEQ ID NO: 211816 - DNA, 30 bp, Artificial Sequence
  Synthetic oligonucleotide
actaatgtcctgtatcgtaaggaccttgaa

SEQ ID NO: 211817 - DNA, 30 bp, Artificial Sequence
  Synthetic oligonucleotide
aggcgttcagtaagatagggacctcttgaa

SEQ ID NO: 211818 - DNA, 30 bp, Artificial Sequence
  Synthetic oligonucleotide
tctagggttatagtgactccaagggttgaa

SEQ ID NO: 211819 - DNA, 30 bp, Artificial Sequence
  Synthetic oligonucleotide
tacgtgtagcattaaaagacatgatttgaa

SEQ ID NO: 211820 - DNA, 31 bp, Artificial Sequence
  Synthetic oligonucleotide
ccacgggccaccctggggatgggtgtttgaa

SEQ ID NO: 211821 - DNA, 30 bp, Artificial Sequence
  Synthetic oligonucleotide
tgattaacgcgtgttcagagaagttttgaa

SEQ ID NO: 211822 - DNA, 30 bp, Artificial Sequence
  Synthetic oligonucleotide
aaacgctaacttggcgataatagttttgaa

SEQ ID NO: 211823 - DNA, 30 bp, Artificial Sequence
  Synthetic oligonucleotide
caaccggtacctcgattcaaggccaaataa

SEQ ID NO: 211824 - DNA, 30 bp, Artificial Sequence
  Synthetic oligonucleotide
aagtccggcggatcggggaagtccaaataa

SEQ ID NO: 211825 - DNA, 30 bp, Artificial Sequence
  Synthetic oligonucleotide
agttcgcaactggagcctcgaaggaaataa

SEQ ID NO: 211826 - DNA, 30 bp, Artificial Sequence
  Synthetic oligonucleotide
atggacgtgggaaggtagtttattaaataa

SEQ ID NO: 211827 - DNA, 30 bp, Artificial Sequence
  Synthetic oligonucleotide
taggagacgaacgctagtgtgcaacaataa

SEQ ID NO: 211828 - DNA, 30 bp, Artificial Sequence
  Synthetic oligonucleotide
atttatcgagcggtggggcaggaacaataa

SEQ ID NO: 211829 - DNA, 30 bp, Artificial Sequence
  Synthetic oligonucleotide
tccgcgatacagaagctcgatgcacaataa

SEQ ID NO: 211830 - DNA, 30 bp, Artificial Sequence
  Synthetic oligonucleotide
agttagcgcgcccgacattacggacaataa

SEQ ID NO: 211831 - DNA, 30 bp, Artificial Sequence
  Synthetic oligonucleotide
cgtgtggccccgtagggggtgaaccaataa

SEQ ID NO: 211832 - DNA, 30 bp, Artificial Sequence
  Synthetic oligonucleotide
gaagactgcgttgctggatggttccaataa

SEQ ID NO: 211833 - DNA, 30 bp, Artificial Sequence
  Synthetic oligonucleotide
ggctgcggccgacctttcgacacgcaataa

SEQ ID NO: 211834 - DNA, 30 bp, Artificial Sequence
  Synthetic oligonucleotide
attattagtgcgtccaggtgacatcaataa

SEQ ID NO: 211835 - DNA, 30 bp, Artificial Sequence
  Synthetic oligonucleotide
aatgtcgggatcttcgttagtgttcaataa

SEQ ID NO: 211836 - DNA, 30 bp, Artificial Sequence
  Synthetic oligonucleotide
tagggttgggtagctgattcttttcaataa

SEQ ID NO: 211837 - DNA, 30 bp, Artificial Sequence
  Synthetic oligonucleotide
ttaaaccgacatgtgtagtgtaaggaataa

SEQ ID NO: 211838 - DNA, 30 bp, Artificial Sequence
  Synthetic oligonucleotide
aattcagcgcggctccactgcgaggaataa

SEQ ID NO: 211839 - DNA, 30 bp, Artificial Sequence
  Synthetic oligonucleotide
ggaacgatcaacggagagcggagggaataa

SEQ ID NO: 211840 - DNA, 30 bp, Artificial Sequence
  Synthetic oligonucleotide
caccactgcgaggtaaataagcttgaataa

SEQ ID NO: 211841 - DNA, 30 bp, Artificial Sequence
  Synthetic oligonucleotide
cagctcaatacaatgttagaattataataa

SEQ ID NO: 211842 - DNA, 30 bp, Artificial Sequence
  Synthetic oligonucleotide
caatacgttgaatcggacggctcctaataa

SEQ ID NO: 211843 - DNA, 30 bp, Artificial Sequence
  Synthetic oligonucleotide
cggggacgttaacaccacagcaagtaataa

SEQ ID NO: 211844 - DNA, 30 bp, Artificial Sequence
  Synthetic oligonucleotide
caggcgagagaataggagtctttgtaataa

SEQ ID NO: 211845 - DNA, 30 bp, Artificial Sequence
  Synthetic oligonucleotide
tcaaccctcagacaaacacacggttaataa

SEQ ID NO: 211846 - DNA, 30 bp, Artificial Sequence
  Synthetic oligonucleotide
tattggatctacaagccatcatgaacataa

SEQ ID NO: 211847 - DNA, 30 bp, Artificial Sequence
  Synthetic oligonucleotide
gcgacagtgttaaaggtgatacccacataa

SEQ ID NO: 211848 - DNA, 30 bp, Artificial Sequence
  Synthetic oligonucleotide
aggttacatcatttaatagcgcccacataa

SEQ ID NO: 211849 - DNA, 30 bp, Artificial Sequence
  Synthetic oligonucleotide
aacactaggcggcgagaatggaaaccataa

SEQ ID NO: 211850 - DNA, 30 bp, Artificial Sequence
  Synthetic oligonucleotide
acgaaattcctgtcattagtgaccccataa

SEQ ID NO: 211851 - DNA, 30 bp, Artificial Sequence
  Synthetic oligonucleotide
ttatccatagtgggtactgagctgccataa

SEQ ID NO: 211852 - DNA, 30 bp, Artificial Sequence
  Synthetic oligonucleotide
cacgttaagttactctgtgatctgccataa

SEQ ID NO: 211853 - DNA, 30 bp, Artificial Sequence
  Synthetic oligonucleotide
tcacgcacgcggcttaacggagtgccataa

SEQ ID NO: 211854 - DNA, 30 bp, Artificial Sequence
  Synthetic oligonucleotide
tatgtcattagtcgaagttatccagcataa

SEQ ID NO: 211855 - DNA, 30 bp, Artificial Sequence
  Synthetic oligonucleotide
atgccaacctatatactaatcttagcataa

SEQ ID NO: 211856 - DNA, 30 bp, Artificial Sequence
  Synthetic oligonucleotide
agcaaagctgcgatattagccccggcataa

SEQ ID NO: 211857 - DNA, 30 bp, Artificial Sequence
  Synthetic oligonucleotide
gaaatgtacagcgcaatcaccgcggcataa

SEQ ID NO: 211858 - DNA, 30 bp, Artificial Sequence
  Synthetic oligonucleotide
taacgcggttaatgggtcagttatgcataa

SEQ ID NO: 211859 - DNA, 30 bp, Artificial Sequence
  Synthetic oligonucleotide
agctatgcagtagtaattacgtctgcataa

SEQ ID NO: 211860 - DNA, 30 bp, Artificial Sequence
  Synthetic oligonucleotide
aggctgcttccaggtgactcggaatcataa

SEQ ID NO: 211861 - DNA, 30 bp, Artificial Sequence
  Synthetic oligonucleotide
tcgcgaactcccatgtggtctgaatcataa

SEQ ID NO: 211862 - DNA, 30 bp, Artificial Sequence
  Synthetic oligonucleotide
tgttgcgcgggaaaaagccaacgatcataa

SEQ ID NO: 211863 - DNA, 30 bp, Artificial Sequence
  Synthetic oligonucleotide
ggtgctcagtcgtggacatatctctcataa

SEQ ID NO: 211864 - DNA, 31 bp, Artificial Sequence
  Synthetic oligonucleotide
agatccagtaataggataccagtagtcataa

SEQ ID NO: 211865 - DNA, 30 bp, Artificial Sequence
  Synthetic oligonucleotide
ctattctgtccctcgtaagaaagttcataa

SEQ ID NO: 211866 - DNA, 30 bp, Artificial Sequence
  Synthetic oligonucleotide
ataacgcaatgaagagaaactgtttcataa

SEQ ID NO: 211867 - DNA, 30 bp, Artificial Sequence
  Synthetic oligonucleotide
tcattgccagctcgtttcattctaagataa

SEQ ID NO: 211868 - DNA, 30 bp, Artificial Sequence
  Synthetic oligonucleotide
atgtactgggatagacgggcggtaagataa

SEQ ID NO: 211869 - DNA, 30 bp, Artificial Sequence
  Synthetic oligonucleotide
aaaatcacctaatggcctcaagacagataa

SEQ ID NO: 211870 - DNA, 30 bp, Artificial Sequence
  Synthetic oligonucleotide
tgacgttctactacgtagggaaagagataa

SEQ ID NO: 211871 - DNA, 30 bp, Artificial Sequence
  Synthetic oligonucleotide
agatacgtgctcagactttccgagagataa

SEQ ID NO: 211872 - DNA, 30 bp, Artificial Sequence
  Synthetic oligonucleotide
ggagagtaaagtcggatgaagcatagataa

SEQ ID NO: 211873 - DNA, 30 bp, Artificial Sequence
  Synthetic oligonucleotide
cgggaagaattgctggtgatataccgataa

SEQ ID NO: 211874 - DNA, 30 bp, Artificial Sequence
  Synthetic oligonucleotide
aatgggtttccgtacaccatttgccgataa

SEQ ID NO: 211875 - DNA, 30 bp, Artificial Sequence
  Synthetic oligonucleotide
ttcaagagagtttaacatgcaaatcgataa

SEQ ID NO: 211876 - DNA, 30 bp, Artificial Sequence
  Synthetic oligonucleotide
gcgcagatgtctacgtaccagcatcgataa

SEQ ID NO: 211877 - DNA, 30 bp, Artificial Sequence
  Synthetic oligonucleotide
cgcatctgaagtggcagaagctctcgataa

SEQ ID NO: 211878 - DNA, 30 bp, Artificial Sequence
  Synthetic oligonucleotide
ctaccgtgtggactggaacggcgtcgataa

SEQ ID NO: 211879 - DNA, 30 bp, Artificial Sequence
  Synthetic oligonucleotide
gcgtcaggacgtgagttgccgcaaggataa

SEQ ID NO: 211880 - DNA, 30 bp, Artificial Sequence
  Synthetic oligonucleotide
agattgatcgtgcgtatctggcaaggataa

SEQ ID NO: 211881 - DNA, 30 bp, Artificial Sequence
  Synthetic oligonucleotide
tattaaacgtcgatgcaaactccaggataa

SEQ ID NO: 211882 - DNA, 30 bp, Artificial Sequence
  Synthetic oligonucleotide
ccgcgttcaaaaatgggaatttcaggataa

SEQ ID NO: 211883 - DNA, 30 bp, Artificial Sequence
  Synthetic oligonucleotide
taatgccgggtattactcgactgcggataa

SEQ ID NO: 211884 - DNA, 30 bp, Artificial Sequence
  Synthetic oligonucleotide
aagttcgctatgggataaatcaagggataa

SEQ ID NO: 211885 - DNA, 30 bp, Artificial Sequence
  Synthetic oligonucleotide
aagtctcaacaatcactttggttgggataa

SEQ ID NO: 211886 - DNA, 30 bp, Artificial Sequence
  Synthetic oligonucleotide
cgtttaatcgtcgaggaggcgtctggataa

SEQ ID NO: 211887 - DNA, 30 bp, Artificial Sequence
  Synthetic oligonucleotide
gagcgaacccatacggataaacggtgataa

SEQ ID NO: 211888 - DNA, 30 bp, Artificial Sequence
  Synthetic oligonucleotide
gccgaagatcgagtaaggctgtattgataa

SEQ ID NO: 211889 - DNA, 30 bp, Artificial Sequence
  Synthetic oligonucleotide
ttcaggtgatcagcctagggcaaaatataa

SEQ ID NO: 211890 - DNA, 30 bp, Artificial Sequence
  Synthetic oligonucleotide
gggcgaagaaatgaatcggttcgaatataa

SEQ ID NO: 211891 - DNA, 30 bp, Artificial Sequence
  Synthetic oligonucleotide
gtaggttatacagttatgcgactaatataa

SEQ ID NO: 211892 - DNA, 30 bp, Artificial Sequence
  Synthetic oligonucleotide
gcggtaggctggtggccctgcgacatataa

SEQ ID NO: 211893 - DNA, 30 bp, Artificial Sequence
  Synthetic oligonucleotide
atggctcttacgttgaaggaacccatataa

SEQ ID NO: 211894 - DNA, 30 bp, Artificial Sequence
  Synthetic oligonucleotide
atagacgtaaccgaatgcatcgagatataa

SEQ ID NO: 211895 - DNA, 30 bp, Artificial Sequence
  Synthetic oligonucleotide
ctagaacgagcatcttaaggaatgatataa

SEQ ID NO: 211896 - DNA, 30 bp, Artificial Sequence
  Synthetic oligonucleotide
gcgcccgatagccactgagagctgatataa

SEQ ID NO: 211897 - DNA, 30 bp, Artificial Sequence
  Synthetic oligonucleotide
tgtggtggggccctttagtctgtgatataa

SEQ ID NO: 211898 - DNA, 30 bp, Artificial Sequence
  Synthetic oligonucleotide
gatccttgagcgtaaacgaaacatatataa

SEQ ID NO: 211899 - DNA, 30 bp, Artificial Sequence
  Synthetic oligonucleotide
tggtggagtgaacatcacgcccttatataa

SEQ ID NO: 211900 - DNA, 30 bp, Artificial Sequence
  Synthetic oligonucleotide
taagtgaggatggtgaggcgaggactataa

SEQ ID NO: 211901 - DNA, 30 bp, Artificial Sequence
  Synthetic oligonucleotide
caccacaccgacatctagaagcccctataa

SEQ ID NO: 211902 - DNA, 30 bp, Artificial Sequence
  Synthetic oligonucleotide
acttgcacaccaggtgcaacgttcctataa

SEQ ID NO: 211903 - DNA, 30 bp, Artificial Sequence
  Synthetic oligonucleotide
ctaaatgtgacctctggttcggggctataa

SEQ ID NO: 211904 - DNA, 30 bp, Artificial Sequence
  Synthetic oligonucleotide
gcagttaagggccggactcgaaatctataa

SEQ ID NO: 211905 - DNA, 30 bp, Artificial Sequence
  Synthetic oligonucleotide
gatatgcttatggatgaaaacgctctataa

SEQ ID NO: 211906 - DNA, 30 bp, Artificial Sequence
  Synthetic oligonucleotide
tctaccagataccggaccacgcgtctataa

SEQ ID NO: 211907 - DNA, 30 bp, Artificial Sequence
  Synthetic oligonucleotide
atgcagaaacggtaatacgcagttctataa

SEQ ID NO: 211908 - DNA, 30 bp, Artificial Sequence
  Synthetic oligonucleotide
ccgtgtggaccaatacacgatgtagtataa

SEQ ID NO: 211909 - DNA, 30 bp, Artificial Sequence
  Synthetic oligonucleotide
atggattagaatagcacctgtgatgtataa

SEQ ID NO: 211910 - DNA, 30 bp, Artificial Sequence
  Synthetic oligonucleotide
gacgtcagatcaagcattctaggtgtataa

SEQ ID NO: 211911 - DNA, 30 bp, Artificial Sequence
  Synthetic oligonucleotide
cgagagagatcaccaacgaacgaattataa

SEQ ID NO: 211912 - DNA, 30 bp, Artificial Sequence
  Synthetic oligonucleotide
aacagatactggaggcaagaaccattataa

SEQ ID NO: 211913 - DNA, 30 bp, Artificial Sequence
  Synthetic oligonucleotide
aatacccaattcatgtgacagccattataa

SEQ ID NO: 211914 - DNA, 30 bp, Artificial Sequence
  Synthetic oligonucleotide
tagccaggtggagacgaacaagtgttataa

SEQ ID NO: 211915 - DNA, 30 bp, Artificial Sequence
  Synthetic oligonucleotide
ccaatagagctgcctaaaaagctgaactaa

SEQ ID NO: 211916 - DNA, 30 bp, Artificial Sequence
  Synthetic oligonucleotide
ggttatagggacagacacttccctaactaa

SEQ ID NO: 211917 - DNA, 30 bp, Artificial Sequence
  Synthetic oligonucleotide
atcgcatgtcctggattggagttacactaa

SEQ ID NO: 211918 - DNA, 30 bp, Artificial Sequence
  Synthetic oligonucleotide
cggacagtccgcccattagaaaggcactaa

SEQ ID NO: 211919 - DNA, 30 bp, Artificial Sequence
  Synthetic oligonucleotide
actaactccacggatggtaaatgagactaa

SEQ ID NO: 211920 - DNA, 30 bp, Artificial Sequence
  Synthetic oligonucleotide
gctcaagatctagcatgatttttggactaa

SEQ ID NO: 211921 - DNA, 30 bp, Artificial Sequence
  Synthetic oligonucleotide
ggctgacacaagggtagtggcagtgactaa

SEQ ID NO: 211922 - DNA, 30 bp, Artificial Sequence
  Synthetic oligonucleotide
ataaatatttgtctgccaaaaaactactaa

SEQ ID NO: 211923 - DNA, 30 bp, Artificial Sequence
  Synthetic oligonucleotide
tcgagactacagtcggactgcatctactaa

SEQ ID NO: 211924 - DNA, 30 bp, Artificial Sequence
  Synthetic oligonucleotide
tacagcggccgtaacggtagttcgtactaa

SEQ ID NO: 211925 - DNA, 30 bp, Artificial Sequence
  Synthetic oligonucleotide
ccgatcagaaacttctcaaagaggtactaa

SEQ ID NO: 211926 - DNA, 30 bp, Artificial Sequence
  Synthetic oligonucleotide
cgccgtatgacaacataaggggggtactaa

SEQ ID NO: 211927 - DNA, 30 bp, Artificial Sequence
  Synthetic oligonucleotide
cgcatatcccgacacttctgggtttactaa

SEQ ID NO: 211928 - DNA, 30 bp, Artificial Sequence
  Synthetic oligonucleotide
ctgggcactttagttgcaagctgcacctaa

SEQ ID NO: 211929 - DNA, 30 bp, Artificial Sequence
  Synthetic oligonucleotide
gcggtagcgggaagtgatggttctacctaa

SEQ ID NO: 211930 - DNA, 30 bp, Artificial Sequence
  Synthetic oligonucleotide
gctaggtatgtgagtatagccgaaccctaa

SEQ ID NO: 211931 - DNA, 30 bp, Artificial Sequence
  Synthetic oligonucleotide
tgacgggcagaacacgaggccacgccctaa

SEQ ID NO: 211932 - DNA, 30 bp, Artificial Sequence
  Synthetic oligonucleotide
gccaattgggtgacggcgttattcgcctaa

SEQ ID NO: 211933 - DNA, 30 bp, Artificial Sequence
  Synthetic oligonucleotide
taatacttgtaagttatggttgaatcctaa

SEQ ID NO: 211934 - DNA, 30 bp, Artificial Sequence
  Synthetic oligonucleotide
tgccttaaggatatgggacaaacatcctaa

SEQ ID NO: 211935 - DNA, 30 bp, Artificial Sequence
  Synthetic oligonucleotide
ttccgaactggggacggtatcagatcctaa

SEQ ID NO: 211936 - DNA, 30 bp, Artificial Sequence
  Synthetic oligonucleotide
ccaggataatccacgaagcatgcgtcctaa

SEQ ID NO: 211937 - DNA, 30 bp, Artificial Sequence
  Synthetic oligonucleotide
catgcaacgcacaggcagggatcgtcctaa

SEQ ID NO: 211938 - DNA, 30 bp, Artificial Sequence
  Synthetic oligonucleotide
aaaccgatacgctttacacatcgcagctaa

SEQ ID NO: 211939 - DNA, 30 bp, Artificial Sequence
  Synthetic oligonucleotide
ggaattaagcaggtgggtttagatagctaa

SEQ ID NO: 211940 - DNA, 30 bp, Artificial Sequence
  Synthetic oligonucleotide
gagcgacggtaatgcggatgtcctagctaa

SEQ ID NO: 211941 - DNA, 30 bp, Artificial Sequence
  Synthetic oligonucleotide
tacaatttaaggagtgccgcaattagctaa

SEQ ID NO: 211942 - DNA, 30 bp, Artificial Sequence
  Synthetic oligonucleotide
gcgtgttgaaaggacctcatgtaacgctaa

SEQ ID NO: 211943 - DNA, 30 bp, Artificial Sequence
  Synthetic oligonucleotide
gcaaaataactgcagtgggggtcacgctaa

SEQ ID NO: 211944 - DNA, 30 bp, Artificial Sequence
  Synthetic oligonucleotide
gcgtatgaaacggaggatgccctacgctaa

SEQ ID NO: 211945 - DNA, 30 bp, Artificial Sequence
  Synthetic oligonucleotide
atcatggtatcggggtttcactcgcgctaa

SEQ ID NO: 211946 - DNA, 30 bp, Artificial Sequence
  Synthetic oligonucleotide
gtcatacaggcagaggccctatctcgctaa

SEQ ID NO: 211947 - DNA, 30 bp, Artificial Sequence
  Synthetic oligonucleotide
tgctagcgagccgaaggctaacaaggctaa

SEQ ID NO: 211948 - DNA, 30 bp, Artificial Sequence
  Synthetic oligonucleotide
gcctttgaagcgtagaggaaaacaggctaa

SEQ ID NO: 211949 - DNA, 30 bp, Artificial Sequence
  Synthetic oligonucleotide
ataacgaagccgccagaagacacgggctaa

SEQ ID NO: 211950 - DNA, 30 bp, Artificial Sequence
  Synthetic oligonucleotide
catggtttcgaccctagggtaccgggctaa

SEQ ID NO: 211951 - DNA, 30 bp, Artificial Sequence
  Synthetic oligonucleotide
aggttaggaataggtgccctggatggctaa

SEQ ID NO: 211952 - DNA, 30 bp, Artificial Sequence
  Synthetic oligonucleotide
cacgccttgaggtgaaggggtcgatgctaa

SEQ ID NO: 211953 - DNA, 30 bp, Artificial Sequence
  Synthetic oligonucleotide
tctctcacgaattagggaaatgagtgctaa

SEQ ID NO: 211954 - DNA, 30 bp, Artificial Sequence
  Synthetic oligonucleotide
tgtctaacatacttgtcaggtacaatctaa

SEQ ID NO: 211955 - DNA, 30 bp, Artificial Sequence
  Synthetic oligonucleotide
acgttggttaacacgacttctggaatctaa

SEQ ID NO: 211956 - DNA, 30 bp, Artificial Sequence
  Synthetic oligonucleotide
tcgattgaaaaggcgcacaccaagatctaa

SEQ ID NO: 211957 - DNA, 30 bp, Artificial Sequence
  Synthetic oligonucleotide
tcctcctataccgcaacgaaatcgatctaa

SEQ ID NO: 211958 - DNA, 30 bp, Artificial Sequence
  Synthetic oligonucleotide
ggtagtggtcagaggtctccaccactctaa

SEQ ID NO: 211959 - DNA, 30 bp, Artificial Sequence
  Synthetic oligonucleotide
ctcaggcattaaggcgctatatcactctaa

SEQ ID NO: 211960 - DNA, 30 bp, Artificial Sequence
  Synthetic oligonucleotide
cctcggtaattatacattgcagcagtctaa

SEQ ID NO: 211961 - DNA, 30 bp, Artificial Sequence
  Synthetic oligonucleotide
ggacagtaatgcgagacgtggtgagtctaa

SEQ ID NO: 211962 - DNA, 30 bp, Artificial Sequence
  Synthetic oligonucleotide
gggtgagtttccagaaagcgagtagtctaa

SEQ ID NO: 211963 - DNA, 30 bp, Artificial Sequence
  Synthetic oligonucleotide
ctctaacctcaatattttctgcgcgtctaa

SEQ ID NO: 211964 - DNA, 30 bp, Artificial Sequence
  Synthetic oligonucleotide
actcacagttgactgattgggccggtctaa

SEQ ID NO: 211965 - DNA, 30 bp, Artificial Sequence
  Synthetic oligonucleotide
gatgtaagagccgtctcgtaagcggtctaa

SEQ ID NO: 211966 - DNA, 30 bp, Artificial Sequence
  Synthetic oligonucleotide
ttcagcaaggcacttgtcaacattgtctaa

SEQ ID NO: 211967 - DNA, 30 bp, Artificial Sequence
  Synthetic oligonucleotide
tagacgacgcatcggctggatgagttctaa

SEQ ID NO: 211968 - DNA, 30 bp, Artificial Sequence
  Synthetic oligonucleotide
atgcctcgagcggtctaagtgaaaaagtaa

SEQ ID NO: 211969 - DNA, 30 bp, Artificial Sequence
  Synthetic oligonucleotide
ggtcagcaatgaaattaatttgaaaagtaa

SEQ ID NO: 211970 - DNA, 30 bp, Artificial Sequence
  Synthetic oligonucleotide
cgagtgatggctccaatcgaatcaaagtaa

SEQ ID NO: 211971 - DNA, 30 bp, Artificial Sequence
  Synthetic oligonucleotide
cgagtcttgctatagcccatctctaagtaa

SEQ ID NO: 211972 - DNA, 30 bp, Artificial Sequence
  Synthetic oligonucleotide
tccactacattgcctattaagggacagtaa

SEQ ID NO: 211973 - DNA, 30 bp, Artificial Sequence
  Synthetic oligonucleotide
aagagattagctagacatatccggcagtaa

SEQ ID NO: 211974 - DNA, 30 bp, Artificial Sequence
  Synthetic oligonucleotide
gcagtcacagttgctgaaagagatcagtaa

SEQ ID NO: 211975 - DNA, 30 bp, Artificial Sequence
  Synthetic oligonucleotide
atatgaggtgggcaccactatggtcagtaa

SEQ ID NO: 211976 - DNA, 30 bp, Artificial Sequence
  Synthetic oligonucleotide
cctcgtcatgagaatcgttctgacgagtaa

SEQ ID NO: 211977 - DNA, 30 bp, Artificial Sequence
  Synthetic oligonucleotide
aattagtctttgtacacttaatcggagtaa

SEQ ID NO: 211978 - DNA, 30 bp, Artificial Sequence
  Synthetic oligonucleotide
gtctgtggttctgatattatgagtgagtaa

SEQ ID NO: 211979 - DNA, 30 bp, Artificial Sequence
  Synthetic oligonucleotide
gaggagtggggaatcagtgatttatagtaa

SEQ ID NO: 211980 - DNA, 30 bp, Artificial Sequence
  Synthetic oligonucleotide
agaggccggaacaccgccgactactagtaa

SEQ ID NO: 211981 - DNA, 30 bp, Artificial Sequence
  Synthetic oligonucleotide
aagtccctagatggcagggtaaagtagtaa

SEQ ID NO: 211982 - DNA, 30 bp, Artificial Sequence
  Synthetic oligonucleotide
ggtccttaagtgacggctgagtagtagtaa

SEQ ID NO: 211983 - DNA, 30 bp, Artificial Sequence
  Synthetic oligonucleotide
cctttcggtgcaacagttagatcgtagtaa

SEQ ID NO: 211984 - DNA, 30 bp, Artificial Sequence
  Synthetic oligonucleotide
atatacgccaggctcactggctcgtagtaa

SEQ ID NO: 211985 - DNA, 30 bp, Artificial Sequence
  Synthetic oligonucleotide
tgcgtagcgtccgaacgtggccggtagtaa

SEQ ID NO: 211986 - DNA, 30 bp, Artificial Sequence
  Synthetic oligonucleotide
cacctcaattagccgccttacatgtagtaa

SEQ ID NO: 211987 - DNA, 30 bp, Artificial Sequence
  Synthetic oligonucleotide
acattaagttgagatcatactggttagtaa

SEQ ID NO: 211988 - DNA, 30 bp, Artificial Sequence
  Synthetic oligonucleotide
ttatcagaactcaagcacaactgttagtaa

SEQ ID NO: 211989 - DNA, 29 bp, Artificial Sequence
  Synthetic oligonucleotide
ttagggggatcagaagaataggcacgtaa

SEQ ID NO: 211990 - DNA, 30 bp, Artificial Sequence
  Synthetic oligonucleotide
gggctaaaacggtttgagtcaaagacgtaa

SEQ ID NO: 211991 - DNA, 30 bp, Artificial Sequence
  Synthetic oligonucleotide
gggttctgcgtaaaaaggacatcaccgtaa

SEQ ID NO: 211992 - DNA, 30 bp, Artificial Sequence
  Synthetic oligonucleotide
ctagggcatgagcaatcataaataccgtaa

SEQ ID NO: 211993 - DNA, 30 bp, Artificial Sequence
  Synthetic oligonucleotide
aacgggaattccggctaccggaacccgtaa

SEQ ID NO: 211994 - DNA, 30 bp, Artificial Sequence
  Synthetic oligonucleotide
tccaggtgtgggtgcgctcgacgagcgtaa

SEQ ID NO: 211995 - DNA, 30 bp, Artificial Sequence
  Synthetic oligonucleotide
gtctacaacgttctgtagatgaacgcgtaa

SEQ ID NO: 211996 - DNA, 30 bp, Artificial Sequence
  Synthetic oligonucleotide
tatgacaaaccgattgggtttggcgcgtaa

SEQ ID NO: 211997 - DNA, 30 bp, Artificial Sequence
  Synthetic oligonucleotide
aagtgagcgtttaggataaatagggcgtaa

SEQ ID NO: 211998 - DNA, 31 bp, Artificial Sequence
  Synthetic oligonucleotide
atttgacacgattaagaagtaattggcgtaa

SEQ ID NO: 211999 - DNA, 30 bp, Artificial Sequence
  Synthetic oligonucleotide
ccgccgcggtgaatggtcaacacatcgtaa

SEQ ID NO: 212000 - DNA, 30 bp, Artificial Sequence
  Synthetic oligonucleotide
tcacatattagatatgttgttgagtcgtaa

SEQ ID NO: 212001 - DNA, 30 bp, Artificial Sequence
  Synthetic oligonucleotide
cagagtttatttacttccatctcgtcgtaa

SEQ ID NO: 212002 - DNA, 30 bp, Artificial Sequence
  Synthetic oligonucleotide
ccttaaccattacgggaaatgtggtcgtaa

SEQ ID NO: 212003 - DNA, 30 bp, Artificial Sequence
  Synthetic oligonucleotide
aactaggtgaaggtaagggggcattcgtaa

SEQ ID NO: 212004 - DNA, 30 bp, Artificial Sequence
  Synthetic oligonucleotide
cggctgtcatctactatatgggattcgtaa

SEQ ID NO: 212005 - DNA, 30 bp, Artificial Sequence
  Synthetic oligonucleotide
tctgacttgccagattgcatagtttcgtaa

SEQ ID NO: 212006 - DNA, 30 bp, Artificial Sequence
  Synthetic oligonucleotide
ctaggacccggcaatggaccaaaaaggtaa

SEQ ID NO: 212007 - DNA, 30 bp, Artificial Sequence
  Synthetic oligonucleotide
ggcgtaatgcatacattcggcggaaggtaa

SEQ ID NO: 212008 - DNA, 30 bp, Artificial Sequence
  Synthetic oligonucleotide
gaatagtctacaagcacatttttaaggtaa

SEQ ID NO: 212009 - DNA, 30 bp, Artificial Sequence
  Synthetic oligonucleotide
tacagaaatagactgatatccgacaggtaa

SEQ ID NO: 212010 - DNA, 30 bp, Artificial Sequence
  Synthetic oligonucleotide
cgaataagcgatacaaggcttgccaggtaa

SEQ ID NO: 212011 - DNA, 30 bp, Artificial Sequence
  Synthetic oligonucleotide
acattggacggtagaacaagatgcaggtaa

SEQ ID NO: 212012 - DNA, 30 bp, Artificial Sequence
  Synthetic oligonucleotide
aattcggactagtgggacctgtgcaggtaa

SEQ ID NO: 212013 - DNA, 30 bp, Artificial Sequence
  Synthetic oligonucleotide
gccaccgttctcatggattatcagaggtaa

SEQ ID NO: 212014 - DNA, 30 bp, Artificial Sequence
  Synthetic oligonucleotide
aggttcgtcattaaaagccgttagaggtaa

SEQ ID NO: 212015 - DNA, 31 bp, Artificial Sequence
  Synthetic oligonucleotide
tcggctactggaggaatgcttcgcgaggtaa

SEQ ID NO: 212016 - DNA, 30 bp, Artificial Sequence
  Synthetic oligonucleotide
aggcgcacgtctagaacctttaaacggtaa

SEQ ID NO: 212017 - DNA, 30 bp, Artificial Sequence
  Synthetic oligonucleotide
atacatggatattaggtcctgcaacggtaa

SEQ ID NO: 212018 - DNA, 30 bp, Artificial Sequence
  Synthetic oligonucleotide
tgttggcgcaacaatagagaacgacggtaa

SEQ ID NO: 212019 - DNA, 30 bp, Artificial Sequence
  Synthetic oligonucleotide
cgcgggtcagattttccagtgtaccggtaa

SEQ ID NO: 212020 - DNA, 30 bp, Artificial Sequence
  Synthetic oligonucleotide
ttccaccgaggtaaggttgacaagcggtaa

SEQ ID NO: 212021 - DNA, 30 bp, Artificial Sequence
  Synthetic oligonucleotide
tgacgtatcggctactagttgctgcggtaa

SEQ ID NO: 212022 - DNA, 30 bp, Artificial Sequence
  Synthetic oligonucleotide
aaagcctagtaagtcagagagaatcggtaa

SEQ ID NO: 212023 - DNA, 30 bp, Artificial Sequence
  Synthetic oligonucleotide
aagatgtccaggtctgatgggatagggtaa

SEQ ID NO: 212024 - DNA, 30 bp, Artificial Sequence
  Synthetic oligonucleotide
aacaagcgaactaaagtactatacgggtaa

SEQ ID NO: 212025 - DNA, 30 bp, Artificial Sequence
  Synthetic oligonucleotide
cacagggcactttggaccaatggcgggtaa

SEQ ID NO: 212026 - DNA, 30 bp, Artificial Sequence
  Synthetic oligonucleotide
agttgtgcccagacatcgagtcaggggtaa

SEQ ID NO: 212027 - DNA, 30 bp, Artificial Sequence
  Synthetic oligonucleotide
ccaagttcggaccgccgcctagaggggtaa

SEQ ID NO: 212028 - DNA, 30 bp, Artificial Sequence
  Synthetic oligonucleotide
ttgtgtaagtgcaatgtctaattggggtaa

SEQ ID NO: 212029 - DNA, 30 bp, Artificial Sequence
  Synthetic oligonucleotide
catcttcgtaaaagccgaaagttggggtaa

SEQ ID NO: 212030 - DNA, 30 bp, Artificial Sequence
  Synthetic oligonucleotide
ctagatatgtacttcgtcgctcatgggtaa

SEQ ID NO: 212031 - DNA, 30 bp, Artificial Sequence
  Synthetic oligonucleotide
ggtgtgtccaggtgtggccaggcctggtaa

SEQ ID NO: 212032 - DNA, 30 bp, Artificial Sequence
  Synthetic oligonucleotide
aagtagcggagggcctaatacgattggtaa

SEQ ID NO: 212033 - DNA, 30 bp, Artificial Sequence
  Synthetic oligonucleotide
gcttgcgtggacatgcgcattggaatgtaa

SEQ ID NO: 212034 - DNA, 30 bp, Artificial Sequence
  Synthetic oligonucleotide
aagctcgagtggccgcaagtcaccatgtaa

SEQ ID NO: 212035 - DNA, 30 bp, Artificial Sequence
  Synthetic oligonucleotide
cataggtcttcccctcagtcaaagatgtaa

SEQ ID NO: 212036 - DNA, 30 bp, Artificial Sequence
  Synthetic oligonucleotide
atggtcagctcatattgtgacactatgtaa

SEQ ID NO: 212037 - DNA, 30 bp, Artificial Sequence
  Synthetic oligonucleotide
tgaaagcgctggctctgagcatgtatgtaa

SEQ ID NO: 212038 - DNA, 30 bp, Artificial Sequence
  Synthetic oligonucleotide
gctgccacactgcatcaaaagaacctgtaa

SEQ ID NO: 212039 - DNA, 30 bp, Artificial Sequence
  Synthetic oligonucleotide
gatgttataccgatccattagaacctgtaa

SEQ ID NO: 212040 - DNA, 30 bp, Artificial Sequence
  Synthetic oligonucleotide
gatgagatacccgcgtgttaatccctgtaa

SEQ ID NO: 212041 - DNA, 30 bp, Artificial Sequence
  Synthetic oligonucleotide
cacgggcacaataagtatgacatgctgtaa

SEQ ID NO: 212042 - DNA, 30 bp, Artificial Sequence
  Synthetic oligonucleotide
aactgagtgccgataatgccaagtctgtaa

SEQ ID NO: 212043 - DNA, 30 bp, Artificial Sequence
  Synthetic oligonucleotide
gatcaccaccgcaaataaagaattctgtaa

SEQ ID NO: 212044 - DNA, 30 bp, Artificial Sequence
  Synthetic oligonucleotide
ggtaagtcagggctattaaccgaagtgtaa

SEQ ID NO: 212045 - DNA, 30 bp, Artificial Sequence
  Synthetic oligonucleotide
agtgaaattaggtgatgcccaacagtgtaa

SEQ ID NO: 212046 - DNA, 30 bp, Artificial Sequence
  Synthetic oligonucleotide
caatgaggggtctgcacgtcgggagtgtaa

SEQ ID NO: 212047 - DNA, 30 bp, Artificial Sequence
  Synthetic oligonucleotide
tagatcactaaaggtgccgagtgggtgtaa

SEQ ID NO: 212048 - DNA, 30 bp, Artificial Sequence
  Synthetic oligonucleotide
ttggacgtttgtagcagaagaactgtgtaa

SEQ ID NO: 212049 - DNA, 30 bp, Artificial Sequence
  Synthetic oligonucleotide
tactaccagagcaatagatactcattgtaa

SEQ ID NO: 212050 - DNA, 30 bp, Artificial Sequence
  Synthetic oligonucleotide
tctcgatgctactccatgtacaggttgtaa

SEQ ID NO: 212051 - DNA, 30 bp, Artificial Sequence
  Synthetic oligonucleotide
gatccacgacaggcgctagattctttgtaa

SEQ ID NO: 212052 - DNA, 30 bp, Artificial Sequence
  Synthetic oligonucleotide
ggagtacacataggttaaaatcgtttgtaa

SEQ ID NO: 212053 - DNA, 30 bp, Artificial Sequence
  Synthetic oligonucleotide
cctcgagcagtctgatctgaagaaaattaa

SEQ ID NO: 212054 - DNA, 30 bp, Artificial Sequence
  Synthetic oligonucleotide
gcgtgaggagactcggagttttgaaattaa

SEQ ID NO: 212055 - DNA, 30 bp, Artificial Sequence
  Synthetic oligonucleotide
catgcatcgaacagggcacgcataaattaa

SEQ ID NO: 212056 - DNA, 30 bp, Artificial Sequence
  Synthetic oligonucleotide
cttatggggttcggtagtggaggcaattaa

SEQ ID NO: 212057 - DNA, 30 bp, Artificial Sequence
  Synthetic oligonucleotide
ggtgttcacggctagcatcgtatcaattaa

SEQ ID NO: 212058 - DNA, 30 bp, Artificial Sequence
  Synthetic oligonucleotide
tggtcgcatggatgtgccaggctcaattaa

SEQ ID NO: 212059 - DNA, 30 bp, Artificial Sequence
  Synthetic oligonucleotide
ctgggagaagcattgcagaataggaattaa

SEQ ID NO: 212060 - DNA, 30 bp, Artificial Sequence
  Synthetic oligonucleotide
taaagtcccgctaaacgagcgcctaattaa

SEQ ID NO: 212061 - DNA, 30 bp, Artificial Sequence
  Synthetic oligonucleotide
gcacaggctgcgggtacagttattaattaa

SEQ ID NO: 212062 - DNA, 30 bp, Artificial Sequence
  Synthetic oligonucleotide
cggcgatgggtttgttggggacaacattaa

SEQ ID NO: 212063 - DNA, 30 bp, Artificial Sequence
  Synthetic oligonucleotide
ttcggtggtgactatttgcaataacattaa

SEQ ID NO: 212064 - DNA, 30 bp, Artificial Sequence
  Synthetic oligonucleotide
caacataaatgcctaccgtgaaagcattaa

SEQ ID NO: 212065 - DNA, 30 bp, Artificial Sequence
  Synthetic oligonucleotide
caaacaaagccggtgtcctggattcattaa

SEQ ID NO: 212066 - DNA, 30 bp, Artificial Sequence
  Synthetic oligonucleotide
cggaggggtcataaatcttcgacagattaa

SEQ ID NO: 212067 - DNA, 30 bp, Artificial Sequence
  Synthetic oligonucleotide
ccgggtaatcttactgccgggacagattaa

SEQ ID NO: 212068 - DNA, 30 bp, Artificial Sequence
  Synthetic oligonucleotide
taccatggaacgtgcaagtaatcagattaa

SEQ ID NO: 212069 - DNA, 30 bp, Artificial Sequence
  Synthetic oligonucleotide
ggtttgccgtctgaaggcattaaggattaa

SEQ ID NO: 212070 - DNA, 30 bp, Artificial Sequence
  Synthetic oligonucleotide
accgagtaggatgcgacgacaacggattaa

SEQ ID NO: 212071 - DNA, 30 bp, Artificial Sequence
  Synthetic oligonucleotide
tcccggaaaggtgtgagcacgccggattaa

SEQ ID NO: 212072 - DNA, 30 bp, Artificial Sequence
  Synthetic oligonucleotide
tctgtcagccgcttgacttatccggattaa

SEQ ID NO: 212073 - DNA, 30 bp, Artificial Sequence
  Synthetic oligonucleotide
aatcagggtaaggtgggcgctccggattaa

SEQ ID NO: 212074 - DNA, 30 bp, Artificial Sequence
  Synthetic oligonucleotide
tacaacgcttcaaggtccggggtggattaa

SEQ ID NO: 212075 - DNA, 30 bp, Artificial Sequence
  Synthetic oligonucleotide
cgctttcatcgaggttagtgatgtgattaa

SEQ ID NO: 212076 - DNA, 30 bp, Artificial Sequence
  Synthetic oligonucleotide
taatgtccagttgtgagatatcaatattaa

SEQ ID NO: 212077 - DNA, 30 bp, Artificial Sequence
  Synthetic oligonucleotide
ggagtagcgtgagtgctctcgtcatattaa

SEQ ID NO: 212078 - DNA, 30 bp, Artificial Sequence
  Synthetic oligonucleotide
gaacttaaggggattgccaatgactattaa

SEQ ID NO: 212079 - DNA, 30 bp, Artificial Sequence
  Synthetic oligonucleotide
acagggccgtttcctatggtgtcctattaa

SEQ ID NO: 212080 - DNA, 30 bp, Artificial Sequence
  Synthetic oligonucleotide
gcacgcgcagtgtcaatgatccgctattaa

SEQ ID NO: 212081 - DNA, 30 bp, Artificial Sequence
  Synthetic oligonucleotide
actatgaccgtgttaattaggagttattaa

SEQ ID NO: 212082 - DNA, 30 bp, Artificial Sequence
  Synthetic oligonucleotide
tgaattgggcaggtattggcaggaacttaa

SEQ ID NO: 212083 - DNA, 30 bp, Artificial Sequence
  Synthetic oligonucleotide
tttgccacatagtcaatgatagtaacttaa

SEQ ID NO: 212084 - DNA, 30 bp, Artificial Sequence
  Synthetic oligonucleotide
ccgtcaggcagggtttttcgtgacacttaa

SEQ ID NO: 212085 - DNA, 30 bp, Artificial Sequence
  Synthetic oligonucleotide
accttaaaacaagtcggtccggtcacttaa

SEQ ID NO: 212086 - DNA, 30 bp, Artificial Sequence
  Synthetic oligonucleotide
gattagggctattaaagacaccagacttaa

SEQ ID NO: 212087 - DNA, 30 bp, Artificial Sequence
  Synthetic oligonucleotide
atgtaggaccgtccaatttacgagacttaa

SEQ ID NO: 212088 - DNA, 30 bp, Artificial Sequence
  Synthetic oligonucleotide
gtcaatgtgcggataatactttcgacttaa

SEQ ID NO: 212089 - DNA, 30 bp, Artificial Sequence
  Synthetic oligonucleotide
actaggcaccggaccctgggtcatacttaa

SEQ ID NO: 212090 - DNA, 30 bp, Artificial Sequence
  Synthetic oligonucleotide
cgcagacgagggcagattattaaaccttaa

SEQ ID NO: 212091 - DNA, 30 bp, Artificial Sequence
  Synthetic oligonucleotide
accgtaatctagtcagccgcgttgccttaa

SEQ ID NO: 212092 - DNA, 30 bp, Artificial Sequence
  Synthetic oligonucleotide
ccggtccatgttaggtaagcaagtccttaa

SEQ ID NO: 212093 - DNA, 30 bp, Artificial Sequence
  Synthetic oligonucleotide
gtccgcgtagggtgcacgttagccgcttaa

SEQ ID NO: 212094 - DNA, 30 bp, Artificial Sequence
  Synthetic oligonucleotide
gaacgcgtacatagcaaaccgaaggcttaa

SEQ ID NO: 212095 - DNA, 30 bp, Artificial Sequence
  Synthetic oligonucleotide
aggctgtccgcacagcctgcaggtgcttaa

SEQ ID NO: 212096 - DNA, 30 bp, Artificial Sequence
  Synthetic oligonucleotide
cgttttaatccaaatgcgaggggtgcttaa

SEQ ID NO: 212097 - DNA, 30 bp, Artificial Sequence
  Synthetic oligonucleotide
acataagagttgttatgtgactgtgcttaa

SEQ ID NO: 212098 - DNA, 30 bp, Artificial Sequence
  Synthetic oligonucleotide
gcgacattcaagtcgattgaatttgcttaa

SEQ ID NO: 212099 - DNA, 30 bp, Artificial Sequence
  Synthetic oligonucleotide
cgacctaagcggtttagatactttgcttaa

SEQ ID NO: 212100 - DNA, 30 bp, Artificial Sequence
  Synthetic oligonucleotide
acgctcaagaagtgtgacgcgtcttcttaa

SEQ ID NO: 212101 - DNA, 30 bp, Artificial Sequence
  Synthetic oligonucleotide
gcgaagctggggattgtataaaaaagttaa

SEQ ID NO: 212102 - DNA, 30 bp, Artificial Sequence
  Synthetic oligonucleotide
accatagaattcagtatcaagtccagttaa

SEQ ID NO: 212103 - DNA, 30 bp, Artificial Sequence
  Synthetic oligonucleotide
taacctagcggagctgaaaattgcagttaa

SEQ ID NO: 212104 - DNA, 30 bp, Artificial Sequence
  Synthetic oligonucleotide
tctcacgaaatggacatagattagagttaa

SEQ ID NO: 212105 - DNA, 30 bp, Artificial Sequence
  Synthetic oligonucleotide
ctgatcctcccggctagctggccgagttaa

SEQ ID NO: 212106 - DNA, 30 bp, Artificial Sequence
  Synthetic oligonucleotide
ggaggtaggccctcttactgcctacgttaa

SEQ ID NO: 212107 - DNA, 30 bp, Artificial Sequence
  Synthetic oligonucleotide
ggatattaacatacgaccaatcaccgttaa

SEQ ID NO: 212108 - DNA, 30 bp, Artificial Sequence
  Synthetic oligonucleotide
tggccgtataagaaaattcgagggcgttaa

SEQ ID NO: 212109 - DNA, 30 bp, Artificial Sequence
  Synthetic oligonucleotide
tccatcttggctaagaaagatgatcgttaa

SEQ ID NO: 212110 - DNA, 30 bp, Artificial Sequence
  Synthetic oligonucleotide
tggagataccagtatagttacggtcgttaa

SEQ ID NO: 212111 - DNA, 30 bp, Artificial Sequence
  Synthetic oligonucleotide
gcattaactgaactaattttggcaggttaa

SEQ ID NO: 212112 - DNA, 30 bp, Artificial Sequence
  Synthetic oligonucleotide
ggtcatagtacctggaaaattaagggttaa

SEQ ID NO: 212113 - DNA, 30 bp, Artificial Sequence
  Synthetic oligonucleotide
gtgacgatgttttagaccgctttgggttaa

SEQ ID NO: 212114 - DNA, 30 bp, Artificial Sequence
  Synthetic oligonucleotide
cgtcctttaattagtcgagcagatggttaa

SEQ ID NO: 212115 - DNA, 30 bp, Artificial Sequence
  Synthetic oligonucleotide
tcgcagaaatgtgcaataattatgatttaa

SEQ ID NO: 212116 - DNA, 30 bp, Artificial Sequence
  Synthetic oligonucleotide
atcagtgtaattccaaaaagttcactttaa

SEQ ID NO: 212117 - DNA, 30 bp, Artificial Sequence
  Synthetic oligonucleotide
taaaggcgagtttgggaagtgtccctttaa

SEQ ID NO: 212118 - DNA, 30 bp, Artificial Sequence
  Synthetic oligonucleotide
ttggcccgcattggcacactacagctttaa

SEQ ID NO: 212119 - DNA, 30 bp, Artificial Sequence
  Synthetic oligonucleotide
ccaagcgttcctcacggtaggcttctttaa

SEQ ID NO: 212120 - DNA, 30 bp, Artificial Sequence
  Synthetic oligonucleotide
agggctggataaatacaggtaaaagtttaa

SEQ ID NO: 212121 - DNA, 30 bp, Artificial Sequence
  Synthetic oligonucleotide
agttgcccactaggaagactaactgtttaa

SEQ ID NO: 212122 - DNA, 30 bp, Artificial Sequence
  Synthetic oligonucleotide
agcctttgcgtacacattgagtctgtttaa

SEQ ID NO: 212123 - DNA, 30 bp, Artificial Sequence
  Synthetic oligonucleotide
ggatgccgaaagttaaattacgttgtttaa

SEQ ID NO: 212124 - DNA, 30 bp, Artificial Sequence
  Synthetic oligonucleotide
atggacaacatttaagagcgtacattttaa

SEQ ID NO: 212125 - DNA, 30 bp, Artificial Sequence
  Synthetic oligonucleotide
gcgcaatttacggaatccatgccattttaa

SEQ ID NO: 212126 - DNA, 30 bp, Artificial Sequence
  Synthetic oligonucleotide
agctttgacagcaggaagcggttgttttaa

SEQ ID NO: 212127 - DNA, 30 bp, Artificial Sequence
  Synthetic oligonucleotide
aatgaagcgaataaataaataaatttttaa

SEQ ID NO: 212128 - DNA, 30 bp, Artificial Sequence
  Synthetic oligonucleotide
gtgactaaagaaatgtcaagggttttttaa

SEQ ID NO: 212129 - DNA, 30 bp, Artificial Sequence
  Synthetic oligonucleotide
ccagatactcgcgatcagggtacaaaaaca

SEQ ID NO: 212130 - DNA, 30 bp, Artificial Sequence
  Synthetic oligonucleotide
tgtggatgtaatggttagtagttaaaaaca

SEQ ID NO: 212131 - DNA, 30 bp, Artificial Sequence
  Synthetic oligonucleotide
aaccatcaacaatgcgggggacccaaaaca

SEQ ID NO: 212132 - DNA, 30 bp, Artificial Sequence
  Synthetic oligonucleotide
gtgagcatacataattcccgcgccaaaaca

SEQ ID NO: 212133 - DNA, 30 bp, Artificial Sequence
  Synthetic oligonucleotide
gttttacgtggaaatgtgggctggaaaaca

SEQ ID NO: 212134 - DNA, 30 bp, Artificial Sequence
  Synthetic oligonucleotide
tagtaagacagctgtcgaaagcataaaaca

SEQ ID NO: 212135 - DNA, 30 bp, Artificial Sequence
  Synthetic oligonucleotide
aggagttctttagtgaatggacctaaaaca

SEQ ID NO: 212136 - DNA, 30 bp, Artificial Sequence
  Synthetic oligonucleotide
atgtgggatattgtaaagttcagtaaaaca

SEQ ID NO: 212137 - DNA, 30 bp, Artificial Sequence
  Synthetic oligonucleotide
ttcggacaagtttgtttgtaactacaaaca

SEQ ID NO: 212138 - DNA, 30 bp, Artificial Sequence
  Synthetic oligonucleotide
taggcgggcttacgtccttgactccaaaca

SEQ ID NO: 212139 - DNA, 30 bp, Artificial Sequence
  Synthetic oligonucleotide
agaaaaactagcagaattgtgcagcaaaca

SEQ ID NO: 212140 - DNA, 30 bp, Artificial Sequence
  Synthetic oligonucleotide
cactccgtcaagtcgtccccatcgcaaaca

SEQ ID NO: 212141 - DNA, 30 bp, Artificial Sequence
  Synthetic oligonucleotide
atataggcatagatcatcgttcggcaaaca

SEQ ID NO: 212142 - DNA, 30 bp, Artificial Sequence
  Synthetic oligonucleotide
agctcggttaaggtcggacagatgcaaaca

SEQ ID NO: 212143 - DNA, 30 bp, Artificial Sequence
  Synthetic oligonucleotide
ctccgcaaagcgacagttctctatcaaaca

SEQ ID NO: 212144 - DNA, 30 bp, Artificial Sequence
  Synthetic oligonucleotide
ttgtatggtttctgaaatcccagtcaaaca

SEQ ID NO: 212145 - DNA, 30 bp, Artificial Sequence
  Synthetic oligonucleotide
tatacaaagcctacgagtttctcagaaaca

SEQ ID NO: 212146 - DNA, 30 bp, Artificial Sequence
  Synthetic oligonucleotide
gtatatagcatcacacttatatgcgaaaca

SEQ ID NO: 212147 - DNA, 30 bp, Artificial Sequence
  Synthetic oligonucleotide
taggagctcaatctggccgtagtcgaaaca

SEQ ID NO: 212148 - DNA, 30 bp, Artificial Sequence
  Synthetic oligonucleotide
tgggtcgaccgctacttattggcggaaaca

SEQ ID NO: 212149 - DNA, 30 bp, Artificial Sequence
  Synthetic oligonucleotide
atcagtataacagttaatgggagggaaaca

SEQ ID NO: 212150 - DNA, 30 bp, Artificial Sequence
  Synthetic oligonucleotide
tgaacaatttcgtctaaaggataataaaca

SEQ ID NO: 212151 - DNA, 30 bp, Artificial Sequence
  Synthetic oligonucleotide
attcagatacttttaccactgacataaaca

SEQ ID NO: 212152 - DNA, 30 bp, Artificial Sequence
  Synthetic oligonucleotide
tggtatagtcatcatgagacaggataaaca

SEQ ID NO: 212153 - DNA, 30 bp, Artificial Sequence
  Synthetic oligonucleotide
ggggttggtgctcaatgcccgggataaaca

SEQ ID NO: 212154 - DNA, 30 bp, Artificial Sequence
  Synthetic oligonucleotide
tgaggctctaatacgtcctgatattaaaca

SEQ ID NO: 212155 - DNA, 30 bp, Artificial Sequence
  Synthetic oligonucleotide
ccgctgtaatcgaagaaggtgttcacaaca

SEQ ID NO: 212156 - DNA, 30 bp, Artificial Sequence
  Synthetic oligonucleotide
ctgcggatggcaactcctgatttgacaaca

SEQ ID NO: 212157 - DNA, 30 bp, Artificial Sequence
  Synthetic oligonucleotide
ggacccgccgctaaggatatccctacaaca

SEQ ID NO: 212158 - DNA, 30 bp, Artificial Sequence
  Synthetic oligonucleotide
caagaatgtgtcgtacgctgaagtacaaca

SEQ ID NO: 212159 - DNA, 30 bp, Artificial Sequence
  Synthetic oligonucleotide
gaggtcaccgtttcgatcacgttaccaaca

SEQ ID NO: 212160 - DNA, 30 bp, Artificial Sequence
  Synthetic oligonucleotide
tggaacccgcctcaaaagaatgggccaaca

SEQ ID NO: 212161 - DNA, 30 bp, Artificial Sequence
  Synthetic oligonucleotide
ggcggataaacgattatattataagcaaca

SEQ ID NO: 212162 - DNA, 30 bp, Artificial Sequence
  Synthetic oligonucleotide
cgctcgttgagaaacaacaaaatcgcaaca

SEQ ID NO: 212163 - DNA, 30 bp, Artificial Sequence
  Synthetic oligonucleotide
acacagcacgcacatgctcgaacggcaaca

SEQ ID NO: 212164 - DNA, 30 bp, Artificial Sequence
  Synthetic oligonucleotide
ttaatgttacaaaataagtactaatcaaca

SEQ ID NO: 212165 - DNA, 30 bp, Artificial Sequence
  Synthetic oligonucleotide
agatgatagcgtccaggaagtataagaaca

SEQ ID NO: 212166 - DNA, 30 bp, Artificial Sequence
  Synthetic oligonucleotide
ctcacactgtgtccaagttgagtaagaaca

SEQ ID NO: 212167 - DNA, 30 bp, Artificial Sequence
  Synthetic oligonucleotide
ctcgacttgagagtgtgttgtacgagaaca

SEQ ID NO: 212168 - DNA, 30 bp, Artificial Sequence
  Synthetic oligonucleotide
tgttactttgctggccagatagggagaaca

SEQ ID NO: 212169 - DNA, 30 bp, Artificial Sequence
  Synthetic oligonucleotide
ctttgcccagtagaaactagggtgagaaca

SEQ ID NO: 212170 - DNA, 30 bp, Artificial Sequence
  Synthetic oligonucleotide
agtacagggaggaggcacatttttagaaca

SEQ ID NO: 212171 - DNA, 30 bp, Artificial Sequence
  Synthetic oligonucleotide
cctaccgcgataatgtatagaaaccgaaca

SEQ ID NO: 212172 - DNA, 30 bp, Artificial Sequence
  Synthetic oligonucleotide
ctaagaccgtgtcaagtacggatgcgaaca

SEQ ID NO: 212173 - DNA, 30 bp, Artificial Sequence
  Synthetic oligonucleotide
ccgcttcaacggattaggtcgtctcgaaca

SEQ ID NO: 212174 - DNA, 30 bp, Artificial Sequence
  Synthetic oligonucleotide
gttatgagagctagtaaaacttgtcgaaca

SEQ ID NO: 212175 - DNA, 30 bp, Artificial Sequence
  Synthetic oligonucleotide
atcagtgcttaacgaacaagcacaggaaca

SEQ ID NO: 212176 - DNA, 30 bp, Artificial Sequence
  Synthetic oligonucleotide
tggatgtctccgtgtgcagcaaacggaaca

SEQ ID NO: 212177 - DNA, 30 bp, Artificial Sequence
  Synthetic oligonucleotide
cggaatagattgttaaagttatacggaaca

SEQ ID NO: 212178 - DNA, 30 bp, Artificial Sequence
  Synthetic oligonucleotide
tattgtcagagccttaacgtgagcggaaca

SEQ ID NO: 212179 - DNA, 30 bp, Artificial Sequence
  Synthetic oligonucleotide
gctgcatgaaacatgcagaatccgggaaca

SEQ ID NO: 212180 - DNA, 30 bp, Artificial Sequence
  Synthetic oligonucleotide
agcatggggttcctgtctacatcgggaaca

SEQ ID NO: 212181 - DNA, 30 bp, Artificial Sequence
  Synthetic oligonucleotide
aataatcataggctatgtccacggggaaca

SEQ ID NO: 212182 - DNA, 30 bp, Artificial Sequence
  Synthetic oligonucleotide
gcaaacgtgccgtctctgtaagatggaaca

SEQ ID NO: 212183 - DNA, 30 bp, Artificial Sequence
  Synthetic oligonucleotide
ctactgtacccgaccaggcaccttggaaca

SEQ ID NO: 212184 - DNA, 30 bp, Artificial Sequence
  Synthetic oligonucleotide
agtaatttatttatcaaccaatcctgaaca

SEQ ID NO: 212185 - DNA, 30 bp, Artificial Sequence
  Synthetic oligonucleotide
tagactcacgacatatggatatagtgaaca

SEQ ID NO: 212186 - DNA, 30 bp, Artificial Sequence
  Synthetic oligonucleotide
caagcacagctatacattgaattgtgaaca

SEQ ID NO: 212187 - DNA, 30 bp, Artificial Sequence
  Synthetic oligonucleotide
agtcgttcgctggtaaaaggtggaataaca

SEQ ID NO: 212188 - DNA, 30 bp, Artificial Sequence
  Synthetic oligonucleotide
atgtccccagcaacatcgccattcataaca

SEQ ID NO: 212189 - DNA, 30 bp, Artificial Sequence
  Synthetic oligonucleotide
acccccggctagaaccgtcgaactataaca

SEQ ID NO: 212190 - DNA, 30 bp, Artificial Sequence
  Synthetic oligonucleotide
cttcaggaattagacaagaagtgtataaca

SEQ ID NO: 212191 - DNA, 30 bp, Artificial Sequence
  Synthetic oligonucleotide
atagacaatcagcttatgcggaagctaaca

SEQ ID NO: 212192 - DNA, 30 bp, Artificial Sequence
  Synthetic oligonucleotide
caagaacctttaggagaaacgccgctaaca

SEQ ID NO: 212193 - DNA, 30 bp, Artificial Sequence
  Synthetic oligonucleotide
tgtaagttgggggtatttgacgtagtaaca

SEQ ID NO: 212194 - DNA, 30 bp, Artificial Sequence
  Synthetic oligonucleotide
actggctatgaccaggcatgtgacgtaaca

SEQ ID NO: 212195 - DNA, 30 bp, Artificial Sequence
  Synthetic oligonucleotide
gacactcctggaacacagtactacgtaaca

SEQ ID NO: 212196 - DNA, 30 bp, Artificial Sequence
  Synthetic oligonucleotide
accgggaagggttaaggggcctccgtaaca

SEQ ID NO: 212197 - DNA, 30 bp, Artificial Sequence
  Synthetic oligonucleotide
tggtcgccccattatgggagaagggtaaca

SEQ ID NO: 212198 - DNA, 30 bp, Artificial Sequence
  Synthetic oligonucleotide
gaggtgttcagaccacctagcggtgtaaca

SEQ ID NO: 212199 - DNA, 30 bp, Artificial Sequence
  Synthetic oligonucleotide
ggtgttaaacaagccgatgcgtccttaaca

SEQ ID NO: 212200 - DNA, 30 bp, Artificial Sequence
  Synthetic oligonucleotide
gtgctggaagtccattatcctgaaaacaca

SEQ ID NO: 212201 - DNA, 30 bp, Artificial Sequence
  Synthetic oligonucleotide
agccaattgttacagtctactttaaacaca

SEQ ID NO: 212202 - DNA, 30 bp, Artificial Sequence
  Synthetic oligonucleotide
ggcggacatgattgatacccagccaacaca

SEQ ID NO: 212203 - DNA, 30 bp, Artificial Sequence
  Synthetic oligonucleotide
gtaacaccattccatcttcgcggcaacaca

SEQ ID NO: 212204 - DNA, 30 bp, Artificial Sequence
  Synthetic oligonucleotide
aaaggatctacgcgccccctttgcaacaca

SEQ ID NO: 212205 - DNA, 30 bp, Artificial Sequence
  Synthetic oligonucleotide
gctggtgcactcgaggaacgaaggaacaca

SEQ ID NO: 212206 - DNA, 30 bp, Artificial Sequence
  Synthetic oligonucleotide
acgccgcggtgaccagactgtctgaacaca

SEQ ID NO: 212207 - DNA, 30 bp, Artificial Sequence
  Synthetic oligonucleotide
gtagagtgtctaaattagcacgttaacaca

SEQ ID NO: 212208 - DNA, 30 bp, Artificial Sequence
  Synthetic oligonucleotide
agggctagtcgttctttaacggaacacaca

SEQ ID NO: 212209 - DNA, 30 bp, Artificial Sequence
  Synthetic oligonucleotide
ctatactaccaaagctagtaaggacacaca

SEQ ID NO: 212210 - DNA, 30 bp, Artificial Sequence
  Synthetic oligonucleotide
taccaaaccctcttagatctagaccacaca

SEQ ID NO: 212211 - DNA, 30 bp, Artificial Sequence
  Synthetic oligonucleotide
agagggtggtatgaatatatgccccacaca

SEQ ID NO: 212212 - DNA, 30 bp, Artificial Sequence
  Synthetic oligonucleotide
taaatgacgccctacattgaactccacaca

SEQ ID NO: 212213 - DNA, 30 bp, Artificial Sequence
  Synthetic oligonucleotide
gatgtgcaaatttcggtctgccctgacaca

SEQ ID NO: 212214 - DNA, 30 bp, Artificial Sequence
  Synthetic oligonucleotide
agtcgattgtgtcaatagcttagtgacaca

SEQ ID NO: 212215 - DNA, 30 bp, Artificial Sequence
  Synthetic oligonucleotide
taagtcctgcgcttccatccgggtgacaca

SEQ ID NO: 212216 - DNA, 30 bp, Artificial Sequence
  Synthetic oligonucleotide
ccagaatcggtcataattctttcatacaca

SEQ ID NO: 212217 - DNA, 30 bp, Artificial Sequence
  Synthetic oligonucleotide
caaccgaaaactcctgccttgagatacaca

SEQ ID NO: 212218 - DNA, 30 bp, Artificial Sequence
  Synthetic oligonucleotide
gtcgtactctcagcggacagcggatacaca

SEQ ID NO: 212219 - DNA, 30 bp, Artificial Sequence
  Synthetic oligonucleotide
taaccctcgagacagagttttcactacaca

SEQ ID NO: 212220 - DNA, 30 bp, Artificial Sequence
  Synthetic oligonucleotide
aagaagaagcaccatatagactcctacaca

SEQ ID NO: 212221 - DNA, 30 bp, Artificial Sequence
  Synthetic oligonucleotide
ttcctagatatcagatcgttgagctacaca

SEQ ID NO: 212222 - DNA, 30 bp, Artificial Sequence
  Synthetic oligonucleotide
gcgcgaacgttagtagctggtatctacaca

SEQ ID NO: 212223 - DNA, 30 bp, Artificial Sequence
  Synthetic oligonucleotide
gcaatgtcacgatctggacaattttacaca

SEQ ID NO: 212224 - DNA, 30 bp, Artificial Sequence
  Synthetic oligonucleotide
ggggcgtggggccgaactaacggaaccaca

SEQ ID NO: 212225 - DNA, 30 bp, Artificial Sequence
  Synthetic oligonucleotide
gtgaccttattaccagttaacgtcaccaca

SEQ ID NO: 212226 - DNA, 30 bp, Artificial Sequence
  Synthetic oligonucleotide
catccctacgaccccaacgccacgaccaca

SEQ ID NO: 212227 - DNA, 30 bp, Artificial Sequence
  Synthetic oligonucleotide
tcatgttaacccaaaactatgatgaccaca

SEQ ID NO: 212228 - DNA, 30 bp, Artificial Sequence
  Synthetic oligonucleotide
taaccaccctggcacacacatttgaccaca

SEQ ID NO: 212229 - DNA, 30 bp, Artificial Sequence
  Synthetic oligonucleotide
atgtaaattaactatgcgggcagtaccaca

SEQ ID NO: 212230 - DNA, 30 bp, Artificial Sequence
  Synthetic oligonucleotide
taaggtttcgagaggtaacagttacccaca

SEQ ID NO: 212231 - DNA, 30 bp, Artificial Sequence
  Synthetic oligonucleotide
taataatagctggccggccataaccccaca

SEQ ID NO: 212232 - DNA, 30 bp, Artificial Sequence
  Synthetic oligonucleotide
gctcacctttagtagtgaggtccccccaca

SEQ ID NO: 212233 - DNA, 30 bp, Artificial Sequence
  Synthetic oligonucleotide
ttgacggattccctagcacatcgccccaca

SEQ ID NO: 212234 - DNA, 30 bp, Artificial Sequence
  Synthetic oligonucleotide
cagccgatatgcgtcgaaagaaagcccaca

SEQ ID NO: 212235 - DNA, 30 bp, Artificial Sequence
  Synthetic oligonucleotide
taaggagtatgggcgaacgccacgcccaca

SEQ ID NO: 212236 - DNA, 30 bp, Artificial Sequence
  Synthetic oligonucleotide
tatggtgaatgagcttaacatgcgcccaca

SEQ ID NO: 212237 - DNA, 30 bp, Artificial Sequence
  Synthetic oligonucleotide
gaggcgcaattaggacaccgcattcccaca

SEQ ID NO: 212238 - DNA, 30 bp, Artificial Sequence
  Synthetic oligonucleotide
tttggccgtggaggattacatacagccaca

SEQ ID NO: 212239 - DNA, 30 bp, Artificial Sequence
  Synthetic oligonucleotide
tcattgcggattgacatgcagtacgccaca

SEQ ID NO: 212240 - DNA, 30 bp, Artificial Sequence
  Synthetic oligonucleotide
agtggacaggtgccaaggagatcggccaca

SEQ ID NO: 212241 - DNA, 30 bp, Artificial Sequence
  Synthetic oligonucleotide
tatgggatcctgacggcagttagtgccaca

SEQ ID NO: 212242 - DNA, 30 bp, Artificial Sequence
  Synthetic oligonucleotide
atgataattgagctgttcggccaatccaca

SEQ ID NO: 212243 - DNA, 30 bp, Artificial Sequence
  Synthetic oligonucleotide
tcggccgacctgagcacgcgtcaatccaca

SEQ ID NO: 212244 - DNA, 30 bp, Artificial Sequence
  Synthetic oligonucleotide
tgggaactgatagcgcgcagggaatccaca

SEQ ID NO: 212245 - DNA, 30 bp, Artificial Sequence
  Synthetic oligonucleotide
gatgagtggagctgctacactatatccaca

SEQ ID NO: 212246 - DNA, 30 bp, Artificial Sequence
  Synthetic oligonucleotide
aggaggaggatatgtgatctgaggtccaca

SEQ ID NO: 212247 - DNA, 30 bp, Artificial Sequence
  Synthetic oligonucleotide
tcagcccaggtggcaggttaggggtccaca

SEQ ID NO: 212248 - DNA, 31 bp, Artificial Sequence
  Synthetic oligonucleotide
tgagaggggcgcacgcaacggagcttccaca

SEQ ID NO: 212249 - DNA, 30 bp, Artificial Sequence
  Synthetic oligonucleotide
tatgcagcctctcccctctcgcgaagcaca

SEQ ID NO: 212250 - DNA, 30 bp, Artificial Sequence
  Synthetic oligonucleotide
aagcgaccgaccgatcgaggtctaagcaca

SEQ ID NO: 212251 - DNA, 29 bp, Artificial Sequence
  Synthetic oligonucleotide
gcaggcaaacgacctttgttagcagcaca

SEQ ID NO: 212252 - DNA, 30 bp, Artificial Sequence
  Synthetic oligonucleotide
tacatagaggcagtttattctgtcagcaca

SEQ ID NO: 212253 - DNA, 30 bp, Artificial Sequence
  Synthetic oligonucleotide
gttcatgactgcatcccgtttgggagcaca

SEQ ID NO: 212254 - DNA, 30 bp, Artificial Sequence
  Synthetic oligonucleotide
agaaagccctgtggccaagggttgagcaca

SEQ ID NO: 212255 - DNA, 30 bp, Artificial Sequence
  Synthetic oligonucleotide
caactaagcatatatcatttgagtagcaca

SEQ ID NO: 212256 - DNA, 30 bp, Artificial Sequence
  Synthetic oligonucleotide
gtgagtttacacatggaggcccaacgcaca

SEQ ID NO: 212257 - DNA, 29 bp, Artificial Sequence
  Synthetic oligonucleotide
cgactcaaacagactagcatcaccgcaca

SEQ ID NO: 212258 - DNA, 30 bp, Artificial Sequence
  Synthetic oligonucleotide
cgctttgacaaaccagacaatgaccgcaca

SEQ ID NO: 212259 - DNA, 30 bp, Artificial Sequence
  Synthetic oligonucleotide
aatcagtcgaaatttggcactctccgcaca

SEQ ID NO: 212260 - DNA, 30 bp, Artificial Sequence
  Synthetic oligonucleotide
tgatgcggtttggaaacgcacatgcgcaca

SEQ ID NO: 212261 - DNA, 30 bp, Artificial Sequence
  Synthetic oligonucleotide
tggtcatctgcctcgagcctcatgcgcaca

SEQ ID NO: 212262 - DNA, 30 bp, Artificial Sequence
  Synthetic oligonucleotide
ctaacccttgtcgctcaaacacagggcaca

SEQ ID NO: 212263 - DNA, 30 bp, Artificial Sequence
  Synthetic oligonucleotide
tggttgacccgctcgatttaatagggcaca

SEQ ID NO: 212264 - DNA, 30 bp, Artificial Sequence
  Synthetic oligonucleotide
ttggtagcgctacagggctagtagggcaca

SEQ ID NO: 212265 - DNA, 30 bp, Artificial Sequence
  Synthetic oligonucleotide
taagtattccggggagcagccaggggcaca

SEQ ID NO: 212266 - DNA, 30 bp, Artificial Sequence
  Synthetic oligonucleotide
tgttgcctacatcgtcattaagtgggcaca

SEQ ID NO: 212267 - DNA, 30 bp, Artificial Sequence
  Synthetic oligonucleotide
aggggggtgcgggtgcgatgtgctggcaca

SEQ ID NO: 212268 - DNA, 30 bp, Artificial Sequence
  Synthetic oligonucleotide
cctaaagcaaaaataggcccatttggcaca

SEQ ID NO: 212269 - DNA, 30 bp, Artificial Sequence
  Synthetic oligonucleotide
ctcgatgttacctgagagtttacatgcaca

SEQ ID NO: 212270 - DNA, 30 bp, Artificial Sequence
  Synthetic oligonucleotide
gtcatgtatgtacaggaacgatgatgcaca

SEQ ID NO: 212271 - DNA, 30 bp, Artificial Sequence
  Synthetic oligonucleotide
cagaaatgctgctcgtagtactactgcaca

SEQ ID NO: 212272 - DNA, 30 bp, Artificial Sequence
  Synthetic oligonucleotide
ggagtgtcctaggatgtggcaagctgcaca

SEQ ID NO: 212273 - DNA, 30 bp, Artificial Sequence
  Synthetic oligonucleotide
ctacacttgagccatggctagtgctgcaca

SEQ ID NO: 212274 - DNA, 30 bp, Artificial Sequence
  Synthetic oligonucleotide
tagtactccaatcttgtctgagagtgcaca

SEQ ID NO: 212275 - DNA, 30 bp, Artificial Sequence
  Synthetic oligonucleotide
gcacgaataaaggtatcgttaccttgcaca

SEQ ID NO: 212276 - DNA, 30 bp, Artificial Sequence
  Synthetic oligonucleotide
gtagggttcaaggtcatccgatgcatcaca

SEQ ID NO: 212277 - DNA, 30 bp, Artificial Sequence
  Synthetic oligonucleotide
acctgctgtagggttaattcaaatatcaca

SEQ ID NO: 212278 - DNA, 30 bp, Artificial Sequence
  Synthetic oligonucleotide
accttagtggagcagtggaggcctatcaca

SEQ ID NO: 212279 - DNA, 30 bp, Artificial Sequence
  Synthetic oligonucleotide
aacaaaagcgaaactcggggttttatcaca

SEQ ID NO: 212280 - DNA, 30 bp, Artificial Sequence
  Synthetic oligonucleotide
tgctaaataaaccgagtcgggtgactcaca

SEQ ID NO: 212281 - DNA, 30 bp, Artificial Sequence
  Synthetic oligonucleotide
caaaacagtgcgttgttactaatactcaca

SEQ ID NO: 212282 - DNA, 30 bp, Artificial Sequence
  Synthetic oligonucleotide
gcgacagaatcgtaatataatttactcaca

SEQ ID NO: 212283 - DNA, 30 bp, Artificial Sequence
  Synthetic oligonucleotide
gcttccaacttggaagcgatgagcctcaca

SEQ ID NO: 212284 - DNA, 30 bp, Artificial Sequence
  Synthetic oligonucleotide
agcaggtaggatataccctgagtcctcaca

SEQ ID NO: 212285 - DNA, 30 bp, Artificial Sequence
  Synthetic oligonucleotide
atgtccattcgacgtacggaagggctcaca

SEQ ID NO: 212286 - DNA, 30 bp, Artificial Sequence
  Synthetic oligonucleotide
ttgggcaccatcgcagagggtcaagtcaca

SEQ ID NO: 212287 - DNA, 30 bp, Artificial Sequence
  Synthetic oligonucleotide
ccgaatgaagctcgtaggtttctagtcaca

SEQ ID NO: 212288 - DNA, 30 bp, Artificial Sequence
  Synthetic oligonucleotide
ccggcttaccgaactaggtatgtagtcaca

SEQ ID NO: 212289 - DNA, 30 bp, Artificial Sequence
  Synthetic oligonucleotide
tagtcgcggggggcgacgtaaggcgtcaca

SEQ ID NO: 212290 - DNA, 30 bp, Artificial Sequence
  Synthetic oligonucleotide
tgaaaataccccgtgtgaggagcattcaca

SEQ ID NO: 212291 - DNA, 30 bp, Artificial Sequence
  Synthetic oligonucleotide
caagcgccagaatacacacaaatattcaca

SEQ ID NO: 212292 - DNA, 30 bp, Artificial Sequence
  Synthetic oligonucleotide
gcatgagctaatcgttagctttacttcaca

SEQ ID NO: 212293 - DNA, 30 bp, Artificial Sequence
  Synthetic oligonucleotide
gggggccagagtatgaagggtggcttcaca

SEQ ID NO: 212294 - DNA, 30 bp, Artificial Sequence
  Synthetic oligonucleotide
ttcacagccccctgggagcgggatttcaca

SEQ ID NO: 212295 - DNA, 30 bp, Artificial Sequence
  Synthetic oligonucleotide
aaaaagcagttccgggcggaacgtttcaca

SEQ ID NO: 212296 - DNA, 30 bp, Artificial Sequence
  Synthetic oligonucleotide
cccaagcttgggcaaggaagaaaaaagaca

SEQ ID NO: 212297 - DNA, 30 bp, Artificial Sequence
  Synthetic oligonucleotide
ctaagctagattgcttggcgtataaagaca

SEQ ID NO: 212298 - DNA, 30 bp, Artificial Sequence
  Synthetic oligonucleotide
actctcaaattatcccttgagggcaagaca

SEQ ID NO: 212299 - DNA, 30 bp, Artificial Sequence
  Synthetic oligonucleotide
gctagggtgtgtgtttaaggcgtgaagaca

SEQ ID NO: 212300 - DNA, 30 bp, Artificial Sequence
  Synthetic oligonucleotide
gcgtgttattggtcggtcggctataagaca

SEQ ID NO: 212301 - DNA, 30 bp, Artificial Sequence
  Synthetic oligonucleotide
cttagaaacttactatataggattaagaca

SEQ ID NO: 212302 - DNA, 30 bp, Artificial Sequence
  Synthetic oligonucleotide
gggtctgcggtgaatcaattagttaagaca

SEQ ID NO: 212303 - DNA, 30 bp, Artificial Sequence
  Synthetic oligonucleotide
actatagtagtattctctcgtgttaagaca

SEQ ID NO: 212304 - DNA, 30 bp, Artificial Sequence
  Synthetic oligonucleotide
aggaattgtagactttgttcctaacagaca

SEQ ID NO: 212305 - DNA, 30 bp, Artificial Sequence
  Synthetic oligonucleotide
ccaatgcagactataacatgaatacagaca

SEQ ID NO: 212306 - DNA, 30 bp, Artificial Sequence
  Synthetic oligonucleotide
agagacgtaactcattatatgggccagaca

SEQ ID NO: 212307 - DNA, 30 bp, Artificial Sequence
  Synthetic oligonucleotide
gaagcgttcttactgaaaatatgccagaca

SEQ ID NO: 212308 - DNA, 30 bp, Artificial Sequence
  Synthetic oligonucleotide
tagcggtctaacatggtaatatatcagaca

SEQ ID NO: 212309 - DNA, 30 bp, Artificial Sequence
  Synthetic oligonucleotide
gcggggcccattaatcctgtccgtcagaca

SEQ ID NO: 212310 - DNA, 30 bp, Artificial Sequence
  Synthetic oligonucleotide
tagagcgcgcaccgcattcgcaacgagaca

SEQ ID NO: 212311 - DNA, 30 bp, Artificial Sequence
  Synthetic oligonucleotide
gctaatccaagcctcatcaatgtcgagaca

SEQ ID NO: 212312 - DNA, 30 bp, Artificial Sequence
  Synthetic oligonucleotide
acaaagcgtcgcacattgaattaggagaca

SEQ ID NO: 212313 - DNA, 30 bp, Artificial Sequence
  Synthetic oligonucleotide
actgggctctctaataatgaaaatgagaca

SEQ ID NO: 212314 - DNA, 30 bp, Artificial Sequence
  Synthetic oligonucleotide
aaactatgcacagcgtacgagtatgagaca

SEQ ID NO: 212315 - DNA, 30 bp, Artificial Sequence
  Synthetic oligonucleotide
aaggaaattcgcacgatgatcgaatagaca

SEQ ID NO: 212316 - DNA, 30 bp, Artificial Sequence
  Synthetic oligonucleotide
ctagaccttccaggcatttaaaactagaca

SEQ ID NO: 212317 - DNA, 30 bp, Artificial Sequence
  Synthetic oligonucleotide
tagcattgctatagagggggtgactagaca

SEQ ID NO: 212318 - DNA, 30 bp, Artificial Sequence
  Synthetic oligonucleotide
ctcttagcccgagagcttaacacgtagaca

SEQ ID NO: 212319 - DNA, 30 bp, Artificial Sequence
  Synthetic oligonucleotide
tgatcgactcagtgagctggtccgtagaca

SEQ ID NO: 212320 - DNA, 30 bp, Artificial Sequence
  Synthetic oligonucleotide
gagtacccagatcagtgagtcgatacgaca

SEQ ID NO: 212321 - DNA, 30 bp, Artificial Sequence
  Synthetic oligonucleotide
actaggcctgtagccttgggggatacgaca

SEQ ID NO: 212322 - DNA, 30 bp, Artificial Sequence
  Synthetic oligonucleotide
gtctagtagcgacaaaagtgtctagcgaca

SEQ ID NO: 212323 - DNA, 30 bp, Artificial Sequence
  Synthetic oligonucleotide
ctatcgtccatgcgatacacactggcgaca

SEQ ID NO: 212324 - DNA, 30 bp, Artificial Sequence
  Synthetic oligonucleotide
cccgtcacatgtcaggagaaggaatcgaca

SEQ ID NO: 212325 - DNA, 30 bp, Artificial Sequence
  Synthetic oligonucleotide
actacgtagtagttctacgatatatcgaca

SEQ ID NO: 212326 - DNA, 30 bp, Artificial Sequence
  Synthetic oligonucleotide
aacgaaccgcagcgtgttagcaactcgaca

SEQ ID NO: 212327 - DNA, 30 bp, Artificial Sequence
  Synthetic oligonucleotide
aacgaaacgtgatttaattcatactcgaca

SEQ ID NO: 212328 - DNA, 30 bp, Artificial Sequence
  Synthetic oligonucleotide
acgtatgtctgctcaacgccgtcttcgaca

SEQ ID NO: 212329 - DNA, 30 bp, Artificial Sequence
  Synthetic oligonucleotide
gcccgagaaagcttacccacgcgttcgaca

SEQ ID NO: 212330 - DNA, 30 bp, Artificial Sequence
  Synthetic oligonucleotide
gataataacggatccggaatgtcaaggaca

SEQ ID NO: 212331 - DNA, 30 bp, Artificial Sequence
  Synthetic oligonucleotide
tatgagtacgcaccttcgcgcctaaggaca

SEQ ID NO: 212332 - DNA, 30 bp, Artificial Sequence
  Synthetic oligonucleotide
cgtttactatgacaagctttcaccaggaca

SEQ ID NO: 212333 - DNA, 30 bp, Artificial Sequence
  Synthetic oligonucleotide
agcccctcagtcgcgtaaatcgcgaggaca

SEQ ID NO: 212334 - DNA, 30 bp, Artificial Sequence
  Synthetic oligonucleotide
acatccagtaagttggcaacgggtaggaca

SEQ ID NO: 212335 - DNA, 30 bp, Artificial Sequence
  Synthetic oligonucleotide
ttcttaacggaagatacctattgacggaca

SEQ ID NO: 212336 - DNA, 30 bp, Artificial Sequence
  Synthetic oligonucleotide
tggggtgtgccagtgaacggataccggaca

SEQ ID NO: 212337 - DNA, 30 bp, Artificial Sequence
  Synthetic oligonucleotide
tgattatctgagtggacgtacgtccggaca

SEQ ID NO: 212338 - DNA, 30 bp, Artificial Sequence
  Synthetic oligonucleotide
caatcagtgaacgaccctacgccgcggaca

SEQ ID NO: 212339 - DNA, 30 bp, Artificial Sequence
  Synthetic oligonucleotide
tcacatgcacgacacctgacgacagggaca

SEQ ID NO: 212340 - DNA, 30 bp, Artificial Sequence
  Synthetic oligonucleotide
aaaaccccacgagcttcgaaccccgggaca

SEQ ID NO: 212341 - DNA, 30 bp, Artificial Sequence
  Synthetic oligonucleotide
ctgatggttagaatcttttgccccgggaca

SEQ ID NO: 212342 - DNA, 30 bp, Artificial Sequence
  Synthetic oligonucleotide
gatctatgcgatgataaaacattcgggaca

SEQ ID NO: 212343 - DNA, 30 bp, Artificial Sequence
  Synthetic oligonucleotide
ataagaatggtgtaaggtccacgggggaca

SEQ ID NO: 212344 - DNA, 30 bp, Artificial Sequence
  Synthetic oligonucleotide
tggagcaaaggctcccatcaatgatggaca

SEQ ID NO: 212345 - DNA, 30 bp, Artificial Sequence
  Synthetic oligonucleotide
tacgagaaggattaccgtttattatggaca

SEQ ID NO: 212346 - DNA, 30 bp, Artificial Sequence
  Synthetic oligonucleotide
cagactagatgttggcgggcctggtggaca

SEQ ID NO: 212347 - DNA, 30 bp, Artificial Sequence
  Synthetic oligonucleotide
aagtgcacgcaagggaggtaaaattggaca

SEQ ID NO: 212348 - DNA, 30 bp, Artificial Sequence
  Synthetic oligonucleotide
tcgaacttgggcggtctttggccttggaca

SEQ ID NO: 212349 - DNA, 30 bp, Artificial Sequence
  Synthetic oligonucleotide
ggatgaaccccattctcgcgtggttggaca

SEQ ID NO: 212350 - DNA, 30 bp, Artificial Sequence
  Synthetic oligonucleotide
gtgctcacaagttggccacataaaatgaca

SEQ ID NO: 212351 - DNA, 30 bp, Artificial Sequence
  Synthetic oligonucleotide
tggacctcactaaactacagcgaaatgaca

SEQ ID NO: 212352 - DNA, 30 bp, Artificial Sequence
  Synthetic oligonucleotide
atgcagcagctctgcccactgtacatgaca

SEQ ID NO: 212353 - DNA, 30 bp, Artificial Sequence
  Synthetic oligonucleotide
aagtggagtgaatctggcgtattgatgaca

SEQ ID NO: 212354 - DNA, 30 bp, Artificial Sequence
  Synthetic oligonucleotide
cagccggaatatatcctcggacaactgaca

SEQ ID NO: 212355 - DNA, 30 bp, Artificial Sequence
  Synthetic oligonucleotide
gggcagaagatcatgtccctaagactgaca

SEQ ID NO: 212356 - DNA, 30 bp, Artificial Sequence
  Synthetic oligonucleotide
gcgactggcgctagcagagactggctgaca

SEQ ID NO: 212357 - DNA, 30 bp, Artificial Sequence
  Synthetic oligonucleotide
tactccgtaaggaaatacttgtaagtgaca

SEQ ID NO: 212358 - DNA, 30 bp, Artificial Sequence
  Synthetic oligonucleotide
ctcaacgaagcaacgtgggtggtagtgaca

SEQ ID NO: 212359 - DNA, 30 bp, Artificial Sequence
  Synthetic oligonucleotide
aggcattttaccctccggcatcgcgtgaca

SEQ ID NO: 212360 - DNA, 30 bp, Artificial Sequence
  Synthetic oligonucleotide
taccggtgagacgaagataagttcgtgaca

SEQ ID NO: 212361 - DNA, 30 bp, Artificial Sequence
  Synthetic oligonucleotide
ataaaacggccatcagcgacgtatgtgaca

SEQ ID NO: 212362 - DNA, 30 bp, Artificial Sequence
  Synthetic oligonucleotide
ataacgtatcttgaataatatcctgtgaca

SEQ ID NO: 212363 - DNA, 30 bp, Artificial Sequence
  Synthetic oligonucleotide
tctgcacggcggacccgaaacagtgtgaca

SEQ ID NO: 212364 - DNA, 30 bp, Artificial Sequence
  Synthetic oligonucleotide
gctgaattctggtgcctactatgtgtgaca

SEQ ID NO: 212365 - DNA, 30 bp, Artificial Sequence
  Synthetic oligonucleotide
tttcactaaaacaatcgcaggtgtgtgaca

SEQ ID NO: 212366 - DNA, 30 bp, Artificial Sequence
  Synthetic oligonucleotide
gcaagagatgtctgaaatggtatattgaca

SEQ ID NO: 212367 - DNA, 30 bp, Artificial Sequence
  Synthetic oligonucleotide
aatgtaggagcagcggggctatacttgaca

SEQ ID NO: 212368 - DNA, 30 bp, Artificial Sequence
  Synthetic oligonucleotide
ctggcagtgattattcttaggtggttgaca

SEQ ID NO: 212369 - DNA, 30 bp, Artificial Sequence
  Synthetic oligonucleotide
gaggccaaaatccaatttacgctgttgaca

SEQ ID NO: 212370 - DNA, 30 bp, Artificial Sequence
  Synthetic oligonucleotide
tcagtttcacccgtgtttatggctttgaca

SEQ ID NO: 212371 - DNA, 31 bp, Artificial Sequence
  Synthetic oligonucleotide
ttaattaaccgggtgaatttcgagtttgaca

SEQ ID NO: 212372 - DNA, 30 bp, Artificial Sequence
  Synthetic oligonucleotide
ctgttcctccgtgccattaagattttgaca

SEQ ID NO: 212373 - DNA, 30 bp, Artificial Sequence
  Synthetic oligonucleotide
gggacctaaagcgaccaaactgaaaataca

SEQ ID NO: 212374 - DNA, 30 bp, Artificial Sequence
  Synthetic oligonucleotide
ctatcacaataatgtcgcatatcaaataca

SEQ ID NO: 212375 - DNA, 30 bp, Artificial Sequence
  Synthetic oligonucleotide
gagccagatgtgtcatcgtaggtaaataca

SEQ ID NO: 212376 - DNA, 30 bp, Artificial Sequence
  Synthetic oligonucleotide
agtcagctctctaaagtccaccccaataca

SEQ ID NO: 212377 - DNA, 30 bp, Artificial Sequence
  Synthetic oligonucleotide
agttagcacatgtcgatcatgaaacataca

SEQ ID NO: 212378 - DNA, 30 bp, Artificial Sequence
  Synthetic oligonucleotide
tgtcaaggtatacgatcaggcaggcataca

SEQ ID NO: 212379 - DNA, 30 bp, Artificial Sequence
  Synthetic oligonucleotide
agcaaaagtctcatttcattgatgcataca

SEQ ID NO: 212380 - DNA, 30 bp, Artificial Sequence
  Synthetic oligonucleotide
gtggttgatacgacaaacttagttcataca

SEQ ID NO: 212381 - DNA, 30 bp, Artificial Sequence
  Synthetic oligonucleotide
cctcaagcatcacataggactctagataca

SEQ ID NO: 212382 - DNA, 30 bp, Artificial Sequence
  Synthetic oligonucleotide
gctataacatctcgtcctatcttagataca

SEQ ID NO: 212383 - DNA, 30 bp, Artificial Sequence
  Synthetic oligonucleotide
accaggatgtcctccatgttcgccgataca

SEQ ID NO: 212384 - DNA, 30 bp, Artificial Sequence
  Synthetic oligonucleotide
gtaaattgataaacgttgccacatgataca

SEQ ID NO: 212385 - DNA, 30 bp, Artificial Sequence
  Synthetic oligonucleotide
atgcgtaccttgggtcatgatgctgataca

SEQ ID NO: 212386 - DNA, 30 bp, Artificial Sequence
  Synthetic oligonucleotide
acggctagtggctgtcttccatttgataca

SEQ ID NO: 212387 - DNA, 30 bp, Artificial Sequence
  Synthetic oligonucleotide
ttgtgacgtgtcgtccgtcgtacatataca

SEQ ID NO: 212388 - DNA, 30 bp, Artificial Sequence
  Synthetic oligonucleotide
tactcaggccatgatcaacggcagtataca

SEQ ID NO: 212389 - DNA, 30 bp, Artificial Sequence
  Synthetic oligonucleotide
atagcataacagtaacggcaatagtataca

SEQ ID NO: 212390 - DNA, 30 bp, Artificial Sequence
  Synthetic oligonucleotide
tccacaaggaattggcgatcgacgtataca

SEQ ID NO: 212391 - DNA, 30 bp, Artificial Sequence
  Synthetic oligonucleotide
gatatacccattagtcgacccttgtataca

SEQ ID NO: 212392 - DNA, 31 bp, Artificial Sequence
  Synthetic oligonucleotide
ctggggtcggtgtgctcaacacctttataca

SEQ ID NO: 212393 - DNA, 30 bp, Artificial Sequence
  Synthetic oligonucleotide
gaggtcggggggtcgcagttttcaactaca

SEQ ID NO: 212394 - DNA, 30 bp, Artificial Sequence
  Synthetic oligonucleotide
ccgacgcatgcgtaggggtgacgaactaca

SEQ ID NO: 212395 - DNA, 30 bp, Artificial Sequence
  Synthetic oligonucleotide
aagacacgtcgagaccgcagcggaactaca

SEQ ID NO: 212396 - DNA, 30 bp, Artificial Sequence
  Synthetic oligonucleotide
tacgttatcatgcggcgaatcaacactaca

SEQ ID NO: 212397 - DNA, 30 bp, Artificial Sequence
  Synthetic oligonucleotide
gataggacccttatggtaaaagccactaca

SEQ ID NO: 212398 - DNA, 30 bp, Artificial Sequence
  Synthetic oligonucleotide
tcgtcgaggtttgggcacataacgactaca

SEQ ID NO: 212399 - DNA, 30 bp, Artificial Sequence
  Synthetic oligonucleotide
ctgtaagtttacgacacaatatcgactaca

SEQ ID NO: 212400 - DNA, 30 bp, Artificial Sequence
  Synthetic oligonucleotide
ggcgagtcgggatcccgattttgtactaca

SEQ ID NO: 212401 - DNA, 30 bp, Artificial Sequence
  Synthetic oligonucleotide
agcgtcccaccacagtactaccaacctaca

SEQ ID NO: 212402 - DNA, 30 bp, Artificial Sequence
  Synthetic oligonucleotide
gcggtgatctgtgtgggcgacaagcctaca

SEQ ID NO: 212403 - DNA, 30 bp, Artificial Sequence
  Synthetic oligonucleotide
ttacttgctcctgccaggcatccgcctaca

SEQ ID NO: 212404 - DNA, 30 bp, Artificial Sequence
  Synthetic oligonucleotide
cataaagaatagtgcgctccacttcctaca

SEQ ID NO: 212405 - DNA, 30 bp, Artificial Sequence
  Synthetic oligonucleotide
aggcgccgttaattatctcgaaacgctaca

SEQ ID NO: 212406 - DNA, 30 bp, Artificial Sequence
  Synthetic oligonucleotide
gcgatccaagacttgaggatggacgctaca

SEQ ID NO: 212407 - DNA, 30 bp, Artificial Sequence
  Synthetic oligonucleotide
ggtcggggaatgcgcgcgcgttgcgctaca

SEQ ID NO: 212408 - DNA, 30 bp, Artificial Sequence
  Synthetic oligonucleotide
ggttataatggagtaaagaagctcgctaca

SEQ ID NO: 212409 - DNA, 30 bp, Artificial Sequence
  Synthetic oligonucleotide
agaatatgcctggtgagaagtctcgctaca

SEQ ID NO: 212410 - DNA, 30 bp, Artificial Sequence
  Synthetic oligonucleotide
gcaggaacatgtgatttctcaaaggctaca

SEQ ID NO: 212411 - DNA, 30 bp, Artificial Sequence
  Synthetic oligonucleotide
atatgtcctgatactagtggaatggctaca

SEQ ID NO: 212412 - DNA, 30 bp, Artificial Sequence
  Synthetic oligonucleotide
tcgcgcccggaccccgaaagagactctaca

SEQ ID NO: 212413 - DNA, 30 bp, Artificial Sequence
  Synthetic oligonucleotide
cataaacaactggtcatgcgcgtgtctaca

SEQ ID NO: 212414 - DNA, 30 bp, Artificial Sequence
  Synthetic oligonucleotide
gggttcactagggggtcctgtcaaagtaca

SEQ ID NO: 212415 - DNA, 30 bp, Artificial Sequence
  Synthetic oligonucleotide
aggggtaagcgtgaaaattgtacaagtaca

SEQ ID NO: 212416 - DNA, 30 bp, Artificial Sequence
  Synthetic oligonucleotide
aataaataaaggtgaaggaattcaagtaca

SEQ ID NO: 212417 - DNA, 31 bp, Artificial Sequence
  Synthetic oligonucleotide
tgcgcatacagattgccccgggctaagtaca

SEQ ID NO: 212418 - DNA, 30 bp, Artificial Sequence
  Synthetic oligonucleotide
agacaagagagctgccgagtaaagagtaca

SEQ ID NO: 212419 - DNA, 31 bp, Artificial Sequence
  Synthetic oligonucleotide
gtaggtttgaacagctttctctaatagtaca

SEQ ID NO: 212420 - DNA, 30 bp, Artificial Sequence
  Synthetic oligonucleotide
tctcgtcagatctggtacgcttaacgtaca

SEQ ID NO: 212421 - DNA, 30 bp, Artificial Sequence
  Synthetic oligonucleotide
tatcgccggaggcccgcacgacgacgtaca

SEQ ID NO: 212422 - DNA, 30 bp, Artificial Sequence
  Synthetic oligonucleotide
tcgacacttcgccgatgaggacgacgtaca

SEQ ID NO: 212423 - DNA, 30 bp, Artificial Sequence
  Synthetic oligonucleotide
gcgtcctacaccaccttggatggccgtaca

SEQ ID NO: 212424 - DNA, 30 bp, Artificial Sequence
  Synthetic oligonucleotide
cattgaggaggccgcaggtaccagcgtaca

SEQ ID NO: 212425 - DNA, 30 bp, Artificial Sequence
  Synthetic oligonucleotide
aggacgaacagacgcgctagattgcgtaca

SEQ ID NO: 212426 - DNA, 30 bp, Artificial Sequence
  Synthetic oligonucleotide
atgattagcatgcaaaggaggagtcgtaca

SEQ ID NO: 212427 - DNA, 30 bp, Artificial Sequence
  Synthetic oligonucleotide
ggtcatacatggttgatcctatgaggtaca

SEQ ID NO: 212428 - DNA, 31 bp, Artificial Sequence
  Synthetic oligonucleotide
atacatgagttatctgtctagttgaggtaca

SEQ ID NO: 212429 - DNA, 30 bp, Artificial Sequence
  Synthetic oligonucleotide
taccaggcagggcctcgccatctcggtaca

SEQ ID NO: 212430 - DNA, 30 bp, Artificial Sequence
  Synthetic oligonucleotide
gggagcaaaacagttaatacgaagggtaca

SEQ ID NO: 212431 - DNA, 30 bp, Artificial Sequence
  Synthetic oligonucleotide
agttgactgcgacccctagataagggtaca

SEQ ID NO: 212432 - DNA, 30 bp, Artificial Sequence
  Synthetic oligonucleotide
gacttacggggctaacagtcataatgtaca

SEQ ID NO: 212433 - DNA, 30 bp, Artificial Sequence
  Synthetic oligonucleotide
cgtatagataagttgactcggtgatgtaca

SEQ ID NO: 212434 - DNA, 30 bp, Artificial Sequence
  Synthetic oligonucleotide
gcgtgtgcaagtacaggtagtatatgtaca

SEQ ID NO: 212435 - DNA, 30 bp, Artificial Sequence
  Synthetic oligonucleotide
atctcgatgttccccttggtacattgtaca

SEQ ID NO: 212436 - DNA, 30 bp, Artificial Sequence
  Synthetic oligonucleotide
ttctcacaatgaaggcttcggcgaattaca

SEQ ID NO: 212437 - DNA, 30 bp, Artificial Sequence
  Synthetic oligonucleotide
actagacgaaattttggattctccattaca

SEQ ID NO: 212438 - DNA, 30 bp, Artificial Sequence
  Synthetic oligonucleotide
tgcaacgcggaaggcacttgcttcattaca

SEQ ID NO: 212439 - DNA, 30 bp, Artificial Sequence
  Synthetic oligonucleotide
ggggggggaacgggggaaacgccgattaca

SEQ ID NO: 212440 - DNA, 30 bp, Artificial Sequence
  Synthetic oligonucleotide
catcgcgataacaagagttcccggattaca

SEQ ID NO: 212441 - DNA, 31 bp, Artificial Sequence
  Synthetic oligonucleotide
ggtctgcgatccgagatgcattcttattaca

SEQ ID NO: 212442 - DNA, 30 bp, Artificial Sequence
  Synthetic oligonucleotide
ctcacgttcgcctcattaagcctacttaca

SEQ ID NO: 212443 - DNA, 30 bp, Artificial Sequence
  Synthetic oligonucleotide
gtcaagcttgattccaccgtcctacttaca

SEQ ID NO: 212444 - DNA, 30 bp, Artificial Sequence
  Synthetic oligonucleotide
tgtcgatcccagcacattcacccccttaca

SEQ ID NO: 212445 - DNA, 30 bp, Artificial Sequence
  Synthetic oligonucleotide
gagatgagataccttatatcccagcttaca

SEQ ID NO: 212446 - DNA, 30 bp, Artificial Sequence
  Synthetic oligonucleotide
ccggggagcttaccatggagtatgcttaca

SEQ ID NO: 212447 - DNA, 30 bp, Artificial Sequence
  Synthetic oligonucleotide
taggcctagggacagtgtggtcatcttaca

SEQ ID NO: 212448 - DNA, 30 bp, Artificial Sequence
  Synthetic oligonucleotide
ctgctaggataaaatgcttctcctcttaca

SEQ ID NO: 212449 - DNA, 30 bp, Artificial Sequence
  Synthetic oligonucleotide
ggtagaatacaaaggtaacatgcggttaca

SEQ ID NO: 212450 - DNA, 30 bp, Artificial Sequence
  Synthetic oligonucleotide
gacctgaagaccccggcaggatgtgttaca

SEQ ID NO: 212451 - DNA, 30 bp, Artificial Sequence
  Synthetic oligonucleotide
aacggacgtgctccccttgctcaatttaca

SEQ ID NO: 212452 - DNA, 30 bp, Artificial Sequence
  Synthetic oligonucleotide
ctagattgggtgcacaggtcagaatttaca

SEQ ID NO: 212453 - DNA, 30 bp, Artificial Sequence
  Synthetic oligonucleotide
ttctagccccgcgtgataggtgaatttaca

SEQ ID NO: 212454 - DNA, 30 bp, Artificial Sequence
  Synthetic oligonucleotide
atccattcgggcatttcaacctaatttaca

SEQ ID NO: 212455 - DNA, 30 bp, Artificial Sequence
  Synthetic oligonucleotide
ttatcgggaggagatacccagggatttaca

SEQ ID NO: 212456 - DNA, 30 bp, Artificial Sequence
  Synthetic oligonucleotide
tccgagtaaccctggaccactgctaaacca

SEQ ID NO: 212457 - DNA, 30 bp, Artificial Sequence
  Synthetic oligonucleotide
gatgctgttagagcaggccctgttaaacca

SEQ ID NO: 212458 - DNA, 30 bp, Artificial Sequence
  Synthetic oligonucleotide
cgcagtgcacacgaagcggccaaacaacca

SEQ ID NO: 212459 - DNA, 30 bp, Artificial Sequence
  Synthetic oligonucleotide
acggccatttcttcggacagggaacaacca

SEQ ID NO: 212460 - DNA, 30 bp, Artificial Sequence
  Synthetic oligonucleotide
ggtacctgcaagttgtatggcccacaacca

SEQ ID NO: 212461 - DNA, 30 bp, Artificial Sequence
  Synthetic oligonucleotide
cctgtttaagggacatggatagaccaacca

SEQ ID NO: 212462 - DNA, 30 bp, Artificial Sequence
  Synthetic oligonucleotide
cagacaagggtaccaagggacctccaacca

SEQ ID NO: 212463 - DNA, 30 bp, Artificial Sequence
  Synthetic oligonucleotide
gacaacgtggcagggttaggcccgcaacca

SEQ ID NO: 212464 - DNA, 30 bp, Artificial Sequence
  Synthetic oligonucleotide
gcaggttcccagggatagacaatgcaacca

SEQ ID NO: 212465 - DNA, 30 bp, Artificial Sequence
  Synthetic oligonucleotide
gtccaacatggcgaaaagggcctgcaacca

SEQ ID NO: 212466 - DNA, 30 bp, Artificial Sequence
  Synthetic oligonucleotide
caggcttttaggtacgacaggtctcaacca

SEQ ID NO: 212467 - DNA, 30 bp, Artificial Sequence
  Synthetic oligonucleotide
gtgcaccagccgtcgcggcaccaagaacca

SEQ ID NO: 212468 - DNA, 30 bp, Artificial Sequence
  Synthetic oligonucleotide
ttcacaggaaccattagtgcaccagaacca

SEQ ID NO: 212469 - DNA, 30 bp, Artificial Sequence
  Synthetic oligonucleotide
tagccaggcgtgtaacaaccttgcgaacca

SEQ ID NO: 212470 - DNA, 30 bp, Artificial Sequence
  Synthetic oligonucleotide
ttttggcagcccatcatatacctcgaacca

SEQ ID NO: 212471 - DNA, 30 bp, Artificial Sequence
  Synthetic oligonucleotide
tggagatccatcgcgctagcttaggaacca

SEQ ID NO: 212472 - DNA, 30 bp, Artificial Sequence
  Synthetic oligonucleotide
aatcaaggatagcttgtcgtaccggaacca

SEQ ID NO: 212473 - DNA, 30 bp, Artificial Sequence
  Synthetic oligonucleotide
aatcgaacggtctgtaacagatatgaacca

SEQ ID NO: 212474 - DNA, 30 bp, Artificial Sequence
  Synthetic oligonucleotide
gaactgggcaggtttttagccattgaacca

SEQ ID NO: 212475 - DNA, 30 bp, Artificial Sequence
  Synthetic oligonucleotide
agaaattgctcaaaaataggatgataacca

SEQ ID NO: 212476 - DNA, 30 bp, Artificial Sequence
  Synthetic oligonucleotide
ggggcatctggcggaataggttgataacca

SEQ ID NO: 212477 - DNA, 30 bp, Artificial Sequence
  Synthetic oligonucleotide
gatcgctacttggaagtgttaaactaacca

SEQ ID NO: 212478 - DNA, 30 bp, Artificial Sequence
  Synthetic oligonucleotide
ggcagaatgagatacgccgtccactaacca

SEQ ID NO: 212479 - DNA, 30 bp, Artificial Sequence
  Synthetic oligonucleotide
gtaaacatccggggtaatttgaagtaacca

SEQ ID NO: 212480 - DNA, 30 bp, Artificial Sequence
  Synthetic oligonucleotide
tatccatatggaacaatatgcgattaacca

SEQ ID NO: 212481 - DNA, 30 bp, Artificial Sequence
  Synthetic oligonucleotide
tgtaaccgttagcgtcagctatattaacca

SEQ ID NO: 212482 - DNA, 30 bp, Artificial Sequence
  Synthetic oligonucleotide
gacgaagtcttgaactcctttatttaacca

SEQ ID NO: 212483 - DNA, 30 bp, Artificial Sequence
  Synthetic oligonucleotide
acaagacggaagcgagtgcctttttaacca

SEQ ID NO: 212484 - DNA, 30 bp, Artificial Sequence
  Synthetic oligonucleotide
ggcaacttacgatattcaccctcaacacca

SEQ ID NO: 212485 - DNA, 30 bp, Artificial Sequence
  Synthetic oligonucleotide
ggacttcagggcggaacgctaagaacacca

SEQ ID NO: 212486 - DNA, 30 bp, Artificial Sequence
  Synthetic oligonucleotide
tcaggacctccttccatgagtcgaacacca

SEQ ID NO: 212487 - DNA, 30 bp, Artificial Sequence
  Synthetic oligonucleotide
actgcgtttgagggaagaccggcgacacca

SEQ ID NO: 212488 - DNA, 30 bp, Artificial Sequence
  Synthetic oligonucleotide
actacggttcggcttacgacagttacacca

SEQ ID NO: 212489 - DNA, 30 bp, Artificial Sequence
  Synthetic oligonucleotide
gtcgggaaattacgaggtagtgtgccacca

SEQ ID NO: 212490 - DNA, 30 bp, Artificial Sequence
  Synthetic oligonucleotide
gacgcgtgtaaatcaggaatcgccgcacca

SEQ ID NO: 212491 - DNA, 30 bp, Artificial Sequence
  Synthetic oligonucleotide
catgtctcggtttggcatattctcgcacca

SEQ ID NO: 212492 - DNA, 30 bp, Artificial Sequence
  Synthetic oligonucleotide
gggccgtgggacactttcgaggtcgcacca

SEQ ID NO: 212493 - DNA, 30 bp, Artificial Sequence
  Synthetic oligonucleotide
aaatgggtgaggacgacccgctcggcacca

SEQ ID NO: 212494 - DNA, 30 bp, Artificial Sequence
  Synthetic oligonucleotide
gcgggtcggcgtccgcaggaggttgcacca

SEQ ID NO: 212495 - DNA, 30 bp, Artificial Sequence
  Synthetic oligonucleotide
atctgggtcggaaggctgaacacaagacca

SEQ ID NO: 212496 - DNA, 30 bp, Artificial Sequence
  Synthetic oligonucleotide
ggtgtctcatcggggcgctacagaagacca

SEQ ID NO: 212497 - DNA, 30 bp, Artificial Sequence
  Synthetic oligonucleotide
aataaaagtgcgtatcaatcggtaagacca

SEQ ID NO: 212498 - DNA, 30 bp, Artificial Sequence
  Synthetic oligonucleotide
tcttaggctgggaatcgtggttagagacca

SEQ ID NO: 212499 - DNA, 30 bp, Artificial Sequence
  Synthetic oligonucleotide
tgcttgtggtcaatagaagagtttagacca

SEQ ID NO: 212500 - DNA, 30 bp, Artificial Sequence
  Synthetic oligonucleotide
caatgtcgcggagcgtacgaagtccgacca

SEQ ID NO: 212501 - DNA, 30 bp, Artificial Sequence
  Synthetic oligonucleotide
gctgaagctgtatattaggtacaaggacca

SEQ ID NO: 212502 - DNA, 30 bp, Artificial Sequence
  Synthetic oligonucleotide
cgcatgatccataaaagaggttaaggacca

SEQ ID NO: 212503 - DNA, 30 bp, Artificial Sequence
  Synthetic oligonucleotide
tatgtaatgggcatcaggcgcggaggacca

SEQ ID NO: 212504 - DNA, 30 bp, Artificial Sequence
  Synthetic oligonucleotide
ctatcagcagtgtctatacgcatcggacca

SEQ ID NO: 212505 - DNA, 30 bp, Artificial Sequence
  Synthetic oligonucleotide
tcgaagggcttgtaagggcccaagggacca

SEQ ID NO: 212506 - DNA, 30 bp, Artificial Sequence
  Synthetic oligonucleotide
aggtttagaacaatttggctgacgggacca

SEQ ID NO: 212507 - DNA, 30 bp, Artificial Sequence
  Synthetic oligonucleotide
gtgactactaaaaatacgacaattggacca

SEQ ID NO: 212508 - DNA, 30 bp, Artificial Sequence
  Synthetic oligonucleotide
tatgcttgtatgccacgatcggaatgacca

SEQ ID NO: 212509 - DNA, 30 bp, Artificial Sequence
  Synthetic oligonucleotide
cgccgggagcacacagatatgacatgacca

SEQ ID NO: 212510 - DNA, 30 bp, Artificial Sequence
  Synthetic oligonucleotide
gtcatcacgtcagcgggggattcatgacca

SEQ ID NO: 212511 - DNA, 30 bp, Artificial Sequence
  Synthetic oligonucleotide
aaatcagatgggtgcataagggagtgacca

SEQ ID NO: 212512 - DNA, 30 bp, Artificial Sequence
  Synthetic oligonucleotide
gcataccgccatcccgacaacatttgacca

SEQ ID NO: 212513 - DNA, 30 bp, Artificial Sequence
  Synthetic oligonucleotide
atagcgataggactaagtgcacgaatacca

SEQ ID NO: 212514 - DNA, 30 bp, Artificial Sequence
  Synthetic oligonucleotide
ctgcagaaaaatttttgattgcccatacca

SEQ ID NO: 212515 - DNA, 30 bp, Artificial Sequence
  Synthetic oligonucleotide
cggggtgatttcaaatgtatatccatacca

SEQ ID NO: 212516 - DNA, 30 bp, Artificial Sequence
  Synthetic oligonucleotide
gataagttctggctactggggaagatacca

SEQ ID NO: 212517 - DNA, 30 bp, Artificial Sequence
  Synthetic oligonucleotide
tgactatgatgtcatctgaacatgctacca

SEQ ID NO: 212518 - DNA, 30 bp, Artificial Sequence
  Synthetic oligonucleotide
aaccgatcgaagtgcatccttagagtacca

SEQ ID NO: 212519 - DNA, 30 bp, Artificial Sequence
  Synthetic oligonucleotide
aaatgtccactaaccggcggtcgcgtacca

SEQ ID NO: 212520 - DNA, 30 bp, Artificial Sequence
  Synthetic oligonucleotide
gtatgttagttagctccatacaacttacca

SEQ ID NO: 212521 - DNA, 30 bp, Artificial Sequence
  Synthetic oligonucleotide
gattgataaccctatgcaccccgtttacca

SEQ ID NO: 212522 - DNA, 30 bp, Artificial Sequence
  Synthetic oligonucleotide
tggttacggacagatggcctaagaaaccca

SEQ ID NO: 212523 - DNA, 30 bp, Artificial Sequence
  Synthetic oligonucleotide
tgccggctattcgaaacaactcagaaccca

SEQ ID NO: 212524 - DNA, 30 bp, Artificial Sequence
  Synthetic oligonucleotide
gcaaccaatcacggtggagtatagaaccca

SEQ ID NO: 212525 - DNA, 30 bp, Artificial Sequence
  Synthetic oligonucleotide
tacagtgcgcccgatgtgtcacggaaccca

SEQ ID NO: 212526 - DNA, 30 bp, Artificial Sequence
  Synthetic oligonucleotide
cattactcgctctttgtaccgaataaccca

SEQ ID NO: 212527 - DNA, 30 bp, Artificial Sequence
  Synthetic oligonucleotide
ctatagggaggatgtggcaggcctaaccca

SEQ ID NO: 212528 - DNA, 30 bp, Artificial Sequence
  Synthetic oligonucleotide
tcaacagcccgccttccctccattaaccca

SEQ ID NO: 212529 - DNA, 30 bp, Artificial Sequence
  Synthetic oligonucleotide
tccctgttttggtaggctttagcacaccca

SEQ ID NO: 212530 - DNA, 30 bp, Artificial Sequence
  Synthetic oligonucleotide
aactcggaacatcggggaccccgccaccca

SEQ ID NO: 212531 - DNA, 30 bp, Artificial Sequence
  Synthetic oligonucleotide
atggataaattccggcaccgcccgcaccca

SEQ ID NO: 212532 - DNA, 30 bp, Artificial Sequence
  Synthetic oligonucleotide
gaacacgtacccagtcgggcgtggcaccca

SEQ ID NO: 212533 - DNA, 30 bp, Artificial Sequence
  Synthetic oligonucleotide
gcatcgatttatcatggccagcgagaccca

SEQ ID NO: 212534 - DNA, 30 bp, Artificial Sequence
  Synthetic oligonucleotide
gtaagaggggacaacggtcccaacgaccca

SEQ ID NO: 212535 - DNA, 30 bp, Artificial Sequence
  Synthetic oligonucleotide
ggaaagggcgttaatgaaactgacgaccca

SEQ ID NO: 212536 - DNA, 30 bp, Artificial Sequence
  Synthetic oligonucleotide
ggagtcatcgcttggagaactttggaccca

SEQ ID NO: 212537 - DNA, 30 bp, Artificial Sequence
  Synthetic oligonucleotide
tccccgtacagaaaagctggaagtgaccca

SEQ ID NO: 212538 - DNA, 30 bp, Artificial Sequence
  Synthetic oligonucleotide
gactgcatgtaaaataaattaatataccca

SEQ ID NO: 212539 - DNA, 30 bp, Artificial Sequence
  Synthetic oligonucleotide
cgtattaacgaggtctaggtgacctaccca

SEQ ID NO: 212540 - DNA, 30 bp, Artificial Sequence
  Synthetic oligonucleotide
cttttcctgcgggtcaggcgcgattaccca

SEQ ID NO: 212541 - DNA, 30 bp, Artificial Sequence
  Synthetic oligonucleotide
cgatgattctgttttacccctggttaccca

SEQ ID NO: 212542 - DNA, 30 bp, Artificial Sequence
  Synthetic oligonucleotide
aacaagtctcacatttatcatacaacccca

SEQ ID NO: 212543 - DNA, 30 bp, Artificial Sequence
  Synthetic oligonucleotide
ttacaagcatgtttcggacaagctacccca

SEQ ID NO: 212544 - DNA, 30 bp, Artificial Sequence
  Synthetic oligonucleotide
tgtttgaccgggtgcacaggcggtacccca

SEQ ID NO: 212545 - DNA, 30 bp, Artificial Sequence
  Synthetic oligonucleotide
tcgaaaactcctcttcgggtgcacccccca

SEQ ID NO: 212546 - DNA, 30 bp, Artificial Sequence
  Synthetic oligonucleotide
cgcgaaaaagaagggggtatcatgccccca

SEQ ID NO: 212547 - DNA, 30 bp, Artificial Sequence
  Synthetic oligonucleotide
aagtgttgaacacatttgaacctgccccca

SEQ ID NO: 212548 - DNA, 30 bp, Artificial Sequence
  Synthetic oligonucleotide
gagagacaaggtaaataataaggagcccca

SEQ ID NO: 212549 - DNA, 30 bp, Artificial Sequence
  Synthetic oligonucleotide
attatgggagttacttacgctgtggcccca

SEQ ID NO: 212550 - DNA, 30 bp, Artificial Sequence
  Synthetic oligonucleotide
aggttcgatgagtacacggtgtcatcccca

SEQ ID NO: 212551 - DNA, 30 bp, Artificial Sequence
  Synthetic oligonucleotide
aaaataacacaaaggttaagcggatcccca

SEQ ID NO: 212552 - DNA, 30 bp, Artificial Sequence
  Synthetic oligonucleotide
ggggctagggttctcagttttacaagccca

SEQ ID NO: 212553 - DNA, 30 bp, Artificial Sequence
  Synthetic oligonucleotide
ggtgactctgattcgtgctaccgaagccca

SEQ ID NO: 212554 - DNA, 30 bp, Artificial Sequence
  Synthetic oligonucleotide
cgtgtgggtatctgaatgcgcaacagccca

SEQ ID NO: 212555 - DNA, 30 bp, Artificial Sequence
  Synthetic oligonucleotide
gaaaggttccggcggagtgatctgagccca

SEQ ID NO: 212556 - DNA, 30 bp, Artificial Sequence
  Synthetic oligonucleotide
cgaaataaccaggccagtgcgggccgccca

SEQ ID NO: 212557 - DNA, 30 bp, Artificial Sequence
  Synthetic oligonucleotide
acgaccagcacttgaatgtgcgctggccca

SEQ ID NO: 212558 - DNA, 30 bp, Artificial Sequence
  Synthetic oligonucleotide
gacaaagtagtttttctcgtatttggccca

SEQ ID NO: 212559 - DNA, 30 bp, Artificial Sequence
  Synthetic oligonucleotide
gtgtgggcgcgcaatggaacaccatgccca

SEQ ID NO: 212560 - DNA, 30 bp, Artificial Sequence
  Synthetic oligonucleotide
tagttcccagcactccgtaacctatgccca

SEQ ID NO: 212561 - DNA, 30 bp, Artificial Sequence
  Synthetic oligonucleotide
cgtgtaattggcactcttgaacactgccca

SEQ ID NO: 212562 - DNA, 30 bp, Artificial Sequence
  Synthetic oligonucleotide
cctggctatcttccatgtgattactgccca

SEQ ID NO: 212563 - DNA, 30 bp, Artificial Sequence
  Synthetic oligonucleotide
tcctcgatacccgcttaagcgtggtgccca

SEQ ID NO: 212564 - DNA, 30 bp, Artificial Sequence
  Synthetic oligonucleotide
gctccacgttgcctggcagatccgatccca

SEQ ID NO: 212565 - DNA, 30 bp, Artificial Sequence
  Synthetic oligonucleotide
tggtttattaagaggccaacttccctccca

SEQ ID NO: 212566 - DNA, 30 bp, Artificial Sequence
  Synthetic oligonucleotide
aagagtgccgtatccaatgtaggcctccca

SEQ ID NO: 212567 - DNA, 31 bp, Artificial Sequence
  Synthetic oligonucleotide
gaggtaattcatactaattgtagttctccca

SEQ ID NO: 212568 - DNA, 30 bp, Artificial Sequence
  Synthetic oligonucleotide
ggcaggtagcactaacgggccgttctccca

SEQ ID NO: 212569 - DNA, 30 bp, Artificial Sequence
  Synthetic oligonucleotide
atgtagtcggaggacggtggttaagtccca

SEQ ID NO: 212570 - DNA, 30 bp, Artificial Sequence
  Synthetic oligonucleotide
tgcgcagaggcgttgagttacccagtccca

SEQ ID NO: 212571 - DNA, 30 bp, Artificial Sequence
  Synthetic oligonucleotide
actcattgtatgtaaattcactccgtccca

SEQ ID NO: 212572 - DNA, 30 bp, Artificial Sequence
  Synthetic oligonucleotide
atattacccgggttgtgaaatgcggtccca

SEQ ID NO: 212573 - DNA, 30 bp, Artificial Sequence
  Synthetic oligonucleotide
gtcgggggaaaacgggtttttcgcttccca

SEQ ID NO: 212574 - DNA, 30 bp, Artificial Sequence
  Synthetic oligonucleotide
tgtgatgaatagagagcgtcaatgttccca

SEQ ID NO: 212575 - DNA, 30 bp, Artificial Sequence
  Synthetic oligonucleotide
tggctaaatgcgtgcacccatggtttccca

SEQ ID NO: 212576 - DNA, 30 bp, Artificial Sequence
  Synthetic oligonucleotide
cccccacctttgtgcggattagaaaagcca

SEQ ID NO: 212577 - DNA, 30 bp, Artificial Sequence
  Synthetic oligonucleotide
gcagtagtgtgcgcttcgaagtccaagcca

SEQ ID NO: 212578 - DNA, 30 bp, Artificial Sequence
  Synthetic oligonucleotide
gagcctgacagatcggccaaggagaagcca

SEQ ID NO: 212579 - DNA, 30 bp, Artificial Sequence
  Synthetic oligonucleotide
atgcctgacagagacctagaaaagcagcca

SEQ ID NO: 212580 - DNA, 30 bp, Artificial Sequence
  Synthetic oligonucleotide
tgctgctagatagaaaacagaagtcagcca

SEQ ID NO: 212581 - DNA, 30 bp, Artificial Sequence
  Synthetic oligonucleotide
cggctggatatctaattgagcagtcagcca

SEQ ID NO: 212582 - DNA, 30 bp, Artificial Sequence
  Synthetic oligonucleotide
tgacttctgaatgattaccggtgtcagcca

SEQ ID NO: 212583 - DNA, 30 bp, Artificial Sequence
  Synthetic oligonucleotide
agcggtgctatcggcatggatcccgagcca

SEQ ID NO: 212584 - DNA, 30 bp, Artificial Sequence
  Synthetic oligonucleotide
cgtgtgcgagaaacagcggtgtgcgagcca

SEQ ID NO: 212585 - DNA, 30 bp, Artificial Sequence
  Synthetic oligonucleotide
ttcatgttccccttgcgcgaagtcgagcca

SEQ ID NO: 212586 - DNA, 30 bp, Artificial Sequence
  Synthetic oligonucleotide
aatcggggtaaattcgtgggtatggagcca

SEQ ID NO: 212587 - DNA, 30 bp, Artificial Sequence
  Synthetic oligonucleotide
ttccgtttctaaaaggagtaagctgagcca

SEQ ID NO: 212588 - DNA, 30 bp, Artificial Sequence
  Synthetic oligonucleotide
gggactattatagcctgagggcgtgagcca

SEQ ID NO: 212589 - DNA, 30 bp, Artificial Sequence
  Synthetic oligonucleotide
gaaggtgtggtctatcggcgcattgagcca

SEQ ID NO: 212590 - DNA, 30 bp, Artificial Sequence
  Synthetic oligonucleotide
gattcagaccttggaaggatacaatagcca

SEQ ID NO: 212591 - DNA, 29 bp, Artificial Sequence
  Synthetic oligonucleotide
cctgttgtcaggacgaaagaccctagcca

SEQ ID NO: 212592 - DNA, 30 bp, Artificial Sequence
  Synthetic oligonucleotide
tggcatcctaatactaccgcaacgtagcca

SEQ ID NO: 212593 - DNA, 30 bp, Artificial Sequence
  Synthetic oligonucleotide
ccgtaggcgtgtaatggggtaacgtagcca

SEQ ID NO: 212594 - DNA, 30 bp, Artificial Sequence
  Synthetic oligonucleotide
gtctggcgagacaagcctgccaaaacgcca

SEQ ID NO: 212595 - DNA, 30 bp, Artificial Sequence
  Synthetic oligonucleotide
caatgatataacaataggaaataaacgcca

SEQ ID NO: 212596 - DNA, 30 bp, Artificial Sequence
  Synthetic oligonucleotide
gacaagactagggtggctcatgacacgcca

SEQ ID NO: 212597 - DNA, 30 bp, Artificial Sequence
  Synthetic oligonucleotide
ggacggctacttctactataaaatacgcca

SEQ ID NO: 212598 - DNA, 30 bp, Artificial Sequence
  Synthetic oligonucleotide
tgccggatggccgatagatttcaaccgcca

SEQ ID NO: 212599 - DNA, 30 bp, Artificial Sequence
  Synthetic oligonucleotide
atgcgagaaggtctacgggcacagccgcca

SEQ ID NO: 212600 - DNA, 30 bp, Artificial Sequence
  Synthetic oligonucleotide
cggaacatgatgcgtagtccactgccgcca

SEQ ID NO: 212601 - DNA, 30 bp, Artificial Sequence
  Synthetic oligonucleotide
ctacaacaaaagtagtagtaaagagcgcca

SEQ ID NO: 212602 - DNA, 30 bp, Artificial Sequence
  Synthetic oligonucleotide
gttgcatttcccagcaacgggctagcgcca

SEQ ID NO: 212603 - DNA, 30 bp, Artificial Sequence
  Synthetic oligonucleotide
gtaagagtatgggttagtaatgccgcgcca

SEQ ID NO: 212604 - DNA, 30 bp, Artificial Sequence
  Synthetic oligonucleotide
tattcataacccggcgaaaggacatcgcca

SEQ ID NO: 212605 - DNA, 30 bp, Artificial Sequence
  Synthetic oligonucleotide
ggcgactattcaatacttagaagatcgcca

SEQ ID NO: 212606 - DNA, 30 bp, Artificial Sequence
  Synthetic oligonucleotide
atagccgaatcgcccccaggagcctcgcca

SEQ ID NO: 212607 - DNA, 30 bp, Artificial Sequence
  Synthetic oligonucleotide
ccttgtgcggccgacagttagaagtcgcca

SEQ ID NO: 212608 - DNA, 30 bp, Artificial Sequence
  Synthetic oligonucleotide
agcttcgctggttggatgggtgggtcgcca

SEQ ID NO: 212609 - DNA, 30 bp, Artificial Sequence
  Synthetic oligonucleotide
agagcttaaagagcgttaggtgattcgcca

SEQ ID NO: 212610 - DNA, 30 bp, Artificial Sequence
  Synthetic oligonucleotide
ggagcgctatccttacaccggtcaaggcca

SEQ ID NO: 212611 - DNA, 30 bp, Artificial Sequence
  Synthetic oligonucleotide
ttatacgacctagatacaacatccaggcca

SEQ ID NO: 212612 - DNA, 30 bp, Artificial Sequence
  Synthetic oligonucleotide
tctagtacaaaagtgctaaagtgcaggcca

SEQ ID NO: 212613 - DNA, 30 bp, Artificial Sequence
  Synthetic oligonucleotide
gtatacacacgctatcaatttaaacggcca

SEQ ID NO: 212614 - DNA, 30 bp, Artificial Sequence
  Synthetic oligonucleotide
ttgggggtcgggcagatgtgtgaacggcca

SEQ ID NO: 212615 - DNA, 30 bp, Artificial Sequence
  Synthetic oligonucleotide
atgttggaaaatatgatctcgatccggcca

SEQ ID NO: 212616 - DNA, 30 bp, Artificial Sequence
  Synthetic oligonucleotide
tcagttgcagtaatgtcgaagaagcggcca

SEQ ID NO: 212617 - DNA, 30 bp, Artificial Sequence
  Synthetic oligonucleotide
atgatgctatgcgtattgtttaggcggcca

SEQ ID NO: 212618 - DNA, 30 bp, Artificial Sequence
  Synthetic oligonucleotide
cggcaaatttgttgattgtattggcggcca

SEQ ID NO: 212619 - DNA, 30 bp, Artificial Sequence
  Synthetic oligonucleotide
acagggacgatagtgtattttctgcggcca

SEQ ID NO: 212620 - DNA, 30 bp, Artificial Sequence
  Synthetic oligonucleotide
agggatccggtgccctcctttgatcggcca

SEQ ID NO: 212621 - DNA, 30 bp, Artificial Sequence
  Synthetic oligonucleotide
ggcaacaccatccgcagggagaacgggcca

SEQ ID NO: 212622 - DNA, 30 bp, Artificial Sequence
  Synthetic oligonucleotide
taactaggcctatgttgtaattccgggcca

SEQ ID NO: 212623 - DNA, 30 bp, Artificial Sequence
  Synthetic oligonucleotide
aagcaacgaacgtgccgaaaggtggggcca

SEQ ID NO: 212624 - DNA, 30 bp, Artificial Sequence
  Synthetic oligonucleotide
agagtaaattgtgggatagaacactggcca

SEQ ID NO: 212625 - DNA, 30 bp, Artificial Sequence
  Synthetic oligonucleotide
aaatgatcaaatatggtagtggcctggcca

SEQ ID NO: 212626 - DNA, 30 bp, Artificial Sequence
  Synthetic oligonucleotide
gggagggagaggcgggacggaccgtggcca

SEQ ID NO: 212627 - DNA, 30 bp, Artificial Sequence
  Synthetic oligonucleotide
tcactcgctaaggttaaattccattggcca

SEQ ID NO: 212628 - DNA, 30 bp, Artificial Sequence
  Synthetic oligonucleotide
atacaatggtgacttcagcggtattggcca

SEQ ID NO: 212629 - DNA, 30 bp, Artificial Sequence
  Synthetic oligonucleotide
aggacaggttaagcccgccatgcttggcca

SEQ ID NO: 212630 - DNA, 30 bp, Artificial Sequence
  Synthetic oligonucleotide
tgttaaggggtttacgtgagtatttggcca

SEQ ID NO: 212631 - DNA, 30 bp, Artificial Sequence
  Synthetic oligonucleotide
ttgtaagccagactttcccgtgtcatgcca

SEQ ID NO: 212632 - DNA, 30 bp, Artificial Sequence
  Synthetic oligonucleotide
ccccggatataatgaggggggcgtatgcca

SEQ ID NO: 212633 - DNA, 30 bp, Artificial Sequence
  Synthetic oligonucleotide
atagccatggtagtcgacacggaactgcca

SEQ ID NO: 212634 - DNA, 30 bp, Artificial Sequence
  Synthetic oligonucleotide
agctttagcaggtggttagcatggctgcca

SEQ ID NO: 212635 - DNA, 30 bp, Artificial Sequence
  Synthetic oligonucleotide
cgtatcgaggccaaggtttcccatctgcca

SEQ ID NO: 212636 - DNA, 30 bp, Artificial Sequence
  Synthetic oligonucleotide
ggtcgaagcagttaccgagcaggtctgcca

SEQ ID NO: 212637 - DNA, 30 bp, Artificial Sequence
  Synthetic oligonucleotide
tatgctttctcagccaccgtctgcgtgcca

SEQ ID NO: 212638 - DNA, 30 bp, Artificial Sequence
  Synthetic oligonucleotide
atctgacaggccggcagagggctcgtgcca

SEQ ID NO: 212639 - DNA, 30 bp, Artificial Sequence
  Synthetic oligonucleotide
gggctagtaacgcgttagtgtcaggtgcca

SEQ ID NO: 212640 - DNA, 30 bp, Artificial Sequence
  Synthetic oligonucleotide
gtgggactgggtacagaattctaggtgcca

SEQ ID NO: 212641 - DNA, 31 bp, Artificial Sequence
  Synthetic oligonucleotide
cgtctagcaagtatctggtctgggtgtgcca

SEQ ID NO: 212642 - DNA, 30 bp, Artificial Sequence
  Synthetic oligonucleotide
agaaggtagtgaaccggaagcttattgcca

SEQ ID NO: 212643 - DNA, 30 bp, Artificial Sequence
  Synthetic oligonucleotide
agcacgatcgtattagtgtttaccttgcca

SEQ ID NO: 212644 - DNA, 30 bp, Artificial Sequence
  Synthetic oligonucleotide
tcggtacgcaaagcgggtcgcacaaatcca

SEQ ID NO: 212645 - DNA, 30 bp, Artificial Sequence
  Synthetic oligonucleotide
gtgtcgctgtgttgagcagtaagcaatcca

SEQ ID NO: 212646 - DNA, 30 bp, Artificial Sequence
  Synthetic oligonucleotide
gaccacgacactgcaactggacagaatcca

SEQ ID NO: 212647 - DNA, 30 bp, Artificial Sequence
  Synthetic oligonucleotide
tgtttacaaatgcacttcgagacgaatcca

SEQ ID NO: 212648 - DNA, 30 bp, Artificial Sequence
  Synthetic oligonucleotide
taagattgaaaaatggaagtggcgaatcca

SEQ ID NO: 212649 - DNA, 30 bp, Artificial Sequence
  Synthetic oligonucleotide
tacaccgcctcaagctgaagacaacatcca

SEQ ID NO: 212650 - DNA, 30 bp, Artificial Sequence
  Synthetic oligonucleotide
agtagtaagcctccacgaatttaacatcca

SEQ ID NO: 212651 - DNA, 30 bp, Artificial Sequence
  Synthetic oligonucleotide
cctctgctcccaacgttgcggacacatcca

SEQ ID NO: 212652 - DNA, 30 bp, Artificial Sequence
  Synthetic oligonucleotide
gcgtcggggggtgaatgttctgtccatcca

SEQ ID NO: 212653 - DNA, 30 bp, Artificial Sequence
  Synthetic oligonucleotide
gtgcaccaacgggcgtaaatctaagatcca

SEQ ID NO: 212654 - DNA, 30 bp, Artificial Sequence
  Synthetic oligonucleotide
gggttgtctcctgtggtactttacgatcca

SEQ ID NO: 212655 - DNA, 30 bp, Artificial Sequence
  Synthetic oligonucleotide
tatacgtagaagcgcaccatattcgatcca

SEQ ID NO: 212656 - DNA, 30 bp, Artificial Sequence
  Synthetic oligonucleotide
ttgcaaaccaataccagtccaggggatcca

SEQ ID NO: 212657 - DNA, 30 bp, Artificial Sequence
  Synthetic oligonucleotide
gataaagcgatctctgggtatactgatcca

SEQ ID NO: 212658 - DNA, 30 bp, Artificial Sequence
  Synthetic oligonucleotide
tgttagggtccggctgcaaaaccctatcca

SEQ ID NO: 212659 - DNA, 30 bp, Artificial Sequence
  Synthetic oligonucleotide
aacccggccgagcataacttaacttatcca

SEQ ID NO: 212660 - DNA, 30 bp, Artificial Sequence
  Synthetic oligonucleotide
tcggacgtccctggcttagatgtaactcca

SEQ ID NO: 212661 - DNA, 30 bp, Artificial Sequence
  Synthetic oligonucleotide
aggtctctttgcacgtcatccttcactcca

SEQ ID NO: 212662 - DNA, 30 bp, Artificial Sequence
  Synthetic oligonucleotide
taccgaaaatatggtttgccttggcctcca

SEQ ID NO: 212663 - DNA, 30 bp, Artificial Sequence
  Synthetic oligonucleotide
ctaccgaatgaagtcaggtccttagctcca

SEQ ID NO: 212664 - DNA, 30 bp, Artificial Sequence
  Synthetic oligonucleotide
ggctctggctttgtcctgcttcacgctcca

SEQ ID NO: 212665 - DNA, 30 bp, Artificial Sequence
  Synthetic oligonucleotide
aaaagtacttggaagctaaactccgctcca

SEQ ID NO: 212666 - DNA, 30 bp, Artificial Sequence
  Synthetic oligonucleotide
ggaaaacctagtcggtaacaaaactctcca

SEQ ID NO: 212667 - DNA, 30 bp, Artificial Sequence
  Synthetic oligonucleotide
caggccaaagccgcgtggcgatcttctcca

SEQ ID NO: 212668 - DNA, 30 bp, Artificial Sequence
  Synthetic oligonucleotide
ggtctggtcattaaacgaaaagtttctcca

SEQ ID NO: 212669 - DNA, 30 bp, Artificial Sequence
  Synthetic oligonucleotide
ctggagcgttcgatagttgcggcaagtcca

SEQ ID NO: 212670 - DNA, 30 bp, Artificial Sequence
  Synthetic oligonucleotide
gtatcgctctacatatagggctgaagtcca

SEQ ID NO: 212671 - DNA, 30 bp, Artificial Sequence
  Synthetic oligonucleotide
attgggcgtgacttttcacagtagagtcca

SEQ ID NO: 212672 - DNA, 30 bp, Artificial Sequence
  Synthetic oligonucleotide
ctgcaaagacttgcaaatggcttgagtcca

SEQ ID NO: 212673 - DNA, 30 bp, Artificial Sequence
  Synthetic oligonucleotide
tggtattggtcgcttaagatgaatagtcca

SEQ ID NO: 212674 - DNA, 30 bp, Artificial Sequence
  Synthetic oligonucleotide
gcattttaaggtatcgtcaccccacgtcca

SEQ ID NO: 212675 - DNA, 30 bp, Artificial Sequence
  Synthetic oligonucleotide
attgcgcggccacaatctatttcacgtcca

SEQ ID NO: 212676 - DNA, 30 bp, Artificial Sequence
  Synthetic oligonucleotide
gccggtagacacctgaatgaggtacgtcca

SEQ ID NO: 212677 - DNA, 30 bp, Artificial Sequence
  Synthetic oligonucleotide
ggtaaaaagcgcaggcttagagagcgtcca

SEQ ID NO: 212678 - DNA, 30 bp, Artificial Sequence
  Synthetic oligonucleotide
ctattccggggcgggccgtggaggcgtcca

SEQ ID NO: 212679 - DNA, 30 bp, Artificial Sequence
  Synthetic oligonucleotide
gatgcgctctctcatcacaagtcaggtcca

SEQ ID NO: 212680 - DNA, 30 bp, Artificial Sequence
  Synthetic oligonucleotide
tacagagttcagttggtaaagaacggtcca

SEQ ID NO: 212681 - DNA, 30 bp, Artificial Sequence
  Synthetic oligonucleotide
gactaagtgtcctatctcagtaatggtcca

SEQ ID NO: 212682 - DNA, 30 bp, Artificial Sequence
  Synthetic oligonucleotide
gatgccttataagtgcaaagtgcatgtcca

SEQ ID NO: 212683 - DNA, 30 bp, Artificial Sequence
  Synthetic oligonucleotide
tagacaagatatgcctagcttagatgtcca

SEQ ID NO: 212684 - DNA, 30 bp, Artificial Sequence
  Synthetic oligonucleotide
gctgtttattcgtgaccaggtatatgtcca

SEQ ID NO: 212685 - DNA, 30 bp, Artificial Sequence
  Synthetic oligonucleotide
accaccgagaatacatcggtagagtgtcca

SEQ ID NO: 212686 - DNA, 30 bp, Artificial Sequence
  Synthetic oligonucleotide
aatggtttcactatcccgaacagttgtcca

SEQ ID NO: 212687 - DNA, 30 bp, Artificial Sequence
  Synthetic oligonucleotide
acgtagacgggtactgatggaattattcca

SEQ ID NO: 212688 - DNA, 30 bp, Artificial Sequence
  Synthetic oligonucleotide
tcgaaatctatgcgggattctgttattcca

SEQ ID NO: 212689 - DNA, 30 bp, Artificial Sequence
  Synthetic oligonucleotide
atagtaataagactgcatgtgcaacttcca

SEQ ID NO: 212690 - DNA, 30 bp, Artificial Sequence
  Synthetic oligonucleotide
tccctctaaaaaactctatgataacttcca

SEQ ID NO: 212691 - DNA, 30 bp, Artificial Sequence
  Synthetic oligonucleotide
gaacacgtgtaaagtgagtaagtccttcca

SEQ ID NO: 212692 - DNA, 30 bp, Artificial Sequence
  Synthetic oligonucleotide
ggttattctaagaaggagggcccgcttcca

SEQ ID NO: 212693 - DNA, 30 bp, Artificial Sequence
  Synthetic oligonucleotide
gaaggcgttatgatatatagcatagttcca

SEQ ID NO: 212694 - DNA, 30 bp, Artificial Sequence
  Synthetic oligonucleotide
tcatgatcttactaacataaacacgttcca

SEQ ID NO: 212695 - DNA, 30 bp, Artificial Sequence
  Synthetic oligonucleotide
tgcctaatgatatttaactatcacgttcca

SEQ ID NO: 212696 - DNA, 30 bp, Artificial Sequence
  Synthetic oligonucleotide
ctagtaaggtaattcccggcgagcgttcca

SEQ ID NO: 212697 - DNA, 30 bp, Artificial Sequence
  Synthetic oligonucleotide
ggatcggtgggaccgtggtgacaggttcca

SEQ ID NO: 212698 - DNA, 30 bp, Artificial Sequence
  Synthetic oligonucleotide
agctaccagcctgccagtaggacggttcca

SEQ ID NO: 212699 - DNA, 30 bp, Artificial Sequence
  Synthetic oligonucleotide
tgttattgccctcagggcacacgggttcca

SEQ ID NO: 212700 - DNA, 30 bp, Artificial Sequence
  Synthetic oligonucleotide
attggctccgcactacagcaagatgttcca

SEQ ID NO: 212701 - DNA, 30 bp, Artificial Sequence
  Synthetic oligonucleotide
agaagcttgcgtaaagaatctattgttcca

SEQ ID NO: 212702 - DNA, 30 bp, Artificial Sequence
  Synthetic oligonucleotide
tgagtcgtgaaatgcgtacgtggatttcca

SEQ ID NO: 212703 - DNA, 30 bp, Artificial Sequence
  Synthetic oligonucleotide
acgctcgccttcgaaatatcttgatttcca

SEQ ID NO: 212704 - DNA, 30 bp, Artificial Sequence
  Synthetic oligonucleotide
cgggtaagatggacgtagaatttatttcca

SEQ ID NO: 212705 - DNA, 30 bp, Artificial Sequence
  Synthetic oligonucleotide
ttagtgcctgcaccctaactcgtctttcca

SEQ ID NO: 212706 - DNA, 30 bp, Artificial Sequence
  Synthetic oligonucleotide
gaacatacctataggcggacatcgtttcca

SEQ ID NO: 212707 - DNA, 30 bp, Artificial Sequence
  Synthetic oligonucleotide
ctacagatcgtcggtatacttaggtttcca

SEQ ID NO: 212708 - DNA, 30 bp, Artificial Sequence
  Synthetic oligonucleotide
cgtaactagatcgtggctgaatattttcca

SEQ ID NO: 212709 - DNA, 30 bp, Artificial Sequence
  Synthetic oligonucleotide
tgagcattacggaagcatccatcttttcca

SEQ ID NO: 212710 - DNA, 30 bp, Artificial Sequence
  Synthetic oligonucleotide
tttcgtcgctagacctagccaacaaaagca

SEQ ID NO: 212711 - DNA, 30 bp, Artificial Sequence
  Synthetic oligonucleotide
cttcagcttcactatataagttacaaagca

SEQ ID NO: 212712 - DNA, 30 bp, Artificial Sequence
  Synthetic oligonucleotide
cataatagtaaatgaaatgtctgcaaagca

SEQ ID NO: 212713 - DNA, 30 bp, Artificial Sequence
  Synthetic oligonucleotide
aaacgtagatcttacgtaggccttaaagca

SEQ ID NO: 212714 - DNA, 30 bp, Artificial Sequence
  Synthetic oligonucleotide
caatcggacgtagtagagtgcgaccaagca

SEQ ID NO: 212715 - DNA, 30 bp, Artificial Sequence
  Synthetic oligonucleotide
aggagtttaacaaattgaggtgtgcaagca

SEQ ID NO: 212716 - DNA, 30 bp, Artificial Sequence
  Synthetic oligonucleotide
ctcaagcgcctaaagatgtaccgtcaagca

SEQ ID NO: 212717 - DNA, 30 bp, Artificial Sequence
  Synthetic oligonucleotide
ggtaatagaaacctagcactatgtcaagca

SEQ ID NO: 212718 - DNA, 30 bp, Artificial Sequence
  Synthetic oligonucleotide
caaccgggcgggtctgtttttagggaagca

SEQ ID NO: 212719 - DNA, 30 bp, Artificial Sequence
  Synthetic oligonucleotide
tctatcttagttggtgcgattggggaagca

SEQ ID NO: 212720 - DNA, 30 bp, Artificial Sequence
  Synthetic oligonucleotide
ccaccaaaacactccactctgaatgaagca

SEQ ID NO: 212721 - DNA, 30 bp, Artificial Sequence
  Synthetic oligonucleotide
aagctgggtaatgaggccgaagatgaagca

SEQ ID NO: 212722 - DNA, 30 bp, Artificial Sequence
  Synthetic oligonucleotide
ggcggggtgggcatagtgtcaagataagca

SEQ ID NO: 212723 - DNA, 30 bp, Artificial Sequence
  Synthetic oligonucleotide
tacttaagcgcttcatccgagacgtaagca

SEQ ID NO: 212724 - DNA, 30 bp, Artificial Sequence
  Synthetic oligonucleotide
aaatgtgtagtcagatataccgggtaagca

SEQ ID NO: 212725 - DNA, 30 bp, Artificial Sequence
  Synthetic oligonucleotide
gtgtggaatactattattgggcaaacagca

SEQ ID NO: 212726 - DNA, 30 bp, Artificial Sequence
  Synthetic oligonucleotide
taaactgcatatctaggaattacgacagca

SEQ ID NO: 212727 - DNA, 30 bp, Artificial Sequence
  Synthetic oligonucleotide
cgctggtggtagaaaacttagtctacagca

SEQ ID NO: 212728 - DNA, 30 bp, Artificial Sequence
  Synthetic oligonucleotide
aataccgggcataaggggttagccccagca

SEQ ID NO: 212729 - DNA, 30 bp, Artificial Sequence
  Synthetic oligonucleotide
tagtgtctagcctatgtacgtgtcccagca

SEQ ID NO: 212730 - DNA, 30 bp, Artificial Sequence
  Synthetic oligonucleotide
cacgggccgctttatgaacgggctccagca

SEQ ID NO: 212731 - DNA, 30 bp, Artificial Sequence
  Synthetic oligonucleotide
attaacatgcctttggagacaggtccagca

SEQ ID NO: 212732 - DNA, 30 bp, Artificial Sequence
  Synthetic oligonucleotide
ttgaccgtcggggctgagattgcagcagca

SEQ ID NO: 212733 - DNA, 30 bp, Artificial Sequence
  Synthetic oligonucleotide
gacgcgcgccaggcagcataaggagcagca

SEQ ID NO: 212734 - DNA, 30 bp, Artificial Sequence
  Synthetic oligonucleotide
gtgtagcttgggggtaacgtgcccgcagca

SEQ ID NO: 212735 - DNA, 30 bp, Artificial Sequence
  Synthetic oligonucleotide
ctaggcctaagcgcgtactagagcgcagca

SEQ ID NO: 212736 - DNA, 30 bp, Artificial Sequence
  Synthetic oligonucleotide
ttagtgggcggcccctcctgaagggcagca

SEQ ID NO: 212737 - DNA, 30 bp, Artificial Sequence
  Synthetic oligonucleotide
ccaggtggtgttagtgtggatcgggcagca

SEQ ID NO: 212738 - DNA, 30 bp, Artificial Sequence
  Synthetic oligonucleotide
cgcggtacatatcagtggcgtggtgcagca

SEQ ID NO: 212739 - DNA, 30 bp, Artificial Sequence
  Synthetic oligonucleotide
tcctaaatactggctcacacttgatcagca

SEQ ID NO: 212740 - DNA, 30 bp, Artificial Sequence
  Synthetic oligonucleotide
aaacgacttttgatatgtctcatgtcagca

SEQ ID NO: 212741 - DNA, 30 bp, Artificial Sequence
  Synthetic oligonucleotide
atactaccaaccgctaagttcctttcagca

SEQ ID NO: 212742 - DNA, 30 bp, Artificial Sequence
  Synthetic oligonucleotide
agggttaaaggatcatctcctgcgagagca

SEQ ID NO: 212743 - DNA, 30 bp, Artificial Sequence
  Synthetic oligonucleotide
aggcgttttggctgagtttcaagacgagca

SEQ ID NO: 212744 - DNA, 30 bp, Artificial Sequence
  Synthetic oligonucleotide
taagcagctacaagaattcggttacgagca

SEQ ID NO: 212745 - DNA, 30 bp, Artificial Sequence
  Synthetic oligonucleotide
gcagaaagagattcacaattgtcgcgagca

SEQ ID NO: 212746 - DNA, 30 bp, Artificial Sequence
  Synthetic oligonucleotide
gctgcgttgtcggaaatctccgttcgagca

SEQ ID NO: 212747 - DNA, 30 bp, Artificial Sequence
  Synthetic oligonucleotide
cgataacggcctcaggaagtggcgggagca

SEQ ID NO: 212748 - DNA, 30 bp, Artificial Sequence
  Synthetic oligonucleotide
attaaacacggagacgggagaatgggagca

SEQ ID NO: 212749 - DNA, 30 bp, Artificial Sequence
  Synthetic oligonucleotide
gcccaatccggataaagaccgacctgagca

SEQ ID NO: 212750 - DNA, 30 bp, Artificial Sequence
  Synthetic oligonucleotide
atgcactgatccaccagggagaattgagca

SEQ ID NO: 212751 - DNA, 30 bp, Artificial Sequence
  Synthetic oligonucleotide
aagaatcagacttcttacagccattgagca

SEQ ID NO: 212752 - DNA, 30 bp, Artificial Sequence
  Synthetic oligonucleotide
gatagacgtggtggacgcgggtaaatagca

SEQ ID NO: 212753 - DNA, 30 bp, Artificial Sequence
  Synthetic oligonucleotide
tgctactcgaagtctgtacaggcaatagca

SEQ ID NO: 212754 - DNA, 30 bp, Artificial Sequence
  Synthetic oligonucleotide
gccgtgaggtgttgaagagtttggatagca

SEQ ID NO: 212755 - DNA, 30 bp, Artificial Sequence
  Synthetic oligonucleotide
tagcgcagtcgaccatcacatgatatagca

SEQ ID NO: 212756 - DNA, 30 bp, Artificial Sequence
  Synthetic oligonucleotide
cctgttgacaaagctatatcatgtatagca

SEQ ID NO: 212757 - DNA, 30 bp, Artificial Sequence
  Synthetic oligonucleotide
ctccgcgtgagcgccttcagtgttatagca

SEQ ID NO: 212758 - DNA, 30 bp, Artificial Sequence
  Synthetic oligonucleotide
gaaccgcacacatctttcgcacaactagca

SEQ ID NO: 212759 - DNA, 30 bp, Artificial Sequence
  Synthetic oligonucleotide
gaagctagtcctcgtggatgtaacctagca

SEQ ID NO: 212760 - DNA, 30 bp, Artificial Sequence
  Synthetic oligonucleotide
agttaagacggtgctgccgcgaccctagca

SEQ ID NO: 212761 - DNA, 30 bp, Artificial Sequence
  Synthetic oligonucleotide
aagaccacagtaacatccggggcgctagca

SEQ ID NO: 212762 - DNA, 30 bp, Artificial Sequence
  Synthetic oligonucleotide
gaacactacttgttttatagtcgtctagca

SEQ ID NO: 212763 - DNA, 30 bp, Artificial Sequence
  Synthetic oligonucleotide
taatagccaggttacgtgacttttctagca

SEQ ID NO: 212764 - DNA, 30 bp, Artificial Sequence
  Synthetic oligonucleotide
ccaccacatgtttttgcaagatcagtagca

SEQ ID NO: 212765 - DNA, 30 bp, Artificial Sequence
  Synthetic oligonucleotide
tccgagaaatgagaacgactcagagtagca

SEQ ID NO: 212766 - DNA, 30 bp, Artificial Sequence
  Synthetic oligonucleotide
atcaatcagagaaaccagcagggcgtagca

SEQ ID NO: 212767 - DNA, 30 bp, Artificial Sequence
  Synthetic oligonucleotide
caaacaactccagaaggtccggtcgtagca

SEQ ID NO: 212768 - DNA, 30 bp, Artificial Sequence
  Synthetic oligonucleotide
ggccattcgtcatctccgcctgcggtagca

SEQ ID NO: 212769 - DNA, 30 bp, Artificial Sequence
  Synthetic oligonucleotide
gtatgagcacgactgtctaaaggtgtagca

SEQ ID NO: 212770 - DNA, 30 bp, Artificial Sequence
  Synthetic oligonucleotide
agtccaccctgaaaacaagcacacttagca

SEQ ID NO: 212771 - DNA, 30 bp, Artificial Sequence
  Synthetic oligonucleotide
tatggagccccggactgggttaagttagca

SEQ ID NO: 212772 - DNA, 30 bp, Artificial Sequence
  Synthetic oligonucleotide
tcgctgctatggaaaaagatagggttagca

SEQ ID NO: 212773 - DNA, 30 bp, Artificial Sequence
  Synthetic oligonucleotide
gtacaaaatcaggggcattttgggttagca

SEQ ID NO: 212774 - DNA, 30 bp, Artificial Sequence
  Synthetic oligonucleotide
aacagcataccgcaaggcaattggttagca

SEQ ID NO: 212775 - DNA, 30 bp, Artificial Sequence
  Synthetic oligonucleotide
cgcctatagggctctttgcgtcctttagca

SEQ ID NO: 212776 - DNA, 30 bp, Artificial Sequence
  Synthetic oligonucleotide
tgggcgtaggccggccaaaaggctttagca

SEQ ID NO: 212777 - DNA, 30 bp, Artificial Sequence
  Synthetic oligonucleotide
gtcggaataataatggctcgccgtttagca

SEQ ID NO: 212778 - DNA, 30 bp, Artificial Sequence
  Synthetic oligonucleotide
ccaggttcttctaattcaagaaaaaacgca

SEQ ID NO: 212779 - DNA, 30 bp, Artificial Sequence
  Synthetic oligonucleotide
gtgtattaaggaggtaaatcttcaaacgca

SEQ ID NO: 212780 - DNA, 30 bp, Artificial Sequence
  Synthetic oligonucleotide
ggacggacagttgttactcgtgacaacgca

SEQ ID NO: 212781 - DNA, 30 bp, Artificial Sequence
  Synthetic oligonucleotide
gaatacttaacttcggcaaatttacacgca

SEQ ID NO: 212782 - DNA, 30 bp, Artificial Sequence
  Synthetic oligonucleotide
gcaagatattcgacattgtgggaccacgca

SEQ ID NO: 212783 - DNA, 30 bp, Artificial Sequence
  Synthetic oligonucleotide
tggaagctcattgcggcgcgaagccacgca

SEQ ID NO: 212784 - DNA, 30 bp, Artificial Sequence
  Synthetic oligonucleotide
cgtcggagtctactcgcaagatgccacgca

SEQ ID NO: 212785 - DNA, 30 bp, Artificial Sequence
  Synthetic oligonucleotide
atgataaggactgtacccaataagcacgca

SEQ ID NO: 212786 - DNA, 30 bp, Artificial Sequence
  Synthetic oligonucleotide
atccgggctgctcaagaatccacgcacgca

SEQ ID NO: 212787 - DNA, 30 bp, Artificial Sequence
  Synthetic oligonucleotide
agacttctacatcgagccagtccgcacgca

SEQ ID NO: 212788 - DNA, 30 bp, Artificial Sequence
  Synthetic oligonucleotide
taaggactgggatggtacaccacagacgca

SEQ ID NO: 212789 - DNA, 30 bp, Artificial Sequence
  Synthetic oligonucleotide
gcgtaggcgaagtctgcgtaactagacgca

SEQ ID NO: 212790 - DNA, 30 bp, Artificial Sequence
  Synthetic oligonucleotide
gcagggagctatcgcataacattcgacgca

SEQ ID NO: 212791 - DNA, 30 bp, Artificial Sequence
  Synthetic oligonucleotide
aagcacgggaaagcggcttacggatacgca

SEQ ID NO: 212792 - DNA, 30 bp, Artificial Sequence
  Synthetic oligonucleotide
ctattacaatgaaaggtcttggactacgca

SEQ ID NO: 212793 - DNA, 30 bp, Artificial Sequence
  Synthetic oligonucleotide
ccggccatctttcttgctcacacctacgca

SEQ ID NO: 212794 - DNA, 30 bp, Artificial Sequence
  Synthetic oligonucleotide
acggtaagattactttctaacggctacgca

SEQ ID NO: 212795 - DNA, 30 bp, Artificial Sequence
  Synthetic oligonucleotide
gaggtggctgtgaaggtataaacaaccgca

SEQ ID NO: 212796 - DNA, 30 bp, Artificial Sequence
  Synthetic oligonucleotide
ataaaccaaacttgggttacgaacaccgca

SEQ ID NO: 212797 - DNA, 30 bp, Artificial Sequence
  Synthetic oligonucleotide
cgccaaaatcttaacgcccttaccaccgca

SEQ ID NO: 212798 - DNA, 30 bp, Artificial Sequence
  Synthetic oligonucleotide
cgcagtggtctagccagctgtatcaccgca

SEQ ID NO: 212799 - DNA, 30 bp, Artificial Sequence
  Synthetic oligonucleotide
cgactatcgtgaggggtaccagtgaccgca

SEQ ID NO: 212800 - DNA, 30 bp, Artificial Sequence
  Synthetic oligonucleotide
atctttaccctcccgtcatcgatccccgca

SEQ ID NO: 212801 - DNA, 30 bp, Artificial Sequence
  Synthetic oligonucleotide
atttggctcagggtagtaggatggcccgca

SEQ ID NO: 212802 - DNA, 30 bp, Artificial Sequence
  Synthetic oligonucleotide
ctagcagtagtgccgctggcctatcccgca

SEQ ID NO: 212803 - DNA, 30 bp, Artificial Sequence
  Synthetic oligonucleotide
atacttcccattcaggttgttggtgccgca

SEQ ID NO: 212804 - DNA, 30 bp, Artificial Sequence
  Synthetic oligonucleotide
aacgtagttctataaggccgcattgccgca

SEQ ID NO: 212805 - DNA, 30 bp, Artificial Sequence
  Synthetic oligonucleotide
caacttctgatagcgggagtctaatccgca

SEQ ID NO: 212806 - DNA, 30 bp, Artificial Sequence
  Synthetic oligonucleotide
aatgataaggggcttgtaggcgactccgca

SEQ ID NO: 212807 - DNA, 30 bp, Artificial Sequence
  Synthetic oligonucleotide
gggatgcaaccttggtttattgccagcgca

SEQ ID NO: 212808 - DNA, 30 bp, Artificial Sequence
  Synthetic oligonucleotide
ctcgcgttaaaagaatagggctaacgcgca

SEQ ID NO: 212809 - DNA, 30 bp, Artificial Sequence
  Synthetic oligonucleotide
tggagaggtcattcgtcatctggccgcgca

SEQ ID NO: 212810 - DNA, 30 bp, Artificial Sequence
  Synthetic oligonucleotide
acgttattttgtaaccataaattcggcgca

SEQ ID NO: 212811 - DNA, 30 bp, Artificial Sequence
  Synthetic oligonucleotide
ttcgtttaagcttgcaagagggatggcgca

SEQ ID NO: 212812 - DNA, 30 bp, Artificial Sequence
  Synthetic oligonucleotide
tgcttatcgaatattcatgggcctggcgca

SEQ ID NO: 212813 - DNA, 30 bp, Artificial Sequence
  Synthetic oligonucleotide
tcttatggaatcgtacaatacgaatgcgca

SEQ ID NO: 212814 - DNA, 30 bp, Artificial Sequence
  Synthetic oligonucleotide
gggatctattggcgttgtatcgcatgcgca

SEQ ID NO: 212815 - DNA, 30 bp, Artificial Sequence
  Synthetic oligonucleotide
gatcggcgagggcccgggggcgcctgcgca

SEQ ID NO: 212816 - DNA, 30 bp, Artificial Sequence
  Synthetic oligonucleotide
aagtaggcgggctgttcggatagctgcgca

SEQ ID NO: 212817 - DNA, 30 bp, Artificial Sequence
  Synthetic oligonucleotide
aatctattcgcgactctggactcgtgcgca

SEQ ID NO: 212818 - DNA, 30 bp, Artificial Sequence
  Synthetic oligonucleotide
catctgtgtctagccagacgtggtatcgca

SEQ ID NO: 212819 - DNA, 30 bp, Artificial Sequence
  Synthetic oligonucleotide
ctgtgtagctagatcgtgcgagctctcgca

SEQ ID NO: 212820 - DNA, 30 bp, Artificial Sequence
  Synthetic oligonucleotide
ggtgtagagttttagggtagctctctcgca

SEQ ID NO: 212821 - DNA, 30 bp, Artificial Sequence
  Synthetic oligonucleotide
tagtgagggacaataagcgcgcaagtcgca

SEQ ID NO: 212822 - DNA, 30 bp, Artificial Sequence
  Synthetic oligonucleotide
caaggagccatacttctgtgtaaggtcgca

SEQ ID NO: 212823 - DNA, 30 bp, Artificial Sequence
  Synthetic oligonucleotide
gccaggcgaaactctgctgtcttggtcgca

SEQ ID NO: 212824 - DNA, 30 bp, Artificial Sequence
  Synthetic oligonucleotide
gagaaattatgcaactacggtagattcgca

SEQ ID NO: 212825 - DNA, 30 bp, Artificial Sequence
  Synthetic oligonucleotide
gcggattccatgaatgccgcttacttcgca

SEQ ID NO: 212826 - DNA, 30 bp, Artificial Sequence
  Synthetic oligonucleotide
gtgaatttgagtgtcagccggatgttcgca

SEQ ID NO: 212827 - DNA, 30 bp, Artificial Sequence
  Synthetic oligonucleotide
ttaagtacctggagaacgtcgggtttcgca

SEQ ID NO: 212828 - DNA, 30 bp, Artificial Sequence
  Synthetic oligonucleotide
acaggtcaaaggtttagaatatacaaggca

SEQ ID NO: 212829 - DNA, 30 bp, Artificial Sequence
  Synthetic oligonucleotide
ggaggactaacgctaataccaagtaaggca

SEQ ID NO: 212830 - DNA, 30 bp, Artificial Sequence
  Synthetic oligonucleotide
cgcatgttctagggaatgcactaacaggca

SEQ ID NO: 212831 - DNA, 30 bp, Artificial Sequence
  Synthetic oligonucleotide
catatcgagaggcgcctagactcacaggca

SEQ ID NO: 212832 - DNA, 30 bp, Artificial Sequence
  Synthetic oligonucleotide
gacacgactcttacttcaaatgagcaggca

SEQ ID NO: 212833 - DNA, 30 bp, Artificial Sequence
  Synthetic oligonucleotide
tgtgaggtaaagatcctgcaccgtcaggca

SEQ ID NO: 212834 - DNA, 30 bp, Artificial Sequence
  Synthetic oligonucleotide
gccagggtcaagaccacaaatttcgaggca

SEQ ID NO: 212835 - DNA, 30 bp, Artificial Sequence
  Synthetic oligonucleotide
atgtatgtcgggaactcattttgggaggca

SEQ ID NO: 212836 - DNA, 30 bp, Artificial Sequence
  Synthetic oligonucleotide
agaaaaatacactggcggacatatgaggca

SEQ ID NO: 212837 - DNA, 30 bp, Artificial Sequence
  Synthetic oligonucleotide
gtacaggtataatccgacagtccataggca

SEQ ID NO: 212838 - DNA, 30 bp, Artificial Sequence
  Synthetic oligonucleotide
cctgtggaaacccggggtgcaggataggca

SEQ ID NO: 212839 - DNA, 30 bp, Artificial Sequence
  Synthetic oligonucleotide
gatgatcccagggcgtaaggaccctaggca

SEQ ID NO: 212840 - DNA, 30 bp, Artificial Sequence
  Synthetic oligonucleotide
ttcagtggccggacatccgtgaagtaggca

SEQ ID NO: 212841 - DNA, 30 bp, Artificial Sequence
  Synthetic oligonucleotide
gcgcatggaccgtcacttttaacgtaggca

SEQ ID NO: 212842 - DNA, 30 bp, Artificial Sequence
  Synthetic oligonucleotide
tgaggtacctaagggataagagcttaggca

SEQ ID NO: 212843 - DNA, 30 bp, Artificial Sequence
  Synthetic oligonucleotide
gacacagagaatgcggggagctcttaggca

SEQ ID NO: 212844 - DNA, 30 bp, Artificial Sequence
  Synthetic oligonucleotide
tgctatgacgagcctgtgagaaccacggca

SEQ ID NO: 212845 - DNA, 30 bp, Artificial Sequence
  Synthetic oligonucleotide
ccgattagggccggcagttaggtcacggca

SEQ ID NO: 212846 - DNA, 30 bp, Artificial Sequence
  Synthetic oligonucleotide
gtcttagtgggggaacagtattggacggca

SEQ ID NO: 212847 - DNA, 30 bp, Artificial Sequence
  Synthetic oligonucleotide
ggcacccattgtcgccaaaatcgaccggca

SEQ ID NO: 212848 - DNA, 30 bp, Artificial Sequence
  Synthetic oligonucleotide
tatgccgctcgtactcttgagggaccggca

SEQ ID NO: 212849 - DNA, 30 bp, Artificial Sequence
  Synthetic oligonucleotide
acgatccctaatgcggtctcctcgccggca

SEQ ID NO: 212850 - DNA, 30 bp, Artificial Sequence
  Synthetic oligonucleotide
tgtattgtaggtggctttcgcaatccggca

SEQ ID NO: 212851 - DNA, 30 bp, Artificial Sequence
  Synthetic oligonucleotide
gcttcggctggtcttttgtggagtccggca

SEQ ID NO: 212852 - DNA, 30 bp, Artificial Sequence
  Synthetic oligonucleotide
tgatccggttggctgccctacttagcggca

SEQ ID NO: 212853 - DNA, 30 bp, Artificial Sequence
  Synthetic oligonucleotide
aaacttttaggcgaaagacataacgcggca

SEQ ID NO: 212854 - DNA, 30 bp, Artificial Sequence
  Synthetic oligonucleotide
gatcgtaatgaggcgcccgttcccgcggca

SEQ ID NO: 212855 - DNA, 30 bp, Artificial Sequence
  Synthetic oligonucleotide
gatactagtccttttaggctaggggcggca

SEQ ID NO: 212856 - DNA, 30 bp, Artificial Sequence
  Synthetic oligonucleotide
cctaaaagtgttacttcactacctgcggca

SEQ ID NO: 212857 - DNA, 30 bp, Artificial Sequence
  Synthetic oligonucleotide
gctgccccacctagtccttgcgaatcggca

SEQ ID NO: 212858 - DNA, 30 bp, Artificial Sequence
  Synthetic oligonucleotide
tcaatacagtgtaagctaaaccagtcggca

SEQ ID NO: 212859 - DNA, 30 bp, Artificial Sequence
  Synthetic oligonucleotide
aacctgaggctcttcaaacgccaaagggca

SEQ ID NO: 212860 - DNA, 30 bp, Artificial Sequence
  Synthetic oligonucleotide
gtgatatttgatcgttaggcccacagggca

SEQ ID NO: 212861 - DNA, 30 bp, Artificial Sequence
  Synthetic oligonucleotide
tgcatcactattgggagacaggagagggca

SEQ ID NO: 212862 - DNA, 30 bp, Artificial Sequence
  Synthetic oligonucleotide
gagcccttatcgctgatggggccgagggca

SEQ ID NO: 212863 - DNA, 30 bp, Artificial Sequence
  Synthetic oligonucleotide
gactgaagggattcttaatatcgacgggca

SEQ ID NO: 212864 - DNA, 30 bp, Artificial Sequence
  Synthetic oligonucleotide
ggtcctgatcagccatatgccggacgggca

SEQ ID NO: 212865 - DNA, 30 bp, Artificial Sequence
  Synthetic oligonucleotide
gggaatacgaggatatgttgcgagcgggca

SEQ ID NO: 212866 - DNA, 30 bp, Artificial Sequence
  Synthetic oligonucleotide
gccagaggctagcggtcaggcccgcgggca

SEQ ID NO: 212867 - DNA, 30 bp, Artificial Sequence
  Synthetic oligonucleotide
tgtccgtcactagatctaagtcggcgggca

SEQ ID NO: 212868 - DNA, 30 bp, Artificial Sequence
  Synthetic oligonucleotide
ctgtgtggttacgcgtggtatattcgggca

SEQ ID NO: 212869 - DNA, 30 bp, Artificial Sequence
  Synthetic oligonucleotide
gcgtcaggcaagggactcccgacaggggca

SEQ ID NO: 212870 - DNA, 30 bp, Artificial Sequence
  Synthetic oligonucleotide
agcaaagctatagtgcctaaacaatgggca

SEQ ID NO: 212871 - DNA, 30 bp, Artificial Sequence
  Synthetic oligonucleotide
gacactaactaaattcacacgcaatgggca

SEQ ID NO: 212872 - DNA, 30 bp, Artificial Sequence
  Synthetic oligonucleotide
gaggcttagactcctaaatttgcatgggca

SEQ ID NO: 212873 - DNA, 30 bp, Artificial Sequence
  Synthetic oligonucleotide
cagtgatctgtatggatatgagactgggca

SEQ ID NO: 212874 - DNA, 30 bp, Artificial Sequence
  Synthetic oligonucleotide
acgctacccgccagacgaccggattgggca

SEQ ID NO: 212875 - DNA, 30 bp, Artificial Sequence
  Synthetic oligonucleotide
ttggacctaatctcgctggtagccatggca

SEQ ID NO: 212876 - DNA, 30 bp, Artificial Sequence
  Synthetic oligonucleotide
gaggatcgacagatgtaccgtagcatggca

SEQ ID NO: 212877 - DNA, 30 bp, Artificial Sequence
  Synthetic oligonucleotide
gcagagtgattcctgctgcaggagatggca

SEQ ID NO: 212878 - DNA, 30 bp, Artificial Sequence
  Synthetic oligonucleotide
ttggtcgtccggagaattataaatatggca

SEQ ID NO: 212879 - DNA, 30 bp, Artificial Sequence
  Synthetic oligonucleotide
agtgtggcgctaatgtacccacctatggca

SEQ ID NO: 212880 - DNA, 30 bp, Artificial Sequence
  Synthetic oligonucleotide
agattcggaatggctacatggagactggca

SEQ ID NO: 212881 - DNA, 30 bp, Artificial Sequence
  Synthetic oligonucleotide
gaagttacactggcgtattgcaggctggca

SEQ ID NO: 212882 - DNA, 30 bp, Artificial Sequence
  Synthetic oligonucleotide
gtcgcgagtagtctgcttcacgggctggca

SEQ ID NO: 212883 - DNA, 30 bp, Artificial Sequence
  Synthetic oligonucleotide
ggggcattgaaggggcaccgaacagtggca

SEQ ID NO: 212884 - DNA, 30 bp, Artificial Sequence
  Synthetic oligonucleotide
gtaaagcggtgttttacagcacgagtggca

SEQ ID NO: 212885 - DNA, 30 bp, Artificial Sequence
  Synthetic oligonucleotide
aagtcaagggtagtggccatttccgtggca

SEQ ID NO: 212886 - DNA, 30 bp, Artificial Sequence
  Synthetic oligonucleotide
gctgagccagtggttattgtcaatgtggca

SEQ ID NO: 212887 - DNA, 30 bp, Artificial Sequence
  Synthetic oligonucleotide
atctttgacttggtgatatgtcttgtggca

SEQ ID NO: 212888 - DNA, 31 bp, Artificial Sequence
  Synthetic oligonucleotide
atctggatagtagttcaagaataaattggca

SEQ ID NO: 212889 - DNA, 30 bp, Artificial Sequence
  Synthetic oligonucleotide
ttcatcggaaggcctgtagtgccattggca

SEQ ID NO: 212890 - DNA, 30 bp, Artificial Sequence
  Synthetic oligonucleotide
atcggccgccctaatctaggaagattggca

SEQ ID NO: 212891 - DNA, 30 bp, Artificial Sequence
  Synthetic oligonucleotide
ggaagacagtctctgtaggcggacttggca

SEQ ID NO: 212892 - DNA, 30 bp, Artificial Sequence
  Synthetic oligonucleotide
gattgggggatatatctacagtagttggca

SEQ ID NO: 212893 - DNA, 30 bp, Artificial Sequence
  Synthetic oligonucleotide
cggtactggatacccgtaaactgtttggca

SEQ ID NO: 212894 - DNA, 30 bp, Artificial Sequence
  Synthetic oligonucleotide
tgcgataggaaaagcatcatcgttttggca

SEQ ID NO: 212895 - DNA, 30 bp, Artificial Sequence
  Synthetic oligonucleotide
ggttcaaccttactcacaaagtcaaatgca

SEQ ID NO: 212896 - DNA, 30 bp, Artificial Sequence
  Synthetic oligonucleotide
ctaaatatagtcaaacctctttgaaatgca

SEQ ID NO: 212897 - DNA, 30 bp, Artificial Sequence
  Synthetic oligonucleotide
agcggttccacacttgactaagaacatgca

SEQ ID NO: 212898 - DNA, 30 bp, Artificial Sequence
  Synthetic oligonucleotide
cctcaaccattgtcacatgcggagcatgca

SEQ ID NO: 212899 - DNA, 30 bp, Artificial Sequence
  Synthetic oligonucleotide
tagaagtagttctcagggggccggcatgca

SEQ ID NO: 212900 - DNA, 30 bp, Artificial Sequence
  Synthetic oligonucleotide
atattgagtgggacgtataatatgcatgca

SEQ ID NO: 212901 - DNA, 30 bp, Artificial Sequence
  Synthetic oligonucleotide
aacgcctaggcaaagtctaataatcatgca

SEQ ID NO: 212902 - DNA, 30 bp, Artificial Sequence
  Synthetic oligonucleotide
ccctgagacactcacctctcacttcatgca

SEQ ID NO: 212903 - DNA, 30 bp, Artificial Sequence
  Synthetic oligonucleotide
gccaaggctcagttacatgttcatgatgca

SEQ ID NO: 212904 - DNA, 30 bp, Artificial Sequence
  Synthetic oligonucleotide
gcttactcattctcactgcgtcgatatgca

SEQ ID NO: 212905 - DNA, 30 bp, Artificial Sequence
  Synthetic oligonucleotide
acgtatgtgagagagtatccactatatgca

SEQ ID NO: 212906 - DNA, 30 bp, Artificial Sequence
  Synthetic oligonucleotide
tcggtggacccactggtaagcctctatgca

SEQ ID NO: 212907 - DNA, 30 bp, Artificial Sequence
  Synthetic oligonucleotide
cagcgaaaatagggagttgatttctatgca

SEQ ID NO: 212908 - DNA, 30 bp, Artificial Sequence
  Synthetic oligonucleotide
actttcaaaaacaaataatgggagtatgca

SEQ ID NO: 212909 - DNA, 30 bp, Artificial Sequence
  Synthetic oligonucleotide
gcagggtacgggtgtcatcgtccgtatgca

SEQ ID NO: 212910 - DNA, 30 bp, Artificial Sequence
  Synthetic oligonucleotide
gaacagcggtagacgtagttgcagactgca

SEQ ID NO: 212911 - DNA, 30 bp, Artificial Sequence
  Synthetic oligonucleotide
gtttagattccgttagcgggttagactgca

SEQ ID NO: 212912 - DNA, 30 bp, Artificial Sequence
  Synthetic oligonucleotide
caagcaaaaacagacggaccatcacctgca

SEQ ID NO: 212913 - DNA, 30 bp, Artificial Sequence
  Synthetic oligonucleotide
cgtcaagtaaaccgcacgcaaatacctgca

SEQ ID NO: 212914 - DNA, 30 bp, Artificial Sequence
  Synthetic oligonucleotide
gacagatcttctttgggagaaaagcctgca

SEQ ID NO: 212915 - DNA, 30 bp, Artificial Sequence
  Synthetic oligonucleotide
gcaatttcacctcccaattgccctcctgca

SEQ ID NO: 212916 - DNA, 30 bp, Artificial Sequence
  Synthetic oligonucleotide
cttcagtgaataccggtcctggctcctgca

SEQ ID NO: 212917 - DNA, 30 bp, Artificial Sequence
  Synthetic oligonucleotide
atcagcaatccctggttactcttggctgca

SEQ ID NO: 212918 - DNA, 30 bp, Artificial Sequence
  Synthetic oligonucleotide
agcgacgagcgcgtgttgaacactgctgca

SEQ ID NO: 212919 - DNA, 30 bp, Artificial Sequence
  Synthetic oligonucleotide
cagccaggaaggtaatgatctgttgctgca

SEQ ID NO: 212920 - DNA, 30 bp, Artificial Sequence
  Synthetic oligonucleotide
tacgttgtctattttcgccaaaactctgca

SEQ ID NO: 212921 - DNA, 30 bp, Artificial Sequence
  Synthetic oligonucleotide
ctttaaccctggaagtaccgaacctctgca

SEQ ID NO: 212922 - DNA, 30 bp, Artificial Sequence
  Synthetic oligonucleotide
gggcgcatgtagtcaatgttttagtctgca

SEQ ID NO: 212923 - DNA, 30 bp, Artificial Sequence
  Synthetic oligonucleotide
accggggtagacgaacacagatcttctgca

SEQ ID NO: 212924 - DNA, 30 bp, Artificial Sequence
  Synthetic oligonucleotide
gtcgagagcgtctctccgttgcgttctgca

SEQ ID NO: 212925 - DNA, 30 bp, Artificial Sequence
  Synthetic oligonucleotide
ttgccgagggccagcatccttccaagtgca

SEQ ID NO: 212926 - DNA, 30 bp, Artificial Sequence
  Synthetic oligonucleotide
ttaaacgctgctcgagtagcgttaagtgca

SEQ ID NO: 212927 - DNA, 30 bp, Artificial Sequence
  Synthetic oligonucleotide
gatggagggggagagacgcttcagagtgca

SEQ ID NO: 212928 - DNA, 30 bp, Artificial Sequence
  Synthetic oligonucleotide
acgcggcgaagctttgtcatttatagtgca

SEQ ID NO: 212929 - DNA, 30 bp, Artificial Sequence
  Synthetic oligonucleotide
atgctatagtgatgcaaactatgtagtgca

SEQ ID NO: 212930 - DNA, 30 bp, Artificial Sequence
  Synthetic oligonucleotide
actttaccggctcctagcggaaaacgtgca

SEQ ID NO: 212931 - DNA, 30 bp, Artificial Sequence
  Synthetic oligonucleotide
ggggcctctgacaggggtacttgacgtgca

SEQ ID NO: 212932 - DNA, 30 bp, Artificial Sequence
  Synthetic oligonucleotide
tcattgcaggtcaattccactagccgtgca

SEQ ID NO: 212933 - DNA, 30 bp, Artificial Sequence
  Synthetic oligonucleotide
atcggttctacccaatccggctagcgtgca

SEQ ID NO: 212934 - DNA, 30 bp, Artificial Sequence
  Synthetic oligonucleotide
tgggtagtaagttgcgagttcctgcgtgca

SEQ ID NO: 212935 - DNA, 30 bp, Artificial Sequence
  Synthetic oligonucleotide
aatctataatgctaacagatgtaaggtgca

SEQ ID NO: 212936 - DNA, 30 bp, Artificial Sequence
  Synthetic oligonucleotide
cttgattaaaaagtccagggaataggtgca

SEQ ID NO: 212937 - DNA, 30 bp, Artificial Sequence
  Synthetic oligonucleotide
ccgagagagaaaggtagtggagacggtgca

SEQ ID NO: 212938 - DNA, 30 bp, Artificial Sequence
  Synthetic oligonucleotide
gtattacacttgggatatacagagggtgca

SEQ ID NO: 212939 - DNA, 30 bp, Artificial Sequence
  Synthetic oligonucleotide
cggttcctatgacacggcgaaaatggtgca

SEQ ID NO: 212940 - DNA, 30 bp, Artificial Sequence
  Synthetic oligonucleotide
ttcatggtcagcacagggagttatggtgca

SEQ ID NO: 212941 - DNA, 30 bp, Artificial Sequence
  Synthetic oligonucleotide
aacgaaattatcagtgggccgcaatgtgca

SEQ ID NO: 212942 - DNA, 30 bp, Artificial Sequence
  Synthetic oligonucleotide
cagatacatgagaacctgcacgaatgtgca

SEQ ID NO: 212943 - DNA, 30 bp, Artificial Sequence
  Synthetic oligonucleotide
agccaacctctctagttccgcgcatgtgca

SEQ ID NO: 212944 - DNA, 30 bp, Artificial Sequence
  Synthetic oligonucleotide
ctatacggcagtagagctctcgcgtgtgca

SEQ ID NO: 212945 - DNA, 30 bp, Artificial Sequence
  Synthetic oligonucleotide
gctccggtctactaggcgggagcttgtgca

SEQ ID NO: 212946 - DNA, 30 bp, Artificial Sequence
  Synthetic oligonucleotide
ggtcaacggcgtggcattgggcgttgtgca

SEQ ID NO: 212947 - DNA, 30 bp, Artificial Sequence
  Synthetic oligonucleotide
gcacaaaaaggccgggatcggtacattgca

SEQ ID NO: 212948 - DNA, 30 bp, Artificial Sequence
  Synthetic oligonucleotide
cgcttaaactaagacttttgtggcattgca

SEQ ID NO: 212949 - DNA, 30 bp, Artificial Sequence
  Synthetic oligonucleotide
ttcgacgaacctcgcgatcaggagattgca

SEQ ID NO: 212950 - DNA, 30 bp, Artificial Sequence
  Synthetic oligonucleotide
cctgccgagaataatcaagtgattattgca

SEQ ID NO: 212951 - DNA, 30 bp, Artificial Sequence
  Synthetic oligonucleotide
ccctctcgaaatgccattcccttacttgca

SEQ ID NO: 212952 - DNA, 30 bp, Artificial Sequence
  Synthetic oligonucleotide
gacattagtctcgttttccaccgccttgca

SEQ ID NO: 212953 - DNA, 30 bp, Artificial Sequence
  Synthetic oligonucleotide
tcatcagaggacatgtaaactgtccttgca

SEQ ID NO: 212954 - DNA, 30 bp, Artificial Sequence
  Synthetic oligonucleotide
ggtcgggtaagggtactgaacatcgttgca

SEQ ID NO: 212955 - DNA, 30 bp, Artificial Sequence
  Synthetic oligonucleotide
actgtctagcagtgtctgtccccggttgca

SEQ ID NO: 212956 - DNA, 30 bp, Artificial Sequence
  Synthetic oligonucleotide
gcctagcgtcaagaaatcgaataatttgca

SEQ ID NO: 212957 - DNA, 30 bp, Artificial Sequence
  Synthetic oligonucleotide
atgggatcatcccagcccacatcatttgca

SEQ ID NO: 212958 - DNA, 30 bp, Artificial Sequence
  Synthetic oligonucleotide
tttaaggtgatgttgaagtcgtcctttgca

SEQ ID NO: 212959 - DNA, 30 bp, Artificial Sequence
  Synthetic oligonucleotide
cagaactttatagcgcaatttagaaaatca

SEQ ID NO: 212960 - DNA, 30 bp, Artificial Sequence
  Synthetic oligonucleotide
attatgctccatcaaaggggttgaaaatca

SEQ ID NO: 212961 - DNA, 30 bp, Artificial Sequence
  Synthetic oligonucleotide
tgacgtttcatactatcagcgaacaaatca

SEQ ID NO: 212962 - DNA, 30 bp, Artificial Sequence
  Synthetic oligonucleotide
tgcaagtcaacaatttaatcatagaaatca

SEQ ID NO: 212963 - DNA, 30 bp, Artificial Sequence
  Synthetic oligonucleotide
gaagaagtctaacgattagccaggaaatca

SEQ ID NO: 212964 - DNA, 30 bp, Artificial Sequence
  Synthetic oligonucleotide
acctacggcgtaactacaactaggaaatca

SEQ ID NO: 212965 - DNA, 30 bp, Artificial Sequence
  Synthetic oligonucleotide
actaagaatcagcttagcaattgtaaatca

SEQ ID NO: 212966 - DNA, 30 bp, Artificial Sequence
  Synthetic oligonucleotide
gcctctaccacgggagacacagagcaatca

SEQ ID NO: 212967 - DNA, 30 bp, Artificial Sequence
  Synthetic oligonucleotide
acagggcgacatgtatagatagttcaatca

SEQ ID NO: 212968 - DNA, 30 bp, Artificial Sequence
  Synthetic oligonucleotide
actagcggggtaaacatttaagaagaatca

SEQ ID NO: 212969 - DNA, 30 bp, Artificial Sequence
  Synthetic oligonucleotide
ggataaccttaagcgtagcaagcggaatca

SEQ ID NO: 212970 - DNA, 30 bp, Artificial Sequence
  Synthetic oligonucleotide
tagtcaccctgataagacttacgtgaatca

SEQ ID NO: 212971 - DNA, 30 bp, Artificial Sequence
  Synthetic oligonucleotide
cggattcctgtgtactacaacgaataatca

SEQ ID NO: 212972 - DNA, 30 bp, Artificial Sequence
  Synthetic oligonucleotide
ccacactggtcaagtcgtttgtcataatca

SEQ ID NO: 212973 - DNA, 30 bp, Artificial Sequence
  Synthetic oligonucleotide
taaaaagcttatgtctagaggacctaatca

SEQ ID NO: 212974 - DNA, 30 bp, Artificial Sequence
  Synthetic oligonucleotide
attgtcgaaatatcttcagggccgtaatca

SEQ ID NO: 212975 - DNA, 31 bp, Artificial Sequence
  Synthetic oligonucleotide
cccacatttatctataaaagggaattaatca

SEQ ID NO: 212976 - DNA, 30 bp, Artificial Sequence
  Synthetic oligonucleotide
taagtaggccttaaatcaagacgttaatca

SEQ ID NO: 212977 - DNA, 30 bp, Artificial Sequence
  Synthetic oligonucleotide
taggacagcgctgaatgaaatatttaatca

SEQ ID NO: 212978 - DNA, 30 bp, Artificial Sequence
  Synthetic oligonucleotide
ggcccccgaggccatgtggtcccaacatca

SEQ ID NO: 212979 - DNA, 30 bp, Artificial Sequence
  Synthetic oligonucleotide
atattaatcggtggctggagaagaacatca

SEQ ID NO: 212980 - DNA, 30 bp, Artificial Sequence
  Synthetic oligonucleotide
acggcgctgtactaaaattaccgaacatca

SEQ ID NO: 212981 - DNA, 30 bp, Artificial Sequence
  Synthetic oligonucleotide
gtatttggtgtaaatacggtatgaacatca

SEQ ID NO: 212982 - DNA, 30 bp, Artificial Sequence
  Synthetic oligonucleotide
gtgtgtgcgtgcaaccctcgaataacatca

SEQ ID NO: 212983 - DNA, 30 bp, Artificial Sequence
  Synthetic oligonucleotide
tggaactgttagcagtagcgttccacatca

SEQ ID NO: 212984 - DNA, 30 bp, Artificial Sequence
  Synthetic oligonucleotide
ctagccgtatctccggatcaaatcacatca

SEQ ID NO: 212985 - DNA, 30 bp, Artificial Sequence
  Synthetic oligonucleotide
taacaaccaatcagtccagcatagacatca

SEQ ID NO: 212986 - DNA, 30 bp, Artificial Sequence
  Synthetic oligonucleotide
aacgtgccgaggcatgccctctcgacatca

SEQ ID NO: 212987 - DNA, 30 bp, Artificial Sequence
  Synthetic oligonucleotide
tggtatcggttctcacgcatagggacatca

SEQ ID NO: 212988 - DNA, 30 bp, Artificial Sequence
  Synthetic oligonucleotide
tgagtatgcgggtttcttgtgtggacatca

SEQ ID NO: 212989 - DNA, 30 bp, Artificial Sequence
  Synthetic oligonucleotide
tcgtagagttaggcgtagcgacctacatca

SEQ ID NO: 212990 - DNA, 30 bp, Artificial Sequence
  Synthetic oligonucleotide
accgggagcctgcgatttcccgctacatca

SEQ ID NO: 212991 - DNA, 30 bp, Artificial Sequence
  Synthetic oligonucleotide
atgggacgctgaggcctcatatagccatca

SEQ ID NO: 212992 - DNA, 30 bp, Artificial Sequence
  Synthetic oligonucleotide
tgttatctaacggatactcagtcgccatca

SEQ ID NO: 212993 - DNA, 30 bp, Artificial Sequence
  Synthetic oligonucleotide
agcgcgtccagtgatcggaccgctccatca

SEQ ID NO: 212994 - DNA, 30 bp, Artificial Sequence
  Synthetic oligonucleotide
gccacctccgcaggggtatcggcagcatca

SEQ ID NO: 212995 - DNA, 30 bp, Artificial Sequence
  Synthetic oligonucleotide
gggggaggcgagctaggtttccgagcatca

SEQ ID NO: 212996 - DNA, 30 bp, Artificial Sequence
  Synthetic oligonucleotide
caagtcgggaatttcctgccataggcatca

SEQ ID NO: 212997 - DNA, 30 bp, Artificial Sequence
  Synthetic oligonucleotide
gtcgaacagaccagataatgcccggcatca

SEQ ID NO: 212998 - DNA, 30 bp, Artificial Sequence
  Synthetic oligonucleotide
atgtcgtgttactcagaaacgctggcatca

SEQ ID NO: 212999 - DNA, 30 bp, Artificial Sequence
  Synthetic oligonucleotide
tcctgaaacttacatctggatgcatcatca

SEQ ID NO: 213000 - DNA, 30 bp, Artificial Sequence
  Synthetic oligonucleotide
ggctgttgcggatagacatctgcatcatca

SEQ ID NO: 213001 - DNA, 30 bp, Artificial Sequence
  Synthetic oligonucleotide
tagcacctaagcatagggggtaactcatca

SEQ ID NO: 213002 - DNA, 30 bp, Artificial Sequence
  Synthetic oligonucleotide
acactagctttcagtcacgttgactcatca

SEQ ID NO: 213003 - DNA, 30 bp, Artificial Sequence
  Synthetic oligonucleotide
aacggatagaatgctaagtccacctcatca

SEQ ID NO: 213004 - DNA, 30 bp, Artificial Sequence
  Synthetic oligonucleotide
ccacgaggaagggaggggttgccctcatca

SEQ ID NO: 213005 - DNA, 30 bp, Artificial Sequence
  Synthetic oligonucleotide
gcctcgtttccaagagagatgttttcatca

SEQ ID NO: 213006 - DNA, 30 bp, Artificial Sequence
  Synthetic oligonucleotide
ggatagagataaagtgtaggtaaaagatca

SEQ ID NO: 213007 - DNA, 30 bp, Artificial Sequence
  Synthetic oligonucleotide
attgtcgcttttccctaagcaacaagatca

SEQ ID NO: 213008 - DNA, 30 bp, Artificial Sequence
  Synthetic oligonucleotide
ggatactataggaggcaaatctgaagatca

SEQ ID NO: 213009 - DNA, 30 bp, Artificial Sequence
  Synthetic oligonucleotide
aacgtattttcgcaaggcctcataagatca

SEQ ID NO: 213010 - DNA, 30 bp, Artificial Sequence
  Synthetic oligonucleotide
aacatcacaggaccggttaaaaccagatca

SEQ ID NO: 213011 - DNA, 30 bp, Artificial Sequence
  Synthetic oligonucleotide
taagtttcagcactccatttcaagagatca

SEQ ID NO: 213012 - DNA, 30 bp, Artificial Sequence
  Synthetic oligonucleotide
actccagtaaactcggatacaaggagatca

SEQ ID NO: 213013 - DNA, 30 bp, Artificial Sequence
  Synthetic oligonucleotide
aatagtggccgaatgttgcaagatagatca

SEQ ID NO: 213014 - DNA, 30 bp, Artificial Sequence
  Synthetic oligonucleotide
gctcattctcttagtaacatcattagatca

SEQ ID NO: 213015 - DNA, 30 bp, Artificial Sequence
  Synthetic oligonucleotide
ctgaggtaaaagaatgtccgcatgcgatca

SEQ ID NO: 213016 - DNA, 30 bp, Artificial Sequence
  Synthetic oligonucleotide
gtgcattggcggtaaaaccagttgcgatca

SEQ ID NO: 213017 - DNA, 30 bp, Artificial Sequence
  Synthetic oligonucleotide
cctgagtcatgttcacgtggaagtcgatca

SEQ ID NO: 213018 - DNA, 30 bp, Artificial Sequence
  Synthetic oligonucleotide
ccaaaagaccctagtttagggtcaggatca

SEQ ID NO: 213019 - DNA, 30 bp, Artificial Sequence
  Synthetic oligonucleotide
tccaagtacgccatgtcatcgttaggatca

SEQ ID NO: 213020 - DNA, 30 bp, Artificial Sequence
  Synthetic oligonucleotide
tggcagtcggctgtctcccaacacggatca

SEQ ID NO: 213021 - DNA, 30 bp, Artificial Sequence
  Synthetic oligonucleotide
tcgattcccgaaagtacttgagggggatca

SEQ ID NO: 213022 - DNA, 30 bp, Artificial Sequence
  Synthetic oligonucleotide
tgagtaccgcgcaacgatagattgggatca

SEQ ID NO: 213023 - DNA, 30 bp, Artificial Sequence
  Synthetic oligonucleotide
gggtcaatgggggtatctgactaaatatca

SEQ ID NO: 213024 - DNA, 30 bp, Artificial Sequence
  Synthetic oligonucleotide
cggtgttatgcttccgcaattatcatatca

SEQ ID NO: 213025 - DNA, 30 bp, Artificial Sequence
  Synthetic oligonucleotide
acgagtctcttctggtccatgcggatatca

SEQ ID NO: 213026 - DNA, 30 bp, Artificial Sequence
  Synthetic oligonucleotide
ctcccgcacgccccactgtttgaactatca

SEQ ID NO: 213027 - DNA, 30 bp, Artificial Sequence
  Synthetic oligonucleotide
gtcatgtgatcatgactataattactatca

SEQ ID NO: 213028 - DNA, 30 bp, Artificial Sequence
  Synthetic oligonucleotide
tcccatcggtccaaggcttggaaagtatca

SEQ ID NO: 213029 - DNA, 30 bp, Artificial Sequence
  Synthetic oligonucleotide
agtcccaacgtggaagtcttacgagtatca

SEQ ID NO: 213030 - DNA, 30 bp, Artificial Sequence
  Synthetic oligonucleotide
tccaccatatggtacaccgtcggagtatca

SEQ ID NO: 213031 - DNA, 30 bp, Artificial Sequence
  Synthetic oligonucleotide
atgagtccgtagataccgacgtacgtatca

SEQ ID NO: 213032 - DNA, 30 bp, Artificial Sequence
  Synthetic oligonucleotide
tagtgttaccatgtaccagagcccgtatca

SEQ ID NO: 213033 - DNA, 30 bp, Artificial Sequence
  Synthetic oligonucleotide
gtcccttcgagggttgtctaaccggtatca

SEQ ID NO: 213034 - DNA, 30 bp, Artificial Sequence
  Synthetic oligonucleotide
atacttgccgggagtacgaaggtggtatca

SEQ ID NO: 213035 - DNA, 30 bp, Artificial Sequence
  Synthetic oligonucleotide
acagtcgcaacaacactccaggctgtatca

SEQ ID NO: 213036 - DNA, 30 bp, Artificial Sequence
  Synthetic oligonucleotide
gcgtatatcggggaattttgtcgtgtatca

SEQ ID NO: 213037 - DNA, 30 bp, Artificial Sequence
  Synthetic oligonucleotide
aaggccaggtcaaggtacccatcattatca

SEQ ID NO: 213038 - DNA, 30 bp, Artificial Sequence
  Synthetic oligonucleotide
ctgtaacggatccctcagtaactattatca

SEQ ID NO: 213039 - DNA, 30 bp, Artificial Sequence
  Synthetic oligonucleotide
ggtctaggcacgatttacacccatttatca

SEQ ID NO: 213040 - DNA, 30 bp, Artificial Sequence
  Synthetic oligonucleotide
cacagtcaaatacgaagtacccatttatca

SEQ ID NO: 213041 - DNA, 30 bp, Artificial Sequence
  Synthetic oligonucleotide
caggagcatccattaggcacactaaactca

SEQ ID NO: 213042 - DNA, 30 bp, Artificial Sequence
  Synthetic oligonucleotide
aggattgcattgggaaagcgaggcaactca

SEQ ID NO: 213043 - DNA, 30 bp, Artificial Sequence
  Synthetic oligonucleotide
ggaagccgaaccttcaactagttgaactca

SEQ ID NO: 213044 - DNA, 30 bp, Artificial Sequence
  Synthetic oligonucleotide
gacacgccttacggaacatgcccccactca

SEQ ID NO: 213045 - DNA, 30 bp, Artificial Sequence
  Synthetic oligonucleotide
tcgacactggctaatgagtgggagcactca

SEQ ID NO: 213046 - DNA, 30 bp, Artificial Sequence
  Synthetic oligonucleotide
atcggggctcaatcccaaagaacgcactca

SEQ ID NO: 213047 - DNA, 30 bp, Artificial Sequence
  Synthetic oligonucleotide
tccacacatagtccggtttgaatggactca

SEQ ID NO: 213048 - DNA, 30 bp, Artificial Sequence
  Synthetic oligonucleotide
cggcgtcgcacggattgaggtgatgactca

SEQ ID NO: 213049 - DNA, 30 bp, Artificial Sequence
  Synthetic oligonucleotide
gttacgtaacagttcagacctgtctactca

SEQ ID NO: 213050 - DNA, 30 bp, Artificial Sequence
  Synthetic oligonucleotide
aggacttagtgcctcgaaaatcggtactca

SEQ ID NO: 213051 - DNA, 30 bp, Artificial Sequence
  Synthetic oligonucleotide
ggagggaatatgacaattccatggtactca

SEQ ID NO: 213052 - DNA, 30 bp, Artificial Sequence
  Synthetic oligonucleotide
acaacgggtacaattttgcgaacttactca

SEQ ID NO: 213053 - DNA, 30 bp, Artificial Sequence
  Synthetic oligonucleotide
gaacgcatgcgcccattgctggtttactca

SEQ ID NO: 213054 - DNA, 30 bp, Artificial Sequence
  Synthetic oligonucleotide
tctacacagagacgcgacctcaacacctca

SEQ ID NO: 213055 - DNA, 30 bp, Artificial Sequence
  Synthetic oligonucleotide
ccagatggacacctctcctcaggcacctca

SEQ ID NO: 213056 - DNA, 30 bp, Artificial Sequence
  Synthetic oligonucleotide
gcgggttggccccgatgtcctgatacctca

SEQ ID NO: 213057 - DNA, 30 bp, Artificial Sequence
  Synthetic oligonucleotide
gacgaggtacgagtaactgccgtaccctca

SEQ ID NO: 213058 - DNA, 30 bp, Artificial Sequence
  Synthetic oligonucleotide
aaggatacgattccctataaagacccctca

SEQ ID NO: 213059 - DNA, 30 bp, Artificial Sequence
  Synthetic oligonucleotide
catggttcatcagaaacgggttacccctca

SEQ ID NO: 213060 - DNA, 30 bp, Artificial Sequence
  Synthetic oligonucleotide
ccttagagcgcggattctagtggcccctca

SEQ ID NO: 213061 - DNA, 30 bp, Artificial Sequence
  Synthetic oligonucleotide
aaaatataggcgcagtaaccccaagcctca

SEQ ID NO: 213062 - DNA, 30 bp, Artificial Sequence
  Synthetic oligonucleotide
cattggtcaaatcttagtttttaggcctca

SEQ ID NO: 213063 - DNA, 30 bp, Artificial Sequence
  Synthetic oligonucleotide
cacagaatgggatacgttgtttatgcctca

SEQ ID NO: 213064 - DNA, 30 bp, Artificial Sequence
  Synthetic oligonucleotide
tgctaccagtgggtagcgcccggatcctca

SEQ ID NO: 213065 - DNA, 30 bp, Artificial Sequence
  Synthetic oligonucleotide
tgcattccccggctcgggcggatcagctca

SEQ ID NO: 213066 - DNA, 30 bp, Artificial Sequence
  Synthetic oligonucleotide
aaccttgcgcagggcctcgtgaatagctca

SEQ ID NO: 213067 - DNA, 30 bp, Artificial Sequence
  Synthetic oligonucleotide
gtgccaacgaggatcgggtcgtatagctca

SEQ ID NO: 213068 - DNA, 30 bp, Artificial Sequence
  Synthetic oligonucleotide
accgagatcggactaagataccaacgctca

SEQ ID NO: 213069 - DNA, 30 bp, Artificial Sequence
  Synthetic oligonucleotide
cgcttggtaattatcgtagttcaccgctca

SEQ ID NO: 213070 - DNA, 30 bp, Artificial Sequence
  Synthetic oligonucleotide
tacatacacaattgtgttgtggcgcgctca

SEQ ID NO: 213071 - DNA, 30 bp, Artificial Sequence
  Synthetic oligonucleotide
aagcagcgatgcaatcgttcaaggcgctca

SEQ ID NO: 213072 - DNA, 30 bp, Artificial Sequence
  Synthetic oligonucleotide
agcatgtcgaccctggcgctacaatgctca

SEQ ID NO: 213073 - DNA, 30 bp, Artificial Sequence
  Synthetic oligonucleotide
gacctgccgattagcttactttgctgctca

SEQ ID NO: 213074 - DNA, 30 bp, Artificial Sequence
  Synthetic oligonucleotide
atgtgtaggtagggtctattcccttgctca

SEQ ID NO: 213075 - DNA, 30 bp, Artificial Sequence
  Synthetic oligonucleotide
cgggaatgttcttgaccggtgcaaatctca

SEQ ID NO: 213076 - DNA, 30 bp, Artificial Sequence
  Synthetic oligonucleotide
gccaaggttgggtaaccttatccaatctca

SEQ ID NO: 213077 - DNA, 29 bp, Artificial Sequence
  Synthetic oligonucleotide
cgtcgcagcgcgtctaaatgagcatctca

SEQ ID NO: 213078 - DNA, 30 bp, Artificial Sequence
  Synthetic oligonucleotide
accccaggaggtgagcaaccaacgatctca

SEQ ID NO: 213079 - DNA, 30 bp, Artificial Sequence
  Synthetic oligonucleotide
tagcctcgggctaaaccccgaacgatctca

SEQ ID NO: 213080 - DNA, 30 bp, Artificial Sequence
  Synthetic oligonucleotide
accgcctagcactacggccattcgatctca

SEQ ID NO: 213081 - DNA, 30 bp, Artificial Sequence
  Synthetic oligonucleotide
ctctcgttgtcacaactaagattgatctca

SEQ ID NO: 213082 - DNA, 30 bp, Artificial Sequence
  Synthetic oligonucleotide
acgcctgagttagaatacagaaggctctca

SEQ ID NO: 213083 - DNA, 30 bp, Artificial Sequence
  Synthetic oligonucleotide
gtaggtaatagcactagtagtagagtctca

SEQ ID NO: 213084 - DNA, 30 bp, Artificial Sequence
  Synthetic oligonucleotide
acacgttatgttagcattacgtgagtctca

SEQ ID NO: 213085 - DNA, 30 bp, Artificial Sequence
  Synthetic oligonucleotide
gctgtggaggacagctggcgtaacgtctca

SEQ ID NO: 213086 - DNA, 30 bp, Artificial Sequence
  Synthetic oligonucleotide
tggccctgtagcgtggataccggcgtctca

SEQ ID NO: 213087 - DNA, 30 bp, Artificial Sequence
  Synthetic oligonucleotide
cgagatttctaaaactgacatcctgtctca

SEQ ID NO: 213088 - DNA, 30 bp, Artificial Sequence
  Synthetic oligonucleotide
cgaaaaacgcaactgtcgcatgttgtctca

SEQ ID NO: 213089 - DNA, 30 bp, Artificial Sequence
  Synthetic oligonucleotide
aaagaatacgagcactggttcgccaagtca

SEQ ID NO: 213090 - DNA, 30 bp, Artificial Sequence
  Synthetic oligonucleotide
acactctggtggtgagactcagctaagtca

SEQ ID NO: 213091 - DNA, 30 bp, Artificial Sequence
  Synthetic oligonucleotide
ataacagactcgatcaaacgggctaagtca

SEQ ID NO: 213092 - DNA, 30 bp, Artificial Sequence
  Synthetic oligonucleotide
tgtcataagtttgccgcgatgggtaagtca

SEQ ID NO: 213093 - DNA, 30 bp, Artificial Sequence
  Synthetic oligonucleotide
acttgtcaccccaatacatttacccagtca

SEQ ID NO: 213094 - DNA, 30 bp, Artificial Sequence
  Synthetic oligonucleotide
gcacgattagccccgtcctgcctgcagtca

SEQ ID NO: 213095 - DNA, 30 bp, Artificial Sequence
  Synthetic oligonucleotide
agagactgtaagttcttatacactcagtca

SEQ ID NO: 213096 - DNA, 30 bp, Artificial Sequence
  Synthetic oligonucleotide
tgaccaaaacgctatggtaaacctcagtca

SEQ ID NO: 213097 - DNA, 30 bp, Artificial Sequence
  Synthetic oligonucleotide
ctcagaacgcttagtgcctatgttgagtca

SEQ ID NO: 213098 - DNA, 30 bp, Artificial Sequence
  Synthetic oligonucleotide
accggattggatttaaaccagaactagtca

SEQ ID NO: 213099 - DNA, 30 bp, Artificial Sequence
  Synthetic oligonucleotide
atcggtcaggcattttagattgactagtca

SEQ ID NO: 213100 - DNA, 30 bp, Artificial Sequence
  Synthetic oligonucleotide
tagtggagtgagtttgggctctgctagtca

SEQ ID NO: 213101 - DNA, 30 bp, Artificial Sequence
  Synthetic oligonucleotide
taacccatggagcaatgtgtgtcgtagtca

SEQ ID NO: 213102 - DNA, 30 bp, Artificial Sequence
  Synthetic oligonucleotide
tgtacacagaatccaattaaggggtagtca

SEQ ID NO: 213103 - DNA, 31 bp, Artificial Sequence
  Synthetic oligonucleotide
aggccatcaaatgtggcattggccttagtca

SEQ ID NO: 213104 - DNA, 30 bp, Artificial Sequence
  Synthetic oligonucleotide
gacatagcgtcatgagacattccttagtca

SEQ ID NO: 213105 - DNA, 30 bp, Artificial Sequence
  Synthetic oligonucleotide
gggataacaagtaagtctttagaaacgtca

SEQ ID NO: 213106 - DNA, 30 bp, Artificial Sequence
  Synthetic oligonucleotide
gatacctaggcgtcgaatctataaacgtca

SEQ ID NO: 213107 - DNA, 30 bp, Artificial Sequence
  Synthetic oligonucleotide
gctcgggaattcggaaagttaggcacgtca

SEQ ID NO: 213108 - DNA, 30 bp, Artificial Sequence
  Synthetic oligonucleotide
accaaatggcgtccgttcttgggaccgtca

SEQ ID NO: 213109 - DNA, 30 bp, Artificial Sequence
  Synthetic oligonucleotide
tcatatttgttgagatttgtgacgccgtca

SEQ ID NO: 213110 - DNA, 30 bp, Artificial Sequence
  Synthetic oligonucleotide
ggtattaaccggggcatccggttgccgtca

SEQ ID NO: 213111 - DNA, 30 bp, Artificial Sequence
  Synthetic oligonucleotide
gtcgggtttatccgagaatcaaccgcgtca

SEQ ID NO: 213112 - DNA, 30 bp, Artificial Sequence
  Synthetic oligonucleotide
acgctaaccacacgccgacatgtcgcgtca

SEQ ID NO: 213113 - DNA, 30 bp, Artificial Sequence
  Synthetic oligonucleotide
cacaagacacggctaccctaccaggcgtca

SEQ ID NO: 213114 - DNA, 30 bp, Artificial Sequence
  Synthetic oligonucleotide
ccctttctctattcgctttttcgatcgtca

SEQ ID NO: 213115 - DNA, 30 bp, Artificial Sequence
  Synthetic oligonucleotide
catggtacggcactgggagtggagtcgtca

SEQ ID NO: 213116 - DNA, 30 bp, Artificial Sequence
  Synthetic oligonucleotide
ggagcaatggtgtatcaagtctggtcgtca

SEQ ID NO: 213117 - DNA, 30 bp, Artificial Sequence
  Synthetic oligonucleotide
tccaggcgacgggatgaggtaacttcgtca

SEQ ID NO: 213118 - DNA, 30 bp, Artificial Sequence
  Synthetic oligonucleotide
accacgaagacacaagcaacgcgttcgtca

SEQ ID NO: 213119 - DNA, 30 bp, Artificial Sequence
  Synthetic oligonucleotide
gacttcacagcgtgaggaaagccaaggtca

SEQ ID NO: 213120 - DNA, 30 bp, Artificial Sequence
  Synthetic oligonucleotide
cttttgtcggtaggaactaaacccaggtca

SEQ ID NO: 213121 - DNA, 30 bp, Artificial Sequence
  Synthetic oligonucleotide
tactattgtgacaatcaattgactaggtca

SEQ ID NO: 213122 - DNA, 30 bp, Artificial Sequence
  Synthetic oligonucleotide
cctgaatgcctacctaaatcgggtaggtca

SEQ ID NO: 213123 - DNA, 30 bp, Artificial Sequence
  Synthetic oligonucleotide
gctgttctcaggataattgaaagacggtca

SEQ ID NO: 213124 - DNA, 30 bp, Artificial Sequence
  Synthetic oligonucleotide
gatcctagatccccggagcaatagcggtca

SEQ ID NO: 213125 - DNA, 30 bp, Artificial Sequence
  Synthetic oligonucleotide
aggtccatttatgtgttattctagcggtca

SEQ ID NO: 213126 - DNA, 30 bp, Artificial Sequence
  Synthetic oligonucleotide
acctcgggcgttgactaaaccattcggtca

SEQ ID NO: 213127 - DNA, 30 bp, Artificial Sequence
  Synthetic oligonucleotide
agtctactacttcaccaaaggagagggtca

SEQ ID NO: 213128 - DNA, 29 bp, Artificial Sequence
  Synthetic oligonucleotide
ccccagggtagatgctatcttaggggtca

SEQ ID NO: 213129 - DNA, 30 bp, Artificial Sequence
  Synthetic oligonucleotide
acccagtacctatgagacaaaatggggtca

SEQ ID NO: 213130 - DNA, 30 bp, Artificial Sequence
  Synthetic oligonucleotide
gccgctggcagtaaggatccacctgggtca

SEQ ID NO: 213131 - DNA, 30 bp, Artificial Sequence
  Synthetic oligonucleotide
acaaacgagttaggaggttaagaatggtca

SEQ ID NO: 213132 - DNA, 30 bp, Artificial Sequence
  Synthetic oligonucleotide
gggcatatcagttaacgatttgaatggtca

SEQ ID NO: 213133 - DNA, 30 bp, Artificial Sequence
  Synthetic oligonucleotide
gtacgtagttgcagtaagcggtaatggtca

SEQ ID NO: 213134 - DNA, 30 bp, Artificial Sequence
  Synthetic oligonucleotide
taagcaatctgtcaattcgggagatggtca

SEQ ID NO: 213135 - DNA, 30 bp, Artificial Sequence
  Synthetic oligonucleotide
ccgtgcatattctgggagaacgtatggtca

SEQ ID NO: 213136 - DNA, 30 bp, Artificial Sequence
  Synthetic oligonucleotide
actgcggtatgaacagaagaacggtggtca

SEQ ID NO: 213137 - DNA, 30 bp, Artificial Sequence
  Synthetic oligonucleotide
ccgcactgcatacccccggccaccatgtca

SEQ ID NO: 213138 - DNA, 30 bp, Artificial Sequence
  Synthetic oligonucleotide
gcgccgaggccatggtgactccagatgtca

SEQ ID NO: 213139 - DNA, 30 bp, Artificial Sequence
  Synthetic oligonucleotide
caaattgtttgctcacccgtagagatgtca

SEQ ID NO: 213140 - DNA, 30 bp, Artificial Sequence
  Synthetic oligonucleotide
cacactagtgttctaggtctgggtctgtca

SEQ ID NO: 213141 - DNA, 30 bp, Artificial Sequence
  Synthetic oligonucleotide
ttgctggcccaaccaaagatttacgtgtca

SEQ ID NO: 213142 - DNA, 30 bp, Artificial Sequence
  Synthetic oligonucleotide
aaggccctgaaaacaaaccagttggtgtca

SEQ ID NO: 213143 - DNA, 30 bp, Artificial Sequence
  Synthetic oligonucleotide
ccaaggcatctgaccgagagacatgtgtca

SEQ ID NO: 213144 - DNA, 30 bp, Artificial Sequence
  Synthetic oligonucleotide
agagagatagagagcgctaatgttgtgtca

SEQ ID NO: 213145 - DNA, 30 bp, Artificial Sequence
  Synthetic oligonucleotide
taccgacgggtggatccagagcaattgtca

SEQ ID NO: 213146 - DNA, 30 bp, Artificial Sequence
  Synthetic oligonucleotide
agtcgacgcattcacggtacttgattgtca

SEQ ID NO: 213147 - DNA, 30 bp, Artificial Sequence
  Synthetic oligonucleotide
gcttagtgactacggcaacttttcttgtca

SEQ ID NO: 213148 - DNA, 30 bp, Artificial Sequence
  Synthetic oligonucleotide
atatggtcgcctccgagaacaagcaattca

SEQ ID NO: 213149 - DNA, 30 bp, Artificial Sequence
  Synthetic oligonucleotide
aaaatgaggggagagtcctcccgcaattca

SEQ ID NO: 213150 - DNA, 30 bp, Artificial Sequence
  Synthetic oligonucleotide
tggatccaggcatgcgtaagatataattca

SEQ ID NO: 213151 - DNA, 30 bp, Artificial Sequence
  Synthetic oligonucleotide
ccgtccgccacagactcttcttgtaattca

SEQ ID NO: 213152 - DNA, 30 bp, Artificial Sequence
  Synthetic oligonucleotide
attaacgagtccatgtgctcactccattca

SEQ ID NO: 213153 - DNA, 30 bp, Artificial Sequence
  Synthetic oligonucleotide
gtgcagaggcaaggagttgagtcgcattca

SEQ ID NO: 213154 - DNA, 30 bp, Artificial Sequence
  Synthetic oligonucleotide
tacaaaccgatgacattcgtgtcgcattca

SEQ ID NO: 213155 - DNA, 30 bp, Artificial Sequence
  Synthetic oligonucleotide
aatgaagagcacgttatcaagtgtcattca

SEQ ID NO: 213156 - DNA, 30 bp, Artificial Sequence
  Synthetic oligonucleotide
gacacagagagcgtagacgagtttcattca

SEQ ID NO: 213157 - DNA, 30 bp, Artificial Sequence
  Synthetic oligonucleotide
atgagaccattcagtttctctaaagattca

SEQ ID NO: 213158 - DNA, 30 bp, Artificial Sequence
  Synthetic oligonucleotide
gctgactacccgtggctacattacgattca

SEQ ID NO: 213159 - DNA, 30 bp, Artificial Sequence
  Synthetic oligonucleotide
ggttactggccaagtaatcagagcgattca

SEQ ID NO: 213160 - DNA, 30 bp, Artificial Sequence
  Synthetic oligonucleotide
ggtacgctctcgatattaaattgcgattca

SEQ ID NO: 213161 - DNA, 30 bp, Artificial Sequence
  Synthetic oligonucleotide
ggggatcaaagagcccccatgtcggattca

SEQ ID NO: 213162 - DNA, 30 bp, Artificial Sequence
  Synthetic oligonucleotide
tcaataatgagcctgctgccaggggattca

SEQ ID NO: 213163 - DNA, 30 bp, Artificial Sequence
  Synthetic oligonucleotide
cacattgtcacaacggcgagggggtattca

SEQ ID NO: 213164 - DNA, 30 bp, Artificial Sequence
  Synthetic oligonucleotide
acgtaccatgaatgccaagacggttattca

SEQ ID NO: 213165 - DNA, 30 bp, Artificial Sequence
  Synthetic oligonucleotide
aagaattggggatcataaaacctaacttca

SEQ ID NO: 213166 - DNA, 30 bp, Artificial Sequence
  Synthetic oligonucleotide
acggactgggtacagcgatgggtaacttca

SEQ ID NO: 213167 - DNA, 30 bp, Artificial Sequence
  Synthetic oligonucleotide
ggcttgcttcagattttgatgagcacttca

SEQ ID NO: 213168 - DNA, 30 bp, Artificial Sequence
  Synthetic oligonucleotide
tgagatgggcaatctttttttcgcacttca

SEQ ID NO: 213169 - DNA, 30 bp, Artificial Sequence
  Synthetic oligonucleotide
aacgtacggtcgtataagtcaggcacttca

SEQ ID NO: 213170 - DNA, 30 bp, Artificial Sequence
  Synthetic oligonucleotide
ggcacatatatcggccgggctacgacttca

SEQ ID NO: 213171 - DNA, 30 bp, Artificial Sequence
  Synthetic oligonucleotide
tgaccagagcggcccggcgaggatacttca

SEQ ID NO: 213172 - DNA, 30 bp, Artificial Sequence
  Synthetic oligonucleotide
gtgccgagtacgtcacggacaggtacttca

SEQ ID NO: 213173 - DNA, 30 bp, Artificial Sequence
  Synthetic oligonucleotide
gatagaaataaaggaaaattggaaccttca

SEQ ID NO: 213174 - DNA, 30 bp, Artificial Sequence
  Synthetic oligonucleotide
gtcaacgtgcggattaactagaaagcttca

SEQ ID NO: 213175 - DNA, 30 bp, Artificial Sequence
  Synthetic oligonucleotide
cattcagactggaattaatggcaggcttca

SEQ ID NO: 213176 - DNA, 30 bp, Artificial Sequence
  Synthetic oligonucleotide
agtggtcttcacgatttattgacggcttca

SEQ ID NO: 213177 - DNA, 30 bp, Artificial Sequence
  Synthetic oligonucleotide
gcatatactggtccattgggaacatcttca

SEQ ID NO: 213178 - DNA, 30 bp, Artificial Sequence
  Synthetic oligonucleotide
tttacctaccggtatcaaaagtgatcttca

SEQ ID NO: 213179 - DNA, 30 bp, Artificial Sequence
  Synthetic oligonucleotide
ctgacgagattcaagtgagcccagtcttca

SEQ ID NO: 213180 - DNA, 30 bp, Artificial Sequence
  Synthetic oligonucleotide
gctattaagcggttacttcaacgttcttca

SEQ ID NO: 213181 - DNA, 31 bp, Artificial Sequence
  Synthetic oligonucleotide
gccatgctgggcttcagtcggaaccagttca

SEQ ID NO: 213182 - DNA, 30 bp, Artificial Sequence
  Synthetic oligonucleotide
tttcgttctcggtgctaacagacgagttca

SEQ ID NO: 213183 - DNA, 30 bp, Artificial Sequence
  Synthetic oligonucleotide
catgattactacgaccggatagggagttca

SEQ ID NO: 213184 - DNA, 30 bp, Artificial Sequence
  Synthetic oligonucleotide
atagctagcgtactatcttttgttagttca

SEQ ID NO: 213185 - DNA, 30 bp, Artificial Sequence
  Synthetic oligonucleotide
gaccataaattcggtggggtattacgttca

SEQ ID NO: 213186 - DNA, 30 bp, Artificial Sequence
  Synthetic oligonucleotide
tcacactagcgtatgtcaaacgcaggttca

SEQ ID NO: 213187 - DNA, 30 bp, Artificial Sequence
  Synthetic oligonucleotide
caaccgagagagtgactaggccgaggttca

SEQ ID NO: 213188 - DNA, 30 bp, Artificial Sequence
  Synthetic oligonucleotide
ctgcgataagcggattaggttcgaggttca

SEQ ID NO: 213189 - DNA, 30 bp, Artificial Sequence
  Synthetic oligonucleotide
gtgttgggaggaggccattattgaggttca

SEQ ID NO: 213190 - DNA, 30 bp, Artificial Sequence
  Synthetic oligonucleotide
gtttggagacccatggtagataagggttca

SEQ ID NO: 213191 - DNA, 30 bp, Artificial Sequence
  Synthetic oligonucleotide
ccgataatacgccatcgtgaagtgggttca

SEQ ID NO: 213192 - DNA, 30 bp, Artificial Sequence
  Synthetic oligonucleotide
agttaggttcagggtaaacccggtggttca

SEQ ID NO: 213193 - DNA, 30 bp, Artificial Sequence
  Synthetic oligonucleotide
tatatgtcccaggtatcgtgaagatgttca

SEQ ID NO: 213194 - DNA, 30 bp, Artificial Sequence
  Synthetic oligonucleotide
gtgcacgtgagtttacggatgaactgttca

SEQ ID NO: 213195 - DNA, 30 bp, Artificial Sequence
  Synthetic oligonucleotide
tgggtagccaactggttcaacgtttgttca

SEQ ID NO: 213196 - DNA, 30 bp, Artificial Sequence
  Synthetic oligonucleotide
atgtgactatggtacgattcttgcatttca

SEQ ID NO: 213197 - DNA, 30 bp, Artificial Sequence
  Synthetic oligonucleotide
aatgaaatcgagttgcttggcaagatttca

SEQ ID NO: 213198 - DNA, 30 bp, Artificial Sequence
  Synthetic oligonucleotide
tctatgatcacgaaaatacgtaggatttca

SEQ ID NO: 213199 - DNA, 30 bp, Artificial Sequence
  Synthetic oligonucleotide
ctgacgcgaccagtcgaggattatatttca

SEQ ID NO: 213200 - DNA, 30 bp, Artificial Sequence
  Synthetic oligonucleotide
taggtgacaggtggacacctgtgactttca

SEQ ID NO: 213201 - DNA, 30 bp, Artificial Sequence
  Synthetic oligonucleotide
aggtgtacacccggtggtgaaaacctttca

SEQ ID NO: 213202 - DNA, 30 bp, Artificial Sequence
  Synthetic oligonucleotide
gaaatgagtggacatgtacgacagctttca

SEQ ID NO: 213203 - DNA, 30 bp, Artificial Sequence
  Synthetic oligonucleotide
accaacttcgaaatgaccggatgagtttca

SEQ ID NO: 213204 - DNA, 30 bp, Artificial Sequence
  Synthetic oligonucleotide
aagacaaggcatttcttgcgcaccgtttca

SEQ ID NO: 213205 - DNA, 30 bp, Artificial Sequence
  Synthetic oligonucleotide
aatgtatcgtttactactcatgaggtttca

SEQ ID NO: 213206 - DNA, 30 bp, Artificial Sequence
  Synthetic oligonucleotide
ctcgcagaagtacaacaagttacggtttca

SEQ ID NO: 213207 - DNA, 30 bp, Artificial Sequence
  Synthetic oligonucleotide
cggtaatgccggacaggttaaaatgtttca

SEQ ID NO: 213208 - DNA, 30 bp, Artificial Sequence
  Synthetic oligonucleotide
tgatggtggcctggagctcgaaaattttca

SEQ ID NO: 213209 - DNA, 30 bp, Artificial Sequence
  Synthetic oligonucleotide
cgcatgttagagcatggcaggccgttttca

SEQ ID NO: 213210 - DNA, 30 bp, Artificial Sequence
  Synthetic oligonucleotide
ttcgctaccataaacatatgagggttttca

SEQ ID NO: 213211 - DNA, 30 bp, Artificial Sequence
  Synthetic oligonucleotide
cagcggaacagagtattcctatgcaaaaga

SEQ ID NO: 213212 - DNA, 30 bp, Artificial Sequence
  Synthetic oligonucleotide
gttcagcatccacataccgcgacgaaaaga

SEQ ID NO: 213213 - DNA, 30 bp, Artificial Sequence
  Synthetic oligonucleotide
ccatacgaccggctacatgcagcgaaaaga

SEQ ID NO: 213214 - DNA, 30 bp, Artificial Sequence
  Synthetic oligonucleotide
agtctggccaacctttgcattgtgaaaaga

SEQ ID NO: 213215 - DNA, 30 bp, Artificial Sequence
  Synthetic oligonucleotide
ttaaagaggcggtgtcgctcggcacaaaga

SEQ ID NO: 213216 - DNA, 30 bp, Artificial Sequence
  Synthetic oligonucleotide
gtcaccgacaataacctccttagacaaaga

SEQ ID NO: 213217 - DNA, 30 bp, Artificial Sequence
  Synthetic oligonucleotide
gttcagcggaggacaggggcccgacaaaga

SEQ ID NO: 213218 - DNA, 30 bp, Artificial Sequence
  Synthetic oligonucleotide
gagcatccttagtcagatgtaagccaaaga

SEQ ID NO: 213219 - DNA, 30 bp, Artificial Sequence
  Synthetic oligonucleotide
ccaattagtgcacgttgttgcggccaaaga

SEQ ID NO: 213220 - DNA, 30 bp, Artificial Sequence
  Synthetic oligonucleotide
tggccatagcattccacgggcgtccaaaga

SEQ ID NO: 213221 - DNA, 30 bp, Artificial Sequence
  Synthetic oligonucleotide
agtccgatccgttgtcctcccactcaaaga

SEQ ID NO: 213222 - DNA, 30 bp, Artificial Sequence
  Synthetic oligonucleotide
atgtagatagtttgcgacggtcgtcaaaga

SEQ ID NO: 213223 - DNA, 30 bp, Artificial Sequence
  Synthetic oligonucleotide
gtgacttgggtcatgtttcagtgtcaaaga

SEQ ID NO: 213224 - DNA, 30 bp, Artificial Sequence
  Synthetic oligonucleotide
aaaaaagaaatctgttatatacacgaaaga

SEQ ID NO: 213225 - DNA, 30 bp, Artificial Sequence
  Synthetic oligonucleotide
cacggaccttcaatgaatgtcatcgaaaga

SEQ ID NO: 213226 - DNA, 30 bp, Artificial Sequence
  Synthetic oligonucleotide
gcttcgcaggcgcgtacggcgtcggaaaga

SEQ ID NO: 213227 - DNA, 30 bp, Artificial Sequence
  Synthetic oligonucleotide
tgtgacgcgcgaaagtaacgacctgaaaga

SEQ ID NO: 213228 - DNA, 30 bp, Artificial Sequence
  Synthetic oligonucleotide
gcaacagtattcagctagcgccattaaaga

SEQ ID NO: 213229 - DNA, 30 bp, Artificial Sequence
  Synthetic oligonucleotide
cccacggagaagtacaacaccagttaaaga

SEQ ID NO: 213230 - DNA, 30 bp, Artificial Sequence
  Synthetic oligonucleotide
atgagtcagatcgttcaagcgcaaacaaga

SEQ ID NO: 213231 - DNA, 30 bp, Artificial Sequence
  Synthetic oligonucleotide
gcgaatcaatgttatgaccaaccaacaaga

SEQ ID NO: 213232 - DNA, 30 bp, Artificial Sequence
  Synthetic oligonucleotide
ctcatcaatgtcaataaagaacgaacaaga

SEQ ID NO: 213233 - DNA, 30 bp, Artificial Sequence
  Synthetic oligonucleotide
ataccggatcaatgagctccgcacacaaga

SEQ ID NO: 213234 - DNA, 30 bp, Artificial Sequence
  Synthetic oligonucleotide
ccaaaacggggacactccttccacccaaga

SEQ ID NO: 213235 - DNA, 30 bp, Artificial Sequence
  Synthetic oligonucleotide
ggcgctgcggatctaaatcgcaccccaaga

SEQ ID NO: 213236 - DNA, 30 bp, Artificial Sequence
  Synthetic oligonucleotide
ggcaatgggtgagccaccttattgccaaga

SEQ ID NO: 213237 - DNA, 30 bp, Artificial Sequence
  Synthetic oligonucleotide
gtcgcctgcttctaccagaaggatccaaga

SEQ ID NO: 213238 - DNA, 30 bp, Artificial Sequence
  Synthetic oligonucleotide
aacagcaccccggatctaaagattccaaga

SEQ ID NO: 213239 - DNA, 30 bp, Artificial Sequence
  Synthetic oligonucleotide
attgtctagtgaaggcatgcatttccaaga

SEQ ID NO: 213240 - DNA, 30 bp, Artificial Sequence
  Synthetic oligonucleotide
caaacagtttcagcaaccaatgcagcaaga

SEQ ID NO: 213241 - DNA, 30 bp, Artificial Sequence
  Synthetic oligonucleotide
tggcgcagagaaaggccgtgggctgcaaga

SEQ ID NO: 213242 - DNA, 30 bp, Artificial Sequence
  Synthetic oligonucleotide
ggtatttgtggatagcgtgtttgatcaaga

SEQ ID NO: 213243 - DNA, 30 bp, Artificial Sequence
  Synthetic oligonucleotide
gacctggaggaccgtgcgtctagctcaaga

SEQ ID NO: 213244 - DNA, 30 bp, Artificial Sequence
  Synthetic oligonucleotide
tgagttggggtgcacgatcgaggctcaaga

SEQ ID NO: 213245 - DNA, 30 bp, Artificial Sequence
  Synthetic oligonucleotide
ccgccggattagggccagtgagcgtcaaga

SEQ ID NO: 213246 - DNA, 30 bp, Artificial Sequence
  Synthetic oligonucleotide
gcaccgttttagcggttacaagtaagaaga

SEQ ID NO: 213247 - DNA, 30 bp, Artificial Sequence
  Synthetic oligonucleotide
aaacatgtaccgactgaacttgtaagaaga

SEQ ID NO: 213248 - DNA, 30 bp, Artificial Sequence
  Synthetic oligonucleotide
ggattttgcatcgggacctcacccagaaga

SEQ ID NO: 213249 - DNA, 30 bp, Artificial Sequence
  Synthetic oligonucleotide
aagaatacccatacgagtgtctgtagaaga

SEQ ID NO: 213250 - DNA, 30 bp, Artificial Sequence
  Synthetic oligonucleotide
taggtcgaactgctgctgcgatttagaaga

SEQ ID NO: 213251 - DNA, 30 bp, Artificial Sequence
  Synthetic oligonucleotide
gcactaaccggggtatactcactacgaaga

SEQ ID NO: 213252 - DNA, 30 bp, Artificial Sequence
  Synthetic oligonucleotide
gatcgaagtaaattagtaatacgccgaaga

SEQ ID NO: 213253 - DNA, 30 bp, Artificial Sequence
  Synthetic oligonucleotide
ggggagggcaacaggccaaacatccgaaga

SEQ ID NO: 213254 - DNA, 30 bp, Artificial Sequence
  Synthetic oligonucleotide
gacctcgggtatgacccagatatgcgaaga

SEQ ID NO: 213255 - DNA, 30 bp, Artificial Sequence
  Synthetic oligonucleotide
cctcgtcgatgattcacgaggactcgaaga

SEQ ID NO: 213256 - DNA, 30 bp, Artificial Sequence
  Synthetic oligonucleotide
cacatgcagaaaacccctgtcgtaggaaga

SEQ ID NO: 213257 - DNA, 30 bp, Artificial Sequence
  Synthetic oligonucleotide
acttaaaagcactgcctcggcaacggaaga

SEQ ID NO: 213258 - DNA, 30 bp, Artificial Sequence
  Synthetic oligonucleotide
gggtagtatatgcacagcgttctgggaaga

SEQ ID NO: 213259 - DNA, 30 bp, Artificial Sequence
  Synthetic oligonucleotide
ctatcgacacagcgaatgagaaactgaaga

SEQ ID NO: 213260 - DNA, 30 bp, Artificial Sequence
  Synthetic oligonucleotide
tcggtgcgtaaccccatagtgagttgaaga

SEQ ID NO: 213261 - DNA, 30 bp, Artificial Sequence
  Synthetic oligonucleotide
atgacaatggtctgtaaagtgttttgaaga

SEQ ID NO: 213262 - DNA, 30 bp, Artificial Sequence
  Synthetic oligonucleotide
caattggctcgctcgcctagtacaataaga

SEQ ID NO: 213263 - DNA, 30 bp, Artificial Sequence
  Synthetic oligonucleotide
atagatctaggataccgtaagctcataaga

SEQ ID NO: 213264 - DNA, 30 bp, Artificial Sequence
  Synthetic oligonucleotide
aggtaagatcctgggtacgcgcgtataaga

SEQ ID NO: 213265 - DNA, 30 bp, Artificial Sequence
  Synthetic oligonucleotide
gtggctggcatggcagaacgctgtataaga

SEQ ID NO: 213266 - DNA, 30 bp, Artificial Sequence
  Synthetic oligonucleotide
gcacaagacagaatttatggggttataaga

SEQ ID NO: 213267 - DNA, 30 bp, Artificial Sequence
  Synthetic oligonucleotide
gacttaccctttacttggagactactaaga

SEQ ID NO: 213268 - DNA, 30 bp, Artificial Sequence
  Synthetic oligonucleotide
cctattatgtctcaatttcaggtactaaga

SEQ ID NO: 213269 - DNA, 30 bp, Artificial Sequence
  Synthetic oligonucleotide
tcgcgtgaacgttatactaatggcctaaga

SEQ ID NO: 213270 - DNA, 30 bp, Artificial Sequence
  Synthetic oligonucleotide
cgggctacaggctatctggctgggctaaga

SEQ ID NO: 213271 - DNA, 30 bp, Artificial Sequence
  Synthetic oligonucleotide
tgatcaaaacaagtttcttgctgagtaaga

SEQ ID NO: 213272 - DNA, 30 bp, Artificial Sequence
  Synthetic oligonucleotide
gcgtttgggcctccattcggataggtaaga

SEQ ID NO: 213273 - DNA, 30 bp, Artificial Sequence
  Synthetic oligonucleotide
aactaagtttcgatatgtcttgtggtaaga

SEQ ID NO: 213274 - DNA, 30 bp, Artificial Sequence
  Synthetic oligonucleotide
gaaggctcttacccctctcagaacttaaga

SEQ ID NO: 213275 - DNA, 30 bp, Artificial Sequence
  Synthetic oligonucleotide
gtaataacacttccttcagcgttaaacaga

SEQ ID NO: 213276 - DNA, 30 bp, Artificial Sequence
  Synthetic oligonucleotide
aaatggctaatcccttaaacggtcaacaga

SEQ ID NO: 213277 - DNA, 30 bp, Artificial Sequence
  Synthetic oligonucleotide
ataaccaacgtagtcttaacaatgaacaga

SEQ ID NO: 213278 - DNA, 30 bp, Artificial Sequence
  Synthetic oligonucleotide
tttaagcacggtacggactagactaacaga

SEQ ID NO: 213279 - DNA, 30 bp, Artificial Sequence
  Synthetic oligonucleotide
cctaagctagtggacatgggcgaacacaga

SEQ ID NO: 213280 - DNA, 30 bp, Artificial Sequence
  Synthetic oligonucleotide
tcgatctggatacatttgaagcgacacaga

SEQ ID NO: 213281 - DNA, 30 bp, Artificial Sequence
  Synthetic oligonucleotide
tcctaataaaggcgcttcgcagtacacaga

SEQ ID NO: 213282 - DNA, 30 bp, Artificial Sequence
  Synthetic oligonucleotide
gtaggtgccatttaatggaggattcacaga

SEQ ID NO: 213283 - DNA, 30 bp, Artificial Sequence
  Synthetic oligonucleotide
actggactagaaggtagagatgaagacaga

SEQ ID NO: 213284 - DNA, 30 bp, Artificial Sequence
  Synthetic oligonucleotide
ggcgggacctgtgggtggtattaagacaga

SEQ ID NO: 213285 - DNA, 30 bp, Artificial Sequence
  Synthetic oligonucleotide
attctccgtaagctctccgttaaggacaga

SEQ ID NO: 213286 - DNA, 30 bp, Artificial Sequence
  Synthetic oligonucleotide
aacgctttcacagctaggcgactggacaga

SEQ ID NO: 213287 - DNA, 30 bp, Artificial Sequence
  Synthetic oligonucleotide
ggaatatgctggttgggtttcacatacaga

SEQ ID NO: 213288 - DNA, 30 bp, Artificial Sequence
  Synthetic oligonucleotide
tctcccaacaatgaggaaattcggtacaga

SEQ ID NO: 213289 - DNA, 30 bp, Artificial Sequence
  Synthetic oligonucleotide
caggcttctaatcacgaagctttgtacaga

SEQ ID NO: 213290 - DNA, 30 bp, Artificial Sequence
  Synthetic oligonucleotide
tggaaagtcgatactactctaagaaccaga

SEQ ID NO: 213291 - DNA, 30 bp, Artificial Sequence
  Synthetic oligonucleotide
ttgttgtcgaccgtctgctcaacgaccaga

SEQ ID NO: 213292 - DNA, 30 bp, Artificial Sequence
  Synthetic oligonucleotide
gggcccagccgttaatttacacataccaga

SEQ ID NO: 213293 - DNA, 30 bp, Artificial Sequence
  Synthetic oligonucleotide
agcctctaggagcggagcttcacacccaga

SEQ ID NO: 213294 - DNA, 30 bp, Artificial Sequence
  Synthetic oligonucleotide
cattttggtaagtgtctcgggatacccaga

SEQ ID NO: 213295 - DNA, 30 bp, Artificial Sequence
  Synthetic oligonucleotide
acgaaccgaatagtttagcgttcccccaga

SEQ ID NO: 213296 - DNA, 30 bp, Artificial Sequence
  Synthetic oligonucleotide
aggcatctgctctaaggccggtcgcccaga

SEQ ID NO: 213297 - DNA, 30 bp, Artificial Sequence
  Synthetic oligonucleotide
ctatttggatggggtaaggaggctcccaga

SEQ ID NO: 213298 - DNA, 30 bp, Artificial Sequence
  Synthetic oligonucleotide
gtccgcgaatcgtccctatacgaagccaga

SEQ ID NO: 213299 - DNA, 30 bp, Artificial Sequence
  Synthetic oligonucleotide
ggccaattttaggcgccaggaccagccaga

SEQ ID NO: 213300 - DNA, 30 bp, Artificial Sequence
  Synthetic oligonucleotide
acgggagtttctagttagggccccgccaga

SEQ ID NO: 213301 - DNA, 30 bp, Artificial Sequence
  Synthetic oligonucleotide
ggaagcataaactattcggcttgggccaga

SEQ ID NO: 213302 - DNA, 30 bp, Artificial Sequence
  Synthetic oligonucleotide
ctaggccttagtcatagagcttctgccaga

SEQ ID NO: 213303 - DNA, 30 bp, Artificial Sequence
  Synthetic oligonucleotide
ccctgcaagtgaccagcaggaccgtccaga

SEQ ID NO: 213304 - DNA, 30 bp, Artificial Sequence
  Synthetic oligonucleotide
gcaacatcatactacttgccaaggtccaga

SEQ ID NO: 213305 - DNA, 30 bp, Artificial Sequence
  Synthetic oligonucleotide
ggctatgttgcagtctctctgaggtccaga

SEQ ID NO: 213306 - DNA, 30 bp, Artificial Sequence
  Synthetic oligonucleotide
gagatagaggcggtcagcaatcaaagcaga

SEQ ID NO: 213307 - DNA, 32 bp, Artificial Sequence
  Synthetic oligonucleotide
catataatttttatcaaagtgtgtgaagcaga

SEQ ID NO: 213308 - DNA, 30 bp, Artificial Sequence
  Synthetic oligonucleotide
tagcccatctacaactcaaaagccagcaga

SEQ ID NO: 213309 - DNA, 30 bp, Artificial Sequence
  Synthetic oligonucleotide
gctcatctaatcccgctggtgttgagcaga

SEQ ID NO: 213310 - DNA, 30 bp, Artificial Sequence
  Synthetic oligonucleotide
cgcaaaggccaaagcgttcaggttagcaga

SEQ ID NO: 213311 - DNA, 30 bp, Artificial Sequence
  Synthetic oligonucleotide
cctacaggcagtccggtttttaaccgcaga

SEQ ID NO: 213312 - DNA, 30 bp, Artificial Sequence
  Synthetic oligonucleotide
agaaattacgaacgtctttcctgtcgcaga

SEQ ID NO: 213313 - DNA, 30 bp, Artificial Sequence
  Synthetic oligonucleotide
ccggggtaacttatggggaatcttcgcaga

SEQ ID NO: 213314 - DNA, 30 bp, Artificial Sequence
  Synthetic oligonucleotide
tagggagtcggtaacgactcgaaaggcaga

SEQ ID NO: 213315 - DNA, 30 bp, Artificial Sequence
  Synthetic oligonucleotide
cgtgccgctagtacactggtttcaggcaga

SEQ ID NO: 213316 - DNA, 30 bp, Artificial Sequence
  Synthetic oligonucleotide
ggccggcttgaagcaggaccatctggcaga

SEQ ID NO: 213317 - DNA, 30 bp, Artificial Sequence
  Synthetic oligonucleotide
ttgggacttttcccagtactccaatgcaga

SEQ ID NO: 213318 - DNA, 30 bp, Artificial Sequence
  Synthetic oligonucleotide
tgtccacgttcgggcaatagtttgtgcaga

SEQ ID NO: 213319 - DNA, 30 bp, Artificial Sequence
  Synthetic oligonucleotide
atcatcgaggacccgcgtcacaattgcaga

SEQ ID NO: 213320 - DNA, 30 bp, Artificial Sequence
  Synthetic oligonucleotide
ggtgggttatgaggatcgaactcttgcaga

SEQ ID NO: 213321 - DNA, 30 bp, Artificial Sequence
  Synthetic oligonucleotide
acccgacttcgacctgttgccagttgcaga

SEQ ID NO: 213322 - DNA, 30 bp, Artificial Sequence
  Synthetic oligonucleotide
gatgcgagcctacttgctctaggttgcaga

SEQ ID NO: 213323 - DNA, 30 bp, Artificial Sequence
  Synthetic oligonucleotide
gattacgaatcaggatgctcgggttgcaga

SEQ ID NO: 213324 - DNA, 30 bp, Artificial Sequence
  Synthetic oligonucleotide
catgaatttatattcatgcagtgaatcaga

SEQ ID NO: 213325 - DNA, 30 bp, Artificial Sequence
  Synthetic oligonucleotide
ccgcagctggcttcaagaaattggatcaga

SEQ ID NO: 213326 - DNA, 30 bp, Artificial Sequence
  Synthetic oligonucleotide
taacagtagacttgggcattctatatcaga

SEQ ID NO: 213327 - DNA, 30 bp, Artificial Sequence
  Synthetic oligonucleotide
tggcgagcgaaacctcgcccagaactcaga

SEQ ID NO: 213328 - DNA, 30 bp, Artificial Sequence
  Synthetic oligonucleotide
tattaaggccacgtatcctagtcactcaga

SEQ ID NO: 213329 - DNA, 30 bp, Artificial Sequence
  Synthetic oligonucleotide
gcaaccagcaattctggagcgagtctcaga

SEQ ID NO: 213330 - DNA, 30 bp, Artificial Sequence
  Synthetic oligonucleotide
aacggtagttgcgcaggacattcagtcaga

SEQ ID NO: 213331 - DNA, 30 bp, Artificial Sequence
  Synthetic oligonucleotide
tatctaaaaacgccattttgaagggtcaga

SEQ ID NO: 213332 - DNA, 30 bp, Artificial Sequence
  Synthetic oligonucleotide
cacgcgtaatataaccgagagtgggtcaga

SEQ ID NO: 213333 - DNA, 30 bp, Artificial Sequence
  Synthetic oligonucleotide
ccttcgaggcttattttcaaccatgtcaga

SEQ ID NO: 213334 - DNA, 30 bp, Artificial Sequence
  Synthetic oligonucleotide
cagacacggcagtctaagtagactgtcaga

SEQ ID NO: 213335 - DNA, 30 bp, Artificial Sequence
  Synthetic oligonucleotide
taactgaggtagtcataggcaagtgtcaga

SEQ ID NO: 213336 - DNA, 30 bp, Artificial Sequence
  Synthetic oligonucleotide
tcttgggcggcctaaggtgggagtgtcaga

SEQ ID NO: 213337 - DNA, 30 bp, Artificial Sequence
  Synthetic oligonucleotide
tgtgcacgggtcgatgtatgccttgtcaga

SEQ ID NO: 213338 - DNA, 30 bp, Artificial Sequence
  Synthetic oligonucleotide
actaatcacaaattattccgaatgttcaga

SEQ ID NO: 213339 - DNA, 30 bp, Artificial Sequence
  Synthetic oligonucleotide
gtggcatacggggtattttctatgttcaga

SEQ ID NO: 213340 - DNA, 30 bp, Artificial Sequence
  Synthetic oligonucleotide
caggacttcagccggactgacgatttcaga

SEQ ID NO: 213341 - DNA, 30 bp, Artificial Sequence
  Synthetic oligonucleotide
taagtaacagttgtgttttgggtcaagaga

SEQ ID NO: 213342 - DNA, 30 bp, Artificial Sequence
  Synthetic oligonucleotide
cgcagacgcattgcaatgagcaagaagaga

SEQ ID NO: 213343 - DNA, 30 bp, Artificial Sequence
  Synthetic oligonucleotide
acgattgcggtcgcatgcttctagaagaga

SEQ ID NO: 213344 - DNA, 30 bp, Artificial Sequence
  Synthetic oligonucleotide
cgatagctccacttgaggcatccacagaga

SEQ ID NO: 213345 - DNA, 30 bp, Artificial Sequence
  Synthetic oligonucleotide
ctgttatgtgtccgcaagtaccgacagaga

SEQ ID NO: 213346 - DNA, 30 bp, Artificial Sequence
  Synthetic oligonucleotide
gctcatcgccatcgtaagagtggacagaga

SEQ ID NO: 213347 - DNA, 30 bp, Artificial Sequence
  Synthetic oligonucleotide
gcgtctcaataccgtttaatattacagaga

SEQ ID NO: 213348 - DNA, 30 bp, Artificial Sequence
  Synthetic oligonucleotide
ttagtaaaggtctgaactgctcaccagaga

SEQ ID NO: 213349 - DNA, 30 bp, Artificial Sequence
  Synthetic oligonucleotide
acaagctccttttgcgttctggcccagaga

SEQ ID NO: 213350 - DNA, 30 bp, Artificial Sequence
  Synthetic oligonucleotide
gatgaggtgacgaatttctcgggccagaga

SEQ ID NO: 213351 - DNA, 30 bp, Artificial Sequence
  Synthetic oligonucleotide
atcaaccatactccgctagggcatcagaga

SEQ ID NO: 213352 - DNA, 30 bp, Artificial Sequence
  Synthetic oligonucleotide
tatagcgtaatattggatatgtaagagaga

SEQ ID NO: 213353 - DNA, 30 bp, Artificial Sequence
  Synthetic oligonucleotide
tacatagtgatacttcactacacagagaga

SEQ ID NO: 213354 - DNA, 30 bp, Artificial Sequence
  Synthetic oligonucleotide
tatacactcatctgccatatgttcgagaga

SEQ ID NO: 213355 - DNA, 30 bp, Artificial Sequence
  Synthetic oligonucleotide
agctgagcgggcaataccgaataatagaga

SEQ ID NO: 213356 - DNA, 30 bp, Artificial Sequence
  Synthetic oligonucleotide
ccattaaatgtgggaacgacagactagaga

SEQ ID NO: 213357 - DNA, 30 bp, Artificial Sequence
  Synthetic oligonucleotide
atccatcctcaaaaaactttaagctagaga

SEQ ID NO: 213358 - DNA, 30 bp, Artificial Sequence
  Synthetic oligonucleotide
tataaactgggttgccacaatacgtagaga

SEQ ID NO: 213359 - DNA, 30 bp, Artificial Sequence
  Synthetic oligonucleotide
aagcgatatcgggttgcggattcttagaga

SEQ ID NO: 213360 - DNA, 30 bp, Artificial Sequence
  Synthetic oligonucleotide
caagcagacgtgggcagcttcctaacgaga

SEQ ID NO: 213361 - DNA, 30 bp, Artificial Sequence
  Synthetic oligonucleotide
catcatagtttgtatcattctgggacgaga

SEQ ID NO: 213362 - DNA, 30 bp, Artificial Sequence
  Synthetic oligonucleotide
atacctctctcctaaaaccctcttacgaga

SEQ ID NO: 213363 - DNA, 30 bp, Artificial Sequence
  Synthetic oligonucleotide
gactgggagaggactcccaaaggaccgaga

SEQ ID NO: 213364 - DNA, 30 bp, Artificial Sequence
  Synthetic oligonucleotide
actgagttcgcccgctaaaaggtaccgaga

SEQ ID NO: 213365 - DNA, 30 bp, Artificial Sequence
  Synthetic oligonucleotide
gcgtcgattgcggattctccgcgcccgaga

SEQ ID NO: 213366 - DNA, 30 bp, Artificial Sequence
  Synthetic oligonucleotide
aacaagtccgggcaattttgttacgcgaga

SEQ ID NO: 213367 - DNA, 30 bp, Artificial Sequence
  Synthetic oligonucleotide
gcggacactatcatgcttcgttcggcgaga

SEQ ID NO: 213368 - DNA, 30 bp, Artificial Sequence
  Synthetic oligonucleotide
gagggaacaaagcccatgcccatggcgaga

SEQ ID NO: 213369 - DNA, 30 bp, Artificial Sequence
  Synthetic oligonucleotide
agaaatcattgggatctccatataaggaga

SEQ ID NO: 213370 - DNA, 30 bp, Artificial Sequence
  Synthetic oligonucleotide
gaagaacagtcttggtggcccaccaggaga

SEQ ID NO: 213371 - DNA, 30 bp, Artificial Sequence
  Synthetic oligonucleotide
taaccgctataccagtgactacctaggaga

SEQ ID NO: 213372 - DNA, 30 bp, Artificial Sequence
  Synthetic oligonucleotide
tgttgtaagatcttgcgtatcgggcggaga

SEQ ID NO: 213373 - DNA, 30 bp, Artificial Sequence
  Synthetic oligonucleotide
aagaaggtagagattcttgtgtggcggaga

SEQ ID NO: 213374 - DNA, 30 bp, Artificial Sequence
  Synthetic oligonucleotide
ttcacatgtatttaccatcccgtgcggaga

SEQ ID NO: 213375 - DNA, 30 bp, Artificial Sequence
  Synthetic oligonucleotide
ggacgtcctatggctttgctcctagggaga

SEQ ID NO: 213376 - DNA, 30 bp, Artificial Sequence
  Synthetic oligonucleotide
gtttaagtcagcaataacgatggggggaga

SEQ ID NO: 213377 - DNA, 30 bp, Artificial Sequence
  Synthetic oligonucleotide
cggaagcggatagggttagagaaatggaga

SEQ ID NO: 213378 - DNA, 30 bp, Artificial Sequence
  Synthetic oligonucleotide
gcttacgacgtcgtgggcgacggctggaga

SEQ ID NO: 213379 - DNA, 30 bp, Artificial Sequence
  Synthetic oligonucleotide
tcctagtcctagggcaccggcggaatgaga

SEQ ID NO: 213380 - DNA, 30 bp, Artificial Sequence
  Synthetic oligonucleotide
actgagtgaataatgtgaaggaacatgaga

SEQ ID NO: 213381 - DNA, 30 bp, Artificial Sequence
  Synthetic oligonucleotide
tgtatgacatcttttcaaaaagcgatgaga

SEQ ID NO: 213382 - DNA, 30 bp, Artificial Sequence
  Synthetic oligonucleotide
cgctagcaaaacatgcaaagccgcctgaga

SEQ ID NO: 213383 - DNA, 30 bp, Artificial Sequence
  Synthetic oligonucleotide
attgtttagaacagcacaagactcctgaga

SEQ ID NO: 213384 - DNA, 30 bp, Artificial Sequence
  Synthetic oligonucleotide
agcgatttgatcctcatcgtcctcctgaga

SEQ ID NO: 213385 - DNA, 30 bp, Artificial Sequence
  Synthetic oligonucleotide
gtgagcggagtggtacgtggaaagctgaga

SEQ ID NO: 213386 - DNA, 30 bp, Artificial Sequence
  Synthetic oligonucleotide
agcagtccaaaagttctggcttggctgaga

SEQ ID NO: 213387 - DNA, 30 bp, Artificial Sequence
  Synthetic oligonucleotide
caggtaggaccgcaccttggctatctgaga

SEQ ID NO: 213388 - DNA, 30 bp, Artificial Sequence
  Synthetic oligonucleotide
gcgaccatcgcaaccggacaggacgtgaga

SEQ ID NO: 213389 - DNA, 30 bp, Artificial Sequence
  Synthetic oligonucleotide
gcagccaaggctgtggtgggacacttgaga

SEQ ID NO: 213390 - DNA, 30 bp, Artificial Sequence
  Synthetic oligonucleotide
agccactgccagatcgatatgagcaataga

SEQ ID NO: 213391 - DNA, 30 bp, Artificial Sequence
  Synthetic oligonucleotide
gacaagtccactcaatcaacgaggaataga

SEQ ID NO: 213392 - DNA, 30 bp, Artificial Sequence
  Synthetic oligonucleotide
cattacggtacggctgtaattcgtaataga

SEQ ID NO: 213393 - DNA, 30 bp, Artificial Sequence
  Synthetic oligonucleotide
cacatacggcgttgagacgcgcttaataga

SEQ ID NO: 213394 - DNA, 30 bp, Artificial Sequence
  Synthetic oligonucleotide
agatttatgcctcatgaatactttaataga

SEQ ID NO: 213395 - DNA, 30 bp, Artificial Sequence
  Synthetic oligonucleotide
aatgcctcgtttcgcctggtccaccataga

SEQ ID NO: 213396 - DNA, 30 bp, Artificial Sequence
  Synthetic oligonucleotide
ctatgacaaataggtggaaaattccataga

SEQ ID NO: 213397 - DNA, 30 bp, Artificial Sequence
  Synthetic oligonucleotide
tacccgggcaattagtgctacagtcataga

SEQ ID NO: 213398 - DNA, 30 bp, Artificial Sequence
  Synthetic oligonucleotide
tgtgcaaatgaagtgaaccttgttcataga

SEQ ID NO: 213399 - DNA, 30 bp, Artificial Sequence
  Synthetic oligonucleotide
actttctcgtaacataaagcgaaagataga

SEQ ID NO: 213400 - DNA, 30 bp, Artificial Sequence
  Synthetic oligonucleotide
gaaagaaatgatgctgtatgaccagataga

SEQ ID NO: 213401 - DNA, 30 bp, Artificial Sequence
  Synthetic oligonucleotide
tctacaagatatcgcgtacagctagataga

SEQ ID NO: 213402 - DNA, 30 bp, Artificial Sequence
  Synthetic oligonucleotide
ccttacgtgttacttatcttgatcgataga

SEQ ID NO: 213403 - DNA, 30 bp, Artificial Sequence
  Synthetic oligonucleotide
gccgtgctctcgatagtccgatatgataga

SEQ ID NO: 213404 - DNA, 30 bp, Artificial Sequence
  Synthetic oligonucleotide
accgccaatcacacccaccaaccatataga

SEQ ID NO: 213405 - DNA, 30 bp, Artificial Sequence
  Synthetic oligonucleotide
tctaaccggtggacgacaatggcatataga

SEQ ID NO: 213406 - DNA, 30 bp, Artificial Sequence
  Synthetic oligonucleotide
gggatctaatggatgcaaaggagctataga

SEQ ID NO: 213407 - DNA, 30 bp, Artificial Sequence
  Synthetic oligonucleotide
acattcagtctcaatagcaggcagtataga

SEQ ID NO: 213408 - DNA, 30 bp, Artificial Sequence
  Synthetic oligonucleotide
ctgtgcaggtcccctgcatatcggtataga

SEQ ID NO: 213409 - DNA, 30 bp, Artificial Sequence
  Synthetic oligonucleotide
atactgaccggcaatgtttggctttataga

SEQ ID NO: 213410 - DNA, 30 bp, Artificial Sequence
  Synthetic oligonucleotide
ggatggattaacgtcgtaagcacaactaga

SEQ ID NO: 213411 - DNA, 30 bp, Artificial Sequence
  Synthetic oligonucleotide
aagaatctacatccggggaccctaactaga

SEQ ID NO: 213412 - DNA, 30 bp, Artificial Sequence
  Synthetic oligonucleotide
tgagacgctttgcgttgcagaaatactaga

SEQ ID NO: 213413 - DNA, 30 bp, Artificial Sequence
  Synthetic oligonucleotide
ggtcaatggttcgatcatcatgatactaga

SEQ ID NO: 213414 - DNA, 30 bp, Artificial Sequence
  Synthetic oligonucleotide
catcttaaattcctataagtgactactaga

SEQ ID NO: 213415 - DNA, 29 bp, Artificial Sequence
  Synthetic oligonucleotide
tcgggccccggggcgaaaggaaacctaga

SEQ ID NO: 213416 - DNA, 30 bp, Artificial Sequence
  Synthetic oligonucleotide
ttttacgggaggggggcgcaatgacctaga

SEQ ID NO: 213417 - DNA, 30 bp, Artificial Sequence
  Synthetic oligonucleotide
tggagaccagtaaacccaggtctccctaga

SEQ ID NO: 213418 - DNA, 30 bp, Artificial Sequence
  Synthetic oligonucleotide
attaacgggattaactgaccctagcctaga

SEQ ID NO: 213419 - DNA, 30 bp, Artificial Sequence
  Synthetic oligonucleotide
ccatgtaagcgggcgcgtgccacgcctaga

SEQ ID NO: 213420 - DNA, 30 bp, Artificial Sequence
  Synthetic oligonucleotide
ccattccatatttgccaccgggtgcctaga

SEQ ID NO: 213421 - DNA, 30 bp, Artificial Sequence
  Synthetic oligonucleotide
tcaattgggaggtatcccatgcctcctaga

SEQ ID NO: 213422 - DNA, 30 bp, Artificial Sequence
  Synthetic oligonucleotide
ataagtgttactggtgggggaattcctaga

SEQ ID NO: 213423 - DNA, 30 bp, Artificial Sequence
  Synthetic oligonucleotide
ataggccgaactaggtatgatatagctaga

SEQ ID NO: 213424 - DNA, 30 bp, Artificial Sequence
  Synthetic oligonucleotide
tgattgtggtgcggaaaaactcatgctaga

SEQ ID NO: 213425 - DNA, 30 bp, Artificial Sequence
  Synthetic oligonucleotide
ttactggtacatcaggctacccctgctaga

SEQ ID NO: 213426 - DNA, 30 bp, Artificial Sequence
  Synthetic oligonucleotide
ttcactacatcgcgagagttcagtgctaga

SEQ ID NO: 213427 - DNA, 30 bp, Artificial Sequence
  Synthetic oligonucleotide
tagaaacctctgtacaatttgattgctaga

SEQ ID NO: 213428 - DNA, 30 bp, Artificial Sequence
  Synthetic oligonucleotide
tattacgacacctctggttcacaatctaga

SEQ ID NO: 213429 - DNA, 30 bp, Artificial Sequence
  Synthetic oligonucleotide
tatgtagatatactaaacgtgacatctaga

SEQ ID NO: 213430 - DNA, 30 bp, Artificial Sequence
  Synthetic oligonucleotide
actctcactttgtcagcctagtgctctaga

SEQ ID NO: 213431 - DNA, 30 bp, Artificial Sequence
  Synthetic oligonucleotide
taacaaatccggggccaagcacagtctaga

SEQ ID NO: 213432 - DNA, 30 bp, Artificial Sequence
  Synthetic oligonucleotide
ttacactgtcaagtccaaaattagtctaga

SEQ ID NO: 213433 - DNA, 30 bp, Artificial Sequence
  Synthetic oligonucleotide
taacgtttcctcggccaagattggtctaga

SEQ ID NO: 213434 - DNA, 30 bp, Artificial Sequence
  Synthetic oligonucleotide
gttaggaggaacatcccgataaggagtaga

SEQ ID NO: 213435 - DNA, 30 bp, Artificial Sequence
  Synthetic oligonucleotide
gcagatcggtcccttcctcgatttagtaga

SEQ ID NO: 213436 - DNA, 30 bp, Artificial Sequence
  Synthetic oligonucleotide
caacgattggatcccgatatggaacgtaga

SEQ ID NO: 213437 - DNA, 30 bp, Artificial Sequence
  Synthetic oligonucleotide
agttactcaaacagttcctaacgacgtaga

SEQ ID NO: 213438 - DNA, 30 bp, Artificial Sequence
  Synthetic oligonucleotide
agcagagcccaggccaattgtgtccgtaga

SEQ ID NO: 213439 - DNA, 30 bp, Artificial Sequence
  Synthetic oligonucleotide
tcttaggcaacacaactctcgttgcgtaga

SEQ ID NO: 213440 - DNA, 30 bp, Artificial Sequence
  Synthetic oligonucleotide
ttcccgcgaaatggatagccgaaaggtaga

SEQ ID NO: 213441 - DNA, 30 bp, Artificial Sequence
  Synthetic oligonucleotide
cgattataatgggtagagcacccaggtaga

SEQ ID NO: 213442 - DNA, 30 bp, Artificial Sequence
  Synthetic oligonucleotide
gagcactgaacctttcgatattccggtaga

SEQ ID NO: 213443 - DNA, 30 bp, Artificial Sequence
  Synthetic oligonucleotide
gggaacgtcaaacgactcaggtagggtaga

SEQ ID NO: 213444 - DNA, 30 bp, Artificial Sequence
  Synthetic oligonucleotide
aagcacgtcgtgcactgtctcgggggtaga

SEQ ID NO: 213445 - DNA, 30 bp, Artificial Sequence
  Synthetic oligonucleotide
gtatctggcaatacaataatttaatgtaga

SEQ ID NO: 213446 - DNA, 30 bp, Artificial Sequence
  Synthetic oligonucleotide
atgatttctgtcaccgggagctagtgtaga

SEQ ID NO: 213447 - DNA, 30 bp, Artificial Sequence
  Synthetic oligonucleotide
aggggaagtttgtcggaaaatccgtgtaga

SEQ ID NO: 213448 - DNA, 30 bp, Artificial Sequence
  Synthetic oligonucleotide
aataaagccagcgcgcttgtttggtgtaga

SEQ ID NO: 213449 - DNA, 30 bp, Artificial Sequence
  Synthetic oligonucleotide
ctccatcaccagggcccggtacgaattaga

SEQ ID NO: 213450 - DNA, 30 bp, Artificial Sequence
  Synthetic oligonucleotide
tactcgccacgttggatctcggtaattaga

SEQ ID NO: 213451 - DNA, 30 bp, Artificial Sequence
  Synthetic oligonucleotide
aggtgtagactggtcactgatgtaattaga

SEQ ID NO: 213452 - DNA, 30 bp, Artificial Sequence
  Synthetic oligonucleotide
ggcatcggttaagatcttctggccattaga

SEQ ID NO: 213453 - DNA, 30 bp, Artificial Sequence
  Synthetic oligonucleotide
gggtataagtgtactgcatcccagattaga

SEQ ID NO: 213454 - DNA, 30 bp, Artificial Sequence
  Synthetic oligonucleotide
cctcagattctataatctcgaatccttaga

SEQ ID NO: 213455 - DNA, 30 bp, Artificial Sequence
  Synthetic oligonucleotide
tgttaaatgagagacctagaatcgcttaga

SEQ ID NO: 213456 - DNA, 30 bp, Artificial Sequence
  Synthetic oligonucleotide
caaaacttgagcagttaacgaccagttaga

SEQ ID NO: 213457 - DNA, 29 bp, Artificial Sequence
  Synthetic oligonucleotide
cactgggcatgacttatacctccgttaga

SEQ ID NO: 213458 - DNA, 30 bp, Artificial Sequence
  Synthetic oligonucleotide
cgcttggtgagagtcgcttctatcgttaga

SEQ ID NO: 213459 - DNA, 30 bp, Artificial Sequence
  Synthetic oligonucleotide
tgcttaacttctcagcagggccaggttaga

SEQ ID NO: 213460 - DNA, 30 bp, Artificial Sequence
  Synthetic oligonucleotide
ccgatgcctaatggatctgccgaggttaga

SEQ ID NO: 213461 - DNA, 30 bp, Artificial Sequence
  Synthetic oligonucleotide
aaaagtgcgaaaaacaccaattaggttaga

SEQ ID NO: 213462 - DNA, 30 bp, Artificial Sequence
  Synthetic oligonucleotide
tcgagccgtaccggcagacttcaatttaga

SEQ ID NO: 213463 - DNA, 30 bp, Artificial Sequence
  Synthetic oligonucleotide
atgggcgcgtgttgcgcagtcgtatttaga

SEQ ID NO: 213464 - DNA, 30 bp, Artificial Sequence
  Synthetic oligonucleotide
gggggagtattctgagcgcggggctttaga

SEQ ID NO: 213465 - DNA, 30 bp, Artificial Sequence
  Synthetic oligonucleotide
catgctttaacgtggaccaaagcgtttaga

SEQ ID NO: 213466 - DNA, 30 bp, Artificial Sequence
  Synthetic oligonucleotide
cgtcgtcgcgggtacaaatgcccttttaga

SEQ ID NO: 213467 - DNA, 30 bp, Artificial Sequence
  Synthetic oligonucleotide
ggtctgcaccatatcggggtaaaaaaacga

SEQ ID NO: 213468 - DNA, 30 bp, Artificial Sequence
  Synthetic oligonucleotide
tggaggtgaatgaatttaggattcaaacga

SEQ ID NO: 213469 - DNA, 30 bp, Artificial Sequence
  Synthetic oligonucleotide
cattcctaatctagaactacggctaaacga

SEQ ID NO: 213470 - DNA, 30 bp, Artificial Sequence
  Synthetic oligonucleotide
ttacgaatgagtcgcccctaaacacaacga

SEQ ID NO: 213471 - DNA, 30 bp, Artificial Sequence
  Synthetic oligonucleotide
atcgcgcatcttcaatacatacaccaacga

SEQ ID NO: 213472 - DNA, 30 bp, Artificial Sequence
  Synthetic oligonucleotide
ggctaatattatttatccgatcaagaacga

SEQ ID NO: 213473 - DNA, 30 bp, Artificial Sequence
  Synthetic oligonucleotide
ccttatttccaaagtatggacggagaacga

SEQ ID NO: 213474 - DNA, 30 bp, Artificial Sequence
  Synthetic oligonucleotide
ggccctaatctgcccttgtaaggcgaacga

SEQ ID NO: 213475 - DNA, 30 bp, Artificial Sequence
  Synthetic oligonucleotide
gtagatgttaccgcggaacccggcgaacga

SEQ ID NO: 213476 - DNA, 30 bp, Artificial Sequence
  Synthetic oligonucleotide
acctctacaaagataaagtcactcgaacga

SEQ ID NO: 213477 - DNA, 30 bp, Artificial Sequence
  Synthetic oligonucleotide
atccagcctacccgtggtcctttcgaacga

SEQ ID NO: 213478 - DNA, 30 bp, Artificial Sequence
  Synthetic oligonucleotide
tcgtggaattgtttctgtgacgtggaacga

SEQ ID NO: 213479 - DNA, 30 bp, Artificial Sequence
  Synthetic oligonucleotide
tgaaagcgctaagtgcgcgagaatgaacga

SEQ ID NO: 213480 - DNA, 30 bp, Artificial Sequence
  Synthetic oligonucleotide
caaatcagacctgcacaattatatgaacga

SEQ ID NO: 213481 - DNA, 30 bp, Artificial Sequence
  Synthetic oligonucleotide
tcctgcaaatggagttccccggctgaacga

SEQ ID NO: 213482 - DNA, 30 bp, Artificial Sequence
  Synthetic oligonucleotide
gaatgactcccgggggatacgtctgaacga

SEQ ID NO: 213483 - DNA, 30 bp, Artificial Sequence
  Synthetic oligonucleotide
cgttgaacaaaggcgttaaaacgtgaacga

SEQ ID NO: 213484 - DNA, 30 bp, Artificial Sequence
  Synthetic oligonucleotide
gtaccggggtcattccgcgtacttgaacga

SEQ ID NO: 213485 - DNA, 30 bp, Artificial Sequence
  Synthetic oligonucleotide
acacccctgagacattagataggataacga

SEQ ID NO: 213486 - DNA, 30 bp, Artificial Sequence
  Synthetic oligonucleotide
aaatggtgaccagtctgctgcttataacga

SEQ ID NO: 213487 - DNA, 30 bp, Artificial Sequence
  Synthetic oligonucleotide
ctcacaagtccataacggtgtaagtaacga

SEQ ID NO: 213488 - DNA, 30 bp, Artificial Sequence
  Synthetic oligonucleotide
agattcagaaaggaactggagtgttaacga

SEQ ID NO: 213489 - DNA, 30 bp, Artificial Sequence
  Synthetic oligonucleotide
ccgatgcggtatatggtaaacgtttaacga

SEQ ID NO: 213490 - DNA, 30 bp, Artificial Sequence
  Synthetic oligonucleotide
gacgttccggtgtcaggctgtataacacga

SEQ ID NO: 213491 - DNA, 30 bp, Artificial Sequence
  Synthetic oligonucleotide
tctcttaataaccaccagaatatgacacga

SEQ ID NO: 213492 - DNA, 30 bp, Artificial Sequence
  Synthetic oligonucleotide
taagctcggagaagttcaatgcctacacga

SEQ ID NO: 213493 - DNA, 30 bp, Artificial Sequence
  Synthetic oligonucleotide
caaatagaatgaaagtacaaagtaccacga

SEQ ID NO: 213494 - DNA, 30 bp, Artificial Sequence
  Synthetic oligonucleotide
gataaccgccctccctggaagtgcccacga

SEQ ID NO: 213495 - DNA, 30 bp, Artificial Sequence
  Synthetic oligonucleotide
cctatgagtcgactcggttcaaaagcacga

SEQ ID NO: 213496 - DNA, 30 bp, Artificial Sequence
  Synthetic oligonucleotide
aacgtcagctctgttaatcgataagcacga

SEQ ID NO: 213497 - DNA, 30 bp, Artificial Sequence
  Synthetic oligonucleotide
ataatcgattgtcctcgcatctcagcacga

SEQ ID NO: 213498 - DNA, 30 bp, Artificial Sequence
  Synthetic oligonucleotide
aagccgggttatcgtgaacggagagcacga

SEQ ID NO: 213499 - DNA, 30 bp, Artificial Sequence
  Synthetic oligonucleotide
aaagggccaacttggtcgctatgcgcacga

SEQ ID NO: 213500 - DNA, 30 bp, Artificial Sequence
  Synthetic oligonucleotide
ctacggaaaaatgggactcgggaggcacga

SEQ ID NO: 213501 - DNA, 30 bp, Artificial Sequence
  Synthetic oligonucleotide
tactccatgattgggtacacgagggcacga

SEQ ID NO: 213502 - DNA, 30 bp, Artificial Sequence
  Synthetic oligonucleotide
tacctactcttaagcatgtcgcgtgcacga

SEQ ID NO: 213503 - DNA, 30 bp, Artificial Sequence
  Synthetic oligonucleotide
agttaagggggctgaccggctatatcacga

SEQ ID NO: 213504 - DNA, 30 bp, Artificial Sequence
  Synthetic oligonucleotide
agatgtcgagtaagaggccaattatcacga

SEQ ID NO: 213505 - DNA, 30 bp, Artificial Sequence
  Synthetic oligonucleotide
tcagtaccgccaccgatctatgggtcacga

SEQ ID NO: 213506 - DNA, 30 bp, Artificial Sequence
  Synthetic oligonucleotide
tacagacgtgctgagtggtcgtggtcacga

SEQ ID NO: 213507 - DNA, 30 bp, Artificial Sequence
  Synthetic oligonucleotide
ctgacaattttcgtaagaaaaatgtcacga

SEQ ID NO: 213508 - DNA, 30 bp, Artificial Sequence
  Synthetic oligonucleotide
cgtaggccggctaccccgcatgattcacga

SEQ ID NO: 213509 - DNA, 30 bp, Artificial Sequence
  Synthetic oligonucleotide
attggggcgttagcctggttaacttcacga

SEQ ID NO: 213510 - DNA, 30 bp, Artificial Sequence
  Synthetic oligonucleotide
ccacaatgccaagtcgtggacagaagacga

SEQ ID NO: 213511 - DNA, 30 bp, Artificial Sequence
  Synthetic oligonucleotide
ggaagtgtcccgtactaacggatgagacga

SEQ ID NO: 213512 - DNA, 31 bp, Artificial Sequence
  Synthetic oligonucleotide
acaaaacaggctacttgacacctatagacga

SEQ ID NO: 213513 - DNA, 30 bp, Artificial Sequence
  Synthetic oligonucleotide
gatacaagttactaaagaaggccacgacga

SEQ ID NO: 213514 - DNA, 30 bp, Artificial Sequence
  Synthetic oligonucleotide
acgatatttctgcaattggggtcacgacga

SEQ ID NO: 213515 - DNA, 30 bp, Artificial Sequence
  Synthetic oligonucleotide
atgcaaactccacgaaaaccgggccgacga

SEQ ID NO: 213516 - DNA, 30 bp, Artificial Sequence
  Synthetic oligonucleotide
tctttaattatgtacatgggggatcgacga

SEQ ID NO: 213517 - DNA, 30 bp, Artificial Sequence
  Synthetic oligonucleotide
cgggcgtgatgaatcactgggtcgggacga

SEQ ID NO: 213518 - DNA, 30 bp, Artificial Sequence
  Synthetic oligonucleotide
aaagaacacaggatcgcatacagtggacga

SEQ ID NO: 213519 - DNA, 30 bp, Artificial Sequence
  Synthetic oligonucleotide
tgagtgcttcgttggggttcgcgatgacga

SEQ ID NO: 213520 - DNA, 31 bp, Artificial Sequence
  Synthetic oligonucleotide
gtaaatactaagtgctaaaatagtctgacga

SEQ ID NO: 213521 - DNA, 30 bp, Artificial Sequence
  Synthetic oligonucleotide
catttagaacgcaattggtgtatgtgacga

SEQ ID NO: 213522 - DNA, 30 bp, Artificial Sequence
  Synthetic oligonucleotide
aggtgctcatagaaacccgagctgtgacga

SEQ ID NO: 213523 - DNA, 30 bp, Artificial Sequence
  Synthetic oligonucleotide
aagggtagtcataagcgtattaaaatacga

SEQ ID NO: 213524 - DNA, 30 bp, Artificial Sequence
  Synthetic oligonucleotide
tgctttagccaagaaatttgaacaatacga

SEQ ID NO: 213525 - DNA, 30 bp, Artificial Sequence
  Synthetic oligonucleotide
cctttgacacaccccacggtacgcatacga

SEQ ID NO: 213526 - DNA, 30 bp, Artificial Sequence
  Synthetic oligonucleotide
catacagggtcgtacttaaacgtcatacga

SEQ ID NO: 213527 - DNA, 30 bp, Artificial Sequence
  Synthetic oligonucleotide
cgggtacagcgcctcttcagctatatacga

SEQ ID NO: 213528 - DNA, 30 bp, Artificial Sequence
  Synthetic oligonucleotide
cagggtaaaagtccatcgaaacctatacga

SEQ ID NO: 213529 - DNA, 30 bp, Artificial Sequence
  Synthetic oligonucleotide
agtaaatcagggtaccatatttttatacga

SEQ ID NO: 213530 - DNA, 30 bp, Artificial Sequence
  Synthetic oligonucleotide
tgttctagaagggtgctattactactacga

SEQ ID NO: 213531 - DNA, 30 bp, Artificial Sequence
  Synthetic oligonucleotide
gtgcaaacagctgatagtactcatctacga

SEQ ID NO: 213532 - DNA, 30 bp, Artificial Sequence
  Synthetic oligonucleotide
agtccgccttgtcaggggggaagtctacga

SEQ ID NO: 213533 - DNA, 30 bp, Artificial Sequence
  Synthetic oligonucleotide
tcactcataatgcttactggcccagtacga

SEQ ID NO: 213534 - DNA, 30 bp, Artificial Sequence
  Synthetic oligonucleotide
tcgacgacgctcgggaatggcggagtacga

SEQ ID NO: 213535 - DNA, 30 bp, Artificial Sequence
  Synthetic oligonucleotide
taggtaatgaagcttctcagatgcgtacga

SEQ ID NO: 213536 - DNA, 30 bp, Artificial Sequence
  Synthetic oligonucleotide
cgaaacaactggttcgcccggatcgtacga

SEQ ID NO: 213537 - DNA, 30 bp, Artificial Sequence
  Synthetic oligonucleotide
ggttacttgtagaaccactgagtcgtacga

SEQ ID NO: 213538 - DNA, 30 bp, Artificial Sequence
  Synthetic oligonucleotide
cagtaaagtccaggcaatgcggctgtacga

SEQ ID NO: 213539 - DNA, 30 bp, Artificial Sequence
  Synthetic oligonucleotide
aggggagtaatgcttaccctaaaattacga

SEQ ID NO: 213540 - DNA, 30 bp, Artificial Sequence
  Synthetic oligonucleotide
aagcaaaccatggacttcttacaattacga

SEQ ID NO: 213541 - DNA, 30 bp, Artificial Sequence
  Synthetic oligonucleotide
ggcatctgaattgtctcaggaacattacga

SEQ ID NO: 213542 - DNA, 30 bp, Artificial Sequence
  Synthetic oligonucleotide
acgagtttctgatctcatcgaaagttacga

SEQ ID NO: 213543 - DNA, 30 bp, Artificial Sequence
  Synthetic oligonucleotide
aagaaacggcgaggtggattgagaaaccga

SEQ ID NO: 213544 - DNA, 30 bp, Artificial Sequence
  Synthetic oligonucleotide
ggtgtggtgtagtgtgaggagggcaaccga

SEQ ID NO: 213545 - DNA, 30 bp, Artificial Sequence
  Synthetic oligonucleotide
tcagattccggccaacaatgggagaaccga

SEQ ID NO: 213546 - DNA, 30 bp, Artificial Sequence
  Synthetic oligonucleotide
tctatcatcggcgaagtgtacaggaaccga

SEQ ID NO: 213547 - DNA, 30 bp, Artificial Sequence
  Synthetic oligonucleotide
cggtaactagctcgcgaatatttgaaccga

SEQ ID NO: 213548 - DNA, 30 bp, Artificial Sequence
  Synthetic oligonucleotide
acggatgtagcatcatcagtccataaccga

SEQ ID NO: 213549 - DNA, 30 bp, Artificial Sequence
  Synthetic oligonucleotide
gtataacaaaacttaagtgcgtgccaccga

SEQ ID NO: 213550 - DNA, 30 bp, Artificial Sequence
  Synthetic oligonucleotide
acagcaacctcctggttggtcatgcaccga

SEQ ID NO: 213551 - DNA, 30 bp, Artificial Sequence
  Synthetic oligonucleotide
ccaacctatcccgtgtcgccattagaccga

SEQ ID NO: 213552 - DNA, 30 bp, Artificial Sequence
  Synthetic oligonucleotide
gtgtagctgcgaaacgcatgacacgaccga

SEQ ID NO: 213553 - DNA, 30 bp, Artificial Sequence
  Synthetic oligonucleotide
ctaagctacgttgccgggggtatggaccga

SEQ ID NO: 213554 - DNA, 30 bp, Artificial Sequence
  Synthetic oligonucleotide
gcgtgctggacccctataaaaagttaccga

SEQ ID NO: 213555 - DNA, 30 bp, Artificial Sequence
  Synthetic oligonucleotide
atagggcagcgttctaaggcgtacacccga

SEQ ID NO: 213556 - DNA, 30 bp, Artificial Sequence
  Synthetic oligonucleotide
aataggttagcttggtaaactaagacccga

SEQ ID NO: 213557 - DNA, 30 bp, Artificial Sequence
  Synthetic oligonucleotide
agaaagtagccaataagccttaagacccga

SEQ ID NO: 213558 - DNA, 30 bp, Artificial Sequence
  Synthetic oligonucleotide
ttgtctgtgaactcagaggaacctacccga

SEQ ID NO: 213559 - DNA, 30 bp, Artificial Sequence
  Synthetic oligonucleotide
gacctctggatggaagtcgtgataccccga

SEQ ID NO: 213560 - DNA, 30 bp, Artificial Sequence
  Synthetic oligonucleotide
tggtataccgagttcaattttctagcccga

SEQ ID NO: 213561 - DNA, 30 bp, Artificial Sequence
  Synthetic oligonucleotide
agcgtgaattcgtttgtttggtatgcccga

SEQ ID NO: 213562 - DNA, 30 bp, Artificial Sequence
  Synthetic oligonucleotide
gcatcgaacaggctagtgtaatggtcccga

SEQ ID NO: 213563 - DNA, 30 bp, Artificial Sequence
  Synthetic oligonucleotide
acgagccctgccttaccagcatcttcccga

SEQ ID NO: 213564 - DNA, 30 bp, Artificial Sequence
  Synthetic oligonucleotide
ttaaaagtattagttggcttagcaagccga

SEQ ID NO: 213565 - DNA, 30 bp, Artificial Sequence
  Synthetic oligonucleotide
acagatcccccggacattgggccgcgccga

SEQ ID NO: 213566 - DNA, 30 bp, Artificial Sequence
  Synthetic oligonucleotide
ttaaaaaacggttgggtaggtaatcgccga

SEQ ID NO: 213567 - DNA, 30 bp, Artificial Sequence
  Synthetic oligonucleotide
tatattgtgaggtccaatcagacaggccga

SEQ ID NO: 213568 - DNA, 30 bp, Artificial Sequence
  Synthetic oligonucleotide
tggctaagttacgtacattagtcaggccga

SEQ ID NO: 213569 - DNA, 30 bp, Artificial Sequence
  Synthetic oligonucleotide
tactatcggaaatagtctcggggcggccga

SEQ ID NO: 213570 - DNA, 30 bp, Artificial Sequence
  Synthetic oligonucleotide
ttttgaaactaattgggactgtgtggccga

SEQ ID NO: 213571 - DNA, 30 bp, Artificial Sequence
  Synthetic oligonucleotide
caatccataagataaccggtgtcctgccga

SEQ ID NO: 213572 - DNA, 30 bp, Artificial Sequence
  Synthetic oligonucleotide
agtgggatgccgattcggcatagctgccga

SEQ ID NO: 213573 - DNA, 30 bp, Artificial Sequence
  Synthetic oligonucleotide
aatacccagtatgagtaggcgttctgccga

SEQ ID NO: 213574 - DNA, 30 bp, Artificial Sequence
  Synthetic oligonucleotide
gcatgcacgcttctaatcagctcgtgccga

SEQ ID NO: 213575 - DNA, 30 bp, Artificial Sequence
  Synthetic oligonucleotide
cggaagctggcccggggtacggattgccga

SEQ ID NO: 213576 - DNA, 30 bp, Artificial Sequence
  Synthetic oligonucleotide
gtagttacgtgatgatggctgaaaatccga

SEQ ID NO: 213577 - DNA, 30 bp, Artificial Sequence
  Synthetic oligonucleotide
taagtacaggtttgctcgatccgaatccga

SEQ ID NO: 213578 - DNA, 30 bp, Artificial Sequence
  Synthetic oligonucleotide
gctagggcggtatgtacctcgggcctccga

SEQ ID NO: 213579 - DNA, 30 bp, Artificial Sequence
  Synthetic oligonucleotide
gcgaccgttgtcagagacgtgggcctccga

SEQ ID NO: 213580 - DNA, 30 bp, Artificial Sequence
  Synthetic oligonucleotide
gagtcgggatgcccattatactaggtccga

SEQ ID NO: 213581 - DNA, 30 bp, Artificial Sequence
  Synthetic oligonucleotide
atggccaaaacagtatatttcccggtccga

SEQ ID NO: 213582 - DNA, 30 bp, Artificial Sequence
  Synthetic oligonucleotide
gtagtcgcacaagggagagctcgggtccga

SEQ ID NO: 213583 - DNA, 30 bp, Artificial Sequence
  Synthetic oligonucleotide
tcaaataaaccacaagttttgctggtccga

SEQ ID NO: 213584 - DNA, 30 bp, Artificial Sequence
  Synthetic oligonucleotide
tagttctgcaacagctaaggccgtgtccga

SEQ ID NO: 213585 - DNA, 30 bp, Artificial Sequence
  Synthetic oligonucleotide
gcgtgaatgtgttaattagaaagcttccga

SEQ ID NO: 213586 - DNA, 30 bp, Artificial Sequence
  Synthetic oligonucleotide
ccgaatgccattaatcttgggcatttccga

SEQ ID NO: 213587 - DNA, 30 bp, Artificial Sequence
  Synthetic oligonucleotide
atcggacgttccggaagggctcgtttccga

SEQ ID NO: 213588 - DNA, 30 bp, Artificial Sequence
  Synthetic oligonucleotide
aactatttagatcacgaaggtagaaagcga

SEQ ID NO: 213589 - DNA, 31 bp, Artificial Sequence
  Synthetic oligonucleotide
cagaggtatccacatcgatttcggaaagcga

SEQ ID NO: 213590 - DNA, 30 bp, Artificial Sequence
  Synthetic oligonucleotide
actagttggtctcacatccgtggcaagcga

SEQ ID NO: 213591 - DNA, 30 bp, Artificial Sequence
  Synthetic oligonucleotide
gaccgtgtctccgccaaaaatacgaagcga

SEQ ID NO: 213592 - DNA, 30 bp, Artificial Sequence
  Synthetic oligonucleotide
ggagtgtaattatgcatattgactaagcga

SEQ ID NO: 213593 - DNA, 30 bp, Artificial Sequence
  Synthetic oligonucleotide
agcactgtacagccgggggaatctaagcga

SEQ ID NO: 213594 - DNA, 30 bp, Artificial Sequence
  Synthetic oligonucleotide
gggacacattatgctagggagtgtaagcga

SEQ ID NO: 213595 - DNA, 30 bp, Artificial Sequence
  Synthetic oligonucleotide
atcttgacgtggggtagaataattaagcga

SEQ ID NO: 213596 - DNA, 30 bp, Artificial Sequence
  Synthetic oligonucleotide
agtctacttcgaaacacaccggaccagcga

SEQ ID NO: 213597 - DNA, 30 bp, Artificial Sequence
  Synthetic oligonucleotide
cactcaacacatgagggtgtgcagcagcga

SEQ ID NO: 213598 - DNA, 30 bp, Artificial Sequence
  Synthetic oligonucleotide
accaaatctttagaggcgttgcctcagcga

SEQ ID NO: 213599 - DNA, 30 bp, Artificial Sequence
  Synthetic oligonucleotide
cgcagtgtgccgctttagccgaacgagcga

SEQ ID NO: 213600 - DNA, 30 bp, Artificial Sequence
  Synthetic oligonucleotide
aagtttaagccgtccatgacaaccgagcga

SEQ ID NO: 213601 - DNA, 30 bp, Artificial Sequence
  Synthetic oligonucleotide
aaaagccctaatgttcgatagagcgagcga

SEQ ID NO: 213602 - DNA, 30 bp, Artificial Sequence
  Synthetic oligonucleotide
tgtggtttagtagtagagtgtccggagcga

SEQ ID NO: 213603 - DNA, 30 bp, Artificial Sequence
  Synthetic oligonucleotide
tgtagtcaggaagctatccccatggagcga

SEQ ID NO: 213604 - DNA, 30 bp, Artificial Sequence
  Synthetic oligonucleotide
gcctacaaatgtccagggaattgtgagcga

SEQ ID NO: 213605 - DNA, 30 bp, Artificial Sequence
  Synthetic oligonucleotide
cttacacacgctcgttctggatcatagcga

SEQ ID NO: 213606 - DNA, 30 bp, Artificial Sequence
  Synthetic oligonucleotide
cgaggtctccagatctcaaattgatagcga

SEQ ID NO: 213607 - DNA, 30 bp, Artificial Sequence
  Synthetic oligonucleotide
tctctctcaatgcgattccggatatagcga

SEQ ID NO: 213608 - DNA, 30 bp, Artificial Sequence
  Synthetic oligonucleotide
gacagttctaattcagacctcctatagcga

SEQ ID NO: 213609 - DNA, 30 bp, Artificial Sequence
  Synthetic oligonucleotide
tagtcaaggtccctgaatgggtactagcga

SEQ ID NO: 213610 - DNA, 30 bp, Artificial Sequence
  Synthetic oligonucleotide
tattgatactgaagttcaacaagctagcga

SEQ ID NO: 213611 - DNA, 30 bp, Artificial Sequence
  Synthetic oligonucleotide
aatccccacactataataggagtctagcga

SEQ ID NO: 213612 - DNA, 30 bp, Artificial Sequence
  Synthetic oligonucleotide
gcgggatgagcttattgaacattctagcga

SEQ ID NO: 213613 - DNA, 30 bp, Artificial Sequence
  Synthetic oligonucleotide
tgacgggttccgtattggggacagtagcga

SEQ ID NO: 213614 - DNA, 30 bp, Artificial Sequence
  Synthetic oligonucleotide
tcagcttcgataccgtgcactcagtagcga

SEQ ID NO: 213615 - DNA, 30 bp, Artificial Sequence
  Synthetic oligonucleotide
taacgtacgaaggtcatccgaacgtagcga

SEQ ID NO: 213616 - DNA, 30 bp, Artificial Sequence
  Synthetic oligonucleotide
cccagaacgtttaatgtcatttcgtagcga

SEQ ID NO: 213617 - DNA, 30 bp, Artificial Sequence
  Synthetic oligonucleotide
cagaatactgtcgtattggtcgattagcga

SEQ ID NO: 213618 - DNA, 30 bp, Artificial Sequence
  Synthetic oligonucleotide
tgtctgtaacgtttagatacgtgttagcga

SEQ ID NO: 213619 - DNA, 30 bp, Artificial Sequence
  Synthetic oligonucleotide
agggggtagcgacgaacggtacgaccgcga

SEQ ID NO: 213620 - DNA, 30 bp, Artificial Sequence
  Synthetic oligonucleotide
tcaccatcagccaggatgacgcgtccgcga

SEQ ID NO: 213621 - DNA, 30 bp, Artificial Sequence
  Synthetic oligonucleotide
atcgtgcaaatttgctttagaaaagcgcga

SEQ ID NO: 213622 - DNA, 30 bp, Artificial Sequence
  Synthetic oligonucleotide
gacgaaaggtttgcagaggcgtaagcgcga

SEQ ID NO: 213623 - DNA, 30 bp, Artificial Sequence
  Synthetic oligonucleotide
ataaggcaagccggggcgaacaacgcgcga

SEQ ID NO: 213624 - DNA, 30 bp, Artificial Sequence
  Synthetic oligonucleotide
aggtgtttcttacagagacaagccgcgcga

SEQ ID NO: 213625 - DNA, 30 bp, Artificial Sequence
  Synthetic oligonucleotide
ttgaaccttcacgtacgtatcggatcgcga

SEQ ID NO: 213626 - DNA, 30 bp, Artificial Sequence
  Synthetic oligonucleotide
caaagggtttacgtaacgctgttatcgcga

SEQ ID NO: 213627 - DNA, 30 bp, Artificial Sequence
  Synthetic oligonucleotide
tctgcgtgctaccagcccaccagttcgcga

SEQ ID NO: 213628 - DNA, 30 bp, Artificial Sequence
  Synthetic oligonucleotide
ctaccgcataatgtgatttcgagttcgcga

SEQ ID NO: 213629 - DNA, 30 bp, Artificial Sequence
  Synthetic oligonucleotide
tacccaagttgggactggtacataaggcga

SEQ ID NO: 213630 - DNA, 30 bp, Artificial Sequence
  Synthetic oligonucleotide
cggcgtgagggtcgcgggatgatcaggcga

SEQ ID NO: 213631 - DNA, 30 bp, Artificial Sequence
  Synthetic oligonucleotide
actaagaatcgtccagggttactcaggcga

SEQ ID NO: 213632 - DNA, 30 bp, Artificial Sequence
  Synthetic oligonucleotide
tcggctagaagcttctgtgatatgaggcga

SEQ ID NO: 213633 - DNA, 30 bp, Artificial Sequence
  Synthetic oligonucleotide
acgaataaggtcagtttgcatcgtaggcga

SEQ ID NO: 213634 - DNA, 30 bp, Artificial Sequence
  Synthetic oligonucleotide
ctcgtgtgctgaacgttaagatgtaggcga

SEQ ID NO: 213635 - DNA, 29 bp, Artificial Sequence
  Synthetic oligonucleotide
caaccttccggataggagccaaccggcga

SEQ ID NO: 213636 - DNA, 29 bp, Artificial Sequence
  Synthetic oligonucleotide
ggggatattgttgtccacataagcggcga

SEQ ID NO: 213637 - DNA, 30 bp, Artificial Sequence
  Synthetic oligonucleotide
gcatacatatctgaggatcaggggcggcga

SEQ ID NO: 213638 - DNA, 30 bp, Artificial Sequence
  Synthetic oligonucleotide
gcactatgagttttgttactcggagggcga

SEQ ID NO: 213639 - DNA, 30 bp, Artificial Sequence
  Synthetic oligonucleotide
cgacaaccatgatttgaccgagtggggcga

SEQ ID NO: 213640 - DNA, 30 bp, Artificial Sequence
  Synthetic oligonucleotide
caccataggtcggccatgcccactgggcga

SEQ ID NO: 213641 - DNA, 30 bp, Artificial Sequence
  Synthetic oligonucleotide
gtcgagaaaagcggtggcctagctgggcga

SEQ ID NO: 213642 - DNA, 30 bp, Artificial Sequence
  Synthetic oligonucleotide
cgggatctagtagaatgtattagtgggcga

SEQ ID NO: 213643 - DNA, 30 bp, Artificial Sequence
  Synthetic oligonucleotide
accggtatgtcagtcttttacgttgggcga

SEQ ID NO: 213644 - DNA, 30 bp, Artificial Sequence
  Synthetic oligonucleotide
tggtaagacgctcaggcgttgtggtggcga

SEQ ID NO: 213645 - DNA, 30 bp, Artificial Sequence
  Synthetic oligonucleotide
cgtgagtaatcccgaaacctcgattggcga

SEQ ID NO: 213646 - DNA, 30 bp, Artificial Sequence
  Synthetic oligonucleotide
gtttactgagacaaagggctaccttggcga

SEQ ID NO: 213647 - DNA, 30 bp, Artificial Sequence
  Synthetic oligonucleotide
gaaaagcaacaagagcctaaaagttggcga

SEQ ID NO: 213648 - DNA, 30 bp, Artificial Sequence
  Synthetic oligonucleotide
tcaaccggcaggaatcgaccgaagatgcga

SEQ ID NO: 213649 - DNA, 30 bp, Artificial Sequence
  Synthetic oligonucleotide
gaaactaggaacgtcctttgcacgatgcga

SEQ ID NO: 213650 - DNA, 30 bp, Artificial Sequence
  Synthetic oligonucleotide
aggcgagcagagttgaagtaaagtatgcga

SEQ ID NO: 213651 - DNA, 30 bp, Artificial Sequence
  Synthetic oligonucleotide
tgattgcttattcgggcttcggggctgcga

SEQ ID NO: 213652 - DNA, 30 bp, Artificial Sequence
  Synthetic oligonucleotide
catgaggtgccacgcgtgagcgtagtgcga

SEQ ID NO: 213653 - DNA, 30 bp, Artificial Sequence
  Synthetic oligonucleotide
gcacaacgttttagcctcgtcagggtgcga

SEQ ID NO: 213654 - DNA, 30 bp, Artificial Sequence
  Synthetic oligonucleotide
ccccttgagctgggctataggggggtgcga

SEQ ID NO: 213655 - DNA, 30 bp, Artificial Sequence
  Synthetic oligonucleotide
tcgcgtgtcgtgaaacttggacgattgcga

SEQ ID NO: 213656 - DNA, 30 bp, Artificial Sequence
  Synthetic oligonucleotide
gaactgggccaagtatgcgccctattgcga

SEQ ID NO: 213657 - DNA, 30 bp, Artificial Sequence
  Synthetic oligonucleotide
atcctcactagttctaacgtctacttgcga

SEQ ID NO: 213658 - DNA, 30 bp, Artificial Sequence
  Synthetic oligonucleotide
taatcgagcgggcccacggctgccttgcga

SEQ ID NO: 213659 - DNA, 30 bp, Artificial Sequence
  Synthetic oligonucleotide
atgtggtcacacgatacgggagagttgcga

SEQ ID NO: 213660 - DNA, 30 bp, Artificial Sequence
  Synthetic oligonucleotide
ataggaaagtcgtagcagtgaatgttgcga

SEQ ID NO: 213661 - DNA, 30 bp, Artificial Sequence
  Synthetic oligonucleotide
atttcggtggtaacaccgggacaaaatcga

SEQ ID NO: 213662 - DNA, 30 bp, Artificial Sequence
  Synthetic oligonucleotide
atcgctaggtcccacccgcttgacaatcga

SEQ ID NO: 213663 - DNA, 30 bp, Artificial Sequence
  Synthetic oligonucleotide
cataagtagtcagatcaatcctcgaatcga

SEQ ID NO: 213664 - DNA, 30 bp, Artificial Sequence
  Synthetic oligonucleotide
cctgggtgagaaaccgccgggtcgaatcga

SEQ ID NO: 213665 - DNA, 30 bp, Artificial Sequence
  Synthetic oligonucleotide
atgaaccggctaaataggtgaggtaatcga

SEQ ID NO: 213666 - DNA, 30 bp, Artificial Sequence
  Synthetic oligonucleotide
gtcagaaaaatgtgttgctggagccatcga

SEQ ID NO: 213667 - DNA, 30 bp, Artificial Sequence
  Synthetic oligonucleotide
gcacaagggccaaaaaacgtatgccatcga

SEQ ID NO: 213668 - DNA, 30 bp, Artificial Sequence
  Synthetic oligonucleotide
acgtgtgtcttcattaaagaccgtcatcga

SEQ ID NO: 213669 - DNA, 30 bp, Artificial Sequence
  Synthetic oligonucleotide
tagacagacttagcctacccactcgatcga

SEQ ID NO: 213670 - DNA, 30 bp, Artificial Sequence
  Synthetic oligonucleotide
cttgaccgtgcacatgggtcaccggatcga

SEQ ID NO: 213671 - DNA, 30 bp, Artificial Sequence
  Synthetic oligonucleotide
ccctcggtgacgagggatgccgtggatcga

SEQ ID NO: 213672 - DNA, 30 bp, Artificial Sequence
  Synthetic oligonucleotide
attagtccgagctgtgaaggtttggatcga

SEQ ID NO: 213673 - DNA, 30 bp, Artificial Sequence
  Synthetic oligonucleotide
taagagattgggaccgataaagatgatcga

SEQ ID NO: 213674 - DNA, 30 bp, Artificial Sequence
  Synthetic oligonucleotide
tggaacagactaaaagagttagttgatcga

SEQ ID NO: 213675 - DNA, 30 bp, Artificial Sequence
  Synthetic oligonucleotide
catgtacacaattcacggttacgatatcga

SEQ ID NO: 213676 - DNA, 30 bp, Artificial Sequence
  Synthetic oligonucleotide
taactgacctcaccctctcattgatatcga

SEQ ID NO: 213677 - DNA, 30 bp, Artificial Sequence
  Synthetic oligonucleotide
aagtcaatatcagaaggtcctacgtatcga

SEQ ID NO: 213678 - DNA, 30 bp, Artificial Sequence
  Synthetic oligonucleotide
ttaataatagaaatggtccggaggtatcga

SEQ ID NO: 213679 - DNA, 30 bp, Artificial Sequence
  Synthetic oligonucleotide
gaccgacatagccctggcccgcattatcga

SEQ ID NO: 213680 - DNA, 30 bp, Artificial Sequence
  Synthetic oligonucleotide
gtcgatgtcagcagcagaatagagactcga

SEQ ID NO: 213681 - DNA, 30 bp, Artificial Sequence
  Synthetic oligonucleotide
ttggtggcagactccagcagcgttactcga

SEQ ID NO: 213682 - DNA, 30 bp, Artificial Sequence
  Synthetic oligonucleotide
ctgcaatgcaggattaatggggttactcga

SEQ ID NO: 213683 - DNA, 30 bp, Artificial Sequence
  Synthetic oligonucleotide
gccagattagatttagtaaattttactcga

SEQ ID NO: 213684 - DNA, 30 bp, Artificial Sequence
  Synthetic oligonucleotide
ctaccgatagccgtcacacgcctgcctcga

SEQ ID NO: 213685 - DNA, 30 bp, Artificial Sequence
  Synthetic oligonucleotide
gttaaccagtccgtagactgtaaagctcga

SEQ ID NO: 213686 - DNA, 30 bp, Artificial Sequence
  Synthetic oligonucleotide
ctgagttattaaacagaagtttgagctcga

SEQ ID NO: 213687 - DNA, 30 bp, Artificial Sequence
  Synthetic oligonucleotide
tcgcttccgtgtgcgtccgacctagctcga

SEQ ID NO: 213688 - DNA, 30 bp, Artificial Sequence
  Synthetic oligonucleotide
tatacggggtgaccggtgcctagcgctcga

SEQ ID NO: 213689 - DNA, 30 bp, Artificial Sequence
  Synthetic oligonucleotide
agtcccacgggatattatgtgctcgctcga

SEQ ID NO: 213690 - DNA, 30 bp, Artificial Sequence
  Synthetic oligonucleotide
tcggcgtcaggcaatttcagcgtcgctcga

SEQ ID NO: 213691 - DNA, 30 bp, Artificial Sequence
  Synthetic oligonucleotide
ttcaagcgagtatagctccttgcggctcga

SEQ ID NO: 213692 - DNA, 30 bp, Artificial Sequence
  Synthetic oligonucleotide
tgtgcgtgatactagaacaggagtgctcga

SEQ ID NO: 213693 - DNA, 30 bp, Artificial Sequence
  Synthetic oligonucleotide
aatagtgatggtggaattccgtttgctcga

SEQ ID NO: 213694 - DNA, 30 bp, Artificial Sequence
  Synthetic oligonucleotide
cctttcttagaggatataaggtgatctcga

SEQ ID NO: 213695 - DNA, 30 bp, Artificial Sequence
  Synthetic oligonucleotide
ttcggcccgaaccgcatagataacagtcga

SEQ ID NO: 213696 - DNA, 30 bp, Artificial Sequence
  Synthetic oligonucleotide
atatttcagccacgggtcttacggagtcga

SEQ ID NO: 213697 - DNA, 30 bp, Artificial Sequence
  Synthetic oligonucleotide
tacgccaacgaaagcagaagaaatagtcga

SEQ ID NO: 213698 - DNA, 30 bp, Artificial Sequence
  Synthetic oligonucleotide
ctaatcgaagggttgatgtaagctagtcga

SEQ ID NO: 213699 - DNA, 30 bp, Artificial Sequence
  Synthetic oligonucleotide
tgccccatactgtcatcgagggctagtcga

SEQ ID NO: 213700 - DNA, 30 bp, Artificial Sequence
  Synthetic oligonucleotide
gatacactctgccgataaccgaaacgtcga

SEQ ID NO: 213701 - DNA, 30 bp, Artificial Sequence
  Synthetic oligonucleotide
cagtggattggcatacgaccgacacgtcga

SEQ ID NO: 213702 - DNA, 30 bp, Artificial Sequence
  Synthetic oligonucleotide
atggttcgcttggtgttgcaagaccgtcga

SEQ ID NO: 213703 - DNA, 30 bp, Artificial Sequence
  Synthetic oligonucleotide
ttgaacgcctgatgcgtgaaaaagcgtcga

SEQ ID NO: 213704 - DNA, 30 bp, Artificial Sequence
  Synthetic oligonucleotide
caatcgggaatattggaaaaaatgcgtcga

SEQ ID NO: 213705 - DNA, 30 bp, Artificial Sequence
  Synthetic oligonucleotide
gtgccgtgcactggttagccaaatcgtcga

SEQ ID NO: 213706 - DNA, 30 bp, Artificial Sequence
  Synthetic oligonucleotide
taaccggctatggggccacaggatcgtcga

SEQ ID NO: 213707 - DNA, 30 bp, Artificial Sequence
  Synthetic oligonucleotide
aaccggaataaggtctcaatcattcgtcga

SEQ ID NO: 213708 - DNA, 30 bp, Artificial Sequence
  Synthetic oligonucleotide
actatcggaccgttgtggctaggaggtcga

SEQ ID NO: 213709 - DNA, 30 bp, Artificial Sequence
  Synthetic oligonucleotide
acagttttgctatcaagagaaaccggtcga

SEQ ID NO: 213710 - DNA, 30 bp, Artificial Sequence
  Synthetic oligonucleotide
gcatgggaacattcaagagtggatggtcga

SEQ ID NO: 213711 - DNA, 30 bp, Artificial Sequence
  Synthetic oligonucleotide
gggaagacaggccgtctaagggctggtcga

SEQ ID NO: 213712 - DNA, 30 bp, Artificial Sequence
  Synthetic oligonucleotide
tcggtccggtcgttaggtagttctggtcga

SEQ ID NO: 213713 - DNA, 30 bp, Artificial Sequence
  Synthetic oligonucleotide
gcggcagccgcgatagcttataactgtcga

SEQ ID NO: 213714 - DNA, 30 bp, Artificial Sequence
  Synthetic oligonucleotide
ttaactattgacaacccagattcctgtcga

SEQ ID NO: 213715 - DNA, 30 bp, Artificial Sequence
  Synthetic oligonucleotide
ggcggtttcctgagtgtacctcgctgtcga

SEQ ID NO: 213716 - DNA, 30 bp, Artificial Sequence
  Synthetic oligonucleotide
aacgtccgtgatatatgagcgctctgtcga

SEQ ID NO: 213717 - DNA, 30 bp, Artificial Sequence
  Synthetic oligonucleotide
ggcgcgcaaagtaaatgtggtaattgtcga

SEQ ID NO: 213718 - DNA, 30 bp, Artificial Sequence
  Synthetic oligonucleotide
aaggtgactttgtcactcacggcttgtcga

SEQ ID NO: 213719 - DNA, 30 bp, Artificial Sequence
  Synthetic oligonucleotide
tagccaataggctgggggaatagcattcga

SEQ ID NO: 213720 - DNA, 30 bp, Artificial Sequence
  Synthetic oligonucleotide
gcttgctgagttttaaatggatggattcga

SEQ ID NO: 213721 - DNA, 30 bp, Artificial Sequence
  Synthetic oligonucleotide
catcaggtacgatttaattgctcccttcga

SEQ ID NO: 213722 - DNA, 30 bp, Artificial Sequence
  Synthetic oligonucleotide
ttagagtgaggatggaggaaccgtcttcga

SEQ ID NO: 213723 - DNA, 30 bp, Artificial Sequence
  Synthetic oligonucleotide
aactaggtcagtggctaagcggaagttcga

SEQ ID NO: 213724 - DNA, 30 bp, Artificial Sequence
  Synthetic oligonucleotide
gcctcggcagcttagccctgtgaagttcga

SEQ ID NO: 213725 - DNA, 30 bp, Artificial Sequence
  Synthetic oligonucleotide
tctttcgcagggttggtctcgccagttcga

SEQ ID NO: 213726 - DNA, 30 bp, Artificial Sequence
  Synthetic oligonucleotide
gcggacaactgccgaacggccctcgttcga

SEQ ID NO: 213727 - DNA, 30 bp, Artificial Sequence
  Synthetic oligonucleotide
tggtgtgggacacgtagtgggtcggttcga

SEQ ID NO: 213728 - DNA, 30 bp, Artificial Sequence
  Synthetic oligonucleotide
gcgccccactggacgatcacgccatttcga

SEQ ID NO: 213729 - DNA, 30 bp, Artificial Sequence
  Synthetic oligonucleotide
aaccttatgggactagtgacggactttcga

SEQ ID NO: 213730 - DNA, 30 bp, Artificial Sequence
  Synthetic oligonucleotide
tcacaaattacgaggggagagcgctttcga

SEQ ID NO: 213731 - DNA, 30 bp, Artificial Sequence
  Synthetic oligonucleotide
gcgcgtaatttatctcgtttcccttttcga

SEQ ID NO: 213732 - DNA, 30 bp, Artificial Sequence
  Synthetic oligonucleotide
tgcagtttaatgcgacaacaaaaaaaagga

SEQ ID NO: 213733 - DNA, 30 bp, Artificial Sequence
  Synthetic oligonucleotide
tttcagcgtcgaacggcgcggttaaaagga

SEQ ID NO: 213734 - DNA, 30 bp, Artificial Sequence
  Synthetic oligonucleotide
agaggaagacgtaatatatctaccaaagga

SEQ ID NO: 213735 - DNA, 30 bp, Artificial Sequence
  Synthetic oligonucleotide
gtctatcaggatatggtccaggtcaaagga

SEQ ID NO: 213736 - DNA, 30 bp, Artificial Sequence
  Synthetic oligonucleotide
ctgtaattggactattgggctgataaagga

SEQ ID NO: 213737 - DNA, 30 bp, Artificial Sequence
  Synthetic oligonucleotide
caatcggggatgggccaagaaggacaagga

SEQ ID NO: 213738 - DNA, 30 bp, Artificial Sequence
  Synthetic oligonucleotide
aattcaattataaatatactcgcgcaagga

SEQ ID NO: 213739 - DNA, 30 bp, Artificial Sequence
  Synthetic oligonucleotide
gacccgggcgccatgtactgctaagaagga

SEQ ID NO: 213740 - DNA, 30 bp, Artificial Sequence
  Synthetic oligonucleotide
tcagggctccaagcgtagcatctagaagga

SEQ ID NO: 213741 - DNA, 30 bp, Artificial Sequence
  Synthetic oligonucleotide
gtgtatgtctcaagtggcaaagacgaagga

SEQ ID NO: 213742 - DNA, 30 bp, Artificial Sequence
  Synthetic oligonucleotide
tccagcctgcccagcggcagatgcgaagga

SEQ ID NO: 213743 - DNA, 30 bp, Artificial Sequence
  Synthetic oligonucleotide
cgttaagaatatgaattactattcgaagga

SEQ ID NO: 213744 - DNA, 30 bp, Artificial Sequence
  Synthetic oligonucleotide
tatagtagcctgatgtgaaaccagtaagga

SEQ ID NO: 213745 - DNA, 30 bp, Artificial Sequence
  Synthetic oligonucleotide
tatccagcaatcgaacggtaaataacagga

SEQ ID NO: 213746 - DNA, 30 bp, Artificial Sequence
  Synthetic oligonucleotide
gtcccagtctgaagtcaggctcggacagga

SEQ ID NO: 213747 - DNA, 30 bp, Artificial Sequence
  Synthetic oligonucleotide
acgggcggccaagagcattttactacagga

SEQ ID NO: 213748 - DNA, 30 bp, Artificial Sequence
  Synthetic oligonucleotide
gaggggcgaggagttgtggcgataccagga

SEQ ID NO: 213749 - DNA, 30 bp, Artificial Sequence
  Synthetic oligonucleotide
tcagattttatagggtagattcccccagga

SEQ ID NO: 213750 - DNA, 30 bp, Artificial Sequence
  Synthetic oligonucleotide
agcgaccgggtctagatctgacatccagga

SEQ ID NO: 213751 - DNA, 30 bp, Artificial Sequence
  Synthetic oligonucleotide
ggtatcccattggcggaagattctccagga

SEQ ID NO: 213752 - DNA, 30 bp, Artificial Sequence
  Synthetic oligonucleotide
cgatgatcttcttaatggcaaagtccagga

SEQ ID NO: 213753 - DNA, 30 bp, Artificial Sequence
  Synthetic oligonucleotide
caattactgctacagagattgtgtccagga

SEQ ID NO: 213754 - DNA, 30 bp, Artificial Sequence
  Synthetic oligonucleotide
gtagtagctggccacatgtaaaaagcagga

SEQ ID NO: 213755 - DNA, 30 bp, Artificial Sequence
  Synthetic oligonucleotide
aggtgttctcgtcagggaatgggggcagga

SEQ ID NO: 213756 - DNA, 30 bp, Artificial Sequence
  Synthetic oligonucleotide
caacctcgactttttctaggactggcagga

SEQ ID NO: 213757 - DNA, 30 bp, Artificial Sequence
  Synthetic oligonucleotide
gtgtgttagctatcatattcgttggcagga

SEQ ID NO: 213758 - DNA, 30 bp, Artificial Sequence
  Synthetic oligonucleotide
aaggtaaagtaattcttgctacctgcagga

SEQ ID NO: 213759 - DNA, 30 bp, Artificial Sequence
  Synthetic oligonucleotide
actgcgggcgagtaccataggattgcagga

SEQ ID NO: 213760 - DNA, 30 bp, Artificial Sequence
  Synthetic oligonucleotide
cagtttccagtggagacatcaggctcagga

SEQ ID NO: 213761 - DNA, 30 bp, Artificial Sequence
  Synthetic oligonucleotide
gttactagctcataggctaggcattcagga

SEQ ID NO: 213762 - DNA, 30 bp, Artificial Sequence
  Synthetic oligonucleotide
ttaccatgccgataggtataactcagagga

SEQ ID NO: 213763 - DNA, 30 bp, Artificial Sequence
  Synthetic oligonucleotide
gcgactcacggggctatataagtcagagga

SEQ ID NO: 213764 - DNA, 30 bp, Artificial Sequence
  Synthetic oligonucleotide
ccaacttcactgcaccaactattcagagga

SEQ ID NO: 213765 - DNA, 30 bp, Artificial Sequence
  Synthetic oligonucleotide
atccaataattaagatgtgctttcagagga

SEQ ID NO: 213766 - DNA, 30 bp, Artificial Sequence
  Synthetic oligonucleotide
agacggggtcttacagggcttgatagagga

SEQ ID NO: 213767 - DNA, 30 bp, Artificial Sequence
  Synthetic oligonucleotide
cacgcatgatttagagggtccgttagagga

SEQ ID NO: 213768 - DNA, 30 bp, Artificial Sequence
  Synthetic oligonucleotide
gaggccaggcgcccggcatcgaaacgagga

SEQ ID NO: 213769 - DNA, 30 bp, Artificial Sequence
  Synthetic oligonucleotide
taacatgacaatcacactccgttgcgagga

SEQ ID NO: 213770 - DNA, 30 bp, Artificial Sequence
  Synthetic oligonucleotide
cgaatgcgtccaagtgacgtgtctcgagga

SEQ ID NO: 213771 - DNA, 30 bp, Artificial Sequence
  Synthetic oligonucleotide
ctatagtgcaagagtacactaaacggagga

SEQ ID NO: 213772 - DNA, 30 bp, Artificial Sequence
  Synthetic oligonucleotide
agggattcgagggagttgcagccgggagga

SEQ ID NO: 213773 - DNA, 30 bp, Artificial Sequence
  Synthetic oligonucleotide
aacatttatgatcggtcggcgcggggagga

SEQ ID NO: 213774 - DNA, 30 bp, Artificial Sequence
  Synthetic oligonucleotide
cctgctatcgccatgggttttcggggagga

SEQ ID NO: 213775 - DNA, 30 bp, Artificial Sequence
  Synthetic oligonucleotide
gttacaagtgtcagatttcacacatgagga

SEQ ID NO: 213776 - DNA, 30 bp, Artificial Sequence
  Synthetic oligonucleotide
ctgactaaccggccgaatggctactgagga

SEQ ID NO: 213777 - DNA, 30 bp, Artificial Sequence
  Synthetic oligonucleotide
gatcggtcccgggcgtgcgtagggtgagga

SEQ ID NO: 213778 - DNA, 30 bp, Artificial Sequence
  Synthetic oligonucleotide
ccgcgtggtcctcctttagacacttgagga

SEQ ID NO: 213779 - DNA, 30 bp, Artificial Sequence
  Synthetic oligonucleotide
atggagcagaatcattttcgttccatagga

SEQ ID NO: 213780 - DNA, 30 bp, Artificial Sequence
  Synthetic oligonucleotide
ccggcggggacatcacgtaccctcatagga

SEQ ID NO: 213781 - DNA, 30 bp, Artificial Sequence
  Synthetic oligonucleotide
gggtcaccatcttacataattgtgatagga

SEQ ID NO: 213782 - DNA, 30 bp, Artificial Sequence
  Synthetic oligonucleotide
aaagagctcagcccaactgaggctatagga

SEQ ID NO: 213783 - DNA, 30 bp, Artificial Sequence
  Synthetic oligonucleotide
taggtcaggttcgttgtagatgctatagga

SEQ ID NO: 213784 - DNA, 30 bp, Artificial Sequence
  Synthetic oligonucleotide
ttcatcagtgcccgaaaaaactgtatagga

SEQ ID NO: 213785 - DNA, 30 bp, Artificial Sequence
  Synthetic oligonucleotide
agtagttctgctaacggcctaagactagga

SEQ ID NO: 213786 - DNA, 30 bp, Artificial Sequence
  Synthetic oligonucleotide
tactaggatccctacgcaagattactagga

SEQ ID NO: 213787 - DNA, 30 bp, Artificial Sequence
  Synthetic oligonucleotide
agactcgtgcaatcgtatcaagagctagga

SEQ ID NO: 213788 - DNA, 30 bp, Artificial Sequence
  Synthetic oligonucleotide
gcacccgattccgaagaatcaagtctagga

SEQ ID NO: 213789 - DNA, 30 bp, Artificial Sequence
  Synthetic oligonucleotide
gttaatttaccatggaggacttgtctagga

SEQ ID NO: 213790 - DNA, 30 bp, Artificial Sequence
  Synthetic oligonucleotide
tgtagtaataaaaatgtgcaatttctagga

SEQ ID NO: 213791 - DNA, 30 bp, Artificial Sequence
  Synthetic oligonucleotide
gcctctggcatagtgaagcgtcaagtagga

SEQ ID NO: 213792 - DNA, 30 bp, Artificial Sequence
  Synthetic oligonucleotide
gcacaaacaaacgactttcgtcgagtagga

SEQ ID NO: 213793 - DNA, 30 bp, Artificial Sequence
  Synthetic oligonucleotide
agccgcacgagggctcatcactgagtagga

SEQ ID NO: 213794 - DNA, 30 bp, Artificial Sequence
  Synthetic oligonucleotide
aatgtcgaagaattaaattgaatcgtagga

SEQ ID NO: 213795 - DNA, 30 bp, Artificial Sequence
  Synthetic oligonucleotide
ccagtctgctcaacatgaatgcgtgtagga

SEQ ID NO: 213796 - DNA, 30 bp, Artificial Sequence
  Synthetic oligonucleotide
gcagggccaaggtcgtggcctcttgtagga

SEQ ID NO: 213797 - DNA, 30 bp, Artificial Sequence
  Synthetic oligonucleotide
cccaaacctgagaacttgtagaacttagga

SEQ ID NO: 213798 - DNA, 30 bp, Artificial Sequence
  Synthetic oligonucleotide
atctactaaaaaagaccccctgtgttagga

SEQ ID NO: 213799 - DNA, 30 bp, Artificial Sequence
  Synthetic oligonucleotide
gtacacgtgacccggaaagcgaatttagga

SEQ ID NO: 213800 - DNA, 30 bp, Artificial Sequence
  Synthetic oligonucleotide
accgtgagggtgattcttggcgctttagga

SEQ ID NO: 213801 - DNA, 30 bp, Artificial Sequence
  Synthetic oligonucleotide
cgtaactttctttaataaactgacaacgga

SEQ ID NO: 213802 - DNA, 30 bp, Artificial Sequence
  Synthetic oligonucleotide
atgtaccgataccgataggaattcaacgga

SEQ ID NO: 213803 - DNA, 30 bp, Artificial Sequence
  Synthetic oligonucleotide
ttgaaagacacattagttcaacagaacgga

SEQ ID NO: 213804 - DNA, 30 bp, Artificial Sequence
  Synthetic oligonucleotide
tagatacagtaaggcttcgctaataacgga

SEQ ID NO: 213805 - DNA, 30 bp, Artificial Sequence
  Synthetic oligonucleotide
cggtatgaatctgaggggcggcataacgga

SEQ ID NO: 213806 - DNA, 30 bp, Artificial Sequence
  Synthetic oligonucleotide
tttgcaattattggggatagcattaacgga

SEQ ID NO: 213807 - DNA, 30 bp, Artificial Sequence
  Synthetic oligonucleotide
ccatgacgtgtccccttttaatttaacgga

SEQ ID NO: 213808 - DNA, 30 bp, Artificial Sequence
  Synthetic oligonucleotide
tgtgaccatttaactatgtatgcccacgga

SEQ ID NO: 213809 - DNA, 30 bp, Artificial Sequence
  Synthetic oligonucleotide
cagcaatggggtattgccctccggcacgga

SEQ ID NO: 213810 - DNA, 30 bp, Artificial Sequence
  Synthetic oligonucleotide
gaccagggtttgaaggtgcatgaggacgga

SEQ ID NO: 213811 - DNA, 30 bp, Artificial Sequence
  Synthetic oligonucleotide
tgctgcgatggttggcacttatcggacgga

SEQ ID NO: 213812 - DNA, 30 bp, Artificial Sequence
  Synthetic oligonucleotide
aaggcgcaagcccaatctgtactggacgga

SEQ ID NO: 213813 - DNA, 30 bp, Artificial Sequence
  Synthetic oligonucleotide
gtatctttatggagagatacagatgacgga

SEQ ID NO: 213814 - DNA, 30 bp, Artificial Sequence
  Synthetic oligonucleotide
aatcatcacctgagaagcagccaatacgga

SEQ ID NO: 213815 - DNA, 30 bp, Artificial Sequence
  Synthetic oligonucleotide
ctttgacactgtcacaagatatcatacgga

SEQ ID NO: 213816 - DNA, 30 bp, Artificial Sequence
  Synthetic oligonucleotide
atgatacgcgcagactgcggcatatacgga

SEQ ID NO: 213817 - DNA, 30 bp, Artificial Sequence
  Synthetic oligonucleotide
gcgacgctaacgaattaaaaagtatacgga

SEQ ID NO: 213818 - DNA, 30 bp, Artificial Sequence
  Synthetic oligonucleotide
agctcccggcggtgcggggcaatctacgga

SEQ ID NO: 213819 - DNA, 30 bp, Artificial Sequence
  Synthetic oligonucleotide
aaagagatttgtcatgccgaacagtacgga

SEQ ID NO: 213820 - DNA, 30 bp, Artificial Sequence
  Synthetic oligonucleotide
agtgaaggcgggctcgcagggctgtacgga

SEQ ID NO: 213821 - DNA, 30 bp, Artificial Sequence
  Synthetic oligonucleotide
tggtgcttgggcgtatatttgtcttacgga

SEQ ID NO: 213822 - DNA, 30 bp, Artificial Sequence
  Synthetic oligonucleotide
tctacggtatgcctggtaatccgaaccgga

SEQ ID NO: 213823 - DNA, 30 bp, Artificial Sequence
  Synthetic oligonucleotide
gctcatcggtcggacatgtccaatcccgga

SEQ ID NO: 213824 - DNA, 30 bp, Artificial Sequence
  Synthetic oligonucleotide
gggtggggtagctcacaaagcccagccgga

SEQ ID NO: 213825 - DNA, 30 bp, Artificial Sequence
  Synthetic oligonucleotide
aggccgtttgaccacagtgtgggagccgga

SEQ ID NO: 213826 - DNA, 30 bp, Artificial Sequence
  Synthetic oligonucleotide
ttacgggctacgaccttgcgacggtccgga

SEQ ID NO: 213827 - DNA, 30 bp, Artificial Sequence
  Synthetic oligonucleotide
gggcagggattttatcgagcgacaagcgga

SEQ ID NO: 213828 - DNA, 30 bp, Artificial Sequence
  Synthetic oligonucleotide
ggtcttgatagttgagtgtgagagagcgga

SEQ ID NO: 213829 - DNA, 30 bp, Artificial Sequence
  Synthetic oligonucleotide
ggcagcaatgcttaggagacggagagcgga

SEQ ID NO: 213830 - DNA, 30 bp, Artificial Sequence
  Synthetic oligonucleotide
gtcaggtaaatatctcgtcaagtgagcgga

SEQ ID NO: 213831 - DNA, 30 bp, Artificial Sequence
  Synthetic oligonucleotide
ctgtcgtactccgactaggagattagcgga

SEQ ID NO: 213832 - DNA, 30 bp, Artificial Sequence
  Synthetic oligonucleotide
cgtatcagattcctatctcaccaacgcgga

SEQ ID NO: 213833 - DNA, 30 bp, Artificial Sequence
  Synthetic oligonucleotide
tgctcggacagaatataactgccacgcgga

SEQ ID NO: 213834 - DNA, 30 bp, Artificial Sequence
  Synthetic oligonucleotide
agggttaaaatatacagacgcgggcgcgga

SEQ ID NO: 213835 - DNA, 30 bp, Artificial Sequence
  Synthetic oligonucleotide
catccatcctaaatccgagcggtgcgcgga

SEQ ID NO: 213836 - DNA, 30 bp, Artificial Sequence
  Synthetic oligonucleotide
ttcctacagacagggggattgcctcgcgga

SEQ ID NO: 213837 - DNA, 30 bp, Artificial Sequence
  Synthetic oligonucleotide
caccagctatgcgaaacctccgctcgcgga

SEQ ID NO: 213838 - DNA, 30 bp, Artificial Sequence
  Synthetic oligonucleotide
tgacgatgacggttagaaaatcttcgcgga

SEQ ID NO: 213839 - DNA, 30 bp, Artificial Sequence
  Synthetic oligonucleotide
gtcatccgtaaacgccgacgtaaaggcgga

SEQ ID NO: 213840 - DNA, 30 bp, Artificial Sequence
  Synthetic oligonucleotide
aggcttacgcttgccattacgaacggcgga

SEQ ID NO: 213841 - DNA, 30 bp, Artificial Sequence
  Synthetic oligonucleotide
cactgtcgccagatacaggcctagggcgga

SEQ ID NO: 213842 - DNA, 30 bp, Artificial Sequence
  Synthetic oligonucleotide
taccggtttaggataagtatgtagggcgga

SEQ ID NO: 213843 - DNA, 30 bp, Artificial Sequence
  Synthetic oligonucleotide
tatatttgaggctgtcacaaagtgggcgga

SEQ ID NO: 213844 - DNA, 30 bp, Artificial Sequence
  Synthetic oligonucleotide
gtgctcaaggaaaagcccttataatgcgga

SEQ ID NO: 213845 - DNA, 30 bp, Artificial Sequence
  Synthetic oligonucleotide
atccccggatcctagttagttacatgcgga

SEQ ID NO: 213846 - DNA, 30 bp, Artificial Sequence
  Synthetic oligonucleotide
gaccctgagtatgaatcaggcctatgcgga

SEQ ID NO: 213847 - DNA, 30 bp, Artificial Sequence
  Synthetic oligonucleotide
gtccttgctgtgaatgagtgtgtatgcgga

SEQ ID NO: 213848 - DNA, 30 bp, Artificial Sequence
  Synthetic oligonucleotide
ccgggcgctttaggagtccgaccctgcgga

SEQ ID NO: 213849 - DNA, 30 bp, Artificial Sequence
  Synthetic oligonucleotide
gtacgtctcactcttgtactaccctgcgga

SEQ ID NO: 213850 - DNA, 29 bp, Artificial Sequence
  Synthetic oligonucleotide
acaaaacgggatacattagaataatcgga

SEQ ID NO: 213851 - DNA, 30 bp, Artificial Sequence
  Synthetic oligonucleotide
ccgccggaggggtgtttaggcttaatcgga

SEQ ID NO: 213852 - DNA, 30 bp, Artificial Sequence
  Synthetic oligonucleotide
ttgtttagtataactaagcttggcatcgga

SEQ ID NO: 213853 - DNA, 30 bp, Artificial Sequence
  Synthetic oligonucleotide
gatgccggcagtgcgcatatgcctatcgga

SEQ ID NO: 213854 - DNA, 30 bp, Artificial Sequence
  Synthetic oligonucleotide
aaacggcccacaggagagtctgcactcgga

SEQ ID NO: 213855 - DNA, 30 bp, Artificial Sequence
  Synthetic oligonucleotide
accgaccgccgattgcgcggttcgctcgga

SEQ ID NO: 213856 - DNA, 30 bp, Artificial Sequence
  Synthetic oligonucleotide
caaaagcagacgtacaaagtgagcgtcgga

SEQ ID NO: 213857 - DNA, 30 bp, Artificial Sequence
  Synthetic oligonucleotide
caaatctacgccgacgtattattggtcgga

SEQ ID NO: 213858 - DNA, 30 bp, Artificial Sequence
  Synthetic oligonucleotide
ctgaaggtagattttgataacgatgtcgga

SEQ ID NO: 213859 - DNA, 30 bp, Artificial Sequence
  Synthetic oligonucleotide
gataagtagcagcatctatgcgttgtcgga

SEQ ID NO: 213860 - DNA, 30 bp, Artificial Sequence
  Synthetic oligonucleotide
cgacactttagttccgatcgcaagaaggga

SEQ ID NO: 213861 - DNA, 30 bp, Artificial Sequence
  Synthetic oligonucleotide
gcaaaccaggcataacacggttagaaggga

SEQ ID NO: 213862 - DNA, 30 bp, Artificial Sequence
  Synthetic oligonucleotide
gtgttaaagatccgacctgccaggaaggga

SEQ ID NO: 213863 - DNA, 30 bp, Artificial Sequence
  Synthetic oligonucleotide
tgtcggtcgaaccattttcgagctaaggga

SEQ ID NO: 213864 - DNA, 30 bp, Artificial Sequence
  Synthetic oligonucleotide
catagtatgtactatgagtgagaccaggga

SEQ ID NO: 213865 - DNA, 30 bp, Artificial Sequence
  Synthetic oligonucleotide
agtaaagtaataccgcacggcgtccaggga

SEQ ID NO: 213866 - DNA, 30 bp, Artificial Sequence
  Synthetic oligonucleotide
gtctgcgggcctgcggcacgccctcaggga

SEQ ID NO: 213867 - DNA, 30 bp, Artificial Sequence
  Synthetic oligonucleotide
ggctatcgtggctggtgggaacgtcaggga

SEQ ID NO: 213868 - DNA, 30 bp, Artificial Sequence
  Synthetic oligonucleotide
gtgtgcataggtacctgtctgtaagaggga

SEQ ID NO: 213869 - DNA, 30 bp, Artificial Sequence
  Synthetic oligonucleotide
atgagatcttttaaaaacgctcccgaggga

SEQ ID NO: 213870 - DNA, 30 bp, Artificial Sequence
  Synthetic oligonucleotide
ctagggcaccccagagccaagatcgaggga

SEQ ID NO: 213871 - DNA, 30 bp, Artificial Sequence
  Synthetic oligonucleotide
aagttaacttaaagaggccgtttggaggga

SEQ ID NO: 213872 - DNA, 30 bp, Artificial Sequence
  Synthetic oligonucleotide
cacaggaagatttgggtcttgggtgaggga

SEQ ID NO: 213873 - DNA, 30 bp, Artificial Sequence
  Synthetic oligonucleotide
ggatccgggaatcggtaggactcataggga

SEQ ID NO: 213874 - DNA, 30 bp, Artificial Sequence
  Synthetic oligonucleotide
acggggtaagatcatggattgtcataggga

SEQ ID NO: 213875 - DNA, 30 bp, Artificial Sequence
  Synthetic oligonucleotide
gtacctatattactttcgtcacgataggga

SEQ ID NO: 213876 - DNA, 30 bp, Artificial Sequence
  Synthetic oligonucleotide
gacgatgtcttggtagcttgcgtataggga

SEQ ID NO: 213877 - DNA, 30 bp, Artificial Sequence
  Synthetic oligonucleotide
gcgtgttaaatctcagagcgtgtataggga

SEQ ID NO: 213878 - DNA, 30 bp, Artificial Sequence
  Synthetic oligonucleotide
gtcgatcgccatcgtctctgtccgtaggga

SEQ ID NO: 213879 - DNA, 30 bp, Artificial Sequence
  Synthetic oligonucleotide
aagagggagtccttaactgtctattaggga

SEQ ID NO: 213880 - DNA, 30 bp, Artificial Sequence
  Synthetic oligonucleotide
agtatggctgttcgggcggttcaaacggga

SEQ ID NO: 213881 - DNA, 30 bp, Artificial Sequence
  Synthetic oligonucleotide
tttgagaataggagatggatctaaacggga

SEQ ID NO: 213882 - DNA, 30 bp, Artificial Sequence
  Synthetic oligonucleotide
gcgtgtaagtctgctggctgtcacacggga

SEQ ID NO: 213883 - DNA, 30 bp, Artificial Sequence
  Synthetic oligonucleotide
gcatcgcagaattaaaatcataccacggga

SEQ ID NO: 213884 - DNA, 30 bp, Artificial Sequence
  Synthetic oligonucleotide
gtcatgtcttagcccatatggaaaccggga

SEQ ID NO: 213885 - DNA, 30 bp, Artificial Sequence
  Synthetic oligonucleotide
caaacttgtaatgtaaatgtcacaccggga

SEQ ID NO: 213886 - DNA, 30 bp, Artificial Sequence
  Synthetic oligonucleotide
accacggtgatagttttaataagaccggga

SEQ ID NO: 213887 - DNA, 30 bp, Artificial Sequence
  Synthetic oligonucleotide
aatcggatagatacgataatgcgaccggga

SEQ ID NO: 213888 - DNA, 30 bp, Artificial Sequence
  Synthetic oligonucleotide
acctgttgcgctatgggcacgggaccggga

SEQ ID NO: 213889 - DNA, 30 bp, Artificial Sequence
  Synthetic oligonucleotide
taatcatacataaaacggccagcgccggga

SEQ ID NO: 213890 - DNA, 30 bp, Artificial Sequence
  Synthetic oligonucleotide
agttatgtcgggggggagctagatccggga

SEQ ID NO: 213891 - DNA, 30 bp, Artificial Sequence
  Synthetic oligonucleotide
aaccagtagtataagatttctaacgcggga

SEQ ID NO: 213892 - DNA, 30 bp, Artificial Sequence
  Synthetic oligonucleotide
taaggggttaccgtcaggtttccggcggga

SEQ ID NO: 213893 - DNA, 30 bp, Artificial Sequence
  Synthetic oligonucleotide
gttaggggtcaagaaccaacaatggcggga

SEQ ID NO: 213894 - DNA, 30 bp, Artificial Sequence
  Synthetic oligonucleotide
attcacaaaaacacacaagtagatgcggga

SEQ ID NO: 213895 - DNA, 30 bp, Artificial Sequence
  Synthetic oligonucleotide
cttcatgggccaacgtctaccgatgcggga

SEQ ID NO: 213896 - DNA, 30 bp, Artificial Sequence
  Synthetic oligonucleotide
gctcagcggagattaaagatccactcggga

SEQ ID NO: 213897 - DNA, 30 bp, Artificial Sequence
  Synthetic oligonucleotide
ggtttctgatgctcaatgtacgactcggga

SEQ ID NO: 213898 - DNA, 30 bp, Artificial Sequence
  Synthetic oligonucleotide
gcgttcagttttggtgtatattcctcggga

SEQ ID NO: 213899 - DNA, 30 bp, Artificial Sequence
  Synthetic oligonucleotide
cccagtgggttcctgtggcctcgctcggga

SEQ ID NO: 213900 - DNA, 30 bp, Artificial Sequence
  Synthetic oligonucleotide
gtattcgttaggagtggttgcttctcggga

SEQ ID NO: 213901 - DNA, 30 bp, Artificial Sequence
  Synthetic oligonucleotide
ggatatgtagtagtaggaggctagtcggga

SEQ ID NO: 213902 - DNA, 30 bp, Artificial Sequence
  Synthetic oligonucleotide
ccggagttcgaagcaattgggggttcggga

SEQ ID NO: 213903 - DNA, 30 bp, Artificial Sequence
  Synthetic oligonucleotide
gtctatacacaatgtgcaactctttcggga

SEQ ID NO: 213904 - DNA, 30 bp, Artificial Sequence
  Synthetic oligonucleotide
ctgaggcttatgaaaagcgaattttcggga

SEQ ID NO: 213905 - DNA, 30 bp, Artificial Sequence
  Synthetic oligonucleotide
ggtcgggaaggctgtacattatgaagggga

SEQ ID NO: 213906 - DNA, 30 bp, Artificial Sequence
  Synthetic oligonucleotide
aaatgggcacgtgattctccctccagggga

SEQ ID NO: 213907 - DNA, 30 bp, Artificial Sequence
  Synthetic oligonucleotide
agcacacaattgacattgatgacacgggga

SEQ ID NO: 213908 - DNA, 30 bp, Artificial Sequence
  Synthetic oligonucleotide
ctctcatcgaggacctctaaaccacgggga

SEQ ID NO: 213909 - DNA, 30 bp, Artificial Sequence
  Synthetic oligonucleotide
gctaacgtgaaaggttgtttcctgcgggga

SEQ ID NO: 213910 - DNA, 30 bp, Artificial Sequence
  Synthetic oligonucleotide
gcagggtcttaggactgagggaatcgggga

SEQ ID NO: 213911 - DNA, 30 bp, Artificial Sequence
  Synthetic oligonucleotide
taacggccgataatcaaactgcatcgggga

SEQ ID NO: 213912 - DNA, 30 bp, Artificial Sequence
  Synthetic oligonucleotide
tcgctcattatgatagaccgtactcgggga

SEQ ID NO: 213913 - DNA, 30 bp, Artificial Sequence
  Synthetic oligonucleotide
ctggcccaaagttagccgagctctcgggga

SEQ ID NO: 213914 - DNA, 30 bp, Artificial Sequence
  Synthetic oligonucleotide
caggaccacatgctcatctcgcgtcgggga

SEQ ID NO: 213915 - DNA, 30 bp, Artificial Sequence
  Synthetic oligonucleotide
gtcaggagagacccctacatggttcgggga

SEQ ID NO: 213916 - DNA, 30 bp, Artificial Sequence
  Synthetic oligonucleotide
aagatactccaccttcccgccagaggggga

SEQ ID NO: 213917 - DNA, 30 bp, Artificial Sequence
  Synthetic oligonucleotide
gaactgacactctagctcttattaggggga

SEQ ID NO: 213918 - DNA, 30 bp, Artificial Sequence
  Synthetic oligonucleotide
ccccgtgctataatgcacgatttcggggga

SEQ ID NO: 213919 - DNA, 40 bp, Artificial Sequence
  Synthetic oligonucleotide
aggataatacattcatggtatggtcggggatcggggggga

SEQ ID NO: 213920 - DNA, 40 bp, Artificial Sequence
  Synthetic oligonucleotide
aagatgatacattcatggtatggtcggggatcggggggga

SEQ ID NO: 213921 - DNA, 40 bp, Artificial Sequence
  Synthetic oligonucleotide
aagataatgcattcatggtatggtcggggatcggggggga

SEQ ID NO: 213922 - DNA, 30 bp, Artificial Sequence
  Synthetic oligonucleotide
gaagagcgggggatcagatcctggggggga

SEQ ID NO: 213923 - DNA, 30 bp, Artificial Sequence
  Synthetic oligonucleotide
cttgattacagactgctggttctgggggga

SEQ ID NO: 213924 - DNA, 30 bp, Artificial Sequence
  Synthetic oligonucleotide
gactcggtaaatcatattatttatggggga

SEQ ID NO: 213925 - DNA, 30 bp, Artificial Sequence
  Synthetic oligonucleotide
ccaacatccaacgtcccggaagctggggga

SEQ ID NO: 213926 - DNA, 30 bp, Artificial Sequence
  Synthetic oligonucleotide
ccattggtgaggatttgtgtgcttggggga

SEQ ID NO: 213927 - DNA, 30 bp, Artificial Sequence
  Synthetic oligonucleotide
gggcgttcggagatgtgcacgcaatgggga

SEQ ID NO: 213928 - DNA, 30 bp, Artificial Sequence
  Synthetic oligonucleotide
acaaattcgatgaaggcgtccgaatgggga

SEQ ID NO: 213929 - DNA, 30 bp, Artificial Sequence
  Synthetic oligonucleotide
tcctactcgcagtgccgattcctgtgggga

SEQ ID NO: 213930 - DNA, 30 bp, Artificial Sequence
  Synthetic oligonucleotide
atcaagattgggcagtgggtagcgatggga

SEQ ID NO: 213931 - DNA, 30 bp, Artificial Sequence
  Synthetic oligonucleotide
taggcaaacggcgaggccacaaggatggga

SEQ ID NO: 213932 - DNA, 30 bp, Artificial Sequence
  Synthetic oligonucleotide
acctagatgtcatcctggctctgtatggga

SEQ ID NO: 213933 - DNA, 30 bp, Artificial Sequence
  Synthetic oligonucleotide
ctaagcagtgacgaatactatcttatggga

SEQ ID NO: 213934 - DNA, 30 bp, Artificial Sequence
  Synthetic oligonucleotide
taggcctatttggttggatcacccctggga

SEQ ID NO: 213935 - DNA, 30 bp, Artificial Sequence
  Synthetic oligonucleotide
tgcttacactcaacatttgacaagctggga

SEQ ID NO: 213936 - DNA, 30 bp, Artificial Sequence
  Synthetic oligonucleotide
agaaattgaatacgaatcacgaggctggga

SEQ ID NO: 213937 - DNA, 30 bp, Artificial Sequence
  Synthetic oligonucleotide
cttgaccaactgagggctgttaggctggga

SEQ ID NO: 213938 - DNA, 30 bp, Artificial Sequence
  Synthetic oligonucleotide
gtgtgttccgctgatgaccagagtctggga

SEQ ID NO: 213939 - DNA, 30 bp, Artificial Sequence
  Synthetic oligonucleotide
cgaaaccaatccggtccgcggagcgtggga

SEQ ID NO: 213940 - DNA, 30 bp, Artificial Sequence
  Synthetic oligonucleotide
caaatacaggtgggcgtagtcgtggtggga

SEQ ID NO: 213941 - DNA, 30 bp, Artificial Sequence
  Synthetic oligonucleotide
ggtgtagtaacccgtgagagcgctgtggga

SEQ ID NO: 213942 - DNA, 30 bp, Artificial Sequence
  Synthetic oligonucleotide
agttgaacataagaaatatggctaaatgga

SEQ ID NO: 213943 - DNA, 30 bp, Artificial Sequence
  Synthetic oligonucleotide
ggcgcctcacggctgacttcgagtaatgga

SEQ ID NO: 213944 - DNA, 30 bp, Artificial Sequence
  Synthetic oligonucleotide
taccagactgtacaaagaggagttaatgga

SEQ ID NO: 213945 - DNA, 30 bp, Artificial Sequence
  Synthetic oligonucleotide
gcagcgttccggcagtgctagggacatgga

SEQ ID NO: 213946 - DNA, 30 bp, Artificial Sequence
  Synthetic oligonucleotide
gcaactgccgttcatcgcaaattacatgga

SEQ ID NO: 213947 - DNA, 30 bp, Artificial Sequence
  Synthetic oligonucleotide
tgggaggcttcaccagcaaactcgcatgga

SEQ ID NO: 213948 - DNA, 31 bp, Artificial Sequence
  Synthetic oligonucleotide
ttcgatgggaggaaaccgacaaagtcatgga

SEQ ID NO: 213949 - DNA, 30 bp, Artificial Sequence
  Synthetic oligonucleotide
actcatatagcaccctgccagctagatgga

SEQ ID NO: 213950 - DNA, 30 bp, Artificial Sequence
  Synthetic oligonucleotide
ttcgcatttctaggagctctcggcgatgga

SEQ ID NO: 213951 - DNA, 30 bp, Artificial Sequence
  Synthetic oligonucleotide
taaaccaagtattttgcgcagaaggatgga

SEQ ID NO: 213952 - DNA, 30 bp, Artificial Sequence
  Synthetic oligonucleotide
tcaccctaggccgtttacggatctgatgga

SEQ ID NO: 213953 - DNA, 30 bp, Artificial Sequence
  Synthetic oligonucleotide
cagggaatatttttcgcttggtttgatgga

SEQ ID NO: 213954 - DNA, 30 bp, Artificial Sequence
  Synthetic oligonucleotide
taacattagatggtatcttaagaatatgga

SEQ ID NO: 213955 - DNA, 30 bp, Artificial Sequence
  Synthetic oligonucleotide
agccctggtcagagccggggtgaatatgga

SEQ ID NO: 213956 - DNA, 30 bp, Artificial Sequence
  Synthetic oligonucleotide
gccaagacagatctcggttactactatgga

SEQ ID NO: 213957 - DNA, 30 bp, Artificial Sequence
  Synthetic oligonucleotide
aagaaggtgctaggcatgtagcgttatgga

SEQ ID NO: 213958 - DNA, 30 bp, Artificial Sequence
  Synthetic oligonucleotide
gactcgcggaaaccgggagtccgaactgga

SEQ ID NO: 213959 - DNA, 30 bp, Artificial Sequence
  Synthetic oligonucleotide
ggccgtaagtggctagacccgcggactgga

SEQ ID NO: 213960 - DNA, 30 bp, Artificial Sequence
  Synthetic oligonucleotide
gtatggatgtcaagagtctaacgtactgga

SEQ ID NO: 213961 - DNA, 30 bp, Artificial Sequence
  Synthetic oligonucleotide
cgacatttattggattccagtacacctgga

SEQ ID NO: 213962 - DNA, 30 bp, Artificial Sequence
  Synthetic oligonucleotide
taggagcagcaagtgcatagcaaccctgga

SEQ ID NO: 213963 - DNA, 30 bp, Artificial Sequence
  Synthetic oligonucleotide
gacgtcgtagtaaagcgatagacgcctgga

SEQ ID NO: 213964 - DNA, 30 bp, Artificial Sequence
  Synthetic oligonucleotide
ttaattgggtttcccacaatctgagctgga

SEQ ID NO: 213965 - DNA, 30 bp, Artificial Sequence
  Synthetic oligonucleotide
ggctagtgcatagaccgtacgtgagctgga

SEQ ID NO: 213966 - DNA, 30 bp, Artificial Sequence
  Synthetic oligonucleotide
cttacttaaagtggaatgcattgagctgga

SEQ ID NO: 213967 - DNA, 30 bp, Artificial Sequence
  Synthetic oligonucleotide
gcgtaacctacccgagttgtaattgctgga

SEQ ID NO: 213968 - DNA, 30 bp, Artificial Sequence
  Synthetic oligonucleotide
cggtctaagtctagagaaactaaatctgga

SEQ ID NO: 213969 - DNA, 29 bp, Artificial Sequence
  Synthetic oligonucleotide
ttaaccaaagcccagtagttatatctgga

SEQ ID NO: 213970 - DNA, 30 bp, Artificial Sequence
  Synthetic oligonucleotide
taaaggatattgtcgtgtctcctatctgga

SEQ ID NO: 213971 - DNA, 30 bp, Artificial Sequence
  Synthetic oligonucleotide
tacgaccgtgtcagatcgaacccgtctgga

SEQ ID NO: 213972 - DNA, 30 bp, Artificial Sequence
  Synthetic oligonucleotide
tcgtattacgggcgtgtctagtattctgga

SEQ ID NO: 213973 - DNA, 30 bp, Artificial Sequence
  Synthetic oligonucleotide
gtgtgccaactacgtgaagttagttctgga

SEQ ID NO: 213974 - DNA, 30 bp, Artificial Sequence
  Synthetic oligonucleotide
ggccgtatgggctcaatggtagcaagtgga

SEQ ID NO: 213975 - DNA, 30 bp, Artificial Sequence
  Synthetic oligonucleotide
ctagatggccaaaggcaaagcggaagtgga

SEQ ID NO: 213976 - DNA, 30 bp, Artificial Sequence
  Synthetic oligonucleotide
tcgttggtttgctaggttccgtggagtgga

SEQ ID NO: 213977 - DNA, 30 bp, Artificial Sequence
  Synthetic oligonucleotide
atcgatgtcatcgcaagttatgaacgtgga

SEQ ID NO: 213978 - DNA, 30 bp, Artificial Sequence
  Synthetic oligonucleotide
ctacgtacgttgggcttattacaaggtgga

SEQ ID NO: 213979 - DNA, 30 bp, Artificial Sequence
  Synthetic oligonucleotide
ctagcagtaaggaatctccatccaggtgga

SEQ ID NO: 213980 - DNA, 30 bp, Artificial Sequence
  Synthetic oligonucleotide
cttgactgcgattctcacgtatacggtgga

SEQ ID NO: 213981 - DNA, 30 bp, Artificial Sequence
  Synthetic oligonucleotide
gctcgtccgtatggccttcggagcggtgga

SEQ ID NO: 213982 - DNA, 30 bp, Artificial Sequence
  Synthetic oligonucleotide
aagggggggtattgacatcctcatggtgga

SEQ ID NO: 213983 - DNA, 30 bp, Artificial Sequence
  Synthetic oligonucleotide
gcgattgatggccgggttccccgtggtgga

SEQ ID NO: 213984 - DNA, 30 bp, Artificial Sequence
  Synthetic oligonucleotide
cccagcgttttaaacatagaaaaatgtgga

SEQ ID NO: 213985 - DNA, 30 bp, Artificial Sequence
  Synthetic oligonucleotide
agttctgacaatcgagcactagcctgtgga

SEQ ID NO: 213986 - DNA, 30 bp, Artificial Sequence
  Synthetic oligonucleotide
tctagtgaggcttaacggagggtctgtgga

SEQ ID NO: 213987 - DNA, 30 bp, Artificial Sequence
  Synthetic oligonucleotide
acccttcctagctctcgcctattctgtgga

SEQ ID NO: 213988 - DNA, 30 bp, Artificial Sequence
  Synthetic oligonucleotide
gccagggatatgcgcatgacaaaaattgga

SEQ ID NO: 213989 - DNA, 30 bp, Artificial Sequence
  Synthetic oligonucleotide
gcgatcgaggtaccagttcttgaaattgga

SEQ ID NO: 213990 - DNA, 30 bp, Artificial Sequence
  Synthetic oligonucleotide
cacttccataggccaggccctacaattgga

SEQ ID NO: 213991 - DNA, 30 bp, Artificial Sequence
  Synthetic oligonucleotide
taaggagaacacatactatatccaattgga

SEQ ID NO: 213992 - DNA, 30 bp, Artificial Sequence
  Synthetic oligonucleotide
ctattggactgcttaaaaaattgaattgga

SEQ ID NO: 213993 - DNA, 30 bp, Artificial Sequence
  Synthetic oligonucleotide
cttccggactttcccagagggggcattgga

SEQ ID NO: 213994 - DNA, 30 bp, Artificial Sequence
  Synthetic oligonucleotide
agcaggtatttcgcggaaattatcattgga

SEQ ID NO: 213995 - DNA, 30 bp, Artificial Sequence
  Synthetic oligonucleotide
tcttaagccagcccggggcacgtcattgga

SEQ ID NO: 213996 - DNA, 30 bp, Artificial Sequence
  Synthetic oligonucleotide
actcgcacctcgtgttttagcagacttgga

SEQ ID NO: 213997 - DNA, 30 bp, Artificial Sequence
  Synthetic oligonucleotide
acgtaaagttcatagttacggggacttgga

SEQ ID NO: 213998 - DNA, 30 bp, Artificial Sequence
  Synthetic oligonucleotide
gaagcgcacagcttaaattagaaccttgga

SEQ ID NO: 213999 - DNA, 30 bp, Artificial Sequence
  Synthetic oligonucleotide
ggtccattgcaaagctacttattagttgga

SEQ ID NO: 214000 - DNA, 30 bp, Artificial Sequence
  Synthetic oligonucleotide
cgcttgtgccagatcagatattccgttgga

SEQ ID NO: 214001 - DNA, 30 bp, Artificial Sequence
  Synthetic oligonucleotide
aagaccggctgtctctacaactaggttgga

SEQ ID NO: 214002 - DNA, 31 bp, Artificial Sequence
  Synthetic oligonucleotide
aacacgcgctcacgcttgtgcgtatgttgga

SEQ ID NO: 214003 - DNA, 30 bp, Artificial Sequence
  Synthetic oligonucleotide
acttagaggctcgagctcgctgctgttgga

SEQ ID NO: 214004 - DNA, 30 bp, Artificial Sequence
  Synthetic oligonucleotide
agtgggtgaggtagccgcgcggttgttgga

SEQ ID NO: 214005 - DNA, 30 bp, Artificial Sequence
  Synthetic oligonucleotide
caccgagggtttacaatactcgcatttgga

SEQ ID NO: 214006 - DNA, 30 bp, Artificial Sequence
  Synthetic oligonucleotide
aaagaacatgaaatcaccacatcatttgga

SEQ ID NO: 214007 - DNA, 30 bp, Artificial Sequence
  Synthetic oligonucleotide
ggtggggagttttgcaaggacggatttgga

SEQ ID NO: 214008 - DNA, 30 bp, Artificial Sequence
  Synthetic oligonucleotide
agatcgacccaggtacgtaggtcgtttgga

SEQ ID NO: 214009 - DNA, 30 bp, Artificial Sequence
  Synthetic oligonucleotide
gagcgtgtgtggtcaggtatccattttgga

SEQ ID NO: 214010 - DNA, 30 bp, Artificial Sequence
  Synthetic oligonucleotide
cactgcacctatgcaaatggctcttttgga

SEQ ID NO: 214011 - DNA, 30 bp, Artificial Sequence
  Synthetic oligonucleotide
cgcataaagacacctatatattgttttgga

SEQ ID NO: 214012 - DNA, 30 bp, Artificial Sequence
  Synthetic oligonucleotide
attggcgcgcctaagctcaggacaaaatga

SEQ ID NO: 214013 - DNA, 30 bp, Artificial Sequence
  Synthetic oligonucleotide
gagacggaacgatattgaagctacaaatga

SEQ ID NO: 214014 - DNA, 30 bp, Artificial Sequence
  Synthetic oligonucleotide
gcctgggcagctgggatggtacccaaatga

SEQ ID NO: 214015 - DNA, 30 bp, Artificial Sequence
  Synthetic oligonucleotide
ggaccgtttgtgctcaagggctccaaatga

SEQ ID NO: 214016 - DNA, 30 bp, Artificial Sequence
  Synthetic oligonucleotide
ttgcctccagggatcccagcgacgaaatga

SEQ ID NO: 214017 - DNA, 30 bp, Artificial Sequence
  Synthetic oligonucleotide
agtcgtggatcacagcagcctaggaaatga

SEQ ID NO: 214018 - DNA, 30 bp, Artificial Sequence
  Synthetic oligonucleotide
ggctggggttttggtatgccattccaatga

SEQ ID NO: 214019 - DNA, 30 bp, Artificial Sequence
  Synthetic oligonucleotide
gtgagtcatgattgcatacataggcaatga

SEQ ID NO: 214020 - DNA, 30 bp, Artificial Sequence
  Synthetic oligonucleotide
gggggtccgtccttagactattggcaatga

SEQ ID NO: 214021 - DNA, 30 bp, Artificial Sequence
  Synthetic oligonucleotide
cgtgtcaatcttcgggtccagaaagaatga

SEQ ID NO: 214022 - DNA, 30 bp, Artificial Sequence
  Synthetic oligonucleotide
catcggggtgacactaccgcaaccgaatga

SEQ ID NO: 214023 - DNA, 30 bp, Artificial Sequence
  Synthetic oligonucleotide
catttaaaccgttgataaaattgggaatga

SEQ ID NO: 214024 - DNA, 30 bp, Artificial Sequence
  Synthetic oligonucleotide
aggttgcaggtagctaataggctggaatga

SEQ ID NO: 214025 - DNA, 30 bp, Artificial Sequence
  Synthetic oligonucleotide
ccaatgccagacgagaatacggatgaatga

SEQ ID NO: 214026 - DNA, 30 bp, Artificial Sequence
  Synthetic oligonucleotide
gtatcaaacccagcgcgaagggttgaatga

SEQ ID NO: 214027 - DNA, 30 bp, Artificial Sequence
  Synthetic oligonucleotide
gcagcgagcacgtaaatccggatataatga

SEQ ID NO: 214028 - DNA, 30 bp, Artificial Sequence
  Synthetic oligonucleotide
cacacgagaagaaatttctcacactaatga

SEQ ID NO: 214029 - DNA, 30 bp, Artificial Sequence
  Synthetic oligonucleotide
ttgcactgtctgcgaaagtatcattaatga

SEQ ID NO: 214030 - DNA, 30 bp, Artificial Sequence
  Synthetic oligonucleotide
cttccggtgcaaacgacgcgatgttaatga

SEQ ID NO: 214031 - DNA, 30 bp, Artificial Sequence
  Synthetic oligonucleotide
agatggattacgccatcggtatgttaatga

SEQ ID NO: 214032 - DNA, 30 bp, Artificial Sequence
  Synthetic oligonucleotide
ctaaaatgcatacaggcatgaacgacatga

SEQ ID NO: 214033 - DNA, 30 bp, Artificial Sequence
  Synthetic oligonucleotide
gtcgagctcggttcttagttttatacatga

SEQ ID NO: 214034 - DNA, 30 bp, Artificial Sequence
  Synthetic oligonucleotide
acctagtgccaacgtgtctagttgccatga

SEQ ID NO: 214035 - DNA, 30 bp, Artificial Sequence
  Synthetic oligonucleotide
gaggcacaagctactcattctcccgcatga

SEQ ID NO: 214036 - DNA, 30 bp, Artificial Sequence
  Synthetic oligonucleotide
agattccagtcagtctcgggtctggcatga

SEQ ID NO: 214037 - DNA, 30 bp, Artificial Sequence
  Synthetic oligonucleotide
ccaggatcgtccatttacctcgtggcatga

SEQ ID NO: 214038 - DNA, 30 bp, Artificial Sequence
  Synthetic oligonucleotide
agtctgtcccttgccagtgcatctgcatga

SEQ ID NO: 214039 - DNA, 30 bp, Artificial Sequence
  Synthetic oligonucleotide
aggggtggcatttaagttacccttgcatga

SEQ ID NO: 214040 - DNA, 30 bp, Artificial Sequence
  Synthetic oligonucleotide
catagacttggtcagccgaatatatcatga

SEQ ID NO: 214041 - DNA, 30 bp, Artificial Sequence
  Synthetic oligonucleotide
aagtgtctcccagaataggaccattcatga

SEQ ID NO: 214042 - DNA, 30 bp, Artificial Sequence
  Synthetic oligonucleotide
ttacgagcgtcctcgtatataccaagatga

SEQ ID NO: 214043 - DNA, 30 bp, Artificial Sequence
  Synthetic oligonucleotide
cttcgggggatgtgggcgtcgtcaagatga

SEQ ID NO: 214044 - DNA, 30 bp, Artificial Sequence
  Synthetic oligonucleotide
tgggcctcaatctcggaggtgctcagatga

SEQ ID NO: 214045 - DNA, 30 bp, Artificial Sequence
  Synthetic oligonucleotide
cggcaggcgtaagttcaattctatagatga

SEQ ID NO: 214046 - DNA, 30 bp, Artificial Sequence
  Synthetic oligonucleotide
agcagatattttctccccgcaattcgatga

SEQ ID NO: 214047 - DNA, 30 bp, Artificial Sequence
  Synthetic oligonucleotide
gaggtgattagagcgttgtgactgggatga

SEQ ID NO: 214048 - DNA, 30 bp, Artificial Sequence
  Synthetic oligonucleotide
tcggtcatcacgcgggaaaggactggatga

SEQ ID NO: 214049 - DNA, 30 bp, Artificial Sequence
  Synthetic oligonucleotide
atcgataagcggttatcaggggtatgatga

SEQ ID NO: 214050 - DNA, 30 bp, Artificial Sequence
  Synthetic oligonucleotide
taaggtgttatggttaagtctcgctgatga

SEQ ID NO: 214051 - DNA, 30 bp, Artificial Sequence
  Synthetic oligonucleotide
ttgaagatctttcggacgatacaaatatga

SEQ ID NO: 214052 - DNA, 30 bp, Artificial Sequence
  Synthetic oligonucleotide
gcccgcgcaaaaggggaccgagaaatatga

SEQ ID NO: 214053 - DNA, 30 bp, Artificial Sequence
  Synthetic oligonucleotide
atagctactagatgactatgaacaatatga

SEQ ID NO: 214054 - DNA, 30 bp, Artificial Sequence
  Synthetic oligonucleotide
ggggtcggtacaactcacatcggaatatga

SEQ ID NO: 214055 - DNA, 30 bp, Artificial Sequence
  Synthetic oligonucleotide
ataatcacggtcgttcgaagccccatatga

SEQ ID NO: 214056 - DNA, 30 bp, Artificial Sequence
  Synthetic oligonucleotide
ccgttcaaaggtaatccactcagcatatga

SEQ ID NO: 214057 - DNA, 30 bp, Artificial Sequence
  Synthetic oligonucleotide
aatcgtgcataaaatggagttctcatatga

SEQ ID NO: 214058 - DNA, 30 bp, Artificial Sequence
  Synthetic oligonucleotide
tgatgaggcatttggtggtttgtcatatga

SEQ ID NO: 214059 - DNA, 30 bp, Artificial Sequence
  Synthetic oligonucleotide
gctcaaggcagagtatatcacaagatatga

SEQ ID NO: 214060 - DNA, 30 bp, Artificial Sequence
  Synthetic oligonucleotide
ggatacccgggatcaaaaactaaactatga

SEQ ID NO: 214061 - DNA, 30 bp, Artificial Sequence
  Synthetic oligonucleotide
ggcgctgtcttaatttagatatgactatga

SEQ ID NO: 214062 - DNA, 30 bp, Artificial Sequence
  Synthetic oligonucleotide
gcggatgcactatgttactacccgctatga

SEQ ID NO: 214063 - DNA, 30 bp, Artificial Sequence
  Synthetic oligonucleotide
cagcctagtatgaacataacgtctctatga

SEQ ID NO: 214064 - DNA, 30 bp, Artificial Sequence
  Synthetic oligonucleotide
gataatataaagtatactgccgttctatga

SEQ ID NO: 214065 - DNA, 30 bp, Artificial Sequence
  Synthetic oligonucleotide
ctctgcggtaacggacaacgaaaagtatga

SEQ ID NO: 214066 - DNA, 30 bp, Artificial Sequence
  Synthetic oligonucleotide
aggggtcacttatagcaaccttaagtatga

SEQ ID NO: 214067 - DNA, 30 bp, Artificial Sequence
  Synthetic oligonucleotide
atgagaggtccagcggtgagttacgtatga

SEQ ID NO: 214068 - DNA, 30 bp, Artificial Sequence
  Synthetic oligonucleotide
cctcaaacgcgtatcagatactgcgtatga

SEQ ID NO: 214069 - DNA, 30 bp, Artificial Sequence
  Synthetic oligonucleotide
gctcaaatagtctgcggttattgcgtatga

SEQ ID NO: 214070 - DNA, 30 bp, Artificial Sequence
  Synthetic oligonucleotide
ctcttcggagaccaggatttcctcgtatga

SEQ ID NO: 214071 - DNA, 30 bp, Artificial Sequence
  Synthetic oligonucleotide
atagacactaatgagttgatcgaggtatga

SEQ ID NO: 214072 - DNA, 30 bp, Artificial Sequence
  Synthetic oligonucleotide
gtgattatgataaattttgtaacggtatga

SEQ ID NO: 214073 - DNA, 30 bp, Artificial Sequence
  Synthetic oligonucleotide
gagacaatcttgtgatcgttgctggtatga

SEQ ID NO: 214074 - DNA, 30 bp, Artificial Sequence
  Synthetic oligonucleotide
aactacacgccctcataagcattggtatga

SEQ ID NO: 214075 - DNA, 30 bp, Artificial Sequence
  Synthetic oligonucleotide
gataatctacacagtgcgaatgaattatga

SEQ ID NO: 214076 - DNA, 30 bp, Artificial Sequence
  Synthetic oligonucleotide
ttctccgacatcagagtgactatattatga

SEQ ID NO: 214077 - DNA, 30 bp, Artificial Sequence
  Synthetic oligonucleotide
tagctcatcgctgtagcctgggacttatga

SEQ ID NO: 214078 - DNA, 30 bp, Artificial Sequence
  Synthetic oligonucleotide
ggatcaccacccccatacgagtatttatga

SEQ ID NO: 214079 - DNA, 30 bp, Artificial Sequence
  Synthetic oligonucleotide
taggaaattgacttcttgatcgccaactga

SEQ ID NO: 214080 - DNA, 30 bp, Artificial Sequence
  Synthetic oligonucleotide
caacgaaggccaaaattacggacgcactga

SEQ ID NO: 214081 - DNA, 30 bp, Artificial Sequence
  Synthetic oligonucleotide
tgctgtctcgtaaaaaggtgctctcactga

SEQ ID NO: 214082 - DNA, 30 bp, Artificial Sequence
  Synthetic oligonucleotide
caagtacgccccggtggtcattgtcactga

SEQ ID NO: 214083 - DNA, 30 bp, Artificial Sequence
  Synthetic oligonucleotide
tcagtcagcttatcaatgctatgagactga

SEQ ID NO: 214084 - DNA, 30 bp, Artificial Sequence
  Synthetic oligonucleotide
gccacaacgaacaggatggaagacgactga

SEQ ID NO: 214085 - DNA, 30 bp, Artificial Sequence
  Synthetic oligonucleotide
gccttgtttttggttcgattggtggactga

SEQ ID NO: 214086 - DNA, 30 bp, Artificial Sequence
  Synthetic oligonucleotide
ctcttccgaaagatatgagatcctgactga

SEQ ID NO: 214087 - DNA, 30 bp, Artificial Sequence
  Synthetic oligonucleotide
acattgagacgcgtaaaaaacttatactga

SEQ ID NO: 214088 - DNA, 30 bp, Artificial Sequence
  Synthetic oligonucleotide
aaatgaatcctggagtacaactggtactga

SEQ ID NO: 214089 - DNA, 30 bp, Artificial Sequence
  Synthetic oligonucleotide
tagggatcgaagttaggcatcgattactga

SEQ ID NO: 214090 - DNA, 30 bp, Artificial Sequence
  Synthetic oligonucleotide
ctatggtactgtgtttatagtgtttactga

SEQ ID NO: 214091 - DNA, 30 bp, Artificial Sequence
  Synthetic oligonucleotide
agcgggctttgaagtctcaagaaaacctga

SEQ ID NO: 214092 - DNA, 30 bp, Artificial Sequence
  Synthetic oligonucleotide
ttctgtgcaggccactgtgcgtaaacctga

SEQ ID NO: 214093 - DNA, 30 bp, Artificial Sequence
  Synthetic oligonucleotide
catagcctgaacggtgggagcatcacctga

SEQ ID NO: 214094 - DNA, 30 bp, Artificial Sequence
  Synthetic oligonucleotide
cgtcattattgcaataaggctgcgacctga

SEQ ID NO: 214095 - DNA, 30 bp, Artificial Sequence
  Synthetic oligonucleotide
aggtattctgcaaactcaagaagtacctga

SEQ ID NO: 214096 - DNA, 30 bp, Artificial Sequence
  Synthetic oligonucleotide
agaaccggtttgaagggtatttgtacctga

SEQ ID NO: 214097 - DNA, 30 bp, Artificial Sequence
  Synthetic oligonucleotide
ccttcgcgtcagtgcggccactttacctga

SEQ ID NO: 214098 - DNA, 30 bp, Artificial Sequence
  Synthetic oligonucleotide
tatacgggaagtgaatcgacacgaccctga

SEQ ID NO: 214099 - DNA, 30 bp, Artificial Sequence
  Synthetic oligonucleotide
atgtgaaagtcagctaccgccgtaccctga

SEQ ID NO: 214100 - DNA, 30 bp, Artificial Sequence
  Synthetic oligonucleotide
gcgaagttcggttaataaccatctccctga

SEQ ID NO: 214101 - DNA, 30 bp, Artificial Sequence
  Synthetic oligonucleotide
tgtctcgtgtaagacaactccgttccctga

SEQ ID NO: 214102 - DNA, 30 bp, Artificial Sequence
  Synthetic oligonucleotide
aggaaggagtccgggtgggtttaagcctga

SEQ ID NO: 214103 - DNA, 30 bp, Artificial Sequence
  Synthetic oligonucleotide
cataagtgaccttgccctaaccatgcctga

SEQ ID NO: 214104 - DNA, 30 bp, Artificial Sequence
  Synthetic oligonucleotide
ctgactagtgagattcggcatcaatcctga

SEQ ID NO: 214105 - DNA, 30 bp, Artificial Sequence
  Synthetic oligonucleotide
tgccggtaaagcatatgatttgcatcctga

SEQ ID NO: 214106 - DNA, 30 bp, Artificial Sequence
  Synthetic oligonucleotide
ggtatgggtgtcccatagtaaagatcctga

SEQ ID NO: 214107 - DNA, 30 bp, Artificial Sequence
  Synthetic oligonucleotide
aagcactctagttgacgttgaacctcctga

SEQ ID NO: 214108 - DNA, 30 bp, Artificial Sequence
  Synthetic oligonucleotide
atgaagaacataaattggggcgcttcctga

SEQ ID NO: 214109 - DNA, 30 bp, Artificial Sequence
  Synthetic oligonucleotide
cgcaacactcgagagaacttatcttcctga

SEQ ID NO: 214110 - DNA, 30 bp, Artificial Sequence
  Synthetic oligonucleotide
cggacacttgtagaagcgggactttcctga

SEQ ID NO: 214111 - DNA, 30 bp, Artificial Sequence
  Synthetic oligonucleotide
gacggagtgtaaaacagtacaataagctga

SEQ ID NO: 214112 - DNA, 30 bp, Artificial Sequence
  Synthetic oligonucleotide
gttcagcgctacccattaagaataagctga

SEQ ID NO: 214113 - DNA, 30 bp, Artificial Sequence
  Synthetic oligonucleotide
tggaatctgaacagggtcacacccagctga

SEQ ID NO: 214114 - DNA, 30 bp, Artificial Sequence
  Synthetic oligonucleotide
aggttagtgtgtgtgtcggcgctgagctga

SEQ ID NO: 214115 - DNA, 30 bp, Artificial Sequence
  Synthetic oligonucleotide
tgggagtaaactgtacaaaaacctcgctga

SEQ ID NO: 214116 - DNA, 30 bp, Artificial Sequence
  Synthetic oligonucleotide
ctaccttttatcgggttccattaatgctga

SEQ ID NO: 214117 - DNA, 30 bp, Artificial Sequence
  Synthetic oligonucleotide
tcaatgtaccagttaaaaataatatgctga

SEQ ID NO: 214118 - DNA, 30 bp, Artificial Sequence
  Synthetic oligonucleotide
ttgtgtaaatgcgaatccgccgcctgctga

SEQ ID NO: 214119 - DNA, 30 bp, Artificial Sequence
  Synthetic oligonucleotide
tggagcgttcccccgtcggccgggtgctga

SEQ ID NO: 214120 - DNA, 30 bp, Artificial Sequence
  Synthetic oligonucleotide
gaaggtaattcatccggctcgtattgctga

SEQ ID NO: 214121 - DNA, 30 bp, Artificial Sequence
  Synthetic oligonucleotide
ttgggggtaaaaagtgtggaatcttgctga

SEQ ID NO: 214122 - DNA, 30 bp, Artificial Sequence
  Synthetic oligonucleotide
tagctactggactactggcttccaatctga

SEQ ID NO: 214123 - DNA, 30 bp, Artificial Sequence
  Synthetic oligonucleotide
aaggcttattgggggatgttcgtcatctga

SEQ ID NO: 214124 - DNA, 30 bp, Artificial Sequence
  Synthetic oligonucleotide
tctattctgaataatctttatgcgatctga

SEQ ID NO: 214125 - DNA, 30 bp, Artificial Sequence
  Synthetic oligonucleotide
ggagcgtaagttaatttcgacgggatctga

SEQ ID NO: 214126 - DNA, 30 bp, Artificial Sequence
  Synthetic oligonucleotide
cggcttcaatgtgcagtctcgactatctga

SEQ ID NO: 214127 - DNA, 30 bp, Artificial Sequence
  Synthetic oligonucleotide
gggtgggaatagaaccgtttactactctga

SEQ ID NO: 214128 - DNA, 30 bp, Artificial Sequence
  Synthetic oligonucleotide
cgtgcgtgcattggagtatcgcagctctga

SEQ ID NO: 214129 - DNA, 30 bp, Artificial Sequence
  Synthetic oligonucleotide
ggaaatggaccgcgcctactagagctctga

SEQ ID NO: 214130 - DNA, 30 bp, Artificial Sequence
  Synthetic oligonucleotide
gtagattcagccccgatgtactcgctctga

SEQ ID NO: 214131 - DNA, 30 bp, Artificial Sequence
  Synthetic oligonucleotide
tggaatgcactctcatctcaaaatctctga

SEQ ID NO: 214132 - DNA, 30 bp, Artificial Sequence
  Synthetic oligonucleotide
tatcttcccgagtcgagctttagagtctga

SEQ ID NO: 214133 - DNA, 30 bp, Artificial Sequence
  Synthetic oligonucleotide
ccaacacgaccggagatagatctggtctga

SEQ ID NO: 214134 - DNA, 30 bp, Artificial Sequence
  Synthetic oligonucleotide
ttttgaacaccgaccaaatggatattctga

SEQ ID NO: 214135 - DNA, 30 bp, Artificial Sequence
  Synthetic oligonucleotide
ctttcaagcaagtggatgattggcttctga

SEQ ID NO: 214136 - DNA, 30 bp, Artificial Sequence
  Synthetic oligonucleotide
tacggctcccgagaaagagttctgttctga

SEQ ID NO: 214137 - DNA, 30 bp, Artificial Sequence
  Synthetic oligonucleotide
caataggaataaaagcttaatgctttctga

SEQ ID NO: 214138 - DNA, 30 bp, Artificial Sequence
  Synthetic oligonucleotide
accagtttttgaaggcccaagtcaaagtga

SEQ ID NO: 214139 - DNA, 30 bp, Artificial Sequence
  Synthetic oligonucleotide
acccgccagaaaattttgacgggcaagtga

SEQ ID NO: 214140 - DNA, 30 bp, Artificial Sequence
  Synthetic oligonucleotide
gccaggtgacgggtcaagtggggcaagtga

SEQ ID NO: 214141 - DNA, 30 bp, Artificial Sequence
  Synthetic oligonucleotide
atgtggagggttgtggttgtagataagtga

SEQ ID NO: 214142 - DNA, 30 bp, Artificial Sequence
  Synthetic oligonucleotide
tcagggatatcgcagcgcgatcctaagtga

SEQ ID NO: 214143 - DNA, 30 bp, Artificial Sequence
  Synthetic oligonucleotide
ctgcgcgttgtgtgcttgacaaatcagtga

SEQ ID NO: 214144 - DNA, 30 bp, Artificial Sequence
  Synthetic oligonucleotide
ttccgtccagtcgcagatgagtgcgagtga

SEQ ID NO: 214145 - DNA, 30 bp, Artificial Sequence
  Synthetic oligonucleotide
gctaaaaatatgtccaattgggtcgagtga

SEQ ID NO: 214146 - DNA, 30 bp, Artificial Sequence
  Synthetic oligonucleotide
ttgagacttatccgcgccagttaggagtga

SEQ ID NO: 214147 - DNA, 30 bp, Artificial Sequence
  Synthetic oligonucleotide
tggacaagtgcgttcttgtggggggagtga

SEQ ID NO: 214148 - DNA, 30 bp, Artificial Sequence
  Synthetic oligonucleotide
ggtaggcaattcacttcaatgctctagtga

SEQ ID NO: 214149 - DNA, 30 bp, Artificial Sequence
  Synthetic oligonucleotide
gggaaaggcattgtaaaatgcccgtagtga

SEQ ID NO: 214150 - DNA, 30 bp, Artificial Sequence
  Synthetic oligonucleotide
ctcgtctatgtagcgccagatcggtagtga

SEQ ID NO: 214151 - DNA, 30 bp, Artificial Sequence
  Synthetic oligonucleotide
aacatgcgcatgttcgagcgtcggtagtga

SEQ ID NO: 214152 - DNA, 30 bp, Artificial Sequence
  Synthetic oligonucleotide
taactttagtgttgaccgaaagggtagtga

SEQ ID NO: 214153 - DNA, 30 bp, Artificial Sequence
  Synthetic oligonucleotide
tgtacgacgccacagatgtcatcttagtga

SEQ ID NO: 214154 - DNA, 30 bp, Artificial Sequence
  Synthetic oligonucleotide
atacgccacaaggagacgcccatttagtga

SEQ ID NO: 214155 - DNA, 30 bp, Artificial Sequence
  Synthetic oligonucleotide
tctaagttgcacgcgattgttaggacgtga

SEQ ID NO: 214156 - DNA, 30 bp, Artificial Sequence
  Synthetic oligonucleotide
aggggcaggtgtaaatgttgtatgacgtga

SEQ ID NO: 214157 - DNA, 30 bp, Artificial Sequence
  Synthetic oligonucleotide
cgggcaggcggttgctatgattgtacgtga

SEQ ID NO: 214158 - DNA, 30 bp, Artificial Sequence
  Synthetic oligonucleotide
cggtcctggcccagatgtgccggagcgtga

SEQ ID NO: 214159 - DNA, 30 bp, Artificial Sequence
  Synthetic oligonucleotide
ggtacggcggtagagttctgaggcgcgtga

SEQ ID NO: 214160 - DNA, 30 bp, Artificial Sequence
  Synthetic oligonucleotide
actcgctaacaagttggatacagggcgtga

SEQ ID NO: 214161 - DNA, 30 bp, Artificial Sequence
  Synthetic oligonucleotide
gagtaaactcttactttatgaatggcgtga

SEQ ID NO: 214162 - DNA, 30 bp, Artificial Sequence
  Synthetic oligonucleotide
gcgccaaccttgtacggttggatggcgtga

SEQ ID NO: 214163 - DNA, 30 bp, Artificial Sequence
  Synthetic oligonucleotide
tgcgtggactcattacttgaccctgcgtga

SEQ ID NO: 214164 - DNA, 30 bp, Artificial Sequence
  Synthetic oligonucleotide
gaggtaagtaggaactcgcaggttgcgtga

SEQ ID NO: 214165 - DNA, 30 bp, Artificial Sequence
  Synthetic oligonucleotide
ccttctgagggacgggtcgggggatcgtga

SEQ ID NO: 214166 - DNA, 30 bp, Artificial Sequence
  Synthetic oligonucleotide
aacagatccaacgggctgacccagtcgtga

SEQ ID NO: 214167 - DNA, 30 bp, Artificial Sequence
  Synthetic oligonucleotide
gagggaaggctcagatgtgagacgtcgtga

SEQ ID NO: 214168 - DNA, 30 bp, Artificial Sequence
  Synthetic oligonucleotide
ctgaatgggcgattcaaactatcttcgtga

SEQ ID NO: 214169 - DNA, 30 bp, Artificial Sequence
  Synthetic oligonucleotide
tgttgaaagagcttattaggattaaggtga

SEQ ID NO: 214170 - DNA, 30 bp, Artificial Sequence
  Synthetic oligonucleotide
acgccctccaaacactctggccccaggtga

SEQ ID NO: 214171 - DNA, 30 bp, Artificial Sequence
  Synthetic oligonucleotide
ttaactgcctgcgctgaactttcgaggtga

SEQ ID NO: 214172 - DNA, 30 bp, Artificial Sequence
  Synthetic oligonucleotide
agaggcgctctgccttacccctggaggtga

SEQ ID NO: 214173 - DNA, 30 bp, Artificial Sequence
  Synthetic oligonucleotide
aacctgctatgagagcgaacgatacggtga

SEQ ID NO: 214174 - DNA, 30 bp, Artificial Sequence
  Synthetic oligonucleotide
gttcaacttgagcgttgtactatacggtga

SEQ ID NO: 214175 - DNA, 30 bp, Artificial Sequence
  Synthetic oligonucleotide
acaggctgtcatgttgtcagaacccggtga

SEQ ID NO: 214176 - DNA, 30 bp, Artificial Sequence
  Synthetic oligonucleotide
tattatgggcaatctaggaacggccggtga

SEQ ID NO: 214177 - DNA, 30 bp, Artificial Sequence
  Synthetic oligonucleotide
aggtatcataccgtggaactgtagcggtga

SEQ ID NO: 214178 - DNA, 30 bp, Artificial Sequence
  Synthetic oligonucleotide
taaacacttagggtccgtaatcggcggtga

SEQ ID NO: 214179 - DNA, 30 bp, Artificial Sequence
  Synthetic oligonucleotide
tgggttaataggtgagacccgtggcggtga

SEQ ID NO: 214180 - DNA, 30 bp, Artificial Sequence
  Synthetic oligonucleotide
ggatctccaaagcatctaatctttcggtga

SEQ ID NO: 214181 - DNA, 30 bp, Artificial Sequence
  Synthetic oligonucleotide
agaaataacatttgtaaaattgcagggtga

SEQ ID NO: 214182 - DNA, 30 bp, Artificial Sequence
  Synthetic oligonucleotide
ggaatcacacgcgatatccagcgagggtga

SEQ ID NO: 214183 - DNA, 30 bp, Artificial Sequence
  Synthetic oligonucleotide
gtcatgtgatagttagtataactagggtga

SEQ ID NO: 214184 - DNA, 30 bp, Artificial Sequence
  Synthetic oligonucleotide
ccggctggctatggacgacaacacgggtga

SEQ ID NO: 214185 - DNA, 30 bp, Artificial Sequence
  Synthetic oligonucleotide
aaacacagaataggagcggtgggcgggtga

SEQ ID NO: 214186 - DNA, 30 bp, Artificial Sequence
  Synthetic oligonucleotide
tagaagctgggggagacgtttcatgggtga

SEQ ID NO: 214187 - DNA, 30 bp, Artificial Sequence
  Synthetic oligonucleotide
tattcaataccgagaaaaccgtatgggtga

SEQ ID NO: 214188 - DNA, 30 bp, Artificial Sequence
  Synthetic oligonucleotide
tcattgactaggtatgtctgccgtgggtga

SEQ ID NO: 214189 - DNA, 30 bp, Artificial Sequence
  Synthetic oligonucleotide
tagtgaacaggtaagtgggactttgggtga

SEQ ID NO: 214190 - DNA, 30 bp, Artificial Sequence
  Synthetic oligonucleotide
gaagattgcgaagagctcaatgtatggtga

SEQ ID NO: 214191 - DNA, 30 bp, Artificial Sequence
  Synthetic oligonucleotide
ctcttagggcgtaagaccttggtctggtga

SEQ ID NO: 214192 - DNA, 30 bp, Artificial Sequence
  Synthetic oligonucleotide
gcaaactataagtgatgtcgcttgtggtga

SEQ ID NO: 214193 - DNA, 30 bp, Artificial Sequence
  Synthetic oligonucleotide
atcaagaagcgtttcgagtgtgcttggtga

SEQ ID NO: 214194 - DNA, 30 bp, Artificial Sequence
  Synthetic oligonucleotide
ggcgtcatcgggatcgagtccataatgtga

SEQ ID NO: 214195 - DNA, 30 bp, Artificial Sequence
  Synthetic oligonucleotide
ttcacaagagctgaggcgatccgcatgtga

SEQ ID NO: 214196 - DNA, 30 bp, Artificial Sequence
  Synthetic oligonucleotide
tcggctgtcctcgattgcgcgccgatgtga

SEQ ID NO: 214197 - DNA, 30 bp, Artificial Sequence
  Synthetic oligonucleotide
taggagtgccagagatttttcaaagtgtga

SEQ ID NO: 214198 - DNA, 30 bp, Artificial Sequence
  Synthetic oligonucleotide
cagcacatgaaattgtgtgaattggtgtga

SEQ ID NO: 214199 - DNA, 30 bp, Artificial Sequence
  Synthetic oligonucleotide
ccgtaggtgtagatctcagggttggtgtga

SEQ ID NO: 214200 - DNA, 30 bp, Artificial Sequence
  Synthetic oligonucleotide
atctgtcggaaacgcgtatacaatgtgtga

SEQ ID NO: 214201 - DNA, 30 bp, Artificial Sequence
  Synthetic oligonucleotide
tacagtctgtagaatcattctcttgtgtga

SEQ ID NO: 214202 - DNA, 30 bp, Artificial Sequence
  Synthetic oligonucleotide
aaaagccaagccattatccatgttgtgtga

SEQ ID NO: 214203 - DNA, 30 bp, Artificial Sequence
  Synthetic oligonucleotide
atcacccgactggatatgtagtagttgtga

SEQ ID NO: 214204 - DNA, 30 bp, Artificial Sequence
  Synthetic oligonucleotide
acagacggctccgaggtgagtgtgttgtga

SEQ ID NO: 214205 - DNA, 30 bp, Artificial Sequence
  Synthetic oligonucleotide
aggtgagcatagctgggatgtattttgtga

SEQ ID NO: 214206 - DNA, 30 bp, Artificial Sequence
  Synthetic oligonucleotide
gggttgacaaaaggtgctagaataaattga

SEQ ID NO: 214207 - DNA, 30 bp, Artificial Sequence
  Synthetic oligonucleotide
gtcgtacaagtgcatgtaggcgagaattga

SEQ ID NO: 214208 - DNA, 30 bp, Artificial Sequence
  Synthetic oligonucleotide
gatcaccgtaacctgtgtgtgatacattga

SEQ ID NO: 214209 - DNA, 30 bp, Artificial Sequence
  Synthetic oligonucleotide
actatcgattccgaatccttcagccattga

SEQ ID NO: 214210 - DNA, 30 bp, Artificial Sequence
  Synthetic oligonucleotide
acgttactcaggtttgttgaaatccattga

SEQ ID NO: 214211 - DNA, 30 bp, Artificial Sequence
  Synthetic oligonucleotide
cttctcagaggccgtgaacattcgcattga

SEQ ID NO: 214212 - DNA, 30 bp, Artificial Sequence
  Synthetic oligonucleotide
ggtcgtgactacttgcttcgcccagattga

SEQ ID NO: 214213 - DNA, 30 bp, Artificial Sequence
  Synthetic oligonucleotide
tacgatcatacgggaatgtcaggagattga

SEQ ID NO: 214214 - DNA, 30 bp, Artificial Sequence
  Synthetic oligonucleotide
actcgcgacatgatgtagcaaattgattga

SEQ ID NO: 214215 - DNA, 30 bp, Artificial Sequence
  Synthetic oligonucleotide
gagccgattccagaatgcgtttaatattga

SEQ ID NO: 214216 - DNA, 30 bp, Artificial Sequence
  Synthetic oligonucleotide
cgaagtttactacgtttatgcccatattga

SEQ ID NO: 214217 - DNA, 30 bp, Artificial Sequence
  Synthetic oligonucleotide
atccgcgctgaaggggatgacatatattga

SEQ ID NO: 214218 - DNA, 30 bp, Artificial Sequence
  Synthetic oligonucleotide
tgcgcgtgttcggctgttgcatagtattga

SEQ ID NO: 214219 - DNA, 30 bp, Artificial Sequence
  Synthetic oligonucleotide
gtgcgactgactccgataatgttgtattga

SEQ ID NO: 214220 - DNA, 30 bp, Artificial Sequence
  Synthetic oligonucleotide
aaccaagatagaaggctgcgtcgttattga

SEQ ID NO: 214221 - DNA, 30 bp, Artificial Sequence
  Synthetic oligonucleotide
tctgcagtaatgacctctggtgacacttga

SEQ ID NO: 214222 - DNA, 30 bp, Artificial Sequence
  Synthetic oligonucleotide
atgctagatgaaaggtttgtgcgcacttga

SEQ ID NO: 214223 - DNA, 30 bp, Artificial Sequence
  Synthetic oligonucleotide
agcacattatagcgataacatcgcacttga

SEQ ID NO: 214224 - DNA, 30 bp, Artificial Sequence
  Synthetic oligonucleotide
atggttacgagtgcccatggagatacttga

SEQ ID NO: 214225 - DNA, 30 bp, Artificial Sequence
  Synthetic oligonucleotide
ttaggacatcaaaataagtttattacttga

SEQ ID NO: 214226 - DNA, 30 bp, Artificial Sequence
  Synthetic oligonucleotide
agtgttgtcgataacagggaccgcccttga

SEQ ID NO: 214227 - DNA, 30 bp, Artificial Sequence
  Synthetic oligonucleotide
tgaaatagaggtatcgatattctcccttga

SEQ ID NO: 214228 - DNA, 30 bp, Artificial Sequence
  Synthetic oligonucleotide
atgcggtttgataaacacccgccagcttga

SEQ ID NO: 214229 - DNA, 30 bp, Artificial Sequence
  Synthetic oligonucleotide
gtcgcagataaacctctggtgcgagcttga

SEQ ID NO: 214230 - DNA, 30 bp, Artificial Sequence
  Synthetic oligonucleotide
gtcccgacaccggcacaatgaatagcttga

SEQ ID NO: 214231 - DNA, 30 bp, Artificial Sequence
  Synthetic oligonucleotide
ggtaggcttcttgttgcttagtcatcttga

SEQ ID NO: 214232 - DNA, 30 bp, Artificial Sequence
  Synthetic oligonucleotide
tggagctgctctactaatcgcggatcttga

SEQ ID NO: 214233 - DNA, 30 bp, Artificial Sequence
  Synthetic oligonucleotide
acgtgcagagcccgctaatatttctcttga

SEQ ID NO: 214234 - DNA, 30 bp, Artificial Sequence
  Synthetic oligonucleotide
cgtgtgggttgctgactgggcgggtcttga

SEQ ID NO: 214235 - DNA, 30 bp, Artificial Sequence
  Synthetic oligonucleotide
gacacatagtggactgagcacgattcttga

SEQ ID NO: 214236 - DNA, 30 bp, Artificial Sequence
  Synthetic oligonucleotide
gccaatcaacgatatacaatgggttcttga

SEQ ID NO: 214237 - DNA, 30 bp, Artificial Sequence
  Synthetic oligonucleotide
tagtgggttatgatggccgcaaaaagttga

SEQ ID NO: 214238 - DNA, 30 bp, Artificial Sequence
  Synthetic oligonucleotide
agtaggagactagtactcagatttagttga

SEQ ID NO: 214239 - DNA, 30 bp, Artificial Sequence
  Synthetic oligonucleotide
gaggttcgagccgaggctggagcacgttga

SEQ ID NO: 214240 - DNA, 30 bp, Artificial Sequence
  Synthetic oligonucleotide
ctagattcgtgctcggagtgccaccgttga

SEQ ID NO: 214241 - DNA, 30 bp, Artificial Sequence
  Synthetic oligonucleotide
acacagagacaattcttggtctttcgttga

SEQ ID NO: 214242 - DNA, 30 bp, Artificial Sequence
  Synthetic oligonucleotide
gcggccgcggacgtcaagactcaaggttga

SEQ ID NO: 214243 - DNA, 30 bp, Artificial Sequence
  Synthetic oligonucleotide
aggcatgctgatttcacagtatcaggttga

SEQ ID NO: 214244 - DNA, 30 bp, Artificial Sequence
  Synthetic oligonucleotide
ccaagtagcggttctaagctgctcggttga

SEQ ID NO: 214245 - DNA, 30 bp, Artificial Sequence
  Synthetic oligonucleotide
ggatagaagatggggcatgtatgtggttga

SEQ ID NO: 214246 - DNA, 30 bp, Artificial Sequence
  Synthetic oligonucleotide
tctccgccaaaattacgcacttgatgttga

SEQ ID NO: 214247 - DNA, 30 bp, Artificial Sequence
  Synthetic oligonucleotide
cctacggaacactagtcagtgcacctttga

SEQ ID NO: 214248 - DNA, 30 bp, Artificial Sequence
  Synthetic oligonucleotide
ggtgcggttacaaacgaatggggcctttga

SEQ ID NO: 214249 - DNA, 30 bp, Artificial Sequence
  Synthetic oligonucleotide
tcagcaggaagcaggtcctgatatctttga

SEQ ID NO: 214250 - DNA, 30 bp, Artificial Sequence
  Synthetic oligonucleotide
gaagtcagcgcctcaggtccacgtctttga

SEQ ID NO: 214251 - DNA, 30 bp, Artificial Sequence
  Synthetic oligonucleotide
gttgtcatgcgttgccgttagccagtttga

SEQ ID NO: 214252 - DNA, 30 bp, Artificial Sequence
  Synthetic oligonucleotide
gattatctgcaggctccagcccaggtttga

SEQ ID NO: 214253 - DNA, 30 bp, Artificial Sequence
  Synthetic oligonucleotide
cgaaaggggtgcataagcgcaggtgtttga

SEQ ID NO: 214254 - DNA, 30 bp, Artificial Sequence
  Synthetic oligonucleotide
aacaaggtggtgcagataccgaaattttga

SEQ ID NO: 214255 - DNA, 30 bp, Artificial Sequence
  Synthetic oligonucleotide
agtttcaactaacttccattgaaattttga

SEQ ID NO: 214256 - DNA, 30 bp, Artificial Sequence
  Synthetic oligonucleotide
gcgcaaagtcgatgatttttttaattttga

SEQ ID NO: 214257 - DNA, 30 bp, Artificial Sequence
  Synthetic oligonucleotide
gacgaaagcactatggagagcaaaaaaata

SEQ ID NO: 214258 - DNA, 37 bp, Artificial Sequence
  Synthetic oligonucleotide
ctacgcgggtaggtacgctctgccttcggtaaaaata

SEQ ID NO: 214259 - DNA, 30 bp, Artificial Sequence
  Synthetic oligonucleotide
gtccggccgctactaaaaaaacgcaaaata

SEQ ID NO: 214260 - DNA, 30 bp, Artificial Sequence
  Synthetic oligonucleotide
acgaagcggtggaggggcagccgcaaaata

SEQ ID NO: 214261 - DNA, 30 bp, Artificial Sequence
  Synthetic oligonucleotide
gactgaggcgacgtccgaaagatcaaaata

SEQ ID NO: 214262 - DNA, 30 bp, Artificial Sequence
  Synthetic oligonucleotide
atatcatgaattctagcatctttcaaaata

SEQ ID NO: 214263 - DNA, 30 bp, Artificial Sequence
  Synthetic oligonucleotide
cggatgcaaaggttgctggtgatacaaata

SEQ ID NO: 214264 - DNA, 30 bp, Artificial Sequence
  Synthetic oligonucleotide
cgttgggcaggatacagggccccgcaaata

SEQ ID NO: 214265 - DNA, 30 bp, Artificial Sequence
  Synthetic oligonucleotide
taactggggaggaggttatcccggcaaata

SEQ ID NO: 214266 - DNA, 30 bp, Artificial Sequence
  Synthetic oligonucleotide
gggcccaagagtatgcgtctcgggcaaata

SEQ ID NO: 214267 - DNA, 30 bp, Artificial Sequence
  Synthetic oligonucleotide
atcagagaacagaggactcatcgtcaaata

SEQ ID NO: 214268 - DNA, 30 bp, Artificial Sequence
  Synthetic oligonucleotide
attaacggtgattggtacatccaagaaata

SEQ ID NO: 214269 - DNA, 30 bp, Artificial Sequence
  Synthetic oligonucleotide
accaacgttccagttgtctccgaagaaata

SEQ ID NO: 214270 - DNA, 30 bp, Artificial Sequence
  Synthetic oligonucleotide
gaggaagtcaccagttatctaccagaaata

SEQ ID NO: 214271 - DNA, 30 bp, Artificial Sequence
  Synthetic oligonucleotide
cagtcaaaaggtctgatcgacaaggaaata

SEQ ID NO: 214272 - DNA, 30 bp, Artificial Sequence
  Synthetic oligonucleotide
gtggccccaaggggtcagactaatgaaata

SEQ ID NO: 214273 - DNA, 30 bp, Artificial Sequence
  Synthetic oligonucleotide
cttcaggaatagtataaaggtaatgaaata

SEQ ID NO: 214274 - DNA, 30 bp, Artificial Sequence
  Synthetic oligonucleotide
gattgtgtgatgtgacgggacagtgaaata

SEQ ID NO: 214275 - DNA, 30 bp, Artificial Sequence
  Synthetic oligonucleotide
ggagacatggctaggagctggatataaata

SEQ ID NO: 214276 - DNA, 30 bp, Artificial Sequence
  Synthetic oligonucleotide
ataggccttcaggctgtacggaggtaaata

SEQ ID NO: 214277 - DNA, 30 bp, Artificial Sequence
  Synthetic oligonucleotide
gacgattatactaccagagaagcttaaata

SEQ ID NO: 214278 - DNA, 30 bp, Artificial Sequence
  Synthetic oligonucleotide
ctaaacgcatagtgctctagaggttaaata

SEQ ID NO: 214279 - DNA, 30 bp, Artificial Sequence
  Synthetic oligonucleotide
tgatagacaagcgtcccctcagaaacaata

SEQ ID NO: 214280 - DNA, 30 bp, Artificial Sequence
  Synthetic oligonucleotide
cctagatgggggcaggaggcgtacacaata

SEQ ID NO: 214281 - DNA, 30 bp, Artificial Sequence
  Synthetic oligonucleotide
ggaggccgcaaagctcaatggcgcacaata

SEQ ID NO: 214282 - DNA, 30 bp, Artificial Sequence
  Synthetic oligonucleotide
ctatgattgcccacgtatctaaagacaata

SEQ ID NO: 214283 - DNA, 31 bp, Artificial Sequence
  Synthetic oligonucleotide
aaggaaacctgaaccacggcacctgacaata

SEQ ID NO: 214284 - DNA, 30 bp, Artificial Sequence
  Synthetic oligonucleotide
cgtccaaaaaaacccatgggaaatacaata

SEQ ID NO: 214285 - DNA, 30 bp, Artificial Sequence
  Synthetic oligonucleotide
ggtctaagaggtttagactgccaaccaata

SEQ ID NO: 214286 - DNA, 30 bp, Artificial Sequence
  Synthetic oligonucleotide
tactccatgcaaatcctgtccatcccaata

SEQ ID NO: 214287 - DNA, 30 bp, Artificial Sequence
  Synthetic oligonucleotide
tgtgtgtatgtgacgggacaaaatccaata

SEQ ID NO: 214288 - DNA, 30 bp, Artificial Sequence
  Synthetic oligonucleotide
ccctcagaaggccgagaaagtcgagcaata

SEQ ID NO: 214289 - DNA, 30 bp, Artificial Sequence
  Synthetic oligonucleotide
tttgcgcggataaggttcaacgtagcaata

SEQ ID NO: 214290 - DNA, 30 bp, Artificial Sequence
  Synthetic oligonucleotide
cagtacaatagcgtaaagtgacacgcaata

SEQ ID NO: 214291 - DNA, 30 bp, Artificial Sequence
  Synthetic oligonucleotide
ggtaatctcagagataaaggtaccgcaata

SEQ ID NO: 214292 - DNA, 30 bp, Artificial Sequence
  Synthetic oligonucleotide
taattcgaacagggagtcccgaaggcaata

SEQ ID NO: 214293 - DNA, 30 bp, Artificial Sequence
  Synthetic oligonucleotide
gctttccaaacagttcgggtgcgggcaata

SEQ ID NO: 214294 - DNA, 30 bp, Artificial Sequence
  Synthetic oligonucleotide
atcagacacttcccctgaaaaatggcaata

SEQ ID NO: 214295 - DNA, 30 bp, Artificial Sequence
  Synthetic oligonucleotide
agaggactgccttgtccggaagcatcaata

SEQ ID NO: 214296 - DNA, 30 bp, Artificial Sequence
  Synthetic oligonucleotide
gtacgagtccaaagctagggctcatcaata

SEQ ID NO: 214297 - DNA, 30 bp, Artificial Sequence
  Synthetic oligonucleotide
cctcatctaaggcggcattgctactcaata

SEQ ID NO: 214298 - DNA, 30 bp, Artificial Sequence
  Synthetic oligonucleotide
ttctgtgaaatctaaaacggatcttcaata

SEQ ID NO: 214299 - DNA, 31 bp, Artificial Sequence
  Synthetic oligonucleotide
ggcgccagggtcgtccgtaactggaagaata

SEQ ID NO: 214300 - DNA, 30 bp, Artificial Sequence
  Synthetic oligonucleotide
gaggcgtatcgcctcgaacgtgcgagaata

SEQ ID NO: 214301 - DNA, 30 bp, Artificial Sequence
  Synthetic oligonucleotide
tgtcctctgtggcgaccagtttttagaata

SEQ ID NO: 214302 - DNA, 30 bp, Artificial Sequence
  Synthetic oligonucleotide
tgcgtatctcaggtgatgagatgacgaata

SEQ ID NO: 214303 - DNA, 30 bp, Artificial Sequence
  Synthetic oligonucleotide
cacgggggtaagcgtagtcccctacgaata

SEQ ID NO: 214304 - DNA, 30 bp, Artificial Sequence
  Synthetic oligonucleotide
gctggcatcaattagaagtgcaaccgaata

SEQ ID NO: 214305 - DNA, 30 bp, Artificial Sequence
  Synthetic oligonucleotide
taccgtagcaacgtgacggcagcccgaata

SEQ ID NO: 214306 - DNA, 30 bp, Artificial Sequence
  Synthetic oligonucleotide
atccactaaaagcctgaaccatgccgaata

SEQ ID NO: 214307 - DNA, 30 bp, Artificial Sequence
  Synthetic oligonucleotide
aggtggcggggcgccgggctagagcgaata

SEQ ID NO: 214308 - DNA, 30 bp, Artificial Sequence
  Synthetic oligonucleotide
taatcaatccgtggagtgagggagcgaata

SEQ ID NO: 214309 - DNA, 30 bp, Artificial Sequence
  Synthetic oligonucleotide
gttcccggtatccaagtagtatatcgaata

SEQ ID NO: 214310 - DNA, 30 bp, Artificial Sequence
  Synthetic oligonucleotide
ctagacgataccaagtaagggagtcgaata

SEQ ID NO: 214311 - DNA, 30 bp, Artificial Sequence
  Synthetic oligonucleotide
ctcatctatcgcctggggggttgtcgaata

SEQ ID NO: 214312 - DNA, 30 bp, Artificial Sequence
  Synthetic oligonucleotide
gcatccgtcggtctcgccgcatgaggaata

SEQ ID NO: 214313 - DNA, 30 bp, Artificial Sequence
  Synthetic oligonucleotide
tgattcgaggcgagaaccattttaggaata

SEQ ID NO: 214314 - DNA, 30 bp, Artificial Sequence
  Synthetic oligonucleotide
tacaaggagagtgtccccgggcacggaata

SEQ ID NO: 214315 - DNA, 30 bp, Artificial Sequence
  Synthetic oligonucleotide
atgaaattgtcgagccaactaggcggaata

SEQ ID NO: 214316 - DNA, 30 bp, Artificial Sequence
  Synthetic oligonucleotide
atggaactggaatataacgattgcggaata

SEQ ID NO: 214317 - DNA, 30 bp, Artificial Sequence
  Synthetic oligonucleotide
gctttgggccatacgcctgcgctcggaata

SEQ ID NO: 214318 - DNA, 30 bp, Artificial Sequence
  Synthetic oligonucleotide
ggtaaaaaccagagatcagttaatggaata

SEQ ID NO: 214319 - DNA, 30 bp, Artificial Sequence
  Synthetic oligonucleotide
ctcccagtcatttatggagcgcgatgaata

SEQ ID NO: 214320 - DNA, 30 bp, Artificial Sequence
  Synthetic oligonucleotide
gatacgatcctagttggattaccgtgaata

SEQ ID NO: 214321 - DNA, 30 bp, Artificial Sequence
  Synthetic oligonucleotide
agtgggtgttcattgtacagatcgtgaata

SEQ ID NO: 214322 - DNA, 30 bp, Artificial Sequence
  Synthetic oligonucleotide
tccaccaaggggtaaagtattacttgaata

SEQ ID NO: 214323 - DNA, 30 bp, Artificial Sequence
  Synthetic oligonucleotide
cggaggtgtaatagttggatctcaataata

SEQ ID NO: 214324 - DNA, 30 bp, Artificial Sequence
  Synthetic oligonucleotide
agcctgggtgctctcaattgtggaataata

SEQ ID NO: 214325 - DNA, 30 bp, Artificial Sequence
  Synthetic oligonucleotide
cgatggtatcgaagatcccttccgataata

SEQ ID NO: 214326 - DNA, 30 bp, Artificial Sequence
  Synthetic oligonucleotide
tgggcgtttcggcccgtcgactcactaata

SEQ ID NO: 214327 - DNA, 30 bp, Artificial Sequence
  Synthetic oligonucleotide
cggttgagaaggcgtgtacggggactaata

SEQ ID NO: 214328 - DNA, 30 bp, Artificial Sequence
  Synthetic oligonucleotide
gcagaggctcgacgtaacgcactactaata

SEQ ID NO: 214329 - DNA, 30 bp, Artificial Sequence
  Synthetic oligonucleotide
ggggggaaccgtattaaacgcttactaata

SEQ ID NO: 214330 - DNA, 30 bp, Artificial Sequence
  Synthetic oligonucleotide
actcgccacagggtggaataattcctaata

SEQ ID NO: 214331 - DNA, 30 bp, Artificial Sequence
  Synthetic oligonucleotide
gggctgaggtcctacactacgcaagtaata

SEQ ID NO: 214332 - DNA, 30 bp, Artificial Sequence
  Synthetic oligonucleotide
cattaatagctcaggaaaatccgcgtaata

SEQ ID NO: 214333 - DNA, 30 bp, Artificial Sequence
  Synthetic oligonucleotide
atatcgcccgttgtccgcgtactcgtaata

SEQ ID NO: 214334 - DNA, 30 bp, Artificial Sequence
  Synthetic oligonucleotide
gtaagcgtgcttaagtatagctgggtaata

SEQ ID NO: 214335 - DNA, 30 bp, Artificial Sequence
  Synthetic oligonucleotide
cgaatcagagattggagttggctggtaata

SEQ ID NO: 214336 - DNA, 30 bp, Artificial Sequence
  Synthetic oligonucleotide
agaaaggcctaatcggtcgcgaatgtaata

SEQ ID NO: 214337 - DNA, 30 bp, Artificial Sequence
  Synthetic oligonucleotide
ggtaggctgccctattggatcgctgtaata

SEQ ID NO: 214338 - DNA, 30 bp, Artificial Sequence
  Synthetic oligonucleotide
cgcttctgccaccgtataatataattaata

SEQ ID NO: 214339 - DNA, 30 bp, Artificial Sequence
  Synthetic oligonucleotide
ggtcgccagactacggggtggatattaata

SEQ ID NO: 214340 - DNA, 30 bp, Artificial Sequence
  Synthetic oligonucleotide
aaccaggaactgaagtagggggacttaata

SEQ ID NO: 214341 - DNA, 30 bp, Artificial Sequence
  Synthetic oligonucleotide
atagcgaagcgagcaaatgataagttaata

SEQ ID NO: 214342 - DNA, 30 bp, Artificial Sequence
  Synthetic oligonucleotide
gggcgtaagcacttcatcgtgtatttaata

SEQ ID NO: 214343 - DNA, 30 bp, Artificial Sequence
  Synthetic oligonucleotide
gccccaggaagagaggtatttcgtttaata

SEQ ID NO: 214344 - DNA, 30 bp, Artificial Sequence
  Synthetic oligonucleotide
gggaaacgcatgaaattttgagttttaata

SEQ ID NO: 214345 - DNA, 30 bp, Artificial Sequence
  Synthetic oligonucleotide
ggcccatagagtcagcacttgagaaacata

SEQ ID NO: 214346 - DNA, 30 bp, Artificial Sequence
  Synthetic oligonucleotide
tagcaaggtttggaacgagagggcaacata

SEQ ID NO: 214347 - DNA, 30 bp, Artificial Sequence
  Synthetic oligonucleotide
aaagggacgccgtatggaggtctcaacata

SEQ ID NO: 214348 - DNA, 30 bp, Artificial Sequence
  Synthetic oligonucleotide
gctagtagcttacagatgtaatggaacata

SEQ ID NO: 214349 - DNA, 30 bp, Artificial Sequence
  Synthetic oligonucleotide
acttatgggtgcactcggtgtagtaacata

SEQ ID NO: 214350 - DNA, 30 bp, Artificial Sequence
  Synthetic oligonucleotide
gtcacgctgacggctgaactctagcacata

SEQ ID NO: 214351 - DNA, 30 bp, Artificial Sequence
  Synthetic oligonucleotide
cgcgacgtaagtgggtgccaagaagacata

SEQ ID NO: 214352 - DNA, 30 bp, Artificial Sequence
  Synthetic oligonucleotide
ataaaggcgaattctagcattccagacata

SEQ ID NO: 214353 - DNA, 30 bp, Artificial Sequence
  Synthetic oligonucleotide
ggggcatcttcggggtgcctggccgacata

SEQ ID NO: 214354 - DNA, 30 bp, Artificial Sequence
  Synthetic oligonucleotide
atgagcagtctgctagccctgggcgacata

SEQ ID NO: 214355 - DNA, 30 bp, Artificial Sequence
  Synthetic oligonucleotide
gaatttaagcgggcgaccggactcgacata

SEQ ID NO: 214356 - DNA, 30 bp, Artificial Sequence
  Synthetic oligonucleotide
tatcggaaccgcaagtgagggggggacata

SEQ ID NO: 214357 - DNA, 30 bp, Artificial Sequence
  Synthetic oligonucleotide
aaggacttgacagtgactcggaaatacata

SEQ ID NO: 214358 - DNA, 30 bp, Artificial Sequence
  Synthetic oligonucleotide
tggatcgctgtcccgaggggactatacata

SEQ ID NO: 214359 - DNA, 30 bp, Artificial Sequence
  Synthetic oligonucleotide
gttgcacacactgggatgaagaactacata

SEQ ID NO: 214360 - DNA, 30 bp, Artificial Sequence
  Synthetic oligonucleotide
tagatggaggttcaacttgttgactacata

SEQ ID NO: 214361 - DNA, 30 bp, Artificial Sequence
  Synthetic oligonucleotide
ccaaccagcagtaagggggaggtctacata

SEQ ID NO: 214362 - DNA, 30 bp, Artificial Sequence
  Synthetic oligonucleotide
cggtgatcttcaatgcaaaggaagtacata

SEQ ID NO: 214363 - DNA, 30 bp, Artificial Sequence
  Synthetic oligonucleotide
acccaccacgaattgtgaggccagtacata

SEQ ID NO: 214364 - DNA, 30 bp, Artificial Sequence
  Synthetic oligonucleotide
taaacatttcctggggacccatggtacata

SEQ ID NO: 214365 - DNA, 30 bp, Artificial Sequence
  Synthetic oligonucleotide
acttccgcaatattagtctccgattacata

SEQ ID NO: 214366 - DNA, 30 bp, Artificial Sequence
  Synthetic oligonucleotide
acacatggcccaatgtattagtgcaccata

SEQ ID NO: 214367 - DNA, 30 bp, Artificial Sequence
  Synthetic oligonucleotide
agaacttgaattggaacgataaagaccata

SEQ ID NO: 214368 - DNA, 30 bp, Artificial Sequence
  Synthetic oligonucleotide
cagacaacgccaaccctaatggggaccata

SEQ ID NO: 214369 - DNA, 30 bp, Artificial Sequence
  Synthetic oligonucleotide
caggtgtttaaagccgcctggcccgccata

SEQ ID NO: 214370 - DNA, 30 bp, Artificial Sequence
  Synthetic oligonucleotide
taaaccgagtgcactcgccggacggccata

SEQ ID NO: 214371 - DNA, 30 bp, Artificial Sequence
  Synthetic oligonucleotide
accacgggtcgagataggacagctgccata

SEQ ID NO: 214372 - DNA, 30 bp, Artificial Sequence
  Synthetic oligonucleotide
ggggtacaaagcggtcgttgacaatccata

SEQ ID NO: 214373 - DNA, 30 bp, Artificial Sequence
  Synthetic oligonucleotide
tgtgactgatggcaggtgttatgatccata

SEQ ID NO: 214374 - DNA, 30 bp, Artificial Sequence
  Synthetic oligonucleotide
ggatgggtcaaccgttcgacccgttccata

SEQ ID NO: 214375 - DNA, 30 bp, Artificial Sequence
  Synthetic oligonucleotide
atgttacgtcacttccggcaggtttccata

SEQ ID NO: 214376 - DNA, 30 bp, Artificial Sequence
  Synthetic oligonucleotide
actgctttgggggaaagtactctaagcata

SEQ ID NO: 214377 - DNA, 30 bp, Artificial Sequence
  Synthetic oligonucleotide
tacgttcatattccccgaacatgcagcata

SEQ ID NO: 214378 - DNA, 30 bp, Artificial Sequence
  Synthetic oligonucleotide
ccacgtgtctgtgaagaaggcctcagcata

SEQ ID NO: 214379 - DNA, 30 bp, Artificial Sequence
  Synthetic oligonucleotide
cttagttcgtaacgtccgaccatgagcata

SEQ ID NO: 214380 - DNA, 30 bp, Artificial Sequence
  Synthetic oligonucleotide
tagttacatgttaaagtttcactgagcata

SEQ ID NO: 214381 - DNA, 30 bp, Artificial Sequence
  Synthetic oligonucleotide
aagtgttgttggttcactaaggatagcata

SEQ ID NO: 214382 - DNA, 30 bp, Artificial Sequence
  Synthetic oligonucleotide
tctagggggttcgagccgcgggagcgcata

SEQ ID NO: 214383 - DNA, 30 bp, Artificial Sequence
  Synthetic oligonucleotide
gtgcatgtgaagactagggcaacgcgcata

SEQ ID NO: 214384 - DNA, 30 bp, Artificial Sequence
  Synthetic oligonucleotide
ccaagtgcctaaagtagggagctcggcata

SEQ ID NO: 214385 - DNA, 30 bp, Artificial Sequence
  Synthetic oligonucleotide
atacgctagcggattcgaacacggggcata

SEQ ID NO: 214386 - DNA, 30 bp, Artificial Sequence
  Synthetic oligonucleotide
tcagggccttgctcggataacgggggcata

SEQ ID NO: 214387 - DNA, 30 bp, Artificial Sequence
  Synthetic oligonucleotide
ttaaaaatgcaggctgtgaatttgggcata

SEQ ID NO: 214388 - DNA, 30 bp, Artificial Sequence
  Synthetic oligonucleotide
caagagggaactagggacttctatggcata

SEQ ID NO: 214389 - DNA, 30 bp, Artificial Sequence
  Synthetic oligonucleotide
agcggactaggggccctttctaggtgcata

SEQ ID NO: 214390 - DNA, 30 bp, Artificial Sequence
  Synthetic oligonucleotide
gtgccaccaatcggaggccctgtgtgcata

SEQ ID NO: 214391 - DNA, 30 bp, Artificial Sequence
  Synthetic oligonucleotide
taggtgggcggttacctcgggcattgcata

SEQ ID NO: 214392 - DNA, 30 bp, Artificial Sequence
  Synthetic oligonucleotide
ccgtttcaattagctacgtcactttgcata

SEQ ID NO: 214393 - DNA, 30 bp, Artificial Sequence
  Synthetic oligonucleotide
cgccagtccgccttcatgaagtaaatcata

SEQ ID NO: 214394 - DNA, 30 bp, Artificial Sequence
  Synthetic oligonucleotide
acggtcttggtcgccggaccccacatcata

SEQ ID NO: 214395 - DNA, 30 bp, Artificial Sequence
  Synthetic oligonucleotide
catctggatgccctagaacattgcatcata

SEQ ID NO: 214396 - DNA, 30 bp, Artificial Sequence
  Synthetic oligonucleotide
atgtatgcatggtaagctccacctatcata

SEQ ID NO: 214397 - DNA, 30 bp, Artificial Sequence
  Synthetic oligonucleotide
agttcgattattagcacgcgtagtatcata

SEQ ID NO: 214398 - DNA, 30 bp, Artificial Sequence
  Synthetic oligonucleotide
cggtccgatataatgctgcccggactcata

SEQ ID NO: 214399 - DNA, 30 bp, Artificial Sequence
  Synthetic oligonucleotide
agggctctggaagaaagccttcacctcata

SEQ ID NO: 214400 - DNA, 30 bp, Artificial Sequence
  Synthetic oligonucleotide
gcagccggacattagaaaatggccctcata

SEQ ID NO: 214401 - DNA, 30 bp, Artificial Sequence
  Synthetic oligonucleotide
accacaaaagttacggtactcgttctcata

SEQ ID NO: 214402 - DNA, 30 bp, Artificial Sequence
  Synthetic oligonucleotide
gggcgttcgtttcatgcggggaaagtcata

SEQ ID NO: 214403 - DNA, 30 bp, Artificial Sequence
  Synthetic oligonucleotide
atcacgaatgatgtgggtagtccagtcata

SEQ ID NO: 214404 - DNA, 30 bp, Artificial Sequence
  Synthetic oligonucleotide
gggagattgacagcaaaatcattcgtcata

SEQ ID NO: 214405 - DNA, 30 bp, Artificial Sequence
  Synthetic oligonucleotide
ggagtcaggtaccagtttcaataggtcata

SEQ ID NO: 214406 - DNA, 29 bp, Artificial Sequence
  Synthetic oligonucleotide
gagaatccggtacatagaatccggtcata

SEQ ID NO: 214407 - DNA, 30 bp, Artificial Sequence
  Synthetic oligonucleotide
gaacaaagcgaacacttcggcagggtcata

SEQ ID NO: 214408 - DNA, 31 bp, Artificial Sequence
  Synthetic oligonucleotide
ccgttggtgcttacagttattttgtgtcata

SEQ ID NO: 214409 - DNA, 30 bp, Artificial Sequence
  Synthetic oligonucleotide
aactggccgtagttgcagaacacattcata

SEQ ID NO: 214410 - DNA, 30 bp, Artificial Sequence
  Synthetic oligonucleotide
ttctcgtaagatcgacgttgtgacttcata

SEQ ID NO: 214411 - DNA, 30 bp, Artificial Sequence
  Synthetic oligonucleotide
tacgtcgtccgatagcgcgccgccttcata

SEQ ID NO: 214412 - DNA, 30 bp, Artificial Sequence
  Synthetic oligonucleotide
tgaatttaaaagacgtctgggctcttcata

SEQ ID NO: 214413 - DNA, 30 bp, Artificial Sequence
  Synthetic oligonucleotide
acttggagtgagagtaacagggtcttcata

SEQ ID NO: 214414 - DNA, 30 bp, Artificial Sequence
  Synthetic oligonucleotide
agaaccactcgttgctaatgggtcttcata

SEQ ID NO: 214415 - DNA, 30 bp, Artificial Sequence
  Synthetic oligonucleotide
atggatggctgttgaggtagagcgttcata

SEQ ID NO: 214416 - DNA, 30 bp, Artificial Sequence
  Synthetic oligonucleotide
tgaagcctacggcacatagcgtcgttcata

SEQ ID NO: 214417 - DNA, 30 bp, Artificial Sequence
  Synthetic oligonucleotide
gcttgcaggcagaattatctagacaagata

SEQ ID NO: 214418 - DNA, 30 bp, Artificial Sequence
  Synthetic oligonucleotide
atccagactgcctcggactgatggaagata

SEQ ID NO: 214419 - DNA, 30 bp, Artificial Sequence
  Synthetic oligonucleotide
aggctctattacgatacttgagttaagata

SEQ ID NO: 214420 - DNA, 30 bp, Artificial Sequence
  Synthetic oligonucleotide
atcatctaacgtggaatatagaaccagata

SEQ ID NO: 214421 - DNA, 30 bp, Artificial Sequence
  Synthetic oligonucleotide
aggatgggtcacgattggtgccctcagata

SEQ ID NO: 214422 - DNA, 30 bp, Artificial Sequence
  Synthetic oligonucleotide
acgtaaatatcgccctcctctgcagagata

SEQ ID NO: 214423 - DNA, 30 bp, Artificial Sequence
  Synthetic oligonucleotide
acacctgctctagtactttcccatgagata

SEQ ID NO: 214424 - DNA, 30 bp, Artificial Sequence
  Synthetic oligonucleotide
actcagctttaagtgcattagtatgagata

SEQ ID NO: 214425 - DNA, 30 bp, Artificial Sequence
  Synthetic oligonucleotide
cgatcatttaaaatatgtactctatagata

SEQ ID NO: 214426 - DNA, 30 bp, Artificial Sequence
  Synthetic oligonucleotide
ggggaagagtcgtgtgtcaaggtatagata

SEQ ID NO: 214427 - DNA, 30 bp, Artificial Sequence
  Synthetic oligonucleotide
tactctggacgagatcccaggttatagata

SEQ ID NO: 214428 - DNA, 30 bp, Artificial Sequence
  Synthetic oligonucleotide
caaactcagggtgcatcgtcagcctagata

SEQ ID NO: 214429 - DNA, 30 bp, Artificial Sequence
  Synthetic oligonucleotide
tgggagactcgataaccgagttcctagata

SEQ ID NO: 214430 - DNA, 30 bp, Artificial Sequence
  Synthetic oligonucleotide
tagcggtcaaggccagaaggaccgtagata

SEQ ID NO: 214431 - DNA, 30 bp, Artificial Sequence
  Synthetic oligonucleotide
gtctcgtgctgattcgagaaagcgtagata

SEQ ID NO: 214432 - DNA, 30 bp, Artificial Sequence
  Synthetic oligonucleotide
aagagcactaatgttttaattcgaacgata

SEQ ID NO: 214433 - DNA, 30 bp, Artificial Sequence
  Synthetic oligonucleotide
ccactttcttagtggtcagcatcgacgata

SEQ ID NO: 214434 - DNA, 30 bp, Artificial Sequence
  Synthetic oligonucleotide
catggccagacggaacgtatcgaaccgata

SEQ ID NO: 214435 - DNA, 30 bp, Artificial Sequence
  Synthetic oligonucleotide
ttcggccaacggatgttatgtacgccgata

SEQ ID NO: 214436 - DNA, 30 bp, Artificial Sequence
  Synthetic oligonucleotide
tgacagtgtcagaggcttacgtgtccgata

SEQ ID NO: 214437 - DNA, 30 bp, Artificial Sequence
  Synthetic oligonucleotide
cccgagatacttgatattccgccagcgata

SEQ ID NO: 214438 - DNA, 30 bp, Artificial Sequence
  Synthetic oligonucleotide
tgactgcggtgagagctcacatcagcgata

SEQ ID NO: 214439 - DNA, 30 bp, Artificial Sequence
  Synthetic oligonucleotide
tttcgttatgaaagtcttaagtcagcgata

SEQ ID NO: 214440 - DNA, 30 bp, Artificial Sequence
  Synthetic oligonucleotide
gtcatgtcgtttatttaacatagggcgata

SEQ ID NO: 214441 - DNA, 30 bp, Artificial Sequence
  Synthetic oligonucleotide
gggacgaatgcatccctcagatatgcgata

SEQ ID NO: 214442 - DNA, 30 bp, Artificial Sequence
  Synthetic oligonucleotide
atgtcattggtcgcgaggtgttgtgcgata

SEQ ID NO: 214443 - DNA, 30 bp, Artificial Sequence
  Synthetic oligonucleotide
attgttggcagccgagtggtccagtcgata

SEQ ID NO: 214444 - DNA, 30 bp, Artificial Sequence
  Synthetic oligonucleotide
atgtctatggcagagtgaaacctgtcgata

SEQ ID NO: 214445 - DNA, 30 bp, Artificial Sequence
  Synthetic oligonucleotide
gtcagcgttagttgtctggcgccaaggata

SEQ ID NO: 214446 - DNA, 30 bp, Artificial Sequence
  Synthetic oligonucleotide
gtacacagccggatcgacatgccgaggata

SEQ ID NO: 214447 - DNA, 30 bp, Artificial Sequence
  Synthetic oligonucleotide
tttatggtactttatgtaggagggaggata

SEQ ID NO: 214448 - DNA, 30 bp, Artificial Sequence
  Synthetic oligonucleotide
gttattcagaccagtgagggaaataggata

SEQ ID NO: 214449 - DNA, 30 bp, Artificial Sequence
  Synthetic oligonucleotide
gaccaacaaagctaaggtgtacctaggata

SEQ ID NO: 214450 - DNA, 30 bp, Artificial Sequence
  Synthetic oligonucleotide
gtccatcatatacaatagaaccaccggata

SEQ ID NO: 214451 - DNA, 30 bp, Artificial Sequence
  Synthetic oligonucleotide
agctggcatccaggcgtcgtaatccggata

SEQ ID NO: 214452 - DNA, 30 bp, Artificial Sequence
  Synthetic oligonucleotide
ctgaagaatgttgtgggagacgttcggata

SEQ ID NO: 214453 - DNA, 30 bp, Artificial Sequence
  Synthetic oligonucleotide
gaactaaaggataaggatttgtaagggata

SEQ ID NO: 214454 - DNA, 30 bp, Artificial Sequence
  Synthetic oligonucleotide
catgcatgttgaagtacacaactcgggata

SEQ ID NO: 214455 - DNA, 30 bp, Artificial Sequence
  Synthetic oligonucleotide
ctacttatctggtgttccaacctcgggata

SEQ ID NO: 214456 - DNA, 30 bp, Artificial Sequence
  Synthetic oligonucleotide
ttcacaatcgggtagccaggagtcgggata

SEQ ID NO: 214457 - DNA, 30 bp, Artificial Sequence
  Synthetic oligonucleotide
tgcaagggacattgcaccaaggaggggata

SEQ ID NO: 214458 - DNA, 30 bp, Artificial Sequence
  Synthetic oligonucleotide
tagaactcgagcgtgtaggtctaggggata

SEQ ID NO: 214459 - DNA, 30 bp, Artificial Sequence
  Synthetic oligonucleotide
gttggaaagattctgcaaccagcggggata

SEQ ID NO: 214460 - DNA, 30 bp, Artificial Sequence
  Synthetic oligonucleotide
caagacatcttacatagtctacgggggata

SEQ ID NO: 214461 - DNA, 30 bp, Artificial Sequence
  Synthetic oligonucleotide
taggtcaaagcgccatcaaattgggggata

SEQ ID NO: 214462 - DNA, 30 bp, Artificial Sequence
  Synthetic oligonucleotide
cgagggttcgagggtaacggatatgggata

SEQ ID NO: 214463 - DNA, 30 bp, Artificial Sequence
  Synthetic oligonucleotide
ccttgtgagtcaattttgtccacctggata

SEQ ID NO: 214464 - DNA, 30 bp, Artificial Sequence
  Synthetic oligonucleotide
gatgttcatttaacggatacgacaatgata

SEQ ID NO: 214465 - DNA, 28 bp, Artificial Sequence
  Synthetic oligonucleotide
acaacccgttatgcagtacccaatgata

SEQ ID NO: 214466 - DNA, 30 bp, Artificial Sequence
  Synthetic oligonucleotide
ggcgtgatctgcacttcttctaggatgata

SEQ ID NO: 214467 - DNA, 30 bp, Artificial Sequence
  Synthetic oligonucleotide
acgtacttacctacctcatgggaactgata

SEQ ID NO: 214468 - DNA, 31 bp, Artificial Sequence
  Synthetic oligonucleotide
agcttcatacagtcgtgaagtccccctgata

SEQ ID NO: 214469 - DNA, 30 bp, Artificial Sequence
  Synthetic oligonucleotide
ttccaagaatagttccaactgagcctgata

SEQ ID NO: 214470 - DNA, 30 bp, Artificial Sequence
  Synthetic oligonucleotide
gtggtgtctgacgaacggctcacagtgata

SEQ ID NO: 214471 - DNA, 30 bp, Artificial Sequence
  Synthetic oligonucleotide
gaaggggttacttaagtttaatgagtgata

SEQ ID NO: 214472 - DNA, 31 bp, Artificial Sequence
  Synthetic oligonucleotide
ttatatgatggccattaataggtacttgata

SEQ ID NO: 214473 - DNA, 30 bp, Artificial Sequence
  Synthetic oligonucleotide
cgctcatatgatcaaggacagcaaaatata

SEQ ID NO: 214474 - DNA, 30 bp, Artificial Sequence
  Synthetic oligonucleotide
cgcggggactacggaaagtgctaaaatata

SEQ ID NO: 214475 - DNA, 30 bp, Artificial Sequence
  Synthetic oligonucleotide
ggctatcagccatccctcactgcaaatata

SEQ ID NO: 214476 - DNA, 30 bp, Artificial Sequence
  Synthetic oligonucleotide
cgacaagaggcgtgccataagaataatata

SEQ ID NO: 214477 - DNA, 30 bp, Artificial Sequence
  Synthetic oligonucleotide
cggggcattagaccatagagtacacatata

SEQ ID NO: 214478 - DNA, 30 bp, Artificial Sequence
  Synthetic oligonucleotide
gggaacgtgggttcgccccctctacatata

SEQ ID NO: 214479 - DNA, 30 bp, Artificial Sequence
  Synthetic oligonucleotide
aagcaagaccacacgccatcgtaccatata

SEQ ID NO: 214480 - DNA, 30 bp, Artificial Sequence
  Synthetic oligonucleotide
agggggtttggtcccaaaccagcccatata

SEQ ID NO: 214481 - DNA, 30 bp, Artificial Sequence
  Synthetic oligonucleotide
gatgcatatggacctttcgaacagcatata

SEQ ID NO: 214482 - DNA, 30 bp, Artificial Sequence
  Synthetic oligonucleotide
cgtaccaggtacattcataggccgcatata

SEQ ID NO: 214483 - DNA, 30 bp, Artificial Sequence
  Synthetic oligonucleotide
atgacgcaaaccgtaacagattggcatata

SEQ ID NO: 214484 - DNA, 30 bp, Artificial Sequence
  Synthetic oligonucleotide
ctcagagtaagccaccttagatttcatata

SEQ ID NO: 214485 - DNA, 30 bp, Artificial Sequence
  Synthetic oligonucleotide
ctattagtcccgaaatgagttaacgatata

SEQ ID NO: 214486 - DNA, 30 bp, Artificial Sequence
  Synthetic oligonucleotide
gttactcgatgatactagatattcgatata

SEQ ID NO: 214487 - DNA, 30 bp, Artificial Sequence
  Synthetic oligonucleotide
ccgggatcgggtaataatcttttcgatata

SEQ ID NO: 214488 - DNA, 30 bp, Artificial Sequence
  Synthetic oligonucleotide
ccggggtcaaacacttttgcgtaggatata

SEQ ID NO: 214489 - DNA, 30 bp, Artificial Sequence
  Synthetic oligonucleotide
atgcgggtggccgcacatggttaggatata

SEQ ID NO: 214490 - DNA, 30 bp, Artificial Sequence
  Synthetic oligonucleotide
ccaagaccatccctcgctgatttggatata

SEQ ID NO: 214491 - DNA, 30 bp, Artificial Sequence
  Synthetic oligonucleotide
gtgggctaaactaatctgttaagatatata

SEQ ID NO: 214492 - DNA, 30 bp, Artificial Sequence
  Synthetic oligonucleotide
aggatggaattagcctaagcttactatata

SEQ ID NO: 214493 - DNA, 30 bp, Artificial Sequence
  Synthetic oligonucleotide
cgaaacacagtgacggcatagttctatata

SEQ ID NO: 214494 - DNA, 30 bp, Artificial Sequence
  Synthetic oligonucleotide
actcggaaccatactgactgtcggtatata

SEQ ID NO: 214495 - DNA, 30 bp, Artificial Sequence
  Synthetic oligonucleotide
ggtcacagatcgattgtagttgggtatata

SEQ ID NO: 214496 - DNA, 30 bp, Artificial Sequence
  Synthetic oligonucleotide
gtattgggcacgcctatcgctgcaactata

SEQ ID NO: 214497 - DNA, 30 bp, Artificial Sequence
  Synthetic oligonucleotide
tgaggctggaggtcggcgtggtatactata

SEQ ID NO: 214498 - DNA, 30 bp, Artificial Sequence
  Synthetic oligonucleotide
tgaagagcgtatacaccagatggacctata

SEQ ID NO: 214499 - DNA, 30 bp, Artificial Sequence
  Synthetic oligonucleotide
ccgatcttaaaggtacaagaagaccctata

SEQ ID NO: 214500 - DNA, 30 bp, Artificial Sequence
  Synthetic oligonucleotide
gctcgtaatatgtggtcctaatatcctata

SEQ ID NO: 214501 - DNA, 30 bp, Artificial Sequence
  Synthetic oligonucleotide
tcaaatccgcatcgtaaacgttatcctata

SEQ ID NO: 214502 - DNA, 30 bp, Artificial Sequence
  Synthetic oligonucleotide
aacagcaagatccataaggtccgggctata

SEQ ID NO: 214503 - DNA, 30 bp, Artificial Sequence
  Synthetic oligonucleotide
gtgcgtctcatcagctaaaacggggctata

SEQ ID NO: 214504 - DNA, 30 bp, Artificial Sequence
  Synthetic oligonucleotide
ttagtaggtccgattcgttgtagtgctata

SEQ ID NO: 214505 - DNA, 30 bp, Artificial Sequence
  Synthetic oligonucleotide
gacacacagacacgtaaagacccatctata

SEQ ID NO: 214506 - DNA, 30 bp, Artificial Sequence
  Synthetic oligonucleotide
aagcaagcattggtatccgctcactctata

SEQ ID NO: 214507 - DNA, 30 bp, Artificial Sequence
  Synthetic oligonucleotide
ccactggggttgcaaatccccaagtctata

SEQ ID NO: 214508 - DNA, 30 bp, Artificial Sequence
  Synthetic oligonucleotide
ttccgtacaacaatgcctctagagtctata

SEQ ID NO: 214509 - DNA, 30 bp, Artificial Sequence
  Synthetic oligonucleotide
cgaccacaaattatcgatctaaggtctata

SEQ ID NO: 214510 - DNA, 30 bp, Artificial Sequence
  Synthetic oligonucleotide
ttaggccgattcaacgttttgttgtctata

SEQ ID NO: 214511 - DNA, 30 bp, Artificial Sequence
  Synthetic oligonucleotide
ccgtactaggataagcgcggttaaagtata

SEQ ID NO: 214512 - DNA, 30 bp, Artificial Sequence
  Synthetic oligonucleotide
aatcacgtgacaaggacgttccgcagtata

SEQ ID NO: 214513 - DNA, 30 bp, Artificial Sequence
  Synthetic oligonucleotide
tcctcatagcggcccggaaaccaacgtata

SEQ ID NO: 214514 - DNA, 30 bp, Artificial Sequence
  Synthetic oligonucleotide
ttcgtacactccatgacttaggaacgtata

SEQ ID NO: 214515 - DNA, 30 bp, Artificial Sequence
  Synthetic oligonucleotide
ctgctggacgaaaacaggtgtagccgtata

SEQ ID NO: 214516 - DNA, 30 bp, Artificial Sequence
  Synthetic oligonucleotide
cgggctgtgaggtacattcggagtcgtata

SEQ ID NO: 214517 - DNA, 30 bp, Artificial Sequence
  Synthetic oligonucleotide
ccaggctctgcataaaagtgtgaaggtata

SEQ ID NO: 214518 - DNA, 30 bp, Artificial Sequence
  Synthetic oligonucleotide
ctacggatgcgccaattataatcaggtata

SEQ ID NO: 214519 - DNA, 30 bp, Artificial Sequence
  Synthetic oligonucleotide
ctccagtacgattcatgtaggtcaggtata

SEQ ID NO: 214520 - DNA, 30 bp, Artificial Sequence
  Synthetic oligonucleotide
taggcactgaatgggggattaggcggtata

SEQ ID NO: 214521 - DNA, 30 bp, Artificial Sequence
  Synthetic oligonucleotide
gaactaaaagtccttagcgacgagggtata

SEQ ID NO: 214522 - DNA, 30 bp, Artificial Sequence
  Synthetic oligonucleotide
tcgggtcggaagcacctgcatacgggtata

SEQ ID NO: 214523 - DNA, 30 bp, Artificial Sequence
  Synthetic oligonucleotide
tgcaacgccatgctagtattataatgtata

SEQ ID NO: 214524 - DNA, 30 bp, Artificial Sequence
  Synthetic oligonucleotide
gagacatgcctagatattcttgcatgtata

SEQ ID NO: 214525 - DNA, 30 bp, Artificial Sequence
  Synthetic oligonucleotide
gaatcacgtataaacatgcgtctatgtata

SEQ ID NO: 214526 - DNA, 30 bp, Artificial Sequence
  Synthetic oligonucleotide
ttaacgagcagactgtcctgtgcaattata

SEQ ID NO: 214527 - DNA, 30 bp, Artificial Sequence
  Synthetic oligonucleotide
tcacctcgttctcacgggctttgaattata

SEQ ID NO: 214528 - DNA, 30 bp, Artificial Sequence
  Synthetic oligonucleotide
gcaatgcgagaagaaatacgagggattata

SEQ ID NO: 214529 - DNA, 30 bp, Artificial Sequence
  Synthetic oligonucleotide
tggtatgggcagtgtcttattttgattata

SEQ ID NO: 214530 - DNA, 30 bp, Artificial Sequence
  Synthetic oligonucleotide
cgcatgttgcgtcaggagacagatattata

SEQ ID NO: 214531 - DNA, 29 bp, Artificial Sequence
  Synthetic oligonucleotide
tccgtagacgggctagttcctgtattata

SEQ ID NO: 214532 - DNA, 30 bp, Artificial Sequence
  Synthetic oligonucleotide
agatcactagaagccaaacagtttattata

SEQ ID NO: 214533 - DNA, 30 bp, Artificial Sequence
  Synthetic oligonucleotide
agtatcgtcaggtgattcggcacgcttata

SEQ ID NO: 214534 - DNA, 30 bp, Artificial Sequence
  Synthetic oligonucleotide
gtcatttgggtgcaagtagacctgcttata

SEQ ID NO: 214535 - DNA, 30 bp, Artificial Sequence
  Synthetic oligonucleotide
ggttgcttagctaactgatctgctcttata

SEQ ID NO: 214536 - DNA, 30 bp, Artificial Sequence
  Synthetic oligonucleotide
ccaagtcctcgagctatgcgaagggttata

SEQ ID NO: 214537 - DNA, 30 bp, Artificial Sequence
  Synthetic oligonucleotide
gcggaaagtcgtcgggatgatttggttata

SEQ ID NO: 214538 - DNA, 30 bp, Artificial Sequence
  Synthetic oligonucleotide
agaataagtgtgcattcgaaaactgttata

SEQ ID NO: 214539 - DNA, 30 bp, Artificial Sequence
  Synthetic oligonucleotide
ccagacgggagaaggcttgagacatttata

SEQ ID NO: 214540 - DNA, 30 bp, Artificial Sequence
  Synthetic oligonucleotide
atttgtggcgatggcataaccaagtttata

SEQ ID NO: 214541 - DNA, 30 bp, Artificial Sequence
  Synthetic oligonucleotide
accacagttggcagcatcatctcgtttata

SEQ ID NO: 214542 - DNA, 30 bp, Artificial Sequence
  Synthetic oligonucleotide
ggcaattcaaacgttaaccggatttttata

SEQ ID NO: 214543 - DNA, 30 bp, Artificial Sequence
  Synthetic oligonucleotide
cacaaggcgatcaatttcggcgtttttata

SEQ ID NO: 214544 - DNA, 30 bp, Artificial Sequence
  Synthetic oligonucleotide
taccacagaggcaattgcgggtttaaacta

SEQ ID NO: 214545 - DNA, 30 bp, Artificial Sequence
  Synthetic oligonucleotide
agaagcactctataccgataccaacaacta

SEQ ID NO: 214546 - DNA, 29 bp, Artificial Sequence
  Synthetic oligonucleotide
gatgattcagaggtctgacaacacaacta

SEQ ID NO: 214547 - DNA, 30 bp, Artificial Sequence
  Synthetic oligonucleotide
cagttaagggtgaccttactacgacaacta

SEQ ID NO: 214548 - DNA, 30 bp, Artificial Sequence
  Synthetic oligonucleotide
atcgttgagagaccaaaacaattccaacta

SEQ ID NO: 214549 - DNA, 30 bp, Artificial Sequence
  Synthetic oligonucleotide
gtgtcggtccgaaaagtcgctaatcaacta

SEQ ID NO: 214550 - DNA, 31 bp, Artificial Sequence
  Synthetic oligonucleotide
cgagatcccaccctaccgatctaatcaacta

SEQ ID NO: 214551 - DNA, 30 bp, Artificial Sequence
  Synthetic oligonucleotide
tattacatagatgagaacctaaaagaacta

SEQ ID NO: 214552 - DNA, 30 bp, Artificial Sequence
  Synthetic oligonucleotide
gacgaagctagtgcagctaactacgaacta

SEQ ID NO: 214553 - DNA, 30 bp, Artificial Sequence
  Synthetic oligonucleotide
attcgtatcggaaaccacggtatcgaacta

SEQ ID NO: 214554 - DNA, 30 bp, Artificial Sequence
  Synthetic oligonucleotide
acgcctgatatttatgagtttatcgaacta

SEQ ID NO: 214555 - DNA, 30 bp, Artificial Sequence
  Synthetic oligonucleotide
ctcaaggggcagccgcgagggggtgaacta

SEQ ID NO: 214556 - DNA, 30 bp, Artificial Sequence
  Synthetic oligonucleotide
atcaccagtaaggatggggctgttgaacta

SEQ ID NO: 214557 - DNA, 30 bp, Artificial Sequence
  Synthetic oligonucleotide
gccgggaagtagagaaacgcccactaacta

SEQ ID NO: 214558 - DNA, 30 bp, Artificial Sequence
  Synthetic oligonucleotide
cgcagacccacataatgacagacctaacta

SEQ ID NO: 214559 - DNA, 30 bp, Artificial Sequence
  Synthetic oligonucleotide
cgaagcagggatctgccacatcgctaacta

SEQ ID NO: 214560 - DNA, 30 bp, Artificial Sequence
  Synthetic oligonucleotide
catataagtggtagttcgacatgctaacta

SEQ ID NO: 214561 - DNA, 30 bp, Artificial Sequence
  Synthetic oligonucleotide
acctggcaaagatagaggtgttagtaacta

SEQ ID NO: 214562 - DNA, 30 bp, Artificial Sequence
  Synthetic oligonucleotide
agggaaggatagcttggtcgttaaacacta

SEQ ID NO: 214563 - DNA, 30 bp, Artificial Sequence
  Synthetic oligonucleotide
atatgaagtaaggggttggtgaacacacta

SEQ ID NO: 214564 - DNA, 30 bp, Artificial Sequence
  Synthetic oligonucleotide
aggtaacgctcgaagcgtatggccacacta

SEQ ID NO: 214565 - DNA, 30 bp, Artificial Sequence
  Synthetic oligonucleotide
agctgctatatattccggctgtcaccacta

SEQ ID NO: 214566 - DNA, 30 bp, Artificial Sequence
  Synthetic oligonucleotide
gttaatcctcgagatggacgccccccacta

SEQ ID NO: 214567 - DNA, 30 bp, Artificial Sequence
  Synthetic oligonucleotide
gtgtgaatatacatctgaagagggccacta

SEQ ID NO: 214568 - DNA, 30 bp, Artificial Sequence
  Synthetic oligonucleotide
agcatagcgtggacatcgtttgtcgcacta

SEQ ID NO: 214569 - DNA, 30 bp, Artificial Sequence
  Synthetic oligonucleotide
ggtacagcaatcacagaggcccatgcacta

SEQ ID NO: 214570 - DNA, 30 bp, Artificial Sequence
  Synthetic oligonucleotide
atgcttcgtctgtttttgggcatatcacta

SEQ ID NO: 214571 - DNA, 30 bp, Artificial Sequence
  Synthetic oligonucleotide
aagttagtggtcccctgagctgcctcacta

SEQ ID NO: 214572 - DNA, 30 bp, Artificial Sequence
  Synthetic oligonucleotide
cgctgaaagacaccaatgtccaagtcacta

SEQ ID NO: 214573 - DNA, 30 bp, Artificial Sequence
  Synthetic oligonucleotide
tatactcgtcggaagaagaccctttcacta

SEQ ID NO: 214574 - DNA, 30 bp, Artificial Sequence
  Synthetic oligonucleotide
gatctcggtattcacactcaggcaagacta

SEQ ID NO: 214575 - DNA, 30 bp, Artificial Sequence
  Synthetic oligonucleotide
tcgtttcaccgtagtagcgatctaagacta

SEQ ID NO: 214576 - DNA, 30 bp, Artificial Sequence
  Synthetic oligonucleotide
acgacatgtgaggttcggtacgccagacta

SEQ ID NO: 214577 - DNA, 30 bp, Artificial Sequence
  Synthetic oligonucleotide
tatcaagtataacaacagtccagtagacta

SEQ ID NO: 214578 - DNA, 30 bp, Artificial Sequence
  Synthetic oligonucleotide
ttgggctatagaggaggggtgtgtagacta

SEQ ID NO: 214579 - DNA, 30 bp, Artificial Sequence
  Synthetic oligonucleotide
tccggttggcttgggcgatatgaacgacta

SEQ ID NO: 214580 - DNA, 30 bp, Artificial Sequence
  Synthetic oligonucleotide
gaatgggcattgttgaggcctgcacgacta

SEQ ID NO: 214581 - DNA, 30 bp, Artificial Sequence
  Synthetic oligonucleotide
atgtgtatatccattaattgctaccgacta

SEQ ID NO: 214582 - DNA, 30 bp, Artificial Sequence
  Synthetic oligonucleotide
ggaagcgtgtgcgtgttatactcaggacta

SEQ ID NO: 214583 - DNA, 31 bp, Artificial Sequence
  Synthetic oligonucleotide
gaacataaatgaatcgatgggattaggacta

SEQ ID NO: 214584 - DNA, 30 bp, Artificial Sequence
  Synthetic oligonucleotide
tagacacctcagtaaatggacaccggacta

SEQ ID NO: 214585 - DNA, 30 bp, Artificial Sequence
  Synthetic oligonucleotide
tgtgcgtaaggatggaggtattccggacta

SEQ ID NO: 214586 - DNA, 30 bp, Artificial Sequence
  Synthetic oligonucleotide
ccggttctctatcgaccccgtgcgggacta

SEQ ID NO: 214587 - DNA, 30 bp, Artificial Sequence
  Synthetic oligonucleotide
caggagtcgcattccggtaggtggtgacta

SEQ ID NO: 214588 - DNA, 30 bp, Artificial Sequence
  Synthetic oligonucleotide
ttgtagggtccggtgcatgggcgcatacta

SEQ ID NO: 214589 - DNA, 30 bp, Artificial Sequence
  Synthetic oligonucleotide
ccatagagataaacacaaatacagatacta

SEQ ID NO: 214590 - DNA, 30 bp, Artificial Sequence
  Synthetic oligonucleotide
cggtcagatattgtgaattggaatatacta

SEQ ID NO: 214591 - DNA, 30 bp, Artificial Sequence
  Synthetic oligonucleotide
accaaggtctagtgctaacctgttatacta

SEQ ID NO: 214592 - DNA, 30 bp, Artificial Sequence
  Synthetic oligonucleotide
cgggaagtcggtaagtgtagggggctacta

SEQ ID NO: 214593 - DNA, 30 bp, Artificial Sequence
  Synthetic oligonucleotide
tcagcgggatagacttctcagcttctacta

SEQ ID NO: 214594 - DNA, 30 bp, Artificial Sequence
  Synthetic oligonucleotide
gagaacttaagtatgaccaggagagtacta

SEQ ID NO: 214595 - DNA, 30 bp, Artificial Sequence
  Synthetic oligonucleotide
tcgagcaaatgccttggcacagatgtacta

SEQ ID NO: 214596 - DNA, 30 bp, Artificial Sequence
  Synthetic oligonucleotide
gccaagagcgcgagcctgcgctgtgtacta

SEQ ID NO: 214597 - DNA, 30 bp, Artificial Sequence
  Synthetic oligonucleotide
gtggttacgaagcggtgtctacaattacta

SEQ ID NO: 214598 - DNA, 30 bp, Artificial Sequence
  Synthetic oligonucleotide
attacaacaaactaccgaaagttcttacta

SEQ ID NO: 214599 - DNA, 30 bp, Artificial Sequence
  Synthetic oligonucleotide
tcggatttagacaggtcttatgatttacta

SEQ ID NO: 214600 - DNA, 30 bp, Artificial Sequence
  Synthetic oligonucleotide
ggtactcgtcgaggtatcatatttttacta

SEQ ID NO: 214601 - DNA, 30 bp, Artificial Sequence
  Synthetic oligonucleotide
agaaccggcttcagtacagctggtaaccta

SEQ ID NO: 214602 - DNA, 30 bp, Artificial Sequence
  Synthetic oligonucleotide
tgcaaccggcttacctacatgttacaccta

SEQ ID NO: 214603 - DNA, 30 bp, Artificial Sequence
  Synthetic oligonucleotide
gtacgagattcggccatgggccaccaccta

SEQ ID NO: 214604 - DNA, 30 bp, Artificial Sequence
  Synthetic oligonucleotide
tcttggagactgattcaggacccccaccta

SEQ ID NO: 214605 - DNA, 30 bp, Artificial Sequence
  Synthetic oligonucleotide
cgatgcgattaaaatggtaccccagaccta

SEQ ID NO: 214606 - DNA, 30 bp, Artificial Sequence
  Synthetic oligonucleotide
cctttctcgaggggtacggttagcgaccta

SEQ ID NO: 214607 - DNA, 30 bp, Artificial Sequence
  Synthetic oligonucleotide
acttcacttatgtactctgccaaggaccta

SEQ ID NO: 214608 - DNA, 30 bp, Artificial Sequence
  Synthetic oligonucleotide
tgtcttacaaacgacagccatcctgaccta

SEQ ID NO: 214609 - DNA, 30 bp, Artificial Sequence
  Synthetic oligonucleotide
aggctagcgacgggcaaatctagataccta

SEQ ID NO: 214610 - DNA, 30 bp, Artificial Sequence
  Synthetic oligonucleotide
tagataggtacgatgggttagcgttaccta

SEQ ID NO: 214611 - DNA, 30 bp, Artificial Sequence
  Synthetic oligonucleotide
aatcattaaacaacgcactgcctaacccta

SEQ ID NO: 214612 - DNA, 30 bp, Artificial Sequence
  Synthetic oligonucleotide
aaaatacataagcgtgcggtctcgacccta

SEQ ID NO: 214613 - DNA, 30 bp, Artificial Sequence
  Synthetic oligonucleotide
tagcgagaaaagtattacctcgttacccta

SEQ ID NO: 214614 - DNA, 30 bp, Artificial Sequence
  Synthetic oligonucleotide
taggccagttctgggggcgtgcaaccccta

SEQ ID NO: 214615 - DNA, 30 bp, Artificial Sequence
  Synthetic oligonucleotide
gtgttccacgataataccccgtcaccccta

SEQ ID NO: 214616 - DNA, 30 bp, Artificial Sequence
  Synthetic oligonucleotide
ttcatattaagtttgactcactccccccta

SEQ ID NO: 214617 - DNA, 30 bp, Artificial Sequence
  Synthetic oligonucleotide
cccacagtcagggacatagatctcccccta

SEQ ID NO: 214618 - DNA, 30 bp, Artificial Sequence
  Synthetic oligonucleotide
cgccagcgactataaggagattgtccccta

SEQ ID NO: 214619 - DNA, 30 bp, Artificial Sequence
  Synthetic oligonucleotide
tcctagagaaaataacatgtcattccccta

SEQ ID NO: 214620 - DNA, 30 bp, Artificial Sequence
  Synthetic oligonucleotide
ggattgcggcggtaatactgcagagcccta

SEQ ID NO: 214621 - DNA, 30 bp, Artificial Sequence
  Synthetic oligonucleotide
gttaggggattgatggtcctagtagcccta

SEQ ID NO: 214622 - DNA, 30 bp, Artificial Sequence
  Synthetic oligonucleotide
ggggctcaattcacgaaatttagggcccta

SEQ ID NO: 214623 - DNA, 30 bp, Artificial Sequence
  Synthetic oligonucleotide
aatagacagctgaaatcacacctggcccta

SEQ ID NO: 214624 - DNA, 30 bp, Artificial Sequence
  Synthetic oligonucleotide
gctaggatttggtatccatggctggcccta

SEQ ID NO: 214625 - DNA, 30 bp, Artificial Sequence
  Synthetic oligonucleotide
ttgccaatgtgatgatgagctctggcccta

SEQ ID NO: 214626 - DNA, 30 bp, Artificial Sequence
  Synthetic oligonucleotide
gccaacaacacgagagtgtttggctcccta

SEQ ID NO: 214627 - DNA, 30 bp, Artificial Sequence
  Synthetic oligonucleotide
gtctctgctagaacctgcccgccaagccta

SEQ ID NO: 214628 - DNA, 30 bp, Artificial Sequence
  Synthetic oligonucleotide
ctcttacggtaaggatactttcatcgccta

SEQ ID NO: 214629 - DNA, 30 bp, Artificial Sequence
  Synthetic oligonucleotide
cgattcacttgagcagagatctatcgccta

SEQ ID NO: 214630 - DNA, 30 bp, Artificial Sequence
  Synthetic oligonucleotide
ggttagtgcttcgatgaaagtagtcgccta

SEQ ID NO: 214631 - DNA, 30 bp, Artificial Sequence
  Synthetic oligonucleotide
gtaggtcgtgccatcgtagggtacggccta

SEQ ID NO: 214632 - DNA, 30 bp, Artificial Sequence
  Synthetic oligonucleotide
ttctgtcagcctacacgattcaccggccta

SEQ ID NO: 214633 - DNA, 30 bp, Artificial Sequence
  Synthetic oligonucleotide
aggaatgtatctaggacatcggcgggccta

SEQ ID NO: 214634 - DNA, 30 bp, Artificial Sequence
  Synthetic oligonucleotide
cacgaattactatcagcttggcatggccta

SEQ ID NO: 214635 - DNA, 30 bp, Artificial Sequence
  Synthetic oligonucleotide
gctgcattaaatggaagaggagatggccta

SEQ ID NO: 214636 - DNA, 30 bp, Artificial Sequence
  Synthetic oligonucleotide
cgggaaacgattctggatgtttaatgccta

SEQ ID NO: 214637 - DNA, 30 bp, Artificial Sequence
  Synthetic oligonucleotide
gtagtatgtagactcctggggccctgccta

SEQ ID NO: 214638 - DNA, 30 bp, Artificial Sequence
  Synthetic oligonucleotide
gggtgactatcacctagttaatcgtgccta

SEQ ID NO: 214639 - DNA, 30 bp, Artificial Sequence
  Synthetic oligonucleotide
gtcatctggcacctacggtgatcgtgccta

SEQ ID NO: 214640 - DNA, 30 bp, Artificial Sequence
  Synthetic oligonucleotide
cataggtcgaactctgggtacgaaatccta

SEQ ID NO: 214641 - DNA, 30 bp, Artificial Sequence
  Synthetic oligonucleotide
ttctaaggaataggtctccgttaaatccta

SEQ ID NO: 214642 - DNA, 30 bp, Artificial Sequence
  Synthetic oligonucleotide
ggtgtttcaagcgaattgatggcgatccta

SEQ ID NO: 214643 - DNA, 30 bp, Artificial Sequence
  Synthetic oligonucleotide
cggaaatccgaccctccgcataagctccta

SEQ ID NO: 214644 - DNA, 30 bp, Artificial Sequence
  Synthetic oligonucleotide
ccagggagtttcatatcaacagagctccta

SEQ ID NO: 214645 - DNA, 30 bp, Artificial Sequence
  Synthetic oligonucleotide
tgaacgctaagggggcgctatttgctccta

SEQ ID NO: 214646 - DNA, 30 bp, Artificial Sequence
  Synthetic oligonucleotide
attggactgagtcatacaagcggggtccta

SEQ ID NO: 214647 - DNA, 30 bp, Artificial Sequence
  Synthetic oligonucleotide
ccaggatctaatcttgtcaaaggattccta

SEQ ID NO: 214648 - DNA, 30 bp, Artificial Sequence
  Synthetic oligonucleotide
ggtcgagggattgactaggctgtcttccta

SEQ ID NO: 214649 - DNA, 30 bp, Artificial Sequence
  Synthetic oligonucleotide
cggactggagcgctttgtgaaaggttccta

SEQ ID NO: 214650 - DNA, 30 bp, Artificial Sequence
  Synthetic oligonucleotide
tgacgaggtgtgagtaatgtctatttccta

SEQ ID NO: 214651 - DNA, 30 bp, Artificial Sequence
  Synthetic oligonucleotide
agttcactctatggcaccagtagtttccta

SEQ ID NO: 214652 - DNA, 30 bp, Artificial Sequence
  Synthetic oligonucleotide
atgtgaacatgtaggatcttaggtttccta

SEQ ID NO: 214653 - DNA, 30 bp, Artificial Sequence
  Synthetic oligonucleotide
cgcaaagcccctaggactcaaataaagcta

SEQ ID NO: 214654 - DNA, 30 bp, Artificial Sequence
  Synthetic oligonucleotide
atcaacaattgtgccgggcctgcacagcta

SEQ ID NO: 214655 - DNA, 30 bp, Artificial Sequence
  Synthetic oligonucleotide
cggttgctcgacctaatatatcaccagcta

SEQ ID NO: 214656 - DNA, 30 bp, Artificial Sequence
  Synthetic oligonucleotide
attaactaatgggggggatcttatcagcta

SEQ ID NO: 214657 - DNA, 30 bp, Artificial Sequence
  Synthetic oligonucleotide
caacgagcactgcactgggacggtcagcta

SEQ ID NO: 214658 - DNA, 30 bp, Artificial Sequence
  Synthetic oligonucleotide
gcactcaaatagcgggataaaacagagcta

SEQ ID NO: 214659 - DNA, 30 bp, Artificial Sequence
  Synthetic oligonucleotide
taggttgcgcttaaattgactcacgagcta

SEQ ID NO: 214660 - DNA, 30 bp, Artificial Sequence
  Synthetic oligonucleotide
aactcacataaaactgtagtatcggagcta

SEQ ID NO: 214661 - DNA, 30 bp, Artificial Sequence
  Synthetic oligonucleotide
gttagaatctaaatcaagagctgggagcta

SEQ ID NO: 214662 - DNA, 30 bp, Artificial Sequence
  Synthetic oligonucleotide
gtataggaagcgaggtccgtggtggagcta

SEQ ID NO: 214663 - DNA, 30 bp, Artificial Sequence
  Synthetic oligonucleotide
ctccggcgccaagatgcccgagatgagcta

SEQ ID NO: 214664 - DNA, 30 bp, Artificial Sequence
  Synthetic oligonucleotide
gagtaatagtgttcttggattagtgagcta

SEQ ID NO: 214665 - DNA, 30 bp, Artificial Sequence
  Synthetic oligonucleotide
agcatttgcaccgaatagattgcatagcta

SEQ ID NO: 214666 - DNA, 30 bp, Artificial Sequence
  Synthetic oligonucleotide
gtgcggagcacgacagtgcccgagtagcta

SEQ ID NO: 214667 - DNA, 30 bp, Artificial Sequence
  Synthetic oligonucleotide
gtcattggcgcgggactgcggatgtagcta

SEQ ID NO: 214668 - DNA, 30 bp, Artificial Sequence
  Synthetic oligonucleotide
catgttagatcacctccgcggccttagcta

SEQ ID NO: 214669 - DNA, 30 bp, Artificial Sequence
  Synthetic oligonucleotide
tcctggtaggcctgctgttgtatttagcta

SEQ ID NO: 214670 - DNA, 30 bp, Artificial Sequence
  Synthetic oligonucleotide
gctaattcgtaaaaggtgcaagtttagcta

SEQ ID NO: 214671 - DNA, 30 bp, Artificial Sequence
  Synthetic oligonucleotide
cctaagtgattcgaagccttgttttagcta

SEQ ID NO: 214672 - DNA, 30 bp, Artificial Sequence
  Synthetic oligonucleotide
gtaatcatgtcatgatggacttcaacgcta

SEQ ID NO: 214673 - DNA, 30 bp, Artificial Sequence
  Synthetic oligonucleotide
cgtctcggtgaagagctttgtgctacgcta

SEQ ID NO: 214674 - DNA, 30 bp, Artificial Sequence
  Synthetic oligonucleotide
cgagacacagtccgaccacatcgagcgcta

SEQ ID NO: 214675 - DNA, 30 bp, Artificial Sequence
  Synthetic oligonucleotide
cgttatcaggatggacaaacacgcgcgcta

SEQ ID NO: 214676 - DNA, 30 bp, Artificial Sequence
  Synthetic oligonucleotide
gttcagttcacgtcaggaaactaggcgcta

SEQ ID NO: 214677 - DNA, 30 bp, Artificial Sequence
  Synthetic oligonucleotide
gctggtcagcttcgttcggaacgggcgcta

SEQ ID NO: 214678 - DNA, 30 bp, Artificial Sequence
  Synthetic oligonucleotide
agattgtcaagctaggagctgcaatcgcta

SEQ ID NO: 214679 - DNA, 30 bp, Artificial Sequence
  Synthetic oligonucleotide
ggaatcgttatcaaagtgatgcgatcgcta

SEQ ID NO: 214680 - DNA, 30 bp, Artificial Sequence
  Synthetic oligonucleotide
aagccctaaagactccggagtcactcgcta

SEQ ID NO: 214681 - DNA, 30 bp, Artificial Sequence
  Synthetic oligonucleotide
tgcgctgtcggtgcgagtggcatgtcgcta

SEQ ID NO: 214682 - DNA, 30 bp, Artificial Sequence
  Synthetic oligonucleotide
ggagctcatcgcttagaaggacattcgcta

SEQ ID NO: 214683 - DNA, 30 bp, Artificial Sequence
  Synthetic oligonucleotide
taaacacgtctggataacagcgtttcgcta

SEQ ID NO: 214684 - DNA, 30 bp, Artificial Sequence
  Synthetic oligonucleotide
tacaatagggtcgttgatgaggcaaggcta

SEQ ID NO: 214685 - DNA, 30 bp, Artificial Sequence
  Synthetic oligonucleotide
ctgcgaatcatggatcattatcgcaggcta

SEQ ID NO: 214686 - DNA, 30 bp, Artificial Sequence
  Synthetic oligonucleotide
gatcggccacaagcagatatgggcaggcta

SEQ ID NO: 214687 - DNA, 30 bp, Artificial Sequence
  Synthetic oligonucleotide
atggccacccagcatattgcatggaggcta

SEQ ID NO: 214688 - DNA, 30 bp, Artificial Sequence
  Synthetic oligonucleotide
gtgtaacaggatatacgggccttgaggcta

SEQ ID NO: 214689 - DNA, 30 bp, Artificial Sequence
  Synthetic oligonucleotide
cctgaggggttaactgcccagtgtaggcta

SEQ ID NO: 214690 - DNA, 30 bp, Artificial Sequence
  Synthetic oligonucleotide
tttattggactgatggggaaggaccggcta

SEQ ID NO: 214691 - DNA, 30 bp, Artificial Sequence
  Synthetic oligonucleotide
caacggtttgtagaggcagacaggcggcta

SEQ ID NO: 214692 - DNA, 30 bp, Artificial Sequence
  Synthetic oligonucleotide
ggggcctcaataacctacaatgggcggcta

SEQ ID NO: 214693 - DNA, 30 bp, Artificial Sequence
  Synthetic oligonucleotide
tgactggcatttgggaggaacttgcggcta

SEQ ID NO: 214694 - DNA, 30 bp, Artificial Sequence
  Synthetic oligonucleotide
gaactccgaaccagaggcaagtaagggcta

SEQ ID NO: 214695 - DNA, 30 bp, Artificial Sequence
  Synthetic oligonucleotide
ccgcgattagctcattaggtaccagggcta

SEQ ID NO: 214696 - DNA, 30 bp, Artificial Sequence
  Synthetic oligonucleotide
tggtataacggtcacgtgccgtacgggcta

SEQ ID NO: 214697 - DNA, 30 bp, Artificial Sequence
  Synthetic oligonucleotide
gcattagctgcgacttaatcaagcgggcta

SEQ ID NO: 214698 - DNA, 30 bp, Artificial Sequence
  Synthetic oligonucleotide
gtaataggcgtaaagctgatcccggggcta

SEQ ID NO: 214699 - DNA, 30 bp, Artificial Sequence
  Synthetic oligonucleotide
cagtagtgaaacgattgaagacgtgggcta

SEQ ID NO: 214700 - DNA, 30 bp, Artificial Sequence
  Synthetic oligonucleotide
gcacttgacggcctgcagaaaggtgggcta

SEQ ID NO: 214701 - DNA, 30 bp, Artificial Sequence
  Synthetic oligonucleotide
gaggctacggttgagtattctgttgggcta

SEQ ID NO: 214702 - DNA, 30 bp, Artificial Sequence
  Synthetic oligonucleotide
tgtaaactgtccgacttagcctttgggcta

SEQ ID NO: 214703 - DNA, 30 bp, Artificial Sequence
  Synthetic oligonucleotide
caatctgagcagatctggaaagaatggcta

SEQ ID NO: 214704 - DNA, 30 bp, Artificial Sequence
  Synthetic oligonucleotide
cactggctacccgctaacctataatggcta

SEQ ID NO: 214705 - DNA, 30 bp, Artificial Sequence
  Synthetic oligonucleotide
ccattaagacccggagctccaagatggcta

SEQ ID NO: 214706 - DNA, 30 bp, Artificial Sequence
  Synthetic oligonucleotide
gcatacaaacatatggactgaatatggcta

SEQ ID NO: 214707 - DNA, 30 bp, Artificial Sequence
  Synthetic oligonucleotide
gtatcgtgggtagatttgaaaccgtggcta

SEQ ID NO: 214708 - DNA, 30 bp, Artificial Sequence
  Synthetic oligonucleotide
tctgtactgcccatcccgtgacattggcta

SEQ ID NO: 214709 - DNA, 30 bp, Artificial Sequence
  Synthetic oligonucleotide
aatagacaacacagcattccacgttggcta

SEQ ID NO: 214710 - DNA, 30 bp, Artificial Sequence
  Synthetic oligonucleotide
agggcctgagtgcggacctcaggcatgcta

SEQ ID NO: 214711 - DNA, 30 bp, Artificial Sequence
  Synthetic oligonucleotide
tcagagtgggcttattgagacacgatgcta

SEQ ID NO: 214712 - DNA, 30 bp, Artificial Sequence
  Synthetic oligonucleotide
gacagatcattcctgcaaaacgcgatgcta

SEQ ID NO: 214713 - DNA, 30 bp, Artificial Sequence
  Synthetic oligonucleotide
ctctggaggaggtacggacgcctgctgcta

SEQ ID NO: 214714 - DNA, 30 bp, Artificial Sequence
  Synthetic oligonucleotide
gggggagaaatcggtaccagggtgctgcta

SEQ ID NO: 214715 - DNA, 30 bp, Artificial Sequence
  Synthetic oligonucleotide
tgcccagctcttaataggtgaatagtgcta

SEQ ID NO: 214716 - DNA, 30 bp, Artificial Sequence
  Synthetic oligonucleotide
aagtagcccggacaagagtggaaattgcta

SEQ ID NO: 214717 - DNA, 30 bp, Artificial Sequence
  Synthetic oligonucleotide
ctggccgttaacaaatgaataaatttgcta

SEQ ID NO: 214718 - DNA, 30 bp, Artificial Sequence
  Synthetic oligonucleotide
ggtaggaaagttcctttcatcggtttgcta

SEQ ID NO: 214719 - DNA, 30 bp, Artificial Sequence
  Synthetic oligonucleotide
agggactcggagccaatagtggggaatcta

SEQ ID NO: 214720 - DNA, 30 bp, Artificial Sequence
  Synthetic oligonucleotide
tcaccttcggaatctagacaaagtaatcta

SEQ ID NO: 214721 - DNA, 30 bp, Artificial Sequence
  Synthetic oligonucleotide
ccggaaacatgctataactaatgtaatcta

SEQ ID NO: 214722 - DNA, 30 bp, Artificial Sequence
  Synthetic oligonucleotide
ccggtgagatgtagtatatactaacatcta

SEQ ID NO: 214723 - DNA, 30 bp, Artificial Sequence
  Synthetic oligonucleotide
atcctaatgtagagggtgcactaagatcta

SEQ ID NO: 214724 - DNA, 30 bp, Artificial Sequence
  Synthetic oligonucleotide
tgtgagcacaaagatcacgcgtccgatcta

SEQ ID NO: 214725 - DNA, 30 bp, Artificial Sequence
  Synthetic oligonucleotide
gccttggcttccaacaagtacctcgatcta

SEQ ID NO: 214726 - DNA, 30 bp, Artificial Sequence
  Synthetic oligonucleotide
cgcggtgtctgatagtaggaaaggtatcta

SEQ ID NO: 214727 - DNA, 30 bp, Artificial Sequence
  Synthetic oligonucleotide
cgacattacacaagtcggtgcgacactcta

SEQ ID NO: 214728 - DNA, 30 bp, Artificial Sequence
  Synthetic oligonucleotide
ttgtggttcacttcgtgcgtagagactcta

SEQ ID NO: 214729 - DNA, 30 bp, Artificial Sequence
  Synthetic oligonucleotide
tggacgtggaaagagaacgatcatactcta

SEQ ID NO: 214730 - DNA, 30 bp, Artificial Sequence
  Synthetic oligonucleotide
aaaagtgtagggagcactacaactactcta

SEQ ID NO: 214731 - DNA, 30 bp, Artificial Sequence
  Synthetic oligonucleotide
atcaatacaatatcgtacagtcttactcta

SEQ ID NO: 214732 - DNA, 30 bp, Artificial Sequence
  Synthetic oligonucleotide
atgatccctaatgcgcgtagccaacctcta

SEQ ID NO: 214733 - DNA, 30 bp, Artificial Sequence
  Synthetic oligonucleotide
actaaatagggatataaggccgagcctcta

SEQ ID NO: 214734 - DNA, 30 bp, Artificial Sequence
  Synthetic oligonucleotide
taggatcggatctgtgtaggttctcctcta

SEQ ID NO: 214735 - DNA, 30 bp, Artificial Sequence
  Synthetic oligonucleotide
cactacccgttgccatcaaacaaagctcta

SEQ ID NO: 214736 - DNA, 30 bp, Artificial Sequence
  Synthetic oligonucleotide
acaggcggcgaggtgcgctcccaagctcta

SEQ ID NO: 214737 - DNA, 30 bp, Artificial Sequence
  Synthetic oligonucleotide
cactgcttgctatacccaacatctgctcta

SEQ ID NO: 214738 - DNA, 30 bp, Artificial Sequence
  Synthetic oligonucleotide
cggcacttaaccccaatacagcgctctcta

SEQ ID NO: 214739 - DNA, 30 bp, Artificial Sequence
  Synthetic oligonucleotide
acgattctaatgctccactttagaagtcta

SEQ ID NO: 214740 - DNA, 30 bp, Artificial Sequence
  Synthetic oligonucleotide
aatagggacattgcaaacaggaagagtcta

SEQ ID NO: 214741 - DNA, 30 bp, Artificial Sequence
  Synthetic oligonucleotide
cgcgccaacaatcctcggatgaagagtcta

SEQ ID NO: 214742 - DNA, 30 bp, Artificial Sequence
  Synthetic oligonucleotide
aacgacgggtagacgggtgggcagagtcta

SEQ ID NO: 214743 - DNA, 30 bp, Artificial Sequence
  Synthetic oligonucleotide
gggccaagagcattaagaccttagagtcta

SEQ ID NO: 214744 - DNA, 30 bp, Artificial Sequence
  Synthetic oligonucleotide
gtaggtgtaaccgtttgctacaggagtcta

SEQ ID NO: 214745 - DNA, 30 bp, Artificial Sequence
  Synthetic oligonucleotide
tacgagcttattctcagagctatgagtcta

SEQ ID NO: 214746 - DNA, 31 bp, Artificial Sequence
  Synthetic oligonucleotide
aagtcagggtgtaacactacgcgtccgtcta

SEQ ID NO: 214747 - DNA, 30 bp, Artificial Sequence
  Synthetic oligonucleotide
tatagaaatcaccgaacccggttccgtcta

SEQ ID NO: 214748 - DNA, 30 bp, Artificial Sequence
  Synthetic oligonucleotide
ccggaccgcgtgatcctagggtatcgtcta

SEQ ID NO: 214749 - DNA, 30 bp, Artificial Sequence
  Synthetic oligonucleotide
agcaacaagccagtaaggcggagaggtcta

SEQ ID NO: 214750 - DNA, 30 bp, Artificial Sequence
  Synthetic oligonucleotide
cggggtggggattcggaccgttacggtcta

SEQ ID NO: 214751 - DNA, 30 bp, Artificial Sequence
  Synthetic oligonucleotide
ttaagatcgcgaaacagggcagtcggtcta

SEQ ID NO: 214752 - DNA, 30 bp, Artificial Sequence
  Synthetic oligonucleotide
tgcggatgcaaacctatactcgagggtcta

SEQ ID NO: 214753 - DNA, 30 bp, Artificial Sequence
  Synthetic oligonucleotide
tgacacactggaagtgctagtttgtgtcta

SEQ ID NO: 214754 - DNA, 30 bp, Artificial Sequence
  Synthetic oligonucleotide
gaggttgctgtggactaccggggcattcta

SEQ ID NO: 214755 - DNA, 30 bp, Artificial Sequence
  Synthetic oligonucleotide
gcatcatacgacgataaaaagctcattcta

SEQ ID NO: 214756 - DNA, 30 bp, Artificial Sequence
  Synthetic oligonucleotide
cttcaggagtgtcgcactatgccgattcta

SEQ ID NO: 214757 - DNA, 30 bp, Artificial Sequence
  Synthetic oligonucleotide
agtggtatcagcgggagcgttaggattcta

SEQ ID NO: 214758 - DNA, 30 bp, Artificial Sequence
  Synthetic oligonucleotide
ttacacaatcccactagcggtaagcttcta

SEQ ID NO: 214759 - DNA, 30 bp, Artificial Sequence
  Synthetic oligonucleotide
agtgtgaaacgacttgccgccaaggttcta

SEQ ID NO: 214760 - DNA, 30 bp, Artificial Sequence
  Synthetic oligonucleotide
ctcacatgatcgtaatacgtgctggttcta

SEQ ID NO: 214761 - DNA, 30 bp, Artificial Sequence
  Synthetic oligonucleotide
acttgaggaagtgagctgctggttgttcta

SEQ ID NO: 214762 - DNA, 30 bp, Artificial Sequence
  Synthetic oligonucleotide
acgacaaaacgatccaccggcgaatttcta

SEQ ID NO: 214763 - DNA, 30 bp, Artificial Sequence
  Synthetic oligonucleotide
ctggggggccagtgcgtctcttgttttcta

SEQ ID NO: 214764 - DNA, 30 bp, Artificial Sequence
  Synthetic oligonucleotide
ggtaaaagggaattcgaatacgtttttcta

SEQ ID NO: 214765 - DNA, 30 bp, Artificial Sequence
  Synthetic oligonucleotide
ctttaggagtcttccgaaaaacaaaaagta

SEQ ID NO: 214766 - DNA, 30 bp, Artificial Sequence
  Synthetic oligonucleotide
aagtggttcggtctctgcgaaacaaaagta

SEQ ID NO: 214767 - DNA, 30 bp, Artificial Sequence
  Synthetic oligonucleotide
ggcatcgagcggccccgcgtggcaaaagta

SEQ ID NO: 214768 - DNA, 30 bp, Artificial Sequence
  Synthetic oligonucleotide
cttatgtggttaaacagctcaataaaagta

SEQ ID NO: 214769 - DNA, 30 bp, Artificial Sequence
  Synthetic oligonucleotide
ggttatacagtgagacatcgtaacaaagta

SEQ ID NO: 214770 - DNA, 30 bp, Artificial Sequence
  Synthetic oligonucleotide
atcggcaggcgttttagctctaagaaagta

SEQ ID NO: 214771 - DNA, 30 bp, Artificial Sequence
  Synthetic oligonucleotide
tcgccaccccgcgtcactgagttgaaagta

SEQ ID NO: 214772 - DNA, 30 bp, Artificial Sequence
  Synthetic oligonucleotide
cagtgccgggcgccaaatgctgataaagta

SEQ ID NO: 214773 - DNA, 30 bp, Artificial Sequence
  Synthetic oligonucleotide
ctggtacgttgactgcgatccgttaaagta

SEQ ID NO: 214774 - DNA, 30 bp, Artificial Sequence
  Synthetic oligonucleotide
cagataattatcgtgaaaatctcacaagta

SEQ ID NO: 214775 - DNA, 30 bp, Artificial Sequence
  Synthetic oligonucleotide
cgccgtttccagcacataaacggacaagta

SEQ ID NO: 214776 - DNA, 30 bp, Artificial Sequence
  Synthetic oligonucleotide
tcagcaattgaagtaagtatttgccaagta

SEQ ID NO: 214777 - DNA, 30 bp, Artificial Sequence
  Synthetic oligonucleotide
gtcaggttcactgagtcataggatcaagta

SEQ ID NO: 214778 - DNA, 30 bp, Artificial Sequence
  Synthetic oligonucleotide
aagcttccataagcgaggtaggatcaagta

SEQ ID NO: 214779 - DNA, 30 bp, Artificial Sequence
  Synthetic oligonucleotide
gccaactggtagtacttaaaggctcaagta

SEQ ID NO: 214780 - DNA, 30 bp, Artificial Sequence
  Synthetic oligonucleotide
atatggcccaaaaacataccctaagaagta

SEQ ID NO: 214781 - DNA, 30 bp, Artificial Sequence
  Synthetic oligonucleotide
gacaaacacgcaatcgatgctccagaagta

SEQ ID NO: 214782 - DNA, 30 bp, Artificial Sequence
  Synthetic oligonucleotide
ggtttaggtctcgagtgcggtggagaagta

SEQ ID NO: 214783 - DNA, 30 bp, Artificial Sequence
  Synthetic oligonucleotide
ctttgcggggggagaagtcataacgaagta

SEQ ID NO: 214784 - DNA, 30 bp, Artificial Sequence
  Synthetic oligonucleotide
gagggttgcggcgagacgatccaataagta

SEQ ID NO: 214785 - DNA, 30 bp, Artificial Sequence
  Synthetic oligonucleotide
tggtgggaagtctccgtagacctctaagta

SEQ ID NO: 214786 - DNA, 30 bp, Artificial Sequence
  Synthetic oligonucleotide
aatctatgggaagatgcttatccgtaagta

SEQ ID NO: 214787 - DNA, 30 bp, Artificial Sequence
  Synthetic oligonucleotide
cattgagaatactaatggtcacattaagta

SEQ ID NO: 214788 - DNA, 30 bp, Artificial Sequence
  Synthetic oligonucleotide
atgaagcgcatcttcaggtaaccaacagta

SEQ ID NO: 214789 - DNA, 30 bp, Artificial Sequence
  Synthetic oligonucleotide
ataacccctctagggcgacttcgaacagta

SEQ ID NO: 214790 - DNA, 30 bp, Artificial Sequence
  Synthetic oligonucleotide
gaagggaatccgatggcgtacggaacagta

SEQ ID NO: 214791 - DNA, 30 bp, Artificial Sequence
  Synthetic oligonucleotide
aagcaaccaattaactacttctggacagta

SEQ ID NO: 214792 - DNA, 30 bp, Artificial Sequence
  Synthetic oligonucleotide
ttcgggactccagaaggcttcgtgacagta

SEQ ID NO: 214793 - DNA, 30 bp, Artificial Sequence
  Synthetic oligonucleotide
aggaaccttgggtcacgtcaagcaccagta

SEQ ID NO: 214794 - DNA, 30 bp, Artificial Sequence
  Synthetic oligonucleotide
gcccaaaaatggataaattcgcgaccagta

SEQ ID NO: 214795 - DNA, 30 bp, Artificial Sequence
  Synthetic oligonucleotide
cgtgggcgccgataatacccacccccagta

SEQ ID NO: 214796 - DNA, 30 bp, Artificial Sequence
  Synthetic oligonucleotide
gcacgaataattccgtcggacgatccagta

SEQ ID NO: 214797 - DNA, 30 bp, Artificial Sequence
  Synthetic oligonucleotide
cattaaagtggaccaagctagcgtccagta

SEQ ID NO: 214798 - DNA, 30 bp, Artificial Sequence
  Synthetic oligonucleotide
gcccgatgggacccgaatactcgtccagta

SEQ ID NO: 214799 - DNA, 30 bp, Artificial Sequence
  Synthetic oligonucleotide
gcagacagatcaaattcagcccgcgcagta

SEQ ID NO: 214800 - DNA, 30 bp, Artificial Sequence
  Synthetic oligonucleotide
gattccccaaaaggggccagataggcagta

SEQ ID NO: 214801 - DNA, 30 bp, Artificial Sequence
  Synthetic oligonucleotide
gtttcggttaaagattttcgctgtgcagta

SEQ ID NO: 214802 - DNA, 30 bp, Artificial Sequence
  Synthetic oligonucleotide
gaccatattacgaggacggccaaatcagta

SEQ ID NO: 214803 - DNA, 30 bp, Artificial Sequence
  Synthetic oligonucleotide
tccgtgtaatgcaagccgcctcagtcagta

SEQ ID NO: 214804 - DNA, 30 bp, Artificial Sequence
  Synthetic oligonucleotide
tctcgatatatgcttctaggttggtcagta

SEQ ID NO: 214805 - DNA, 30 bp, Artificial Sequence
  Synthetic oligonucleotide
gccgggcccagctttctgggatacagagta

SEQ ID NO: 214806 - DNA, 28 bp, Artificial Sequence
  Synthetic oligonucleotide
cctgtgctggtgtgtatattacagagta

SEQ ID NO: 214807 - DNA, 30 bp, Artificial Sequence
  Synthetic oligonucleotide
cgagacgacagtacagaactccccagagta

SEQ ID NO: 214808 - DNA, 30 bp, Artificial Sequence
  Synthetic oligonucleotide
atacaagtgctaatttctgggcccagagta

SEQ ID NO: 214809 - DNA, 30 bp, Artificial Sequence
  Synthetic oligonucleotide
cgagggttctgataacacgcagtgagagta

SEQ ID NO: 214810 - DNA, 30 bp, Artificial Sequence
  Synthetic oligonucleotide
ttggggtaaacagcgcagtagaatagagta

SEQ ID NO: 214811 - DNA, 30 bp, Artificial Sequence
  Synthetic oligonucleotide
attatagtggacctgtagaaataaggagta

SEQ ID NO: 214812 - DNA, 30 bp, Artificial Sequence
  Synthetic oligonucleotide
ttgggtctccccgaggtgatcctaggagta

SEQ ID NO: 214813 - DNA, 30 bp, Artificial Sequence
  Synthetic oligonucleotide
tacgacatgcgcgacacgcttcagggagta

SEQ ID NO: 214814 - DNA, 30 bp, Artificial Sequence
  Synthetic oligonucleotide
gacattgggatcccagtgagtaggggagta

SEQ ID NO: 214815 - DNA, 30 bp, Artificial Sequence
  Synthetic oligonucleotide
tacaaatagagtgaaacgacccgtggagta

SEQ ID NO: 214816 - DNA, 30 bp, Artificial Sequence
  Synthetic oligonucleotide
tggacgattcccgcttcgccaggatgagta

SEQ ID NO: 214817 - DNA, 30 bp, Artificial Sequence
  Synthetic oligonucleotide
aggcggataatgtcggtagaatactgagta

SEQ ID NO: 214818 - DNA, 30 bp, Artificial Sequence
  Synthetic oligonucleotide
ctgtacatcaatagcgctacatagtgagta

SEQ ID NO: 214819 - DNA, 30 bp, Artificial Sequence
  Synthetic oligonucleotide
gggaaccgacggacccgactcaggtgagta

SEQ ID NO: 214820 - DNA, 30 bp, Artificial Sequence
  Synthetic oligonucleotide
ggaaacaaaggccggcaggtgcattgagta

SEQ ID NO: 214821 - DNA, 30 bp, Artificial Sequence
  Synthetic oligonucleotide
attggacttaaccgatcatgggaaatagta

SEQ ID NO: 214822 - DNA, 30 bp, Artificial Sequence
  Synthetic oligonucleotide
agcattgtttggcttagccaatgaatagta

SEQ ID NO: 214823 - DNA, 30 bp, Artificial Sequence
  Synthetic oligonucleotide
ctgcaccctcgacatttcctcatcatagta

SEQ ID NO: 214824 - DNA, 30 bp, Artificial Sequence
  Synthetic oligonucleotide
tagtcctttggcgtattgctgcggatagta

SEQ ID NO: 214825 - DNA, 30 bp, Artificial Sequence
  Synthetic oligonucleotide
gcatttatgtagagacagtaccatatagta

SEQ ID NO: 214826 - DNA, 30 bp, Artificial Sequence
  Synthetic oligonucleotide
tgggtgaatatggggcatcgctaactagta

SEQ ID NO: 214827 - DNA, 30 bp, Artificial Sequence
  Synthetic oligonucleotide
ggtgggaactgatggaagataacactagta

SEQ ID NO: 214828 - DNA, 30 bp, Artificial Sequence
  Synthetic oligonucleotide
tccgctggacttctgagcaaaatgctagta

SEQ ID NO: 214829 - DNA, 30 bp, Artificial Sequence
  Synthetic oligonucleotide
cgttgataatcgtgttgattggttctagta

SEQ ID NO: 214830 - DNA, 30 bp, Artificial Sequence
  Synthetic oligonucleotide
ctcaaagggatcggtcagtcgtgcgtagta

SEQ ID NO: 214831 - DNA, 30 bp, Artificial Sequence
  Synthetic oligonucleotide
ggcacctgtggaaggtgctcgggggtagta

SEQ ID NO: 214832 - DNA, 30 bp, Artificial Sequence
  Synthetic oligonucleotide
ttgatttaaagaggggaaagtacgttagta

SEQ ID NO: 214833 - DNA, 30 bp, Artificial Sequence
  Synthetic oligonucleotide
tgcacccatgtgtatacgcgtactttagta

SEQ ID NO: 214834 - DNA, 30 bp, Artificial Sequence
  Synthetic oligonucleotide
aaaatgctgtaagggtagaagacaaacgta

SEQ ID NO: 214835 - DNA, 30 bp, Artificial Sequence
  Synthetic oligonucleotide
ccaattactgtatgagggcttataaacgta

SEQ ID NO: 214836 - DNA, 30 bp, Artificial Sequence
  Synthetic oligonucleotide
ctctcgaggtctaaccaatatgcgaacgta

SEQ ID NO: 214837 - DNA, 30 bp, Artificial Sequence
  Synthetic oligonucleotide
cgtatcagtcggggttacgtgcataacgta

SEQ ID NO: 214838 - DNA, 30 bp, Artificial Sequence
  Synthetic oligonucleotide
atcgagcaaaagactgttccaggtaacgta

SEQ ID NO: 214839 - DNA, 30 bp, Artificial Sequence
  Synthetic oligonucleotide
aaggatcaccggcttcttttcgcacacgta

SEQ ID NO: 214840 - DNA, 30 bp, Artificial Sequence
  Synthetic oligonucleotide
tgcgagcatgtatattcggctacgcacgta

SEQ ID NO: 214841 - DNA, 30 bp, Artificial Sequence
  Synthetic oligonucleotide
gtgaccggattgggagtgggcaggcacgta

SEQ ID NO: 214842 - DNA, 30 bp, Artificial Sequence
  Synthetic oligonucleotide
tacaacctacgacccaaaattgatcacgta

SEQ ID NO: 214843 - DNA, 30 bp, Artificial Sequence
  Synthetic oligonucleotide
gacgcaaatcgatagctgtgaaaagacgta

SEQ ID NO: 214844 - DNA, 30 bp, Artificial Sequence
  Synthetic oligonucleotide
tgtgcgtaggatctagttatgcaggacgta

SEQ ID NO: 214845 - DNA, 30 bp, Artificial Sequence
  Synthetic oligonucleotide
ttatttgcggagtctgtcaaggaggacgta

SEQ ID NO: 214846 - DNA, 30 bp, Artificial Sequence
  Synthetic oligonucleotide
agcctggcggaagagctgtagtaggacgta

SEQ ID NO: 214847 - DNA, 30 bp, Artificial Sequence
  Synthetic oligonucleotide
atgcagaaaatgtaatgaggggttgacgta

SEQ ID NO: 214848 - DNA, 30 bp, Artificial Sequence
  Synthetic oligonucleotide
cgttgactgttgtttgatgagtagtacgta

SEQ ID NO: 214849 - DNA, 30 bp, Artificial Sequence
  Synthetic oligonucleotide
tgagatgcgtctacaggtgacgcgtacgta

SEQ ID NO: 214850 - DNA, 30 bp, Artificial Sequence
  Synthetic oligonucleotide
gtccgcctagggtcatcttgaagttacgta

SEQ ID NO: 214851 - DNA, 30 bp, Artificial Sequence
  Synthetic oligonucleotide
tgaagaaggcggtgggtgggcctcaccgta

SEQ ID NO: 214852 - DNA, 30 bp, Artificial Sequence
  Synthetic oligonucleotide
aaaatgccacctgcggtacgattcaccgta

SEQ ID NO: 214853 - DNA, 30 bp, Artificial Sequence
  Synthetic oligonucleotide
ctctagacacggaggagaaatgcgcccgta

SEQ ID NO: 214854 - DNA, 30 bp, Artificial Sequence
  Synthetic oligonucleotide
gcagtggttgggggaagcatcattcccgta

SEQ ID NO: 214855 - DNA, 30 bp, Artificial Sequence
  Synthetic oligonucleotide
ggcgtaccttctatgtgggcacccgccgta

SEQ ID NO: 214856 - DNA, 30 bp, Artificial Sequence
  Synthetic oligonucleotide
gccgtaacgaaaaggccagtcagggccgta

SEQ ID NO: 214857 - DNA, 30 bp, Artificial Sequence
  Synthetic oligonucleotide
aatgcttagagcgaacacgcgactgccgta

SEQ ID NO: 214858 - DNA, 30 bp, Artificial Sequence
  Synthetic oligonucleotide
acgcaggccaggaacgtaattaaatccgta

SEQ ID NO: 214859 - DNA, 30 bp, Artificial Sequence
  Synthetic oligonucleotide
tggagtgcgtagcggtcacggtcatccgta

SEQ ID NO: 214860 - DNA, 30 bp, Artificial Sequence
  Synthetic oligonucleotide
ggccgttaagggtgggaatacttatccgta

SEQ ID NO: 214861 - DNA, 30 bp, Artificial Sequence
  Synthetic oligonucleotide
tgaaccgatgtggtaatagtataaagcgta

SEQ ID NO: 214862 - DNA, 30 bp, Artificial Sequence
  Synthetic oligonucleotide
gtgtgaaatcacgcggtcgatctaagcgta

SEQ ID NO: 214863 - DNA, 30 bp, Artificial Sequence
  Synthetic oligonucleotide
cctattatagcctctggcacagccagcgta

SEQ ID NO: 214864 - DNA, 30 bp, Artificial Sequence
  Synthetic oligonucleotide
agtacagtgggttaacgctcaggcagcgta

SEQ ID NO: 214865 - DNA, 30 bp, Artificial Sequence
  Synthetic oligonucleotide
gcttgaccacagtcaatgcacttcagcgta

SEQ ID NO: 214866 - DNA, 30 bp, Artificial Sequence
  Synthetic oligonucleotide
tcgcatcccatagtcagtacttagagcgta

SEQ ID NO: 214867 - DNA, 30 bp, Artificial Sequence
  Synthetic oligonucleotide
atatgtacgaattgcctttccaggagcgta

SEQ ID NO: 214868 - DNA, 30 bp, Artificial Sequence
  Synthetic oligonucleotide
gcatgctgtggctggcctaccagtagcgta

SEQ ID NO: 214869 - DNA, 30 bp, Artificial Sequence
  Synthetic oligonucleotide
gagagtaaatattacaaggtacgtagcgta

SEQ ID NO: 214870 - DNA, 30 bp, Artificial Sequence
  Synthetic oligonucleotide
aaaaaaggaagctgcgaagtctttagcgta

SEQ ID NO: 214871 - DNA, 30 bp, Artificial Sequence
  Synthetic oligonucleotide
gaacaggatcggtaaattaacaaacgcgta

SEQ ID NO: 214872 - DNA, 30 bp, Artificial Sequence
  Synthetic oligonucleotide
gtctccgttgaacgtgctggagggcgcgta

SEQ ID NO: 214873 - DNA, 30 bp, Artificial Sequence
  Synthetic oligonucleotide
aattcagtccgaacactgcggagaggcgta

SEQ ID NO: 214874 - DNA, 30 bp, Artificial Sequence
  Synthetic oligonucleotide
ggttagctttaacagataagcaccggcgta

SEQ ID NO: 214875 - DNA, 30 bp, Artificial Sequence
  Synthetic oligonucleotide
caatatgaataactctatttgaagggcgta

SEQ ID NO: 214876 - DNA, 30 bp, Artificial Sequence
  Synthetic oligonucleotide
ccataatgatgcggaaagattgaatgcgta

SEQ ID NO: 214877 - DNA, 30 bp, Artificial Sequence
  Synthetic oligonucleotide
acgggtttcgaattctctcttacctgcgta

SEQ ID NO: 214878 - DNA, 30 bp, Artificial Sequence
  Synthetic oligonucleotide
gccgagttcagttgttagcctggctgcgta

SEQ ID NO: 214879 - DNA, 30 bp, Artificial Sequence
  Synthetic oligonucleotide
gatagggacatgggtgtcacagcttgcgta

SEQ ID NO: 214880 - DNA, 30 bp, Artificial Sequence
  Synthetic oligonucleotide
gtgaaatttcaacgcactatacgttgcgta

SEQ ID NO: 214881 - DNA, 30 bp, Artificial Sequence
  Synthetic oligonucleotide
cgtcaaattcgtaggaagtctggaatcgta

SEQ ID NO: 214882 - DNA, 30 bp, Artificial Sequence
  Synthetic oligonucleotide
tagttgcgcaagaacaatatatgaatcgta

SEQ ID NO: 214883 - DNA, 30 bp, Artificial Sequence
  Synthetic oligonucleotide
tcgggttcgaggtcactgctcgtaatcgta

SEQ ID NO: 214884 - DNA, 30 bp, Artificial Sequence
  Synthetic oligonucleotide
cccaggttttcaaaattacgggcgatcgta

SEQ ID NO: 214885 - DNA, 30 bp, Artificial Sequence
  Synthetic oligonucleotide
acaagttacaacgacaataatcatatcgta

SEQ ID NO: 214886 - DNA, 30 bp, Artificial Sequence
  Synthetic oligonucleotide
gacaccgggcagttcgactttcaactcgta

SEQ ID NO: 214887 - DNA, 30 bp, Artificial Sequence
  Synthetic oligonucleotide
tggacgaaagtgtatcgcgacagcctcgta

SEQ ID NO: 214888 - DNA, 30 bp, Artificial Sequence
  Synthetic oligonucleotide
cgaaattccttatatgcgtcggtcctcgta

SEQ ID NO: 214889 - DNA, 30 bp, Artificial Sequence
  Synthetic oligonucleotide
cacgggggtggctcgatagagcagctcgta

SEQ ID NO: 214890 - DNA, 30 bp, Artificial Sequence
  Synthetic oligonucleotide
taagtctaaagcagtcgggcgacgctcgta

SEQ ID NO: 214891 - DNA, 30 bp, Artificial Sequence
  Synthetic oligonucleotide
tccggggcggtgagccttcggccgctcgta

SEQ ID NO: 214892 - DNA, 30 bp, Artificial Sequence
  Synthetic oligonucleotide
catgtacgttagaattcatgatctctcgta

SEQ ID NO: 214893 - DNA, 30 bp, Artificial Sequence
  Synthetic oligonucleotide
taagcgtctgcggaagaacatgttctcgta

SEQ ID NO: 214894 - DNA, 30 bp, Artificial Sequence
  Synthetic oligonucleotide
cgtttcaaaagattaaagatcaacgtcgta

SEQ ID NO: 214895 - DNA, 30 bp, Artificial Sequence
  Synthetic oligonucleotide
ttcgcccagagttacaatcttgacgtcgta

SEQ ID NO: 214896 - DNA, 30 bp, Artificial Sequence
  Synthetic oligonucleotide
gggaattcaggcaaataaaaccctgtcgta

SEQ ID NO: 214897 - DNA, 30 bp, Artificial Sequence
  Synthetic oligonucleotide
cgtgcaaacatcacaaaaaactgtgtcgta

SEQ ID NO: 214898 - DNA, 30 bp, Artificial Sequence
  Synthetic oligonucleotide
taaaacagtcaatcgccactagacttcgta

SEQ ID NO: 214899 - DNA, 30 bp, Artificial Sequence
  Synthetic oligonucleotide
agttctggcagttgcccgacggacttcgta

SEQ ID NO: 214900 - DNA, 30 bp, Artificial Sequence
  Synthetic oligonucleotide
cagaaggctaacgacagacctgacttcgta

SEQ ID NO: 214901 - DNA, 30 bp, Artificial Sequence
  Synthetic oligonucleotide
acgcgtcaactgctcgaatgactcttcgta

SEQ ID NO: 214902 - DNA, 30 bp, Artificial Sequence
  Synthetic oligonucleotide
gtgcgttcgagcactcgcgcaactttcgta

SEQ ID NO: 214903 - DNA, 30 bp, Artificial Sequence
  Synthetic oligonucleotide
tacaaaccgccgattgaaatcccaaaggta

SEQ ID NO: 214904 - DNA, 30 bp, Artificial Sequence
  Synthetic oligonucleotide
ttgggcagtgtttatgtgcaatagaaggta

SEQ ID NO: 214905 - DNA, 30 bp, Artificial Sequence
  Synthetic oligonucleotide
acggagctgttaccatgcgcgctacaggta

SEQ ID NO: 214906 - DNA, 30 bp, Artificial Sequence
  Synthetic oligonucleotide
gtagcgacttaggcggccgatcgtcaggta

SEQ ID NO: 214907 - DNA, 30 bp, Artificial Sequence
  Synthetic oligonucleotide
tacacactactagatcgcgtctgtcaggta

SEQ ID NO: 214908 - DNA, 30 bp, Artificial Sequence
  Synthetic oligonucleotide
gagtattcataagtgtccgaaattcaggta

SEQ ID NO: 214909 - DNA, 30 bp, Artificial Sequence
  Synthetic oligonucleotide
gcaggatttgttatacacgatcaagaggta

SEQ ID NO: 214910 - DNA, 31 bp, Artificial Sequence
  Synthetic oligonucleotide
ctgcaattccgacttgccgttttaggaggta

SEQ ID NO: 214911 - DNA, 30 bp, Artificial Sequence
  Synthetic oligonucleotide
acgtaggctcggttgagatttcctgaggta

SEQ ID NO: 214912 - DNA, 30 bp, Artificial Sequence
  Synthetic oligonucleotide
agagaacgggatcggtacagaggtgaggta

SEQ ID NO: 214913 - DNA, 30 bp, Artificial Sequence
  Synthetic oligonucleotide
ccgtgctggtggggaactataacctaggta

SEQ ID NO: 214914 - DNA, 30 bp, Artificial Sequence
  Synthetic oligonucleotide
gatgaaagaaagtagaatcggccctaggta

SEQ ID NO: 214915 - DNA, 30 bp, Artificial Sequence
  Synthetic oligonucleotide
acatcgaaccgacacggcgcgggaacggta

SEQ ID NO: 214916 - DNA, 30 bp, Artificial Sequence
  Synthetic oligonucleotide
ctaacgacggattcaaggttcctgacggta

SEQ ID NO: 214917 - DNA, 30 bp, Artificial Sequence
  Synthetic oligonucleotide
gggtaattaactagtgtcgataagccggta

SEQ ID NO: 214918 - DNA, 30 bp, Artificial Sequence
  Synthetic oligonucleotide
gacaaaagctaatcacagcacaatccggta

SEQ ID NO: 214919 - DNA, 30 bp, Artificial Sequence
  Synthetic oligonucleotide
cgggccggggaacagtcagccgaagcggta

SEQ ID NO: 214920 - DNA, 30 bp, Artificial Sequence
  Synthetic oligonucleotide
accagccacggagctgagagatcagcggta

SEQ ID NO: 214921 - DNA, 30 bp, Artificial Sequence
  Synthetic oligonucleotide
tcagtaatacaatacgctagcagagcggta

SEQ ID NO: 214922 - DNA, 30 bp, Artificial Sequence
  Synthetic oligonucleotide
gtgctactgctggaattatcgcgagcggta

SEQ ID NO: 214923 - DNA, 30 bp, Artificial Sequence
  Synthetic oligonucleotide
tttaggtcaaccaagctcaggcccgcggta

SEQ ID NO: 214924 - DNA, 30 bp, Artificial Sequence
  Synthetic oligonucleotide
actacccagagtcgttaagaaagcgcggta

SEQ ID NO: 214925 - DNA, 30 bp, Artificial Sequence
  Synthetic oligonucleotide
gtgcatcaaggtgcgcgatagacggcggta

SEQ ID NO: 214926 - DNA, 30 bp, Artificial Sequence
  Synthetic oligonucleotide
actgtgcggatacaaatatcctctgcggta

SEQ ID NO: 214927 - DNA, 30 bp, Artificial Sequence
  Synthetic oligonucleotide
tgactatcgattaaatgacagctctcggta

SEQ ID NO: 214928 - DNA, 30 bp, Artificial Sequence
  Synthetic oligonucleotide
ttcgcgaaactaattttcgaagtgtcggta

SEQ ID NO: 214929 - DNA, 30 bp, Artificial Sequence
  Synthetic oligonucleotide
aagatgtggttatagtcagcggtgtcggta

SEQ ID NO: 214930 - DNA, 30 bp, Artificial Sequence
  Synthetic oligonucleotide
gcggcatcgcgagccggggctgtttcggta

SEQ ID NO: 214931 - DNA, 30 bp, Artificial Sequence
  Synthetic oligonucleotide
aacacgtagcgcttcctagaggtcagggta

SEQ ID NO: 214932 - DNA, 30 bp, Artificial Sequence
  Synthetic oligonucleotide
tactcactttgtgagacttccttcagggta

SEQ ID NO: 214933 - DNA, 30 bp, Artificial Sequence
  Synthetic oligonucleotide
ggccccagagcaaggatggtgaagagggta

SEQ ID NO: 214934 - DNA, 30 bp, Artificial Sequence
  Synthetic oligonucleotide
ataatgatgataggagcgaacgcgagggta

SEQ ID NO: 214935 - DNA, 30 bp, Artificial Sequence
  Synthetic oligonucleotide
gtagacatccaacacaagtactctagggta

SEQ ID NO: 214936 - DNA, 30 bp, Artificial Sequence
  Synthetic oligonucleotide
acgtagtgagagaattcgaaggcccgggta

SEQ ID NO: 214937 - DNA, 30 bp, Artificial Sequence
  Synthetic oligonucleotide
caacggccctatatatgtcactcgcgggta

SEQ ID NO: 214938 - DNA, 30 bp, Artificial Sequence
  Synthetic oligonucleotide
cagagaccaggcatctagtatgatcgggta

SEQ ID NO: 214939 - DNA, 30 bp, Artificial Sequence
  Synthetic oligonucleotide
caggcttatgcgtgaagattacacggggta

SEQ ID NO: 214940 - DNA, 30 bp, Artificial Sequence
  Synthetic oligonucleotide
ggaagggggggctatacgtgccagggggta

SEQ ID NO: 214941 - DNA, 30 bp, Artificial Sequence
  Synthetic oligonucleotide
acacccgaactcaacgagctgtcgggggta

SEQ ID NO: 214942 - DNA, 30 bp, Artificial Sequence
  Synthetic oligonucleotide
gctccagagggggtacttcggggatgggta

SEQ ID NO: 214943 - DNA, 30 bp, Artificial Sequence
  Synthetic oligonucleotide
tgtatggttggccgcctgaacaactgggta

SEQ ID NO: 214944 - DNA, 30 bp, Artificial Sequence
  Synthetic oligonucleotide
tcaatatctggacgggctaaccactgggta

SEQ ID NO: 214945 - DNA, 30 bp, Artificial Sequence
  Synthetic oligonucleotide
tcactactctaacatcatcgttagtgggta

SEQ ID NO: 214946 - DNA, 30 bp, Artificial Sequence
  Synthetic oligonucleotide
agagcagctaggaatgcatctacgtgggta

SEQ ID NO: 214947 - DNA, 30 bp, Artificial Sequence
  Synthetic oligonucleotide
caggcatgctgcggccagactggttgggta

SEQ ID NO: 214948 - DNA, 30 bp, Artificial Sequence
  Synthetic oligonucleotide
tccgggctagaaggcatcaaaatttgggta

SEQ ID NO: 214949 - DNA, 30 bp, Artificial Sequence
  Synthetic oligonucleotide
cttgtgatcatctaggtggcagtttgggta

SEQ ID NO: 214950 - DNA, 30 bp, Artificial Sequence
  Synthetic oligonucleotide
ctgagggctcaaagacactgcgtaatggta

SEQ ID NO: 214951 - DNA, 30 bp, Artificial Sequence
  Synthetic oligonucleotide
gtcatacaagtgggtgctctacacatggta

SEQ ID NO: 214952 - DNA, 30 bp, Artificial Sequence
  Synthetic oligonucleotide
ggcgggcgcaaggtcagccacagcatggta

SEQ ID NO: 214953 - DNA, 30 bp, Artificial Sequence
  Synthetic oligonucleotide
cttaaaggaattcattttactggcatggta

SEQ ID NO: 214954 - DNA, 30 bp, Artificial Sequence
  Synthetic oligonucleotide
gacacaagttcaacccaactttagatggta

SEQ ID NO: 214955 - DNA, 30 bp, Artificial Sequence
  Synthetic oligonucleotide
ctatcctgatctcgattcgtcgtgatggta

SEQ ID NO: 214956 - DNA, 30 bp, Artificial Sequence
  Synthetic oligonucleotide
cataggtcgtggggggttttaactatggta

SEQ ID NO: 214957 - DNA, 30 bp, Artificial Sequence
  Synthetic oligonucleotide
aggtccagatcatcgacattctctatggta

SEQ ID NO: 214958 - DNA, 30 bp, Artificial Sequence
  Synthetic oligonucleotide
gtcctcgaaagcggttgatctagactggta

SEQ ID NO: 214959 - DNA, 30 bp, Artificial Sequence
  Synthetic oligonucleotide
gggatagcttaataagagttagtcctggta

SEQ ID NO: 214960 - DNA, 30 bp, Artificial Sequence
  Synthetic oligonucleotide
taaggatgccaagaggtcaccccgctggta

SEQ ID NO: 214961 - DNA, 30 bp, Artificial Sequence
  Synthetic oligonucleotide
ttggtgcgtgatgctttaaaagcgctggta

SEQ ID NO: 214962 - DNA, 30 bp, Artificial Sequence
  Synthetic oligonucleotide
caggcgtcgtctggatcgagacggctggta

SEQ ID NO: 214963 - DNA, 30 bp, Artificial Sequence
  Synthetic oligonucleotide
cggaagtttgcgcgattatggtgtctggta

SEQ ID NO: 214964 - DNA, 30 bp, Artificial Sequence
  Synthetic oligonucleotide
ccatacaatatatttccgtacgaagtggta

SEQ ID NO: 214965 - DNA, 30 bp, Artificial Sequence
  Synthetic oligonucleotide
ttgagcaggtggtcctgtatgacagtggta

SEQ ID NO: 214966 - DNA, 30 bp, Artificial Sequence
  Synthetic oligonucleotide
gtgtaggaaaggtggggacccaccgtggta

SEQ ID NO: 214967 - DNA, 30 bp, Artificial Sequence
  Synthetic oligonucleotide
gattggaccaagagttcaacactcgtggta

SEQ ID NO: 214968 - DNA, 30 bp, Artificial Sequence
  Synthetic oligonucleotide
tgtattagggtgtatacgaacttcgtggta

SEQ ID NO: 214969 - DNA, 30 bp, Artificial Sequence
  Synthetic oligonucleotide
ttatcactcggggctccgactcttgtggta

SEQ ID NO: 214970 - DNA, 30 bp, Artificial Sequence
  Synthetic oligonucleotide
tgcataacctcgcggtcaccaccattggta

SEQ ID NO: 214971 - DNA, 30 bp, Artificial Sequence
  Synthetic oligonucleotide
gtgttcgtctggtgtaatcgctacttggta

SEQ ID NO: 214972 - DNA, 30 bp, Artificial Sequence
  Synthetic oligonucleotide
gacagacgagtctcagtgtaatgcttggta

SEQ ID NO: 214973 - DNA, 30 bp, Artificial Sequence
  Synthetic oligonucleotide
gcaccaagaggtgcgccaatttgcttggta

SEQ ID NO: 214974 - DNA, 30 bp, Artificial Sequence
  Synthetic oligonucleotide
ttccggagagtctattaacaagtcttggta

SEQ ID NO: 214975 - DNA, 30 bp, Artificial Sequence
  Synthetic oligonucleotide
ataacagttagctataggtcggggttggta

SEQ ID NO: 214976 - DNA, 30 bp, Artificial Sequence
  Synthetic oligonucleotide
cttgtggatctatgtgagaccaaaaatgta

SEQ ID NO: 214977 - DNA, 30 bp, Artificial Sequence
  Synthetic oligonucleotide
tttgtaaatgtcacatgcgtggccaatgta

SEQ ID NO: 214978 - DNA, 30 bp, Artificial Sequence
  Synthetic oligonucleotide
aagatggaaacggtttacagatcgaatgta

SEQ ID NO: 214979 - DNA, 30 bp, Artificial Sequence
  Synthetic oligonucleotide
gcagccagatctggtaaaagagctaatgta

SEQ ID NO: 214980 - DNA, 30 bp, Artificial Sequence
  Synthetic oligonucleotide
aaaggctgcgattgtcggggtgttaatgta

SEQ ID NO: 214981 - DNA, 30 bp, Artificial Sequence
  Synthetic oligonucleotide
aaaacaggctatccggttggtaacgatgta

SEQ ID NO: 214982 - DNA, 30 bp, Artificial Sequence
  Synthetic oligonucleotide
cacctttatcacacccagacaatcgatgta

SEQ ID NO: 214983 - DNA, 30 bp, Artificial Sequence
  Synthetic oligonucleotide
gaatgtcggcacgatataccatcggatgta

SEQ ID NO: 214984 - DNA, 30 bp, Artificial Sequence
  Synthetic oligonucleotide
aagggaacgacgacgcaactacgtgatgta

SEQ ID NO: 214985 - DNA, 30 bp, Artificial Sequence
  Synthetic oligonucleotide
cgggaggttaggtgattatagtaatatgta

SEQ ID NO: 214986 - DNA, 30 bp, Artificial Sequence
  Synthetic oligonucleotide
tgtttggcgtgcgaggtgacatcatatgta

SEQ ID NO: 214987 - DNA, 30 bp, Artificial Sequence
  Synthetic oligonucleotide
ttggatgagttttcgtcagcaggatatgta

SEQ ID NO: 214988 - DNA, 30 bp, Artificial Sequence
  Synthetic oligonucleotide
tagacaccccaattggacgtggagtatgta

SEQ ID NO: 214989 - DNA, 30 bp, Artificial Sequence
  Synthetic oligonucleotide
aaatgctacttgcaacgcggtctgtatgta

SEQ ID NO: 214990 - DNA, 30 bp, Artificial Sequence
  Synthetic oligonucleotide
actctcaaggaaatactcgagcccactgta

SEQ ID NO: 214991 - DNA, 30 bp, Artificial Sequence
  Synthetic oligonucleotide
ttggtcggtcagggaaggagggggactgta

SEQ ID NO: 214992 - DNA, 30 bp, Artificial Sequence
  Synthetic oligonucleotide
tcccgcggacatcgggtccatgtgactgta

SEQ ID NO: 214993 - DNA, 30 bp, Artificial Sequence
  Synthetic oligonucleotide
tggaaagtgcgccttcctggacttactgta

SEQ ID NO: 214994 - DNA, 30 bp, Artificial Sequence
  Synthetic oligonucleotide
tagaactaactggcttatgccaagcctgta

SEQ ID NO: 214995 - DNA, 30 bp, Artificial Sequence
  Synthetic oligonucleotide
ctaaataggaatgtaagtattcggcctgta

SEQ ID NO: 214996 - DNA, 30 bp, Artificial Sequence
  Synthetic oligonucleotide
cgggtacacagtttgtaagcaatagctgta

SEQ ID NO: 214997 - DNA, 30 bp, Artificial Sequence
  Synthetic oligonucleotide
atgggcggggttcacaccatcaacgctgta

SEQ ID NO: 214998 - DNA, 30 bp, Artificial Sequence
  Synthetic oligonucleotide
cccgcttcaccatcggatctataggctgta

SEQ ID NO: 214999 - DNA, 30 bp, Artificial Sequence
  Synthetic oligonucleotide
ggagataccagggttgcggattatgctgta

SEQ ID NO: 215000 - DNA, 30 bp, Artificial Sequence
  Synthetic oligonucleotide
gatcacgaaccgctgaaaagagaatctgta

SEQ ID NO: 215001 - DNA, 30 bp, Artificial Sequence
  Synthetic oligonucleotide
ataataaggattaaatgaaattcctctgta

SEQ ID NO: 215002 - DNA, 30 bp, Artificial Sequence
  Synthetic oligonucleotide
aggaggcgtggcatcaccataccgtctgta

SEQ ID NO: 215003 - DNA, 30 bp, Artificial Sequence
  Synthetic oligonucleotide
ggagcagtcaccttagaagcatattctgta

SEQ ID NO: 215004 - DNA, 30 bp, Artificial Sequence
  Synthetic oligonucleotide
cccggcaagggaccctaatcctattctgta

SEQ ID NO: 215005 - DNA, 30 bp, Artificial Sequence
  Synthetic oligonucleotide
cagctagcgacatggcaatgtgtttctgta

SEQ ID NO: 215006 - DNA, 30 bp, Artificial Sequence
  Synthetic oligonucleotide
tcgtaggtggatacaggattattttctgta

SEQ ID NO: 215007 - DNA, 29 bp, Artificial Sequence
  Synthetic oligonucleotide
cgttactagaaattgtgaggaaaagtgta

SEQ ID NO: 215008 - DNA, 30 bp, Artificial Sequence
  Synthetic oligonucleotide
gagagagcttgactttgaagcctgagtgta

SEQ ID NO: 215009 - DNA, 30 bp, Artificial Sequence
  Synthetic oligonucleotide
acttcaaggtactcacgcgtatctagtgta

SEQ ID NO: 215010 - DNA, 30 bp, Artificial Sequence
  Synthetic oligonucleotide
ccggtaacattaattaaatattctagtgta

SEQ ID NO: 215011 - DNA, 30 bp, Artificial Sequence
  Synthetic oligonucleotide
taggtggttgtcacggattcttaacgtgta

SEQ ID NO: 215012 - DNA, 30 bp, Artificial Sequence
  Synthetic oligonucleotide
acaggggaataccgcccgcaacgccgtgta

SEQ ID NO: 215013 - DNA, 30 bp, Artificial Sequence
  Synthetic oligonucleotide
cgggtaagtcagaacagcttctagcgtgta

SEQ ID NO: 215014 - DNA, 30 bp, Artificial Sequence
  Synthetic oligonucleotide
atgtagaggaatattctgttgactcgtgta

SEQ ID NO: 215015 - DNA, 30 bp, Artificial Sequence
  Synthetic oligonucleotide
atgtcgcctgcgggtattgagggtcgtgta

SEQ ID NO: 215016 - DNA, 30 bp, Artificial Sequence
  Synthetic oligonucleotide
caacgctggcgttgcggtcaaacaggtgta

SEQ ID NO: 215017 - DNA, 30 bp, Artificial Sequence
  Synthetic oligonucleotide
cctttagggaggcactgccatcgaggtgta

SEQ ID NO: 215018 - DNA, 30 bp, Artificial Sequence
  Synthetic oligonucleotide
cgttcgaccgggactctgcctcttggtgta

SEQ ID NO: 215019 - DNA, 30 bp, Artificial Sequence
  Synthetic oligonucleotide
tcaccaaccagctaaagggtccaatgtgta

SEQ ID NO: 215020 - DNA, 30 bp, Artificial Sequence
  Synthetic oligonucleotide
gcgtagagaatttcggtttatgcctgtgta

SEQ ID NO: 215021 - DNA, 30 bp, Artificial Sequence
  Synthetic oligonucleotide
gtgatagttatcgcacccaatgtctgtgta

SEQ ID NO: 215022 - DNA, 30 bp, Artificial Sequence
  Synthetic oligonucleotide
catcatcgtagactatctagtgagtgtgta

SEQ ID NO: 215023 - DNA, 30 bp, Artificial Sequence
  Synthetic oligonucleotide
gaatcgtaaaagagtaacctcatgtgtgta

SEQ ID NO: 215024 - DNA, 30 bp, Artificial Sequence
  Synthetic oligonucleotide
tgggcgcccacgagggtcgaacattgtgta

SEQ ID NO: 215025 - DNA, 30 bp, Artificial Sequence
  Synthetic oligonucleotide
gaagcttaaacgcgtgcgagtgcaattgta

SEQ ID NO: 215026 - DNA, 30 bp, Artificial Sequence
  Synthetic oligonucleotide
tcaaacatcggacggacctgagtcattgta

SEQ ID NO: 215027 - DNA, 30 bp, Artificial Sequence
  Synthetic oligonucleotide
taaaccattaaatattactggcagattgta

SEQ ID NO: 215028 - DNA, 30 bp, Artificial Sequence
  Synthetic oligonucleotide
aagatgtttggttgaacgtatacgattgta

SEQ ID NO: 215029 - DNA, 30 bp, Artificial Sequence
  Synthetic oligonucleotide
gccatacgtggaacaattaacaatattgta

SEQ ID NO: 215030 - DNA, 30 bp, Artificial Sequence
  Synthetic oligonucleotide
aaatggtagctggttccgggacgtattgta

SEQ ID NO: 215031 - DNA, 30 bp, Artificial Sequence
  Synthetic oligonucleotide
gaaggtgacacggaaggcgcgggtattgta

SEQ ID NO: 215032 - DNA, 30 bp, Artificial Sequence
  Synthetic oligonucleotide
ccgctgatggggagggtgttgtaacttgta

SEQ ID NO: 215033 - DNA, 30 bp, Artificial Sequence
  Synthetic oligonucleotide
gtataccgtaaatggctaactgaccttgta

SEQ ID NO: 215034 - DNA, 30 bp, Artificial Sequence
  Synthetic oligonucleotide
acgcacgatatctctacataagtgcttgta

SEQ ID NO: 215035 - DNA, 30 bp, Artificial Sequence
  Synthetic oligonucleotide
tcgtgcgctgtctgatgtaatcctcttgta

SEQ ID NO: 215036 - DNA, 30 bp, Artificial Sequence
  Synthetic oligonucleotide
ggctactacccgtctggactgccagttgta

SEQ ID NO: 215037 - DNA, 30 bp, Artificial Sequence
  Synthetic oligonucleotide
aactattgattatgagtctatcgcgttgta

SEQ ID NO: 215038 - DNA, 30 bp, Artificial Sequence
  Synthetic oligonucleotide
attagcgagccgcaggcccttatcgttgta

SEQ ID NO: 215039 - DNA, 30 bp, Artificial Sequence
  Synthetic oligonucleotide
agggcagggacacggcacaaatgggttgta

SEQ ID NO: 215040 - DNA, 30 bp, Artificial Sequence
  Synthetic oligonucleotide
gaaggtcagctttggctgtcaatggttgta

SEQ ID NO: 215041 - DNA, 30 bp, Artificial Sequence
  Synthetic oligonucleotide
agcagaaagcggattacgtgatactttgta

SEQ ID NO: 215042 - DNA, 30 bp, Artificial Sequence
  Synthetic oligonucleotide
tgcaaccagacccgtccaatgcagtttgta

SEQ ID NO: 215043 - DNA, 30 bp, Artificial Sequence
  Synthetic oligonucleotide
accagatggacttccatttaggtcaaatta

SEQ ID NO: 215044 - DNA, 30 bp, Artificial Sequence
  Synthetic oligonucleotide
gcgaggcattagtgctccgatactaaatta

SEQ ID NO: 215045 - DNA, 30 bp, Artificial Sequence
  Synthetic oligonucleotide
aaccataagcatttgatgattagacaatta

SEQ ID NO: 215046 - DNA, 31 bp, Artificial Sequence
  Synthetic oligonucleotide
gagatgtggtcgttcacgattccgacaatta

SEQ ID NO: 215047 - DNA, 30 bp, Artificial Sequence
  Synthetic oligonucleotide
gatggtggcctgaccaaacatgtccaatta

SEQ ID NO: 215048 - DNA, 30 bp, Artificial Sequence
  Synthetic oligonucleotide
actgcaccgccagactgcgagtggcaatta

SEQ ID NO: 215049 - DNA, 30 bp, Artificial Sequence
  Synthetic oligonucleotide
tttcgctaatatcctctatctctgcaatta

SEQ ID NO: 215050 - DNA, 30 bp, Artificial Sequence
  Synthetic oligonucleotide
ctgcttgaggtcgactaagttgtgcaatta

SEQ ID NO: 215051 - DNA, 30 bp, Artificial Sequence
  Synthetic oligonucleotide
gtatgtatagactgaaacaggcgtcaatta

SEQ ID NO: 215052 - DNA, 30 bp, Artificial Sequence
  Synthetic oligonucleotide
aagtacgcccagcttgctttagcagaatta

SEQ ID NO: 215053 - DNA, 30 bp, Artificial Sequence
  Synthetic oligonucleotide
cgtccttacggaaatacagaacgagaatta

SEQ ID NO: 215054 - DNA, 30 bp, Artificial Sequence
  Synthetic oligonucleotide
atccatgagcgaccaggtggagtagaatta

SEQ ID NO: 215055 - DNA, 30 bp, Artificial Sequence
  Synthetic oligonucleotide
ggcaaacacacagccgctgcggccgaatta

SEQ ID NO: 215056 - DNA, 30 bp, Artificial Sequence
  Synthetic oligonucleotide
ggttcgtaaaggtatgattagccggaatta

SEQ ID NO: 215057 - DNA, 30 bp, Artificial Sequence
  Synthetic oligonucleotide
gcaaggtccaagccggccaccgtggaatta

SEQ ID NO: 215058 - DNA, 30 bp, Artificial Sequence
  Synthetic oligonucleotide
atcgagtccgcataagtacctcgtgaatta

SEQ ID NO: 215059 - DNA, 30 bp, Artificial Sequence
  Synthetic oligonucleotide
ctgaactggcccggactagagtgtgaatta

SEQ ID NO: 215060 - DNA, 30 bp, Artificial Sequence
  Synthetic oligonucleotide
gtgactggaatcaagctagggattgaatta

SEQ ID NO: 215061 - DNA, 30 bp, Artificial Sequence
  Synthetic oligonucleotide
tgtggacaacctatgcgagtctcataatta

SEQ ID NO: 215062 - DNA, 30 bp, Artificial Sequence
  Synthetic oligonucleotide
catgccgacaggttattctcaacctaatta

SEQ ID NO: 215063 - DNA, 30 bp, Artificial Sequence
  Synthetic oligonucleotide
gataatacaactggtcatggagcgtaatta

SEQ ID NO: 215064 - DNA, 30 bp, Artificial Sequence
  Synthetic oligonucleotide
tagctggtcgacattagccctcggtaatta

SEQ ID NO: 215065 - DNA, 30 bp, Artificial Sequence
  Synthetic oligonucleotide
actcgtagccctgaggcaacaatttaatta

SEQ ID NO: 215066 - DNA, 30 bp, Artificial Sequence
  Synthetic oligonucleotide
aaatagcgtcaaagcagcagaataacatta

SEQ ID NO: 215067 - DNA, 30 bp, Artificial Sequence
  Synthetic oligonucleotide
catagagcataagatcattatataacatta

SEQ ID NO: 215068 - DNA, 30 bp, Artificial Sequence
  Synthetic oligonucleotide
tcgctgtgcgtgcgcgcactagtcacatta

SEQ ID NO: 215069 - DNA, 30 bp, Artificial Sequence
  Synthetic oligonucleotide
ttgaaggaatcgcaagactcgacaccatta

SEQ ID NO: 215070 - DNA, 30 bp, Artificial Sequence
  Synthetic oligonucleotide
tgacagccaaaagcagatgggagaccatta

SEQ ID NO: 215071 - DNA, 30 bp, Artificial Sequence
  Synthetic oligonucleotide
cggcgagctagacgcagtgaacacccatta

SEQ ID NO: 215072 - DNA, 30 bp, Artificial Sequence
  Synthetic oligonucleotide
gctctggctgagatcatggctggcccatta

SEQ ID NO: 215073 - DNA, 30 bp, Artificial Sequence
  Synthetic oligonucleotide
tgatggtagcacatggaagaatgcccatta

SEQ ID NO: 215074 - DNA, 30 bp, Artificial Sequence
  Synthetic oligonucleotide
gtggggtcttggtcctgactatctccatta

SEQ ID NO: 215075 - DNA, 30 bp, Artificial Sequence
  Synthetic oligonucleotide
ccaagtgcggcgcatgcgcgttactcatta

SEQ ID NO: 215076 - DNA, 30 bp, Artificial Sequence
  Synthetic oligonucleotide
gcacctgtggtgagctacaaatgctcatta

SEQ ID NO: 215077 - DNA, 30 bp, Artificial Sequence
  Synthetic oligonucleotide
gataacaaccgccgtaaaagcctctcatta

SEQ ID NO: 215078 - DNA, 30 bp, Artificial Sequence
  Synthetic oligonucleotide
ttgaaccctagggatcgctataggtcatta

SEQ ID NO: 215079 - DNA, 30 bp, Artificial Sequence
  Synthetic oligonucleotide
gttaggtggagccattagcacaattcatta

SEQ ID NO: 215080 - DNA, 30 bp, Artificial Sequence
  Synthetic oligonucleotide
ctccagagaccgaccattcgtgaaagatta

SEQ ID NO: 215081 - DNA, 30 bp, Artificial Sequence
  Synthetic oligonucleotide
tcccaagcgaccagctcattcgtaagatta

SEQ ID NO: 215082 - DNA, 30 bp, Artificial Sequence
  Synthetic oligonucleotide
ctccttacaattaagtcgccgttaagatta

SEQ ID NO: 215083 - DNA, 30 bp, Artificial Sequence
  Synthetic oligonucleotide
caaatgtgagtagaggcttgtcccagatta

SEQ ID NO: 215084 - DNA, 30 bp, Artificial Sequence
  Synthetic oligonucleotide
ctcgtaatcaagtctcgctgcagcagatta

SEQ ID NO: 215085 - DNA, 30 bp, Artificial Sequence
  Synthetic oligonucleotide
cgagcaagaggtggtcatggccgcagatta

SEQ ID NO: 215086 - DNA, 30 bp, Artificial Sequence
  Synthetic oligonucleotide
tggctatgcgctttggcgacactcagatta

SEQ ID NO: 215087 - DNA, 30 bp, Artificial Sequence
  Synthetic oligonucleotide
acagagggtgatattcgcgcccagagatta

SEQ ID NO: 215088 - DNA, 30 bp, Artificial Sequence
  Synthetic oligonucleotide
ggttcagccagagaattgcatgtgagatta

SEQ ID NO: 215089 - DNA, 30 bp, Artificial Sequence
  Synthetic oligonucleotide
ataagtgtcggccatactggagaacgatta

SEQ ID NO: 215090 - DNA, 30 bp, Artificial Sequence
  Synthetic oligonucleotide
gaacaatcatactattgacaagcaggatta

SEQ ID NO: 215091 - DNA, 30 bp, Artificial Sequence
  Synthetic oligonucleotide
gtaggttaatgttagcggaggtcaggatta

SEQ ID NO: 215092 - DNA, 30 bp, Artificial Sequence
  Synthetic oligonucleotide
aaaattgaattgcgacacatcctaggatta

SEQ ID NO: 215093 - DNA, 30 bp, Artificial Sequence
  Synthetic oligonucleotide
caaatgaaacgtaatgaaaacgtaggatta

SEQ ID NO: 215094 - DNA, 30 bp, Artificial Sequence
  Synthetic oligonucleotide
cgtatctccagccacgcgatcaggggatta

SEQ ID NO: 215095 - DNA, 30 bp, Artificial Sequence
  Synthetic oligonucleotide
caagttaagtggaggaagtaagggggatta

SEQ ID NO: 215096 - DNA, 30 bp, Artificial Sequence
  Synthetic oligonucleotide
agggactgctttttacaccccttgggatta

SEQ ID NO: 215097 - DNA, 30 bp, Artificial Sequence
  Synthetic oligonucleotide
cgagacacggaaatttcatagaatggatta

SEQ ID NO: 215098 - DNA, 30 bp, Artificial Sequence
  Synthetic oligonucleotide
gcggaaaggtaagatctaaacatctgatta

SEQ ID NO: 215099 - DNA, 30 bp, Artificial Sequence
  Synthetic oligonucleotide
tgctacgggctacgagaggtggggtgatta

SEQ ID NO: 215100 - DNA, 30 bp, Artificial Sequence
  Synthetic oligonucleotide
gaacccgcatattaggttcgtatgtgatta

SEQ ID NO: 215101 - DNA, 30 bp, Artificial Sequence
  Synthetic oligonucleotide
gggaatgagtcaggcactaccgcttgatta

SEQ ID NO: 215102 - DNA, 30 bp, Artificial Sequence
  Synthetic oligonucleotide
agttgaggtctatgtagacggtgttgatta

SEQ ID NO: 215103 - DNA, 30 bp, Artificial Sequence
  Synthetic oligonucleotide
catcaaccgtgcgtgtcaaagggaatatta

SEQ ID NO: 215104 - DNA, 30 bp, Artificial Sequence
  Synthetic oligonucleotide
ctgagcggtggggtgtgtcggcgcatatta

SEQ ID NO: 215105 - DNA, 30 bp, Artificial Sequence
  Synthetic oligonucleotide
tgaaagtgagtgaaagggggagtcatatta

SEQ ID NO: 215106 - DNA, 30 bp, Artificial Sequence
  Synthetic oligonucleotide
atatgagaatactgggtacgtgtgctatta

SEQ ID NO: 215107 - DNA, 30 bp, Artificial Sequence
  Synthetic oligonucleotide
gcgaacagactttaagaattagacgtatta

SEQ ID NO: 215108 - DNA, 30 bp, Artificial Sequence
  Synthetic oligonucleotide
agtacgaagaccggggcgctctccgtatta

SEQ ID NO: 215109 - DNA, 30 bp, Artificial Sequence
  Synthetic oligonucleotide
ataggcttacgatacgaaatgaatgtatta

SEQ ID NO: 215110 - DNA, 30 bp, Artificial Sequence
  Synthetic oligonucleotide
gatagcacataacgtgctccgaaattatta

SEQ ID NO: 215111 - DNA, 30 bp, Artificial Sequence
  Synthetic oligonucleotide
tggtatggaatctgggaagcatcattatta

SEQ ID NO: 215112 - DNA, 30 bp, Artificial Sequence
  Synthetic oligonucleotide
tgacggaagcattaagtatccgtattatta

SEQ ID NO: 215113 - DNA, 30 bp, Artificial Sequence
  Synthetic oligonucleotide
agattatgtttgattcgtccagtcttatta

SEQ ID NO: 215114 - DNA, 30 bp, Artificial Sequence
  Synthetic oligonucleotide
aggaatagccacatgttacacaagttatta

SEQ ID NO: 215115 - DNA, 30 bp, Artificial Sequence
  Synthetic oligonucleotide
aggccgtgatcgttagtacgagcgttatta

SEQ ID NO: 215116 - DNA, 30 bp, Artificial Sequence
  Synthetic oligonucleotide
tggtgtgcttccttgatggctaggttatta

SEQ ID NO: 215117 - DNA, 30 bp, Artificial Sequence
  Synthetic oligonucleotide
agggtccgagcttaagcctaatttttatta

SEQ ID NO: 215118 - DNA, 30 bp, Artificial Sequence
  Synthetic oligonucleotide
atgcttactgcgcggacaaataaaaactta

SEQ ID NO: 215119 - DNA, 30 bp, Artificial Sequence
  Synthetic oligonucleotide
accggtagtgcttttacaagaaacaactta

SEQ ID NO: 215120 - DNA, 30 bp, Artificial Sequence
  Synthetic oligonucleotide
tctaaaggtctatgaaacccctgcaactta

SEQ ID NO: 215121 - DNA, 30 bp, Artificial Sequence
  Synthetic oligonucleotide
catgtcatgcatggattagaaccgaactta

SEQ ID NO: 215122 - DNA, 30 bp, Artificial Sequence
  Synthetic oligonucleotide
tgcaaagggcagtcctagagttgtaactta

SEQ ID NO: 215123 - DNA, 30 bp, Artificial Sequence
  Synthetic oligonucleotide
cgtcttccatcttcagtggtgatacactta

SEQ ID NO: 215124 - DNA, 30 bp, Artificial Sequence
  Synthetic oligonucleotide
aaaggagggggtgtgagatgatgccactta

SEQ ID NO: 215125 - DNA, 30 bp, Artificial Sequence
  Synthetic oligonucleotide
gtgggtaaagggttaggactttcgcactta

SEQ ID NO: 215126 - DNA, 30 bp, Artificial Sequence
  Synthetic oligonucleotide
tcgacaaattccaaatgggggtgtcactta

SEQ ID NO: 215127 - DNA, 30 bp, Artificial Sequence
  Synthetic oligonucleotide
gggggaaaggtgtgggcggaagatgactta

SEQ ID NO: 215128 - DNA, 30 bp, Artificial Sequence
  Synthetic oligonucleotide
ggagttcgtcgctggcacattccgacctta

SEQ ID NO: 215129 - DNA, 30 bp, Artificial Sequence
  Synthetic oligonucleotide
acctcgtccatcataagcgcaaatacctta

SEQ ID NO: 215130 - DNA, 30 bp, Artificial Sequence
  Synthetic oligonucleotide
cactttcagcactggcatcgagatacctta

SEQ ID NO: 215131 - DNA, 30 bp, Artificial Sequence
  Synthetic oligonucleotide
atggtcagacattggcgggaaatgccctta

SEQ ID NO: 215132 - DNA, 30 bp, Artificial Sequence
  Synthetic oligonucleotide
aagccttgtagagcgttggtgagagcctta

SEQ ID NO: 215133 - DNA, 30 bp, Artificial Sequence
  Synthetic oligonucleotide
taagatatcatgtaaagagacgacgcctta

SEQ ID NO: 215134 - DNA, 30 bp, Artificial Sequence
  Synthetic oligonucleotide
cagactttgctacagcaaaatgtggcctta

SEQ ID NO: 215135 - DNA, 30 bp, Artificial Sequence
  Synthetic oligonucleotide
ctatggtaacgatgttcaaagcctgcctta

SEQ ID NO: 215136 - DNA, 30 bp, Artificial Sequence
  Synthetic oligonucleotide
agcgtccttatcgacggaaaaattgcctta

SEQ ID NO: 215137 - DNA, 30 bp, Artificial Sequence
  Synthetic oligonucleotide
acaagcatccggaggtcttagcactcctta

SEQ ID NO: 215138 - DNA, 30 bp, Artificial Sequence
  Synthetic oligonucleotide
agagatggataagcagcatgtgagtcctta

SEQ ID NO: 215139 - DNA, 30 bp, Artificial Sequence
  Synthetic oligonucleotide
aagtgtagtttgttatccgggtcgtcctta

SEQ ID NO: 215140 - DNA, 30 bp, Artificial Sequence
  Synthetic oligonucleotide
ggtggctgcaaccttagccaacggtcctta

SEQ ID NO: 215141 - DNA, 30 bp, Artificial Sequence
  Synthetic oligonucleotide
tagtaccggcaccatacgccgagttcctta

SEQ ID NO: 215142 - DNA, 30 bp, Artificial Sequence
  Synthetic oligonucleotide
tcttacacactagtagagaatctttcctta

SEQ ID NO: 215143 - DNA, 30 bp, Artificial Sequence
  Synthetic oligonucleotide
atagctagtttcgcgtatgtgttaagctta

SEQ ID NO: 215144 - DNA, 30 bp, Artificial Sequence
  Synthetic oligonucleotide
tgtaaggtgtaggatagcagcgccagctta

SEQ ID NO: 215145 - DNA, 30 bp, Artificial Sequence
  Synthetic oligonucleotide
aggggaagatgaagcatgcccttgagctta

SEQ ID NO: 215146 - DNA, 30 bp, Artificial Sequence
  Synthetic oligonucleotide
tggagtgtaactcagccctctattagctta

SEQ ID NO: 215147 - DNA, 30 bp, Artificial Sequence
  Synthetic oligonucleotide
ctgcttacaacatcatgcactaaacgctta

SEQ ID NO: 215148 - DNA, 30 bp, Artificial Sequence
  Synthetic oligonucleotide
ccggcgcggtactgaggtagttcaggctta

SEQ ID NO: 215149 - DNA, 30 bp, Artificial Sequence
  Synthetic oligonucleotide
gagagatcactgtgtgccatcaggggctta

SEQ ID NO: 215150 - DNA, 30 bp, Artificial Sequence
  Synthetic oligonucleotide
tagtctagcagagaaacctgacttggctta

SEQ ID NO: 215151 - DNA, 30 bp, Artificial Sequence
  Synthetic oligonucleotide
gcctcatcgctgccagggattgcatgctta

SEQ ID NO: 215152 - DNA, 30 bp, Artificial Sequence
  Synthetic oligonucleotide
ccactgcgggataggaatctatggtgctta

SEQ ID NO: 215153 - DNA, 30 bp, Artificial Sequence
  Synthetic oligonucleotide
gttgtctaaagggatgggaacatttgctta

SEQ ID NO: 215154 - DNA, 30 bp, Artificial Sequence
  Synthetic oligonucleotide
tcacgggaccactgtcggtcagcgatctta

SEQ ID NO: 215155 - DNA, 30 bp, Artificial Sequence
  Synthetic oligonucleotide
cgaaagactgccttattagtatcgatctta

SEQ ID NO: 215156 - DNA, 30 bp, Artificial Sequence
  Synthetic oligonucleotide
aattggccagaggattaaagcttactctta

SEQ ID NO: 215157 - DNA, 30 bp, Artificial Sequence
  Synthetic oligonucleotide
cctacggtggatggtagggataccctctta

SEQ ID NO: 215158 - DNA, 30 bp, Artificial Sequence
  Synthetic oligonucleotide
gactcgtgtatcaataacgttggcctctta

SEQ ID NO: 215159 - DNA, 30 bp, Artificial Sequence
  Synthetic oligonucleotide
atatgtcagtgaatttgcaacttggtctta

SEQ ID NO: 215160 - DNA, 29 bp, Artificial Sequence
  Synthetic oligonucleotide
ggggaacgacgtatttgatccttgtctta

SEQ ID NO: 215161 - DNA, 30 bp, Artificial Sequence
  Synthetic oligonucleotide
tgcacgtcatggccagcctgcaaattctta

SEQ ID NO: 215162 - DNA, 30 bp, Artificial Sequence
  Synthetic oligonucleotide
acacgtgaaaccgctagcattagcttctta

SEQ ID NO: 215163 - DNA, 30 bp, Artificial Sequence
  Synthetic oligonucleotide
atcacggattagaatatgctcgtcttctta

SEQ ID NO: 215164 - DNA, 30 bp, Artificial Sequence
  Synthetic oligonucleotide
ggtacgaatgtcatatcaatagatttctta

SEQ ID NO: 215165 - DNA, 30 bp, Artificial Sequence
  Synthetic oligonucleotide
tcaccgctcaagcagcgaggcgttttctta

SEQ ID NO: 215166 - DNA, 30 bp, Artificial Sequence
  Synthetic oligonucleotide
acctgagagcacgatattcaaggaaagtta

SEQ ID NO: 215167 - DNA, 30 bp, Artificial Sequence
  Synthetic oligonucleotide
tgttgagcaagagttgtgcttggaaagtta

SEQ ID NO: 215168 - DNA, 30 bp, Artificial Sequence
  Synthetic oligonucleotide
cgaagctctcggaaactcattgataagtta

SEQ ID NO: 215169 - DNA, 30 bp, Artificial Sequence
  Synthetic oligonucleotide
gagcataaagtaatggccttgagtaagtta

SEQ ID NO: 215170 - DNA, 30 bp, Artificial Sequence
  Synthetic oligonucleotide
gcatagcgaaggttatttcagggacagtta

SEQ ID NO: 215171 - DNA, 30 bp, Artificial Sequence
  Synthetic oligonucleotide
tgggctttgggctacggtagataccagtta

SEQ ID NO: 215172 - DNA, 30 bp, Artificial Sequence
  Synthetic oligonucleotide
cttggctgaaggccctcgcgaatccagtta

SEQ ID NO: 215173 - DNA, 30 bp, Artificial Sequence
  Synthetic oligonucleotide
gttataaacggccccttgaatcggcagtta

SEQ ID NO: 215174 - DNA, 30 bp, Artificial Sequence
  Synthetic oligonucleotide
gcgatacctatcctaaggggcctgcagtta

SEQ ID NO: 215175 - DNA, 30 bp, Artificial Sequence
  Synthetic oligonucleotide
tatgaggggtacttgcgccacattcagtta

SEQ ID NO: 215176 - DNA, 30 bp, Artificial Sequence
  Synthetic oligonucleotide
ttgatcttgggtggaccagggattcagtta

SEQ ID NO: 215177 - DNA, 30 bp, Artificial Sequence
  Synthetic oligonucleotide
gttaatttcatacaacgtgagcttcagtta

SEQ ID NO: 215178 - DNA, 30 bp, Artificial Sequence
  Synthetic oligonucleotide
gactataagtggcagatgctctaagagtta

SEQ ID NO: 215179 - DNA, 30 bp, Artificial Sequence
  Synthetic oligonucleotide
gttggcgtacggttacgccctcccgagtta

SEQ ID NO: 215180 - DNA, 30 bp, Artificial Sequence
  Synthetic oligonucleotide
ttagagtcttaacgcgggctggccgagtta

SEQ ID NO: 215181 - DNA, 30 bp, Artificial Sequence
  Synthetic oligonucleotide
catgtacgacttcagaggacacctgagtta

SEQ ID NO: 215182 - DNA, 30 bp, Artificial Sequence
  Synthetic oligonucleotide
agacgtacaaagtgtaaccagattgagtta

SEQ ID NO: 215183 - DNA, 30 bp, Artificial Sequence
  Synthetic oligonucleotide
cgggtccgtgtatggtgggatattgagtta

SEQ ID NO: 215184 - DNA, 30 bp, Artificial Sequence
  Synthetic oligonucleotide
tcgaattctcgacaattgactttatagtta

SEQ ID NO: 215185 - DNA, 30 bp, Artificial Sequence
  Synthetic oligonucleotide
gcgtgcttgcgatcagtatacagctagtta

SEQ ID NO: 215186 - DNA, 31 bp, Artificial Sequence
  Synthetic oligonucleotide
tccctcttataaattggaggtgcgctagtta

SEQ ID NO: 215187 - DNA, 30 bp, Artificial Sequence
  Synthetic oligonucleotide
aaaaacgccagtgctgcggaatagtagtta

SEQ ID NO: 215188 - DNA, 30 bp, Artificial Sequence
  Synthetic oligonucleotide
atagcagacgccaggcgcggatggtagtta

SEQ ID NO: 215189 - DNA, 30 bp, Artificial Sequence
  Synthetic oligonucleotide
cgttcacgttcatacagtccggtgtagtta

SEQ ID NO: 215190 - DNA, 30 bp, Artificial Sequence
  Synthetic oligonucleotide
atgaccaacacgtaacacccgagttagtta

SEQ ID NO: 215191 - DNA, 30 bp, Artificial Sequence
  Synthetic oligonucleotide
tcgccaaccgtcatgtttctcctcacgtta

SEQ ID NO: 215192 - DNA, 30 bp, Artificial Sequence
  Synthetic oligonucleotide
atatggctaaatgcaggcttggtcacgtta

SEQ ID NO: 215193 - DNA, 30 bp, Artificial Sequence
  Synthetic oligonucleotide
catgttccagcatagaaggcgtctacgtta

SEQ ID NO: 215194 - DNA, 30 bp, Artificial Sequence
  Synthetic oligonucleotide
aagtgagtgtgggagcattggtttacgtta

SEQ ID NO: 215195 - DNA, 30 bp, Artificial Sequence
  Synthetic oligonucleotide
aagctataatcgtccttgcatgagccgtta

SEQ ID NO: 215196 - DNA, 30 bp, Artificial Sequence
  Synthetic oligonucleotide
tccaacttggtggaaagcgcatgggcgtta

SEQ ID NO: 215197 - DNA, 30 bp, Artificial Sequence
  Synthetic oligonucleotide
gcgaccctggacctctcactcagtgcgtta

SEQ ID NO: 215198 - DNA, 30 bp, Artificial Sequence
  Synthetic oligonucleotide
ggtctatggctggatgtcactagtgcgtta

SEQ ID NO: 215199 - DNA, 30 bp, Artificial Sequence
  Synthetic oligonucleotide
tgtaagaagattactatacggagatcgtta

SEQ ID NO: 215200 - DNA, 30 bp, Artificial Sequence
  Synthetic oligonucleotide
catcctagggcttaattcctgctatcgtta

SEQ ID NO: 215201 - DNA, 30 bp, Artificial Sequence
  Synthetic oligonucleotide
ttatccatgctagctagactgacttcgtta

SEQ ID NO: 215202 - DNA, 30 bp, Artificial Sequence
  Synthetic oligonucleotide
agttactaagagccatcatttgtttcgtta

SEQ ID NO: 215203 - DNA, 30 bp, Artificial Sequence
  Synthetic oligonucleotide
tgtataagccgccccagcagtaaaaggtta

SEQ ID NO: 215204 - DNA, 30 bp, Artificial Sequence
  Synthetic oligonucleotide
cacgtggagatttaaccgcatgccaggtta

SEQ ID NO: 215205 - DNA, 30 bp, Artificial Sequence
  Synthetic oligonucleotide
tccttgccaacttacagggctgtacggtta

SEQ ID NO: 215206 - DNA, 30 bp, Artificial Sequence
  Synthetic oligonucleotide
acatccctacgcagtcggatggcccggtta

SEQ ID NO: 215207 - DNA, 30 bp, Artificial Sequence
  Synthetic oligonucleotide
cacttggcccggaggcaacgcccgcggtta

SEQ ID NO: 215208 - DNA, 30 bp, Artificial Sequence
  Synthetic oligonucleotide
caatacgttcggaaggatctagggcggtta

SEQ ID NO: 215209 - DNA, 30 bp, Artificial Sequence
  Synthetic oligonucleotide
ggtatgcgactgtattagtgccatcggtta

SEQ ID NO: 215210 - DNA, 30 bp, Artificial Sequence
  Synthetic oligonucleotide
ttgtgaccaaaatctcgaggtgctcggtta

SEQ ID NO: 215211 - DNA, 30 bp, Artificial Sequence
  Synthetic oligonucleotide
aattcaagataacagtgagtttcagggtta

SEQ ID NO: 215212 - DNA, 30 bp, Artificial Sequence
  Synthetic oligonucleotide
cgttgatcatcaacgttattccgcgggtta

SEQ ID NO: 215213 - DNA, 30 bp, Artificial Sequence
  Synthetic oligonucleotide
ctacatcaagcgggcgggtggaaggggtta

SEQ ID NO: 215214 - DNA, 30 bp, Artificial Sequence
  Synthetic oligonucleotide
tcgaaacgccaagcacaggcaggggggtta

SEQ ID NO: 215215 - DNA, 30 bp, Artificial Sequence
  Synthetic oligonucleotide
gggtgtcggtatgaattgacagctgggtta

SEQ ID NO: 215216 - DNA, 30 bp, Artificial Sequence
  Synthetic oligonucleotide
caacagttagacggaagacgtggtgggtta

SEQ ID NO: 215217 - DNA, 30 bp, Artificial Sequence
  Synthetic oligonucleotide
tacagaatctggaggccaggatcatggtta

SEQ ID NO: 215218 - DNA, 30 bp, Artificial Sequence
  Synthetic oligonucleotide
tcaaggtataatcaacaaaattcatggtta

SEQ ID NO: 215219 - DNA, 30 bp, Artificial Sequence
  Synthetic oligonucleotide
cagtgagccgagcgctactggctatggtta

SEQ ID NO: 215220 - DNA, 40 bp, Artificial Sequence
  Synthetic oligonucleotide
tgaaccgttgctgtccacgtgttaacattccgtgtggtta

SEQ ID NO: 215221 - DNA, 30 bp, Artificial Sequence
  Synthetic oligonucleotide
gagccaacaaccgttacgttctattggtta

SEQ ID NO: 215222 - DNA, 30 bp, Artificial Sequence
  Synthetic oligonucleotide
tacggtcagtaacttagaagaggttggtta

SEQ ID NO: 215223 - DNA, 30 bp, Artificial Sequence
  Synthetic oligonucleotide
gcggagtagaggaaatgtcaactttggtta

SEQ ID NO: 215224 - DNA, 30 bp, Artificial Sequence
  Synthetic oligonucleotide
cggcgaaggcttttgccaagtcaaatgtta

SEQ ID NO: 215225 - DNA, 30 bp, Artificial Sequence
  Synthetic oligonucleotide
tacgcctaaccccttgggcatgacatgtta

SEQ ID NO: 215226 - DNA, 30 bp, Artificial Sequence
  Synthetic oligonucleotide
tggttaagggcctacataaaagccatgtta

SEQ ID NO: 215227 - DNA, 30 bp, Artificial Sequence
  Synthetic oligonucleotide
gcatcgctctgaatcataagctagatgtta

SEQ ID NO: 215228 - DNA, 30 bp, Artificial Sequence
  Synthetic oligonucleotide
taggcctggaagacgaaggacgcgatgtta

SEQ ID NO: 215229 - DNA, 30 bp, Artificial Sequence
  Synthetic oligonucleotide
tgtgaaaaccgaccttaaacacatatgtta

SEQ ID NO: 215230 - DNA, 30 bp, Artificial Sequence
  Synthetic oligonucleotide
ataaattggatatacgacttaagtatgtta

SEQ ID NO: 215231 - DNA, 30 bp, Artificial Sequence
  Synthetic oligonucleotide
gatcggtctatacaccgaatatggctgtta

SEQ ID NO: 215232 - DNA, 30 bp, Artificial Sequence
  Synthetic oligonucleotide
tgcggtagggacaacggctcgaaagtgtta

SEQ ID NO: 215233 - DNA, 30 bp, Artificial Sequence
  Synthetic oligonucleotide
aacgcaatcggggggtcagcacgggtgtta

SEQ ID NO: 215234 - DNA, 30 bp, Artificial Sequence
  Synthetic oligonucleotide
ctggcagtgttgaacaaaagggcattgtta

SEQ ID NO: 215235 - DNA, 30 bp, Artificial Sequence
  Synthetic oligonucleotide
ccgtgacagtgattgatttggcacttgtta

SEQ ID NO: 215236 - DNA, 31 bp, Artificial Sequence
  Synthetic oligonucleotide
cccatgacactgagggcatgttcccttgtta

SEQ ID NO: 215237 - DNA, 30 bp, Artificial Sequence
  Synthetic oligonucleotide
cgctcaagtgatgtcccaaatagcttgtta

SEQ ID NO: 215238 - DNA, 30 bp, Artificial Sequence
  Synthetic oligonucleotide
acctgaccaatatacgtcaaaatgttgtta

SEQ ID NO: 215239 - DNA, 30 bp, Artificial Sequence
  Synthetic oligonucleotide
atcgccatatctacttgcccagatttgtta

SEQ ID NO: 215240 - DNA, 30 bp, Artificial Sequence
  Synthetic oligonucleotide
gtgtgcggaggttcacatgacgttttgtta

SEQ ID NO: 215241 - DNA, 31 bp, Artificial Sequence
  Synthetic oligonucleotide
tatcgccagtcgggagactaaaataaattta

SEQ ID NO: 215242 - DNA, 30 bp, Artificial Sequence
  Synthetic oligonucleotide
gcaataaaagccattacacgaataaattta

SEQ ID NO: 215243 - DNA, 30 bp, Artificial Sequence
  Synthetic oligonucleotide
taaaggcgataagcagacgtggagaattta

SEQ ID NO: 215244 - DNA, 30 bp, Artificial Sequence
  Synthetic oligonucleotide
taagctgtagttcacgacacaacgaattta

SEQ ID NO: 215245 - DNA, 30 bp, Artificial Sequence
  Synthetic oligonucleotide
gggatcataacggcaagctttaggaattta

SEQ ID NO: 215246 - DNA, 30 bp, Artificial Sequence
  Synthetic oligonucleotide
cttggcagcgtgtgggccggagaacattta

SEQ ID NO: 215247 - DNA, 30 bp, Artificial Sequence
  Synthetic oligonucleotide
aaaagctcgaagagaagagggggccattta

SEQ ID NO: 215248 - DNA, 30 bp, Artificial Sequence
  Synthetic oligonucleotide
gtctgagaagtcagtttaaaggagcattta

SEQ ID NO: 215249 - DNA, 30 bp, Artificial Sequence
  Synthetic oligonucleotide
aactaaacctgagcagatagttggcattta

SEQ ID NO: 215250 - DNA, 30 bp, Artificial Sequence
  Synthetic oligonucleotide
ccaggagcgctagcgtgcacctaagattta

SEQ ID NO: 215251 - DNA, 30 bp, Artificial Sequence
  Synthetic oligonucleotide
tctgaagagcctgtcctgatagccgattta

SEQ ID NO: 215252 - DNA, 30 bp, Artificial Sequence
  Synthetic oligonucleotide
gtggcgtcgagcttgtctggcctggattta

SEQ ID NO: 215253 - DNA, 30 bp, Artificial Sequence
  Synthetic oligonucleotide
ttggggcttaatgcgacataggtggattta

SEQ ID NO: 215254 - DNA, 30 bp, Artificial Sequence
  Synthetic oligonucleotide
gccaaattggcacagggaaaagatgattta

SEQ ID NO: 215255 - DNA, 30 bp, Artificial Sequence
  Synthetic oligonucleotide
agctgaagggaattccacggcgatgattta

SEQ ID NO: 215256 - DNA, 30 bp, Artificial Sequence
  Synthetic oligonucleotide
ttgaaaagagttaatttcatgttatattta

SEQ ID NO: 215257 - DNA, 30 bp, Artificial Sequence
  Synthetic oligonucleotide
aaacaatgcggcgaaggagtatactattta

SEQ ID NO: 215258 - DNA, 30 bp, Artificial Sequence
  Synthetic oligonucleotide
cagatacgtgtgggcggcggaaagtattta

SEQ ID NO: 215259 - DNA, 30 bp, Artificial Sequence
  Synthetic oligonucleotide
ccggtaacatttggccggggtcagtattta

SEQ ID NO: 215260 - DNA, 30 bp, Artificial Sequence
  Synthetic oligonucleotide
ccttctccagactttagaagtgcgtattta

SEQ ID NO: 215261 - DNA, 30 bp, Artificial Sequence
  Synthetic oligonucleotide
caggatacgggttagcctgaaacaacttta

SEQ ID NO: 215262 - DNA, 30 bp, Artificial Sequence
  Synthetic oligonucleotide
agcgcggtcaggatcacaagttcaacttta

SEQ ID NO: 215263 - DNA, 30 bp, Artificial Sequence
  Synthetic oligonucleotide
ggagggggacaaagggaaatcggtacttta

SEQ ID NO: 215264 - DNA, 30 bp, Artificial Sequence
  Synthetic oligonucleotide
tagatcaagcaggcgcttctcaaagcttta

SEQ ID NO: 215265 - DNA, 30 bp, Artificial Sequence
  Synthetic oligonucleotide
agccattaaacgatcactctcaacgcttta

SEQ ID NO: 215266 - DNA, 30 bp, Artificial Sequence
  Synthetic oligonucleotide
agtactagatgatgggacctcatcgcttta

SEQ ID NO: 215267 - DNA, 30 bp, Artificial Sequence
  Synthetic oligonucleotide
ctaccggctctaagtcaatagagtgcttta

SEQ ID NO: 215268 - DNA, 30 bp, Artificial Sequence
  Synthetic oligonucleotide
atcatcacacaagatgtctgactctcttta

SEQ ID NO: 215269 - DNA, 30 bp, Artificial Sequence
  Synthetic oligonucleotide
gatccctgcttcatcgagagtccgtcttta

SEQ ID NO: 215270 - DNA, 30 bp, Artificial Sequence
  Synthetic oligonucleotide
ctcggagggtagtacaattacggttcttta

SEQ ID NO: 215271 - DNA, 30 bp, Artificial Sequence
  Synthetic oligonucleotide
gcaagtgttggtccacaggggctttcttta

SEQ ID NO: 215272 - DNA, 30 bp, Artificial Sequence
  Synthetic oligonucleotide
gacaaccgctaagttctaaatgcaagttta

SEQ ID NO: 215273 - DNA, 30 bp, Artificial Sequence
  Synthetic oligonucleotide
gactgctcgatccagcaatctacgagttta

SEQ ID NO: 215274 - DNA, 31 bp, Artificial Sequence
  Synthetic oligonucleotide
gttaatgagccatgtgggtcttgttagttta

SEQ ID NO: 215275 - DNA, 30 bp, Artificial Sequence
  Synthetic oligonucleotide
aagaatctaccacgcatacaagaacgttta

SEQ ID NO: 215276 - DNA, 30 bp, Artificial Sequence
  Synthetic oligonucleotide
cttcccacaactatcagtgcaacgcgttta

SEQ ID NO: 215277 - DNA, 30 bp, Artificial Sequence
  Synthetic oligonucleotide
aaggtagaaactgtaatattggcgcgttta

SEQ ID NO: 215278 - DNA, 30 bp, Artificial Sequence
  Synthetic oligonucleotide
tgtttagggggaacactacaatatcgttta

SEQ ID NO: 215279 - DNA, 30 bp, Artificial Sequence
  Synthetic oligonucleotide
ctagaaaggggggattagacctagggttta

SEQ ID NO: 215280 - DNA, 30 bp, Artificial Sequence
  Synthetic oligonucleotide
acaggaattgataccgggaacacgggttta

SEQ ID NO: 215281 - DNA, 30 bp, Artificial Sequence
  Synthetic oligonucleotide
cggaggcagacaacaaagggattgggttta

SEQ ID NO: 215282 - DNA, 30 bp, Artificial Sequence
  Synthetic oligonucleotide
cccagaaattggtggtcacaaagtggttta

SEQ ID NO: 215283 - DNA, 30 bp, Artificial Sequence
  Synthetic oligonucleotide
cctaaatggagtaatcgtgccgcatgttta

SEQ ID NO: 215284 - DNA, 30 bp, Artificial Sequence
  Synthetic oligonucleotide
agcagatctacagtagtgcgtctctgttta

SEQ ID NO: 215285 - DNA, 30 bp, Artificial Sequence
  Synthetic oligonucleotide
tgctaagaggttcttcagctagtctgttta

SEQ ID NO: 215286 - DNA, 30 bp, Artificial Sequence
  Synthetic oligonucleotide
aataagtggattggtgcggtgtggtgttta

SEQ ID NO: 215287 - DNA, 30 bp, Artificial Sequence
  Synthetic oligonucleotide
cgccatagagcacccaattcttattgttta

SEQ ID NO: 215288 - DNA, 30 bp, Artificial Sequence
  Synthetic oligonucleotide
gtcggagcggtgtttcactaccacatttta

SEQ ID NO: 215289 - DNA, 30 bp, Artificial Sequence
  Synthetic oligonucleotide
ctacacatctagatacgggatggcatttta

SEQ ID NO: 215290 - DNA, 30 bp, Artificial Sequence
  Synthetic oligonucleotide
gtctcattaaggaactaaacagagatttta

SEQ ID NO: 215291 - DNA, 30 bp, Artificial Sequence
  Synthetic oligonucleotide
cggccgcagactcagcgatgtccgatttta

SEQ ID NO: 215292 - DNA, 30 bp, Artificial Sequence
  Synthetic oligonucleotide
tgaagtagcgaaacgagttcctggctttta

SEQ ID NO: 215293 - DNA, 30 bp, Artificial Sequence
  Synthetic oligonucleotide
ctaacttgataggagatgaggaacgtttta

SEQ ID NO: 215294 - DNA, 30 bp, Artificial Sequence
  Synthetic oligonucleotide
cgggaccggccgcttgcgcgaaaggtttta

SEQ ID NO: 215295 - DNA, 30 bp, Artificial Sequence
  Synthetic oligonucleotide
gtgcatcagagaaaatgtctatcggtttta

SEQ ID NO: 215296 - DNA, 30 bp, Artificial Sequence
  Synthetic oligonucleotide
gggggcttgctagtatgcacgtcggtttta

SEQ ID NO: 215297 - DNA, 30 bp, Artificial Sequence
  Synthetic oligonucleotide
cgtataggagagtttgatgcaagggtttta

SEQ ID NO: 215298 - DNA, 30 bp, Artificial Sequence
  Synthetic oligonucleotide
cgtctaggttgtcgatccgcgagggtttta

SEQ ID NO: 215299 - DNA, 30 bp, Artificial Sequence
  Synthetic oligonucleotide
gctcaggcccggtgctgagtgagggtttta

SEQ ID NO: 215300 - DNA, 30 bp, Artificial Sequence
  Synthetic oligonucleotide
cgggggccgattgaagaatgtggggtttta

SEQ ID NO: 215301 - DNA, 30 bp, Artificial Sequence
  Synthetic oligonucleotide
aaacgtgatagcgaggtcaaatgggtttta

SEQ ID NO: 215302 - DNA, 30 bp, Artificial Sequence
  Synthetic oligonucleotide
tgagtactcttggtgccaaagaatgtttta

SEQ ID NO: 215303 - DNA, 30 bp, Artificial Sequence
  Synthetic oligonucleotide
ccgtggtggacatgacccaagccattttta

SEQ ID NO: 215304 - DNA, 30 bp, Artificial Sequence
  Synthetic oligonucleotide
acgtaagactgtgagctttggatattttta

SEQ ID NO: 215305 - DNA, 30 bp, Artificial Sequence
  Synthetic oligonucleotide
ccatagctcacaaaacattgggtattttta

SEQ ID NO: 215306 - DNA, 30 bp, Artificial Sequence
  Synthetic oligonucleotide
catggcactgctctcgtctttgagttttta

SEQ ID NO: 215307 - DNA, 30 bp, Artificial Sequence
  Synthetic oligonucleotide
ggagaacaacttagctgtagcctgttttta

SEQ ID NO: 215308 - DNA, 30 bp, Artificial Sequence
  Synthetic oligonucleotide
gtactttgtgcctgactagtggtgttttta

SEQ ID NO: 215309 - DNA, 30 bp, Artificial Sequence
  Synthetic oligonucleotide
gaagcgtctcaagatagagcgactttttta

SEQ ID NO: 215310 - DNA, 30 bp, Artificial Sequence
  Synthetic oligonucleotide
acggtaggttgagctaacgtgcaaaaaaac

SEQ ID NO: 215311 - DNA, 30 bp, Artificial Sequence
  Synthetic oligonucleotide
gtgcgcactctcaaactccccgcgaaaaac

SEQ ID NO: 215312 - DNA, 30 bp, Artificial Sequence
  Synthetic oligonucleotide
ttaatcgagcaaatatcaactagccaaaac

SEQ ID NO: 215313 - DNA, 29 bp, Artificial Sequence
  Synthetic oligonucleotide
gctcacaatgagtcttcatcgtccaaaac

SEQ ID NO: 215314 - DNA, 30 bp, Artificial Sequence
  Synthetic oligonucleotide
cctaccgagtgtataggcgttgtgcaaaac

SEQ ID NO: 215315 - DNA, 30 bp, Artificial Sequence
  Synthetic oligonucleotide
ccataatactggtaaacgaacaacgaaaac

SEQ ID NO: 215316 - DNA, 30 bp, Artificial Sequence
  Synthetic oligonucleotide
gatatcggcgtaatggacaaccacgaaaac

SEQ ID NO: 215317 - DNA, 30 bp, Artificial Sequence
  Synthetic oligonucleotide
tatcatcgcaacgggatgttagcggaaaac

SEQ ID NO: 215318 - DNA, 30 bp, Artificial Sequence
  Synthetic oligonucleotide
cgtctgaccgcgcgggcacggggtgaaaac

SEQ ID NO: 215319 - DNA, 30 bp, Artificial Sequence
  Synthetic oligonucleotide
aggccaacgtgtctgaaaaccattgaaaac

SEQ ID NO: 215320 - DNA, 30 bp, Artificial Sequence
  Synthetic oligonucleotide
cagctcggaaatcgatttaaatcataaaac

SEQ ID NO: 215321 - DNA, 27 bp, Artificial Sequence
  Synthetic oligonucleotide
cgcgagcagcatgccaggagataaaac

SEQ ID NO: 215322 - DNA, 30 bp, Artificial Sequence
  Synthetic oligonucleotide
ggtcggggcatactttccggttactaaaac

SEQ ID NO: 215323 - DNA, 30 bp, Artificial Sequence
  Synthetic oligonucleotide
tcggctgccattactgccgtgccctaaaac

SEQ ID NO: 215324 - DNA, 30 bp, Artificial Sequence
  Synthetic oligonucleotide
tcgatgcagtacggaagtcctgggtaaaac

SEQ ID NO: 215325 - DNA, 30 bp, Artificial Sequence
  Synthetic oligonucleotide
cgggcttcgtagagatgagcactgtaaaac

SEQ ID NO: 215326 - DNA, 30 bp, Artificial Sequence
  Synthetic oligonucleotide
actgaatgggtatttgatcccggttaaaac

SEQ ID NO: 215327 - DNA, 30 bp, Artificial Sequence
  Synthetic oligonucleotide
agaaaggtacagataagacttctttaaaac

SEQ ID NO: 215328 - DNA, 30 bp, Artificial Sequence
  Synthetic oligonucleotide
aaaaaaacttagttcatcgagcgaacaaac

SEQ ID NO: 215329 - DNA, 30 bp, Artificial Sequence
  Synthetic oligonucleotide
atttgatccaaaagtaagaagcgcacaaac

SEQ ID NO: 215330 - DNA, 30 bp, Artificial Sequence
  Synthetic oligonucleotide
ccgagcgttaggatgggcaccggcacaaac

SEQ ID NO: 215331 - DNA, 30 bp, Artificial Sequence
  Synthetic oligonucleotide
cgttggcgctgtcttatccttccgacaaac

SEQ ID NO: 215332 - DNA, 30 bp, Artificial Sequence
  Synthetic oligonucleotide
aggaggatctgctgatacggcttgacaaac

SEQ ID NO: 215333 - DNA, 30 bp, Artificial Sequence
  Synthetic oligonucleotide
tcgtctgaagtgactgcagttcttacaaac

SEQ ID NO: 215334 - DNA, 30 bp, Artificial Sequence
  Synthetic oligonucleotide
taccataaatcatagactgtgtaaccaaac

SEQ ID NO: 215335 - DNA, 30 bp, Artificial Sequence
  Synthetic oligonucleotide
gtatccattacaatgccccgacgaccaaac

SEQ ID NO: 215336 - DNA, 30 bp, Artificial Sequence
  Synthetic oligonucleotide
cgtaggaaatctagacgcggaggaccaaac

SEQ ID NO: 215337 - DNA, 30 bp, Artificial Sequence
  Synthetic oligonucleotide
ctcgccgcatacggtaaaaaggtgccaaac

SEQ ID NO: 215338 - DNA, 30 bp, Artificial Sequence
  Synthetic oligonucleotide
cgggaactcgctacgattctgttgccaaac

SEQ ID NO: 215339 - DNA, 30 bp, Artificial Sequence
  Synthetic oligonucleotide
ctctcgtcgtctttacatcatcgtccaaac

SEQ ID NO: 215340 - DNA, 30 bp, Artificial Sequence
  Synthetic oligonucleotide
agtcgatcgagatacaatcttgaagcaaac

SEQ ID NO: 215341 - DNA, 30 bp, Artificial Sequence
  Synthetic oligonucleotide
cgctttcatggatccgaatgccgagcaaac

SEQ ID NO: 215342 - DNA, 30 bp, Artificial Sequence
  Synthetic oligonucleotide
gtaggccatcggcatcggctatccgcaaac

SEQ ID NO: 215343 - DNA, 30 bp, Artificial Sequence
  Synthetic oligonucleotide
atgacctacgggtgaagcacgaaggcaaac

SEQ ID NO: 215344 - DNA, 30 bp, Artificial Sequence
  Synthetic oligonucleotide
gacattctcgtgtagatcaccgaggcaaac

SEQ ID NO: 215345 - DNA, 30 bp, Artificial Sequence
  Synthetic oligonucleotide
agagcagatacagacgtattaagggcaaac

SEQ ID NO: 215346 - DNA, 30 bp, Artificial Sequence
  Synthetic oligonucleotide
catagacacctcgagttaaataatgcaaac

SEQ ID NO: 215347 - DNA, 30 bp, Artificial Sequence
  Synthetic oligonucleotide
tttacagaccacgtatttactagtgcaaac

SEQ ID NO: 215348 - DNA, 30 bp, Artificial Sequence
  Synthetic oligonucleotide
gcaagagtataagggctaaacaaatcaaac

SEQ ID NO: 215349 - DNA, 30 bp, Artificial Sequence
  Synthetic oligonucleotide
taagataatgggccagtctatggatcaaac

SEQ ID NO: 215350 - DNA, 30 bp, Artificial Sequence
  Synthetic oligonucleotide
atgtgattgcaatctggggatgactcaaac

SEQ ID NO: 215351 - DNA, 30 bp, Artificial Sequence
  Synthetic oligonucleotide
ctaggggacaggtgataaagatactcaaac

SEQ ID NO: 215352 - DNA, 30 bp, Artificial Sequence
  Synthetic oligonucleotide
actcgttggatggatgccagacagtcaaac

SEQ ID NO: 215353 - DNA, 30 bp, Artificial Sequence
  Synthetic oligonucleotide
atggatttaggatgtatatccacgtcaaac

SEQ ID NO: 215354 - DNA, 30 bp, Artificial Sequence
  Synthetic oligonucleotide
gcctcaaaataatgtctgggcaggtcaaac

SEQ ID NO: 215355 - DNA, 30 bp, Artificial Sequence
  Synthetic oligonucleotide
gacctatagaactgggggttcaggtcaaac

SEQ ID NO: 215356 - DNA, 30 bp, Artificial Sequence
  Synthetic oligonucleotide
gaagggtaagtatcatcccggtcttcaaac

SEQ ID NO: 215357 - DNA, 30 bp, Artificial Sequence
  Synthetic oligonucleotide
gcatgttcccacgcactgaggggcagaaac

SEQ ID NO: 215358 - DNA, 30 bp, Artificial Sequence
  Synthetic oligonucleotide
tgaagcgatacctgctacagccggagaaac

SEQ ID NO: 215359 - DNA, 30 bp, Artificial Sequence
  Synthetic oligonucleotide
tggctactgagacgttccgatctgagaaac

SEQ ID NO: 215360 - DNA, 30 bp, Artificial Sequence
  Synthetic oligonucleotide
gtagacaggtgcacggcacgcaatagaaac

SEQ ID NO: 215361 - DNA, 30 bp, Artificial Sequence
  Synthetic oligonucleotide
acgacttagtcttttcttatgggtagaaac

SEQ ID NO: 215362 - DNA, 30 bp, Artificial Sequence
  Synthetic oligonucleotide
ttgacaaaaatcccgtactaagtacgaaac

SEQ ID NO: 215363 - DNA, 30 bp, Artificial Sequence
  Synthetic oligonucleotide
gacctatgcggttgagttagtttgcgaaac

SEQ ID NO: 215364 - DNA, 30 bp, Artificial Sequence
  Synthetic oligonucleotide
acactggatcaggccacgaccggtcgaaac

SEQ ID NO: 215365 - DNA, 30 bp, Artificial Sequence
  Synthetic oligonucleotide
ctttgcggtatcgacataaactaaggaaac

SEQ ID NO: 215366 - DNA, 30 bp, Artificial Sequence
  Synthetic oligonucleotide
tacagatatgtgcgaggcgtttgaggaaac

SEQ ID NO: 215367 - DNA, 30 bp, Artificial Sequence
  Synthetic oligonucleotide
gatgctttgacgatggtaagtaacggaaac

SEQ ID NO: 215368 - DNA, 30 bp, Artificial Sequence
  Synthetic oligonucleotide
cgctctccgggtgcatttatcgacggaaac

SEQ ID NO: 215369 - DNA, 30 bp, Artificial Sequence
  Synthetic oligonucleotide
tgaataacatggtatactttcatcggaaac

SEQ ID NO: 215370 - DNA, 30 bp, Artificial Sequence
  Synthetic oligonucleotide
ggactccaggggagaggatggcagggaaac

SEQ ID NO: 215371 - DNA, 30 bp, Artificial Sequence
  Synthetic oligonucleotide
ttctgctgttggcgtaaggacgagggaaac

SEQ ID NO: 215372 - DNA, 30 bp, Artificial Sequence
  Synthetic oligonucleotide
acaaacctagtgacgtaacctaggggaaac

SEQ ID NO: 215373 - DNA, 30 bp, Artificial Sequence
  Synthetic oligonucleotide
cggtgcacgcactgaaacgagatgggaaac

SEQ ID NO: 215374 - DNA, 30 bp, Artificial Sequence
  Synthetic oligonucleotide
tcctctagaaatctaccaagatgtggaaac

SEQ ID NO: 215375 - DNA, 30 bp, Artificial Sequence
  Synthetic oligonucleotide
tgcgacagtgacggaggtgacaaatgaaac

SEQ ID NO: 215376 - DNA, 30 bp, Artificial Sequence
  Synthetic oligonucleotide
tctcacctacggtgcgtaggcacatgaaac

SEQ ID NO: 215377 - DNA, 30 bp, Artificial Sequence
  Synthetic oligonucleotide
aacctatcactttcacctgggccatgaaac

SEQ ID NO: 215378 - DNA, 30 bp, Artificial Sequence
  Synthetic oligonucleotide
cgcaagccttctcagcgataattttgaaac

SEQ ID NO: 215379 - DNA, 30 bp, Artificial Sequence
  Synthetic oligonucleotide
gagatcttaaagatacgatgataaataaac

SEQ ID NO: 215380 - DNA, 30 bp, Artificial Sequence
  Synthetic oligonucleotide
cgtacatctctcattacgaggggaataaac

SEQ ID NO: 215381 - DNA, 30 bp, Artificial Sequence
  Synthetic oligonucleotide
gccaccccctgaaaatgacgtttaataaac

SEQ ID NO: 215382 - DNA, 30 bp, Artificial Sequence
  Synthetic oligonucleotide
taaagcactggaggggtgcatcccataaac

SEQ ID NO: 215383 - DNA, 30 bp, Artificial Sequence
  Synthetic oligonucleotide
tgccaatcgagcgaacacggctggataaac

SEQ ID NO: 215384 - DNA, 30 bp, Artificial Sequence
  Synthetic oligonucleotide
ttggatctccgttagaaattggatataaac

SEQ ID NO: 215385 - DNA, 30 bp, Artificial Sequence
  Synthetic oligonucleotide
acgccgaagaaccaccggcgttgtataaac

SEQ ID NO: 215386 - DNA, 30 bp, Artificial Sequence
  Synthetic oligonucleotide
tgttgatccgactaacgtgataaactaaac

SEQ ID NO: 215387 - DNA, 30 bp, Artificial Sequence
  Synthetic oligonucleotide
tcgtccccagatcgcagcatcgccctaaac

SEQ ID NO: 215388 - DNA, 30 bp, Artificial Sequence
  Synthetic oligonucleotide
tggtttagcatcggagatctatgcctaaac

SEQ ID NO: 215389 - DNA, 30 bp, Artificial Sequence
  Synthetic oligonucleotide
agtctgagggggtgttaatcgaggctaaac

SEQ ID NO: 215390 - DNA, 30 bp, Artificial Sequence
  Synthetic oligonucleotide
aaggataaacaggaacgggaggggctaaac

SEQ ID NO: 215391 - DNA, 30 bp, Artificial Sequence
  Synthetic oligonucleotide
agttacttaagcgtacggattgatctaaac

SEQ ID NO: 215392 - DNA, 30 bp, Artificial Sequence
  Synthetic oligonucleotide
atatcatgtggaacacacacaagtctaaac

SEQ ID NO: 215393 - DNA, 30 bp, Artificial Sequence
  Synthetic oligonucleotide
ctgccgtgacgagatgagtagacagtaaac

SEQ ID NO: 215394 - DNA, 30 bp, Artificial Sequence
  Synthetic oligonucleotide
aacatgacgcacgtgcactgcgacgtaaac

SEQ ID NO: 215395 - DNA, 30 bp, Artificial Sequence
  Synthetic oligonucleotide
ggcgtatggcctgcgggattggccgtaaac

SEQ ID NO: 215396 - DNA, 30 bp, Artificial Sequence
  Synthetic oligonucleotide
tgtgagaaagcggattgtagccaggtaaac

SEQ ID NO: 215397 - DNA, 30 bp, Artificial Sequence
  Synthetic oligonucleotide
taggtcgcgcgaccgacaaacacggtaaac

SEQ ID NO: 215398 - DNA, 30 bp, Artificial Sequence
  Synthetic oligonucleotide
actgagtcgaaatttgtgttatgggtaaac

SEQ ID NO: 215399 - DNA, 30 bp, Artificial Sequence
  Synthetic oligonucleotide
tcaccgcgtacagcgaagtagtgggtaaac

SEQ ID NO: 215400 - DNA, 30 bp, Artificial Sequence
  Synthetic oligonucleotide
tctgcacaatttaggtgaagtgatgtaaac

SEQ ID NO: 215401 - DNA, 30 bp, Artificial Sequence
  Synthetic oligonucleotide
atgcaccggaaggctatcgcacctgtaaac

SEQ ID NO: 215402 - DNA, 30 bp, Artificial Sequence
  Synthetic oligonucleotide
ttaggttacaacgctggcggccgtgtaaac

SEQ ID NO: 215403 - DNA, 30 bp, Artificial Sequence
  Synthetic oligonucleotide
ggccagtgccatgatgtcataggtgtaaac

SEQ ID NO: 215404 - DNA, 30 bp, Artificial Sequence
  Synthetic oligonucleotide
taccatgaccgagcattagcttgtgtaaac

SEQ ID NO: 215405 - DNA, 30 bp, Artificial Sequence
  Synthetic oligonucleotide
gatcgaacgattcttaagggcagattaaac

SEQ ID NO: 215406 - DNA, 30 bp, Artificial Sequence
  Synthetic oligonucleotide
ccaacagatcatccagcaaggcgattaaac

SEQ ID NO: 215407 - DNA, 30 bp, Artificial Sequence
  Synthetic oligonucleotide
gaaaaagaaagggtgcgaataaccttaaac

SEQ ID NO: 215408 - DNA, 30 bp, Artificial Sequence
  Synthetic oligonucleotide
ctatgccaatacggtccacaagggttaaac

SEQ ID NO: 215409 - DNA, 30 bp, Artificial Sequence
  Synthetic oligonucleotide
cgtattccatacaggagggtataaaacaac

SEQ ID NO: 215410 - DNA, 30 bp, Artificial Sequence
  Synthetic oligonucleotide
aagagggcgggtttcacttacccaaacaac

SEQ ID NO: 215411 - DNA, 30 bp, Artificial Sequence
  Synthetic oligonucleotide
acaacagacgtctccaaatatgtcaacaac

SEQ ID NO: 215412 - DNA, 30 bp, Artificial Sequence
  Synthetic oligonucleotide
tagggttataacccggtcgcctcgaacaac

SEQ ID NO: 215413 - DNA, 30 bp, Artificial Sequence
  Synthetic oligonucleotide
tgctgcgtatatccatacggccttaacaac

SEQ ID NO: 215414 - DNA, 30 bp, Artificial Sequence
  Synthetic oligonucleotide
taagtcgtacgaaatgactagtcccacaac

SEQ ID NO: 215415 - DNA, 30 bp, Artificial Sequence
  Synthetic oligonucleotide
ggcgtaatggtcgtgcgagttacgcacaac

SEQ ID NO: 215416 - DNA, 30 bp, Artificial Sequence
  Synthetic oligonucleotide
atctagtacagatctatcggaatgcacaac

SEQ ID NO: 215417 - DNA, 30 bp, Artificial Sequence
  Synthetic oligonucleotide
tcttggagcgaagaagatgaggatcacaac

SEQ ID NO: 215418 - DNA, 30 bp, Artificial Sequence
  Synthetic oligonucleotide
gtctcacttacagatggatctcctcacaac

SEQ ID NO: 215419 - DNA, 31 bp, Artificial Sequence
  Synthetic oligonucleotide
agaagggagcattacggttaagcttcacaac

SEQ ID NO: 215420 - DNA, 30 bp, Artificial Sequence
  Synthetic oligonucleotide
aaacaagcagtggcaactgggtccgacaac

SEQ ID NO: 215421 - DNA, 30 bp, Artificial Sequence
  Synthetic oligonucleotide
aaaccttcttcccatgcggatcgcgacaac

SEQ ID NO: 215422 - DNA, 29 bp, Artificial Sequence
  Synthetic oligonucleotide
cgtgctcgcgcctaacttcagctgacaac

SEQ ID NO: 215423 - DNA, 30 bp, Artificial Sequence
  Synthetic oligonucleotide
ggaagggtatgggaagctgggtgatacaac

SEQ ID NO: 215424 - DNA, 30 bp, Artificial Sequence
  Synthetic oligonucleotide
ggtctggaggttttctaaaagctctacaac

SEQ ID NO: 215425 - DNA, 30 bp, Artificial Sequence
  Synthetic oligonucleotide
tatcatcgccgtgaaaaaaagtgttacaac

SEQ ID NO: 215426 - DNA, 30 bp, Artificial Sequence
  Synthetic oligonucleotide
ggggtatcaaaaatggatgcccaaaccaac

SEQ ID NO: 215427 - DNA, 30 bp, Artificial Sequence
  Synthetic oligonucleotide
tttcgatatctgttaccgaaccccaccaac

SEQ ID NO: 215428 - DNA, 30 bp, Artificial Sequence
  Synthetic oligonucleotide
accgacactgtatgtatcaagattaccaac

SEQ ID NO: 215429 - DNA, 30 bp, Artificial Sequence
  Synthetic oligonucleotide
aactaacaacagctggacgtaagccccaac

SEQ ID NO: 215430 - DNA, 30 bp, Artificial Sequence
  Synthetic oligonucleotide
gcctgcacaatagaacgcaagcgccccaac

SEQ ID NO: 215431 - DNA, 30 bp, Artificial Sequence
  Synthetic oligonucleotide
aggtttcaagcatggcaggatgcgcccaac

SEQ ID NO: 215432 - DNA, 30 bp, Artificial Sequence
  Synthetic oligonucleotide
atcaagcgcgtggtcaccaaagatcccaac

SEQ ID NO: 215433 - DNA, 30 bp, Artificial Sequence
  Synthetic oligonucleotide
ggagagagatccatgctccagagtcccaac

SEQ ID NO: 215434 - DNA, 30 bp, Artificial Sequence
  Synthetic oligonucleotide
tacgagcagccaacggttctcgccgccaac

SEQ ID NO: 215435 - DNA, 30 bp, Artificial Sequence
  Synthetic oligonucleotide
ttggcacgtacctaggcaaatattgccaac

SEQ ID NO: 215436 - DNA, 30 bp, Artificial Sequence
  Synthetic oligonucleotide
agtattatatactcgcaggaaacatccaac

SEQ ID NO: 215437 - DNA, 30 bp, Artificial Sequence
  Synthetic oligonucleotide
cgtgggttaatgtaacgcgaaccatccaac

SEQ ID NO: 215438 - DNA, 30 bp, Artificial Sequence
  Synthetic oligonucleotide
gtccatcggttttccagtgtaagctccaac

SEQ ID NO: 215439 - DNA, 30 bp, Artificial Sequence
  Synthetic oligonucleotide
cggccacttcttcaatgtacccggtccaac

SEQ ID NO: 215440 - DNA, 30 bp, Artificial Sequence
  Synthetic oligonucleotide
tggggaggtgggggctcatgtcggtccaac

SEQ ID NO: 215441 - DNA, 30 bp, Artificial Sequence
  Synthetic oligonucleotide
cgggaggtgaggtgtaggttaccaagcaac

SEQ ID NO: 215442 - DNA, 30 bp, Artificial Sequence
  Synthetic oligonucleotide
cagtaaaagttctcaagtagcataagcaac

SEQ ID NO: 215443 - DNA, 30 bp, Artificial Sequence
  Synthetic oligonucleotide
attagggatccctcagattcggtcagcaac

SEQ ID NO: 215444 - DNA, 30 bp, Artificial Sequence
  Synthetic oligonucleotide
ctagaatggaggctgataagctggagcaac

SEQ ID NO: 215445 - DNA, 30 bp, Artificial Sequence
  Synthetic oligonucleotide
gaacgaataagcagcggaatagatagcaac

SEQ ID NO: 215446 - DNA, 30 bp, Artificial Sequence
  Synthetic oligonucleotide
taaccctcgataagggacagcatacgcaac

SEQ ID NO: 215447 - DNA, 30 bp, Artificial Sequence
  Synthetic oligonucleotide
gaaaatgaggcgtatcccgcttaccgcaac

SEQ ID NO: 215448 - DNA, 30 bp, Artificial Sequence
  Synthetic oligonucleotide
aagagctgaaatgcattgcgaatccgcaac

SEQ ID NO: 215449 - DNA, 30 bp, Artificial Sequence
  Synthetic oligonucleotide
agccgacaccagtccttcgcagctcgcaac

SEQ ID NO: 215450 - DNA, 30 bp, Artificial Sequence
  Synthetic oligonucleotide
atcaccttgaaaaggaggatgagtcgcaac

SEQ ID NO: 215451 - DNA, 30 bp, Artificial Sequence
  Synthetic oligonucleotide
gtacatacagtaagtcattaggcaggcaac

SEQ ID NO: 215452 - DNA, 30 bp, Artificial Sequence
  Synthetic oligonucleotide
cgtcgcgtcacgtttggtacgctcggcaac

SEQ ID NO: 215453 - DNA, 30 bp, Artificial Sequence
  Synthetic oligonucleotide
gagacgggcacagcggaacattagggcaac

SEQ ID NO: 215454 - DNA, 30 bp, Artificial Sequence
  Synthetic oligonucleotide
caagtaggagggtcagcttcgatgggcaac

SEQ ID NO: 215455 - DNA, 30 bp, Artificial Sequence
  Synthetic oligonucleotide
actgagtgagtatgtgttctcgaatgcaac

SEQ ID NO: 215456 - DNA, 30 bp, Artificial Sequence
  Synthetic oligonucleotide
atttacgcgtatcttggatgggcgtgcaac

SEQ ID NO: 215457 - DNA, 30 bp, Artificial Sequence
  Synthetic oligonucleotide
acgtacgacccctgtatgggctcaatcaac

SEQ ID NO: 215458 - DNA, 30 bp, Artificial Sequence
  Synthetic oligonucleotide
ataagccagaaggagcggccggtaatcaac

SEQ ID NO: 215459 - DNA, 30 bp, Artificial Sequence
  Synthetic oligonucleotide
agtgcacatagttcactacgtgcactcaac

SEQ ID NO: 215460 - DNA, 30 bp, Artificial Sequence
  Synthetic oligonucleotide
gtcgaaggtgctagcgttattttactcaac

SEQ ID NO: 215461 - DNA, 30 bp, Artificial Sequence
  Synthetic oligonucleotide
ggactggatccctgtaaaccggccctcaac

SEQ ID NO: 215462 - DNA, 30 bp, Artificial Sequence
  Synthetic oligonucleotide
ctaaagtcaaatcttgtgctttggctcaac

SEQ ID NO: 215463 - DNA, 30 bp, Artificial Sequence
  Synthetic oligonucleotide
acgaatgaataacgctgtattattctcaac

SEQ ID NO: 215464 - DNA, 30 bp, Artificial Sequence
  Synthetic oligonucleotide
atagggcattactggcgcaaggttctcaac

SEQ ID NO: 215465 - DNA, 30 bp, Artificial Sequence
  Synthetic oligonucleotide
tacgctggaaagtattatacaacggtcaac

SEQ ID NO: 215466 - DNA, 30 bp, Artificial Sequence
  Synthetic oligonucleotide
tgcagtcaacataggacataacttgtcaac

SEQ ID NO: 215467 - DNA, 30 bp, Artificial Sequence
  Synthetic oligonucleotide
cacaaatttgcctaacgtatctaattcaac

SEQ ID NO: 215468 - DNA, 31 bp, Artificial Sequence
  Synthetic oligonucleotide
tgggcgacgcccatccaaaggaaccttcaac

SEQ ID NO: 215469 - DNA, 30 bp, Artificial Sequence
  Synthetic oligonucleotide
agcactgatttaatgacgtgaagcttcaac

SEQ ID NO: 215470 - DNA, 30 bp, Artificial Sequence
  Synthetic oligonucleotide
tagatcccgtgggtgtgggacgagttcaac

SEQ ID NO: 215471 - DNA, 30 bp, Artificial Sequence
  Synthetic oligonucleotide
aggggataacaagtcgtgaaaagaaagaac

SEQ ID NO: 215472 - DNA, 30 bp, Artificial Sequence
  Synthetic oligonucleotide
gcgaataccagtttaattcgcatcaagaac

SEQ ID NO: 215473 - DNA, 30 bp, Artificial Sequence
  Synthetic oligonucleotide
agcgatcaccggaaacgggggcagaagaac

SEQ ID NO: 215474 - DNA, 30 bp, Artificial Sequence
  Synthetic oligonucleotide
ggtgtttcctatatttacacctcgaagaac

SEQ ID NO: 215475 - DNA, 30 bp, Artificial Sequence
  Synthetic oligonucleotide
ctgttaagtccgaacattcaagtgaagaac

SEQ ID NO: 215476 - DNA, 30 bp, Artificial Sequence
  Synthetic oligonucleotide
ggagagatggaattcgggccgacccagaac

SEQ ID NO: 215477 - DNA, 30 bp, Artificial Sequence
  Synthetic oligonucleotide
gtggtcaattcgtagcctataggccagaac

SEQ ID NO: 215478 - DNA, 30 bp, Artificial Sequence
  Synthetic oligonucleotide
agatctatccacattaatcagccgcagaac

SEQ ID NO: 215479 - DNA, 30 bp, Artificial Sequence
  Synthetic oligonucleotide
tgttgggcataaagaaacatagggcagaac

SEQ ID NO: 215480 - DNA, 30 bp, Artificial Sequence
  Synthetic oligonucleotide
tgtaaggctgaatgtacctaatggcagaac

SEQ ID NO: 215481 - DNA, 30 bp, Artificial Sequence
  Synthetic oligonucleotide
ggctgaagattattttcagtttgtcagaac

SEQ ID NO: 215482 - DNA, 30 bp, Artificial Sequence
  Synthetic oligonucleotide
acttctgctagtggtgggtctccagagaac

SEQ ID NO: 215483 - DNA, 30 bp, Artificial Sequence
  Synthetic oligonucleotide
gaaaggcccggcatggtgagtccagagaac

SEQ ID NO: 215484 - DNA, 30 bp, Artificial Sequence
  Synthetic oligonucleotide
tttggtaaccgctaggattatgcagagaac

SEQ ID NO: 215485 - DNA, 30 bp, Artificial Sequence
  Synthetic oligonucleotide
cgcttttagaccgtgtactgttacgagaac

SEQ ID NO: 215486 - DNA, 30 bp, Artificial Sequence
  Synthetic oligonucleotide
tgaagcggatcacgctgaggtaccgagaac

SEQ ID NO: 215487 - DNA, 30 bp, Artificial Sequence
  Synthetic oligonucleotide
atggtggatggtggcttggccgtggagaac

SEQ ID NO: 215488 - DNA, 30 bp, Artificial Sequence
  Synthetic oligonucleotide
taggttcgtggcttacacgtaactgagaac

SEQ ID NO: 215489 - DNA, 30 bp, Artificial Sequence
  Synthetic oligonucleotide
ttgccgagccgccaccgcttcagtgagaac

SEQ ID NO: 215490 - DNA, 30 bp, Artificial Sequence
  Synthetic oligonucleotide
ggggttcctaaaacaaataaacgtgagaac

SEQ ID NO: 215491 - DNA, 30 bp, Artificial Sequence
  Synthetic oligonucleotide
ttacaaggagtctagctcgttcttgagaac

SEQ ID NO: 215492 - DNA, 30 bp, Artificial Sequence
  Synthetic oligonucleotide
gcaattggagcggcatggatgtttgagaac

SEQ ID NO: 215493 - DNA, 30 bp, Artificial Sequence
  Synthetic oligonucleotide
gcttcggtattgtgggattgagagtagaac

SEQ ID NO: 215494 - DNA, 30 bp, Artificial Sequence
  Synthetic oligonucleotide
gacttaagtaaccagtaccgcggttagaac

SEQ ID NO: 215495 - DNA, 30 bp, Artificial Sequence
  Synthetic oligonucleotide
acatatgctaatagcctggactgttagaac

SEQ ID NO: 215496 - DNA, 30 bp, Artificial Sequence
  Synthetic oligonucleotide
cttaccgtgattatatgtgtcgtttagaac

SEQ ID NO: 215497 - DNA, 30 bp, Artificial Sequence
  Synthetic oligonucleotide
aggtgcgctacagagcgcaacccaacgaac

SEQ ID NO: 215498 - DNA, 30 bp, Artificial Sequence
  Synthetic oligonucleotide
gccggtgatctgatagcgtggggcacgaac

SEQ ID NO: 215499 - DNA, 30 bp, Artificial Sequence
  Synthetic oligonucleotide
gaatgtaatgtttagctatcaaagacgaac

SEQ ID NO: 215500 - DNA, 30 bp, Artificial Sequence
  Synthetic oligonucleotide
cacggcatgaccattaggcactatacgaac

SEQ ID NO: 215501 - DNA, 30 bp, Artificial Sequence
  Synthetic oligonucleotide
tcctgcgcagtaaacggcacacttacgaac

SEQ ID NO: 215502 - DNA, 30 bp, Artificial Sequence
  Synthetic oligonucleotide
ggtccctatccaccgactaacccaccgaac

SEQ ID NO: 215503 - DNA, 30 bp, Artificial Sequence
  Synthetic oligonucleotide
taaaggacctgcccaggtgcacacccgaac

SEQ ID NO: 215504 - DNA, 30 bp, Artificial Sequence
  Synthetic oligonucleotide
tcggtatgttaagcatgtcgaaccccgaac

SEQ ID NO: 215505 - DNA, 30 bp, Artificial Sequence
  Synthetic oligonucleotide
tttaccgagagttggggcaccaccccgaac

SEQ ID NO: 215506 - DNA, 30 bp, Artificial Sequence
  Synthetic oligonucleotide
attaggttgtcattggttcgcgttccgaac

SEQ ID NO: 215507 - DNA, 30 bp, Artificial Sequence
  Synthetic oligonucleotide
cgacggcaagttactagtatagcagcgaac

SEQ ID NO: 215508 - DNA, 30 bp, Artificial Sequence
  Synthetic oligonucleotide
tgtactaacggccaatgatgcgtagcgaac

SEQ ID NO: 215509 - DNA, 30 bp, Artificial Sequence
  Synthetic oligonucleotide
aatcacatctccacgtttttaaaggcgaac

SEQ ID NO: 215510 - DNA, 30 bp, Artificial Sequence
  Synthetic oligonucleotide
gcgctacggttaaggcgtaacatggcgaac

SEQ ID NO: 215511 - DNA, 30 bp, Artificial Sequence
  Synthetic oligonucleotide
ggggcagtacgggacccatgcgtggcgaac

SEQ ID NO: 215512 - DNA, 30 bp, Artificial Sequence
  Synthetic oligonucleotide
cacgagactaataattcgatagatgcgaac

SEQ ID NO: 215513 - DNA, 30 bp, Artificial Sequence
  Synthetic oligonucleotide
tcggctcgcgttattgaaagggtttcgaac

SEQ ID NO: 215514 - DNA, 30 bp, Artificial Sequence
  Synthetic oligonucleotide
cgagaatctgtaagattgcctaaaaggaac

SEQ ID NO: 215515 - DNA, 30 bp, Artificial Sequence
  Synthetic oligonucleotide
aaacttaaaagtaatggaggtaaaaggaac

SEQ ID NO: 215516 - DNA, 30 bp, Artificial Sequence
  Synthetic oligonucleotide
gccggtcacgttcagctgccggccaggaac

SEQ ID NO: 215517 - DNA, 30 bp, Artificial Sequence
  Synthetic oligonucleotide
ccgcaatctaacgattgtttcattaggaac

SEQ ID NO: 215518 - DNA, 30 bp, Artificial Sequence
  Synthetic oligonucleotide
gggacggttgtggccgaacctggacggaac

SEQ ID NO: 215519 - DNA, 30 bp, Artificial Sequence
  Synthetic oligonucleotide
gaactacaggtgtgagcgagcatacggaac

SEQ ID NO: 215520 - DNA, 30 bp, Artificial Sequence
  Synthetic oligonucleotide
gctcaacgtaagctctatgaatgccggaac

SEQ ID NO: 215521 - DNA, 30 bp, Artificial Sequence
  Synthetic oligonucleotide
ccgggataatgctaaagttgactccggaac

SEQ ID NO: 215522 - DNA, 30 bp, Artificial Sequence
  Synthetic oligonucleotide
ggagtgcacagtattgatctcctccggaac

SEQ ID NO: 215523 - DNA, 30 bp, Artificial Sequence
  Synthetic oligonucleotide
gctcaagtgcctggtgaaccataagggaac

SEQ ID NO: 215524 - DNA, 30 bp, Artificial Sequence
  Synthetic oligonucleotide
atggtcaatggagcaggcaactaagggaac

SEQ ID NO: 215525 - DNA, 30 bp, Artificial Sequence
  Synthetic oligonucleotide
agactaataaacccaaccataccagggaac

SEQ ID NO: 215526 - DNA, 30 bp, Artificial Sequence
  Synthetic oligonucleotide
tgctattctacaccggaacagcacgggaac

SEQ ID NO: 215527 - DNA, 30 bp, Artificial Sequence
  Synthetic oligonucleotide
ctgcccgagaagggcgactcatgcgggaac

SEQ ID NO: 215528 - DNA, 30 bp, Artificial Sequence
  Synthetic oligonucleotide
gtagttctccgtagtaaaataagggggaac

SEQ ID NO: 215529 - DNA, 30 bp, Artificial Sequence
  Synthetic oligonucleotide
gagaaggatctctgacatgcgagggggaac

SEQ ID NO: 215530 - DNA, 30 bp, Artificial Sequence
  Synthetic oligonucleotide
accttattataataaagggatggggggaac

SEQ ID NO: 215531 - DNA, 30 bp, Artificial Sequence
  Synthetic oligonucleotide
ccagggcccaatgaacaacaacatgggaac

SEQ ID NO: 215532 - DNA, 30 bp, Artificial Sequence
  Synthetic oligonucleotide
cgggaggaaaggtgtgacccccctgggaac

SEQ ID NO: 215533 - DNA, 30 bp, Artificial Sequence
  Synthetic oligonucleotide
gaggtctctcaatttcactgtaactggaac

SEQ ID NO: 215534 - DNA, 30 bp, Artificial Sequence
  Synthetic oligonucleotide
ggaaagactgtcgtataaaatcactggaac

SEQ ID NO: 215535 - DNA, 30 bp, Artificial Sequence
  Synthetic oligonucleotide
ggaaggtactcggatgattttgactggaac

SEQ ID NO: 215536 - DNA, 30 bp, Artificial Sequence
  Synthetic oligonucleotide
tagtaggaaacagcaagggcatattggaac

SEQ ID NO: 215537 - DNA, 30 bp, Artificial Sequence
  Synthetic oligonucleotide
acgccaaagggactagcaatataaatgaac

SEQ ID NO: 215538 - DNA, 30 bp, Artificial Sequence
  Synthetic oligonucleotide
ttgagacacggtcggggaaaacgaatgaac

SEQ ID NO: 215539 - DNA, 30 bp, Artificial Sequence
  Synthetic oligonucleotide
gactcgtttccgccaaaagatttcatgaac

SEQ ID NO: 215540 - DNA, 30 bp, Artificial Sequence
  Synthetic oligonucleotide
tgctgaatacaacataggaacgcgatgaac

SEQ ID NO: 215541 - DNA, 30 bp, Artificial Sequence
  Synthetic oligonucleotide
agtatgttacgggggtcacacgcgatgaac

SEQ ID NO: 215542 - DNA, 30 bp, Artificial Sequence
  Synthetic oligonucleotide
gtccctagaaggcagtccttgatcctgaac

SEQ ID NO: 215543 - DNA, 30 bp, Artificial Sequence
  Synthetic oligonucleotide
ttaggtgagagtgggatagaacttctgaac

SEQ ID NO: 215544 - DNA, 30 bp, Artificial Sequence
  Synthetic oligonucleotide
gaaggagatgacgccgttccgtttctgaac

SEQ ID NO: 215545 - DNA, 30 bp, Artificial Sequence
  Synthetic oligonucleotide
aggatgtccacccattgcggggcagtgaac

SEQ ID NO: 215546 - DNA, 30 bp, Artificial Sequence
  Synthetic oligonucleotide
ttatcttataaaacaaaacaaaacgtgaac

SEQ ID NO: 215547 - DNA, 30 bp, Artificial Sequence
  Synthetic oligonucleotide
gaaagcagtaatcgcatactgaacgtgaac

SEQ ID NO: 215548 - DNA, 30 bp, Artificial Sequence
  Synthetic oligonucleotide
cgaggagaaccggaaattcgcgccgtgaac

SEQ ID NO: 215549 - DNA, 30 bp, Artificial Sequence
  Synthetic oligonucleotide
tggacgaggcatgttctggccttcgtgaac

SEQ ID NO: 215550 - DNA, 30 bp, Artificial Sequence
  Synthetic oligonucleotide
agagattgttggttgaatgcattggtgaac

SEQ ID NO: 215551 - DNA, 30 bp, Artificial Sequence
  Synthetic oligonucleotide
agctgataagatgtatagatcgctgtgaac

SEQ ID NO: 215552 - DNA, 30 bp, Artificial Sequence
  Synthetic oligonucleotide
gcattattctcaactccgatattcttgaac

SEQ ID NO: 215553 - DNA, 30 bp, Artificial Sequence
  Synthetic oligonucleotide
ttcgggcaacactgcgtatcaaagttgaac

SEQ ID NO: 215554 - DNA, 30 bp, Artificial Sequence
  Synthetic oligonucleotide
acagttgccacccataaaggacgtttgaac

SEQ ID NO: 215555 - DNA, 30 bp, Artificial Sequence
  Synthetic oligonucleotide
gacgtcttcggcaagtcgagacttttgaac

SEQ ID NO: 215556 - DNA, 30 bp, Artificial Sequence
  Synthetic oligonucleotide
taggtttcaaatcaccaagtagcaaataac

SEQ ID NO: 215557 - DNA, 30 bp, Artificial Sequence
  Synthetic oligonucleotide
aagcgccacggttgcaaaggacgaaataac

SEQ ID NO: 215558 - DNA, 30 bp, Artificial Sequence
  Synthetic oligonucleotide
gtcctgggtatgtattgcggagccaataac

SEQ ID NO: 215559 - DNA, 30 bp, Artificial Sequence
  Synthetic oligonucleotide
tgccacgtcgcgcaaatgcggtggaataac

SEQ ID NO: 215560 - DNA, 30 bp, Artificial Sequence
  Synthetic oligonucleotide
accagaagcggaggtttcgagttgaataac

SEQ ID NO: 215561 - DNA, 30 bp, Artificial Sequence
  Synthetic oligonucleotide
gtggtctgtttatgtgacacgggtaataac

SEQ ID NO: 215562 - DNA, 30 bp, Artificial Sequence
  Synthetic oligonucleotide
accggaataggcatcgtttgagaacataac

SEQ ID NO: 215563 - DNA, 30 bp, Artificial Sequence
  Synthetic oligonucleotide
taggcgagtgctcaagcaaagcaccataac

SEQ ID NO: 215564 - DNA, 30 bp, Artificial Sequence
  Synthetic oligonucleotide
gcgagtgggtactcgtacgccgctcataac

SEQ ID NO: 215565 - DNA, 30 bp, Artificial Sequence
  Synthetic oligonucleotide
gaatgtggagaacttgcatgctcagataac

SEQ ID NO: 215566 - DNA, 30 bp, Artificial Sequence
  Synthetic oligonucleotide
caggcgattatttgaagttaaggcgataac

SEQ ID NO: 215567 - DNA, 30 bp, Artificial Sequence
  Synthetic oligonucleotide
agaactacgacttaagatcggatcgataac

SEQ ID NO: 215568 - DNA, 30 bp, Artificial Sequence
  Synthetic oligonucleotide
aacgcttgtcgcgcaatgacaacatataac

SEQ ID NO: 215569 - DNA, 30 bp, Artificial Sequence
  Synthetic oligonucleotide
tcacaatggatagcatgcttaccctataac

SEQ ID NO: 215570 - DNA, 30 bp, Artificial Sequence
  Synthetic oligonucleotide
ttaccccggtaaatatggtgtatgtataac

SEQ ID NO: 215571 - DNA, 30 bp, Artificial Sequence
  Synthetic oligonucleotide
acttaaaagccagtcacgattgtgtataac

SEQ ID NO: 215572 - DNA, 30 bp, Artificial Sequence
  Synthetic oligonucleotide
aggtatgaactagtgcactggcacactaac

SEQ ID NO: 215573 - DNA, 30 bp, Artificial Sequence
  Synthetic oligonucleotide
aaccgtctggtgcgcaatgtaggcactaac

SEQ ID NO: 215574 - DNA, 30 bp, Artificial Sequence
  Synthetic oligonucleotide
cgatcgaatagcactgcccggggcactaac

SEQ ID NO: 215575 - DNA, 30 bp, Artificial Sequence
  Synthetic oligonucleotide
cacctcagtgggggtataatgttgactaac

SEQ ID NO: 215576 - DNA, 30 bp, Artificial Sequence
  Synthetic oligonucleotide
cccatgaggaacccccgtcagtatactaac

SEQ ID NO: 215577 - DNA, 30 bp, Artificial Sequence
  Synthetic oligonucleotide
agctcgatccgacaggtttaccctactaac

SEQ ID NO: 215578 - DNA, 30 bp, Artificial Sequence
  Synthetic oligonucleotide
cacccctacaacgacagaggattccctaac

SEQ ID NO: 215579 - DNA, 30 bp, Artificial Sequence
  Synthetic oligonucleotide
gtttattgcaaacgggaaagatgagctaac

SEQ ID NO: 215580 - DNA, 30 bp, Artificial Sequence
  Synthetic oligonucleotide
aggctagacccacgagtctcccgtgctaac

SEQ ID NO: 215581 - DNA, 30 bp, Artificial Sequence
  Synthetic oligonucleotide
gttggacacataacgatacggtgtgctaac

SEQ ID NO: 215582 - DNA, 30 bp, Artificial Sequence
  Synthetic oligonucleotide
aagattcaggcaccatgcgggattgctaac

SEQ ID NO: 215583 - DNA, 30 bp, Artificial Sequence
  Synthetic oligonucleotide
ctagggacgtctattcacgagaaatctaac

SEQ ID NO: 215584 - DNA, 30 bp, Artificial Sequence
  Synthetic oligonucleotide
gtcgcgacagagggttaagtgtcatctaac

SEQ ID NO: 215585 - DNA, 30 bp, Artificial Sequence
  Synthetic oligonucleotide
gccgagcagcatcccattgttctatctaac

SEQ ID NO: 215586 - DNA, 30 bp, Artificial Sequence
  Synthetic oligonucleotide
ggccagggcatcggccgaaaaacgtctaac

SEQ ID NO: 215587 - DNA, 30 bp, Artificial Sequence
  Synthetic oligonucleotide
taggtgcctttaggactttagccgtctaac

SEQ ID NO: 215588 - DNA, 30 bp, Artificial Sequence
  Synthetic oligonucleotide
gtcccgagagaaggaaaaaggcggtctaac

SEQ ID NO: 215589 - DNA, 30 bp, Artificial Sequence
  Synthetic oligonucleotide
taccaacgccgtactgctgggacaagtaac

SEQ ID NO: 215590 - DNA, 30 bp, Artificial Sequence
  Synthetic oligonucleotide
accttgcatcagcaagaagcgaccagtaac

SEQ ID NO: 215591 - DNA, 30 bp, Artificial Sequence
  Synthetic oligonucleotide
ggttaaccggctttacagggtcccagtaac

SEQ ID NO: 215592 - DNA, 30 bp, Artificial Sequence
  Synthetic oligonucleotide
tgagaacgtaaatcgtagtcatgcagtaac

SEQ ID NO: 215593 - DNA, 30 bp, Artificial Sequence
  Synthetic oligonucleotide
ccaggggacccccccagtcaatcgagtaac

SEQ ID NO: 215594 - DNA, 30 bp, Artificial Sequence
  Synthetic oligonucleotide
tactaaatattctagcatattcggagtaac

SEQ ID NO: 215595 - DNA, 30 bp, Artificial Sequence
  Synthetic oligonucleotide
gtcaacagcgaactaatattattgagtaac

SEQ ID NO: 215596 - DNA, 30 bp, Artificial Sequence
  Synthetic oligonucleotide
cataggtaccatatcaggaattaacgtaac

SEQ ID NO: 215597 - DNA, 30 bp, Artificial Sequence
  Synthetic oligonucleotide
gccattttggaccgacttcggctccgtaac

SEQ ID NO: 215598 - DNA, 30 bp, Artificial Sequence
  Synthetic oligonucleotide
acccggtgccgaagtgtctgaacgcgtaac

SEQ ID NO: 215599 - DNA, 30 bp, Artificial Sequence
  Synthetic oligonucleotide
acgtacaaccccaagcagagtttgcgtaac

SEQ ID NO: 215600 - DNA, 30 bp, Artificial Sequence
  Synthetic oligonucleotide
acataatgcaagagtattagcttaggtaac

SEQ ID NO: 215601 - DNA, 30 bp, Artificial Sequence
  Synthetic oligonucleotide
gcaggaagtatctcacactgaggcggtaac

SEQ ID NO: 215602 - DNA, 30 bp, Artificial Sequence
  Synthetic oligonucleotide
cggcgcataccagggaaaaggtgcggtaac

SEQ ID NO: 215603 - DNA, 30 bp, Artificial Sequence
  Synthetic oligonucleotide
ggtcatcatgagactttcaattagggtaac

SEQ ID NO: 215604 - DNA, 30 bp, Artificial Sequence
  Synthetic oligonucleotide
aacatgggcagttaagttctcgcgggtaac

SEQ ID NO: 215605 - DNA, 30 bp, Artificial Sequence
  Synthetic oligonucleotide
tgaagtatgatagtgtaagtggggggtaac

SEQ ID NO: 215606 - DNA, 30 bp, Artificial Sequence
  Synthetic oligonucleotide
aggtccaattcagttaaacgacatggtaac

SEQ ID NO: 215607 - DNA, 30 bp, Artificial Sequence
  Synthetic oligonucleotide
gatggcgaagttctaaggtcaacatgtaac

SEQ ID NO: 215608 - DNA, 30 bp, Artificial Sequence
  Synthetic oligonucleotide
caggatccatagacgttaccaccatgtaac

SEQ ID NO: 215609 - DNA, 30 bp, Artificial Sequence
  Synthetic oligonucleotide
tgctaggccggatcgccttggatatgtaac

SEQ ID NO: 215610 - DNA, 30 bp, Artificial Sequence
  Synthetic oligonucleotide
accaggtgaagatcctcatcgacgtgtaac

SEQ ID NO: 215611 - DNA, 30 bp, Artificial Sequence
  Synthetic oligonucleotide
aaaggcgcgtcggcatgccaactttgtaac

SEQ ID NO: 215612 - DNA, 30 bp, Artificial Sequence
  Synthetic oligonucleotide
atcccgaacctgaggagaatacaaattaac

SEQ ID NO: 215613 - DNA, 30 bp, Artificial Sequence
  Synthetic oligonucleotide
acgggacagctagttctcgcgcaaattaac

SEQ ID NO: 215614 - DNA, 30 bp, Artificial Sequence
  Synthetic oligonucleotide
caatccaccggatacgtcggcggaattaac

SEQ ID NO: 215615 - DNA, 30 bp, Artificial Sequence
  Synthetic oligonucleotide
cgatctggaagataaatagccataattaac

SEQ ID NO: 215616 - DNA, 30 bp, Artificial Sequence
  Synthetic oligonucleotide
tctttgtgaaggaaactggcggtcattaac

SEQ ID NO: 215617 - DNA, 30 bp, Artificial Sequence
  Synthetic oligonucleotide
gaaacaccaccgacccgactacagattaac

SEQ ID NO: 215618 - DNA, 30 bp, Artificial Sequence
  Synthetic oligonucleotide
gaaataatgcctcaaaacagaggacttaac

SEQ ID NO: 215619 - DNA, 30 bp, Artificial Sequence
  Synthetic oligonucleotide
ggtggatgttttgtgccgcgatcccttaac

SEQ ID NO: 215620 - DNA, 30 bp, Artificial Sequence
  Synthetic oligonucleotide
caacgtacaatgtctcggcagggccttaac

SEQ ID NO: 215621 - DNA, 30 bp, Artificial Sequence
  Synthetic oligonucleotide
gtcggcttcagaggaggcgtggcgcttaac

SEQ ID NO: 215622 - DNA, 30 bp, Artificial Sequence
  Synthetic oligonucleotide
gtgagatgaaggagctcacgccggcttaac

SEQ ID NO: 215623 - DNA, 30 bp, Artificial Sequence
  Synthetic oligonucleotide
attgtctccgaagcccatgcggaagttaac

SEQ ID NO: 215624 - DNA, 30 bp, Artificial Sequence
  Synthetic oligonucleotide
tgtatcccgcgtcttccaaggggggttaac

SEQ ID NO: 215625 - DNA, 30 bp, Artificial Sequence
  Synthetic oligonucleotide
aatggtcctaggtataaggccaatgttaac

SEQ ID NO: 215626 - DNA, 30 bp, Artificial Sequence
  Synthetic oligonucleotide
tggtcaggttctcagtccatcgatgttaac

SEQ ID NO: 215627 - DNA, 30 bp, Artificial Sequence
  Synthetic oligonucleotide
tgaggcacggctcacatttacggtgttaac

SEQ ID NO: 215628 - DNA, 30 bp, Artificial Sequence
  Synthetic oligonucleotide
agcataaacgtaatagcaacgggatttaac

SEQ ID NO: 215629 - DNA, 30 bp, Artificial Sequence
  Synthetic oligonucleotide
agatccgacagtatgaggtcgttatttaac

SEQ ID NO: 215630 - DNA, 30 bp, Artificial Sequence
  Synthetic oligonucleotide
catatacagcattacgtggagacctttaac

SEQ ID NO: 215631 - DNA, 30 bp, Artificial Sequence
  Synthetic oligonucleotide
ggcaggataatgcggtttactgggaaacac

SEQ ID NO: 215632 - DNA, 30 bp, Artificial Sequence
  Synthetic oligonucleotide
aatagactagacgcggttaggcgtaaacac

SEQ ID NO: 215633 - DNA, 30 bp, Artificial Sequence
  Synthetic oligonucleotide
ttcagggacacatagactccttttaaacac

SEQ ID NO: 215634 - DNA, 30 bp, Artificial Sequence
  Synthetic oligonucleotide
gcgggcatgagcagtgtcgagtgacaacac

SEQ ID NO: 215635 - DNA, 30 bp, Artificial Sequence
  Synthetic oligonucleotide
tctgttcaatgacaataatggaggcaacac

SEQ ID NO: 215636 - DNA, 30 bp, Artificial Sequence
  Synthetic oligonucleotide
ggccgttgggatgaagtaacagggcaacac

SEQ ID NO: 215637 - DNA, 30 bp, Artificial Sequence
  Synthetic oligonucleotide
cgcgggaatagtcccaacagcgtcgaacac

SEQ ID NO: 215638 - DNA, 30 bp, Artificial Sequence
  Synthetic oligonucleotide
ttatgacctctgagagatggtgcggaacac

SEQ ID NO: 215639 - DNA, 30 bp, Artificial Sequence
  Synthetic oligonucleotide
taggcccgtatggaaacagaactggaacac

SEQ ID NO: 215640 - DNA, 30 bp, Artificial Sequence
  Synthetic oligonucleotide
tgtttatcaggaagactgttcactgaacac

SEQ ID NO: 215641 - DNA, 30 bp, Artificial Sequence
  Synthetic oligonucleotide
ttcactggcgcggaggctagatcttaacac

SEQ ID NO: 215642 - DNA, 30 bp, Artificial Sequence
  Synthetic oligonucleotide
cataatggccgggtttaaaaagtttaacac

SEQ ID NO: 215643 - DNA, 30 bp, Artificial Sequence
  Synthetic oligonucleotide
aggtggtcaccagtcattcacaaaacacac

SEQ ID NO: 215644 - DNA, 30 bp, Artificial Sequence
  Synthetic oligonucleotide
ctgttaacagagagatgctaggaaacacac

SEQ ID NO: 215645 - DNA, 30 bp, Artificial Sequence
  Synthetic oligonucleotide
cgcttctgaaggatccgcggaagcacacac

SEQ ID NO: 215646 - DNA, 30 bp, Artificial Sequence
  Synthetic oligonucleotide
attttcccaaccatatggagcccgacacac

SEQ ID NO: 215647 - DNA, 30 bp, Artificial Sequence
  Synthetic oligonucleotide
agcaggagggtccgcgatgacgaaccacac

SEQ ID NO: 215648 - DNA, 30 bp, Artificial Sequence
  Synthetic oligonucleotide
gtgagtagtacgctgatcttgtccccacac

SEQ ID NO: 215649 - DNA, 30 bp, Artificial Sequence
  Synthetic oligonucleotide
cactgcaacccgaaaaagacaggcccacac

SEQ ID NO: 215650 - DNA, 30 bp, Artificial Sequence
  Synthetic oligonucleotide
acaacgtgtccttggagctagggcccacac

SEQ ID NO: 215651 - DNA, 30 bp, Artificial Sequence
  Synthetic oligonucleotide
ctcctgcatatcaatcttcagaagccacac

SEQ ID NO: 215652 - DNA, 30 bp, Artificial Sequence
  Synthetic oligonucleotide
ttaccagggttccgcatgacgtccgcacac

SEQ ID NO: 215653 - DNA, 30 bp, Artificial Sequence
  Synthetic oligonucleotide
aggtacaatgagcggtaggaccgggcacac

SEQ ID NO: 215654 - DNA, 30 bp, Artificial Sequence
  Synthetic oligonucleotide
atggaaatcaacggacagagtcctgcacac

SEQ ID NO: 215655 - DNA, 30 bp, Artificial Sequence
  Synthetic oligonucleotide
ctgggttgcgtggaacaattaattgcacac

SEQ ID NO: 215656 - DNA, 30 bp, Artificial Sequence
  Synthetic oligonucleotide
aaatgtagctgcgaaactggtggatcacac

SEQ ID NO: 215657 - DNA, 30 bp, Artificial Sequence
  Synthetic oligonucleotide
tagtgacaagaccgggaaaaaaactcacac

SEQ ID NO: 215658 - DNA, 30 bp, Artificial Sequence
  Synthetic oligonucleotide
gggaggtcaaaaaccgtcaacctgtcacac

SEQ ID NO: 215659 - DNA, 30 bp, Artificial Sequence
  Synthetic oligonucleotide
tcttaggcaccggaattagtgtaaagacac

SEQ ID NO: 215660 - DNA, 30 bp, Artificial Sequence
  Synthetic oligonucleotide
tggcacatagatggatgccagaatagacac

SEQ ID NO: 215661 - DNA, 30 bp, Artificial Sequence
  Synthetic oligonucleotide
ggtaaacattgacggataaacgatagacac

SEQ ID NO: 215662 - DNA, 30 bp, Artificial Sequence
  Synthetic oligonucleotide
gcggaacgtgcatccaaggtcactagacac

SEQ ID NO: 215663 - DNA, 30 bp, Artificial Sequence
  Synthetic oligonucleotide
aagaatgggtctttcgaggggcttagacac

SEQ ID NO: 215664 - DNA, 30 bp, Artificial Sequence
  Synthetic oligonucleotide
cggctagacgggcctctagcgaaacgacac

SEQ ID NO: 215665 - DNA, 30 bp, Artificial Sequence
  Synthetic oligonucleotide
actgaacctacgaggatccggtaacgacac

SEQ ID NO: 215666 - DNA, 30 bp, Artificial Sequence
  Synthetic oligonucleotide
acatatcatggcgaaacaatgcaccgacac

SEQ ID NO: 215667 - DNA, 30 bp, Artificial Sequence
  Synthetic oligonucleotide
tcggccggtttcagggcgagataccgacac

SEQ ID NO: 215668 - DNA, 30 bp, Artificial Sequence
  Synthetic oligonucleotide
gacacgcataagagagcccgtcgccgacac

SEQ ID NO: 215669 - DNA, 30 bp, Artificial Sequence
  Synthetic oligonucleotide
caccgaggacgctgctcagctgatcgacac

SEQ ID NO: 215670 - DNA, 30 bp, Artificial Sequence
  Synthetic oligonucleotide
caacattcaatctggccttcgcctcgacac

SEQ ID NO: 215671 - DNA, 31 bp, Artificial Sequence
  Synthetic oligonucleotide
gtccttgcatgtggttgtactcgctcgacac

SEQ ID NO: 215672 - DNA, 30 bp, Artificial Sequence
  Synthetic oligonucleotide
acatgacattaaaaaattgcatttcgacac

SEQ ID NO: 215673 - DNA, 30 bp, Artificial Sequence
  Synthetic oligonucleotide
ccatagctgagatttaattgattaggacac

SEQ ID NO: 215674 - DNA, 30 bp, Artificial Sequence
  Synthetic oligonucleotide
gtgtttgattttgcaaaacaaccgggacac

SEQ ID NO: 215675 - DNA, 30 bp, Artificial Sequence
  Synthetic oligonucleotide
cgatactttctagacatacgatatggacac

SEQ ID NO: 215676 - DNA, 30 bp, Artificial Sequence
  Synthetic oligonucleotide
taaataagggatgcctgccctcctggacac

SEQ ID NO: 215677 - DNA, 30 bp, Artificial Sequence
  Synthetic oligonucleotide
ttcgcctacgttagacatactacatgacac

SEQ ID NO: 215678 - DNA, 30 bp, Artificial Sequence
  Synthetic oligonucleotide
gccagaatcacggtgaacatggagtgacac

SEQ ID NO: 215679 - DNA, 30 bp, Artificial Sequence
  Synthetic oligonucleotide
cgtaagagtgaattggcggtaataatacac

SEQ ID NO: 215680 - DNA, 30 bp, Artificial Sequence
  Synthetic oligonucleotide
aacacgaagtactaatttaggaatatacac

SEQ ID NO: 215681 - DNA, 30 bp, Artificial Sequence
  Synthetic oligonucleotide
gtcctggggggtgccgagctgaatatacac

SEQ ID NO: 215682 - DNA, 31 bp, Artificial Sequence
  Synthetic oligonucleotide
tcgttcagattgcattattgtccatatacac

SEQ ID NO: 215683 - DNA, 30 bp, Artificial Sequence
  Synthetic oligonucleotide
tacacttcgttaagggtcttggaactacac

SEQ ID NO: 215684 - DNA, 30 bp, Artificial Sequence
  Synthetic oligonucleotide
ctatgtcgtcattccgccgtgatactacac

SEQ ID NO: 215685 - DNA, 30 bp, Artificial Sequence
  Synthetic oligonucleotide
gaccggagcggaaatccacgcttcctacac

SEQ ID NO: 215686 - DNA, 30 bp, Artificial Sequence
  Synthetic oligonucleotide
aagttaatgcattaatactacaaagtacac

SEQ ID NO: 215687 - DNA, 30 bp, Artificial Sequence
  Synthetic oligonucleotide
tgggcccactaagatgctaacacagtacac

SEQ ID NO: 215688 - DNA, 30 bp, Artificial Sequence
  Synthetic oligonucleotide
gtgtcagctcagagtaggggttacgtacac

SEQ ID NO: 215689 - DNA, 30 bp, Artificial Sequence
  Synthetic oligonucleotide
ggagttcgaatcctttagcgttaggtacac

SEQ ID NO: 215690 - DNA, 30 bp, Artificial Sequence
  Synthetic oligonucleotide
ggtttactactagctgcccagagtgtacac

SEQ ID NO: 215691 - DNA, 30 bp, Artificial Sequence
  Synthetic oligonucleotide
aaagaaacggcgacatcgaacagcttacac

SEQ ID NO: 215692 - DNA, 30 bp, Artificial Sequence
  Synthetic oligonucleotide
tctggtctcatgtctatgaagaggttacac

SEQ ID NO: 215693 - DNA, 30 bp, Artificial Sequence
  Synthetic oligonucleotide
ccaagaggatatttaggtccacaaaaccac

SEQ ID NO: 215694 - DNA, 30 bp, Artificial Sequence
  Synthetic oligonucleotide
tagattgtatgaagatttaatggcaaccac

SEQ ID NO: 215695 - DNA, 30 bp, Artificial Sequence
  Synthetic oligonucleotide
taaccgtaaattgacccagaccagaaccac

SEQ ID NO: 215696 - DNA, 30 bp, Artificial Sequence
  Synthetic oligonucleotide
ctgttggttaccgagtagataaggaaccac

SEQ ID NO: 215697 - DNA, 30 bp, Artificial Sequence
  Synthetic oligonucleotide
tatcaccaaaatgttgcccactctaaccac

SEQ ID NO: 215698 - DNA, 29 bp, Artificial Sequence
  Synthetic oligonucleotide
acatttcacaaggcctacgtagccaccac

SEQ ID NO: 215699 - DNA, 30 bp, Artificial Sequence
  Synthetic oligonucleotide
agggcacctacactttcgaatacgcaccac

SEQ ID NO: 215700 - DNA, 30 bp, Artificial Sequence
  Synthetic oligonucleotide
attagccatatggccagggtcgtgcaccac

SEQ ID NO: 215701 - DNA, 30 bp, Artificial Sequence
  Synthetic oligonucleotide
tatggctagtgtgaaagggaagctcaccac

SEQ ID NO: 215702 - DNA, 30 bp, Artificial Sequence
  Synthetic oligonucleotide
ccgttacaatagagtttgtagtacgaccac

SEQ ID NO: 215703 - DNA, 30 bp, Artificial Sequence
  Synthetic oligonucleotide
cagctgaatggggtcgtggcgattgaccac

SEQ ID NO: 215704 - DNA, 30 bp, Artificial Sequence
  Synthetic oligonucleotide
aaaaggagtgaaccgtctgaccaaacccac

SEQ ID NO: 215705 - DNA, 30 bp, Artificial Sequence
  Synthetic oligonucleotide
gcttcggcttatcccggtagcgtaacccac

SEQ ID NO: 215706 - DNA, 30 bp, Artificial Sequence
  Synthetic oligonucleotide
atgcgggtgcctccgtgattgcagacccac

SEQ ID NO: 215707 - DNA, 30 bp, Artificial Sequence
  Synthetic oligonucleotide
ccggcgttcgggaaaagaggagatacccac

SEQ ID NO: 215708 - DNA, 30 bp, Artificial Sequence
  Synthetic oligonucleotide
agtataggttgagtgcaagtcgatacccac

SEQ ID NO: 215709 - DNA, 30 bp, Artificial Sequence
  Synthetic oligonucleotide
gtgtaaaaaaactgggatttaaaaccccac

SEQ ID NO: 215710 - DNA, 30 bp, Artificial Sequence
  Synthetic oligonucleotide
aggggtttcctgggaggcgtagaaccccac

SEQ ID NO: 215711 - DNA, 30 bp, Artificial Sequence
  Synthetic oligonucleotide
attaacgacacaactggcccacggccccac

SEQ ID NO: 215712 - DNA, 30 bp, Artificial Sequence
  Synthetic oligonucleotide
tcggggtgcaactggggtagcattccccac

SEQ ID NO: 215713 - DNA, 30 bp, Artificial Sequence
  Synthetic oligonucleotide
tgcccaatcctatctgcggggaccgcccac

SEQ ID NO: 215714 - DNA, 30 bp, Artificial Sequence
  Synthetic oligonucleotide
tctcgtggaatatattttgcagttgcccac

SEQ ID NO: 215715 - DNA, 30 bp, Artificial Sequence
  Synthetic oligonucleotide
aaccaccgggggtctctcggaaaatcccac

SEQ ID NO: 215716 - DNA, 30 bp, Artificial Sequence
  Synthetic oligonucleotide
acctatagagccagatgttcgagatcccac

SEQ ID NO: 215717 - DNA, 30 bp, Artificial Sequence
  Synthetic oligonucleotide
ccggaccgacacgattactccacctcccac

SEQ ID NO: 215718 - DNA, 30 bp, Artificial Sequence
  Synthetic oligonucleotide
atgtaaaatcacctgtgagtaatctcccac

SEQ ID NO: 215719 - DNA, 30 bp, Artificial Sequence
  Synthetic oligonucleotide
tgctgtcacgtttatacgcgatatagccac

SEQ ID NO: 215720 - DNA, 30 bp, Artificial Sequence
  Synthetic oligonucleotide
aaccgcattagcgttaagaagacccgccac

SEQ ID NO: 215721 - DNA, 30 bp, Artificial Sequence
  Synthetic oligonucleotide
gacctatgaaccgcggtggacgagcgccac

SEQ ID NO: 215722 - DNA, 30 bp, Artificial Sequence
  Synthetic oligonucleotide
gctgtgcttgtcgtagagaaaacgcgccac

SEQ ID NO: 215723 - DNA, 30 bp, Artificial Sequence
  Synthetic oligonucleotide
tgtaaacaagtccgatcacttagtcgccac

SEQ ID NO: 215724 - DNA, 30 bp, Artificial Sequence
  Synthetic oligonucleotide
gggtaacaagcggtaagtatgggtcgccac

SEQ ID NO: 215725 - DNA, 30 bp, Artificial Sequence
  Synthetic oligonucleotide
tcagtggtgtgatactacccatcaggccac

SEQ ID NO: 215726 - DNA, 30 bp, Artificial Sequence
  Synthetic oligonucleotide
gttgctgaagggtgggatcgtggaggccac

SEQ ID NO: 215727 - DNA, 30 bp, Artificial Sequence
  Synthetic oligonucleotide
tagcatccaatcgcgtaatggcacggccac

SEQ ID NO: 215728 - DNA, 30 bp, Artificial Sequence
  Synthetic oligonucleotide
tgtgacgcgtcaaagagtctaaccggccac

SEQ ID NO: 215729 - DNA, 30 bp, Artificial Sequence
  Synthetic oligonucleotide
tcgaagcgaggcaaataattatccggccac

SEQ ID NO: 215730 - DNA, 30 bp, Artificial Sequence
  Synthetic oligonucleotide
acttacacttgcaaattactactcggccac

SEQ ID NO: 215731 - DNA, 30 bp, Artificial Sequence
  Synthetic oligonucleotide
ttagctgggggaatgtctgctaagggccac

SEQ ID NO: 215732 - DNA, 30 bp, Artificial Sequence
  Synthetic oligonucleotide
tgaccttagctctagtcgccatagggccac

SEQ ID NO: 215733 - DNA, 30 bp, Artificial Sequence
  Synthetic oligonucleotide
gccaatatccaacatgtaagatagggccac

SEQ ID NO: 215734 - DNA, 30 bp, Artificial Sequence
  Synthetic oligonucleotide
gaaaatcaataataacctgaaccgggccac

SEQ ID NO: 215735 - DNA, 30 bp, Artificial Sequence
  Synthetic oligonucleotide
attatggtgaggtccgcgagtaaatgccac

SEQ ID NO: 215736 - DNA, 30 bp, Artificial Sequence
  Synthetic oligonucleotide
aagccacgactctcattgagacagtgccac

SEQ ID NO: 215737 - DNA, 30 bp, Artificial Sequence
  Synthetic oligonucleotide
gtcttaaaagagggcgtcaatgccatccac

SEQ ID NO: 215738 - DNA, 30 bp, Artificial Sequence
  Synthetic oligonucleotide
cacatggagattaggatacgccgcatccac

SEQ ID NO: 215739 - DNA, 30 bp, Artificial Sequence
  Synthetic oligonucleotide
ggctggccacgcaaagtagcgcatatccac

SEQ ID NO: 215740 - DNA, 30 bp, Artificial Sequence
  Synthetic oligonucleotide
ccgtcgctcaatctattgcagtgtatccac

SEQ ID NO: 215741 - DNA, 30 bp, Artificial Sequence
  Synthetic oligonucleotide
tgccaagagagagggaatacgccactccac

SEQ ID NO: 215742 - DNA, 30 bp, Artificial Sequence
  Synthetic oligonucleotide
ggataccgacaccatggtaccggcctccac

SEQ ID NO: 215743 - DNA, 30 bp, Artificial Sequence
  Synthetic oligonucleotide
cacacttgggaggctgtataggtcctccac

SEQ ID NO: 215744 - DNA, 30 bp, Artificial Sequence
  Synthetic oligonucleotide
cggtgtatcaacagaagtgcaactctccac

SEQ ID NO: 215745 - DNA, 30 bp, Artificial Sequence
  Synthetic oligonucleotide
cagtcagcgtcatctggggttcgggtccac

SEQ ID NO: 215746 - DNA, 31 bp, Artificial Sequence
  Synthetic oligonucleotide
atgtcagcggtacggggcacgcaatgtccac

SEQ ID NO: 215747 - DNA, 30 bp, Artificial Sequence
  Synthetic oligonucleotide
cacgattgaaagataagcgggtatgtccac

SEQ ID NO: 215748 - DNA, 30 bp, Artificial Sequence
  Synthetic oligonucleotide
gctgacaatgtcaatgaaggacttgtccac

SEQ ID NO: 215749 - DNA, 30 bp, Artificial Sequence
  Synthetic oligonucleotide
cacggctaaataaaaatccaatctttccac

SEQ ID NO: 215750 - DNA, 30 bp, Artificial Sequence
  Synthetic oligonucleotide
ttggcgaagaagcgcgatctccgtttccac

SEQ ID NO: 215751 - DNA, 30 bp, Artificial Sequence
  Synthetic oligonucleotide
accaacgcgcggtatacaaagacaaagcac

SEQ ID NO: 215752 - DNA, 30 bp, Artificial Sequence
  Synthetic oligonucleotide
aagagctttgggacaaccaaaccaaagcac

SEQ ID NO: 215753 - DNA, 31 bp, Artificial Sequence
  Synthetic oligonucleotide
cagtgttaagttacggaggcaaataaagcac

SEQ ID NO: 215754 - DNA, 30 bp, Artificial Sequence
  Synthetic oligonucleotide
acctcggcaagaagccaaacagtaaagcac

SEQ ID NO: 215755 - DNA, 30 bp, Artificial Sequence
  Synthetic oligonucleotide
gtattaccaagggtcaatgagaacaagcac

SEQ ID NO: 215756 - DNA, 30 bp, Artificial Sequence
  Synthetic oligonucleotide
ggaagacggaccatcatgcagttcaagcac

SEQ ID NO: 215757 - DNA, 30 bp, Artificial Sequence
  Synthetic oligonucleotide
cttcccaagtgggggcaccaaccgaagcac

SEQ ID NO: 215758 - DNA, 30 bp, Artificial Sequence
  Synthetic oligonucleotide
tatagactgttcggtactaagaataagcac

SEQ ID NO: 215759 - DNA, 30 bp, Artificial Sequence
  Synthetic oligonucleotide
ttctgaaagaagccgtcacctgtccagcac

SEQ ID NO: 215760 - DNA, 30 bp, Artificial Sequence
  Synthetic oligonucleotide
ctcgccacgtaattagtgggtccagagcac

SEQ ID NO: 215761 - DNA, 30 bp, Artificial Sequence
  Synthetic oligonucleotide
atattctctataactggaaagctagagcac

SEQ ID NO: 215762 - DNA, 30 bp, Artificial Sequence
  Synthetic oligonucleotide
tagtaggatagacgaattgcgctagagcac

SEQ ID NO: 215763 - DNA, 30 bp, Artificial Sequence
  Synthetic oligonucleotide
cagtagcggcgcctcaggttatccgagcac

SEQ ID NO: 215764 - DNA, 30 bp, Artificial Sequence
  Synthetic oligonucleotide
gctgctttttgcaactgtaatggggagcac

SEQ ID NO: 215765 - DNA, 30 bp, Artificial Sequence
  Synthetic oligonucleotide
gccagtatccggtgaccccatgtggagcac

SEQ ID NO: 215766 - DNA, 30 bp, Artificial Sequence
  Synthetic oligonucleotide
atggtgggtagcttctccctaagatagcac

SEQ ID NO: 215767 - DNA, 30 bp, Artificial Sequence
  Synthetic oligonucleotide
acttttaaggccgaacatgtacattagcac

SEQ ID NO: 215768 - DNA, 30 bp, Artificial Sequence
  Synthetic oligonucleotide
cacccaatgcaacgctgagttgattagcac

SEQ ID NO: 215769 - DNA, 30 bp, Artificial Sequence
  Synthetic oligonucleotide
caatgatggtcgagggtctagtcttagcac

SEQ ID NO: 215770 - DNA, 30 bp, Artificial Sequence
  Synthetic oligonucleotide
cgggggtacccagctgcaaaatcgccgcac

SEQ ID NO: 215771 - DNA, 30 bp, Artificial Sequence
  Synthetic oligonucleotide
atcactcagcggcgtcaaagggaagcgcac

SEQ ID NO: 215772 - DNA, 30 bp, Artificial Sequence
  Synthetic oligonucleotide
ttggtacaatctaaacaggttatagcgcac

SEQ ID NO: 215773 - DNA, 30 bp, Artificial Sequence
  Synthetic oligonucleotide
aaacccgcggggccgcacaccaatgcgcac

SEQ ID NO: 215774 - DNA, 30 bp, Artificial Sequence
  Synthetic oligonucleotide
cacggaggggttggttatatctgtgcgcac

SEQ ID NO: 215775 - DNA, 30 bp, Artificial Sequence
  Synthetic oligonucleotide
atcaggaagacaataatgttctgtgcgcac

SEQ ID NO: 215776 - DNA, 30 bp, Artificial Sequence
  Synthetic oligonucleotide
cgggcgtggtaaaacttcgcgatatcgcac

SEQ ID NO: 215777 - DNA, 30 bp, Artificial Sequence
  Synthetic oligonucleotide
atgggacgccggggttacgcccgctcgcac

SEQ ID NO: 215778 - DNA, 30 bp, Artificial Sequence
  Synthetic oligonucleotide
gatgacggcgtggaggagatttagtcgcac

SEQ ID NO: 215779 - DNA, 30 bp, Artificial Sequence
  Synthetic oligonucleotide
caagtggcgagtattaagctaacaaggcac

SEQ ID NO: 215780 - DNA, 30 bp, Artificial Sequence
  Synthetic oligonucleotide
ccattggaggaggaccgccgtagaaggcac

SEQ ID NO: 215781 - DNA, 30 bp, Artificial Sequence
  Synthetic oligonucleotide
cacaatgttcaggtgagggctttgaggcac

SEQ ID NO: 215782 - DNA, 30 bp, Artificial Sequence
  Synthetic oligonucleotide
taaaaatcggcgtgtggtagaagtaggcac

SEQ ID NO: 215783 - DNA, 30 bp, Artificial Sequence
  Synthetic oligonucleotide
gtatgatttaccacagatcaacaacggcac

SEQ ID NO: 215784 - DNA, 30 bp, Artificial Sequence
  Synthetic oligonucleotide
ggacgctagactggcgagcgctcacggcac

SEQ ID NO: 215785 - DNA, 30 bp, Artificial Sequence
  Synthetic oligonucleotide
aagattgttgatttttcttacagccggcac

SEQ ID NO: 215786 - DNA, 30 bp, Artificial Sequence
  Synthetic oligonucleotide
ggttccgaacaagaataagccgtgcggcac

SEQ ID NO: 215787 - DNA, 30 bp, Artificial Sequence
  Synthetic oligonucleotide
acactctggacaggcaatatcggtcggcac

SEQ ID NO: 215788 - DNA, 30 bp, Artificial Sequence
  Synthetic oligonucleotide
tagctatgggtgtagtccggcaatgggcac

SEQ ID NO: 215789 - DNA, 30 bp, Artificial Sequence
  Synthetic oligonucleotide
gtaatgtccagccgctcccccaaatggcac

SEQ ID NO: 215790 - DNA, 30 bp, Artificial Sequence
  Synthetic oligonucleotide
taatttgaactcgtttagtggccttggcac

SEQ ID NO: 215791 - DNA, 30 bp, Artificial Sequence
  Synthetic oligonucleotide
gttctagtccccatgaagtttaaaatgcac

SEQ ID NO: 215792 - DNA, 30 bp, Artificial Sequence
  Synthetic oligonucleotide
ggctaataacatatagattggtctatgcac

SEQ ID NO: 215793 - DNA, 30 bp, Artificial Sequence
  Synthetic oligonucleotide
agaaaggctaaaccaattgagctactgcac

SEQ ID NO: 215794 - DNA, 30 bp, Artificial Sequence
  Synthetic oligonucleotide
tggcccttatagcgagaattggggctgcac

SEQ ID NO: 215795 - DNA, 30 bp, Artificial Sequence
  Synthetic oligonucleotide
gcacccgtagatgcgcatacccaagtgcac

SEQ ID NO: 215796 - DNA, 30 bp, Artificial Sequence
  Synthetic oligonucleotide
ctaggtaattgataaataggtcaggtgcac

SEQ ID NO: 215797 - DNA, 30 bp, Artificial Sequence
  Synthetic oligonucleotide
gttaggccgtggactggccgtgaggtgcac

SEQ ID NO: 215798 - DNA, 30 bp, Artificial Sequence
  Synthetic oligonucleotide
gtgcagtgggagagtattttaagtgtgcac

SEQ ID NO: 215799 - DNA, 30 bp, Artificial Sequence
  Synthetic oligonucleotide
accaggcatacctctttgtagcaattgcac

SEQ ID NO: 215800 - DNA, 30 bp, Artificial Sequence
  Synthetic oligonucleotide
gccagggattagcgtcatgctatattgcac

SEQ ID NO: 215801 - DNA, 30 bp, Artificial Sequence
  Synthetic oligonucleotide
ctgcactaccactcataggagctattgcac

SEQ ID NO: 215802 - DNA, 30 bp, Artificial Sequence
  Synthetic oligonucleotide
cacaaagatagtcgacgggagaacttgcac

SEQ ID NO: 215803 - DNA, 30 bp, Artificial Sequence
  Synthetic oligonucleotide
ggatgatatgatgaaagtatccggttgcac

SEQ ID NO: 215804 - DNA, 30 bp, Artificial Sequence
  Synthetic oligonucleotide
cgatccggccagcgacagttgccgaatcac

SEQ ID NO: 215805 - DNA, 30 bp, Artificial Sequence
  Synthetic oligonucleotide
cttctgtcgagttgagagtccgcgaatcac

SEQ ID NO: 215806 - DNA, 30 bp, Artificial Sequence
  Synthetic oligonucleotide
acgtccttatactttgattcattgaatcac

SEQ ID NO: 215807 - DNA, 30 bp, Artificial Sequence
  Synthetic oligonucleotide
gttacttaaaactccgaaccgaagcatcac

SEQ ID NO: 215808 - DNA, 30 bp, Artificial Sequence
  Synthetic oligonucleotide
gatggacgttgagtttgttatgcgcatcac

SEQ ID NO: 215809 - DNA, 30 bp, Artificial Sequence
  Synthetic oligonucleotide
aagtcatgatgcacctgggaccatcatcac

SEQ ID NO: 215810 - DNA, 30 bp, Artificial Sequence
  Synthetic oligonucleotide
agcagaacacgacggagagtagatcatcac

SEQ ID NO: 215811 - DNA, 30 bp, Artificial Sequence
  Synthetic oligonucleotide
gggtacggtgtatataggcgggctcatcac

SEQ ID NO: 215812 - DNA, 30 bp, Artificial Sequence
  Synthetic oligonucleotide
gtagaccctccactaaatcactttcatcac

SEQ ID NO: 215813 - DNA, 30 bp, Artificial Sequence
  Synthetic oligonucleotide
ctgtagtatcacgatgttgacgtagatcac

SEQ ID NO: 215814 - DNA, 30 bp, Artificial Sequence
  Synthetic oligonucleotide
tcgtaccattccatttggcgtgacgatcac

SEQ ID NO: 215815 - DNA, 30 bp, Artificial Sequence
  Synthetic oligonucleotide
cggccctccggttacacactagtatatcac

SEQ ID NO: 215816 - DNA, 30 bp, Artificial Sequence
  Synthetic oligonucleotide
ggatcatccaggaggaatcaagattatcac

SEQ ID NO: 215817 - DNA, 30 bp, Artificial Sequence
  Synthetic oligonucleotide
gagctacgagagtctacgctatgttatcac

SEQ ID NO: 215818 - DNA, 31 bp, Artificial Sequence
  Synthetic oligonucleotide
aggtgggtgttagggttcgagtgtttatcac

SEQ ID NO: 215819 - DNA, 30 bp, Artificial Sequence
  Synthetic oligonucleotide
gggtccgtgtggatcggctataggactcac

SEQ ID NO: 215820 - DNA, 30 bp, Artificial Sequence
  Synthetic oligonucleotide
tgctagacaaatggatccgatgggactcac

SEQ ID NO: 215821 - DNA, 30 bp, Artificial Sequence
  Synthetic oligonucleotide
aagatttcaacggctaccgttcagcctcac

SEQ ID NO: 215822 - DNA, 30 bp, Artificial Sequence
  Synthetic oligonucleotide
ctatcacgactctttccggtcagtcctcac

SEQ ID NO: 215823 - DNA, 30 bp, Artificial Sequence
  Synthetic oligonucleotide
gtacggcctagagaaatcagaatggctcac

SEQ ID NO: 215824 - DNA, 30 bp, Artificial Sequence
  Synthetic oligonucleotide
gtacttccatgtattaaaacagtggctcac

SEQ ID NO: 215825 - DNA, 30 bp, Artificial Sequence
  Synthetic oligonucleotide
agatcattatgaactgactgatatgctcac

SEQ ID NO: 215826 - DNA, 30 bp, Artificial Sequence
  Synthetic oligonucleotide
ccacgatttaaaatgatatgaggatctcac

SEQ ID NO: 215827 - DNA, 30 bp, Artificial Sequence
  Synthetic oligonucleotide
aagaacgaatctagcgcataagtatctcac

SEQ ID NO: 215828 - DNA, 30 bp, Artificial Sequence
  Synthetic oligonucleotide
agtgttggggccttttctggatactctcac

SEQ ID NO: 215829 - DNA, 30 bp, Artificial Sequence
  Synthetic oligonucleotide
gctggaatgtcagatgcaccgccctctcac

SEQ ID NO: 215830 - DNA, 30 bp, Artificial Sequence
  Synthetic oligonucleotide
agagcgaaggacagtagcttgggctctcac

SEQ ID NO: 215831 - DNA, 30 bp, Artificial Sequence
  Synthetic oligonucleotide
ggtctatctcttaggatattggcgtctcac

SEQ ID NO: 215832 - DNA, 30 bp, Artificial Sequence
  Synthetic oligonucleotide
ctaaatcaccataagtttgacgaaagtcac

SEQ ID NO: 215833 - DNA, 30 bp, Artificial Sequence
  Synthetic oligonucleotide
tggcagatacttaaaaaatgctacagtcac

SEQ ID NO: 215834 - DNA, 30 bp, Artificial Sequence
  Synthetic oligonucleotide
gactgtaggtgtgtcatcaggaggcgtcac

SEQ ID NO: 215835 - DNA, 30 bp, Artificial Sequence
  Synthetic oligonucleotide
tggcgatcaaacggctaaatgatgcgtcac

SEQ ID NO: 215836 - DNA, 30 bp, Artificial Sequence
  Synthetic oligonucleotide
ggtctctgcacttagactatgatgcgtcac

SEQ ID NO: 215837 - DNA, 30 bp, Artificial Sequence
  Synthetic oligonucleotide
ccaggagtttgccatagcggggctcgtcac

SEQ ID NO: 215838 - DNA, 30 bp, Artificial Sequence
  Synthetic oligonucleotide
taatcggagtacggtccacttgtaggtcac

SEQ ID NO: 215839 - DNA, 30 bp, Artificial Sequence
  Synthetic oligonucleotide
tacataagaggatggtgcgcgtagggtcac

SEQ ID NO: 215840 - DNA, 30 bp, Artificial Sequence
  Synthetic oligonucleotide
cactaggtgcgtgacccagtgtagggtcac

SEQ ID NO: 215841 - DNA, 30 bp, Artificial Sequence
  Synthetic oligonucleotide
atgacagttggaattcaggccagatgtcac

SEQ ID NO: 215842 - DNA, 30 bp, Artificial Sequence
  Synthetic oligonucleotide
ttgtacccctcaaggaattgtcgatgtcac

SEQ ID NO: 215843 - DNA, 30 bp, Artificial Sequence
  Synthetic oligonucleotide
tataactagactccagacagacggtgtcac

SEQ ID NO: 215844 - DNA, 30 bp, Artificial Sequence
  Synthetic oligonucleotide
tgagaagatgcctaccccggcgtgtgtcac

SEQ ID NO: 215845 - DNA, 30 bp, Artificial Sequence
  Synthetic oligonucleotide
acctgtgtacatagcatgctgctttgtcac

SEQ ID NO: 215846 - DNA, 30 bp, Artificial Sequence
  Synthetic oligonucleotide
cctgcgcttgggccttaatggcaaattcac

SEQ ID NO: 215847 - DNA, 30 bp, Artificial Sequence
  Synthetic oligonucleotide
tcttcgaaatgtccctccacataaattcac

SEQ ID NO: 215848 - DNA, 30 bp, Artificial Sequence
  Synthetic oligonucleotide
aggcgtggcgtaacgacagtctcaattcac

SEQ ID NO: 215849 - DNA, 30 bp, Artificial Sequence
  Synthetic oligonucleotide
aaatggggggaatagccgtcgaagattcac

SEQ ID NO: 215850 - DNA, 30 bp, Artificial Sequence
  Synthetic oligonucleotide
tcttgcgcgatctgtctaacccagattcac

SEQ ID NO: 215851 - DNA, 30 bp, Artificial Sequence
  Synthetic oligonucleotide
taaagaagcatcgagggtgggtaacttcac

SEQ ID NO: 215852 - DNA, 30 bp, Artificial Sequence
  Synthetic oligonucleotide
cccatcagaatcgtttacgggacacttcac

SEQ ID NO: 215853 - DNA, 30 bp, Artificial Sequence
  Synthetic oligonucleotide
tgatgtaagtaattgaaaattgtacttcac

SEQ ID NO: 215854 - DNA, 30 bp, Artificial Sequence
  Synthetic oligonucleotide
gccttgatccatacttgtctgcagcttcac

SEQ ID NO: 215855 - DNA, 30 bp, Artificial Sequence
  Synthetic oligonucleotide
cctcggcagagctctactaacatgcttcac

SEQ ID NO: 215856 - DNA, 30 bp, Artificial Sequence
  Synthetic oligonucleotide
tgtattggctgccgggcgtgggcagttcac

SEQ ID NO: 215857 - DNA, 30 bp, Artificial Sequence
  Synthetic oligonucleotide
tggacttcacaccgtatcgattcagttcac

SEQ ID NO: 215858 - DNA, 30 bp, Artificial Sequence
  Synthetic oligonucleotide
tttgggcttactggatacacactagttcac

SEQ ID NO: 215859 - DNA, 30 bp, Artificial Sequence
  Synthetic oligonucleotide
gtgatgcactcaaagaaagtgaacgttcac

SEQ ID NO: 215860 - DNA, 30 bp, Artificial Sequence
  Synthetic oligonucleotide
tgcaaatacgtccgtcgtaaatacgttcac

SEQ ID NO: 215861 - DNA, 30 bp, Artificial Sequence
  Synthetic oligonucleotide
atcttaaggaagcccgtctgcgtcgttcac

SEQ ID NO: 215862 - DNA, 30 bp, Artificial Sequence
  Synthetic oligonucleotide
gggcggccgaagtattagagcgaggttcac

SEQ ID NO: 215863 - DNA, 30 bp, Artificial Sequence
  Synthetic oligonucleotide
gttcactgatggtgaaaggggccggttcac

SEQ ID NO: 215864 - DNA, 30 bp, Artificial Sequence
  Synthetic oligonucleotide
ggcaggtaaaacggcagtagagcggttcac

SEQ ID NO: 215865 - DNA, 30 bp, Artificial Sequence
  Synthetic oligonucleotide
ctttaagtcgccggaaggtagagggttcac

SEQ ID NO: 215866 - DNA, 30 bp, Artificial Sequence
  Synthetic oligonucleotide
tggttcatgagctaacagatccgggttcac

SEQ ID NO: 215867 - DNA, 30 bp, Artificial Sequence
  Synthetic oligonucleotide
atgtaatcttagttaagtagatgggttcac

SEQ ID NO: 215868 - DNA, 30 bp, Artificial Sequence
  Synthetic oligonucleotide
gggatcttgggctgtctcggtccatttcac

SEQ ID NO: 215869 - DNA, 30 bp, Artificial Sequence
  Synthetic oligonucleotide
agggcacgcagaacatctcctcacaaagac

SEQ ID NO: 215870 - DNA, 30 bp, Artificial Sequence
  Synthetic oligonucleotide
cagctggacagtggcagcgaggtcaaagac

SEQ ID NO: 215871 - DNA, 30 bp, Artificial Sequence
  Synthetic oligonucleotide
gtgcatatatattcggtatcatggaaagac

SEQ ID NO: 215872 - DNA, 30 bp, Artificial Sequence
  Synthetic oligonucleotide
ggcgactggcagaggtttgtcatgaaagac

SEQ ID NO: 215873 - DNA, 30 bp, Artificial Sequence
  Synthetic oligonucleotide
tcgtgtggcgcaatagccactgctaaagac

SEQ ID NO: 215874 - DNA, 30 bp, Artificial Sequence
  Synthetic oligonucleotide
ttccggggctacagggaaccagaacaagac

SEQ ID NO: 215875 - DNA, 30 bp, Artificial Sequence
  Synthetic oligonucleotide
gacattaccggtcaatcttgacgccaagac

SEQ ID NO: 215876 - DNA, 30 bp, Artificial Sequence
  Synthetic oligonucleotide
gccactcggctggttggactaggccaagac

SEQ ID NO: 215877 - DNA, 30 bp, Artificial Sequence
  Synthetic oligonucleotide
cggtaatgagtgtaccggctgttgcaagac

SEQ ID NO: 215878 - DNA, 30 bp, Artificial Sequence
  Synthetic oligonucleotide
gctcatattggaggacgtaagacagaagac

SEQ ID NO: 215879 - DNA, 30 bp, Artificial Sequence
  Synthetic oligonucleotide
gattgaataccagtgggaattagagaagac

SEQ ID NO: 215880 - DNA, 30 bp, Artificial Sequence
  Synthetic oligonucleotide
gctcgaggcgtttgtcaagaacgagaagac

SEQ ID NO: 215881 - DNA, 30 bp, Artificial Sequence
  Synthetic oligonucleotide
ccaacgtattgatccatcttctacgaagac

SEQ ID NO: 215882 - DNA, 30 bp, Artificial Sequence
  Synthetic oligonucleotide
tggattatcttccctacaacgggcgaagac

SEQ ID NO: 215883 - DNA, 30 bp, Artificial Sequence
  Synthetic oligonucleotide
gtaggcgtgggacggaatgagtcggaagac

SEQ ID NO: 215884 - DNA, 30 bp, Artificial Sequence
  Synthetic oligonucleotide
cacgcctttaatagtggacgaccataagac

SEQ ID NO: 215885 - DNA, 30 bp, Artificial Sequence
  Synthetic oligonucleotide
gaagccgagatcagcgcgaagttgtaagac

SEQ ID NO: 215886 - DNA, 30 bp, Artificial Sequence
  Synthetic oligonucleotide
gtaatggggtgaacggcctagccttaagac

SEQ ID NO: 215887 - DNA, 30 bp, Artificial Sequence
  Synthetic oligonucleotide
ttacaccccaggatctccaaaatttaagac

SEQ ID NO: 215888 - DNA, 30 bp, Artificial Sequence
  Synthetic oligonucleotide
aacattacgacttatcggtgttgcacagac

SEQ ID NO: 215889 - DNA, 30 bp, Artificial Sequence
  Synthetic oligonucleotide
caaagttctttgtaagtcagaaggacagac

SEQ ID NO: 215890 - DNA, 30 bp, Artificial Sequence
  Synthetic oligonucleotide
gggacatcgccatagtaaattcggacagac

SEQ ID NO: 215891 - DNA, 30 bp, Artificial Sequence
  Synthetic oligonucleotide
ggtcaaattttgggcgcagtcaatacagac

SEQ ID NO: 215892 - DNA, 30 bp, Artificial Sequence
  Synthetic oligonucleotide
ggatctgcggaataatccaaaactacagac

SEQ ID NO: 215893 - DNA, 30 bp, Artificial Sequence
  Synthetic oligonucleotide
cggatggtggtgagttcacatggtacagac

SEQ ID NO: 215894 - DNA, 30 bp, Artificial Sequence
  Synthetic oligonucleotide
agtttgggagtggaagtacccattacagac

SEQ ID NO: 215895 - DNA, 30 bp, Artificial Sequence
  Synthetic oligonucleotide
gaacttcaaaaaaccgcgctggttacagac

SEQ ID NO: 215896 - DNA, 30 bp, Artificial Sequence
  Synthetic oligonucleotide
cttgatccgtaagcgcccaaataaccagac

SEQ ID NO: 215897 - DNA, 30 bp, Artificial Sequence
  Synthetic oligonucleotide
ccctataagtgcatagcgggtcgaccagac

SEQ ID NO: 215898 - DNA, 30 bp, Artificial Sequence
  Synthetic oligonucleotide
ctaacgggtgcgtacgtacagtacccagac

SEQ ID NO: 215899 - DNA, 30 bp, Artificial Sequence
  Synthetic oligonucleotide
ggaccaatgtaacgccttcagtagccagac

SEQ ID NO: 215900 - DNA, 30 bp, Artificial Sequence
  Synthetic oligonucleotide
gcacaagaatatctccagtacgcgccagac

SEQ ID NO: 215901 - DNA, 30 bp, Artificial Sequence
  Synthetic oligonucleotide
aggctctatcatagcataatttcgccagac

SEQ ID NO: 215902 - DNA, 30 bp, Artificial Sequence
  Synthetic oligonucleotide
ttaagtagttcgagatccatgacagcagac

SEQ ID NO: 215903 - DNA, 30 bp, Artificial Sequence
  Synthetic oligonucleotide
cggctcaccagggagatgatttctgcagac

SEQ ID NO: 215904 - DNA, 30 bp, Artificial Sequence
  Synthetic oligonucleotide
acattatggtaaacgataccgaagtcagac

SEQ ID NO: 215905 - DNA, 30 bp, Artificial Sequence
  Synthetic oligonucleotide
cgctcatgggcatacggtgaaaattcagac

SEQ ID NO: 215906 - DNA, 30 bp, Artificial Sequence
  Synthetic oligonucleotide
gggtatgactagaattgaatgggaagagac

SEQ ID NO: 215907 - DNA, 30 bp, Artificial Sequence
  Synthetic oligonucleotide
atggcactgagctctgatggtttaagagac

SEQ ID NO: 215908 - DNA, 30 bp, Artificial Sequence
  Synthetic oligonucleotide
tgacgcaagtgccactgctatgcgagagac

SEQ ID NO: 215909 - DNA, 30 bp, Artificial Sequence
  Synthetic oligonucleotide
cgttcaccaggacagctacggcgtagagac

SEQ ID NO: 215910 - DNA, 30 bp, Artificial Sequence
  Synthetic oligonucleotide
cgtaattatattggttacgatggccgagac

SEQ ID NO: 215911 - DNA, 30 bp, Artificial Sequence
  Synthetic oligonucleotide
gatccctcatctaaggagtacgtccgagac

SEQ ID NO: 215912 - DNA, 30 bp, Artificial Sequence
  Synthetic oligonucleotide
ctagaattgcggctcgttagctggcgagac

SEQ ID NO: 215913 - DNA, 30 bp, Artificial Sequence
  Synthetic oligonucleotide
tttgctatccaacggaaaacaacaggagac

SEQ ID NO: 215914 - DNA, 30 bp, Artificial Sequence
  Synthetic oligonucleotide
ttcccctaccacgataagttaacgggagac

SEQ ID NO: 215915 - DNA, 30 bp, Artificial Sequence
  Synthetic oligonucleotide
agggataaactaagtgctcgcgggggagac

SEQ ID NO: 215916 - DNA, 30 bp, Artificial Sequence
  Synthetic oligonucleotide
catagcattcggtcgagccaaatctgagac

SEQ ID NO: 215917 - DNA, 30 bp, Artificial Sequence
  Synthetic oligonucleotide
aagaaagtcactggttgaggcgtctgagac

SEQ ID NO: 215918 - DNA, 30 bp, Artificial Sequence
  Synthetic oligonucleotide
atccatagtgtagattagggacagtgagac

SEQ ID NO: 215919 - DNA, 30 bp, Artificial Sequence
  Synthetic oligonucleotide
gtgctaggaggacggattgtgaattgagac

SEQ ID NO: 215920 - DNA, 30 bp, Artificial Sequence
  Synthetic oligonucleotide
attgtctccccaagtggagatggttgagac

SEQ ID NO: 215921 - DNA, 30 bp, Artificial Sequence
  Synthetic oligonucleotide
catagtgggcggttttggattggttgagac

SEQ ID NO: 215922 - DNA, 30 bp, Artificial Sequence
  Synthetic oligonucleotide
cgttcaattccaagcgaatatgaaatagac

SEQ ID NO: 215923 - DNA, 30 bp, Artificial Sequence
  Synthetic oligonucleotide
ctaacattactaggtaggttggtaatagac

SEQ ID NO: 215924 - DNA, 30 bp, Artificial Sequence
  Synthetic oligonucleotide
ttcttacgcgaccattgataaaagatagac

SEQ ID NO: 215925 - DNA, 30 bp, Artificial Sequence
  Synthetic oligonucleotide
aggcattgccccagccatattgagatagac

SEQ ID NO: 215926 - DNA, 30 bp, Artificial Sequence
  Synthetic oligonucleotide
catgcagagcacgccggccccatgatagac

SEQ ID NO: 215927 - DNA, 30 bp, Artificial Sequence
  Synthetic oligonucleotide
aggtaaacgtcttcacgatccgatatagac

SEQ ID NO: 215928 - DNA, 30 bp, Artificial Sequence
  Synthetic oligonucleotide
cttgggactataacttacgacgaactagac

SEQ ID NO: 215929 - DNA, 30 bp, Artificial Sequence
  Synthetic oligonucleotide
atccagcaactagggatccccggactagac

SEQ ID NO: 215930 - DNA, 30 bp, Artificial Sequence
  Synthetic oligonucleotide
gtatggcccataagccaccggaacctagac

SEQ ID NO: 215931 - DNA, 30 bp, Artificial Sequence
  Synthetic oligonucleotide
atgcccgttgcattttatcactagctagac

SEQ ID NO: 215932 - DNA, 30 bp, Artificial Sequence
  Synthetic oligonucleotide
gatatggaaaaggtcactaaagtagtagac

SEQ ID NO: 215933 - DNA, 30 bp, Artificial Sequence
  Synthetic oligonucleotide
catagcatccgttaagtgtccagcgtagac

SEQ ID NO: 215934 - DNA, 30 bp, Artificial Sequence
  Synthetic oligonucleotide
tattgccgccagcggcataaagcggtagac

SEQ ID NO: 215935 - DNA, 30 bp, Artificial Sequence
  Synthetic oligonucleotide
gactacaagttagcagaacgccgtgtagac

SEQ ID NO: 215936 - DNA, 30 bp, Artificial Sequence
  Synthetic oligonucleotide
agttctccagggacttaagagctattagac

SEQ ID NO: 215937 - DNA, 30 bp, Artificial Sequence
  Synthetic oligonucleotide
tgtggcagtagcacgtgttctcgtttagac

SEQ ID NO: 215938 - DNA, 30 bp, Artificial Sequence
  Synthetic oligonucleotide
actgtggctcctaagtcggtaataaacgac

SEQ ID NO: 215939 - DNA, 30 bp, Artificial Sequence
  Synthetic oligonucleotide
aagtctcagtagcagacccagtccaacgac

SEQ ID NO: 215940 - DNA, 30 bp, Artificial Sequence
  Synthetic oligonucleotide
tcaggtgatttcggctactgtgggaacgac

SEQ ID NO: 215941 - DNA, 30 bp, Artificial Sequence
  Synthetic oligonucleotide
gtagaacgattgcttaccgtctggaacgac

SEQ ID NO: 215942 - DNA, 30 bp, Artificial Sequence
  Synthetic oligonucleotide
tgaggcagggtgaccttccctggtaacgac

SEQ ID NO: 215943 - DNA, 30 bp, Artificial Sequence
  Synthetic oligonucleotide
gtgtagataagacaggtccgtaaacacgac

SEQ ID NO: 215944 - DNA, 30 bp, Artificial Sequence
  Synthetic oligonucleotide
gttagcgcatagacataggaataacacgac

SEQ ID NO: 215945 - DNA, 30 bp, Artificial Sequence
  Synthetic oligonucleotide
ggccgacgatacacatgggggacgcacgac

SEQ ID NO: 215946 - DNA, 30 bp, Artificial Sequence
  Synthetic oligonucleotide
ttagtacgatcaaatagtgcacttcacgac

SEQ ID NO: 215947 - DNA, 30 bp, Artificial Sequence
  Synthetic oligonucleotide
cgtaaaactccgcgtgcgggggcagacgac

SEQ ID NO: 215948 - DNA, 30 bp, Artificial Sequence
  Synthetic oligonucleotide
aagccggcctaaggtcgggggtgagacgac

SEQ ID NO: 215949 - DNA, 30 bp, Artificial Sequence
  Synthetic oligonucleotide
aacgcaatctgcctctagtttcacgacgac

SEQ ID NO: 215950 - DNA, 30 bp, Artificial Sequence
  Synthetic oligonucleotide
atacgggcttctactgaacgcttcgacgac

SEQ ID NO: 215951 - DNA, 30 bp, Artificial Sequence
  Synthetic oligonucleotide
agactaagacttcatactacaatggacgac

SEQ ID NO: 215952 - DNA, 30 bp, Artificial Sequence
  Synthetic oligonucleotide
gacattgaagttacgagcgctaactacgac

SEQ ID NO: 215953 - DNA, 30 bp, Artificial Sequence
  Synthetic oligonucleotide
tcggctgggaccaggccgcgttagtacgac

SEQ ID NO: 215954 - DNA, 30 bp, Artificial Sequence
  Synthetic oligonucleotide
ggacctcaaaaaattgcgggagtgtacgac

SEQ ID NO: 215955 - DNA, 30 bp, Artificial Sequence
  Synthetic oligonucleotide
gtcagtcattccaacaaggtttagaccgac

SEQ ID NO: 215956 - DNA, 30 bp, Artificial Sequence
  Synthetic oligonucleotide
ccgggagagttacttaaaaataggaccgac

SEQ ID NO: 215957 - DNA, 30 bp, Artificial Sequence
  Synthetic oligonucleotide
ttgggaaggggtgggggacgaactaccgac

SEQ ID NO: 215958 - DNA, 30 bp, Artificial Sequence
  Synthetic oligonucleotide
ccttgtcgacgccaatctggggtagccgac

SEQ ID NO: 215959 - DNA, 30 bp, Artificial Sequence
  Synthetic oligonucleotide
tagacggctaaggcttcgcaaccggccgac

SEQ ID NO: 215960 - DNA, 30 bp, Artificial Sequence
  Synthetic oligonucleotide
gcgactcatgacgcgcgcactgcggccgac

SEQ ID NO: 215961 - DNA, 30 bp, Artificial Sequence
  Synthetic oligonucleotide
gcttcttcacgaaggaatagccaaagcgac

SEQ ID NO: 215962 - DNA, 30 bp, Artificial Sequence
  Synthetic oligonucleotide
cctgcatatgggccaactctagaaagcgac

SEQ ID NO: 215963 - DNA, 30 bp, Artificial Sequence
  Synthetic oligonucleotide
gcaagcccagggtcaggagctcgcagcgac

SEQ ID NO: 215964 - DNA, 30 bp, Artificial Sequence
  Synthetic oligonucleotide
ccaagtatttgttgccctaccccgagcgac

SEQ ID NO: 215965 - DNA, 30 bp, Artificial Sequence
  Synthetic oligonucleotide
tttcgcataattccattcaagactagcgac

SEQ ID NO: 215966 - DNA, 30 bp, Artificial Sequence
  Synthetic oligonucleotide
ataccgctacctcggggataaccacgcgac

SEQ ID NO: 215967 - DNA, 30 bp, Artificial Sequence
  Synthetic oligonucleotide
cggggctcggctacaccaacgtcacgcgac

SEQ ID NO: 215968 - DNA, 30 bp, Artificial Sequence
  Synthetic oligonucleotide
atgacataatggctctatgaaacaggcgac

SEQ ID NO: 215969 - DNA, 30 bp, Artificial Sequence
  Synthetic oligonucleotide
ggaattggcaatctcgccattctcggcgac

SEQ ID NO: 215970 - DNA, 30 bp, Artificial Sequence
  Synthetic oligonucleotide
ggtcccatcattgactttaaaaatggcgac

SEQ ID NO: 215971 - DNA, 30 bp, Artificial Sequence
  Synthetic oligonucleotide
gttggtggaaaaaaggctttatgtggcgac

SEQ ID NO: 215972 - DNA, 30 bp, Artificial Sequence
  Synthetic oligonucleotide
ctgctcaccccggatggaatgcgatgcgac

SEQ ID NO: 215973 - DNA, 30 bp, Artificial Sequence
  Synthetic oligonucleotide
atatcgtgacgtaacaaatccatgtgcgac

SEQ ID NO: 215974 - DNA, 30 bp, Artificial Sequence
  Synthetic oligonucleotide
taaaggtggaactggctggttgattgcgac

SEQ ID NO: 215975 - DNA, 30 bp, Artificial Sequence
  Synthetic oligonucleotide
aatggcgggcgcagtccacgaacttgcgac

SEQ ID NO: 215976 - DNA, 30 bp, Artificial Sequence
  Synthetic oligonucleotide
ccggatttgtgttgcccctacccaatcgac

SEQ ID NO: 215977 - DNA, 30 bp, Artificial Sequence
  Synthetic oligonucleotide
tttgctaatatcttatcagtgcagctcgac

SEQ ID NO: 215978 - DNA, 30 bp, Artificial Sequence
  Synthetic oligonucleotide
ttgaagcaaggacctcgactcccgctcgac

SEQ ID NO: 215979 - DNA, 30 bp, Artificial Sequence
  Synthetic oligonucleotide
tcctacggctgggtacggcaaccagtcgac

SEQ ID NO: 215980 - DNA, 30 bp, Artificial Sequence
  Synthetic oligonucleotide
cctgagcttccatcggatagtggagtcgac

SEQ ID NO: 215981 - DNA, 30 bp, Artificial Sequence
  Synthetic oligonucleotide
gtgacattacgcggagttatcaaggtcgac

SEQ ID NO: 215982 - DNA, 30 bp, Artificial Sequence
  Synthetic oligonucleotide
taactcaccatacttacaggcccggtcgac

SEQ ID NO: 215983 - DNA, 30 bp, Artificial Sequence
  Synthetic oligonucleotide
gtaatatcttagcgtgcccggcgtgtcgac

SEQ ID NO: 215984 - DNA, 30 bp, Artificial Sequence
  Synthetic oligonucleotide
ttcttctagcaaatgccttacaaattcgac

SEQ ID NO: 215985 - DNA, 30 bp, Artificial Sequence
  Synthetic oligonucleotide
tagaaacgcgtagtcgtctaaaacttcgac

SEQ ID NO: 215986 - DNA, 30 bp, Artificial Sequence
  Synthetic oligonucleotide
accatcgggaatctagtgacccagttcgac

SEQ ID NO: 215987 - DNA, 29 bp, Artificial Sequence
  Synthetic oligonucleotide
gactaaccgctaatcattggtcgttcgac

SEQ ID NO: 215988 - DNA, 31 bp, Artificial Sequence
  Synthetic oligonucleotide
ttcggcgtggcgtccgcttgcggggttcgac

SEQ ID NO: 215989 - DNA, 30 bp, Artificial Sequence
  Synthetic oligonucleotide
gacaaccactatgggccaggaatgttcgac

SEQ ID NO: 215990 - DNA, 30 bp, Artificial Sequence
  Synthetic oligonucleotide
gacgtcaacatggtcaactttagtttcgac

SEQ ID NO: 215991 - DNA, 30 bp, Artificial Sequence
  Synthetic oligonucleotide
acagaccgtctagcttcgttgcgtttcgac

SEQ ID NO: 215992 - DNA, 30 bp, Artificial Sequence
  Synthetic oligonucleotide
ttcgggcaggtagacgatcgccaaaaggac

SEQ ID NO: 215993 - DNA, 30 bp, Artificial Sequence
  Synthetic oligonucleotide
atgggatatctcgtatagccccgaaaggac

SEQ ID NO: 215994 - DNA, 30 bp, Artificial Sequence
  Synthetic oligonucleotide
aatacgaagtccgtcaataatacgaaggac

SEQ ID NO: 215995 - DNA, 30 bp, Artificial Sequence
  Synthetic oligonucleotide
gaccccggatttacgctgtgagggaaggac

SEQ ID NO: 215996 - DNA, 30 bp, Artificial Sequence
  Synthetic oligonucleotide
tgtataggacagctatgcaaatttaaggac

SEQ ID NO: 215997 - DNA, 30 bp, Artificial Sequence
  Synthetic oligonucleotide
agtgtcgtgctactggcaacaagccaggac

SEQ ID NO: 215998 - DNA, 30 bp, Artificial Sequence
  Synthetic oligonucleotide
aaccgttggtgcgacgtacgtacagaggac

SEQ ID NO: 215999 - DNA, 30 bp, Artificial Sequence
  Synthetic oligonucleotide
accaggagccggcttcccgtaagagaggac

SEQ ID NO: 216000 - DNA, 30 bp, Artificial Sequence
  Synthetic oligonucleotide
cagacccgctacatcctacgtggagaggac

SEQ ID NO: 216001 - DNA, 30 bp, Artificial Sequence
  Synthetic oligonucleotide
cgacctctatgtgaagtgcccagggaggac

SEQ ID NO: 216002 - DNA, 30 bp, Artificial Sequence
  Synthetic oligonucleotide
ctgagggtgcaaaccctacgaatggaggac

SEQ ID NO: 216003 - DNA, 30 bp, Artificial Sequence
  Synthetic oligonucleotide
cacagtcagttggggggccagccataggac

SEQ ID NO: 216004 - DNA, 30 bp, Artificial Sequence
  Synthetic oligonucleotide
ctaagccggttctgtcaaaatccctaggac

SEQ ID NO: 216005 - DNA, 30 bp, Artificial Sequence
  Synthetic oligonucleotide
ctttgatagtcactgacacgcgagtaggac

SEQ ID NO: 216006 - DNA, 30 bp, Artificial Sequence
  Synthetic oligonucleotide
ggagaagggttattcgtcaggttttaggac

SEQ ID NO: 216007 - DNA, 30 bp, Artificial Sequence
  Synthetic oligonucleotide
gaacccgtgccgccctatagagaaacggac

SEQ ID NO: 216008 - DNA, 30 bp, Artificial Sequence
  Synthetic oligonucleotide
agcacatgcatgaccgatcctataacggac

SEQ ID NO: 216009 - DNA, 30 bp, Artificial Sequence
  Synthetic oligonucleotide
tggatgtcaagatttgcgccgctaacggac

SEQ ID NO: 216010 - DNA, 30 bp, Artificial Sequence
  Synthetic oligonucleotide
tacagaggtagagaccaattactgacggac

SEQ ID NO: 216011 - DNA, 30 bp, Artificial Sequence
  Synthetic oligonucleotide
ctgcgctcgacttggctcccttacccggac

SEQ ID NO: 216012 - DNA, 30 bp, Artificial Sequence
  Synthetic oligonucleotide
atagcggacagctggtatgtgcgtccggac

SEQ ID NO: 216013 - DNA, 30 bp, Artificial Sequence
  Synthetic oligonucleotide
cagggaagtcgaacaattggacttccggac

SEQ ID NO: 216014 - DNA, 30 bp, Artificial Sequence
  Synthetic oligonucleotide
atctgtcggttactacgaacaagagcggac

SEQ ID NO: 216015 - DNA, 30 bp, Artificial Sequence
  Synthetic oligonucleotide
ttaaagacttaagcatggaagtacgcggac

SEQ ID NO: 216016 - DNA, 30 bp, Artificial Sequence
  Synthetic oligonucleotide
ttcgtaactgtacatcccccgggggcggac

SEQ ID NO: 216017 - DNA, 30 bp, Artificial Sequence
  Synthetic oligonucleotide
atcttgggtatgcgattggtcactgcggac

SEQ ID NO: 216018 - DNA, 30 bp, Artificial Sequence
  Synthetic oligonucleotide
cagcaatagaatcggattagaggatcggac

SEQ ID NO: 216019 - DNA, 30 bp, Artificial Sequence
  Synthetic oligonucleotide
gcacgtccggaaacggattatacctcggac

SEQ ID NO: 216020 - DNA, 30 bp, Artificial Sequence
  Synthetic oligonucleotide
cgatgctgcccacaccaatgctcctcggac

SEQ ID NO: 216021 - DNA, 30 bp, Artificial Sequence
  Synthetic oligonucleotide
aggccaaaagttgaccgtcaacagtcggac

SEQ ID NO: 216022 - DNA, 30 bp, Artificial Sequence
  Synthetic oligonucleotide
gcggataggcatgaatattgaaattcggac

SEQ ID NO: 216023 - DNA, 30 bp, Artificial Sequence
  Synthetic oligonucleotide
gtactagtacacattgattaggcaagggac

SEQ ID NO: 216024 - DNA, 30 bp, Artificial Sequence
  Synthetic oligonucleotide
gggtccacaagaaccactatttgaagggac

SEQ ID NO: 216025 - DNA, 30 bp, Artificial Sequence
  Synthetic oligonucleotide
ggctcgattcccgaggatgcttctagggac

SEQ ID NO: 216026 - DNA, 30 bp, Artificial Sequence
  Synthetic oligonucleotide
cgttttgaaaaaataggaggtggacgggac

SEQ ID NO: 216027 - DNA, 30 bp, Artificial Sequence
  Synthetic oligonucleotide
gcgcgtcaacgttgtagctacccaggggac

SEQ ID NO: 216028 - DNA, 30 bp, Artificial Sequence
  Synthetic oligonucleotide
tccgggggttcgtgattactgagaggggac

SEQ ID NO: 216029 - DNA, 30 bp, Artificial Sequence
  Synthetic oligonucleotide
gcatcaccactctgtgtcggatgaggggac

SEQ ID NO: 216030 - DNA, 30 bp, Artificial Sequence
  Synthetic oligonucleotide
gtgtgtgcgtatagaactcactgaggggac

SEQ ID NO: 216031 - DNA, 30 bp, Artificial Sequence
  Synthetic oligonucleotide
tgctgttgggttacggggcgaataggggac

SEQ ID NO: 216032 - DNA, 30 bp, Artificial Sequence
  Synthetic oligonucleotide
tagccgcagatacaggtaatgtcgggggac

SEQ ID NO: 216033 - DNA, 30 bp, Artificial Sequence
  Synthetic oligonucleotide
gtcgcaaggttacagtgactactgggggac

SEQ ID NO: 216034 - DNA, 30 bp, Artificial Sequence
  Synthetic oligonucleotide
gagaacgacggtcgaggcgcaactggggac

SEQ ID NO: 216035 - DNA, 30 bp, Artificial Sequence
  Synthetic oligonucleotide
ttgtcataagcggctccatcaagtggggac

SEQ ID NO: 216036 - DNA, 30 bp, Artificial Sequence
  Synthetic oligonucleotide
tgcggaaagattgtactttagcgtggggac

SEQ ID NO: 216037 - DNA, 30 bp, Artificial Sequence
  Synthetic oligonucleotide
gaccgctacgctaatggaaattgtggggac

SEQ ID NO: 216038 - DNA, 30 bp, Artificial Sequence
  Synthetic oligonucleotide
agggtaacgacccgggggggtccatgggac

SEQ ID NO: 216039 - DNA, 30 bp, Artificial Sequence
  Synthetic oligonucleotide
ggtgcttgcggagtgtcatagcgatgggac

SEQ ID NO: 216040 - DNA, 30 bp, Artificial Sequence
  Synthetic oligonucleotide
gtcgggcgatacaaacaaacaggctgggac

SEQ ID NO: 216041 - DNA, 30 bp, Artificial Sequence
  Synthetic oligonucleotide
ctggcacgatgttatcatctgtagtgggac

SEQ ID NO: 216042 - DNA, 30 bp, Artificial Sequence
  Synthetic oligonucleotide
ttcgaagcagacgtaataaataggtgggac

SEQ ID NO: 216043 - DNA, 30 bp, Artificial Sequence
  Synthetic oligonucleotide
gacgacccttagccagaaaacgcttgggac

SEQ ID NO: 216044 - DNA, 30 bp, Artificial Sequence
  Synthetic oligonucleotide
ctcgcctcgcatcgtaagtaggccatggac

SEQ ID NO: 216045 - DNA, 30 bp, Artificial Sequence
  Synthetic oligonucleotide
tagtggtatcatctagcgactaatatggac

SEQ ID NO: 216046 - DNA, 30 bp, Artificial Sequence
  Synthetic oligonucleotide
cagtgcaacggactttcgggaagtatggac

SEQ ID NO: 216047 - DNA, 30 bp, Artificial Sequence
  Synthetic oligonucleotide
gatcatcggacggggctcagggtactggac

SEQ ID NO: 216048 - DNA, 30 bp, Artificial Sequence
  Synthetic oligonucleotide
attgccacacgctaacctagatctctggac

SEQ ID NO: 216049 - DNA, 30 bp, Artificial Sequence
  Synthetic oligonucleotide
gtcacacatttccgatggctaccagtggac

SEQ ID NO: 216050 - DNA, 30 bp, Artificial Sequence
  Synthetic oligonucleotide
atatctcgtagataatgcgggggagtggac

SEQ ID NO: 216051 - DNA, 30 bp, Artificial Sequence
  Synthetic oligonucleotide
gaacttcaaacccgatgctttaaggtggac

SEQ ID NO: 216052 - DNA, 30 bp, Artificial Sequence
  Synthetic oligonucleotide
cgtaaagaaatttaatagtgacttgtggac

SEQ ID NO: 216053 - DNA, 30 bp, Artificial Sequence
  Synthetic oligonucleotide
taggtcacgacccgaagacaggcattggac

SEQ ID NO: 216054 - DNA, 30 bp, Artificial Sequence
  Synthetic oligonucleotide
acgatgcctggcttgctcctggcattggac

SEQ ID NO: 216055 - DNA, 30 bp, Artificial Sequence
  Synthetic oligonucleotide
cggcgtacggcgttagagagtgtattggac

SEQ ID NO: 216056 - DNA, 30 bp, Artificial Sequence
  Synthetic oligonucleotide
tcaggctaggtaccttaattcgggttggac

SEQ ID NO: 216057 - DNA, 30 bp, Artificial Sequence
  Synthetic oligonucleotide
tcctgcccagcttgcaaacaggtgttggac

SEQ ID NO: 216058 - DNA, 30 bp, Artificial Sequence
  Synthetic oligonucleotide
gcgcgtgtaacggatgtatttaatttggac

SEQ ID NO: 216059 - DNA, 30 bp, Artificial Sequence
  Synthetic oligonucleotide
gccgtctgaggtcatggtttagttttggac

SEQ ID NO: 216060 - DNA, 30 bp, Artificial Sequence
  Synthetic oligonucleotide
ccagtgtgggacttggcatcggcaaatgac

SEQ ID NO: 216061 - DNA, 30 bp, Artificial Sequence
  Synthetic oligonucleotide
tttgcccgcggcaaacacaacgccaatgac

SEQ ID NO: 216062 - DNA, 30 bp, Artificial Sequence
  Synthetic oligonucleotide
gggagaaatgctcaatctgtgcctaatgac

SEQ ID NO: 216063 - DNA, 30 bp, Artificial Sequence
  Synthetic oligonucleotide
atggaaaccgacctgagaccatgacatgac

SEQ ID NO: 216064 - DNA, 30 bp, Artificial Sequence
  Synthetic oligonucleotide
aagggtaaacgtcctgaattaatacatgac

SEQ ID NO: 216065 - DNA, 30 bp, Artificial Sequence
  Synthetic oligonucleotide
cggctcgtaaaggtccgtgcaacccatgac

SEQ ID NO: 216066 - DNA, 30 bp, Artificial Sequence
  Synthetic oligonucleotide
cccgcatcgcctatacatagtgcccatgac

SEQ ID NO: 216067 - DNA, 30 bp, Artificial Sequence
  Synthetic oligonucleotide
gccacgaatcgtataatctataggcatgac

SEQ ID NO: 216068 - DNA, 30 bp, Artificial Sequence
  Synthetic oligonucleotide
tgaccgatacgcggttgggtctggcatgac

SEQ ID NO: 216069 - DNA, 30 bp, Artificial Sequence
  Synthetic oligonucleotide
atgatataatggggagccaggtatcatgac

SEQ ID NO: 216070 - DNA, 30 bp, Artificial Sequence
  Synthetic oligonucleotide
caagcctggatgtctcattaagctcatgac

SEQ ID NO: 216071 - DNA, 30 bp, Artificial Sequence
  Synthetic oligonucleotide
catcggaattatttggctggttgtcatgac

SEQ ID NO: 216072 - DNA, 30 bp, Artificial Sequence
  Synthetic oligonucleotide
tactatgaatgggtccagagaggagatgac

SEQ ID NO: 216073 - DNA, 30 bp, Artificial Sequence
  Synthetic oligonucleotide
gaagcagcctatgtagcggatctcgatgac

SEQ ID NO: 216074 - DNA, 30 bp, Artificial Sequence
  Synthetic oligonucleotide
agttgtggtaagatgggcccctatgatgac

SEQ ID NO: 216075 - DNA, 30 bp, Artificial Sequence
  Synthetic oligonucleotide
aaggttactgacacattgctgctatatgac

SEQ ID NO: 216076 - DNA, 30 bp, Artificial Sequence
  Synthetic oligonucleotide
gaggtctagtcgcacggaacccattatgac

SEQ ID NO: 216077 - DNA, 30 bp, Artificial Sequence
  Synthetic oligonucleotide
ttcctacatgaatacagtcactcaactgac

SEQ ID NO: 216078 - DNA, 30 bp, Artificial Sequence
  Synthetic oligonucleotide
tactggagctgcatggtaatgtccactgac

SEQ ID NO: 216079 - DNA, 30 bp, Artificial Sequence
  Synthetic oligonucleotide
catcagtatcaaactacgctttcgactgac

SEQ ID NO: 216080 - DNA, 30 bp, Artificial Sequence
  Synthetic oligonucleotide
tgaggttcaggtctagggtaatcccctgac

SEQ ID NO: 216081 - DNA, 30 bp, Artificial Sequence
  Synthetic oligonucleotide
aacgcgaggcctgcagctcattggcctgac

SEQ ID NO: 216082 - DNA, 30 bp, Artificial Sequence
  Synthetic oligonucleotide
gggttcaacgaactttatttagatcctgac

SEQ ID NO: 216083 - DNA, 30 bp, Artificial Sequence
  Synthetic oligonucleotide
gtctccaatttccgagataactacgctgac

SEQ ID NO: 216084 - DNA, 30 bp, Artificial Sequence
  Synthetic oligonucleotide
acggcgatccttattatttataccgctgac

SEQ ID NO: 216085 - DNA, 30 bp, Artificial Sequence
  Synthetic oligonucleotide
agagcacaatacgctgcgaagcgcgctgac

SEQ ID NO: 216086 - DNA, 30 bp, Artificial Sequence
  Synthetic oligonucleotide
gaagcggatccagatccatgcaaggctgac

SEQ ID NO: 216087 - DNA, 30 bp, Artificial Sequence
  Synthetic oligonucleotide
gaacgcgacaacagttacctagttgctgac

SEQ ID NO: 216088 - DNA, 30 bp, Artificial Sequence
  Synthetic oligonucleotide
cgctggtgtcaaccgcgctcagactctgac

SEQ ID NO: 216089 - DNA, 30 bp, Artificial Sequence
  Synthetic oligonucleotide
ttccttagagagggcattaatacgtctgac

SEQ ID NO: 216090 - DNA, 30 bp, Artificial Sequence
  Synthetic oligonucleotide
catatgggcatgctgcatagacaaagtgac

SEQ ID NO: 216091 - DNA, 30 bp, Artificial Sequence
  Synthetic oligonucleotide
gagtagtcttatttgatagtactaagtgac

SEQ ID NO: 216092 - DNA, 30 bp, Artificial Sequence
  Synthetic oligonucleotide
ttcgtattcacgtatgatatagtaagtgac

SEQ ID NO: 216093 - DNA, 30 bp, Artificial Sequence
  Synthetic oligonucleotide
gatagggtaaccgaaagcgccgacagtgac

SEQ ID NO: 216094 - DNA, 30 bp, Artificial Sequence
  Synthetic oligonucleotide
agtatgtagcctgatatttatctgagtgac

SEQ ID NO: 216095 - DNA, 30 bp, Artificial Sequence
  Synthetic oligonucleotide
tgagcctaatcggcgatattcgttagtgac

SEQ ID NO: 216096 - DNA, 30 bp, Artificial Sequence
  Synthetic oligonucleotide
agtcttaagggtgtttgaggtggccgtgac

SEQ ID NO: 216097 - DNA, 30 bp, Artificial Sequence
  Synthetic oligonucleotide
gctatagtggcgattctagtattccgtgac

SEQ ID NO: 216098 - DNA, 30 bp, Artificial Sequence
  Synthetic oligonucleotide
ataggaccgatgcgctatgcccggcgtgac

SEQ ID NO: 216099 - DNA, 30 bp, Artificial Sequence
  Synthetic oligonucleotide
cgaatagaccccatacgttacgctcgtgac

SEQ ID NO: 216100 - DNA, 30 bp, Artificial Sequence
  Synthetic oligonucleotide
cccggtacggtaatggcacctagtcgtgac

SEQ ID NO: 216101 - DNA, 30 bp, Artificial Sequence
  Synthetic oligonucleotide
ggggacaggcgaattggtccaggtcgtgac

SEQ ID NO: 216102 - DNA, 30 bp, Artificial Sequence
  Synthetic oligonucleotide
gaatgaaggtctatcgaatcgtgtggtgac

SEQ ID NO: 216103 - DNA, 30 bp, Artificial Sequence
  Synthetic oligonucleotide
acgcttaactttcttaagggagactgtgac

SEQ ID NO: 216104 - DNA, 30 bp, Artificial Sequence
  Synthetic oligonucleotide
ctgggcacgacgtatcatatcgtctgtgac

SEQ ID NO: 216105 - DNA, 30 bp, Artificial Sequence
  Synthetic oligonucleotide
ggtacgagagcttgggaggtcgtctgtgac

SEQ ID NO: 216106 - DNA, 30 bp, Artificial Sequence
  Synthetic oligonucleotide
actcccccttactggaagagcctgtgtgac

SEQ ID NO: 216107 - DNA, 30 bp, Artificial Sequence
  Synthetic oligonucleotide
ggttagtgtatttgcactacagcttgtgac

SEQ ID NO: 216108 - DNA, 30 bp, Artificial Sequence
  Synthetic oligonucleotide
cgctacttcttgacaatgttagtttgtgac

SEQ ID NO: 216109 - DNA, 30 bp, Artificial Sequence
  Synthetic oligonucleotide
agccaagcaagattacacacgtaaattgac

SEQ ID NO: 216110 - DNA, 30 bp, Artificial Sequence
  Synthetic oligonucleotide
gctttgccgagagcatataaccggattgac

SEQ ID NO: 216111 - DNA, 30 bp, Artificial Sequence
  Synthetic oligonucleotide
gcggagaaattggagcgtcctcgacttgac

SEQ ID NO: 216112 - DNA, 30 bp, Artificial Sequence
  Synthetic oligonucleotide
ccgggtcccaattaccggctgagccttgac

SEQ ID NO: 216113 - DNA, 30 bp, Artificial Sequence
  Synthetic oligonucleotide
gcgcatttggtgtaatgcctggcgcttgac

SEQ ID NO: 216114 - DNA, 30 bp, Artificial Sequence
  Synthetic oligonucleotide
tattggggcggagtctgacgttgggttgac

SEQ ID NO: 216115 - DNA, 30 bp, Artificial Sequence
  Synthetic oligonucleotide
cattcccagaaagctacgctgtaatttgac

SEQ ID NO: 216116 - DNA, 30 bp, Artificial Sequence
  Synthetic oligonucleotide
gcaagagcggggagtgctcgctgatttgac

SEQ ID NO: 216117 - DNA, 30 bp, Artificial Sequence
  Synthetic oligonucleotide
ccgtcgttttgatcagattgcgtatttgac

SEQ ID NO: 216118 - DNA, 30 bp, Artificial Sequence
  Synthetic oligonucleotide
agttatctgtgaccaagctcactgtttgac

SEQ ID NO: 216119 - DNA, 30 bp, Artificial Sequence
  Synthetic oligonucleotide
acgccggcggggacggagcgcgattttgac

SEQ ID NO: 216120 - DNA, 30 bp, Artificial Sequence
  Synthetic oligonucleotide
aggactcccggcacatcaaaccgaaaatac

SEQ ID NO: 216121 - DNA, 30 bp, Artificial Sequence
  Synthetic oligonucleotide
tgaacggaacacgttacacgatgcaaatac

SEQ ID NO: 216122 - DNA, 30 bp, Artificial Sequence
  Synthetic oligonucleotide
ggacgtgcgcaaacacgtgcgcggaaatac

SEQ ID NO: 216123 - DNA, 30 bp, Artificial Sequence
  Synthetic oligonucleotide
ggaggtgactgtatgagggaggttaaatac

SEQ ID NO: 216124 - DNA, 30 bp, Artificial Sequence
  Synthetic oligonucleotide
gcgaagccaaaagccagcgaatttaaatac

SEQ ID NO: 216125 - DNA, 30 bp, Artificial Sequence
  Synthetic oligonucleotide
tcaaggtctctccacagaacgccacaatac

SEQ ID NO: 216126 - DNA, 30 bp, Artificial Sequence
  Synthetic oligonucleotide
actttgccggtgatcttataagtacaatac

SEQ ID NO: 216127 - DNA, 30 bp, Artificial Sequence
  Synthetic oligonucleotide
agtgagaggagtgttatcttaccgcaatac

SEQ ID NO: 216128 - DNA, 30 bp, Artificial Sequence
  Synthetic oligonucleotide
ctgggtacggatcattctattgaggaatac

SEQ ID NO: 216129 - DNA, 30 bp, Artificial Sequence
  Synthetic oligonucleotide
actgtatactaaaggtaatcggtggaatac

SEQ ID NO: 216130 - DNA, 30 bp, Artificial Sequence
  Synthetic oligonucleotide
tcgactacaataacccgcactactgaatac

SEQ ID NO: 216131 - DNA, 30 bp, Artificial Sequence
  Synthetic oligonucleotide
tactccctagcaagacaggcccgtgaatac

SEQ ID NO: 216132 - DNA, 30 bp, Artificial Sequence
  Synthetic oligonucleotide
acgactccccgtaactccaaacgataatac

SEQ ID NO: 216133 - DNA, 30 bp, Artificial Sequence
  Synthetic oligonucleotide
tcgatgggatcaacagcgactctataatac

SEQ ID NO: 216134 - DNA, 30 bp, Artificial Sequence
  Synthetic oligonucleotide
aactattgtttgggaaatgacgactaatac

SEQ ID NO: 216135 - DNA, 30 bp, Artificial Sequence
  Synthetic oligonucleotide
agtaagtagttcctacgggaggactaatac

SEQ ID NO: 216136 - DNA, 30 bp, Artificial Sequence
  Synthetic oligonucleotide
ggtgaccagatggaggggtccatctaatac

SEQ ID NO: 216137 - DNA, 30 bp, Artificial Sequence
  Synthetic oligonucleotide
gacgtgttggtcgggtcacttaggtaatac

SEQ ID NO: 216138 - DNA, 30 bp, Artificial Sequence
  Synthetic oligonucleotide
atggcatctagtacgagtcgatattaatac

SEQ ID NO: 216139 - DNA, 30 bp, Artificial Sequence
  Synthetic oligonucleotide
gaggtcagtggaatggcccgaagttaatac

SEQ ID NO: 216140 - DNA, 30 bp, Artificial Sequence
  Synthetic oligonucleotide
caagctgatcgctcaacggtgcgttaatac

SEQ ID NO: 216141 - DNA, 30 bp, Artificial Sequence
  Synthetic oligonucleotide
atcaaaagagaggttaggacgctaacatac

SEQ ID NO: 216142 - DNA, 30 bp, Artificial Sequence
  Synthetic oligonucleotide
cctgagggactgacgctggatcccacatac

SEQ ID NO: 216143 - DNA, 31 bp, Artificial Sequence
  Synthetic oligonucleotide
aaggcaccagtgctggacacataggacatac

SEQ ID NO: 216144 - DNA, 30 bp, Artificial Sequence
  Synthetic oligonucleotide
aactgatgccgtacaaattccggcccatac

SEQ ID NO: 216145 - DNA, 30 bp, Artificial Sequence
  Synthetic oligonucleotide
ctgactaaggcatagagcacatgcgcatac

SEQ ID NO: 216146 - DNA, 30 bp, Artificial Sequence
  Synthetic oligonucleotide
ctgcgtctttgcttggatccaaaggcatac

SEQ ID NO: 216147 - DNA, 30 bp, Artificial Sequence
  Synthetic oligonucleotide
tgattatcaacggaacggatccaggcatac

SEQ ID NO: 216148 - DNA, 30 bp, Artificial Sequence
  Synthetic oligonucleotide
ctctagacacgtgtttgtgcagcggcatac

SEQ ID NO: 216149 - DNA, 30 bp, Artificial Sequence
  Synthetic oligonucleotide
ttagactcacacctcgcggacacctcatac

SEQ ID NO: 216150 - DNA, 30 bp, Artificial Sequence
  Synthetic oligonucleotide
aatcggcgttcgttcttcattagctcatac

SEQ ID NO: 216151 - DNA, 30 bp, Artificial Sequence
  Synthetic oligonucleotide
ttatgctaccttgcggcaaggtggtcatac

SEQ ID NO: 216152 - DNA, 30 bp, Artificial Sequence
  Synthetic oligonucleotide
aatatggcataattgccaccggcaagatac

SEQ ID NO: 216153 - DNA, 30 bp, Artificial Sequence
  Synthetic oligonucleotide
atgcagactacgcccaagatatgaagatac

SEQ ID NO: 216154 - DNA, 30 bp, Artificial Sequence
  Synthetic oligonucleotide
tcccgcagacccgggcgtggttgaagatac

SEQ ID NO: 216155 - DNA, 30 bp, Artificial Sequence
  Synthetic oligonucleotide
acacttgagtagacaagccagataagatac

SEQ ID NO: 216156 - DNA, 30 bp, Artificial Sequence
  Synthetic oligonucleotide
cgggggatgttgttcgtgtgacggagatac

SEQ ID NO: 216157 - DNA, 30 bp, Artificial Sequence
  Synthetic oligonucleotide
ggaggggataaaaacatggggcatagatac

SEQ ID NO: 216158 - DNA, 30 bp, Artificial Sequence
  Synthetic oligonucleotide
tccctcaccccactttgttgcgatagatac

SEQ ID NO: 216159 - DNA, 30 bp, Artificial Sequence
  Synthetic oligonucleotide
gggtccgccaatttaaggacaaaccgatac

SEQ ID NO: 216160 - DNA, 30 bp, Artificial Sequence
  Synthetic oligonucleotide
cagataatccttggagggtcctgccgatac

SEQ ID NO: 216161 - DNA, 30 bp, Artificial Sequence
  Synthetic oligonucleotide
agccgattaagtcgagaagctagaggatac

SEQ ID NO: 216162 - DNA, 30 bp, Artificial Sequence
  Synthetic oligonucleotide
cctgcagtcatcggtgcccaaacgggatac

SEQ ID NO: 216163 - DNA, 30 bp, Artificial Sequence
  Synthetic oligonucleotide
cctcgaatcgacggggtgacacatggatac

SEQ ID NO: 216164 - DNA, 30 bp, Artificial Sequence
  Synthetic oligonucleotide
tcgacgcgttctaactattatgcctgatac

SEQ ID NO: 216165 - DNA, 30 bp, Artificial Sequence
  Synthetic oligonucleotide
tattgtcgaacgatgttcagaggctgatac

SEQ ID NO: 216166 - DNA, 30 bp, Artificial Sequence
  Synthetic oligonucleotide
aatctagaggcgacagaaggcatgtgatac

SEQ ID NO: 216167 - DNA, 30 bp, Artificial Sequence
  Synthetic oligonucleotide
gttatacaataaagagctaatatgtgatac

SEQ ID NO: 216168 - DNA, 30 bp, Artificial Sequence
  Synthetic oligonucleotide
actccgggtcacactaaacgggtgtgatac

SEQ ID NO: 216169 - DNA, 30 bp, Artificial Sequence
  Synthetic oligonucleotide
catgatgtggagtggtctcgagaaatatac

SEQ ID NO: 216170 - DNA, 30 bp, Artificial Sequence
  Synthetic oligonucleotide
tatataaccgctcactgagctgaaatatac

SEQ ID NO: 216171 - DNA, 30 bp, Artificial Sequence
  Synthetic oligonucleotide
cacggaacgtaagtgtccctgtgaatatac

SEQ ID NO: 216172 - DNA, 30 bp, Artificial Sequence
  Synthetic oligonucleotide
acatattgagccggggtgcttgacatatac

SEQ ID NO: 216173 - DNA, 30 bp, Artificial Sequence
  Synthetic oligonucleotide
gcgttattagtgagccttagtcgcatatac

SEQ ID NO: 216174 - DNA, 30 bp, Artificial Sequence
  Synthetic oligonucleotide
atgatagtggaccatttgaccccgatatac

SEQ ID NO: 216175 - DNA, 30 bp, Artificial Sequence
  Synthetic oligonucleotide
aggaagagcagagtattagaccgtatatac

SEQ ID NO: 216176 - DNA, 30 bp, Artificial Sequence
  Synthetic oligonucleotide
atcttacaccgaacagcatttaaactatac

SEQ ID NO: 216177 - DNA, 30 bp, Artificial Sequence
  Synthetic oligonucleotide
gctagccgtcgcgatgacctggcgctatac

SEQ ID NO: 216178 - DNA, 30 bp, Artificial Sequence
  Synthetic oligonucleotide
gtgctgcacgaaagtcttgttgtagtatac

SEQ ID NO: 216179 - DNA, 30 bp, Artificial Sequence
  Synthetic oligonucleotide
tgaatgggaatggttaatctaatcgtatac

SEQ ID NO: 216180 - DNA, 30 bp, Artificial Sequence
  Synthetic oligonucleotide
ggtcatactagagttcaccgggtcgtatac

SEQ ID NO: 216181 - DNA, 30 bp, Artificial Sequence
  Synthetic oligonucleotide
gacacaacctgatgtcaacaccgattatac

SEQ ID NO: 216182 - DNA, 30 bp, Artificial Sequence
  Synthetic oligonucleotide
gtaccgctatgctggttgcccatacactac

SEQ ID NO: 216183 - DNA, 30 bp, Artificial Sequence
  Synthetic oligonucleotide
gtgggcgatacaaccgtaaacacccactac

SEQ ID NO: 216184 - DNA, 30 bp, Artificial Sequence
  Synthetic oligonucleotide
taaggtcagcgactggcggaagatcactac

SEQ ID NO: 216185 - DNA, 30 bp, Artificial Sequence
  Synthetic oligonucleotide
cgtgactgttatcagtaacgcgttcactac

SEQ ID NO: 216186 - DNA, 30 bp, Artificial Sequence
  Synthetic oligonucleotide
tcaaaagctactgtttcaaagccagactac

SEQ ID NO: 216187 - DNA, 30 bp, Artificial Sequence
  Synthetic oligonucleotide
gacgaaatttcggcaatcttatgagactac

SEQ ID NO: 216188 - DNA, 30 bp, Artificial Sequence
  Synthetic oligonucleotide
aagacaaacccccggtggtagatggactac

SEQ ID NO: 216189 - DNA, 30 bp, Artificial Sequence
  Synthetic oligonucleotide
accattgtacttggatccttgcctgactac

SEQ ID NO: 216190 - DNA, 30 bp, Artificial Sequence
  Synthetic oligonucleotide
cgaccttgtatcctacggtaattatactac

SEQ ID NO: 216191 - DNA, 30 bp, Artificial Sequence
  Synthetic oligonucleotide
caaaacaatatccttacatgtgagtactac

SEQ ID NO: 216192 - DNA, 30 bp, Artificial Sequence
  Synthetic oligonucleotide
aagtcaccaggaaccattctacattactac

SEQ ID NO: 216193 - DNA, 30 bp, Artificial Sequence
  Synthetic oligonucleotide
ttcctacgcgtactcgatcaacgttactac

SEQ ID NO: 216194 - DNA, 30 bp, Artificial Sequence
  Synthetic oligonucleotide
tcaagtacatggtcaagaagtaggacctac

SEQ ID NO: 216195 - DNA, 30 bp, Artificial Sequence
  Synthetic oligonucleotide
acagaggtacagaactcacgagatacctac

SEQ ID NO: 216196 - DNA, 30 bp, Artificial Sequence
  Synthetic oligonucleotide
tggaatgaacagaaagtactttgtacctac

SEQ ID NO: 216197 - DNA, 30 bp, Artificial Sequence
  Synthetic oligonucleotide
gcgatgtgaacatgtaaaggcgcaccctac

SEQ ID NO: 216198 - DNA, 30 bp, Artificial Sequence
  Synthetic oligonucleotide
agaggttttccacaggagatcacgccctac

SEQ ID NO: 216199 - DNA, 30 bp, Artificial Sequence
  Synthetic oligonucleotide
ccgaaatttaatgaaaaggcagctccctac

SEQ ID NO: 216200 - DNA, 30 bp, Artificial Sequence
  Synthetic oligonucleotide
gcaggttcagcgcaaatcttaatcgcctac

SEQ ID NO: 216201 - DNA, 30 bp, Artificial Sequence
  Synthetic oligonucleotide
caatcccttaatgatttatactcctcctac

SEQ ID NO: 216202 - DNA, 30 bp, Artificial Sequence
  Synthetic oligonucleotide
aagggtaccgtattataagaaaagagctac

SEQ ID NO: 216203 - DNA, 30 bp, Artificial Sequence
  Synthetic oligonucleotide
gctgcaatatgtgggatatcgactagctac

SEQ ID NO: 216204 - DNA, 30 bp, Artificial Sequence
  Synthetic oligonucleotide
gcatggaatacttctcgtcaaaggcgctac

SEQ ID NO: 216205 - DNA, 30 bp, Artificial Sequence
  Synthetic oligonucleotide
aaagaggctggttggacttggtatcgctac

SEQ ID NO: 216206 - DNA, 30 bp, Artificial Sequence
  Synthetic oligonucleotide
atacatacaactgggtgtaaccgaggctac

SEQ ID NO: 216207 - DNA, 30 bp, Artificial Sequence
  Synthetic oligonucleotide
aaagtcggccggtgtgaccatagcggctac

SEQ ID NO: 216208 - DNA, 30 bp, Artificial Sequence
  Synthetic oligonucleotide
ttgtaggtaatggacgaggcccgcggctac

SEQ ID NO: 216209 - DNA, 30 bp, Artificial Sequence
  Synthetic oligonucleotide
gttctaccgtgaaactgtgcaatcggctac

SEQ ID NO: 216210 - DNA, 30 bp, Artificial Sequence
  Synthetic oligonucleotide
gacgatctgatacaaggtgctccgggctac

SEQ ID NO: 216211 - DNA, 29 bp, Artificial Sequence
  Synthetic oligonucleotide
tcgcccatacgtaagcgaatgtgggctac

SEQ ID NO: 216212 - DNA, 30 bp, Artificial Sequence
  Synthetic oligonucleotide
tcatcgtcctcaaagcaccgtaatggctac

SEQ ID NO: 216213 - DNA, 30 bp, Artificial Sequence
  Synthetic oligonucleotide
ggaaaatatccttaaacttaaccgtgctac

SEQ ID NO: 216214 - DNA, 30 bp, Artificial Sequence
  Synthetic oligonucleotide
acagaatgcaagtacaccgagcaaatctac

SEQ ID NO: 216215 - DNA, 30 bp, Artificial Sequence
  Synthetic oligonucleotide
cgggagcgggattcatcgcatcacatctac

SEQ ID NO: 216216 - DNA, 30 bp, Artificial Sequence
  Synthetic oligonucleotide
taatagcaagagtggaagccatatatctac

SEQ ID NO: 216217 - DNA, 30 bp, Artificial Sequence
  Synthetic oligonucleotide
ttgattaggtttggacagtgaggcctctac

SEQ ID NO: 216218 - DNA, 30 bp, Artificial Sequence
  Synthetic oligonucleotide
aagggcacgctcatgcaagagtgcctctac

SEQ ID NO: 216219 - DNA, 30 bp, Artificial Sequence
  Synthetic oligonucleotide
ttgcgttacaaacaatgtactatgctctac

SEQ ID NO: 216220 - DNA, 30 bp, Artificial Sequence
  Synthetic oligonucleotide
tttcaggtataaatcggaggtatcgtctac

SEQ ID NO: 216221 - DNA, 30 bp, Artificial Sequence
  Synthetic oligonucleotide
acgcgagcctgagccagaaaactcgtctac

SEQ ID NO: 216222 - DNA, 30 bp, Artificial Sequence
  Synthetic oligonucleotide
gttctcaattaattttctcattgattctac

SEQ ID NO: 216223 - DNA, 30 bp, Artificial Sequence
  Synthetic oligonucleotide
ggacggatggggttcacttccggaaagtac

SEQ ID NO: 216224 - DNA, 30 bp, Artificial Sequence
  Synthetic oligonucleotide
agggccaaagtaatgtcgcgcaggaagtac

SEQ ID NO: 216225 - DNA, 30 bp, Artificial Sequence
  Synthetic oligonucleotide
ccgaactgctgggtaggagtctataagtac

SEQ ID NO: 216226 - DNA, 30 bp, Artificial Sequence
  Synthetic oligonucleotide
ggacgctatatggatatcttccctaagtac

SEQ ID NO: 216227 - DNA, 30 bp, Artificial Sequence
  Synthetic oligonucleotide
agtatacgggcatacaggagtagtaagtac

SEQ ID NO: 216228 - DNA, 30 bp, Artificial Sequence
  Synthetic oligonucleotide
acaatggactgttgaattgggctacagtac

SEQ ID NO: 216229 - DNA, 30 bp, Artificial Sequence
  Synthetic oligonucleotide
tccaccattgcgatggcgtagaaccagtac

SEQ ID NO: 216230 - DNA, 30 bp, Artificial Sequence
  Synthetic oligonucleotide
aggaaatctctcggggctaggcaccagtac

SEQ ID NO: 216231 - DNA, 30 bp, Artificial Sequence
  Synthetic oligonucleotide
tcttagacgaagggagttgaagaccagtac

SEQ ID NO: 216232 - DNA, 30 bp, Artificial Sequence
  Synthetic oligonucleotide
aggaaatcgcgacctatcatggtccagtac

SEQ ID NO: 216233 - DNA, 30 bp, Artificial Sequence
  Synthetic oligonucleotide
taaagcctcgtcagtggaccaaagcagtac

SEQ ID NO: 216234 - DNA, 30 bp, Artificial Sequence
  Synthetic oligonucleotide
ccaagtgggtgtacttacacggctcagtac

SEQ ID NO: 216235 - DNA, 30 bp, Artificial Sequence
  Synthetic oligonucleotide
tgattgctaaggcgtcagcgacgagagtac

SEQ ID NO: 216236 - DNA, 30 bp, Artificial Sequence
  Synthetic oligonucleotide
ttgtctaaagtctcaaggaacttcgagtac

SEQ ID NO: 216237 - DNA, 30 bp, Artificial Sequence
  Synthetic oligonucleotide
ctaggcgaatctggcagtgtcagtgagtac

SEQ ID NO: 216238 - DNA, 30 bp, Artificial Sequence
  Synthetic oligonucleotide
catcccttttgcgggagaaggcgtgagtac

SEQ ID NO: 216239 - DNA, 30 bp, Artificial Sequence
  Synthetic oligonucleotide
catttggtagacaaaccgctaggtgagtac

SEQ ID NO: 216240 - DNA, 30 bp, Artificial Sequence
  Synthetic oligonucleotide
acgacagcgtagtacgaggcaatatagtac

SEQ ID NO: 216241 - DNA, 30 bp, Artificial Sequence
  Synthetic oligonucleotide
ggacgccactgtaggttaattcactagtac

SEQ ID NO: 216242 - DNA, 30 bp, Artificial Sequence
  Synthetic oligonucleotide
tgacccacgagtaagtggggaaagtagtac

SEQ ID NO: 216243 - DNA, 30 bp, Artificial Sequence
  Synthetic oligonucleotide
ccatgctatgggttcagcctccagtagtac

SEQ ID NO: 216244 - DNA, 30 bp, Artificial Sequence
  Synthetic oligonucleotide
ggcatacatcgtatcaaatatgattagtac

SEQ ID NO: 216245 - DNA, 30 bp, Artificial Sequence
  Synthetic oligonucleotide
ttaatggaagagtttcacacgggttagtac

SEQ ID NO: 216246 - DNA, 30 bp, Artificial Sequence
  Synthetic oligonucleotide
cagcggcggctaatccctaggtcaacgtac

SEQ ID NO: 216247 - DNA, 30 bp, Artificial Sequence
  Synthetic oligonucleotide
ccagcggactcttaccatgtagacacgtac

SEQ ID NO: 216248 - DNA, 30 bp, Artificial Sequence
  Synthetic oligonucleotide
atagcactgcaaaggaaaagcgtcacgtac

SEQ ID NO: 216249 - DNA, 30 bp, Artificial Sequence
  Synthetic oligonucleotide
cgaagccggtatcggcgaagtcttccgtac

SEQ ID NO: 216250 - DNA, 30 bp, Artificial Sequence
  Synthetic oligonucleotide
cgtaggcagagagcttgatgttccgcgtac

SEQ ID NO: 216251 - DNA, 30 bp, Artificial Sequence
  Synthetic oligonucleotide
actgacatacaagcgctaaaacgtgcgtac

SEQ ID NO: 216252 - DNA, 30 bp, Artificial Sequence
  Synthetic oligonucleotide
caatatgttataagcctaaagattgcgtac

SEQ ID NO: 216253 - DNA, 30 bp, Artificial Sequence
  Synthetic oligonucleotide
cgggccccctcatatagtctatattcgtac

SEQ ID NO: 216254 - DNA, 30 bp, Artificial Sequence
  Synthetic oligonucleotide
acagtcacgtctacctatgcggcttcgtac

SEQ ID NO: 216255 - DNA, 30 bp, Artificial Sequence
  Synthetic oligonucleotide
atagctctgtggattgggtttgtaaggtac

SEQ ID NO: 216256 - DNA, 30 bp, Artificial Sequence
  Synthetic oligonucleotide
caaaagagaatggccactgagggcaggtac

SEQ ID NO: 216257 - DNA, 30 bp, Artificial Sequence
  Synthetic oligonucleotide
ccttttgcaaaaatgctgacccagaggtac

SEQ ID NO: 216258 - DNA, 30 bp, Artificial Sequence
  Synthetic oligonucleotide
ggcgtatggtatgtcaagtgttctaggtac

SEQ ID NO: 216259 - DNA, 30 bp, Artificial Sequence
  Synthetic oligonucleotide
gtcacatatggtcggtagggtacacggtac

SEQ ID NO: 216260 - DNA, 30 bp, Artificial Sequence
  Synthetic oligonucleotide
gggaggagctgctctgcatcacgccggtac

SEQ ID NO: 216261 - DNA, 30 bp, Artificial Sequence
  Synthetic oligonucleotide
tggaatgtgctggaccaacacgggcggtac

SEQ ID NO: 216262 - DNA, 30 bp, Artificial Sequence
  Synthetic oligonucleotide
agctgtcagattaggaccgtaattcggtac

SEQ ID NO: 216263 - DNA, 30 bp, Artificial Sequence
  Synthetic oligonucleotide
gcgagcagttaaactaggggaagcgggtac

SEQ ID NO: 216264 - DNA, 30 bp, Artificial Sequence
  Synthetic oligonucleotide
tcaagtttgtgacgacaattttatgggtac

SEQ ID NO: 216265 - DNA, 30 bp, Artificial Sequence
  Synthetic oligonucleotide
aacaaggtttggcctggagagagtgggtac

SEQ ID NO: 216266 - DNA, 30 bp, Artificial Sequence
  Synthetic oligonucleotide
aaggagggtgctccctataaacttgggtac

SEQ ID NO: 216267 - DNA, 30 bp, Artificial Sequence
  Synthetic oligonucleotide
ggtggtgatccaatcggcttgcgctggtac

SEQ ID NO: 216268 - DNA, 30 bp, Artificial Sequence
  Synthetic oligonucleotide
cacacctaactagcgtagcccagttggtac

SEQ ID NO: 216269 - DNA, 30 bp, Artificial Sequence
  Synthetic oligonucleotide
ctgagaccacgtggtcacgacctttggtac

SEQ ID NO: 216270 - DNA, 30 bp, Artificial Sequence
  Synthetic oligonucleotide
tgaggagtgccagttacttgcatactgtac

SEQ ID NO: 216271 - DNA, 30 bp, Artificial Sequence
  Synthetic oligonucleotide
tacgtggggtaccgcggcgggttactgtac

SEQ ID NO: 216272 - DNA, 30 bp, Artificial Sequence
  Synthetic oligonucleotide
gaccagacatccaatatgcaacgtctgtac

SEQ ID NO: 216273 - DNA, 30 bp, Artificial Sequence
  Synthetic oligonucleotide
atcgcgacataacagaccaaccaggtgtac

SEQ ID NO: 216274 - DNA, 30 bp, Artificial Sequence
  Synthetic oligonucleotide
tgggtggactgtgattgggttagggtgtac

SEQ ID NO: 216275 - DNA, 30 bp, Artificial Sequence
  Synthetic oligonucleotide
tcgcttccgccaatgacgagggtggtgtac

SEQ ID NO: 216276 - DNA, 30 bp, Artificial Sequence
  Synthetic oligonucleotide
ctgtgggtcttcgtgcacaggatattgtac

SEQ ID NO: 216277 - DNA, 30 bp, Artificial Sequence
  Synthetic oligonucleotide
ccttgactgtgccgaagatcggccttgtac

SEQ ID NO: 216278 - DNA, 30 bp, Artificial Sequence
  Synthetic oligonucleotide
gtgaatatcgtgttatggattcgcttgtac

SEQ ID NO: 216279 - DNA, 30 bp, Artificial Sequence
  Synthetic oligonucleotide
ataggtggatccagtcaggttggcttgtac

SEQ ID NO: 216280 - DNA, 30 bp, Artificial Sequence
  Synthetic oligonucleotide
ctttacctaagtgtgctacgtctcttgtac

SEQ ID NO: 216281 - DNA, 30 bp, Artificial Sequence
  Synthetic oligonucleotide
gctattgcgtggaggatttgaggtttgtac

SEQ ID NO: 216282 - DNA, 30 bp, Artificial Sequence
  Synthetic oligonucleotide
actttcaagtaggtaggggcgtgaaattac

SEQ ID NO: 216283 - DNA, 30 bp, Artificial Sequence
  Synthetic oligonucleotide
tacccgtggaatggataatatggtaattac

SEQ ID NO: 216284 - DNA, 30 bp, Artificial Sequence
  Synthetic oligonucleotide
atttgcgaaggcacccggacgagacattac

SEQ ID NO: 216285 - DNA, 30 bp, Artificial Sequence
  Synthetic oligonucleotide
ccaaggtcggaggattcaggcgcgcattac

SEQ ID NO: 216286 - DNA, 30 bp, Artificial Sequence
  Synthetic oligonucleotide
aataacgtagtaacatcgtagcatcattac

SEQ ID NO: 216287 - DNA, 30 bp, Artificial Sequence
  Synthetic oligonucleotide
aacggactggtaaccgtcgtgcgagattac

SEQ ID NO: 216288 - DNA, 30 bp, Artificial Sequence
  Synthetic oligonucleotide
aacctgtggctaaaacgaaaaaatgattac

SEQ ID NO: 216289 - DNA, 30 bp, Artificial Sequence
  Synthetic oligonucleotide
acacttatctggcaatgataagttgattac

SEQ ID NO: 216290 - DNA, 30 bp, Artificial Sequence
  Synthetic oligonucleotide
cattaattaccgaaaaacatccaatattac

SEQ ID NO: 216291 - DNA, 30 bp, Artificial Sequence
  Synthetic oligonucleotide
gtggtggtgggttgcggatggacgtattac

SEQ ID NO: 216292 - DNA, 30 bp, Artificial Sequence
  Synthetic oligonucleotide
gccgaaagacggtatgaggtaccgtattac

SEQ ID NO: 216293 - DNA, 30 bp, Artificial Sequence
  Synthetic oligonucleotide
cacggtagcgatggatgacgtgtttattac

SEQ ID NO: 216294 - DNA, 30 bp, Artificial Sequence
  Synthetic oligonucleotide
tgtatcgtaagaatcaataggcaaacttac

SEQ ID NO: 216295 - DNA, 30 bp, Artificial Sequence
  Synthetic oligonucleotide
gaatgtatgcgagagcacggaatgacttac

SEQ ID NO: 216296 - DNA, 30 bp, Artificial Sequence
  Synthetic oligonucleotide
tcgtaaagtatagactggcataaaccttac

SEQ ID NO: 216297 - DNA, 30 bp, Artificial Sequence
  Synthetic oligonucleotide
acttagggttggattgggatgagaccttac

SEQ ID NO: 216298 - DNA, 30 bp, Artificial Sequence
  Synthetic oligonucleotide
ttagtggatggggtcaaaacttagccttac

SEQ ID NO: 216299 - DNA, 30 bp, Artificial Sequence
  Synthetic oligonucleotide
ggtaggtgggggtacattatgtcagcttac

SEQ ID NO: 216300 - DNA, 30 bp, Artificial Sequence
  Synthetic oligonucleotide
cttagtcccaacaatctggagtgagcttac

SEQ ID NO: 216301 - DNA, 30 bp, Artificial Sequence
  Synthetic oligonucleotide
gtgtatcacggcgggtcacacagcgcttac

SEQ ID NO: 216302 - DNA, 30 bp, Artificial Sequence
  Synthetic oligonucleotide
agtactcaccgctagtcgtggctcgcttac

SEQ ID NO: 216303 - DNA, 30 bp, Artificial Sequence
  Synthetic oligonucleotide
tggatgtgcctttataatacgttcgcttac

SEQ ID NO: 216304 - DNA, 30 bp, Artificial Sequence
  Synthetic oligonucleotide
cactgcaaaacacgccggttattatcttac

SEQ ID NO: 216305 - DNA, 30 bp, Artificial Sequence
  Synthetic oligonucleotide
gcgagtaatttcgaactcgaatactcttac

SEQ ID NO: 216306 - DNA, 30 bp, Artificial Sequence
  Synthetic oligonucleotide
gacatcgaaatctgccactgttccagttac

SEQ ID NO: 216307 - DNA, 30 bp, Artificial Sequence
  Synthetic oligonucleotide
acgtccgaaacctaggtgtaccgcagttac

SEQ ID NO: 216308 - DNA, 30 bp, Artificial Sequence
  Synthetic oligonucleotide
ctcgttcggcggaattgttgacagagttac

SEQ ID NO: 216309 - DNA, 30 bp, Artificial Sequence
  Synthetic oligonucleotide
accctaagtaaggctataaaatcacgttac

SEQ ID NO: 216310 - DNA, 30 bp, Artificial Sequence
  Synthetic oligonucleotide
agctgaaactggagtacaagcatacgttac

SEQ ID NO: 216311 - DNA, 30 bp, Artificial Sequence
  Synthetic oligonucleotide
ccccgcatcgagaaatagtttgagcgttac

SEQ ID NO: 216312 - DNA, 30 bp, Artificial Sequence
  Synthetic oligonucleotide
ttgggcctcaggtctaggcacgttcgttac

SEQ ID NO: 216313 - DNA, 30 bp, Artificial Sequence
  Synthetic oligonucleotide
acgtgtcatataaaaagatgatttcgttac

SEQ ID NO: 216314 - DNA, 30 bp, Artificial Sequence
  Synthetic oligonucleotide
ccattgtagatataacttttaataggttac

SEQ ID NO: 216315 - DNA, 30 bp, Artificial Sequence
  Synthetic oligonucleotide
tattgatgcgagcgcggagtgcgcggttac

SEQ ID NO: 216316 - DNA, 30 bp, Artificial Sequence
  Synthetic oligonucleotide
acttcaggatgctgaagtgcggagggttac

SEQ ID NO: 216317 - DNA, 30 bp, Artificial Sequence
  Synthetic oligonucleotide
cggcattgtgccggagcctgtgcgggttac

SEQ ID NO: 216318 - DNA, 30 bp, Artificial Sequence
  Synthetic oligonucleotide
atcggcgcgatatcgatttatcggggttac

SEQ ID NO: 216319 - DNA, 30 bp, Artificial Sequence
  Synthetic oligonucleotide
tacgagtataacaagacacacacctgttac

SEQ ID NO: 216320 - DNA, 30 bp, Artificial Sequence
  Synthetic oligonucleotide
gttcaatatgatggttgagaccggtgttac

SEQ ID NO: 216321 - DNA, 30 bp, Artificial Sequence
  Synthetic oligonucleotide
ccaggacaagagaggttaggggtgtgttac

SEQ ID NO: 216322 - DNA, 30 bp, Artificial Sequence
  Synthetic oligonucleotide
cacccgggttgggacagaaggtaaatttac

SEQ ID NO: 216323 - DNA, 30 bp, Artificial Sequence
  Synthetic oligonucleotide
aacgccagtgctaaatttcgagccatttac

SEQ ID NO: 216324 - DNA, 30 bp, Artificial Sequence
  Synthetic oligonucleotide
agctgatcacttgtgtgagggatgatttac

SEQ ID NO: 216325 - DNA, 30 bp, Artificial Sequence
  Synthetic oligonucleotide
acacagtttgaggccacgaggcctatttac

SEQ ID NO: 216326 - DNA, 30 bp, Artificial Sequence
  Synthetic oligonucleotide
agggccgcgaaaagcgtagacgtactttac

SEQ ID NO: 216327 - DNA, 30 bp, Artificial Sequence
  Synthetic oligonucleotide
taattgtgaaggagagtgccgttgctttac

SEQ ID NO: 216328 - DNA, 30 bp, Artificial Sequence
  Synthetic oligonucleotide
gcaacagaggggtaagattagccggtttac

SEQ ID NO: 216329 - DNA, 30 bp, Artificial Sequence
  Synthetic oligonucleotide
gccatgcagagagggtagtaccgggtttac

SEQ ID NO: 216330 - DNA, 30 bp, Artificial Sequence
  Synthetic oligonucleotide
tcagcaccgagtcaatataatcaattttac

SEQ ID NO: 216331 - DNA, 30 bp, Artificial Sequence
  Synthetic oligonucleotide
acacactcacgggacagtttggacttttac

SEQ ID NO: 216332 - DNA, 30 bp, Artificial Sequence
  Synthetic oligonucleotide
taggataatcatcagcctcacatcttttac

SEQ ID NO: 216333 - DNA, 30 bp, Artificial Sequence
  Synthetic oligonucleotide
tagatccccaggaccggactcaagttttac

SEQ ID NO: 216334 - DNA, 30 bp, Artificial Sequence
  Synthetic oligonucleotide
ggcgggtcgagtgctggccgacagttttac

SEQ ID NO: 216335 - DNA, 30 bp, Artificial Sequence
  Synthetic oligonucleotide
ataagacctagagagttgaaattgttttac

SEQ ID NO: 216336 - DNA, 30 bp, Artificial Sequence
  Synthetic oligonucleotide
gaagatgatcaatgcattaccacaaaaacc

SEQ ID NO: 216337 - DNA, 30 bp, Artificial Sequence
  Synthetic oligonucleotide
gaaagacattcctggggccagggaaaaacc

SEQ ID NO: 216338 - DNA, 30 bp, Artificial Sequence
  Synthetic oligonucleotide
atcagcagtcaagcctgtatagggaaaacc

SEQ ID NO: 216339 - DNA, 30 bp, Artificial Sequence
  Synthetic oligonucleotide
atggtgggactatgcggccggaataaaacc

SEQ ID NO: 216340 - DNA, 30 bp, Artificial Sequence
  Synthetic oligonucleotide
caaggttcgcaaagcccagtcagtaaaacc

SEQ ID NO: 216341 - DNA, 30 bp, Artificial Sequence
  Synthetic oligonucleotide
tctgtgggttacccgggacctcaacaaacc

SEQ ID NO: 216342 - DNA, 30 bp, Artificial Sequence
  Synthetic oligonucleotide
ttcatgtatttcttatcgacctcacaaacc

SEQ ID NO: 216343 - DNA, 30 bp, Artificial Sequence
  Synthetic oligonucleotide
aggacaatatctatcacagtgtcacaaacc

SEQ ID NO: 216344 - DNA, 30 bp, Artificial Sequence
  Synthetic oligonucleotide
tatgacggggtaatcagaaagtgcgaaacc

SEQ ID NO: 216345 - DNA, 30 bp, Artificial Sequence
  Synthetic oligonucleotide
ggacctaatccaccatgtttactcgaaacc

SEQ ID NO: 216346 - DNA, 30 bp, Artificial Sequence
  Synthetic oligonucleotide
taccacccagtgggttctcaagaggaaacc

SEQ ID NO: 216347 - DNA, 30 bp, Artificial Sequence
  Synthetic oligonucleotide
ataagcgcggcgtgggtcggaacggaaacc

SEQ ID NO: 216348 - DNA, 30 bp, Artificial Sequence
  Synthetic oligonucleotide
ctggtctgatcgtgcagggtggcggaaacc

SEQ ID NO: 216349 - DNA, 30 bp, Artificial Sequence
  Synthetic oligonucleotide
tctggcgctcggtttgcaagtgtggaaacc

SEQ ID NO: 216350 - DNA, 30 bp, Artificial Sequence
  Synthetic oligonucleotide
cctgactgtgccaaaaaactcatataaacc

SEQ ID NO: 216351 - DNA, 30 bp, Artificial Sequence
  Synthetic oligonucleotide
gttacattatagccacaatccacctaaacc

SEQ ID NO: 216352 - DNA, 30 bp, Artificial Sequence
  Synthetic oligonucleotide
tgatagagcttcacttggctggggtaaacc

SEQ ID NO: 216353 - DNA, 30 bp, Artificial Sequence
  Synthetic oligonucleotide
gggggggtcaacctttcccgcctgtaaacc

SEQ ID NO: 216354 - DNA, 30 bp, Artificial Sequence
  Synthetic oligonucleotide
taagaaatagggggaatgcaatgaacaacc

SEQ ID NO: 216355 - DNA, 30 bp, Artificial Sequence
  Synthetic oligonucleotide
cgattctaaaaatatttcggagagacaacc

SEQ ID NO: 216356 - DNA, 30 bp, Artificial Sequence
  Synthetic oligonucleotide
cggtcaactgaccgttgcacgtagacaacc

SEQ ID NO: 216357 - DNA, 30 bp, Artificial Sequence
  Synthetic oligonucleotide
gtaacgaagggtggtgtattgtggacaacc

SEQ ID NO: 216358 - DNA, 30 bp, Artificial Sequence
  Synthetic oligonucleotide
gatctcaactagccattaacgtatacaacc

SEQ ID NO: 216359 - DNA, 30 bp, Artificial Sequence
  Synthetic oligonucleotide
gggccctttttaaggtgacacgttccaacc

SEQ ID NO: 216360 - DNA, 30 bp, Artificial Sequence
  Synthetic oligonucleotide
ccgagagtcaaataaactcacaccgcaacc

SEQ ID NO: 216361 - DNA, 30 bp, Artificial Sequence
  Synthetic oligonucleotide
tgtggtttcggcatatggggacaatcaacc

SEQ ID NO: 216362 - DNA, 30 bp, Artificial Sequence
  Synthetic oligonucleotide
ctactgtcatggccctgcagacgctcaacc

SEQ ID NO: 216363 - DNA, 30 bp, Artificial Sequence
  Synthetic oligonucleotide
ctagtctcatcaagctacaacaagtcaacc

SEQ ID NO: 216364 - DNA, 30 bp, Artificial Sequence
  Synthetic oligonucleotide
tcggtccatcaagactttctacggtcaacc

SEQ ID NO: 216365 - DNA, 30 bp, Artificial Sequence
  Synthetic oligonucleotide
cgtattaatcttgtgcaaactatgtcaacc

SEQ ID NO: 216366 - DNA, 30 bp, Artificial Sequence
  Synthetic oligonucleotide
cttggatgagggttcgggaaactgtcaacc

SEQ ID NO: 216367 - DNA, 30 bp, Artificial Sequence
  Synthetic oligonucleotide
tgcacaattccaattacaaagggaagaacc

SEQ ID NO: 216368 - DNA, 30 bp, Artificial Sequence
  Synthetic oligonucleotide
ccttcaaaaattcgtacattgcaacgaacc

SEQ ID NO: 216369 - DNA, 30 bp, Artificial Sequence
  Synthetic oligonucleotide
agtcgtcgaagaccttgtgccacccgaacc

SEQ ID NO: 216370 - DNA, 30 bp, Artificial Sequence
  Synthetic oligonucleotide
aaccgccataactatacagtgtctcgaacc

SEQ ID NO: 216371 - DNA, 30 bp, Artificial Sequence
  Synthetic oligonucleotide
acacacgccctgttccaaggcggtcgaacc

SEQ ID NO: 216372 - DNA, 30 bp, Artificial Sequence
  Synthetic oligonucleotide
tcattacggatatggaccaaccaaggaacc

SEQ ID NO: 216373 - DNA, 31 bp, Artificial Sequence
  Synthetic oligonucleotide
atgctgaacagcggcttcgcatacgggaacc

SEQ ID NO: 216374 - DNA, 30 bp, Artificial Sequence
  Synthetic oligonucleotide
gagaatgagaactgccaattcgctggaacc

SEQ ID NO: 216375 - DNA, 30 bp, Artificial Sequence
  Synthetic oligonucleotide
tagcaaatccgttgatcgtggtgatgaacc

SEQ ID NO: 216376 - DNA, 30 bp, Artificial Sequence
  Synthetic oligonucleotide
agatcgtgttgttaaaaaagcctctgaacc

SEQ ID NO: 216377 - DNA, 30 bp, Artificial Sequence
  Synthetic oligonucleotide
gtgaaaccaaatctataaaaggagtgaacc

SEQ ID NO: 216378 - DNA, 30 bp, Artificial Sequence
  Synthetic oligonucleotide
gaccgatcttgtccaacactcgtgataacc

SEQ ID NO: 216379 - DNA, 30 bp, Artificial Sequence
  Synthetic oligonucleotide
aagcgtgagacagcaacggacgccctaacc

SEQ ID NO: 216380 - DNA, 30 bp, Artificial Sequence
  Synthetic oligonucleotide
taggcccaaagacattctcaaccgctaacc

SEQ ID NO: 216381 - DNA, 30 bp, Artificial Sequence
  Synthetic oligonucleotide
actcctcggaataccttgctggcagtaacc

SEQ ID NO: 216382 - DNA, 30 bp, Artificial Sequence
  Synthetic oligonucleotide
acatcgttttgccagaatgagaacgtaacc

SEQ ID NO: 216383 - DNA, 30 bp, Artificial Sequence
  Synthetic oligonucleotide
ctctgggatgcgcacgagggcgtcgtaacc

SEQ ID NO: 216384 - DNA, 30 bp, Artificial Sequence
  Synthetic oligonucleotide
ctgagactcgggccagccaaacaggtaacc

SEQ ID NO: 216385 - DNA, 30 bp, Artificial Sequence
  Synthetic oligonucleotide
gtcagtgccgtaatacatcaccaggtaacc

SEQ ID NO: 216386 - DNA, 30 bp, Artificial Sequence
  Synthetic oligonucleotide
actcgtttggttagcgttccgttattaacc

SEQ ID NO: 216387 - DNA, 30 bp, Artificial Sequence
  Synthetic oligonucleotide
aggaggtaaagcgagcagcagcagttaacc

SEQ ID NO: 216388 - DNA, 30 bp, Artificial Sequence
  Synthetic oligonucleotide
catcgctaagtatgtagtccatagttaacc

SEQ ID NO: 216389 - DNA, 30 bp, Artificial Sequence
  Synthetic oligonucleotide
ttcggtacgggtgcaaggcatgctttaacc

SEQ ID NO: 216390 - DNA, 30 bp, Artificial Sequence
  Synthetic oligonucleotide
aacgtatgtctccattactgacttttaacc

SEQ ID NO: 216391 - DNA, 30 bp, Artificial Sequence
  Synthetic oligonucleotide
acgaccgcgctttcacgtatccgcaacacc

SEQ ID NO: 216392 - DNA, 30 bp, Artificial Sequence
  Synthetic oligonucleotide
aaacggggaattacagtggatcggaacacc

SEQ ID NO: 216393 - DNA, 30 bp, Artificial Sequence
  Synthetic oligonucleotide
cgggctggtctgggggcacgcatgaacacc

SEQ ID NO: 216394 - DNA, 30 bp, Artificial Sequence
  Synthetic oligonucleotide
cacggcgtgcgcattaaaacgcttaacacc

SEQ ID NO: 216395 - DNA, 30 bp, Artificial Sequence
  Synthetic oligonucleotide
tccgacgaatggcctgtatttgagcacacc

SEQ ID NO: 216396 - DNA, 30 bp, Artificial Sequence
  Synthetic oligonucleotide
ctaagaaggaaacgcgattgggctcacacc

SEQ ID NO: 216397 - DNA, 30 bp, Artificial Sequence
  Synthetic oligonucleotide
tacatttcaccacagcagtcaaaagacacc

SEQ ID NO: 216398 - DNA, 30 bp, Artificial Sequence
  Synthetic oligonucleotide
gaagagacgaactcgggtgatgaagacacc

SEQ ID NO: 216399 - DNA, 30 bp, Artificial Sequence
  Synthetic oligonucleotide
gtaacgaatgccgtacaaggtatggacacc

SEQ ID NO: 216400 - DNA, 30 bp, Artificial Sequence
  Synthetic oligonucleotide
tggaaaaaactatccgtagagcctgacacc

SEQ ID NO: 216401 - DNA, 30 bp, Artificial Sequence
  Synthetic oligonucleotide
tcgcaaattgagaaaaggccggttgacacc

SEQ ID NO: 216402 - DNA, 30 bp, Artificial Sequence
  Synthetic oligonucleotide
tagcgcctggtctaatgaggcggatacacc

SEQ ID NO: 216403 - DNA, 30 bp, Artificial Sequence
  Synthetic oligonucleotide
ccggcgctcaacagataaaatgtgtacacc

SEQ ID NO: 216404 - DNA, 30 bp, Artificial Sequence
  Synthetic oligonucleotide
gatcgaacaatatagatacttgtgcccacc

SEQ ID NO: 216405 - DNA, 30 bp, Artificial Sequence
  Synthetic oligonucleotide
acttgccatatccctaggcgcggagccacc

SEQ ID NO: 216406 - DNA, 30 bp, Artificial Sequence
  Synthetic oligonucleotide
atggccttccatacttgctatggctccacc

SEQ ID NO: 216407 - DNA, 30 bp, Artificial Sequence
  Synthetic oligonucleotide
gagtaagattcgctcgtacgccattccacc

SEQ ID NO: 216408 - DNA, 30 bp, Artificial Sequence
  Synthetic oligonucleotide
agtaacggcagactcatcaaacagagcacc

SEQ ID NO: 216409 - DNA, 30 bp, Artificial Sequence
  Synthetic oligonucleotide
taggactgaaggtaatcgtttacgagcacc

SEQ ID NO: 216410 - DNA, 30 bp, Artificial Sequence
  Synthetic oligonucleotide
tagacgaaaaaacgggcgttctctagcacc

SEQ ID NO: 216411 - DNA, 30 bp, Artificial Sequence
  Synthetic oligonucleotide
attggccggaaggaggtgatgtgccgcacc

SEQ ID NO: 216412 - DNA, 30 bp, Artificial Sequence
  Synthetic oligonucleotide
cgattgggatgccttgatgttctccgcacc

SEQ ID NO: 216413 - DNA, 30 bp, Artificial Sequence
  Synthetic oligonucleotide
agtgcactatatggggggttgctgcgcacc

SEQ ID NO: 216414 - DNA, 30 bp, Artificial Sequence
  Synthetic oligonucleotide
cacatttgtgtgtgtttcagtgttcgcacc

SEQ ID NO: 216415 - DNA, 30 bp, Artificial Sequence
  Synthetic oligonucleotide
acttagggccgttcatgggctcgaggcacc

SEQ ID NO: 216416 - DNA, 30 bp, Artificial Sequence
  Synthetic oligonucleotide
atcggcttacgcaaaactaccattggcacc

SEQ ID NO: 216417 - DNA, 30 bp, Artificial Sequence
  Synthetic oligonucleotide
cacaacaaacttctcaaatgccaatgcacc

SEQ ID NO: 216418 - DNA, 30 bp, Artificial Sequence
  Synthetic oligonucleotide
gtagtgtactaggcgtacagtttgtgcacc

SEQ ID NO: 216419 - DNA, 30 bp, Artificial Sequence
  Synthetic oligonucleotide
tctactagggttcctccctgatattgcacc

SEQ ID NO: 216420 - DNA, 30 bp, Artificial Sequence
  Synthetic oligonucleotide
agtcgtattttgacattgccgtgttgcacc

SEQ ID NO: 216421 - DNA, 30 bp, Artificial Sequence
  Synthetic oligonucleotide
taagaccgggggcctaagaaagaaatcacc

SEQ ID NO: 216422 - DNA, 30 bp, Artificial Sequence
  Synthetic oligonucleotide
gctttgcaagaaaaatataactaaatcacc

SEQ ID NO: 216423 - DNA, 30 bp, Artificial Sequence
  Synthetic oligonucleotide
ctggggcaagaagtaaggtcttaaatcacc

SEQ ID NO: 216424 - DNA, 30 bp, Artificial Sequence
  Synthetic oligonucleotide
acgctaaacgaaagtgacactcccatcacc

SEQ ID NO: 216425 - DNA, 30 bp, Artificial Sequence
  Synthetic oligonucleotide
acgctattacctagcagtggttctatcacc

SEQ ID NO: 216426 - DNA, 30 bp, Artificial Sequence
  Synthetic oligonucleotide
cagcttagcagccctccgaaaagtatcacc

SEQ ID NO: 216427 - DNA, 30 bp, Artificial Sequence
  Synthetic oligonucleotide
ttcgcgaataacttccactataatctcacc

SEQ ID NO: 216428 - DNA, 30 bp, Artificial Sequence
  Synthetic oligonucleotide
gtatcggaaaaggagaggggaaaagtcacc

SEQ ID NO: 216429 - DNA, 30 bp, Artificial Sequence
  Synthetic oligonucleotide
aggagaggttcccggcagtgagaagtcacc

SEQ ID NO: 216430 - DNA, 32 bp, Artificial Sequence
  Synthetic oligonucleotide
atcctgaaagcctagggcaggtgtgcgtcacc

SEQ ID NO: 216431 - DNA, 30 bp, Artificial Sequence
  Synthetic oligonucleotide
gggaaagaagaatcaggtgttttcgtcacc

SEQ ID NO: 216432 - DNA, 30 bp, Artificial Sequence
  Synthetic oligonucleotide
taccaaatgagctatttgcacagggtcacc

SEQ ID NO: 216433 - DNA, 30 bp, Artificial Sequence
  Synthetic oligonucleotide
catgaggaaaatgacactcacatggtcacc

SEQ ID NO: 216434 - DNA, 30 bp, Artificial Sequence
  Synthetic oligonucleotide
ttagatactagggatggaactcatgtcacc

SEQ ID NO: 216435 - DNA, 30 bp, Artificial Sequence
  Synthetic oligonucleotide
gctctcacgacaatatcagacactgtcacc

SEQ ID NO: 216436 - DNA, 30 bp, Artificial Sequence
  Synthetic oligonucleotide
cgactatagatataaaccgtgcctgtcacc

SEQ ID NO: 216437 - DNA, 30 bp, Artificial Sequence
  Synthetic oligonucleotide
cgggccatcgatagcggtaacagattcacc

SEQ ID NO: 216438 - DNA, 30 bp, Artificial Sequence
  Synthetic oligonucleotide
agcacggagaggatattttcccacttcacc

SEQ ID NO: 216439 - DNA, 30 bp, Artificial Sequence
  Synthetic oligonucleotide
aataagtaacacaagttaccgaggttcacc

SEQ ID NO: 216440 - DNA, 30 bp, Artificial Sequence
  Synthetic oligonucleotide
tcaaaataaccgcgacttatccggttcacc

SEQ ID NO: 216441 - DNA, 30 bp, Artificial Sequence
  Synthetic oligonucleotide
atctcgaatcctaaagtaggattgttcacc

SEQ ID NO: 216442 - DNA, 30 bp, Artificial Sequence
  Synthetic oligonucleotide
ccatcggggcatttagtagggattttcacc

SEQ ID NO: 216443 - DNA, 30 bp, Artificial Sequence
  Synthetic oligonucleotide
tccctggcaaccgccacttaagttttcacc

SEQ ID NO: 216444 - DNA, 30 bp, Artificial Sequence
  Synthetic oligonucleotide
ttgaatatacgatatctttgggcaaagacc

SEQ ID NO: 216445 - DNA, 30 bp, Artificial Sequence
  Synthetic oligonucleotide
tgacaaagattatagttttgccacaagacc

SEQ ID NO: 216446 - DNA, 30 bp, Artificial Sequence
  Synthetic oligonucleotide
ggcctactatctgtgcacatgtgcaagacc

SEQ ID NO: 216447 - DNA, 30 bp, Artificial Sequence
  Synthetic oligonucleotide
taggggggtcgacctgtacggcggaagacc

SEQ ID NO: 216448 - DNA, 30 bp, Artificial Sequence
  Synthetic oligonucleotide
acaaggcaatcttgcggcgactgtaagacc

SEQ ID NO: 216449 - DNA, 30 bp, Artificial Sequence
  Synthetic oligonucleotide
tgggaaatactgacagggtagatgcagacc

SEQ ID NO: 216450 - DNA, 30 bp, Artificial Sequence
  Synthetic oligonucleotide
aacaaaggaaccaccgtctggaatcagacc

SEQ ID NO: 216451 - DNA, 30 bp, Artificial Sequence
  Synthetic oligonucleotide
ccttaacagctagacatagtatacgagacc

SEQ ID NO: 216452 - DNA, 30 bp, Artificial Sequence
  Synthetic oligonucleotide
tcgccaatcccggacgcatcgcgggagacc

SEQ ID NO: 216453 - DNA, 30 bp, Artificial Sequence
  Synthetic oligonucleotide
tcgaccgtgagaattgtggaatgggagacc

SEQ ID NO: 216454 - DNA, 30 bp, Artificial Sequence
  Synthetic oligonucleotide
ctctcagagtccgcagtcaaagttgagacc

SEQ ID NO: 216455 - DNA, 30 bp, Artificial Sequence
  Synthetic oligonucleotide
cggaattgggtttccgaggcttttgagacc

SEQ ID NO: 216456 - DNA, 30 bp, Artificial Sequence
  Synthetic oligonucleotide
tcagctctaatgcaggtctcacaatagacc

SEQ ID NO: 216457 - DNA, 30 bp, Artificial Sequence
  Synthetic oligonucleotide
agtcatcctcagatgagcgtctgatagacc

SEQ ID NO: 216458 - DNA, 30 bp, Artificial Sequence
  Synthetic oligonucleotide
ggcttagttttgcaccagaatcactagacc

SEQ ID NO: 216459 - DNA, 30 bp, Artificial Sequence
  Synthetic oligonucleotide
tggttcaagctgattaggtcctcctagacc

SEQ ID NO: 216460 - DNA, 30 bp, Artificial Sequence
  Synthetic oligonucleotide
accaggtcctaatgaaacatgctgtagacc

SEQ ID NO: 216461 - DNA, 30 bp, Artificial Sequence
  Synthetic oligonucleotide
ccttgcccatcccggtaccaaaattagacc

SEQ ID NO: 216462 - DNA, 30 bp, Artificial Sequence
  Synthetic oligonucleotide
agacaggtcagcgtgaccacctgttagacc

SEQ ID NO: 216463 - DNA, 30 bp, Artificial Sequence
  Synthetic oligonucleotide
aggattctgtcaataggcaagatttagacc

SEQ ID NO: 216464 - DNA, 30 bp, Artificial Sequence
  Synthetic oligonucleotide
aatctaacgcgcacaaaagtggtaacgacc

SEQ ID NO: 216465 - DNA, 30 bp, Artificial Sequence
  Synthetic oligonucleotide
atgcgtaaatggcatctatagcccacgacc

SEQ ID NO: 216466 - DNA, 30 bp, Artificial Sequence
  Synthetic oligonucleotide
caaatttaccaagactaggtatagacgacc

SEQ ID NO: 216467 - DNA, 30 bp, Artificial Sequence
  Synthetic oligonucleotide
aaccaagttcaggcacctaggtcgacgacc

SEQ ID NO: 216468 - DNA, 30 bp, Artificial Sequence
  Synthetic oligonucleotide
cgtaataaagctatgcctagcacaccgacc

SEQ ID NO: 216469 - DNA, 30 bp, Artificial Sequence
  Synthetic oligonucleotide
tgtttacaattggttgtaagcgagccgacc

SEQ ID NO: 216470 - DNA, 30 bp, Artificial Sequence
  Synthetic oligonucleotide
tactaaatcatacaagtgctttatccgacc

SEQ ID NO: 216471 - DNA, 30 bp, Artificial Sequence
  Synthetic oligonucleotide
gcctggttaaagttgtactgggctccgacc

SEQ ID NO: 216472 - DNA, 30 bp, Artificial Sequence
  Synthetic oligonucleotide
aggtggctcgagggcgtatgccgtccgacc

SEQ ID NO: 216473 - DNA, 30 bp, Artificial Sequence
  Synthetic oligonucleotide
ttcatttaagtaggcactaggaacgcgacc

SEQ ID NO: 216474 - DNA, 30 bp, Artificial Sequence
  Synthetic oligonucleotide
gctatcccaatgtagaatgggtaggcgacc

SEQ ID NO: 216475 - DNA, 30 bp, Artificial Sequence
  Synthetic oligonucleotide
gggaataggcggctaccctccgatgcgacc

SEQ ID NO: 216476 - DNA, 30 bp, Artificial Sequence
  Synthetic oligonucleotide
catggagactgaacacatacgtttgcgacc

SEQ ID NO: 216477 - DNA, 30 bp, Artificial Sequence
  Synthetic oligonucleotide
ggtagagttggcagttgtgatgcctcgacc

SEQ ID NO: 216478 - DNA, 30 bp, Artificial Sequence
  Synthetic oligonucleotide
cgaacggtggactagacccgtatctcgacc

SEQ ID NO: 216479 - DNA, 30 bp, Artificial Sequence
  Synthetic oligonucleotide
ttaatgtggttgattagctgcgagtcgacc

SEQ ID NO: 216480 - DNA, 30 bp, Artificial Sequence
  Synthetic oligonucleotide
agtcgtgcttaacgtaactcggtgtcgacc

SEQ ID NO: 216481 - DNA, 30 bp, Artificial Sequence
  Synthetic oligonucleotide
ataatgctcgggaaaacgtagtgaaggacc

SEQ ID NO: 216482 - DNA, 30 bp, Artificial Sequence
  Synthetic oligonucleotide
tatggcacctgtgtgcgacatatcaggacc

SEQ ID NO: 216483 - DNA, 30 bp, Artificial Sequence
  Synthetic oligonucleotide
gtccaatagctaaccactggccagaggacc

SEQ ID NO: 216484 - DNA, 30 bp, Artificial Sequence
  Synthetic oligonucleotide
ggcacaaaaagaattgctaagtgtaggacc

SEQ ID NO: 216485 - DNA, 30 bp, Artificial Sequence
  Synthetic oligonucleotide
cctttaccggtgcgctaatgtgtacggacc

SEQ ID NO: 216486 - DNA, 30 bp, Artificial Sequence
  Synthetic oligonucleotide
tgaagtgggttcggtcgacgccaccggacc

SEQ ID NO: 216487 - DNA, 30 bp, Artificial Sequence
  Synthetic oligonucleotide
gagcgttaatccatcgacttctcgcggacc

SEQ ID NO: 216488 - DNA, 30 bp, Artificial Sequence
  Synthetic oligonucleotide
cgtatcaggaggtctattgttaaagggacc

SEQ ID NO: 216489 - DNA, 30 bp, Artificial Sequence
  Synthetic oligonucleotide
aggcgaaggcagttagtcctcacagggacc

SEQ ID NO: 216490 - DNA, 30 bp, Artificial Sequence
  Synthetic oligonucleotide
cacagctgaccttgtagtaggcgagggacc

SEQ ID NO: 216491 - DNA, 30 bp, Artificial Sequence
  Synthetic oligonucleotide
atgtggaagcacttatctccaggagggacc

SEQ ID NO: 216492 - DNA, 30 bp, Artificial Sequence
  Synthetic oligonucleotide
gggccagcagaaactaataaattcgggacc

SEQ ID NO: 216493 - DNA, 30 bp, Artificial Sequence
  Synthetic oligonucleotide
gcctccgcaggggttatggtactctggacc

SEQ ID NO: 216494 - DNA, 30 bp, Artificial Sequence
  Synthetic oligonucleotide
accacgacaaggctctatgtatccatgacc

SEQ ID NO: 216495 - DNA, 30 bp, Artificial Sequence
  Synthetic oligonucleotide
ggtattggacctctaagatagagcatgacc

SEQ ID NO: 216496 - DNA, 30 bp, Artificial Sequence
  Synthetic oligonucleotide
gggccgcagaccgtttaaattctcatgacc

SEQ ID NO: 216497 - DNA, 30 bp, Artificial Sequence
  Synthetic oligonucleotide
ctggagggagctgatctcaccccgatgacc

SEQ ID NO: 216498 - DNA, 30 bp, Artificial Sequence
  Synthetic oligonucleotide
gtggccggcaaggttgtgcgctcgatgacc

SEQ ID NO: 216499 - DNA, 30 bp, Artificial Sequence
  Synthetic oligonucleotide
tgccctcaaattatcaggttaaatatgacc

SEQ ID NO: 216500 - DNA, 30 bp, Artificial Sequence
  Synthetic oligonucleotide
acaaagtgtatcgactataatcgtatgacc

SEQ ID NO: 216501 - DNA, 30 bp, Artificial Sequence
  Synthetic oligonucleotide
cggggaggtgtgctacgttcctgcctgacc

SEQ ID NO: 216502 - DNA, 30 bp, Artificial Sequence
  Synthetic oligonucleotide
gtcgcccccgtaatttatcaacagctgacc

SEQ ID NO: 216503 - DNA, 30 bp, Artificial Sequence
  Synthetic oligonucleotide
aggcgtaattacacaacatgttggctgacc

SEQ ID NO: 216504 - DNA, 30 bp, Artificial Sequence
  Synthetic oligonucleotide
gaatcagggagcaactccctgctcgtgacc

SEQ ID NO: 216505 - DNA, 30 bp, Artificial Sequence
  Synthetic oligonucleotide
tccacaagcttatagtctcgtttcgtgacc

SEQ ID NO: 216506 - DNA, 30 bp, Artificial Sequence
  Synthetic oligonucleotide
tagggcaggaccgattgaaggacggtgacc

SEQ ID NO: 216507 - DNA, 30 bp, Artificial Sequence
  Synthetic oligonucleotide
cagccagcacgatttcatatgcctgtgacc

SEQ ID NO: 216508 - DNA, 30 bp, Artificial Sequence
  Synthetic oligonucleotide
tttatcactgcctctgagcggtgcttgacc

SEQ ID NO: 216509 - DNA, 30 bp, Artificial Sequence
  Synthetic oligonucleotide
tggagaagtatgctgagaatttgtttgacc

SEQ ID NO: 216510 - DNA, 30 bp, Artificial Sequence
  Synthetic oligonucleotide
cctcggagcagcaactctaggaacaatacc

SEQ ID NO: 216511 - DNA, 30 bp, Artificial Sequence
  Synthetic oligonucleotide
gacgcgagttccaccatgggagacaatacc

SEQ ID NO: 216512 - DNA, 30 bp, Artificial Sequence
  Synthetic oligonucleotide
acgaaacatcagtgcttacggaaacatacc

SEQ ID NO: 216513 - DNA, 30 bp, Artificial Sequence
  Synthetic oligonucleotide
cgcggtgttcaaaacccgaataaccatacc

SEQ ID NO: 216514 - DNA, 30 bp, Artificial Sequence
  Synthetic oligonucleotide
agtgaactttaggaccccgaccgccatacc

SEQ ID NO: 216515 - DNA, 30 bp, Artificial Sequence
  Synthetic oligonucleotide
cacagagaccaaaagatattttagcatacc

SEQ ID NO: 216516 - DNA, 30 bp, Artificial Sequence
  Synthetic oligonucleotide
tgtgggggattccttctggcatctcatacc

SEQ ID NO: 216517 - DNA, 30 bp, Artificial Sequence
  Synthetic oligonucleotide
aaggtccaggtcatccggacgcgtcatacc

SEQ ID NO: 216518 - DNA, 30 bp, Artificial Sequence
  Synthetic oligonucleotide
aatccagggtatcgtcaccgtgtagatacc

SEQ ID NO: 216519 - DNA, 30 bp, Artificial Sequence
  Synthetic oligonucleotide
caaggtgctagtaatgaccttcacgatacc

SEQ ID NO: 216520 - DNA, 30 bp, Artificial Sequence
  Synthetic oligonucleotide
taagggaccgtgaaatttctaatcgatacc

SEQ ID NO: 216521 - DNA, 30 bp, Artificial Sequence
  Synthetic oligonucleotide
acaagtccgatagaaccctgaaaggatacc

SEQ ID NO: 216522 - DNA, 30 bp, Artificial Sequence
  Synthetic oligonucleotide
agctcttgaattagagtatccacggatacc

SEQ ID NO: 216523 - DNA, 30 bp, Artificial Sequence
  Synthetic oligonucleotide
agcagaatccaagagcagtacgaatatacc

SEQ ID NO: 216524 - DNA, 30 bp, Artificial Sequence
  Synthetic oligonucleotide
gtcatgcgaggcaaaaacaaagactatacc

SEQ ID NO: 216525 - DNA, 30 bp, Artificial Sequence
  Synthetic oligonucleotide
ctatacctagctgaaatatgtgcaactacc

SEQ ID NO: 216526 - DNA, 30 bp, Artificial Sequence
  Synthetic oligonucleotide
atcggtccttgaaggagatacaaagctacc

SEQ ID NO: 216527 - DNA, 30 bp, Artificial Sequence
  Synthetic oligonucleotide
gttgcgtacaagaggaggctggaagctacc

SEQ ID NO: 216528 - DNA, 30 bp, Artificial Sequence
  Synthetic oligonucleotide
ctgccagtatctggggggggtcacgctacc

SEQ ID NO: 216529 - DNA, 30 bp, Artificial Sequence
  Synthetic oligonucleotide
gcgtcgacttcgagccttggatgcgctacc

SEQ ID NO: 216530 - DNA, 30 bp, Artificial Sequence
  Synthetic oligonucleotide
ggacccagggtgcggtgtacagcggctacc

SEQ ID NO: 216531 - DNA, 30 bp, Artificial Sequence
  Synthetic oligonucleotide
gcgggggttatagcagggtgtggggctacc

SEQ ID NO: 216532 - DNA, 30 bp, Artificial Sequence
  Synthetic oligonucleotide
ttaatgcgcaatttcgagcgggtggctacc

SEQ ID NO: 216533 - DNA, 30 bp, Artificial Sequence
  Synthetic oligonucleotide
aaatggcgttaccaagtgacggactctacc

SEQ ID NO: 216534 - DNA, 30 bp, Artificial Sequence
  Synthetic oligonucleotide
gacttaagggaagggttgtaggcaagtacc

SEQ ID NO: 216535 - DNA, 30 bp, Artificial Sequence
  Synthetic oligonucleotide
gtagcctccgaaatcccaacattgagtacc

SEQ ID NO: 216536 - DNA, 30 bp, Artificial Sequence
  Synthetic oligonucleotide
gttcagtgcaagcgtaaacccgcacgtacc

SEQ ID NO: 216537 - DNA, 30 bp, Artificial Sequence
  Synthetic oligonucleotide
gaaaggtagccatagcgcgcaaaccgtacc

SEQ ID NO: 216538 - DNA, 30 bp, Artificial Sequence
  Synthetic oligonucleotide
gctgggaaagggggtaaagttagccgtacc

SEQ ID NO: 216539 - DNA, 30 bp, Artificial Sequence
  Synthetic oligonucleotide
gctaggcgagaagttaagaatccgcgtacc

SEQ ID NO: 216540 - DNA, 30 bp, Artificial Sequence
  Synthetic oligonucleotide
cgaaagtctcgggagcccaccattcgtacc

SEQ ID NO: 216541 - DNA, 30 bp, Artificial Sequence
  Synthetic oligonucleotide
tgatacagttagcgtagaattgtaggtacc

SEQ ID NO: 216542 - DNA, 30 bp, Artificial Sequence
  Synthetic oligonucleotide
ggaagggggggtaagggacgtgagggtacc

SEQ ID NO: 216543 - DNA, 30 bp, Artificial Sequence
  Synthetic oligonucleotide
ccttcactggatagttgcgtcaaatgtacc

SEQ ID NO: 216544 - DNA, 30 bp, Artificial Sequence
  Synthetic oligonucleotide
tcccaacagaagctcgaggacggatgtacc

SEQ ID NO: 216545 - DNA, 30 bp, Artificial Sequence
  Synthetic oligonucleotide
catggaaaaggtttagtctgattctgtacc

SEQ ID NO: 216546 - DNA, 30 bp, Artificial Sequence
  Synthetic oligonucleotide
catactaaatgtggtcaagtgatgtgtacc

SEQ ID NO: 216547 - DNA, 30 bp, Artificial Sequence
  Synthetic oligonucleotide
gaaggacgtcgtatgccctcaaaaattacc

SEQ ID NO: 216548 - DNA, 30 bp, Artificial Sequence
  Synthetic oligonucleotide
cgggttgatcgggattggccacacgttacc

SEQ ID NO: 216549 - DNA, 30 bp, Artificial Sequence
  Synthetic oligonucleotide
acagttaaggcagacccactaatcgttacc

SEQ ID NO: 216550 - DNA, 30 bp, Artificial Sequence
  Synthetic oligonucleotide
cctccagacccgggctaagagtaggttacc

SEQ ID NO: 216551 - DNA, 30 bp, Artificial Sequence
  Synthetic oligonucleotide
acaagcacggaaactcatttatgggttacc

SEQ ID NO: 216552 - DNA, 30 bp, Artificial Sequence
  Synthetic oligonucleotide
cgcccctgtatgaaaaagacctgggttacc

SEQ ID NO: 216553 - DNA, 30 bp, Artificial Sequence
  Synthetic oligonucleotide
cgcgcatagcaacctgaggcacatgttacc

SEQ ID NO: 216554 - DNA, 30 bp, Artificial Sequence
  Synthetic oligonucleotide
aacgcgttactgggatgattgactgttacc

SEQ ID NO: 216555 - DNA, 30 bp, Artificial Sequence
  Synthetic oligonucleotide
cagcactggaagtcaatgttagaatttacc

SEQ ID NO: 216556 - DNA, 30 bp, Artificial Sequence
  Synthetic oligonucleotide
ggtggagctcggacttgaagcataaaaccc

SEQ ID NO: 216557 - DNA, 30 bp, Artificial Sequence
  Synthetic oligonucleotide
ccactgaaggtcaggtgaaaggagaaaccc

SEQ ID NO: 216558 - DNA, 30 bp, Artificial Sequence
  Synthetic oligonucleotide
cccgcaccgaaggcccagctacgtaaaccc

SEQ ID NO: 216559 - DNA, 30 bp, Artificial Sequence
  Synthetic oligonucleotide
gcctgaggagtggtcacgactgcgcaaccc

SEQ ID NO: 216560 - DNA, 30 bp, Artificial Sequence
  Synthetic oligonucleotide
cctgggataccctaagcgtttgcagaaccc

SEQ ID NO: 216561 - DNA, 30 bp, Artificial Sequence
  Synthetic oligonucleotide
gtatcggtgcgtcggtattgacaataaccc

SEQ ID NO: 216562 - DNA, 30 bp, Artificial Sequence
  Synthetic oligonucleotide
acgaacgagtctcctgatgccctataaccc

SEQ ID NO: 216563 - DNA, 30 bp, Artificial Sequence
  Synthetic oligonucleotide
gaccaggcccgtaattgtgggtagtaaccc

SEQ ID NO: 216564 - DNA, 30 bp, Artificial Sequence
  Synthetic oligonucleotide
gtgatatgtacacggtttgcgatttaaccc

SEQ ID NO: 216565 - DNA, 30 bp, Artificial Sequence
  Synthetic oligonucleotide
tcacttatataagatcatctgtagacaccc

SEQ ID NO: 216566 - DNA, 30 bp, Artificial Sequence
  Synthetic oligonucleotide
gaggacctctgatccttggcagcaccaccc

SEQ ID NO: 216567 - DNA, 30 bp, Artificial Sequence
  Synthetic oligonucleotide
gctagttttccacggaccgttcccccaccc

SEQ ID NO: 216568 - DNA, 31 bp, Artificial Sequence
  Synthetic oligonucleotide
agtcatcgtcgtcatgggacatagtccaccc

SEQ ID NO: 216569 - DNA, 30 bp, Artificial Sequence
  Synthetic oligonucleotide
ctatcggcccagagttgaattcgagcaccc

SEQ ID NO: 216570 - DNA, 30 bp, Artificial Sequence
  Synthetic oligonucleotide
accgatacggagtgcgtttggtccgcaccc

SEQ ID NO: 216571 - DNA, 30 bp, Artificial Sequence
  Synthetic oligonucleotide
tgaattgggtactaggcagatacggcaccc

SEQ ID NO: 216572 - DNA, 30 bp, Artificial Sequence
  Synthetic oligonucleotide
taaaggggagggctatatatgccggcaccc

SEQ ID NO: 216573 - DNA, 30 bp, Artificial Sequence
  Synthetic oligonucleotide
ggcaagtgtttgtttagttaagtggcaccc

SEQ ID NO: 216574 - DNA, 30 bp, Artificial Sequence
  Synthetic oligonucleotide
cgtgctaacgtttaaaacctccgtgcaccc

SEQ ID NO: 216575 - DNA, 30 bp, Artificial Sequence
  Synthetic oligonucleotide
gagtcgctggactttagactaatatcaccc

SEQ ID NO: 216576 - DNA, 30 bp, Artificial Sequence
  Synthetic oligonucleotide
actacagcgcttaccaacactaagtcaccc

SEQ ID NO: 216577 - DNA, 30 bp, Artificial Sequence
  Synthetic oligonucleotide
gcacctagcgttatcctaatttgttcaccc

SEQ ID NO: 216578 - DNA, 30 bp, Artificial Sequence
  Synthetic oligonucleotide
ccggagttgtcgtgtttgctaggaagaccc

SEQ ID NO: 216579 - DNA, 30 bp, Artificial Sequence
  Synthetic oligonucleotide
aggagaagcacaaggactctaaacagaccc

SEQ ID NO: 216580 - DNA, 30 bp, Artificial Sequence
  Synthetic oligonucleotide
cttctggagaatctcacctttgacagaccc

SEQ ID NO: 216581 - DNA, 30 bp, Artificial Sequence
  Synthetic oligonucleotide
gaggagcggttcctaatgaggagcagaccc

SEQ ID NO: 216582 - DNA, 30 bp, Artificial Sequence
  Synthetic oligonucleotide
cgtccgacagattggcccgggcggagaccc

SEQ ID NO: 216583 - DNA, 30 bp, Artificial Sequence
  Synthetic oligonucleotide
atcccggaactacccactcattggagaccc

SEQ ID NO: 216584 - DNA, 30 bp, Artificial Sequence
  Synthetic oligonucleotide
ggtgggaaagaggataaacatcatagaccc

SEQ ID NO: 216585 - DNA, 30 bp, Artificial Sequence
  Synthetic oligonucleotide
tgcgtagagggggcggtggcccgtagaccc

SEQ ID NO: 216586 - DNA, 30 bp, Artificial Sequence
  Synthetic oligonucleotide
cgtcagaacgcaatttttgtcccccgaccc

SEQ ID NO: 216587 - DNA, 30 bp, Artificial Sequence
  Synthetic oligonucleotide
atgcggtacttgagagtacgccagggaccc

SEQ ID NO: 216588 - DNA, 30 bp, Artificial Sequence
  Synthetic oligonucleotide
acaaagttacggaggtcgaccggtggaccc

SEQ ID NO: 216589 - DNA, 30 bp, Artificial Sequence
  Synthetic oligonucleotide
cccagatcgggggttgcttgttgtggaccc

SEQ ID NO: 216590 - DNA, 30 bp, Artificial Sequence
  Synthetic oligonucleotide
ccacagccaggacagaaaccgaaatgaccc

SEQ ID NO: 216591 - DNA, 30 bp, Artificial Sequence
  Synthetic oligonucleotide
agctagagagtcgtagcagtaaccataccc

SEQ ID NO: 216592 - DNA, 31 bp, Artificial Sequence
  Synthetic oligonucleotide
atgtccccgaggaatatcatgagatataccc

SEQ ID NO: 216593 - DNA, 30 bp, Artificial Sequence
  Synthetic oligonucleotide
ggcctcagtcttgccttgaactctataccc

SEQ ID NO: 216594 - DNA, 30 bp, Artificial Sequence
  Synthetic oligonucleotide
agcgaatatttttatggtggacgtctaccc

SEQ ID NO: 216595 - DNA, 30 bp, Artificial Sequence
  Synthetic oligonucleotide
cactctccagagcatttcagtaagttaccc

SEQ ID NO: 216596 - DNA, 30 bp, Artificial Sequence
  Synthetic oligonucleotide
tcgttggacctatgtgtacgccaaaacccc

SEQ ID NO: 216597 - DNA, 30 bp, Artificial Sequence
  Synthetic oligonucleotide
tccaacctcaggtaagtcgcactaaacccc

SEQ ID NO: 216598 - DNA, 30 bp, Artificial Sequence
  Synthetic oligonucleotide
ctaaacgctgaagagacgatacaacacccc

SEQ ID NO: 216599 - DNA, 30 bp, Artificial Sequence
  Synthetic oligonucleotide
cgtgaatccgcgggcccgctaagacacccc

SEQ ID NO: 216600 - DNA, 30 bp, Artificial Sequence
  Synthetic oligonucleotide
ccgtcttcatgggtcaatcacaccgacccc

SEQ ID NO: 216601 - DNA, 30 bp, Artificial Sequence
  Synthetic oligonucleotide
taggctcagggatgggatacaatcgacccc

SEQ ID NO: 216602 - DNA, 30 bp, Artificial Sequence
  Synthetic oligonucleotide
taacgaccgatcaggcggttcatggacccc

SEQ ID NO: 216603 - DNA, 30 bp, Artificial Sequence
  Synthetic oligonucleotide
ggtagagcttgaagcggaaaggaatacccc

SEQ ID NO: 216604 - DNA, 30 bp, Artificial Sequence
  Synthetic oligonucleotide
tcacacgctcggtgccaacggcgcaccccc

SEQ ID NO: 216605 - DNA, 30 bp, Artificial Sequence
  Synthetic oligonucleotide
gtttggacagggaatggaagcgataccccc

SEQ ID NO: 216606 - DNA, 30 bp, Artificial Sequence
  Synthetic oligonucleotide
atgggataaggtccggtgccgtataccccc

SEQ ID NO: 216607 - DNA, 30 bp, Artificial Sequence
  Synthetic oligonucleotide
ggagcgcatcgaacggaaaacagtaccccc

SEQ ID NO: 216608 - DNA, 30 bp, Artificial Sequence
  Synthetic oligonucleotide
cagtatggcaagcgtcatataagacccccc

SEQ ID NO: 216609 - DNA, 30 bp, Artificial Sequence
  Synthetic oligonucleotide
actggcaaagttaggccatccctagccccc

SEQ ID NO: 216610 - DNA, 30 bp, Artificial Sequence
  Synthetic oligonucleotide
ggtgtttggagaatacgaacgggggccccc

SEQ ID NO: 216611 - DNA, 30 bp, Artificial Sequence
  Synthetic oligonucleotide
tggataaagtgaagacaggtttctgccccc

SEQ ID NO: 216612 - DNA, 30 bp, Artificial Sequence
  Synthetic oligonucleotide
tagtttgtggatacatatgttcactccccc

SEQ ID NO: 216613 - DNA, 30 bp, Artificial Sequence
  Synthetic oligonucleotide
taggtccaacccaggttgtgaggttccccc

SEQ ID NO: 216614 - DNA, 30 bp, Artificial Sequence
  Synthetic oligonucleotide
cgcgacggaccaaagacttgagtaagcccc

SEQ ID NO: 216615 - DNA, 30 bp, Artificial Sequence
  Synthetic oligonucleotide
tcactcaggtccaacctgccagccagcccc

SEQ ID NO: 216616 - DNA, 30 bp, Artificial Sequence
  Synthetic oligonucleotide
tcgccaggccaaagtaccttcgagagcccc

SEQ ID NO: 216617 - DNA, 30 bp, Artificial Sequence
  Synthetic oligonucleotide
acaataaaacgcgcaattcaggatagcccc

SEQ ID NO: 216618 - DNA, 30 bp, Artificial Sequence
  Synthetic oligonucleotide
aaggtccggtacactcctggatatagcccc

SEQ ID NO: 216619 - DNA, 30 bp, Artificial Sequence
  Synthetic oligonucleotide
tcgatgacaatgggttcgcgcgcgcgcccc

SEQ ID NO: 216620 - DNA, 30 bp, Artificial Sequence
  Synthetic oligonucleotide
gacagtcacacccttggcccgtgaggcccc

SEQ ID NO: 216621 - DNA, 30 bp, Artificial Sequence
  Synthetic oligonucleotide
tatagcgaacatgctagtatccgcggcccc

SEQ ID NO: 216622 - DNA, 30 bp, Artificial Sequence
  Synthetic oligonucleotide
atcacttaaagagccgacgagaatggcccc

SEQ ID NO: 216623 - DNA, 30 bp, Artificial Sequence
  Synthetic oligonucleotide
cgaatattgaaaaatcatgtccgcatcccc

SEQ ID NO: 216624 - DNA, 30 bp, Artificial Sequence
  Synthetic oligonucleotide
gtaagtcggtaaacgttgatcttcctcccc

SEQ ID NO: 216625 - DNA, 30 bp, Artificial Sequence
  Synthetic oligonucleotide
acgtaagcgagggatttattatatctcccc

SEQ ID NO: 216626 - DNA, 30 bp, Artificial Sequence
  Synthetic oligonucleotide
gcgagtgaagtacactccttgcgtctcccc

SEQ ID NO: 216627 - DNA, 30 bp, Artificial Sequence
  Synthetic oligonucleotide
cctcggctttagtagcgattctgtctcccc

SEQ ID NO: 216628 - DNA, 30 bp, Artificial Sequence
  Synthetic oligonucleotide
gagggctggagtcacctcgtgtttctcccc

SEQ ID NO: 216629 - DNA, 30 bp, Artificial Sequence
  Synthetic oligonucleotide
atcaaaaggttagtgttgtcatacgtcccc

SEQ ID NO: 216630 - DNA, 30 bp, Artificial Sequence
  Synthetic oligonucleotide
gtcccgcttcatcgatggaagtacgtcccc

SEQ ID NO: 216631 - DNA, 30 bp, Artificial Sequence
  Synthetic oligonucleotide
ctagatcgtcacttttgggcgctaaagccc

SEQ ID NO: 216632 - DNA, 30 bp, Artificial Sequence
  Synthetic oligonucleotide
gctgctatcagaagccaacggttaaagccc

SEQ ID NO: 216633 - DNA, 30 bp, Artificial Sequence
  Synthetic oligonucleotide
tctcgttattaaggatactaacctaagccc

SEQ ID NO: 216634 - DNA, 30 bp, Artificial Sequence
  Synthetic oligonucleotide
aagagtgatataaggcacgctcaacagccc

SEQ ID NO: 216635 - DNA, 30 bp, Artificial Sequence
  Synthetic oligonucleotide
gacgacgttctatatatcaacgaacagccc

SEQ ID NO: 216636 - DNA, 30 bp, Artificial Sequence
  Synthetic oligonucleotide
cgacagcgttaatggaaaagttctcagccc

SEQ ID NO: 216637 - DNA, 30 bp, Artificial Sequence
  Synthetic oligonucleotide
attagaaagtcatgcaagtagcgtcagccc

SEQ ID NO: 216638 - DNA, 30 bp, Artificial Sequence
  Synthetic oligonucleotide
caggtaatcgccgtattagtgtgtcagccc

SEQ ID NO: 216639 - DNA, 30 bp, Artificial Sequence
  Synthetic oligonucleotide
tcgctccgcggctctgtcttcattcagccc

SEQ ID NO: 216640 - DNA, 30 bp, Artificial Sequence
  Synthetic oligonucleotide
ctaaagggtaagatcagtaattaggagccc

SEQ ID NO: 216641 - DNA, 30 bp, Artificial Sequence
  Synthetic oligonucleotide
aatgcgttacggcactatcatccggagccc

SEQ ID NO: 216642 - DNA, 30 bp, Artificial Sequence
  Synthetic oligonucleotide
gactaaaatctaaacgggaaatgtgagccc

SEQ ID NO: 216643 - DNA, 30 bp, Artificial Sequence
  Synthetic oligonucleotide
acgagccgaataaaaattattcttgagccc

SEQ ID NO: 216644 - DNA, 30 bp, Artificial Sequence
  Synthetic oligonucleotide
gaatctgaaaatttactgtcagtctagccc

SEQ ID NO: 216645 - DNA, 30 bp, Artificial Sequence
  Synthetic oligonucleotide
gcggggaagcgcctttgaaagtcgtagccc

SEQ ID NO: 216646 - DNA, 30 bp, Artificial Sequence
  Synthetic oligonucleotide
caggggtgatcaaaataggaactttagccc

SEQ ID NO: 216647 - DNA, 30 bp, Artificial Sequence
  Synthetic oligonucleotide
ataactgcgcgagtattagcagagacgccc

SEQ ID NO: 216648 - DNA, 30 bp, Artificial Sequence
  Synthetic oligonucleotide
gttgtcgaggtggttagtcccgcgacgccc

SEQ ID NO: 216649 - DNA, 30 bp, Artificial Sequence
  Synthetic oligonucleotide
aatcctgaagttgcgaactaagagccgccc

SEQ ID NO: 216650 - DNA, 30 bp, Artificial Sequence
  Synthetic oligonucleotide
gtggcgggttacattttgttggctccgccc

SEQ ID NO: 216651 - DNA, 30 bp, Artificial Sequence
  Synthetic oligonucleotide
acatatgttatgatcaggtgattggcgccc

SEQ ID NO: 216652 - DNA, 30 bp, Artificial Sequence
  Synthetic oligonucleotide
tcttaatttaagtggtggagtaatgcgccc

SEQ ID NO: 216653 - DNA, 30 bp, Artificial Sequence
  Synthetic oligonucleotide
cgcggtcgaagtataccggtgtagtcgccc

SEQ ID NO: 216654 - DNA, 30 bp, Artificial Sequence
  Synthetic oligonucleotide
ggctcgaccgcgctaatcgcctgttcgccc

SEQ ID NO: 216655 - DNA, 30 bp, Artificial Sequence
  Synthetic oligonucleotide
tagttagaggatgcaccactcgtttcgccc

SEQ ID NO: 216656 - DNA, 30 bp, Artificial Sequence
  Synthetic oligonucleotide
gggcaagctccctaggaagagttttcgccc

SEQ ID NO: 216657 - DNA, 30 bp, Artificial Sequence
  Synthetic oligonucleotide
cactaggcgcgagcgccctgtcaaaggccc

SEQ ID NO: 216658 - DNA, 30 bp, Artificial Sequence
  Synthetic oligonucleotide
gtttgtaacacaaggaaatcgttcaggccc

SEQ ID NO: 216659 - DNA, 30 bp, Artificial Sequence
  Synthetic oligonucleotide
cctgcttgaatctgctggcggttcaggccc

SEQ ID NO: 216660 - DNA, 30 bp, Artificial Sequence
  Synthetic oligonucleotide
attggatatggggaaatagtaaagaggccc

SEQ ID NO: 216661 - DNA, 29 bp, Artificial Sequence
  Synthetic oligonucleotide
ttacgaggttcaggactgcaatgaggccc

SEQ ID NO: 216662 - DNA, 30 bp, Artificial Sequence
  Synthetic oligonucleotide
cggcagaacacaagattacggctacggccc

SEQ ID NO: 216663 - DNA, 30 bp, Artificial Sequence
  Synthetic oligonucleotide
tgtcaagtgcttacagggcaacaccggccc

SEQ ID NO: 216664 - DNA, 30 bp, Artificial Sequence
  Synthetic oligonucleotide
agaagcattatatgtgaagcagagcggccc

SEQ ID NO: 216665 - DNA, 30 bp, Artificial Sequence
  Synthetic oligonucleotide
gacacttactggtaatttcgaagtcggccc

SEQ ID NO: 216666 - DNA, 30 bp, Artificial Sequence
  Synthetic oligonucleotide
tatacgagtgcatgtaaagcagttcggccc

SEQ ID NO: 216667 - DNA, 30 bp, Artificial Sequence
  Synthetic oligonucleotide
gaaagtgcgaaattttgcacggcagggccc

SEQ ID NO: 216668 - DNA, 30 bp, Artificial Sequence
  Synthetic oligonucleotide
tttgctaatggagggcgtttgctggggccc

SEQ ID NO: 216669 - DNA, 30 bp, Artificial Sequence
  Synthetic oligonucleotide
ccagaacgtctaaaccgatctgattggccc

SEQ ID NO: 216670 - DNA, 30 bp, Artificial Sequence
  Synthetic oligonucleotide
taacgtcgatctggattagcgtacatgccc

SEQ ID NO: 216671 - DNA, 30 bp, Artificial Sequence
  Synthetic oligonucleotide
tcgtcttccatatattagtgtgtcatgccc

SEQ ID NO: 216672 - DNA, 30 bp, Artificial Sequence
  Synthetic oligonucleotide
agtatcatttccgtcgtcgagcaactgccc

SEQ ID NO: 216673 - DNA, 30 bp, Artificial Sequence
  Synthetic oligonucleotide
agctcgtgttagtctcctaacggtctgccc

SEQ ID NO: 216674 - DNA, 30 bp, Artificial Sequence
  Synthetic oligonucleotide
cctccaaacaggcaaagtaaccgggtgccc

SEQ ID NO: 216675 - DNA, 30 bp, Artificial Sequence
  Synthetic oligonucleotide
gtcggttggagttatgactacaatgtgccc

SEQ ID NO: 216676 - DNA, 30 bp, Artificial Sequence
  Synthetic oligonucleotide
actccttaaatcgggtggagggctgtgccc

SEQ ID NO: 216677 - DNA, 30 bp, Artificial Sequence
  Synthetic oligonucleotide
gtgcaatcatgcggttagacctttgtgccc

SEQ ID NO: 216678 - DNA, 30 bp, Artificial Sequence
  Synthetic oligonucleotide
cttgtcgcggaggagccacgagcattgccc

SEQ ID NO: 216679 - DNA, 30 bp, Artificial Sequence
  Synthetic oligonucleotide
aaccgagcgtgaaattaatgaaatttgccc

SEQ ID NO: 216680 - DNA, 30 bp, Artificial Sequence
  Synthetic oligonucleotide
tagtaagagggggggtttatgccaaatccc

SEQ ID NO: 216681 - DNA, 30 bp, Artificial Sequence
  Synthetic oligonucleotide
atcgatggaacggtaataacattaaatccc

SEQ ID NO: 216682 - DNA, 30 bp, Artificial Sequence
  Synthetic oligonucleotide
tcttgtaacgagtgagtatatacgaatccc

SEQ ID NO: 216683 - DNA, 30 bp, Artificial Sequence
  Synthetic oligonucleotide
gattcgatcaacgaaggggcctataatccc

SEQ ID NO: 216684 - DNA, 30 bp, Artificial Sequence
  Synthetic oligonucleotide
aaaacaaacggcatcagcactgaacatccc

SEQ ID NO: 216685 - DNA, 30 bp, Artificial Sequence
  Synthetic oligonucleotide
acagactgttgttcccccggctaacatccc

SEQ ID NO: 216686 - DNA, 30 bp, Artificial Sequence
  Synthetic oligonucleotide
tactggtgccatgtgaggccgttccatccc

SEQ ID NO: 216687 - DNA, 30 bp, Artificial Sequence
  Synthetic oligonucleotide
ccgacgaaacgcagaagaacatgtcatccc

SEQ ID NO: 216688 - DNA, 30 bp, Artificial Sequence
  Synthetic oligonucleotide
tcgattcatgctattcggaacgaagatccc

SEQ ID NO: 216689 - DNA, 30 bp, Artificial Sequence
  Synthetic oligonucleotide
gggggttatcgcgtgtcatgacagtatccc

SEQ ID NO: 216690 - DNA, 30 bp, Artificial Sequence
  Synthetic oligonucleotide
ctgtatccagttaattggggctcgtatccc

SEQ ID NO: 216691 - DNA, 30 bp, Artificial Sequence
  Synthetic oligonucleotide
aaatacataaccccataatccaggtatccc

SEQ ID NO: 216692 - DNA, 30 bp, Artificial Sequence
  Synthetic oligonucleotide
cgtggaagagagttctactttctgtatccc

SEQ ID NO: 216693 - DNA, 30 bp, Artificial Sequence
  Synthetic oligonucleotide
gggcttagacttcgggcacatcgttatccc

SEQ ID NO: 216694 - DNA, 30 bp, Artificial Sequence
  Synthetic oligonucleotide
gcgcctggcgtgttacagataataactccc

SEQ ID NO: 216695 - DNA, 30 bp, Artificial Sequence
  Synthetic oligonucleotide
cgtgaaagtcgtggttgcgtctggactccc

SEQ ID NO: 216696 - DNA, 30 bp, Artificial Sequence
  Synthetic oligonucleotide
acaatgagtaaggaattgcgtgttactccc

SEQ ID NO: 216697 - DNA, 30 bp, Artificial Sequence
  Synthetic oligonucleotide
taagggcgctaagacgtgtcacggcctccc

SEQ ID NO: 216698 - DNA, 30 bp, Artificial Sequence
  Synthetic oligonucleotide
cactatgatctaagagcaggttggcctccc

SEQ ID NO: 216699 - DNA, 30 bp, Artificial Sequence
  Synthetic oligonucleotide
ggtgtcccaggccgcaacctgactcctccc

SEQ ID NO: 216700 - DNA, 30 bp, Artificial Sequence
  Synthetic oligonucleotide
aagctacttagaagccaggattgtcctccc

SEQ ID NO: 216701 - DNA, 30 bp, Artificial Sequence
  Synthetic oligonucleotide
gcaggtgatgtcgggttaaggattcctccc

SEQ ID NO: 216702 - DNA, 30 bp, Artificial Sequence
  Synthetic oligonucleotide
acgtcaatcgacgcacgactgcgctctccc

SEQ ID NO: 216703 - DNA, 30 bp, Artificial Sequence
  Synthetic oligonucleotide
gcgaaatattaacgcatagctgcgtctccc

SEQ ID NO: 216704 - DNA, 30 bp, Artificial Sequence
  Synthetic oligonucleotide
cagtgcaactaatacccataatcgtctccc

SEQ ID NO: 216705 - DNA, 31 bp, Artificial Sequence
  Synthetic oligonucleotide
ggtgcttgcggacctacgagagcacagtccc

SEQ ID NO: 216706 - DNA, 30 bp, Artificial Sequence
  Synthetic oligonucleotide
catcagtgtctggatggcgcgcacagtccc

SEQ ID NO: 216707 - DNA, 30 bp, Artificial Sequence
  Synthetic oligonucleotide
taatgcggtattatggccacctagcgtccc

SEQ ID NO: 216708 - DNA, 30 bp, Artificial Sequence
  Synthetic oligonucleotide
atcacgggagggaacgacttacaaggtccc

SEQ ID NO: 216709 - DNA, 30 bp, Artificial Sequence
  Synthetic oligonucleotide
ttcgggcaactacccaatgaggaaggtccc

SEQ ID NO: 216710 - DNA, 30 bp, Artificial Sequence
  Synthetic oligonucleotide
caaaagttggccgcctcgaccaccggtccc

SEQ ID NO: 216711 - DNA, 30 bp, Artificial Sequence
  Synthetic oligonucleotide
acggccagctcagtcacggtcgccggtccc

SEQ ID NO: 216712 - DNA, 30 bp, Artificial Sequence
  Synthetic oligonucleotide
caggaaacggtcaatgtggggctgggtccc

SEQ ID NO: 216713 - DNA, 30 bp, Artificial Sequence
  Synthetic oligonucleotide
tcaactgtggaaactgaatagaatggtccc

SEQ ID NO: 216714 - DNA, 30 bp, Artificial Sequence
  Synthetic oligonucleotide
aggcgcgacactaacgattaatgtggtccc

SEQ ID NO: 216715 - DNA, 30 bp, Artificial Sequence
  Synthetic oligonucleotide
gcaataaaaggcttgtgcggaacatgtccc

SEQ ID NO: 216716 - DNA, 30 bp, Artificial Sequence
  Synthetic oligonucleotide
tgtagggatgaaatctaccacatatgtccc

SEQ ID NO: 216717 - DNA, 30 bp, Artificial Sequence
  Synthetic oligonucleotide
actggtagaataatgagactcacttgtccc

SEQ ID NO: 216718 - DNA, 30 bp, Artificial Sequence
  Synthetic oligonucleotide
gagcctgataacaaaacgatgcaaattccc

SEQ ID NO: 216719 - DNA, 30 bp, Artificial Sequence
  Synthetic oligonucleotide
gaagataaagtgatagctatctaccttccc

SEQ ID NO: 216720 - DNA, 30 bp, Artificial Sequence
  Synthetic oligonucleotide
ccggcaaattgacatggcggttggcttccc

SEQ ID NO: 216721 - DNA, 30 bp, Artificial Sequence
  Synthetic oligonucleotide
gtgttatctgaagaaggtaaagtagttccc

SEQ ID NO: 216722 - DNA, 30 bp, Artificial Sequence
  Synthetic oligonucleotide
tcatggccaacaccggttacctgcgttccc

SEQ ID NO: 216723 - DNA, 30 bp, Artificial Sequence
  Synthetic oligonucleotide
caccaatgtccggtaccaagacaggttccc

SEQ ID NO: 216724 - DNA, 30 bp, Artificial Sequence
  Synthetic oligonucleotide
taatgcagctcgcggatctgtgaggttccc

SEQ ID NO: 216725 - DNA, 30 bp, Artificial Sequence
  Synthetic oligonucleotide
ctggctacccatggtgtgacattggttccc

SEQ ID NO: 216726 - DNA, 30 bp, Artificial Sequence
  Synthetic oligonucleotide
ccctcaaagtttgcccaacatgaaaaagcc

SEQ ID NO: 216727 - DNA, 31 bp, Artificial Sequence
  Synthetic oligonucleotide
gcggaacacacatggaacttttggcaaagcc

SEQ ID NO: 216728 - DNA, 30 bp, Artificial Sequence
  Synthetic oligonucleotide
aggacgtctgagcgtgaacttgggaaagcc

SEQ ID NO: 216729 - DNA, 29 bp, Artificial Sequence
  Synthetic oligonucleotide
acccagaatagaattaagaggataaagcc

SEQ ID NO: 216730 - DNA, 30 bp, Artificial Sequence
  Synthetic oligonucleotide
tacgggaattgattttaaatcggacaagcc

SEQ ID NO: 216731 - DNA, 30 bp, Artificial Sequence
  Synthetic oligonucleotide
taatgatcgggcgggcggagtactcaagcc

SEQ ID NO: 216732 - DNA, 29 bp, Artificial Sequence
  Synthetic oligonucleotide
gcgccccagagtgctggtcatacgaagcc

SEQ ID NO: 216733 - DNA, 30 bp, Artificial Sequence
  Synthetic oligonucleotide
ggacaacaggtgcattgcgtgttggaagcc

SEQ ID NO: 216734 - DNA, 30 bp, Artificial Sequence
  Synthetic oligonucleotide
tggacatgtttctatggctaatatgaagcc

SEQ ID NO: 216735 - DNA, 30 bp, Artificial Sequence
  Synthetic oligonucleotide
gtgccccagggtcatggcaagggataagcc

SEQ ID NO: 216736 - DNA, 30 bp, Artificial Sequence
  Synthetic oligonucleotide
cggtactagaccggaactttactataagcc

SEQ ID NO: 216737 - DNA, 30 bp, Artificial Sequence
  Synthetic oligonucleotide
gggtatccggatagtcctctggcgtaagcc

SEQ ID NO: 216738 - DNA, 30 bp, Artificial Sequence
  Synthetic oligonucleotide
caacaggtttcgatggacaatatgtaagcc

SEQ ID NO: 216739 - DNA, 30 bp, Artificial Sequence
  Synthetic oligonucleotide
ggtaacggggatgcgggaaataattaagcc

SEQ ID NO: 216740 - DNA, 30 bp, Artificial Sequence
  Synthetic oligonucleotide
ctgttgacttatcccggaccggattaagcc

SEQ ID NO: 216741 - DNA, 30 bp, Artificial Sequence
  Synthetic oligonucleotide
cgccgtgctttcgtacgggcgacaacagcc

SEQ ID NO: 216742 - DNA, 30 bp, Artificial Sequence
  Synthetic oligonucleotide
gtcaaacccagtcaagacacagtaacagcc

SEQ ID NO: 216743 - DNA, 30 bp, Artificial Sequence
  Synthetic oligonucleotide
gccaacaccgcctagtccgacaccacagcc

SEQ ID NO: 216744 - DNA, 30 bp, Artificial Sequence
  Synthetic oligonucleotide
ttaagtaaacgtgcgccctcattcacagcc

SEQ ID NO: 216745 - DNA, 30 bp, Artificial Sequence
  Synthetic oligonucleotide
gggggactgctcggtgagtaactgacagcc

SEQ ID NO: 216746 - DNA, 30 bp, Artificial Sequence
  Synthetic oligonucleotide
gacttcgtacgtacatcatatgctacagcc

SEQ ID NO: 216747 - DNA, 30 bp, Artificial Sequence
  Synthetic oligonucleotide
tcacattatgttggatcaaaacctccagcc

SEQ ID NO: 216748 - DNA, 30 bp, Artificial Sequence
  Synthetic oligonucleotide
atgaagtggctgtgtgcttgctgtccagcc

SEQ ID NO: 216749 - DNA, 30 bp, Artificial Sequence
  Synthetic oligonucleotide
tatcttacggaacgaacggcctaagcagcc

SEQ ID NO: 216750 - DNA, 30 bp, Artificial Sequence
  Synthetic oligonucleotide
ccttcgtaggagtatcggggccccgcagcc

SEQ ID NO: 216751 - DNA, 30 bp, Artificial Sequence
  Synthetic oligonucleotide
ctaggggcaccgtcaaatgccgtggcagcc

SEQ ID NO: 216752 - DNA, 30 bp, Artificial Sequence
  Synthetic oligonucleotide
aatcacgcatctgggcaaggtaaatcagcc

SEQ ID NO: 216753 - DNA, 30 bp, Artificial Sequence
  Synthetic oligonucleotide
ttcataccatttaatgtaggcgcgtcagcc

SEQ ID NO: 216754 - DNA, 30 bp, Artificial Sequence
  Synthetic oligonucleotide
cactgagattttaactaaggatacagagcc

SEQ ID NO: 216755 - DNA, 30 bp, Artificial Sequence
  Synthetic oligonucleotide
atttgaatacaaactagaaagggcagagcc

SEQ ID NO: 216756 - DNA, 30 bp, Artificial Sequence
  Synthetic oligonucleotide
agttgacacgagttctgatatggcagagcc

SEQ ID NO: 216757 - DNA, 30 bp, Artificial Sequence
  Synthetic oligonucleotide
tgtaaaccgtctgtgaggcgctaacgagcc

SEQ ID NO: 216758 - DNA, 30 bp, Artificial Sequence
  Synthetic oligonucleotide
agtccccaaagggactttatcgcacgagcc

SEQ ID NO: 216759 - DNA, 30 bp, Artificial Sequence
  Synthetic oligonucleotide
cattacacaaaatataaaggtggacgagcc

SEQ ID NO: 216760 - DNA, 30 bp, Artificial Sequence
  Synthetic oligonucleotide
aatcattgctggatgagctatatccgagcc

SEQ ID NO: 216761 - DNA, 30 bp, Artificial Sequence
  Synthetic oligonucleotide
ctcgaggataatgttaatgacctccgagcc

SEQ ID NO: 216762 - DNA, 30 bp, Artificial Sequence
  Synthetic oligonucleotide
tgttcagtccgggtaactttcttccgagcc

SEQ ID NO: 216763 - DNA, 30 bp, Artificial Sequence
  Synthetic oligonucleotide
gagaataagttctcgagatggggaggagcc

SEQ ID NO: 216764 - DNA, 30 bp, Artificial Sequence
  Synthetic oligonucleotide
taaagacaggcgaattttcttggtggagcc

SEQ ID NO: 216765 - DNA, 30 bp, Artificial Sequence
  Synthetic oligonucleotide
agtaaggggactgttacggtgggatgagcc

SEQ ID NO: 216766 - DNA, 30 bp, Artificial Sequence
  Synthetic oligonucleotide
ctccataagctaacctcgtccatatgagcc

SEQ ID NO: 216767 - DNA, 30 bp, Artificial Sequence
  Synthetic oligonucleotide
ttggtggttgtcagggattagtcgtgagcc

SEQ ID NO: 216768 - DNA, 30 bp, Artificial Sequence
  Synthetic oligonucleotide
tcggagacggatccggcatgcatgtgagcc

SEQ ID NO: 216769 - DNA, 30 bp, Artificial Sequence
  Synthetic oligonucleotide
tctccttaacggtgaaactaactttgagcc

SEQ ID NO: 216770 - DNA, 30 bp, Artificial Sequence
  Synthetic oligonucleotide
caatacatcaggacagtaggggtcatagcc

SEQ ID NO: 216771 - DNA, 30 bp, Artificial Sequence
  Synthetic oligonucleotide
gaccggtctgagaatgtgtcaatgatagcc

SEQ ID NO: 216772 - DNA, 30 bp, Artificial Sequence
  Synthetic oligonucleotide
ggctgtaccatgggtaatgcgcgcctagcc

SEQ ID NO: 216773 - DNA, 30 bp, Artificial Sequence
  Synthetic oligonucleotide
gaggtagtaattaagcagcacaacgtagcc

SEQ ID NO: 216774 - DNA, 30 bp, Artificial Sequence
  Synthetic oligonucleotide
gctatcgatccaggtgatgtaatcgtagcc

SEQ ID NO: 216775 - DNA, 30 bp, Artificial Sequence
  Synthetic oligonucleotide
cagctaacgcacgatggtgatgcggtagcc

SEQ ID NO: 216776 - DNA, 30 bp, Artificial Sequence
  Synthetic oligonucleotide
ggttccctcaacagtaggaacgtggtagcc

SEQ ID NO: 216777 - DNA, 30 bp, Artificial Sequence
  Synthetic oligonucleotide
tgattattcgtatatcacatcgtggtagcc

SEQ ID NO: 216778 - DNA, 30 bp, Artificial Sequence
  Synthetic oligonucleotide
gaaggtagccacaggtatgtctatgtagcc

SEQ ID NO: 216779 - DNA, 30 bp, Artificial Sequence
  Synthetic oligonucleotide
cgtatgatagggttaggcaaccagttagcc

SEQ ID NO: 216780 - DNA, 30 bp, Artificial Sequence
  Synthetic oligonucleotide
ttcacggacggagtcagcccaaggttagcc

SEQ ID NO: 216781 - DNA, 30 bp, Artificial Sequence
  Synthetic oligonucleotide
tcacaaagcgcgtcttgaaggggtttagcc

SEQ ID NO: 216782 - DNA, 30 bp, Artificial Sequence
  Synthetic oligonucleotide
gatctgcacgaaagaatgtaatgtttagcc

SEQ ID NO: 216783 - DNA, 30 bp, Artificial Sequence
  Synthetic oligonucleotide
gcaggtctggaatactaatgcattttagcc

SEQ ID NO: 216784 - DNA, 30 bp, Artificial Sequence
  Synthetic oligonucleotide
tggcaaacgatggataacaaatttttagcc

SEQ ID NO: 216785 - DNA, 30 bp, Artificial Sequence
  Synthetic oligonucleotide
tctgggtgctgctcagaaaagataaacgcc

SEQ ID NO: 216786 - DNA, 30 bp, Artificial Sequence
  Synthetic oligonucleotide
ttaaatcggatggacttcgcgtccaacgcc

SEQ ID NO: 216787 - DNA, 30 bp, Artificial Sequence
  Synthetic oligonucleotide
gactcaattctggggagcgcacgtaacgcc

SEQ ID NO: 216788 - DNA, 30 bp, Artificial Sequence
  Synthetic oligonucleotide
gggtgccattagtcgtaattacggcacgcc

SEQ ID NO: 216789 - DNA, 30 bp, Artificial Sequence
  Synthetic oligonucleotide
tcttggtgggaaattggacgcgaggacgcc

SEQ ID NO: 216790 - DNA, 30 bp, Artificial Sequence
  Synthetic oligonucleotide
ggcacaataaatgcggacgcgttggacgcc

SEQ ID NO: 216791 - DNA, 30 bp, Artificial Sequence
  Synthetic oligonucleotide
ggaaggataaccaactgtacaagctacgcc

SEQ ID NO: 216792 - DNA, 30 bp, Artificial Sequence
  Synthetic oligonucleotide
ttactgtcattcatatttaatcgctacgcc

SEQ ID NO: 216793 - DNA, 30 bp, Artificial Sequence
  Synthetic oligonucleotide
cggtcggtaacaatagatgggaggtacgcc

SEQ ID NO: 216794 - DNA, 30 bp, Artificial Sequence
  Synthetic oligonucleotide
gttgatactacccactaggttcattacgcc

SEQ ID NO: 216795 - DNA, 30 bp, Artificial Sequence
  Synthetic oligonucleotide
tcctatctcaaaaggaattcgccctccgcc

SEQ ID NO: 216796 - DNA, 31 bp, Artificial Sequence
  Synthetic oligonucleotide
tggctaatagagtgggggttagggttccgcc

SEQ ID NO: 216797 - DNA, 30 bp, Artificial Sequence
  Synthetic oligonucleotide
ttaggagatcctgggttagaagcaagcgcc

SEQ ID NO: 216798 - DNA, 30 bp, Artificial Sequence
  Synthetic oligonucleotide
ggggaggctcagccgaaggtaataagcgcc

SEQ ID NO: 216799 - DNA, 30 bp, Artificial Sequence
  Synthetic oligonucleotide
gcgttacacttcagaccgcgcttaagcgcc

SEQ ID NO: 216800 - DNA, 30 bp, Artificial Sequence
  Synthetic oligonucleotide
aagaacatgtctcgcacgcaccgcagcgcc

SEQ ID NO: 216801 - DNA, 30 bp, Artificial Sequence
  Synthetic oligonucleotide
acatattaaaggtaagccgtgccgagcgcc

SEQ ID NO: 216802 - DNA, 30 bp, Artificial Sequence
  Synthetic oligonucleotide
acacgtagacatagtgaatacgcccgcgcc

SEQ ID NO: 216803 - DNA, 30 bp, Artificial Sequence
  Synthetic oligonucleotide
tcgtaggttctaagaattaggaagcgcgcc

SEQ ID NO: 216804 - DNA, 30 bp, Artificial Sequence
  Synthetic oligonucleotide
cagcgaggtacgcaatcaacgtatcgcgcc

SEQ ID NO: 216805 - DNA, 30 bp, Artificial Sequence
  Synthetic oligonucleotide
aaccagtctttacacgcggggctaggcgcc

SEQ ID NO: 216806 - DNA, 30 bp, Artificial Sequence
  Synthetic oligonucleotide
tcggatccatagcggttaaaatagggcgcc

SEQ ID NO: 216807 - DNA, 30 bp, Artificial Sequence
  Synthetic oligonucleotide
cccgtcggacaacaatacttttcgggcgcc

SEQ ID NO: 216808 - DNA, 30 bp, Artificial Sequence
  Synthetic oligonucleotide
gtatgggcagggtttctgggccggggcgcc

SEQ ID NO: 216809 - DNA, 30 bp, Artificial Sequence
  Synthetic oligonucleotide
gcgaaacaacaagtaagttgtccatgcgcc

SEQ ID NO: 216810 - DNA, 30 bp, Artificial Sequence
  Synthetic oligonucleotide
cacaaggcgtgcgaaatttcggtatgcgcc

SEQ ID NO: 216811 - DNA, 30 bp, Artificial Sequence
  Synthetic oligonucleotide
gcacagagtgaagctgaacgcgattgcgcc

SEQ ID NO: 216812 - DNA, 30 bp, Artificial Sequence
  Synthetic oligonucleotide
atgcacatgcaacggcggaatagcatcgcc

SEQ ID NO: 216813 - DNA, 30 bp, Artificial Sequence
  Synthetic oligonucleotide
gtataatgatgtcacggtcaagcgatcgcc

SEQ ID NO: 216814 - DNA, 30 bp, Artificial Sequence
  Synthetic oligonucleotide
cactagtaagggtgatcttttcagctcgcc

SEQ ID NO: 216815 - DNA, 30 bp, Artificial Sequence
  Synthetic oligonucleotide
caagagccactcgtgcgcgactcagtcgcc

SEQ ID NO: 216816 - DNA, 31 bp, Artificial Sequence
  Synthetic oligonucleotide
gtagggggcttgacattaacacagcgtcgcc

SEQ ID NO: 216817 - DNA, 30 bp, Artificial Sequence
  Synthetic oligonucleotide
agcccacaggggatcaggtaaggcgtcgcc

SEQ ID NO: 216818 - DNA, 30 bp, Artificial Sequence
  Synthetic oligonucleotide
ctcaaaccggcggaatataagcgggtcgcc

SEQ ID NO: 216819 - DNA, 30 bp, Artificial Sequence
  Synthetic oligonucleotide
caagtttctcgtcgctaaggaatggtcgcc

SEQ ID NO: 216820 - DNA, 30 bp, Artificial Sequence
  Synthetic oligonucleotide
gggtgatgccatgaaattggttgtgtcgcc

SEQ ID NO: 216821 - DNA, 30 bp, Artificial Sequence
  Synthetic oligonucleotide
gtagagcgtctcagggtgattgcattcgcc

SEQ ID NO: 216822 - DNA, 30 bp, Artificial Sequence
  Synthetic oligonucleotide
accaacggttttgacaggtcatgattcgcc

SEQ ID NO: 216823 - DNA, 30 bp, Artificial Sequence
  Synthetic oligonucleotide
gaacatgagttgtcagacaacgccaaggcc

SEQ ID NO: 216824 - DNA, 30 bp, Artificial Sequence
  Synthetic oligonucleotide
acaactctagttggacctaactggaaggcc

SEQ ID NO: 216825 - DNA, 30 bp, Artificial Sequence
  Synthetic oligonucleotide
atcgataacgggtaagacggctggaaggcc

SEQ ID NO: 216826 - DNA, 30 bp, Artificial Sequence
  Synthetic oligonucleotide
ttaaaggttgcccggaataaagcgcaggcc

SEQ ID NO: 216827 - DNA, 30 bp, Artificial Sequence
  Synthetic oligonucleotide
agaatacagattttcttcgcctgtcaggcc

SEQ ID NO: 216828 - DNA, 30 bp, Artificial Sequence
  Synthetic oligonucleotide
caggccaagattcaagaactcaaagaggcc

SEQ ID NO: 216829 - DNA, 30 bp, Artificial Sequence
  Synthetic oligonucleotide
agggaaaacatgatatacaaccccgaggcc

SEQ ID NO: 216830 - DNA, 30 bp, Artificial Sequence
  Synthetic oligonucleotide
gtaaccgttaaagaccgaggggaggaggcc

SEQ ID NO: 216831 - DNA, 30 bp, Artificial Sequence
  Synthetic oligonucleotide
gggtgatctgttaaaagtttgtatgaggcc

SEQ ID NO: 216832 - DNA, 30 bp, Artificial Sequence
  Synthetic oligonucleotide
cgacggcaaaggccgaaagcaaaataggcc

SEQ ID NO: 216833 - DNA, 30 bp, Artificial Sequence
  Synthetic oligonucleotide
tcagtcgaggttcataactcagactaggcc

SEQ ID NO: 216834 - DNA, 30 bp, Artificial Sequence
  Synthetic oligonucleotide
ggcaaaactaactaataactctcgacggcc

SEQ ID NO: 216835 - DNA, 30 bp, Artificial Sequence
  Synthetic oligonucleotide
cggacgtcctcctcactcccgaggacggcc

SEQ ID NO: 216836 - DNA, 30 bp, Artificial Sequence
  Synthetic oligonucleotide
ttagaatacggccgccacacgccaccggcc

SEQ ID NO: 216837 - DNA, 30 bp, Artificial Sequence
  Synthetic oligonucleotide
ccctggggcgacagtaatggggctccggcc

SEQ ID NO: 216838 - DNA, 30 bp, Artificial Sequence
  Synthetic oligonucleotide
gtcacgtagtccccggagtgtcacgcggcc

SEQ ID NO: 216839 - DNA, 30 bp, Artificial Sequence
  Synthetic oligonucleotide
tcgtagggcaatgtagtgattctcgcggcc

SEQ ID NO: 216840 - DNA, 30 bp, Artificial Sequence
  Synthetic oligonucleotide
accatcttagggacgccggtgatggcggcc

SEQ ID NO: 216841 - DNA, 30 bp, Artificial Sequence
  Synthetic oligonucleotide
gaaagcagggaaatcccctaagtggcggcc

SEQ ID NO: 216842 - DNA, 30 bp, Artificial Sequence
  Synthetic oligonucleotide
cagattgtttagactgaactttctgcggcc

SEQ ID NO: 216843 - DNA, 30 bp, Artificial Sequence
  Synthetic oligonucleotide
tgttctaggatacgaatcgacggtgcggcc

SEQ ID NO: 216844 - DNA, 30 bp, Artificial Sequence
  Synthetic oligonucleotide
ataagatatggcataaagacctaatcggcc

SEQ ID NO: 216845 - DNA, 30 bp, Artificial Sequence
  Synthetic oligonucleotide
gtaagttgccgataatgagtgtgatcggcc

SEQ ID NO: 216846 - DNA, 30 bp, Artificial Sequence
  Synthetic oligonucleotide
attcggtatttagcacacgtgccctcggcc

SEQ ID NO: 216847 - DNA, 30 bp, Artificial Sequence
  Synthetic oligonucleotide
tgtcgtgagtcgtgtttccgagcttcggcc

SEQ ID NO: 216848 - DNA, 30 bp, Artificial Sequence
  Synthetic oligonucleotide
aagacagcgcacgattgttatagttcggcc

SEQ ID NO: 216849 - DNA, 30 bp, Artificial Sequence
  Synthetic oligonucleotide
gagccataaatgaatgtgtaactttcggcc

SEQ ID NO: 216850 - DNA, 30 bp, Artificial Sequence
  Synthetic oligonucleotide
tcgcgacgcattgttttcgccaagagggcc

SEQ ID NO: 216851 - DNA, 30 bp, Artificial Sequence
  Synthetic oligonucleotide
aggaaaccatactgggagagattccgggcc

SEQ ID NO: 216852 - DNA, 30 bp, Artificial Sequence
  Synthetic oligonucleotide
cgtataggctggctagtaaaaactcgggcc

SEQ ID NO: 216853 - DNA, 30 bp, Artificial Sequence
  Synthetic oligonucleotide
atgcgaaagaggatccttgattttcgggcc

SEQ ID NO: 216854 - DNA, 30 bp, Artificial Sequence
  Synthetic oligonucleotide
cggggaggcggagagcatgaatctggggcc

SEQ ID NO: 216855 - DNA, 30 bp, Artificial Sequence
  Synthetic oligonucleotide
cggggcaaagtatcatatatttaatgggcc

SEQ ID NO: 216856 - DNA, 30 bp, Artificial Sequence
  Synthetic oligonucleotide
aaaaatggaacaggttgatgaggctgggcc

SEQ ID NO: 216857 - DNA, 30 bp, Artificial Sequence
  Synthetic oligonucleotide
aactgcagtttaggagaaagtgtttgggcc

SEQ ID NO: 216858 - DNA, 30 bp, Artificial Sequence
  Synthetic oligonucleotide
cttctatctgactctccagttttcatggcc

SEQ ID NO: 216859 - DNA, 30 bp, Artificial Sequence
  Synthetic oligonucleotide
tgactcgtgttgtgtgggttagggatggcc

SEQ ID NO: 216860 - DNA, 30 bp, Artificial Sequence
  Synthetic oligonucleotide
tgctatgatcctttacattacacactggcc

SEQ ID NO: 216861 - DNA, 30 bp, Artificial Sequence
  Synthetic oligonucleotide
acaagaacacggtccggccactcactggcc

SEQ ID NO: 216862 - DNA, 30 bp, Artificial Sequence
  Synthetic oligonucleotide
tacggttccagaaggtgagagagactggcc

SEQ ID NO: 216863 - DNA, 30 bp, Artificial Sequence
  Synthetic oligonucleotide
ctaacggtggggacattaggcacgctggcc

SEQ ID NO: 216864 - DNA, 30 bp, Artificial Sequence
  Synthetic oligonucleotide
caatctggggtctttcagggtcggctggcc

SEQ ID NO: 216865 - DNA, 30 bp, Artificial Sequence
  Synthetic oligonucleotide
ttatcttgaaacctaagagtttggctggcc

SEQ ID NO: 216866 - DNA, 30 bp, Artificial Sequence
  Synthetic oligonucleotide
caccatataagtacgcgagctcatctggcc

SEQ ID NO: 216867 - DNA, 30 bp, Artificial Sequence
  Synthetic oligonucleotide
gggtaagccaggctcagagagtaagtggcc

SEQ ID NO: 216868 - DNA, 30 bp, Artificial Sequence
  Synthetic oligonucleotide
gggcgtacccgggaatctaagatagtggcc

SEQ ID NO: 216869 - DNA, 30 bp, Artificial Sequence
  Synthetic oligonucleotide
catttgctcagtgggttatgcgttgtggcc

SEQ ID NO: 216870 - DNA, 30 bp, Artificial Sequence
  Synthetic oligonucleotide
tcgaatggtcagactattacggacttggcc

SEQ ID NO: 216871 - DNA, 30 bp, Artificial Sequence
  Synthetic oligonucleotide
agtagaaatacactgtaactgacgaatgcc

SEQ ID NO: 216872 - DNA, 30 bp, Artificial Sequence
  Synthetic oligonucleotide
tgcggatccctataaaccgagttgaatgcc

SEQ ID NO: 216873 - DNA, 30 bp, Artificial Sequence
  Synthetic oligonucleotide
atacggcacaagacttcgatagctaatgcc

SEQ ID NO: 216874 - DNA, 30 bp, Artificial Sequence
  Synthetic oligonucleotide
acttggagtaaaataacggcatttaatgcc

SEQ ID NO: 216875 - DNA, 30 bp, Artificial Sequence
  Synthetic oligonucleotide
agttatcattagtgattaatgccacatgcc

SEQ ID NO: 216876 - DNA, 30 bp, Artificial Sequence
  Synthetic oligonucleotide
agagatgtgttggttctgaggtcacatgcc

SEQ ID NO: 216877 - DNA, 30 bp, Artificial Sequence
  Synthetic oligonucleotide
cgttctgagccatcatgtatacatcatgcc

SEQ ID NO: 216878 - DNA, 30 bp, Artificial Sequence
  Synthetic oligonucleotide
ccacggatgcaaggagtggccactcatgcc

SEQ ID NO: 216879 - DNA, 30 bp, Artificial Sequence
  Synthetic oligonucleotide
ggaagaatatgaaaaccggagggagatgcc

SEQ ID NO: 216880 - DNA, 30 bp, Artificial Sequence
  Synthetic oligonucleotide
gaagcaatcagctttttagtgactgatgcc

SEQ ID NO: 216881 - DNA, 30 bp, Artificial Sequence
  Synthetic oligonucleotide
gcaccggaacgcgtgtgaccagccactgcc

SEQ ID NO: 216882 - DNA, 30 bp, Artificial Sequence
  Synthetic oligonucleotide
tggataataaccgttactaccgggactgcc

SEQ ID NO: 216883 - DNA, 30 bp, Artificial Sequence
  Synthetic oligonucleotide
ccttggtccgccaacagccgaacgcctgcc

SEQ ID NO: 216884 - DNA, 30 bp, Artificial Sequence
  Synthetic oligonucleotide
tacagatgcgttaaaccggagcctcctgcc

SEQ ID NO: 216885 - DNA, 30 bp, Artificial Sequence
  Synthetic oligonucleotide
ctggcaaaatattacgtgttccttcctgcc

SEQ ID NO: 216886 - DNA, 30 bp, Artificial Sequence
  Synthetic oligonucleotide
cacgacggggcgagtcaccgggttcctgcc

SEQ ID NO: 216887 - DNA, 30 bp, Artificial Sequence
  Synthetic oligonucleotide
cgtacaggacttacgtccctagtagctgcc

SEQ ID NO: 216888 - DNA, 30 bp, Artificial Sequence
  Synthetic oligonucleotide
ccgttaaaactgacggttcggatcgctgcc

SEQ ID NO: 216889 - DNA, 30 bp, Artificial Sequence
  Synthetic oligonucleotide
gtgatgatgcgtgtatagacgacctctgcc

SEQ ID NO: 216890 - DNA, 30 bp, Artificial Sequence
  Synthetic oligonucleotide
acaatgagacagtataataatcagtctgcc

SEQ ID NO: 216891 - DNA, 30 bp, Artificial Sequence
  Synthetic oligonucleotide
cccaaaccgattgacatgactgagtctgcc

SEQ ID NO: 216892 - DNA, 30 bp, Artificial Sequence
  Synthetic oligonucleotide
ggaacgcgtaggaatatcatgccaagtgcc

SEQ ID NO: 216893 - DNA, 30 bp, Artificial Sequence
  Synthetic oligonucleotide
gaaattgaattgggatgtgtaggaagtgcc

SEQ ID NO: 216894 - DNA, 30 bp, Artificial Sequence
  Synthetic oligonucleotide
tgaaagagcaacggtaccgcggggagtgcc

SEQ ID NO: 216895 - DNA, 30 bp, Artificial Sequence
  Synthetic oligonucleotide
atatggtaatgggtcgggtgatatagtgcc

SEQ ID NO: 216896 - DNA, 30 bp, Artificial Sequence
  Synthetic oligonucleotide
acacattttgtaaactgaggacctagtgcc

SEQ ID NO: 216897 - DNA, 30 bp, Artificial Sequence
  Synthetic oligonucleotide
atctgaagcgctaaggaggactgtagtgcc

SEQ ID NO: 216898 - DNA, 30 bp, Artificial Sequence
  Synthetic oligonucleotide
ctatgttacttgaggggcttaaaccgtgcc

SEQ ID NO: 216899 - DNA, 30 bp, Artificial Sequence
  Synthetic oligonucleotide
taaaggaggtatacggtttccacccgtgcc

SEQ ID NO: 216900 - DNA, 30 bp, Artificial Sequence
  Synthetic oligonucleotide
aggtttgcgtaaacggcagatcctcgtgcc

SEQ ID NO: 216901 - DNA, 30 bp, Artificial Sequence
  Synthetic oligonucleotide
ggaagcgcccagttacatggtggaggtgcc

SEQ ID NO: 216902 - DNA, 30 bp, Artificial Sequence
  Synthetic oligonucleotide
tacatcgtttcacagcactcgataggtgcc

SEQ ID NO: 216903 - DNA, 30 bp, Artificial Sequence
  Synthetic oligonucleotide
agcgggcagcgaactcaaacttccggtgcc

SEQ ID NO: 216904 - DNA, 30 bp, Artificial Sequence
  Synthetic oligonucleotide
tgccttaggcggcggtggtgtccgggtgcc

SEQ ID NO: 216905 - DNA, 30 bp, Artificial Sequence
  Synthetic oligonucleotide
atggtcagacggacataaagtttgggtgcc

SEQ ID NO: 216906 - DNA, 30 bp, Artificial Sequence
  Synthetic oligonucleotide
atttgggagcgcaagagttgaggtggtgcc

SEQ ID NO: 216907 - DNA, 30 bp, Artificial Sequence
  Synthetic oligonucleotide
gttggtgccggccggtcggtttcgtgtgcc

SEQ ID NO: 216908 - DNA, 30 bp, Artificial Sequence
  Synthetic oligonucleotide
aatggggtaaatgaccagtgacattgtgcc

SEQ ID NO: 216909 - DNA, 30 bp, Artificial Sequence
  Synthetic oligonucleotide
atagtcagaaccgaacgcgtataaattgcc

SEQ ID NO: 216910 - DNA, 30 bp, Artificial Sequence
  Synthetic oligonucleotide
cacatcggaagatttaacaaaacaattgcc

SEQ ID NO: 216911 - DNA, 30 bp, Artificial Sequence
  Synthetic oligonucleotide
tagctcgcgaaaaaccacgaggtaattgcc

SEQ ID NO: 216912 - DNA, 30 bp, Artificial Sequence
  Synthetic oligonucleotide
tatgtaaacccaagtcgatcccacattgcc

SEQ ID NO: 216913 - DNA, 30 bp, Artificial Sequence
  Synthetic oligonucleotide
aaggcaagtctagtaggtcgtcgcattgcc

SEQ ID NO: 216914 - DNA, 30 bp, Artificial Sequence
  Synthetic oligonucleotide
ggtctgaggaagggacttcgctagattgcc

SEQ ID NO: 216915 - DNA, 30 bp, Artificial Sequence
  Synthetic oligonucleotide
cagggtgtgaaggtcaggaggaatattgcc

SEQ ID NO: 216916 - DNA, 30 bp, Artificial Sequence
  Synthetic oligonucleotide
cagggtgaagtttagtaatactctattgcc

SEQ ID NO: 216917 - DNA, 30 bp, Artificial Sequence
  Synthetic oligonucleotide
attactgcatctgtcacattggtccttgcc

SEQ ID NO: 216918 - DNA, 30 bp, Artificial Sequence
  Synthetic oligonucleotide
aacggtcgaattcgggtacctgcagttgcc

SEQ ID NO: 216919 - DNA, 30 bp, Artificial Sequence
  Synthetic oligonucleotide
tagaggcttacatgcgtggtagatgttgcc

SEQ ID NO: 216920 - DNA, 30 bp, Artificial Sequence
  Synthetic oligonucleotide
gacaattcgggttatagagcgtgtgttgcc

SEQ ID NO: 216921 - DNA, 30 bp, Artificial Sequence
  Synthetic oligonucleotide
gcgtaaaaaactactaatctcattgttgcc

SEQ ID NO: 216922 - DNA, 30 bp, Artificial Sequence
  Synthetic oligonucleotide
gatacgctcacgcatacgtgccaatttgcc

SEQ ID NO: 216923 - DNA, 27 bp, Artificial Sequence
  Synthetic oligonucleotide
ttcgtctgagtatgatatcagtttgcc

SEQ ID NO: 216924 - DNA, 30 bp, Artificial Sequence
  Synthetic oligonucleotide
gtgtgtattcacgggtcaacgctgtttgcc

SEQ ID NO: 216925 - DNA, 30 bp, Artificial Sequence
  Synthetic oligonucleotide
cggggttatccaagcaacttggattttgcc

SEQ ID NO: 216926 - DNA, 30 bp, Artificial Sequence
  Synthetic oligonucleotide
gtcgtatggatcagtcccaggatttttgcc

SEQ ID NO: 216927 - DNA, 30 bp, Artificial Sequence
  Synthetic oligonucleotide
ggctatccggtgaagatggatgaaaaatcc

SEQ ID NO: 216928 - DNA, 30 bp, Artificial Sequence
  Synthetic oligonucleotide
ccgatttttcgtactatagggtaaaaatcc

SEQ ID NO: 216929 - DNA, 30 bp, Artificial Sequence
  Synthetic oligonucleotide
gcgcggaatatttacatttatgagaaatcc

SEQ ID NO: 216930 - DNA, 30 bp, Artificial Sequence
  Synthetic oligonucleotide
ttaccatcgaatggaaattcgttacaatcc

SEQ ID NO: 216931 - DNA, 30 bp, Artificial Sequence
  Synthetic oligonucleotide
agtggttatattaaggaggagtcgcaatcc

SEQ ID NO: 216932 - DNA, 30 bp, Artificial Sequence
  Synthetic oligonucleotide
taatcacctggctgcgcgtgggttcaatcc

SEQ ID NO: 216933 - DNA, 30 bp, Artificial Sequence
  Synthetic oligonucleotide
tcgaggctccgtcaaacaaccagagaatcc

SEQ ID NO: 216934 - DNA, 30 bp, Artificial Sequence
  Synthetic oligonucleotide
aagtgatctcatacgtgatggggagaatcc

SEQ ID NO: 216935 - DNA, 30 bp, Artificial Sequence
  Synthetic oligonucleotide
ctaaaaggaattgcgggcatccacgaatcc

SEQ ID NO: 216936 - DNA, 30 bp, Artificial Sequence
  Synthetic oligonucleotide
agagagtattttcccatcttgcgcgaatcc

SEQ ID NO: 216937 - DNA, 30 bp, Artificial Sequence
  Synthetic oligonucleotide
agagctagttagatgggaaggggggaatcc

SEQ ID NO: 216938 - DNA, 30 bp, Artificial Sequence
  Synthetic oligonucleotide
cttaattttggttaagtaataggataatcc

SEQ ID NO: 216939 - DNA, 30 bp, Artificial Sequence
  Synthetic oligonucleotide
cggttgccagggtgaagtggcatttaatcc

SEQ ID NO: 216940 - DNA, 30 bp, Artificial Sequence
  Synthetic oligonucleotide
agttaacaggggttggccgtctaaacatcc

SEQ ID NO: 216941 - DNA, 30 bp, Artificial Sequence
  Synthetic oligonucleotide
cgaattatgcgaacgtattctaagacatcc

SEQ ID NO: 216942 - DNA, 30 bp, Artificial Sequence
  Synthetic oligonucleotide
gccctccgagcacgagtaaaacttacatcc

SEQ ID NO: 216943 - DNA, 30 bp, Artificial Sequence
  Synthetic oligonucleotide
ccacgactagagtaaccgcgccaaccatcc

SEQ ID NO: 216944 - DNA, 30 bp, Artificial Sequence
  Synthetic oligonucleotide
tgaagtcacaggcatgtcgaactaccatcc

SEQ ID NO: 216945 - DNA, 30 bp, Artificial Sequence
  Synthetic oligonucleotide
caagcaatacacgtacgctttctaccatcc

SEQ ID NO: 216946 - DNA, 30 bp, Artificial Sequence
  Synthetic oligonucleotide
ccgtctttaatactcaccatggacccatcc

SEQ ID NO: 216947 - DNA, 30 bp, Artificial Sequence
  Synthetic oligonucleotide
gggatcgaccgcgctcagcacatcccatcc

SEQ ID NO: 216948 - DNA, 30 bp, Artificial Sequence
  Synthetic oligonucleotide
gatggggcgatctggcgcctgatcccatcc

SEQ ID NO: 216949 - DNA, 30 bp, Artificial Sequence
  Synthetic oligonucleotide
aacgttcgctttcacgtgatcaagccatcc

SEQ ID NO: 216950 - DNA, 30 bp, Artificial Sequence
  Synthetic oligonucleotide
aatggcaatgtataatatagtaaggcatcc

SEQ ID NO: 216951 - DNA, 30 bp, Artificial Sequence
  Synthetic oligonucleotide
cggtccgacagctatgcggggatggcatcc

SEQ ID NO: 216952 - DNA, 30 bp, Artificial Sequence
  Synthetic oligonucleotide
tcagcagcaattccgcaatgccattcatcc

SEQ ID NO: 216953 - DNA, 30 bp, Artificial Sequence
  Synthetic oligonucleotide
gcattccagtaaagggattacatttcatcc

SEQ ID NO: 216954 - DNA, 30 bp, Artificial Sequence
  Synthetic oligonucleotide
aacagtaagaaggttcagtcaaaaagatcc

SEQ ID NO: 216955 - DNA, 30 bp, Artificial Sequence
  Synthetic oligonucleotide
tctgagcaacacgcgcttgctataagatcc

SEQ ID NO: 216956 - DNA, 30 bp, Artificial Sequence
  Synthetic oligonucleotide
agcttcaagttgggttttctgttcagatcc

SEQ ID NO: 216957 - DNA, 30 bp, Artificial Sequence
  Synthetic oligonucleotide
taatgccaacactgtggatataatagatcc

SEQ ID NO: 216958 - DNA, 30 bp, Artificial Sequence
  Synthetic oligonucleotide
ggtgcgggtagcctttgttattgtagatcc

SEQ ID NO: 216959 - DNA, 30 bp, Artificial Sequence
  Synthetic oligonucleotide
ctgattgaacaatgttagataattagatcc

SEQ ID NO: 216960 - DNA, 30 bp, Artificial Sequence
  Synthetic oligonucleotide
gtgatggtcagtcgaaaggtccttagatcc

SEQ ID NO: 216961 - DNA, 30 bp, Artificial Sequence
  Synthetic oligonucleotide
tactcgaacgatcgaaggcataaccgatcc

SEQ ID NO: 216962 - DNA, 30 bp, Artificial Sequence
  Synthetic oligonucleotide
cgcgcgccatactgtgggggttcccgatcc

SEQ ID NO: 216963 - DNA, 30 bp, Artificial Sequence
  Synthetic oligonucleotide
gggtctatgttgccgttacactgccgatcc

SEQ ID NO: 216964 - DNA, 30 bp, Artificial Sequence
  Synthetic oligonucleotide
gaggcaaaagttctgtgatcttcgcgatcc

SEQ ID NO: 216965 - DNA, 30 bp, Artificial Sequence
  Synthetic oligonucleotide
cagttatcggaaatccatctgtagggatcc

SEQ ID NO: 216966 - DNA, 30 bp, Artificial Sequence
  Synthetic oligonucleotide
tcacatacaatgacttaagtgcctggatcc

SEQ ID NO: 216967 - DNA, 29 bp, Artificial Sequence
  Synthetic oligonucleotide
aaggattgacgtcttttcttattggatcc

SEQ ID NO: 216968 - DNA, 30 bp, Artificial Sequence
  Synthetic oligonucleotide
attcgctgagaattttcgcgggaatgatcc

SEQ ID NO: 216969 - DNA, 30 bp, Artificial Sequence
  Synthetic oligonucleotide
ccacagattatgcgagggataacttgatcc

SEQ ID NO: 216970 - DNA, 30 bp, Artificial Sequence
  Synthetic oligonucleotide
gacttgtcaaaaggagaaaactaaatatcc

SEQ ID NO: 216971 - DNA, 30 bp, Artificial Sequence
  Synthetic oligonucleotide
caggagatttcttcgcacactgtaatatcc

SEQ ID NO: 216972 - DNA, 40 bp, Artificial Sequence
  Synthetic oligonucleotide
ctactaacttgactcgggttctcgtgctcgacatatatcc

SEQ ID NO: 216973 - DNA, 30 bp, Artificial Sequence
  Synthetic oligonucleotide
ctcagtgttaaggctgttaagctactatcc

SEQ ID NO: 216974 - DNA, 30 bp, Artificial Sequence
  Synthetic oligonucleotide
acggccttcttcaccagatctgtcctatcc

SEQ ID NO: 216975 - DNA, 31 bp, Artificial Sequence
  Synthetic oligonucleotide
cgtaggagccttcgaactggcactgctatcc

SEQ ID NO: 216976 - DNA, 30 bp, Artificial Sequence
  Synthetic oligonucleotide
gaggcgtggacgttttcgtggtgtctatcc

SEQ ID NO: 216977 - DNA, 30 bp, Artificial Sequence
  Synthetic oligonucleotide
ccacatgaagggcttctgcgcacagtatcc

SEQ ID NO: 216978 - DNA, 30 bp, Artificial Sequence
  Synthetic oligonucleotide
ccaatcgaggtcaagacatttgctgtatcc

SEQ ID NO: 216979 - DNA, 30 bp, Artificial Sequence
  Synthetic oligonucleotide
acattcggagccgaggctctcgttgtatcc

SEQ ID NO: 216980 - DNA, 30 bp, Artificial Sequence
  Synthetic oligonucleotide
gtaggtgcaggaaaattctcgtttgtatcc

SEQ ID NO: 216981 - DNA, 30 bp, Artificial Sequence
  Synthetic oligonucleotide
cgttcatccaatggggtatgaggcttatcc

SEQ ID NO: 216982 - DNA, 30 bp, Artificial Sequence
  Synthetic oligonucleotide
ctgatacgagggggagctgagttgttatcc

SEQ ID NO: 216983 - DNA, 30 bp, Artificial Sequence
  Synthetic oligonucleotide
aggatgagtgtatggggccgtaaaaactcc

SEQ ID NO: 216984 - DNA, 30 bp, Artificial Sequence
  Synthetic oligonucleotide
cgtacggggtaaactcaagctcccaactcc

SEQ ID NO: 216985 - DNA, 30 bp, Artificial Sequence
  Synthetic oligonucleotide
agagtgggggatggtatgaccggcaactcc

SEQ ID NO: 216986 - DNA, 30 bp, Artificial Sequence
  Synthetic oligonucleotide
cattatcgaacgagacttgaccggaactcc

SEQ ID NO: 216987 - DNA, 30 bp, Artificial Sequence
  Synthetic oligonucleotide
acggggatcttctcgagatgtgaacactcc

SEQ ID NO: 216988 - DNA, 30 bp, Artificial Sequence
  Synthetic oligonucleotide
gctggctgttctatggagtagcgacactcc

SEQ ID NO: 216989 - DNA, 30 bp, Artificial Sequence
  Synthetic oligonucleotide
gatggaatagacgtgcggaggtgccactcc

SEQ ID NO: 216990 - DNA, 30 bp, Artificial Sequence
  Synthetic oligonucleotide
ataaaggggactagtcaaaagtggcactcc

SEQ ID NO: 216991 - DNA, 30 bp, Artificial Sequence
  Synthetic oligonucleotide
gggaagtggtgtcgggggacgcatcactcc

SEQ ID NO: 216992 - DNA, 30 bp, Artificial Sequence
  Synthetic oligonucleotide
tggaaatccggaaacggctggcaagactcc

SEQ ID NO: 216993 - DNA, 30 bp, Artificial Sequence
  Synthetic oligonucleotide
agtaggaggatatccaaccccggagactcc

SEQ ID NO: 216994 - DNA, 30 bp, Artificial Sequence
  Synthetic oligonucleotide
ggctagaggagagagtacttcgacgactcc

SEQ ID NO: 216995 - DNA, 30 bp, Artificial Sequence
  Synthetic oligonucleotide
aggtaaagaatgatgggattgtcatactcc

SEQ ID NO: 216996 - DNA, 30 bp, Artificial Sequence
  Synthetic oligonucleotide
tcgaaattataacagtgctgtcagtactcc

SEQ ID NO: 216997 - DNA, 30 bp, Artificial Sequence
  Synthetic oligonucleotide
tgagtagcgattcggtatatacgcacctcc

SEQ ID NO: 216998 - DNA, 30 bp, Artificial Sequence
  Synthetic oligonucleotide
gacaatactgacaccatctttacgacctcc

SEQ ID NO: 216999 - DNA, 30 bp, Artificial Sequence
  Synthetic oligonucleotide
cggaatccgaacccgtgtgtggatacctcc

SEQ ID NO: 217000 - DNA, 30 bp, Artificial Sequence
  Synthetic oligonucleotide
ggactgctgggtaaggatttcggaccctcc

SEQ ID NO: 217001 - DNA, 30 bp, Artificial Sequence
  Synthetic oligonucleotide
tgaacagtgcggttgataacttgaccctcc

SEQ ID NO: 217002 - DNA, 30 bp, Artificial Sequence
  Synthetic oligonucleotide
taggtgaatgtacaagtagtcgacccctcc

SEQ ID NO: 217003 - DNA, 31 bp, Artificial Sequence
  Synthetic oligonucleotide
ccctgcccgtgtagaggccagacctccctcc

SEQ ID NO: 217004 - DNA, 30 bp, Artificial Sequence
  Synthetic oligonucleotide
aagcacgttgtaccgacgaatggagcctcc

SEQ ID NO: 217005 - DNA, 30 bp, Artificial Sequence
  Synthetic oligonucleotide
cgggcggtaaggctagtttgttacgcctcc

SEQ ID NO: 217006 - DNA, 30 bp, Artificial Sequence
  Synthetic oligonucleotide
ggaacccacggttctgacagttccgcctcc

SEQ ID NO: 217007 - DNA, 30 bp, Artificial Sequence
  Synthetic oligonucleotide
ataatggcgactactccgcgcatcgcctcc

SEQ ID NO: 217008 - DNA, 30 bp, Artificial Sequence
  Synthetic oligonucleotide
gcggaggtacaaaaacagaaaagatcctcc

SEQ ID NO: 217009 - DNA, 30 bp, Artificial Sequence
  Synthetic oligonucleotide
cggattgcaccgcgccttgtatgctcctcc

SEQ ID NO: 217010 - DNA, 30 bp, Artificial Sequence
  Synthetic oligonucleotide
gtgttctaacctttgtctgtgaagtcctcc

SEQ ID NO: 217011 - DNA, 30 bp, Artificial Sequence
  Synthetic oligonucleotide
tggaacaattagaaatatgaaaggtcctcc

SEQ ID NO: 217012 - DNA, 30 bp, Artificial Sequence
  Synthetic oligonucleotide
agcggacggcagccttcaaaggtgtcctcc

SEQ ID NO: 217013 - DNA, 30 bp, Artificial Sequence
  Synthetic oligonucleotide
caaattaacgaccgtgggcacctgagctcc

SEQ ID NO: 217014 - DNA, 30 bp, Artificial Sequence
  Synthetic oligonucleotide
gtggtatcaaatgccgttatgtgtagctcc

SEQ ID NO: 217015 - DNA, 30 bp, Artificial Sequence
  Synthetic oligonucleotide
acgggcgcaccagcttcttactaacgctcc

SEQ ID NO: 217016 - DNA, 29 bp, Artificial Sequence
  Synthetic oligonucleotide
agaacctttaggtggtgaagtcacgctcc

SEQ ID NO: 217017 - DNA, 30 bp, Artificial Sequence
  Synthetic oligonucleotide
gaacgaacgaaatgagcgacatttggctcc

SEQ ID NO: 217018 - DNA, 30 bp, Artificial Sequence
  Synthetic oligonucleotide
gtagtcccactaaccggtactttctgctcc

SEQ ID NO: 217019 - DNA, 30 bp, Artificial Sequence
  Synthetic oligonucleotide
aactagtgattagagccgacatagtgctcc

SEQ ID NO: 217020 - DNA, 30 bp, Artificial Sequence
  Synthetic oligonucleotide
gtgaccagttccggttattcctagtgctcc

SEQ ID NO: 217021 - DNA, 30 bp, Artificial Sequence
  Synthetic oligonucleotide
ccgatttggcgattacgaatgaattgctcc

SEQ ID NO: 217022 - DNA, 30 bp, Artificial Sequence
  Synthetic oligonucleotide
gacttgtcgtataggtttaacgccatctcc

SEQ ID NO: 217023 - DNA, 30 bp, Artificial Sequence
  Synthetic oligonucleotide
tcatagatgttactgttgtgtggtatctcc

SEQ ID NO: 217024 - DNA, 30 bp, Artificial Sequence
  Synthetic oligonucleotide
catagggtaatatgtatttaaaaactctcc

SEQ ID NO: 217025 - DNA, 30 bp, Artificial Sequence
  Synthetic oligonucleotide
tgactcggaatgattaacctcgaactctcc

SEQ ID NO: 217026 - DNA, 30 bp, Artificial Sequence
  Synthetic oligonucleotide
cggagccggtatgttcattggcgactctcc

SEQ ID NO: 217027 - DNA, 30 bp, Artificial Sequence
  Synthetic oligonucleotide
gaaggtatccggtttgtccttacgctctcc

SEQ ID NO: 217028 - DNA, 30 bp, Artificial Sequence
  Synthetic oligonucleotide
ggtagagctcccaatggccgcaggctctcc

SEQ ID NO: 217029 - DNA, 30 bp, Artificial Sequence
  Synthetic oligonucleotide
aatagttccgcatataacagcaaagtctcc

SEQ ID NO: 217030 - DNA, 30 bp, Artificial Sequence
  Synthetic oligonucleotide
gcgctggtgaggtattacaaaactgtctcc

SEQ ID NO: 217031 - DNA, 30 bp, Artificial Sequence
  Synthetic oligonucleotide
ggtaccaatctgggagccaccagtgtctcc

SEQ ID NO: 217032 - DNA, 30 bp, Artificial Sequence
  Synthetic oligonucleotide
caatcttggcggtatgagaaacaattctcc

SEQ ID NO: 217033 - DNA, 30 bp, Artificial Sequence
  Synthetic oligonucleotide
agctaaatgttgtagtggaaatgattctcc

SEQ ID NO: 217034 - DNA, 30 bp, Artificial Sequence
  Synthetic oligonucleotide
gatacgggcaggttaaaaaagagtttctcc

SEQ ID NO: 217035 - DNA, 30 bp, Artificial Sequence
  Synthetic oligonucleotide
tctgtggacttgctactgctgcacaagtcc

SEQ ID NO: 217036 - DNA, 30 bp, Artificial Sequence
  Synthetic oligonucleotide
agagtttaacaaaagtgtaagtgtaagtcc

SEQ ID NO: 217037 - DNA, 30 bp, Artificial Sequence
  Synthetic oligonucleotide
agggttaaaatgtcataactccatcagtcc

SEQ ID NO: 217038 - DNA, 30 bp, Artificial Sequence
  Synthetic oligonucleotide
agtcgtatgtcaacccacagagcagagtcc

SEQ ID NO: 217039 - DNA, 30 bp, Artificial Sequence
  Synthetic oligonucleotide
ggaagggggcctaaattctgtggagagtcc

SEQ ID NO: 217040 - DNA, 30 bp, Artificial Sequence
  Synthetic oligonucleotide
ccagccagttgctaggaataattagagtcc

SEQ ID NO: 217041 - DNA, 30 bp, Artificial Sequence
  Synthetic oligonucleotide
acaagttataaccatcggaaaactgagtcc

SEQ ID NO: 217042 - DNA, 30 bp, Artificial Sequence
  Synthetic oligonucleotide
aagtgagcgtaacgtacgtcaaaatagtcc

SEQ ID NO: 217043 - DNA, 30 bp, Artificial Sequence
  Synthetic oligonucleotide
tgagtaagaaggtatggatcttggtagtcc

SEQ ID NO: 217044 - DNA, 30 bp, Artificial Sequence
  Synthetic oligonucleotide
gaaacactagaaagttcaagatcttagtcc

SEQ ID NO: 217045 - DNA, 30 bp, Artificial Sequence
  Synthetic oligonucleotide
atgcaatccagcatcctagcgagttagtcc

SEQ ID NO: 217046 - DNA, 31 bp, Artificial Sequence
  Synthetic oligonucleotide
ctccgagaagggcgagctagaattttagtcc

SEQ ID NO: 217047 - DNA, 30 bp, Artificial Sequence
  Synthetic oligonucleotide
ctacagtggagatctgtgaagcaaacgtcc

SEQ ID NO: 217048 - DNA, 30 bp, Artificial Sequence
  Synthetic oligonucleotide
cgattagattagctgggagaccgaacgtcc

SEQ ID NO: 217049 - DNA, 30 bp, Artificial Sequence
  Synthetic oligonucleotide
ataggacttaagcccgcggggtccacgtcc

SEQ ID NO: 217050 - DNA, 30 bp, Artificial Sequence
  Synthetic oligonucleotide
taacgtttctgaaagataaattatacgtcc

SEQ ID NO: 217051 - DNA, 30 bp, Artificial Sequence
  Synthetic oligonucleotide
gatgtgggtaggatcattgggcctacgtcc

SEQ ID NO: 217052 - DNA, 30 bp, Artificial Sequence
  Synthetic oligonucleotide
tagcccaaaacttgtttgcaccgtacgtcc

SEQ ID NO: 217053 - DNA, 30 bp, Artificial Sequence
  Synthetic oligonucleotide
taatgaaaaatctggtccgggcaaccgtcc

SEQ ID NO: 217054 - DNA, 30 bp, Artificial Sequence
  Synthetic oligonucleotide
aggtaaccaaaggattggtggacgccgtcc

SEQ ID NO: 217055 - DNA, 30 bp, Artificial Sequence
  Synthetic oligonucleotide
acgtccggcgcgcattcaagcctgccgtcc

SEQ ID NO: 217056 - DNA, 30 bp, Artificial Sequence
  Synthetic oligonucleotide
ttgacgcgagaagacgaagggattccgtcc

SEQ ID NO: 217057 - DNA, 29 bp, Artificial Sequence
  Synthetic oligonucleotide
tccatgtggattatattttgaaagcgtcc

SEQ ID NO: 217058 - DNA, 30 bp, Artificial Sequence
  Synthetic oligonucleotide
gatcggtatgttctgattaatggcgcgtcc

SEQ ID NO: 217059 - DNA, 30 bp, Artificial Sequence
  Synthetic oligonucleotide
ccgcttgcgccaacagagctatattcgtcc

SEQ ID NO: 217060 - DNA, 30 bp, Artificial Sequence
  Synthetic oligonucleotide
ggcacgacaacagttagtccgttttcgtcc

SEQ ID NO: 217061 - DNA, 30 bp, Artificial Sequence
  Synthetic oligonucleotide
ggctataaacgcttctcgtacagcaggtcc

SEQ ID NO: 217062 - DNA, 30 bp, Artificial Sequence
  Synthetic oligonucleotide
caggcttagtcatgggcgcgttcgaggtcc

SEQ ID NO: 217063 - DNA, 30 bp, Artificial Sequence
  Synthetic oligonucleotide
tccaactgttctgacatcggcacacggtcc

SEQ ID NO: 217064 - DNA, 30 bp, Artificial Sequence
  Synthetic oligonucleotide
gttacaaaggtgtcgtacttatgacggtcc

SEQ ID NO: 217065 - DNA, 30 bp, Artificial Sequence
  Synthetic oligonucleotide
tgccaaagcttgagcagttcagcgcggtcc

SEQ ID NO: 217066 - DNA, 30 bp, Artificial Sequence
  Synthetic oligonucleotide
caatgggtgtcccgcgaactgcaagggtcc

SEQ ID NO: 217067 - DNA, 30 bp, Artificial Sequence
  Synthetic oligonucleotide
ggactgcaaactctctgtaaatcagggtcc

SEQ ID NO: 217068 - DNA, 30 bp, Artificial Sequence
  Synthetic oligonucleotide
acaccctttatctggcgtaaaagagggtcc

SEQ ID NO: 217069 - DNA, 30 bp, Artificial Sequence
  Synthetic oligonucleotide
aaggaatccgctggaaaaaataaggggtcc

SEQ ID NO: 217070 - DNA, 30 bp, Artificial Sequence
  Synthetic oligonucleotide
tcggctagccccctaactcactcggggtcc

SEQ ID NO: 217071 - DNA, 29 bp, Artificial Sequence
  Synthetic oligonucleotide
aaacggttaaaaatcttgactgggggtcc

SEQ ID NO: 217072 - DNA, 30 bp, Artificial Sequence
  Synthetic oligonucleotide
gggtaatgggtgtgctgaggttgggggtcc

SEQ ID NO: 217073 - DNA, 30 bp, Artificial Sequence
  Synthetic oligonucleotide
tggttgcaatcaatagagggccactggtcc

SEQ ID NO: 217074 - DNA, 30 bp, Artificial Sequence
  Synthetic oligonucleotide
cgtcagaaggccgtctgtaaacgttggtcc

SEQ ID NO: 217075 - DNA, 30 bp, Artificial Sequence
  Synthetic oligonucleotide
aataagagggaggattatcaggccatgtcc

SEQ ID NO: 217076 - DNA, 31 bp, Artificial Sequence
  Synthetic oligonucleotide
gcgttagtttccgtgaaaccccagcatgtcc

SEQ ID NO: 217077 - DNA, 30 bp, Artificial Sequence
  Synthetic oligonucleotide
ggcgttgagtacgccgtccgtcagatgtcc

SEQ ID NO: 217078 - DNA, 30 bp, Artificial Sequence
  Synthetic oligonucleotide
attccgtgtggttagaccgagcgcctgtcc

SEQ ID NO: 217079 - DNA, 30 bp, Artificial Sequence
  Synthetic oligonucleotide
tacaggttaaacgcggtcccgtatctgtcc

SEQ ID NO: 217080 - DNA, 30 bp, Artificial Sequence
  Synthetic oligonucleotide
cgaaggagtgaggctgccacgctagtgtcc

SEQ ID NO: 217081 - DNA, 30 bp, Artificial Sequence
  Synthetic oligonucleotide
agactattactaataatgcgtatgttgtcc

SEQ ID NO: 217082 - DNA, 30 bp, Artificial Sequence
  Synthetic oligonucleotide
cgcttcgtagggagctagcgtcttttgtcc

SEQ ID NO: 217083 - DNA, 31 bp, Artificial Sequence
  Synthetic oligonucleotide
tcgggcttgagttaccatagttttaaattcc

SEQ ID NO: 217084 - DNA, 30 bp, Artificial Sequence
  Synthetic oligonucleotide
agcgtacaaaaaggttcgtaccccaattcc

SEQ ID NO: 217085 - DNA, 30 bp, Artificial Sequence
  Synthetic oligonucleotide
attagctcttcaaaagtccacgagaattcc

SEQ ID NO: 217086 - DNA, 30 bp, Artificial Sequence
  Synthetic oligonucleotide
agcccaagccatagagacgataataattcc

SEQ ID NO: 217087 - DNA, 30 bp, Artificial Sequence
  Synthetic oligonucleotide
ggccggcacgtgtgagaattatataattcc

SEQ ID NO: 217088 - DNA, 30 bp, Artificial Sequence
  Synthetic oligonucleotide
atgtagcgtccgttgtcaaaagctaattcc

SEQ ID NO: 217089 - DNA, 30 bp, Artificial Sequence
  Synthetic oligonucleotide
acgtcacgaatctcccttaaagcacattcc

SEQ ID NO: 217090 - DNA, 30 bp, Artificial Sequence
  Synthetic oligonucleotide
ttagccaaactgcgtaccgatatgcattcc

SEQ ID NO: 217091 - DNA, 30 bp, Artificial Sequence
  Synthetic oligonucleotide
cggtattaccgttccgcacacgacgattcc

SEQ ID NO: 217092 - DNA, 30 bp, Artificial Sequence
  Synthetic oligonucleotide
gctcgcaaccaactgcgtatttctgattcc

SEQ ID NO: 217093 - DNA, 30 bp, Artificial Sequence
  Synthetic oligonucleotide
aaacaacaaggaacccctctcggtgattcc

SEQ ID NO: 217094 - DNA, 30 bp, Artificial Sequence
  Synthetic oligonucleotide
tagttccgatcccccccaactgttgattcc

SEQ ID NO: 217095 - DNA, 30 bp, Artificial Sequence
  Synthetic oligonucleotide
gcaggagaaggaaggtacatttcatattcc

SEQ ID NO: 217096 - DNA, 30 bp, Artificial Sequence
  Synthetic oligonucleotide
tgcgtcactagtactattgtttcatattcc

SEQ ID NO: 217097 - DNA, 30 bp, Artificial Sequence
  Synthetic oligonucleotide
aagagcgccgagacggttgttaactattcc

SEQ ID NO: 217098 - DNA, 30 bp, Artificial Sequence
  Synthetic oligonucleotide
cggataagcgccgcttaatggatgtattcc

SEQ ID NO: 217099 - DNA, 30 bp, Artificial Sequence
  Synthetic oligonucleotide
tgaactaaaatgtttagtttagcgacttcc

SEQ ID NO: 217100 - DNA, 30 bp, Artificial Sequence
  Synthetic oligonucleotide
cggaggggagaagtttaacttgtgacttcc

SEQ ID NO: 217101 - DNA, 30 bp, Artificial Sequence
  Synthetic oligonucleotide
cggtcgtcacatagcaaaggccatacttcc

SEQ ID NO: 217102 - DNA, 30 bp, Artificial Sequence
  Synthetic oligonucleotide
gccatggcggggatagttttgtgtacttcc

SEQ ID NO: 217103 - DNA, 30 bp, Artificial Sequence
  Synthetic oligonucleotide
atacggaacgttattccgaccagaccttcc

SEQ ID NO: 217104 - DNA, 30 bp, Artificial Sequence
  Synthetic oligonucleotide
tttgtcagtggtgcgagtgtgtgtccttcc

SEQ ID NO: 217105 - DNA, 30 bp, Artificial Sequence
  Synthetic oligonucleotide
tcgtcccaaatgggtatggtcattccttcc

SEQ ID NO: 217106 - DNA, 31 bp, Artificial Sequence
  Synthetic oligonucleotide
agcgtagtccacactgtttacagtcgcttcc

SEQ ID NO: 217107 - DNA, 30 bp, Artificial Sequence
  Synthetic oligonucleotide
tcagaatgctcaaaacagcgaaaggcttcc

SEQ ID NO: 217108 - DNA, 31 bp, Artificial Sequence
  Synthetic oligonucleotide
aaatgacagtcccgtaatgtattgggcttcc

SEQ ID NO: 217109 - DNA, 30 bp, Artificial Sequence
  Synthetic oligonucleotide
ggtatggcaaaagaaaccaacttggcttcc

SEQ ID NO: 217110 - DNA, 30 bp, Artificial Sequence
  Synthetic oligonucleotide
agcttcaagggcgaacaatgggatgcttcc

SEQ ID NO: 217111 - DNA, 30 bp, Artificial Sequence
  Synthetic oligonucleotide
attgcaatgttcagtcagagaactgcttcc

SEQ ID NO: 217112 - DNA, 30 bp, Artificial Sequence
  Synthetic oligonucleotide
aatcggtatatagaaggattggttgcttcc

SEQ ID NO: 217113 - DNA, 30 bp, Artificial Sequence
  Synthetic oligonucleotide
gcgctcaaattccacggccaactatcttcc

SEQ ID NO: 217114 - DNA, 30 bp, Artificial Sequence
  Synthetic oligonucleotide
ccttatctcgatgaggggctggtatcttcc

SEQ ID NO: 217115 - DNA, 30 bp, Artificial Sequence
  Synthetic oligonucleotide
atgtcacaaaccttattgtggtaacgttcc

SEQ ID NO: 217116 - DNA, 30 bp, Artificial Sequence
  Synthetic oligonucleotide
cgacgggatgtcatgagatggggtcgttcc

SEQ ID NO: 217117 - DNA, 30 bp, Artificial Sequence
  Synthetic oligonucleotide
ttgggactagtgacaaatgccgttcgttcc

SEQ ID NO: 217118 - DNA, 30 bp, Artificial Sequence
  Synthetic oligonucleotide
aacgagaccgataatcgtcctcgatgttcc

SEQ ID NO: 217119 - DNA, 30 bp, Artificial Sequence
  Synthetic oligonucleotide
gaacgaactgactacaggacaggttgttcc

SEQ ID NO: 217120 - DNA, 30 bp, Artificial Sequence
  Synthetic oligonucleotide
aaatgctacgggatcacgaatgacatttcc

SEQ ID NO: 217121 - DNA, 30 bp, Artificial Sequence
  Synthetic oligonucleotide
aagcgagccggcaaggtagctcggatttcc

SEQ ID NO: 217122 - DNA, 30 bp, Artificial Sequence
  Synthetic oligonucleotide
agacacatcaaacgtacggcggatatttcc

SEQ ID NO: 217123 - DNA, 30 bp, Artificial Sequence
  Synthetic oligonucleotide
atggacctatcaactagcgataaactttcc

SEQ ID NO: 217124 - DNA, 30 bp, Artificial Sequence
  Synthetic oligonucleotide
taagaagtcaaacgttgggtcacactttcc

SEQ ID NO: 217125 - DNA, 30 bp, Artificial Sequence
  Synthetic oligonucleotide
accattcatatctaatagtataacctttcc

SEQ ID NO: 217126 - DNA, 30 bp, Artificial Sequence
  Synthetic oligonucleotide
gtggtgttgagctactaagccggtctttcc

SEQ ID NO: 217127 - DNA, 30 bp, Artificial Sequence
  Synthetic oligonucleotide
tcctggtataatgggcagtaccacttttcc

SEQ ID NO: 217128 - DNA, 30 bp, Artificial Sequence
  Synthetic oligonucleotide
agacttaattgtgcaacgggtcagttttcc

SEQ ID NO: 217129 - DNA, 30 bp, Artificial Sequence
  Synthetic oligonucleotide
tcttcagcataattaggaatggagttttcc

SEQ ID NO: 217130 - DNA, 30 bp, Artificial Sequence
  Synthetic oligonucleotide
aaaagaaattctaatgcggtatataaaagc

SEQ ID NO: 217131 - DNA, 30 bp, Artificial Sequence
  Synthetic oligonucleotide
aagagccactaacccgggattttgcaaagc

SEQ ID NO: 217132 - DNA, 30 bp, Artificial Sequence
  Synthetic oligonucleotide
aagtgtaggttctcggttcgaaaagaaagc

SEQ ID NO: 217133 - DNA, 30 bp, Artificial Sequence
  Synthetic oligonucleotide
agctctgccaatctatgtgtcacagaaagc

SEQ ID NO: 217134 - DNA, 30 bp, Artificial Sequence
  Synthetic oligonucleotide
ctggacacaaacatcggaccgaccgaaagc

SEQ ID NO: 217135 - DNA, 30 bp, Artificial Sequence
  Synthetic oligonucleotide
gggcggtatggtctccccaaggtcgaaagc

SEQ ID NO: 217136 - DNA, 30 bp, Artificial Sequence
  Synthetic oligonucleotide
tatatttggacgataatggaataggaaagc

SEQ ID NO: 217137 - DNA, 30 bp, Artificial Sequence
  Synthetic oligonucleotide
tcctgaccaggaagacacagttgggaaagc

SEQ ID NO: 217138 - DNA, 30 bp, Artificial Sequence
  Synthetic oligonucleotide
gtacaggtcctagaagcctccactgaaagc

SEQ ID NO: 217139 - DNA, 30 bp, Artificial Sequence
  Synthetic oligonucleotide
ttatagcgcgaggatgcgtgttaataaagc

SEQ ID NO: 217140 - DNA, 30 bp, Artificial Sequence
  Synthetic oligonucleotide
cttcactaggacaagcttgacttctaaagc

SEQ ID NO: 217141 - DNA, 30 bp, Artificial Sequence
  Synthetic oligonucleotide
gttgcaacgaaatggatcttcctttaaagc

SEQ ID NO: 217142 - DNA, 30 bp, Artificial Sequence
  Synthetic oligonucleotide
taggcatggagacggctggagctaacaagc

SEQ ID NO: 217143 - DNA, 30 bp, Artificial Sequence
  Synthetic oligonucleotide
aacaggttacgattgcgagtctgcacaagc

SEQ ID NO: 217144 - DNA, 30 bp, Artificial Sequence
  Synthetic oligonucleotide
gcatgaactacattgtcagcacatacaagc

SEQ ID NO: 217145 - DNA, 30 bp, Artificial Sequence
  Synthetic oligonucleotide
atgaggtctagtgtatgcaaatgtacaagc

SEQ ID NO: 217146 - DNA, 30 bp, Artificial Sequence
  Synthetic oligonucleotide
ctaattagagtgggattgactggaccaagc

SEQ ID NO: 217147 - DNA, 30 bp, Artificial Sequence
  Synthetic oligonucleotide
agattatgcgcacctccccccgcagcaagc

SEQ ID NO: 217148 - DNA, 30 bp, Artificial Sequence
  Synthetic oligonucleotide
tatacacgctaggcgtcaaacgccgcaagc

SEQ ID NO: 217149 - DNA, 30 bp, Artificial Sequence
  Synthetic oligonucleotide
cttttggacggtccgttcaagcgtgcaagc

SEQ ID NO: 217150 - DNA, 30 bp, Artificial Sequence
  Synthetic oligonucleotide
aacgtcgggttgttagaagtcggtgcaagc

SEQ ID NO: 217151 - DNA, 30 bp, Artificial Sequence
  Synthetic oligonucleotide
ccgtcaagaattttaatcccgtactcaagc

SEQ ID NO: 217152 - DNA, 30 bp, Artificial Sequence
  Synthetic oligonucleotide
cgtaaagagccggctgtattcccgtcaagc

SEQ ID NO: 217153 - DNA, 30 bp, Artificial Sequence
  Synthetic oligonucleotide
gactacagcgcgaatcaggagcattcaagc

SEQ ID NO: 217154 - DNA, 30 bp, Artificial Sequence
  Synthetic oligonucleotide
gccggaagaatggccattcgaaccagaagc

SEQ ID NO: 217155 - DNA, 30 bp, Artificial Sequence
  Synthetic oligonucleotide
tgtcatactaaaatgtgggaagccagaagc

SEQ ID NO: 217156 - DNA, 30 bp, Artificial Sequence
  Synthetic oligonucleotide
ataagcataccagcgatacgtcggagaagc

SEQ ID NO: 217157 - DNA, 30 bp, Artificial Sequence
  Synthetic oligonucleotide
gcattcaaattatagcccttcgcacgaagc

SEQ ID NO: 217158 - DNA, 30 bp, Artificial Sequence
  Synthetic oligonucleotide
aaggaatctttgaaggccaaatcacgaagc

SEQ ID NO: 217159 - DNA, 30 bp, Artificial Sequence
  Synthetic oligonucleotide
cataggtgtcccggcgaacaccgacgaagc

SEQ ID NO: 217160 - DNA, 30 bp, Artificial Sequence
  Synthetic oligonucleotide
aaaactaggttgggtataggcgtacgaagc

SEQ ID NO: 217161 - DNA, 30 bp, Artificial Sequence
  Synthetic oligonucleotide
ggcggaagatcattctaaagatgccgaagc

SEQ ID NO: 217162 - DNA, 30 bp, Artificial Sequence
  Synthetic oligonucleotide
tccacgtagctaattgatcttacgcgaagc

SEQ ID NO: 217163 - DNA, 30 bp, Artificial Sequence
  Synthetic oligonucleotide
tgctgttgaggggcccagcggatgcgaagc

SEQ ID NO: 217164 - DNA, 30 bp, Artificial Sequence
  Synthetic oligonucleotide
tatagtaaggcggcgaggaagataggaagc

SEQ ID NO: 217165 - DNA, 30 bp, Artificial Sequence
  Synthetic oligonucleotide
gattaggcaagtagggtactgtgtggaagc

SEQ ID NO: 217166 - DNA, 30 bp, Artificial Sequence
  Synthetic oligonucleotide
aaccagtcggatggtaatcggctctgaagc

SEQ ID NO: 217167 - DNA, 30 bp, Artificial Sequence
  Synthetic oligonucleotide
aggtgaagcgtaagcccacgcaagtgaagc

SEQ ID NO: 217168 - DNA, 30 bp, Artificial Sequence
  Synthetic oligonucleotide
gaccaggactctgatgttattctgtgaagc

SEQ ID NO: 217169 - DNA, 30 bp, Artificial Sequence
  Synthetic oligonucleotide
ggaacatatccataaaaaagaggaataagc

SEQ ID NO: 217170 - DNA, 30 bp, Artificial Sequence
  Synthetic oligonucleotide
atctcaagcgggtatggttatggaataagc

SEQ ID NO: 217171 - DNA, 30 bp, Artificial Sequence
  Synthetic oligonucleotide
tgcatcagacagcgtcgtatctgaataagc

SEQ ID NO: 217172 - DNA, 30 bp, Artificial Sequence
  Synthetic oligonucleotide
ccaagctatgaggagtacgtaaacataagc

SEQ ID NO: 217173 - DNA, 30 bp, Artificial Sequence
  Synthetic oligonucleotide
cacgcttagtgggaatagaactacataagc

SEQ ID NO: 217174 - DNA, 30 bp, Artificial Sequence
  Synthetic oligonucleotide
gctccgaggcatggaagtatgtccataagc

SEQ ID NO: 217175 - DNA, 30 bp, Artificial Sequence
  Synthetic oligonucleotide
gctgttcagaattcgtattggggcataagc

SEQ ID NO: 217176 - DNA, 30 bp, Artificial Sequence
  Synthetic oligonucleotide
ctaccgcggttacaattacctattctaagc

SEQ ID NO: 217177 - DNA, 30 bp, Artificial Sequence
  Synthetic oligonucleotide
gcgggttacattagataggtgaaagtaagc

SEQ ID NO: 217178 - DNA, 30 bp, Artificial Sequence
  Synthetic oligonucleotide
aatcttgcggtacgcgacggttgagtaagc

SEQ ID NO: 217179 - DNA, 30 bp, Artificial Sequence
  Synthetic oligonucleotide
ctcccacgatctgctactcgattagtaagc

SEQ ID NO: 217180 - DNA, 30 bp, Artificial Sequence
  Synthetic oligonucleotide
gtgcgtgtataacacaattgggtcgtaagc

SEQ ID NO: 217181 - DNA, 30 bp, Artificial Sequence
  Synthetic oligonucleotide
agcgggtttagaatgcccgtattggtaagc

SEQ ID NO: 217182 - DNA, 30 bp, Artificial Sequence
  Synthetic oligonucleotide
aggggtgcgagggtgatggtgcctgtaagc

SEQ ID NO: 217183 - DNA, 30 bp, Artificial Sequence
  Synthetic oligonucleotide
cgcaccgcacagttgagatgccttgtaagc

SEQ ID NO: 217184 - DNA, 30 bp, Artificial Sequence
  Synthetic oligonucleotide
tgcgcgtcgaccattctgagaacattaagc

SEQ ID NO: 217185 - DNA, 30 bp, Artificial Sequence
  Synthetic oligonucleotide
agagatagagtcagttggcatagcttaagc

SEQ ID NO: 217186 - DNA, 30 bp, Artificial Sequence
  Synthetic oligonucleotide
cgcacaacccgatacttggtattcttaagc

SEQ ID NO: 217187 - DNA, 30 bp, Artificial Sequence
  Synthetic oligonucleotide
gtgtgcgactggcccgggcttcgaaacagc

SEQ ID NO: 217188 - DNA, 30 bp, Artificial Sequence
  Synthetic oligonucleotide
caaaacgcctaaaactgcgtggacaacagc

SEQ ID NO: 217189 - DNA, 30 bp, Artificial Sequence
  Synthetic oligonucleotide
tgcaggtgtggcacaaggcatgataacagc

SEQ ID NO: 217190 - DNA, 30 bp, Artificial Sequence
  Synthetic oligonucleotide
gtaatgttggtgcgttgattaagtaacagc

SEQ ID NO: 217191 - DNA, 30 bp, Artificial Sequence
  Synthetic oligonucleotide
aagcgtttaggcataatcttaagacacagc

SEQ ID NO: 217192 - DNA, 30 bp, Artificial Sequence
  Synthetic oligonucleotide
ccaaagtgaccttggcaacccgaccacagc

SEQ ID NO: 217193 - DNA, 30 bp, Artificial Sequence
  Synthetic oligonucleotide
gaccttctcctgtgtgaacgttggcacagc

SEQ ID NO: 217194 - DNA, 30 bp, Artificial Sequence
  Synthetic oligonucleotide
gtgcatgtaacaactttcgggcatcacagc

SEQ ID NO: 217195 - DNA, 30 bp, Artificial Sequence
  Synthetic oligonucleotide
cgtgaaccatgcgactgtcacaaagacagc

SEQ ID NO: 217196 - DNA, 30 bp, Artificial Sequence
  Synthetic oligonucleotide
gtattactggtagagacgggaaccgacagc

SEQ ID NO: 217197 - DNA, 30 bp, Artificial Sequence
  Synthetic oligonucleotide
gccgctaggccatgtgtaagtactgacagc

SEQ ID NO: 217198 - DNA, 30 bp, Artificial Sequence
  Synthetic oligonucleotide
gcaatcttaactggcggcgctccatacagc

SEQ ID NO: 217199 - DNA, 30 bp, Artificial Sequence
  Synthetic oligonucleotide
gcatgaaggacagatataccggactacagc

SEQ ID NO: 217200 - DNA, 30 bp, Artificial Sequence
  Synthetic oligonucleotide
atagagaagtttaactatcctatctacagc

SEQ ID NO: 217201 - DNA, 30 bp, Artificial Sequence
  Synthetic oligonucleotide
ggattattcaattgcgcgtgaaggtacagc

SEQ ID NO: 217202 - DNA, 30 bp, Artificial Sequence
  Synthetic oligonucleotide
gtaggaactcttatgtcggcccccaccagc

SEQ ID NO: 217203 - DNA, 30 bp, Artificial Sequence
  Synthetic oligonucleotide
tcagggctgaatgacttgtgtctgaccagc

SEQ ID NO: 217204 - DNA, 30 bp, Artificial Sequence
  Synthetic oligonucleotide
ctgtgcggaccttcctttgcaaataccagc

SEQ ID NO: 217205 - DNA, 30 bp, Artificial Sequence
  Synthetic oligonucleotide
gatagcaaatccgtatccgcgcataccagc

SEQ ID NO: 217206 - DNA, 30 bp, Artificial Sequence
  Synthetic oligonucleotide
atggcactcatgaaccggccggctaccagc

SEQ ID NO: 217207 - DNA, 29 bp, Artificial Sequence
  Synthetic oligonucleotide
tgtggttccccattagtgtcgtgcccagc

SEQ ID NO: 217208 - DNA, 30 bp, Artificial Sequence
  Synthetic oligonucleotide
ttggcacgtatagacgttactattcccagc

SEQ ID NO: 217209 - DNA, 31 bp, Artificial Sequence
  Synthetic oligonucleotide
tacctcaaatatagctggggcggcggccagc

SEQ ID NO: 217210 - DNA, 30 bp, Artificial Sequence
  Synthetic oligonucleotide
ctgaaagcggaatggccgcaaagatccagc

SEQ ID NO: 217211 - DNA, 30 bp, Artificial Sequence
  Synthetic oligonucleotide
gtctagtggccaagtcgatgttactccagc

SEQ ID NO: 217212 - DNA, 30 bp, Artificial Sequence
  Synthetic oligonucleotide
aacgggtagcgacttcccggttgctccagc

SEQ ID NO: 217213 - DNA, 30 bp, Artificial Sequence
  Synthetic oligonucleotide
tgatgcgtggagcaaacagcagggtccagc

SEQ ID NO: 217214 - DNA, 30 bp, Artificial Sequence
  Synthetic oligonucleotide
ccggaggaccaaaccgccgggtcttccagc

SEQ ID NO: 217215 - DNA, 30 bp, Artificial Sequence
  Synthetic oligonucleotide
accccatctcgttcattaggattttccagc

SEQ ID NO: 217216 - DNA, 30 bp, Artificial Sequence
  Synthetic oligonucleotide
caacgccgctggtcgtgattcaagagcagc

SEQ ID NO: 217217 - DNA, 30 bp, Artificial Sequence
  Synthetic oligonucleotide
ttgctagcgatcgattatccagcacgcagc

SEQ ID NO: 217218 - DNA, 30 bp, Artificial Sequence
  Synthetic oligonucleotide
gcattaaaagttagtatataatacggcagc

SEQ ID NO: 217219 - DNA, 30 bp, Artificial Sequence
  Synthetic oligonucleotide
acgtgtgtcatcgtcagtactaccggcagc

SEQ ID NO: 217220 - DNA, 30 bp, Artificial Sequence
  Synthetic oligonucleotide
aagggcatagagtagccgattatcggcagc

SEQ ID NO: 217221 - DNA, 30 bp, Artificial Sequence
  Synthetic oligonucleotide
tatgaagtagcccaccattacgagggcagc

SEQ ID NO: 217222 - DNA, 30 bp, Artificial Sequence
  Synthetic oligonucleotide
acttgatacggggcgcatagattgggcagc

SEQ ID NO: 217223 - DNA, 30 bp, Artificial Sequence
  Synthetic oligonucleotide
tcttatgccactggtaggaaagaatgcagc

SEQ ID NO: 217224 - DNA, 30 bp, Artificial Sequence
  Synthetic oligonucleotide
gatcgctcaacggcatttgggctatgcagc

SEQ ID NO: 217225 - DNA, 30 bp, Artificial Sequence
  Synthetic oligonucleotide
ccgtcattctggctccttggaggttgcagc

SEQ ID NO: 217226 - DNA, 30 bp, Artificial Sequence
  Synthetic oligonucleotide
cagaaaagagcttaccgtgcttaaatcagc

SEQ ID NO: 217227 - DNA, 30 bp, Artificial Sequence
  Synthetic oligonucleotide
aggaccctgtaatactgggtaagaatcagc

SEQ ID NO: 217228 - DNA, 30 bp, Artificial Sequence
  Synthetic oligonucleotide
ggtaaaggggaattaccacattgaatcagc

SEQ ID NO: 217229 - DNA, 30 bp, Artificial Sequence
  Synthetic oligonucleotide
ggttgtggcgggggatttgtctacatcagc

SEQ ID NO: 217230 - DNA, 30 bp, Artificial Sequence
  Synthetic oligonucleotide
gtcatgaatctacacttggtactcatcagc

SEQ ID NO: 217231 - DNA, 30 bp, Artificial Sequence
  Synthetic oligonucleotide
ctttagtaaaattgtaggtataggatcagc

SEQ ID NO: 217232 - DNA, 30 bp, Artificial Sequence
  Synthetic oligonucleotide
acggcattggatcattttttggggatcagc

SEQ ID NO: 217233 - DNA, 30 bp, Artificial Sequence
  Synthetic oligonucleotide
ggaaagtagcccatgtagttatctatcagc

SEQ ID NO: 217234 - DNA, 30 bp, Artificial Sequence
  Synthetic oligonucleotide
gggactgctaggtatgcgtccagactcagc

SEQ ID NO: 217235 - DNA, 30 bp, Artificial Sequence
  Synthetic oligonucleotide
aggttaagaggattaatggcgtgcctcagc

SEQ ID NO: 217236 - DNA, 30 bp, Artificial Sequence
  Synthetic oligonucleotide
atgccctttacctaacgtatagcgctcagc

SEQ ID NO: 217237 - DNA, 30 bp, Artificial Sequence
  Synthetic oligonucleotide
taagtttgttcttgagcaggcgggctcagc

SEQ ID NO: 217238 - DNA, 30 bp, Artificial Sequence
  Synthetic oligonucleotide
gagctctgccacaatctagaaacagtcagc

SEQ ID NO: 217239 - DNA, 29 bp, Artificial Sequence
  Synthetic oligonucleotide
aaggcgacatcataatcgtgtatgtcagc

SEQ ID NO: 217240 - DNA, 30 bp, Artificial Sequence
  Synthetic oligonucleotide
tctcgacgtaaacccgcaccttctgtcagc

SEQ ID NO: 217241 - DNA, 30 bp, Artificial Sequence
  Synthetic oligonucleotide
aagtgtggaattgtttttgaagaattcagc

SEQ ID NO: 217242 - DNA, 30 bp, Artificial Sequence
  Synthetic oligonucleotide
caagataactgccaaaacaagggcttcagc

SEQ ID NO: 217243 - DNA, 30 bp, Artificial Sequence
  Synthetic oligonucleotide
actacgatagcgatggatctcgaaaagagc

SEQ ID NO: 217244 - DNA, 30 bp, Artificial Sequence
  Synthetic oligonucleotide
cctgggagacggcttccaggtgcaaagagc

SEQ ID NO: 217245 - DNA, 30 bp, Artificial Sequence
  Synthetic oligonucleotide
ttccaccaccctgttggacgggtaaagagc

SEQ ID NO: 217246 - DNA, 30 bp, Artificial Sequence
  Synthetic oligonucleotide
gaagtagcggtacactggcgcaggaagagc

SEQ ID NO: 217247 - DNA, 30 bp, Artificial Sequence
  Synthetic oligonucleotide
ttttaagctagaacgatacccctgaagagc

SEQ ID NO: 217248 - DNA, 30 bp, Artificial Sequence
  Synthetic oligonucleotide
gagtaggttttacaatccacgagtaagagc

SEQ ID NO: 217249 - DNA, 30 bp, Artificial Sequence
  Synthetic oligonucleotide
agtgatgcctcacttgcaggtacacagagc

SEQ ID NO: 217250 - DNA, 30 bp, Artificial Sequence
  Synthetic oligonucleotide
tctaaatatagcacaaggctaggacagagc

SEQ ID NO: 217251 - DNA, 30 bp, Artificial Sequence
  Synthetic oligonucleotide
aacttagcatagtgacacttaggacagagc

SEQ ID NO: 217252 - DNA, 30 bp, Artificial Sequence
  Synthetic oligonucleotide
tacttcccagaagctactaatctccagagc

SEQ ID NO: 217253 - DNA, 30 bp, Artificial Sequence
  Synthetic oligonucleotide
aagacaggacaatgacgcgaatcgcagagc

SEQ ID NO: 217254 - DNA, 30 bp, Artificial Sequence
  Synthetic oligonucleotide
atgcgaaatttgcaaccacggcccgagagc

SEQ ID NO: 217255 - DNA, 29 bp, Artificial Sequence
  Synthetic oligonucleotide
attagcggtggactcgggaaagcgagagc

SEQ ID NO: 217256 - DNA, 30 bp, Artificial Sequence
  Synthetic oligonucleotide
tgccagaattaccaccgactagcggagagc

SEQ ID NO: 217257 - DNA, 30 bp, Artificial Sequence
  Synthetic oligonucleotide
cagccaagcacactaatgcgaactgagagc

SEQ ID NO: 217258 - DNA, 30 bp, Artificial Sequence
  Synthetic oligonucleotide
gggtcctcggagctataggactggtagagc

SEQ ID NO: 217259 - DNA, 30 bp, Artificial Sequence
  Synthetic oligonucleotide
gtcacggctaagatattacttgattagagc

SEQ ID NO: 217260 - DNA, 30 bp, Artificial Sequence
  Synthetic oligonucleotide
ggcgttatggcagtgtaccattggacgagc

SEQ ID NO: 217261 - DNA, 30 bp, Artificial Sequence
  Synthetic oligonucleotide
agacaattattaccgtcggcccaaccgagc

SEQ ID NO: 217262 - DNA, 30 bp, Artificial Sequence
  Synthetic oligonucleotide
agcgttgagagcgccattcaccccccgagc

SEQ ID NO: 217263 - DNA, 30 bp, Artificial Sequence
  Synthetic oligonucleotide
ctatcgtgtaagttctcaaccaggccgagc

SEQ ID NO: 217264 - DNA, 30 bp, Artificial Sequence
  Synthetic oligonucleotide
ctagcttactcgatactaacttaggcgagc

SEQ ID NO: 217265 - DNA, 30 bp, Artificial Sequence
  Synthetic oligonucleotide
tcgtgacaggaaatgttctattgtgcgagc

SEQ ID NO: 217266 - DNA, 30 bp, Artificial Sequence
  Synthetic oligonucleotide
aacgggcatgcggcgtaaaagcttgcgagc

SEQ ID NO: 217267 - DNA, 30 bp, Artificial Sequence
  Synthetic oligonucleotide
aagattacccgggtcttcaagggatcgagc

SEQ ID NO: 217268 - DNA, 30 bp, Artificial Sequence
  Synthetic oligonucleotide
ccggactgtaataactcaacgcgctcgagc

SEQ ID NO: 217269 - DNA, 30 bp, Artificial Sequence
  Synthetic oligonucleotide
attggtgtaacagaacgcctaaagtcgagc

SEQ ID NO: 217270 - DNA, 30 bp, Artificial Sequence
  Synthetic oligonucleotide
gtcttgcattacgcatttatacgttcgagc

SEQ ID NO: 217271 - DNA, 30 bp, Artificial Sequence
  Synthetic oligonucleotide
ggccacgcgaactaggcataccgttcgagc

SEQ ID NO: 217272 - DNA, 30 bp, Artificial Sequence
  Synthetic oligonucleotide
ttggtcaatcacgtagaatcaactaggagc

SEQ ID NO: 217273 - DNA, 30 bp, Artificial Sequence
  Synthetic oligonucleotide
tattaggcatgttgccattcatttaggagc

SEQ ID NO: 217274 - DNA, 30 bp, Artificial Sequence
  Synthetic oligonucleotide
tcagaggataatccctcatcggcacggagc

SEQ ID NO: 217275 - DNA, 30 bp, Artificial Sequence
  Synthetic oligonucleotide
agagtacggtctaatcgccccgtccggagc

SEQ ID NO: 217276 - DNA, 30 bp, Artificial Sequence
  Synthetic oligonucleotide
aacagtgccgagttggaggttcagcggagc

SEQ ID NO: 217277 - DNA, 30 bp, Artificial Sequence
  Synthetic oligonucleotide
atcccatacaggcataacaaagtgcggagc

SEQ ID NO: 217278 - DNA, 30 bp, Artificial Sequence
  Synthetic oligonucleotide
gttggaccaaagccattaacgtctcggagc

SEQ ID NO: 217279 - DNA, 30 bp, Artificial Sequence
  Synthetic oligonucleotide
tttaacgtgtaccgacatatttgtcggagc

SEQ ID NO: 217280 - DNA, 30 bp, Artificial Sequence
  Synthetic oligonucleotide
ttccagttggaaaacgggccaacagggagc

SEQ ID NO: 217281 - DNA, 30 bp, Artificial Sequence
  Synthetic oligonucleotide
ttcaaccgtaggcagtggagtagagggagc

SEQ ID NO: 217282 - DNA, 30 bp, Artificial Sequence
  Synthetic oligonucleotide
acttttagggaactgagctgcgtagggagc

SEQ ID NO: 217283 - DNA, 30 bp, Artificial Sequence
  Synthetic oligonucleotide
tgcagagtacatgcattaagcatcgggagc

SEQ ID NO: 217284 - DNA, 30 bp, Artificial Sequence
  Synthetic oligonucleotide
taaaatatgccagactcacgtgtatggagc

SEQ ID NO: 217285 - DNA, 30 bp, Artificial Sequence
  Synthetic oligonucleotide
gttaacggtacgggctgcgctaaaatgagc

SEQ ID NO: 217286 - DNA, 30 bp, Artificial Sequence
  Synthetic oligonucleotide
atactagtggtgtcggtggaggtaatgagc

SEQ ID NO: 217287 - DNA, 30 bp, Artificial Sequence
  Synthetic oligonucleotide
cttagttaccgcggaggcccacccatgagc

SEQ ID NO: 217288 - DNA, 30 bp, Artificial Sequence
  Synthetic oligonucleotide
atcacgataacccaggaaacagtgatgagc

SEQ ID NO: 217289 - DNA, 30 bp, Artificial Sequence
  Synthetic oligonucleotide
gaggggttggaatggcatcggggtatgagc

SEQ ID NO: 217290 - DNA, 30 bp, Artificial Sequence
  Synthetic oligonucleotide
gacccgatgtgaggggtgtggggcctgagc

SEQ ID NO: 217291 - DNA, 30 bp, Artificial Sequence
  Synthetic oligonucleotide
gtggaataaactctcattctttatctgagc

SEQ ID NO: 217292 - DNA, 30 bp, Artificial Sequence
  Synthetic oligonucleotide
tctggatagataactggccttggggtgagc

SEQ ID NO: 217293 - DNA, 30 bp, Artificial Sequence
  Synthetic oligonucleotide
gcggggtaatactgccgcatgcaattgagc

SEQ ID NO: 217294 - DNA, 30 bp, Artificial Sequence
  Synthetic oligonucleotide
ggtacgtgtttacgaccctattcattgagc

SEQ ID NO: 217295 - DNA, 30 bp, Artificial Sequence
  Synthetic oligonucleotide
gccggcacgatcgatgagcgtggattgagc

SEQ ID NO: 217296 - DNA, 30 bp, Artificial Sequence
  Synthetic oligonucleotide
tatggaatatagctgtaggcatggttgagc

SEQ ID NO: 217297 - DNA, 30 bp, Artificial Sequence
  Synthetic oligonucleotide
gtctccgggcatccgatctgctttttgagc

SEQ ID NO: 217298 - DNA, 30 bp, Artificial Sequence
  Synthetic oligonucleotide
gactagacggttcacggtcacaaaaatagc

SEQ ID NO: 217299 - DNA, 30 bp, Artificial Sequence
  Synthetic oligonucleotide
agattaacgatcagctcgctttgaaatagc

SEQ ID NO: 217300 - DNA, 30 bp, Artificial Sequence
  Synthetic oligonucleotide
ctcccttgcggttactaggtcgagaatagc

SEQ ID NO: 217301 - DNA, 30 bp, Artificial Sequence
  Synthetic oligonucleotide
ccgtatgcgctcgatgcattatctaatagc

SEQ ID NO: 217302 - DNA, 30 bp, Artificial Sequence
  Synthetic oligonucleotide
tcccgcgtgcgtcgtgtgacgagtaatagc

SEQ ID NO: 217303 - DNA, 30 bp, Artificial Sequence
  Synthetic oligonucleotide
ctcagcaaactatatagcaggtcacatagc

SEQ ID NO: 217304 - DNA, 30 bp, Artificial Sequence
  Synthetic oligonucleotide
aaatactagaccgcggtattattacatagc

SEQ ID NO: 217305 - DNA, 30 bp, Artificial Sequence
  Synthetic oligonucleotide
gtaatccatcctcttctaggtaaccatagc

SEQ ID NO: 217306 - DNA, 30 bp, Artificial Sequence
  Synthetic oligonucleotide
tggttcagtatatgctgaaacgaccatagc

SEQ ID NO: 217307 - DNA, 30 bp, Artificial Sequence
  Synthetic oligonucleotide
acagttacattgtacaggtgttgtcatagc

SEQ ID NO: 217308 - DNA, 30 bp, Artificial Sequence
  Synthetic oligonucleotide
ccaacgggtccatgtctaaccaaagatagc

SEQ ID NO: 217309 - DNA, 30 bp, Artificial Sequence
  Synthetic oligonucleotide
cagcgttttaatcttagtcgtcgagatagc

SEQ ID NO: 217310 - DNA, 30 bp, Artificial Sequence
  Synthetic oligonucleotide
gaacatagttatcttgtccacgtagatagc

SEQ ID NO: 217311 - DNA, 30 bp, Artificial Sequence
  Synthetic oligonucleotide
gacgaatcgcggctaagtaacgccgatagc

SEQ ID NO: 217312 - DNA, 30 bp, Artificial Sequence
  Synthetic oligonucleotide
ttggaagacactgcgaatccactcgatagc

SEQ ID NO: 217313 - DNA, 30 bp, Artificial Sequence
  Synthetic oligonucleotide
ctggtaaaaatgtgaatcgccttcgatagc

SEQ ID NO: 217314 - DNA, 30 bp, Artificial Sequence
  Synthetic oligonucleotide
agtactgagtaggcgaagtgacaatatagc

SEQ ID NO: 217315 - DNA, 30 bp, Artificial Sequence
  Synthetic oligonucleotide
ctgaagcttaattgaatctcaacatatagc

SEQ ID NO: 217316 - DNA, 30 bp, Artificial Sequence
  Synthetic oligonucleotide
cagttgtgctccgtaaatccctcatatagc

SEQ ID NO: 217317 - DNA, 30 bp, Artificial Sequence
  Synthetic oligonucleotide
tatctgacattaggcttcggccgatatagc

SEQ ID NO: 217318 - DNA, 30 bp, Artificial Sequence
  Synthetic oligonucleotide
gacacaggttcgactttttaagtatatagc

SEQ ID NO: 217319 - DNA, 30 bp, Artificial Sequence
  Synthetic oligonucleotide
tgagattaaagatctttgccgttctatagc

SEQ ID NO: 217320 - DNA, 30 bp, Artificial Sequence
  Synthetic oligonucleotide
ctatgtaagccaaccaatccatgaactagc

SEQ ID NO: 217321 - DNA, 30 bp, Artificial Sequence
  Synthetic oligonucleotide
acgaggcgcctcaaatttgggaacactagc

SEQ ID NO: 217322 - DNA, 30 bp, Artificial Sequence
  Synthetic oligonucleotide
gcaaacttacctgatagtccagttactagc

SEQ ID NO: 217323 - DNA, 30 bp, Artificial Sequence
  Synthetic oligonucleotide
cggatacgtttgacggaagagacacctagc

SEQ ID NO: 217324 - DNA, 30 bp, Artificial Sequence
  Synthetic oligonucleotide
gggtataatagttcagggatgccacctagc

SEQ ID NO: 217325 - DNA, 30 bp, Artificial Sequence
  Synthetic oligonucleotide
cttacaccttatttattcacctaccctagc

SEQ ID NO: 217326 - DNA, 30 bp, Artificial Sequence
  Synthetic oligonucleotide
agtttcctagggccggagttaaggcctagc

SEQ ID NO: 217327 - DNA, 30 bp, Artificial Sequence
  Synthetic oligonucleotide
tggggccctcgaatcgatagaactcctagc

SEQ ID NO: 217328 - DNA, 30 bp, Artificial Sequence
  Synthetic oligonucleotide
tagcctgttagttcatatctcgttcctagc

SEQ ID NO: 217329 - DNA, 30 bp, Artificial Sequence
  Synthetic oligonucleotide
tgacgtacgcgagacacaaaatcagctagc

SEQ ID NO: 217330 - DNA, 30 bp, Artificial Sequence
  Synthetic oligonucleotide
gcagaccagcggaacgggcttcgagctagc

SEQ ID NO: 217331 - DNA, 30 bp, Artificial Sequence
  Synthetic oligonucleotide
gaacttagcctgggtgaagcaggcgctagc

SEQ ID NO: 217332 - DNA, 30 bp, Artificial Sequence
  Synthetic oligonucleotide
cgctctgttggtcttaggcactggtctagc

SEQ ID NO: 217333 - DNA, 30 bp, Artificial Sequence
  Synthetic oligonucleotide
gttgtaaatggcggtgccaaagattctagc

SEQ ID NO: 217334 - DNA, 30 bp, Artificial Sequence
  Synthetic oligonucleotide
agtgtagcgtaaacggcagacctaagtagc

SEQ ID NO: 217335 - DNA, 30 bp, Artificial Sequence
  Synthetic oligonucleotide
gctcgaccggcaataggcataaatagtagc

SEQ ID NO: 217336 - DNA, 30 bp, Artificial Sequence
  Synthetic oligonucleotide
tattacccagtctgcacagaaagacgtagc

SEQ ID NO: 217337 - DNA, 30 bp, Artificial Sequence
  Synthetic oligonucleotide
ccatggtagaatagctcctggcgccgtagc

SEQ ID NO: 217338 - DNA, 30 bp, Artificial Sequence
  Synthetic oligonucleotide
tctcaccgagatacaaaagtgtgtcgtagc

SEQ ID NO: 217339 - DNA, 30 bp, Artificial Sequence
  Synthetic oligonucleotide
tagttattttaacgcgtacatcacggtagc

SEQ ID NO: 217340 - DNA, 30 bp, Artificial Sequence
  Synthetic oligonucleotide
tactaacttaaggcaaaacgacaatgtagc

SEQ ID NO: 217341 - DNA, 30 bp, Artificial Sequence
  Synthetic oligonucleotide
tggctggagccggactaagtgggcattagc

SEQ ID NO: 217342 - DNA, 30 bp, Artificial Sequence
  Synthetic oligonucleotide
ctccgtctgcattccagagttgggattagc

SEQ ID NO: 217343 - DNA, 30 bp, Artificial Sequence
  Synthetic oligonucleotide
atgggccaagcctctaagttacttattagc

SEQ ID NO: 217344 - DNA, 30 bp, Artificial Sequence
  Synthetic oligonucleotide
cggatccgtattctagatagaccacttagc

SEQ ID NO: 217345 - DNA, 30 bp, Artificial Sequence
  Synthetic oligonucleotide
tcgggagagtcgagattcccggtacttagc

SEQ ID NO: 217346 - DNA, 30 bp, Artificial Sequence
  Synthetic oligonucleotide
tgagagaattggcgctacggctcccttagc

SEQ ID NO: 217347 - DNA, 30 bp, Artificial Sequence
  Synthetic oligonucleotide
cgcaatccactctgtgcttagatccttagc

SEQ ID NO: 217348 - DNA, 30 bp, Artificial Sequence
  Synthetic oligonucleotide
ctgaggaaggctatgtcttagttcgttagc

SEQ ID NO: 217349 - DNA, 30 bp, Artificial Sequence
  Synthetic oligonucleotide
atccagtagaatccggagtaatttgttagc

SEQ ID NO: 217350 - DNA, 30 bp, Artificial Sequence
  Synthetic oligonucleotide
tccgaatagcaagcaactctttaatttagc

SEQ ID NO: 217351 - DNA, 30 bp, Artificial Sequence
  Synthetic oligonucleotide
ctaacaatcgggtcattgtagtcatttagc

SEQ ID NO: 217352 - DNA, 30 bp, Artificial Sequence
  Synthetic oligonucleotide
gcagagtaactcgggaagagaaactttagc

SEQ ID NO: 217353 - DNA, 30 bp, Artificial Sequence
  Synthetic oligonucleotide
tgaacgcccaagctgattcggaggtttagc

SEQ ID NO: 217354 - DNA, 30 bp, Artificial Sequence
  Synthetic oligonucleotide
cgtatagtgttcgttaatacagtgtttagc

SEQ ID NO: 217355 - DNA, 30 bp, Artificial Sequence
  Synthetic oligonucleotide
tcgaaccttatttatcgccttcataaacgc

SEQ ID NO: 217356 - DNA, 30 bp, Artificial Sequence
  Synthetic oligonucleotide
ttagtttagaccagagtatatgaacaacgc

SEQ ID NO: 217357 - DNA, 30 bp, Artificial Sequence
  Synthetic oligonucleotide
gagcaaaccaaatggcatattctacaacgc

SEQ ID NO: 217358 - DNA, 30 bp, Artificial Sequence
  Synthetic oligonucleotide
tcgcccaggcggacttaatgggaccaacgc

SEQ ID NO: 217359 - DNA, 30 bp, Artificial Sequence
  Synthetic oligonucleotide
tggcactggacgataacgatttcgcaacgc

SEQ ID NO: 217360 - DNA, 30 bp, Artificial Sequence
  Synthetic oligonucleotide
aagggccagtacattcgaatcactcaacgc

SEQ ID NO: 217361 - DNA, 30 bp, Artificial Sequence
  Synthetic oligonucleotide
cttggcaacggctgtcaagcgattcaacgc

SEQ ID NO: 217362 - DNA, 29 bp, Artificial Sequence
  Synthetic oligonucleotide
ggttaatgcttgagacggatttagaacgc

SEQ ID NO: 217363 - DNA, 30 bp, Artificial Sequence
  Synthetic oligonucleotide
acggtatgagatgggacggagcccgaacgc

SEQ ID NO: 217364 - DNA, 30 bp, Artificial Sequence
  Synthetic oligonucleotide
cgcatgtactggtcatgtacggcggaacgc

SEQ ID NO: 217365 - DNA, 30 bp, Artificial Sequence
  Synthetic oligonucleotide
aagtgcctcttccatcgtgtaaactaacgc

SEQ ID NO: 217366 - DNA, 30 bp, Artificial Sequence
  Synthetic oligonucleotide
catttggaaattcattatgtcacctaacgc

SEQ ID NO: 217367 - DNA, 30 bp, Artificial Sequence
  Synthetic oligonucleotide
gtcgagtgccgagacgttccagtctaacgc

SEQ ID NO: 217368 - DNA, 30 bp, Artificial Sequence
  Synthetic oligonucleotide
gaacactatcaggcccgcgaaaattaacgc

SEQ ID NO: 217369 - DNA, 30 bp, Artificial Sequence
  Synthetic oligonucleotide
ctgatcatgaccagaagaagttgttaacgc

SEQ ID NO: 217370 - DNA, 30 bp, Artificial Sequence
  Synthetic oligonucleotide
taccaaggtcgttgcgcaacaatttaacgc

SEQ ID NO: 217371 - DNA, 30 bp, Artificial Sequence
  Synthetic oligonucleotide
agagaggagatccgtaactgtttaacacgc

SEQ ID NO: 217372 - DNA, 30 bp, Artificial Sequence
  Synthetic oligonucleotide
taatcaacgtaagggacatcgcacacacgc

SEQ ID NO: 217373 - DNA, 30 bp, Artificial Sequence
  Synthetic oligonucleotide
atagtattcaaccatcggggtgccacacgc

SEQ ID NO: 217374 - DNA, 30 bp, Artificial Sequence
  Synthetic oligonucleotide
caagttaagtttagggttagttgcacacgc

SEQ ID NO: 217375 - DNA, 30 bp, Artificial Sequence
  Synthetic oligonucleotide
ttgtccaccgacatgcgagagttcacacgc

SEQ ID NO: 217376 - DNA, 30 bp, Artificial Sequence
  Synthetic oligonucleotide
ggcggcaacctctggaaacatccgacacgc

SEQ ID NO: 217377 - DNA, 30 bp, Artificial Sequence
  Synthetic oligonucleotide
ttggcggcatgaacagctaatctcccacgc

SEQ ID NO: 217378 - DNA, 30 bp, Artificial Sequence
  Synthetic oligonucleotide
gggtctagaacagttgtgagtcatccacgc

SEQ ID NO: 217379 - DNA, 30 bp, Artificial Sequence
  Synthetic oligonucleotide
gcgggttacatgacgtgtgctactccacgc

SEQ ID NO: 217380 - DNA, 31 bp, Artificial Sequence
  Synthetic oligonucleotide
ttaggaactcaccagccccagtattccacgc

SEQ ID NO: 217381 - DNA, 30 bp, Artificial Sequence
  Synthetic oligonucleotide
ggcttctgagggcctgactcgaaagcacgc

SEQ ID NO: 217382 - DNA, 30 bp, Artificial Sequence
  Synthetic oligonucleotide
ctccgaccaagcgtctagcacaccgcacgc

SEQ ID NO: 217383 - DNA, 30 bp, Artificial Sequence
  Synthetic oligonucleotide
tgatagccgactcggtctctgatctcacgc

SEQ ID NO: 217384 - DNA, 30 bp, Artificial Sequence
  Synthetic oligonucleotide
atgtgcaggccaaaacgctcattctcacgc

SEQ ID NO: 217385 - DNA, 30 bp, Artificial Sequence
  Synthetic oligonucleotide
acccggcgcgtcgaaggtgacgtgtcacgc

SEQ ID NO: 217386 - DNA, 30 bp, Artificial Sequence
  Synthetic oligonucleotide
gactagaatgccaaaagtgggtcttcacgc

SEQ ID NO: 217387 - DNA, 30 bp, Artificial Sequence
  Synthetic oligonucleotide
atacgacttccaagaaggcactgttcacgc

SEQ ID NO: 217388 - DNA, 30 bp, Artificial Sequence
  Synthetic oligonucleotide
aacgccatcccttaagagctgtgttcacgc

SEQ ID NO: 217389 - DNA, 30 bp, Artificial Sequence
  Synthetic oligonucleotide
cacacagggcagtaaaggatcgtttcacgc

SEQ ID NO: 217390 - DNA, 30 bp, Artificial Sequence
  Synthetic oligonucleotide
gtgcatgtcggtagaatggccgcaggacgc

SEQ ID NO: 217391 - DNA, 30 bp, Artificial Sequence
  Synthetic oligonucleotide
tataactatctaatggatagtgcaatacgc

SEQ ID NO: 217392 - DNA, 30 bp, Artificial Sequence
  Synthetic oligonucleotide
tggatgcgcgggctccgatgtcgcatacgc

SEQ ID NO: 217393 - DNA, 30 bp, Artificial Sequence
  Synthetic oligonucleotide
catgctatggccttcaaccaatgcatacgc

SEQ ID NO: 217394 - DNA, 30 bp, Artificial Sequence
  Synthetic oligonucleotide
tatatcgagctcagtgagggacggatacgc

SEQ ID NO: 217395 - DNA, 30 bp, Artificial Sequence
  Synthetic oligonucleotide
ctatcgttcgtcaggggtcatgggatacgc

SEQ ID NO: 217396 - DNA, 30 bp, Artificial Sequence
  Synthetic oligonucleotide
gcagtcacggacgtgacgcgaagtatacgc

SEQ ID NO: 217397 - DNA, 30 bp, Artificial Sequence
  Synthetic oligonucleotide
gaggagcagtgagtgcatatacgtatacgc

SEQ ID NO: 217398 - DNA, 30 bp, Artificial Sequence
  Synthetic oligonucleotide
tacccagctagaaaccaacaaattatacgc

SEQ ID NO: 217399 - DNA, 30 bp, Artificial Sequence
  Synthetic oligonucleotide
gtggcacatccggtcgagccaattatacgc

SEQ ID NO: 217400 - DNA, 30 bp, Artificial Sequence
  Synthetic oligonucleotide
gtatgtggccatccgaccgcaatactacgc

SEQ ID NO: 217401 - DNA, 30 bp, Artificial Sequence
  Synthetic oligonucleotide
gttagaagggtaccgtggatccacctacgc

SEQ ID NO: 217402 - DNA, 30 bp, Artificial Sequence
  Synthetic oligonucleotide
ggtgtaagcggatgattgaaaacagtacgc

SEQ ID NO: 217403 - DNA, 30 bp, Artificial Sequence
  Synthetic oligonucleotide
tcgttttaggccggcttaaaggcagtacgc

SEQ ID NO: 217404 - DNA, 30 bp, Artificial Sequence
  Synthetic oligonucleotide
gagaagctcaaatcgccacagtgagtacgc

SEQ ID NO: 217405 - DNA, 30 bp, Artificial Sequence
  Synthetic oligonucleotide
ctattaccttcacagtcgaatcacgtacgc

SEQ ID NO: 217406 - DNA, 30 bp, Artificial Sequence
  Synthetic oligonucleotide
cagacgtccaagtaagcacgtgtggtacgc

SEQ ID NO: 217407 - DNA, 30 bp, Artificial Sequence
  Synthetic oligonucleotide
atcccctgccttgggtaaggcagtgtacgc

SEQ ID NO: 217408 - DNA, 30 bp, Artificial Sequence
  Synthetic oligonucleotide
gggagaacaaaggcacgcaaaattgtacgc

SEQ ID NO: 217409 - DNA, 30 bp, Artificial Sequence
  Synthetic oligonucleotide
gagcatagtgacgtttaggtaaaaaaccgc

SEQ ID NO: 217410 - DNA, 30 bp, Artificial Sequence
  Synthetic oligonucleotide
gcgggtgtaagaaattacgcacgaaaccgc

SEQ ID NO: 217411 - DNA, 30 bp, Artificial Sequence
  Synthetic oligonucleotide
aagccattggtaacgattgacggcaaccgc

SEQ ID NO: 217412 - DNA, 30 bp, Artificial Sequence
  Synthetic oligonucleotide
acaaggaagactattaggccacagaaccgc

SEQ ID NO: 217413 - DNA, 30 bp, Artificial Sequence
  Synthetic oligonucleotide
ttaacacctgcgtaccaggaggggaaccgc

SEQ ID NO: 217414 - DNA, 30 bp, Artificial Sequence
  Synthetic oligonucleotide
atcaaatgtgctgcgcattgaaaacaccgc

SEQ ID NO: 217415 - DNA, 30 bp, Artificial Sequence
  Synthetic oligonucleotide
tgcaccgcaagagaaagaaatggacaccgc

SEQ ID NO: 217416 - DNA, 30 bp, Artificial Sequence
  Synthetic oligonucleotide
gcgcctgatccaagtagctgcaatcaccgc

SEQ ID NO: 217417 - DNA, 30 bp, Artificial Sequence
  Synthetic oligonucleotide
ttaaggaataacatatttgttggagaccgc

SEQ ID NO: 217418 - DNA, 30 bp, Artificial Sequence
  Synthetic oligonucleotide
cgttgtgtggaagcggcgagttgagaccgc

SEQ ID NO: 217419 - DNA, 30 bp, Artificial Sequence
  Synthetic oligonucleotide
tggttcgactgaggtctagtcagcgaccgc

SEQ ID NO: 217420 - DNA, 30 bp, Artificial Sequence
  Synthetic oligonucleotide
acttctagaatcaacgtatgatcggaccgc

SEQ ID NO: 217421 - DNA, 30 bp, Artificial Sequence
  Synthetic oligonucleotide
atacgggcccagatttattcagtctaccgc

SEQ ID NO: 217422 - DNA, 30 bp, Artificial Sequence
  Synthetic oligonucleotide
gatgggatgtcttagggctcggcaccccgc

SEQ ID NO: 217423 - DNA, 30 bp, Artificial Sequence
  Synthetic oligonucleotide
gtaaggacacgaatctgccggtgagcccgc

SEQ ID NO: 217424 - DNA, 30 bp, Artificial Sequence
  Synthetic oligonucleotide
ctcaccgagcaggtattctaccgggcccgc

SEQ ID NO: 217425 - DNA, 30 bp, Artificial Sequence
  Synthetic oligonucleotide
gccggtaataggctggcgggactggcccgc

SEQ ID NO: 217426 - DNA, 30 bp, Artificial Sequence
  Synthetic oligonucleotide
gtccgacattctgacaaactactggcccgc

SEQ ID NO: 217427 - DNA, 30 bp, Artificial Sequence
  Synthetic oligonucleotide
ggtcttgagcgtgcaacgtatcccagccgc

SEQ ID NO: 217428 - DNA, 30 bp, Artificial Sequence
  Synthetic oligonucleotide
ccgccaacagaagggctcgctattagccgc

SEQ ID NO: 217429 - DNA, 30 bp, Artificial Sequence
  Synthetic oligonucleotide
taaaacagcacggaagcacagctccgccgc

SEQ ID NO: 217430 - DNA, 31 bp, Artificial Sequence
  Synthetic oligonucleotide
aagacaaacggtgtccagggtacatcgccgc

SEQ ID NO: 217431 - DNA, 30 bp, Artificial Sequence
  Synthetic oligonucleotide
cgttcatatttatgctacctagaaggccgc

SEQ ID NO: 217432 - DNA, 30 bp, Artificial Sequence
  Synthetic oligonucleotide
gatatcatgatttttagataggaaggccgc

SEQ ID NO: 217433 - DNA, 30 bp, Artificial Sequence
  Synthetic oligonucleotide
ttccacttgagcactagcgataaatgccgc

SEQ ID NO: 217434 - DNA, 30 bp, Artificial Sequence
  Synthetic oligonucleotide
ctgcgggagcgaggaactcgtagatgccgc

SEQ ID NO: 217435 - DNA, 30 bp, Artificial Sequence
  Synthetic oligonucleotide
tcagaagcgtcaatatagcatccaatccgc

SEQ ID NO: 217436 - DNA, 30 bp, Artificial Sequence
  Synthetic oligonucleotide
aaacagccgagaccacagctgcagatccgc

SEQ ID NO: 217437 - DNA, 30 bp, Artificial Sequence
  Synthetic oligonucleotide
gccacaggtacacttgtttcgccactccgc

SEQ ID NO: 217438 - DNA, 30 bp, Artificial Sequence
  Synthetic oligonucleotide
tcacttaccaactatattcaagccctccgc

SEQ ID NO: 217439 - DNA, 30 bp, Artificial Sequence
  Synthetic oligonucleotide
cgccgacgctacggcgtcagagatctccgc

SEQ ID NO: 217440 - DNA, 30 bp, Artificial Sequence
  Synthetic oligonucleotide
aacttgcgtggtataaagaagattctccgc

SEQ ID NO: 217441 - DNA, 30 bp, Artificial Sequence
  Synthetic oligonucleotide
ctttatcataaattgaagtgtgttctccgc

SEQ ID NO: 217442 - DNA, 30 bp, Artificial Sequence
  Synthetic oligonucleotide
tgaagtaggactcgcgactcttacgtccgc

SEQ ID NO: 217443 - DNA, 30 bp, Artificial Sequence
  Synthetic oligonucleotide
agatggatatcgggcagtcgatatgtccgc

SEQ ID NO: 217444 - DNA, 30 bp, Artificial Sequence
  Synthetic oligonucleotide
aaaggcatgtttggattgtagtaattccgc

SEQ ID NO: 217445 - DNA, 31 bp, Artificial Sequence
  Synthetic oligonucleotide
gggcatgttaacggcttattttgggttccgc

SEQ ID NO: 217446 - DNA, 30 bp, Artificial Sequence
  Synthetic oligonucleotide
cgttacgaattcgagatctcgtctttccgc

SEQ ID NO: 217447 - DNA, 30 bp, Artificial Sequence
  Synthetic oligonucleotide
tttcgagaaccgaaattatgtccaaagcgc

SEQ ID NO: 217448 - DNA, 30 bp, Artificial Sequence
  Synthetic oligonucleotide
caataccatcggacgagcggggaacagcgc

SEQ ID NO: 217449 - DNA, 30 bp, Artificial Sequence
  Synthetic oligonucleotide
tggtttaaagtaatagagcgataacagcgc

SEQ ID NO: 217450 - DNA, 30 bp, Artificial Sequence
  Synthetic oligonucleotide
agggctgctctatagtggcaggtacagcgc

SEQ ID NO: 217451 - DNA, 30 bp, Artificial Sequence
  Synthetic oligonucleotide
ttcaggtaaggtgccatttgtgtacagcgc

SEQ ID NO: 217452 - DNA, 30 bp, Artificial Sequence
  Synthetic oligonucleotide
aggtgatttaagtggactcctagccagcgc

SEQ ID NO: 217453 - DNA, 30 bp, Artificial Sequence
  Synthetic oligonucleotide
agcattggaatcggtcatctctgccagcgc

SEQ ID NO: 217454 - DNA, 30 bp, Artificial Sequence
  Synthetic oligonucleotide
agatagggattccgtgctaagtatcagcgc

SEQ ID NO: 217455 - DNA, 30 bp, Artificial Sequence
  Synthetic oligonucleotide
tgaggttaggcggtgatgtgaggtcagcgc

SEQ ID NO: 217456 - DNA, 30 bp, Artificial Sequence
  Synthetic oligonucleotide
agcagattccggtcgtagtatacagagcgc

SEQ ID NO: 217457 - DNA, 30 bp, Artificial Sequence
  Synthetic oligonucleotide
tgcgtaccgagtgactacgatccatagcgc

SEQ ID NO: 217458 - DNA, 30 bp, Artificial Sequence
  Synthetic oligonucleotide
ggcaatggtcgtgaaaatcaactctagcgc

SEQ ID NO: 217459 - DNA, 30 bp, Artificial Sequence
  Synthetic oligonucleotide
taaacgaacgtggcggctaccacgtagcgc

SEQ ID NO: 217460 - DNA, 30 bp, Artificial Sequence
  Synthetic oligonucleotide
tacgtagagaaccatgaaagagggtagcgc

SEQ ID NO: 217461 - DNA, 30 bp, Artificial Sequence
  Synthetic oligonucleotide
tttgctaccgggcgtatcctggtgtagcgc

SEQ ID NO: 217462 - DNA, 30 bp, Artificial Sequence
  Synthetic oligonucleotide
tccattaacataaggggtgaacgcacgcgc

SEQ ID NO: 217463 - DNA, 30 bp, Artificial Sequence
  Synthetic oligonucleotide
gggatcgagaaccggtcatcagtcacgcgc

SEQ ID NO: 217464 - DNA, 30 bp, Artificial Sequence
  Synthetic oligonucleotide
tagaacaatttgaccgcaggtaggacgcgc

SEQ ID NO: 217465 - DNA, 30 bp, Artificial Sequence
  Synthetic oligonucleotide
tattaggagccatatagaggaattacgcgc

SEQ ID NO: 217466 - DNA, 30 bp, Artificial Sequence
  Synthetic oligonucleotide
acgtctgacaaatttagcaacactccgcgc

SEQ ID NO: 217467 - DNA, 30 bp, Artificial Sequence
  Synthetic oligonucleotide
tagcgcgatgttgtgggacgctccgcgcgc

SEQ ID NO: 217468 - DNA, 30 bp, Artificial Sequence
  Synthetic oligonucleotide
aaacggcattagctgtttcgcctggcgcgc

SEQ ID NO: 217469 - DNA, 30 bp, Artificial Sequence
  Synthetic oligonucleotide
acccgcctatttatttaacaaagatcgcgc

SEQ ID NO: 217470 - DNA, 30 bp, Artificial Sequence
  Synthetic oligonucleotide
tcgctggagggatccaaacagctctcgcgc

SEQ ID NO: 217471 - DNA, 30 bp, Artificial Sequence
  Synthetic oligonucleotide
gacatggaaagtggggtccggttacggcgc

SEQ ID NO: 217472 - DNA, 30 bp, Artificial Sequence
  Synthetic oligonucleotide
agtctgtacaacgcgcattccattcggcgc

SEQ ID NO: 217473 - DNA, 30 bp, Artificial Sequence
  Synthetic oligonucleotide
ccccgtgaatatttatcggcaccagggcgc

SEQ ID NO: 217474 - DNA, 30 bp, Artificial Sequence
  Synthetic oligonucleotide
cagacccatgcaggctgatggggagggcgc

SEQ ID NO: 217475 - DNA, 30 bp, Artificial Sequence
  Synthetic oligonucleotide
agacgtaaggaagtgtttccgaaatggcgc

SEQ ID NO: 217476 - DNA, 30 bp, Artificial Sequence
  Synthetic oligonucleotide
tggcacgcggggctagtttgatgaatgcgc

SEQ ID NO: 217477 - DNA, 30 bp, Artificial Sequence
  Synthetic oligonucleotide
acgatagccacgcttagtcgcattatgcgc

SEQ ID NO: 217478 - DNA, 30 bp, Artificial Sequence
  Synthetic oligonucleotide
gaggaaagtgatgaatattataatctgcgc

SEQ ID NO: 217479 - DNA, 30 bp, Artificial Sequence
  Synthetic oligonucleotide
taggtccgcgagtgtagtttacatctgcgc

SEQ ID NO: 217480 - DNA, 30 bp, Artificial Sequence
  Synthetic oligonucleotide
taaggtatcccgtgcaaggccattctgcgc

SEQ ID NO: 217481 - DNA, 30 bp, Artificial Sequence
  Synthetic oligonucleotide
atttgtaggtgactagccaaaaccgtgcgc

SEQ ID NO: 217482 - DNA, 30 bp, Artificial Sequence
  Synthetic oligonucleotide
tgaccatgaaacttcggggaatccgtgcgc

SEQ ID NO: 217483 - DNA, 30 bp, Artificial Sequence
  Synthetic oligonucleotide
gattggcttcgaagtatcagggaggtgcgc

SEQ ID NO: 217484 - DNA, 30 bp, Artificial Sequence
  Synthetic oligonucleotide
cggcacagctctttcgactgggatgtgcgc

SEQ ID NO: 217485 - DNA, 30 bp, Artificial Sequence
  Synthetic oligonucleotide
aacgaggcgataaaccgtgtacgtgtgcgc

SEQ ID NO: 217486 - DNA, 30 bp, Artificial Sequence
  Synthetic oligonucleotide
tggtagcgctccacacattactcattgcgc

SEQ ID NO: 217487 - DNA, 30 bp, Artificial Sequence
  Synthetic oligonucleotide
atgaatcataacaaataacgtttattgcgc

SEQ ID NO: 217488 - DNA, 30 bp, Artificial Sequence
  Synthetic oligonucleotide
atacgttgagccatcttgtagaagttgcgc

SEQ ID NO: 217489 - DNA, 30 bp, Artificial Sequence
  Synthetic oligonucleotide
cttgttcggggagtgcaatggccgttgcgc

SEQ ID NO: 217490 - DNA, 30 bp, Artificial Sequence
  Synthetic oligonucleotide
cgctttaagggtaggtgggatcacaatcgc

SEQ ID NO: 217491 - DNA, 30 bp, Artificial Sequence
  Synthetic oligonucleotide
tttaaacccccatctaaccaaacgaatcgc

SEQ ID NO: 217492 - DNA, 30 bp, Artificial Sequence
  Synthetic oligonucleotide
aacgattgaccagggccgtcgaggaatcgc

SEQ ID NO: 217493 - DNA, 30 bp, Artificial Sequence
  Synthetic oligonucleotide
gctaattattagcactaccttttgaatcgc

SEQ ID NO: 217494 - DNA, 30 bp, Artificial Sequence
  Synthetic oligonucleotide
caaataccaaatggctaacactcacatcgc

SEQ ID NO: 217495 - DNA, 30 bp, Artificial Sequence
  Synthetic oligonucleotide
gcaatatcaaatcgcagtgttacccatcgc

SEQ ID NO: 217496 - DNA, 30 bp, Artificial Sequence
  Synthetic oligonucleotide
catcaagaataacgtacagtccggcatcgc

SEQ ID NO: 217497 - DNA, 30 bp, Artificial Sequence
  Synthetic oligonucleotide
ccgtggctgtctagagttgaacgagatcgc

SEQ ID NO: 217498 - DNA, 30 bp, Artificial Sequence
  Synthetic oligonucleotide
aagctattggtgggtatctcaggagatcgc

SEQ ID NO: 217499 - DNA, 30 bp, Artificial Sequence
  Synthetic oligonucleotide
aaagctgatctgacgaagggatacgatcgc

SEQ ID NO: 217500 - DNA, 30 bp, Artificial Sequence
  Synthetic oligonucleotide
gccagttgctgtgactcgataggcgatcgc

SEQ ID NO: 217501 - DNA, 30 bp, Artificial Sequence
  Synthetic oligonucleotide
agtgagtaacattgagagccagtcgatcgc

SEQ ID NO: 217502 - DNA, 30 bp, Artificial Sequence
  Synthetic oligonucleotide
attgttgggtagaaatacggctatgatcgc

SEQ ID NO: 217503 - DNA, 30 bp, Artificial Sequence
  Synthetic oligonucleotide
ctgcctggaccagagattacattatatcgc

SEQ ID NO: 217504 - DNA, 30 bp, Artificial Sequence
  Synthetic oligonucleotide
acccccggcaagtgtcggaggaagtatcgc

SEQ ID NO: 217505 - DNA, 30 bp, Artificial Sequence
  Synthetic oligonucleotide
caagtgggcgtcttggttcacgggtatcgc

SEQ ID NO: 217506 - DNA, 30 bp, Artificial Sequence
  Synthetic oligonucleotide
ggagtaatgtcagcagccgcactgtatcgc

SEQ ID NO: 217507 - DNA, 30 bp, Artificial Sequence
  Synthetic oligonucleotide
tcagtctgcgtttcatatcgggacactcgc

SEQ ID NO: 217508 - DNA, 30 bp, Artificial Sequence
  Synthetic oligonucleotide
catccgtacaacagctcgtacgatactcgc

SEQ ID NO: 217509 - DNA, 30 bp, Artificial Sequence
  Synthetic oligonucleotide
ggcacgggctcgacggaacgcgaacctcgc

SEQ ID NO: 217510 - DNA, 30 bp, Artificial Sequence
  Synthetic oligonucleotide
gaagtcacctcacgcatttatccgcctcgc

SEQ ID NO: 217511 - DNA, 30 bp, Artificial Sequence
  Synthetic oligonucleotide
atctatatttaccaaggatcggtagctcgc

SEQ ID NO: 217512 - DNA, 30 bp, Artificial Sequence
  Synthetic oligonucleotide
agtaacgggatgagttctgtgcccgctcgc

SEQ ID NO: 217513 - DNA, 30 bp, Artificial Sequence
  Synthetic oligonucleotide
acgactacgatgactagtacttgtgctcgc

SEQ ID NO: 217514 - DNA, 30 bp, Artificial Sequence
  Synthetic oligonucleotide
taggcaaacttagtttggcacgtctctcgc

SEQ ID NO: 217515 - DNA, 30 bp, Artificial Sequence
  Synthetic oligonucleotide
acccagacatagactcagtatgtctctcgc

SEQ ID NO: 217516 - DNA, 30 bp, Artificial Sequence
  Synthetic oligonucleotide
atgtgatacggttgctacgcgtcgtctcgc

SEQ ID NO: 217517 - DNA, 30 bp, Artificial Sequence
  Synthetic oligonucleotide
agatctgtcggacaaatggtggtaagtcgc

SEQ ID NO: 217518 - DNA, 30 bp, Artificial Sequence
  Synthetic oligonucleotide
gtggtaatctggactggggcaaacagtcgc

SEQ ID NO: 217519 - DNA, 30 bp, Artificial Sequence
  Synthetic oligonucleotide
gcgtggtcgtagttcggtgttcatagtcgc

SEQ ID NO: 217520 - DNA, 30 bp, Artificial Sequence
  Synthetic oligonucleotide
ccgactaatggagataagcatatgcgtcgc

SEQ ID NO: 217521 - DNA, 30 bp, Artificial Sequence
  Synthetic oligonucleotide
aacccatggtgttgctcgatctaaggtcgc

SEQ ID NO: 217522 - DNA, 30 bp, Artificial Sequence
  Synthetic oligonucleotide
cagatcaaagaccaaaacccgtaaggtcgc

SEQ ID NO: 217523 - DNA, 30 bp, Artificial Sequence
  Synthetic oligonucleotide
actaactggtcgtcggcaattgcgggtcgc

SEQ ID NO: 217524 - DNA, 30 bp, Artificial Sequence
  Synthetic oligonucleotide
ctatgtaggtcttactgggcttcttgtcgc

SEQ ID NO: 217525 - DNA, 30 bp, Artificial Sequence
  Synthetic oligonucleotide
gaagtattggctgggattattaaaattcgc

SEQ ID NO: 217526 - DNA, 29 bp, Artificial Sequence
  Synthetic oligonucleotide
aagagaggttcgagtcggcacccattcgc

SEQ ID NO: 217527 - DNA, 30 bp, Artificial Sequence
  Synthetic oligonucleotide
tgcttttggttcaccagagtcagcattcgc

SEQ ID NO: 217528 - DNA, 30 bp, Artificial Sequence
  Synthetic oligonucleotide
acggggcaatactcactctctaagattcgc

SEQ ID NO: 217529 - DNA, 30 bp, Artificial Sequence
  Synthetic oligonucleotide
agtgccccactcacatcggagacgattcgc

SEQ ID NO: 217530 - DNA, 30 bp, Artificial Sequence
  Synthetic oligonucleotide
ataagtgtagccgttaatcagaatattcgc

SEQ ID NO: 217531 - DNA, 30 bp, Artificial Sequence
  Synthetic oligonucleotide
atgcgaactgctcgaccatagagacttcgc

SEQ ID NO: 217532 - DNA, 30 bp, Artificial Sequence
  Synthetic oligonucleotide
taaccggggccttacaccaatgtagttcgc

SEQ ID NO: 217533 - DNA, 30 bp, Artificial Sequence
  Synthetic oligonucleotide
gcactgcacgcaatcatcagtgccgttcgc

SEQ ID NO: 217534 - DNA, 30 bp, Artificial Sequence
  Synthetic oligonucleotide
ggattatgtctgacttggttaacggttcgc

SEQ ID NO: 217535 - DNA, 30 bp, Artificial Sequence
  Synthetic oligonucleotide
atgggaaggaatcaggcctgtacggttcgc

SEQ ID NO: 217536 - DNA, 30 bp, Artificial Sequence
  Synthetic oligonucleotide
ttggggcctggtgggagtaacgcggttcgc

SEQ ID NO: 217537 - DNA, 30 bp, Artificial Sequence
  Synthetic oligonucleotide
cctggtttggatcacatgtgagtggttcgc

SEQ ID NO: 217538 - DNA, 30 bp, Artificial Sequence
  Synthetic oligonucleotide
aggttttcacgtgtgagtttcacatttcgc

SEQ ID NO: 217539 - DNA, 30 bp, Artificial Sequence
  Synthetic oligonucleotide
cgctcccgtaaagataactcgcggtttcgc

SEQ ID NO: 217540 - DNA, 30 bp, Artificial Sequence
  Synthetic oligonucleotide
acggccattggagtatgcaaagattttcgc

SEQ ID NO: 217541 - DNA, 30 bp, Artificial Sequence
  Synthetic oligonucleotide
tacgctaaacacactattggggccaaaggc

SEQ ID NO: 217542 - DNA, 30 bp, Artificial Sequence
  Synthetic oligonucleotide
acatttggcaccggtgatcttggcaaaggc

SEQ ID NO: 217543 - DNA, 30 bp, Artificial Sequence
  Synthetic oligonucleotide
accatattaatttccaaaagggagaaaggc

SEQ ID NO: 217544 - DNA, 30 bp, Artificial Sequence
  Synthetic oligonucleotide
ggcatcgaaggacacctgatctagaaaggc

SEQ ID NO: 217545 - DNA, 30 bp, Artificial Sequence
  Synthetic oligonucleotide
tagaacaagtatagcgtacaggggaaaggc

SEQ ID NO: 217546 - DNA, 31 bp, Artificial Sequence
  Synthetic oligonucleotide
ctgcagtgggaacgttagtggcggtcaaggc

SEQ ID NO: 217547 - DNA, 30 bp, Artificial Sequence
  Synthetic oligonucleotide
taacccacgactacgtagatctgtcaaggc

SEQ ID NO: 217548 - DNA, 30 bp, Artificial Sequence
  Synthetic oligonucleotide
agcgtagtcgcacaacagatacttcaaggc

SEQ ID NO: 217549 - DNA, 30 bp, Artificial Sequence
  Synthetic oligonucleotide
cccgcactgtaacagggtcgactggaaggc

SEQ ID NO: 217550 - DNA, 30 bp, Artificial Sequence
  Synthetic oligonucleotide
gaacgatcgttaggccaaagggctgaaggc

SEQ ID NO: 217551 - DNA, 30 bp, Artificial Sequence
  Synthetic oligonucleotide
acgtagaaatcgcagatagtcacataaggc

SEQ ID NO: 217552 - DNA, 30 bp, Artificial Sequence
  Synthetic oligonucleotide
cttatcgagctgtaataggaatattaaggc

SEQ ID NO: 217553 - DNA, 30 bp, Artificial Sequence
  Synthetic oligonucleotide
tatgctccgcataagtcaacacgtacaggc

SEQ ID NO: 217554 - DNA, 30 bp, Artificial Sequence
  Synthetic oligonucleotide
aggtgcctgggcggaagcgaggaaccaggc

SEQ ID NO: 217555 - DNA, 30 bp, Artificial Sequence
  Synthetic oligonucleotide
ttagatcaagattgggatctgcccccaggc

SEQ ID NO: 217556 - DNA, 30 bp, Artificial Sequence
  Synthetic oligonucleotide
gtattacggaatcggggcggaaagccaggc

SEQ ID NO: 217557 - DNA, 30 bp, Artificial Sequence
  Synthetic oligonucleotide
ccattcaacatggggtcttcctatccaggc

SEQ ID NO: 217558 - DNA, 30 bp, Artificial Sequence
  Synthetic oligonucleotide
atggcccacggaaaggcggaacgtgcaggc

SEQ ID NO: 217559 - DNA, 30 bp, Artificial Sequence
  Synthetic oligonucleotide
cggccgagtagatataatccgcagtcaggc

SEQ ID NO: 217560 - DNA, 30 bp, Artificial Sequence
  Synthetic oligonucleotide
gtacgtacaccagacaggacggcttcaggc

SEQ ID NO: 217561 - DNA, 30 bp, Artificial Sequence
  Synthetic oligonucleotide
aatgtgagtttaactgttgatatttcaggc

SEQ ID NO: 217562 - DNA, 30 bp, Artificial Sequence
  Synthetic oligonucleotide
cgggtccaaaactcaaacagtacaagaggc

SEQ ID NO: 217563 - DNA, 30 bp, Artificial Sequence
  Synthetic oligonucleotide
ttcgaagtatgtcggcattgtaacagaggc

SEQ ID NO: 217564 - DNA, 30 bp, Artificial Sequence
  Synthetic oligonucleotide
tgcggggaacctacgtataatagcagaggc

SEQ ID NO: 217565 - DNA, 30 bp, Artificial Sequence
  Synthetic oligonucleotide
gtcgcgagggagtccaagagaggcagaggc

SEQ ID NO: 217566 - DNA, 30 bp, Artificial Sequence
  Synthetic oligonucleotide
acgagttgataaggcataaactatagaggc

SEQ ID NO: 217567 - DNA, 30 bp, Artificial Sequence
  Synthetic oligonucleotide
agtatgattgaagggaagcaagcacgaggc

SEQ ID NO: 217568 - DNA, 30 bp, Artificial Sequence
  Synthetic oligonucleotide
ctagtttgtatgttgctataacggcgaggc

SEQ ID NO: 217569 - DNA, 30 bp, Artificial Sequence
  Synthetic oligonucleotide
ctcgatccagtgaaaatatgcgatcgaggc

SEQ ID NO: 217570 - DNA, 30 bp, Artificial Sequence
  Synthetic oligonucleotide
ttgttccccaatccacgctggaaaggaggc

SEQ ID NO: 217571 - DNA, 31 bp, Artificial Sequence
  Synthetic oligonucleotide
gttgcatcctagaaaagcagtacaaggaggc

SEQ ID NO: 217572 - DNA, 30 bp, Artificial Sequence
  Synthetic oligonucleotide
ggggttgagaattgacaatagcaaggaggc

SEQ ID NO: 217573 - DNA, 30 bp, Artificial Sequence
  Synthetic oligonucleotide
ccttcatacatattttacagtagcggaggc

SEQ ID NO: 217574 - DNA, 30 bp, Artificial Sequence
  Synthetic oligonucleotide
ggcgtgggggcaagggcctgctcgggaggc

SEQ ID NO: 217575 - DNA, 30 bp, Artificial Sequence
  Synthetic oligonucleotide
aatgaaaacccttagtatgtcgattgaggc

SEQ ID NO: 217576 - DNA, 30 bp, Artificial Sequence
  Synthetic oligonucleotide
tacgctcgtcaacggaagttcgattgaggc

SEQ ID NO: 217577 - DNA, 30 bp, Artificial Sequence
  Synthetic oligonucleotide
acagtggacgccgattcggatttcataggc

SEQ ID NO: 217578 - DNA, 30 bp, Artificial Sequence
  Synthetic oligonucleotide
gataagcattggctgacaacagctataggc

SEQ ID NO: 217579 - DNA, 30 bp, Artificial Sequence
  Synthetic oligonucleotide
agactagcgctcgctaatgtagctataggc

SEQ ID NO: 217580 - DNA, 30 bp, Artificial Sequence
  Synthetic oligonucleotide
tgcatccttatctggttcagataactaggc

SEQ ID NO: 217581 - DNA, 30 bp, Artificial Sequence
  Synthetic oligonucleotide
gagcgaaaaggcataaaatcgcccctaggc

SEQ ID NO: 217582 - DNA, 30 bp, Artificial Sequence
  Synthetic oligonucleotide
gcatttacactgagcatcagaatcctaggc

SEQ ID NO: 217583 - DNA, 30 bp, Artificial Sequence
  Synthetic oligonucleotide
gatgcgtgtcggcctgtccattggctaggc

SEQ ID NO: 217584 - DNA, 30 bp, Artificial Sequence
  Synthetic oligonucleotide
taatcgatatgagggcgcagattcgtaggc

SEQ ID NO: 217585 - DNA, 30 bp, Artificial Sequence
  Synthetic oligonucleotide
cccaccgtcgattgaattgagcgggtaggc

SEQ ID NO: 217586 - DNA, 30 bp, Artificial Sequence
  Synthetic oligonucleotide
ccaaaacggcgtagttatttccatgtaggc

SEQ ID NO: 217587 - DNA, 30 bp, Artificial Sequence
  Synthetic oligonucleotide
tagttatcaacacgtggttaggatgtaggc

SEQ ID NO: 217588 - DNA, 30 bp, Artificial Sequence
  Synthetic oligonucleotide
cgtcgtaatggtggcatgaattatgtaggc

SEQ ID NO: 217589 - DNA, 30 bp, Artificial Sequence
  Synthetic oligonucleotide
gtgggagtggcgttcagtaggcaattaggc

SEQ ID NO: 217590 - DNA, 30 bp, Artificial Sequence
  Synthetic oligonucleotide
agcaggtggatgaaacgccagatattaggc

SEQ ID NO: 217591 - DNA, 30 bp, Artificial Sequence
  Synthetic oligonucleotide
gcccgacttcacaaaggtagtcacttaggc

SEQ ID NO: 217592 - DNA, 30 bp, Artificial Sequence
  Synthetic oligonucleotide
aactagacacacggagatccaaagttaggc

SEQ ID NO: 217593 - DNA, 30 bp, Artificial Sequence
  Synthetic oligonucleotide
aacgctggaaagctggaagaaacgttaggc

SEQ ID NO: 217594 - DNA, 30 bp, Artificial Sequence
  Synthetic oligonucleotide
gcgagtacgttcgggggcgtagatttaggc

SEQ ID NO: 217595 - DNA, 30 bp, Artificial Sequence
  Synthetic oligonucleotide
cacgaagctccggcaccataatctttaggc

SEQ ID NO: 217596 - DNA, 30 bp, Artificial Sequence
  Synthetic oligonucleotide
cgggaagtgattggcagttcttctttaggc

SEQ ID NO: 217597 - DNA, 30 bp, Artificial Sequence
  Synthetic oligonucleotide
ttgaggagtggggcatcccattgaaacggc

SEQ ID NO: 217598 - DNA, 30 bp, Artificial Sequence
  Synthetic oligonucleotide
tttaggatggaccgaggcagatttaacggc

SEQ ID NO: 217599 - DNA, 30 bp, Artificial Sequence
  Synthetic oligonucleotide
acggtaatttagcgaccagtccaccacggc

SEQ ID NO: 217600 - DNA, 30 bp, Artificial Sequence
  Synthetic oligonucleotide
gtagcagcgaggaatagtgggcagcacggc

SEQ ID NO: 217601 - DNA, 30 bp, Artificial Sequence
  Synthetic oligonucleotide
cgaaagccggttctcccttgagaggacggc

SEQ ID NO: 217602 - DNA, 30 bp, Artificial Sequence
  Synthetic oligonucleotide
tcatatacatcaagtttataagggtacggc

SEQ ID NO: 217603 - DNA, 30 bp, Artificial Sequence
  Synthetic oligonucleotide
catttcgtatgacagtgagaccccaccggc

SEQ ID NO: 217604 - DNA, 30 bp, Artificial Sequence
  Synthetic oligonucleotide
caaggattgtgaacattgggtcccaccggc

SEQ ID NO: 217605 - DNA, 30 bp, Artificial Sequence
  Synthetic oligonucleotide
gcggtggtacttagagctagtagcaccggc

SEQ ID NO: 217606 - DNA, 30 bp, Artificial Sequence
  Synthetic oligonucleotide
agttttgggacatagcacaagggcaccggc

SEQ ID NO: 217607 - DNA, 30 bp, Artificial Sequence
  Synthetic oligonucleotide
tacatcgtcaagagtacgccctggaccggc

SEQ ID NO: 217608 - DNA, 30 bp, Artificial Sequence
  Synthetic oligonucleotide
attatcatgagaaggcatcaggctaccggc

SEQ ID NO: 217609 - DNA, 30 bp, Artificial Sequence
  Synthetic oligonucleotide
gttatcagactcggctcgttaaagcccggc

SEQ ID NO: 217610 - DNA, 30 bp, Artificial Sequence
  Synthetic oligonucleotide
gcataattgacaaatcataccaggcccggc

SEQ ID NO: 217611 - DNA, 30 bp, Artificial Sequence
  Synthetic oligonucleotide
aaagcccctcgttacgccgaaatcgccggc

SEQ ID NO: 217612 - DNA, 30 bp, Artificial Sequence
  Synthetic oligonucleotide
taatgacgtagttgtacgatacgggccggc

SEQ ID NO: 217613 - DNA, 30 bp, Artificial Sequence
  Synthetic oligonucleotide
gactgacgtgtctttcgggctggctccggc

SEQ ID NO: 217614 - DNA, 30 bp, Artificial Sequence
  Synthetic oligonucleotide
atgggggagagttggtctagactttccggc

SEQ ID NO: 217615 - DNA, 30 bp, Artificial Sequence
  Synthetic oligonucleotide
cgccactgggtggaggtgcttcaaagcggc

SEQ ID NO: 217616 - DNA, 30 bp, Artificial Sequence
  Synthetic oligonucleotide
cgcaacaggacgagatgaggtttaagcggc

SEQ ID NO: 217617 - DNA, 30 bp, Artificial Sequence
  Synthetic oligonucleotide
acccccgaagtgtcctatcccgttagcggc

SEQ ID NO: 217618 - DNA, 30 bp, Artificial Sequence
  Synthetic oligonucleotide
atagaggtgtatatgatattacctcgcggc

SEQ ID NO: 217619 - DNA, 30 bp, Artificial Sequence
  Synthetic oligonucleotide
tatagagaacatattatcacaataggcggc

SEQ ID NO: 217620 - DNA, 30 bp, Artificial Sequence
  Synthetic oligonucleotide
aggggaagagaaagtgtggcagtcggcggc

SEQ ID NO: 217621 - DNA, 30 bp, Artificial Sequence
  Synthetic oligonucleotide
tgatacctgggggctctcacagcatgcggc

SEQ ID NO: 217622 - DNA, 30 bp, Artificial Sequence
  Synthetic oligonucleotide
ggaggttcaaccggcacgcgtcggtgcggc

SEQ ID NO: 217623 - DNA, 30 bp, Artificial Sequence
  Synthetic oligonucleotide
ttcaatagaagaggtaggtgactttgcggc

SEQ ID NO: 217624 - DNA, 30 bp, Artificial Sequence
  Synthetic oligonucleotide
gggagtcagttaattggcccggaaatcggc

SEQ ID NO: 217625 - DNA, 30 bp, Artificial Sequence
  Synthetic oligonucleotide
cctgataaagcttgacggtaaataatcggc

SEQ ID NO: 217626 - DNA, 30 bp, Artificial Sequence
  Synthetic oligonucleotide
tcacgttaatggcgtccgttaaccatcggc

SEQ ID NO: 217627 - DNA, 30 bp, Artificial Sequence
  Synthetic oligonucleotide
acttcaacgttccgtgaatccaccatcggc

SEQ ID NO: 217628 - DNA, 30 bp, Artificial Sequence
  Synthetic oligonucleotide
cttctaaagagtaggtagtagtccatcggc

SEQ ID NO: 217629 - DNA, 30 bp, Artificial Sequence
  Synthetic oligonucleotide
atgtcgactctgatacagttttctatcggc

SEQ ID NO: 217630 - DNA, 30 bp, Artificial Sequence
  Synthetic oligonucleotide
gttacttaacagaggacgggatgtatcggc

SEQ ID NO: 217631 - DNA, 30 bp, Artificial Sequence
  Synthetic oligonucleotide
tgcgctgaggccatgtatacacaactcggc

SEQ ID NO: 217632 - DNA, 30 bp, Artificial Sequence
  Synthetic oligonucleotide
aacttcaaagcgcagtaggcttacctcggc

SEQ ID NO: 217633 - DNA, 30 bp, Artificial Sequence
  Synthetic oligonucleotide
cacgggaagaagctgcatactggcctcggc

SEQ ID NO: 217634 - DNA, 30 bp, Artificial Sequence
  Synthetic oligonucleotide
aggattcgtcctttagggccgctcctcggc

SEQ ID NO: 217635 - DNA, 30 bp, Artificial Sequence
  Synthetic oligonucleotide
aaagtcacgtaagacaaaaaccctctcggc

SEQ ID NO: 217636 - DNA, 30 bp, Artificial Sequence
  Synthetic oligonucleotide
tagaggcctacatttgttgcgtaagtcggc

SEQ ID NO: 217637 - DNA, 30 bp, Artificial Sequence
  Synthetic oligonucleotide
tgcccctaatttgcttaacattaagtcggc

SEQ ID NO: 217638 - DNA, 30 bp, Artificial Sequence
  Synthetic oligonucleotide
tttgggtgcacgtcttagtttagcgtcggc

SEQ ID NO: 217639 - DNA, 30 bp, Artificial Sequence
  Synthetic oligonucleotide
gggcccaaaacctccttcgttcatgtcggc

SEQ ID NO: 217640 - DNA, 30 bp, Artificial Sequence
  Synthetic oligonucleotide
ctgctttttctgcgggtctgatatgtcggc

SEQ ID NO: 217641 - DNA, 30 bp, Artificial Sequence
  Synthetic oligonucleotide
tatacgtttcgtgagcgaaactgtgtcggc

SEQ ID NO: 217642 - DNA, 30 bp, Artificial Sequence
  Synthetic oligonucleotide
ttcgtaatgtgatacctagaaagattcggc

SEQ ID NO: 217643 - DNA, 30 bp, Artificial Sequence
  Synthetic oligonucleotide
taaaaatggataaggacggaactattcggc

SEQ ID NO: 217644 - DNA, 30 bp, Artificial Sequence
  Synthetic oligonucleotide
aggttccgttcacgccgaggattaaagggc

SEQ ID NO: 217645 - DNA, 30 bp, Artificial Sequence
  Synthetic oligonucleotide
gtcactgggtatgtaatgtgcagcaagggc

SEQ ID NO: 217646 - DNA, 30 bp, Artificial Sequence
  Synthetic oligonucleotide
tgggctcactattctaacgggcgcaagggc

SEQ ID NO: 217647 - DNA, 30 bp, Artificial Sequence
  Synthetic oligonucleotide
agagctccatatcaactgctttagaagggc

SEQ ID NO: 217648 - DNA, 30 bp, Artificial Sequence
  Synthetic oligonucleotide
tgcgttgggtgtaccccacgtaataagggc

SEQ ID NO: 217649 - DNA, 30 bp, Artificial Sequence
  Synthetic oligonucleotide
gtagatcggcgacacggaacatgtaagggc

SEQ ID NO: 217650 - DNA, 30 bp, Artificial Sequence
  Synthetic oligonucleotide
gcgccgctcgtgcatgacgtggtacagggc

SEQ ID NO: 217651 - DNA, 30 bp, Artificial Sequence
  Synthetic oligonucleotide
aagggcagcactcagaaccggaaagagggc

SEQ ID NO: 217652 - DNA, 30 bp, Artificial Sequence
  Synthetic oligonucleotide
cgacatgacgtacgaaccaattcagagggc

SEQ ID NO: 217653 - DNA, 30 bp, Artificial Sequence
  Synthetic oligonucleotide
atgatactgtcgtaccatggtaccgagggc

SEQ ID NO: 217654 - DNA, 30 bp, Artificial Sequence
  Synthetic oligonucleotide
tagctcgagggtttctaagtctgcgagggc

SEQ ID NO: 217655 - DNA, 30 bp, Artificial Sequence
  Synthetic oligonucleotide
cactatggtgaccgcatcaataaggagggc

SEQ ID NO: 217656 - DNA, 30 bp, Artificial Sequence
  Synthetic oligonucleotide
aacttcgggtgttttaccaccaaatagggc

SEQ ID NO: 217657 - DNA, 30 bp, Artificial Sequence
  Synthetic oligonucleotide
cagcggacacgccaatgtaccagttagggc

SEQ ID NO: 217658 - DNA, 30 bp, Artificial Sequence
  Synthetic oligonucleotide
ctaggcgctttcgttagcaatatttagggc

SEQ ID NO: 217659 - DNA, 30 bp, Artificial Sequence
  Synthetic oligonucleotide
ccaccgcgacggagtttcacggaaccgggc

SEQ ID NO: 217660 - DNA, 30 bp, Artificial Sequence
  Synthetic oligonucleotide
ggaggcacgattcataatacagttccgggc

SEQ ID NO: 217661 - DNA, 30 bp, Artificial Sequence
  Synthetic oligonucleotide
cgtattgtcctatcgggtgtgttcgcgggc

SEQ ID NO: 217662 - DNA, 30 bp, Artificial Sequence
  Synthetic oligonucleotide
agccctgcgtggtccatggatgtggcgggc

SEQ ID NO: 217663 - DNA, 30 bp, Artificial Sequence
  Synthetic oligonucleotide
gccgtacaaggaataaggatatatgcgggc

SEQ ID NO: 217664 - DNA, 30 bp, Artificial Sequence
  Synthetic oligonucleotide
gagattcgaacgtaaatgcctttatcgggc

SEQ ID NO: 217665 - DNA, 30 bp, Artificial Sequence
  Synthetic oligonucleotide
gcaatctctttaagtcgccgtgactcgggc

SEQ ID NO: 217666 - DNA, 30 bp, Artificial Sequence
  Synthetic oligonucleotide
gcgatcggttaggcgtctggttcgtcgggc

SEQ ID NO: 217667 - DNA, 30 bp, Artificial Sequence
  Synthetic oligonucleotide
caccattctaataacagacacgggtcgggc

SEQ ID NO: 217668 - DNA, 30 bp, Artificial Sequence
  Synthetic oligonucleotide
ggtgggttgaggttcatttccccaaggggc

SEQ ID NO: 217669 - DNA, 30 bp, Artificial Sequence
  Synthetic oligonucleotide
aacctccatggcatagaccctgcaaggggc

SEQ ID NO: 217670 - DNA, 31 bp, Artificial Sequence
  Synthetic oligonucleotide
ctgtcagtataagcagctatgaagcaggggc

SEQ ID NO: 217671 - DNA, 30 bp, Artificial Sequence
  Synthetic oligonucleotide
tacgggaccggggaacaacgtttgaggggc

SEQ ID NO: 217672 - DNA, 30 bp, Artificial Sequence
  Synthetic oligonucleotide
gggcgggggaataaacatccagataggggc

SEQ ID NO: 217673 - DNA, 30 bp, Artificial Sequence
  Synthetic oligonucleotide
acgaccgtgttgaacctaaagtgacggggc

SEQ ID NO: 217674 - DNA, 30 bp, Artificial Sequence
  Synthetic oligonucleotide
tgcgaccaagttggacagtagggccggggc

SEQ ID NO: 217675 - DNA, 30 bp, Artificial Sequence
  Synthetic oligonucleotide
ctatcggattagattccaggggagcggggc

SEQ ID NO: 217676 - DNA, 30 bp, Artificial Sequence
  Synthetic oligonucleotide
ccattaaaacgtactcttcgccctcggggc

SEQ ID NO: 217677 - DNA, 30 bp, Artificial Sequence
  Synthetic oligonucleotide
gaaagagggtcacattttgtgcaagggggc

SEQ ID NO: 217678 - DNA, 30 bp, Artificial Sequence
  Synthetic oligonucleotide
cccttggcccggagtagcactgcagggggc

SEQ ID NO: 217679 - DNA, 30 bp, Artificial Sequence
  Synthetic oligonucleotide
caacgagtaggtcgtacttcactagggggc

SEQ ID NO: 217680 - DNA, 30 bp, Artificial Sequence
  Synthetic oligonucleotide
taattacagtcacatcccaacttagggggc

SEQ ID NO: 217681 - DNA, 30 bp, Artificial Sequence
  Synthetic oligonucleotide
ggatagaaaacgcacatattatgggggggc

SEQ ID NO: 217682 - DNA, 30 bp, Artificial Sequence
  Synthetic oligonucleotide
tcccatgtgtcttcgttaaaatagtggggc

SEQ ID NO: 217683 - DNA, 30 bp, Artificial Sequence
  Synthetic oligonucleotide
ctttaggcttaatttcaatcggcaatgggc

SEQ ID NO: 217684 - DNA, 30 bp, Artificial Sequence
  Synthetic oligonucleotide
cttagcaaagaattgatacggtgaatgggc

SEQ ID NO: 217685 - DNA, 30 bp, Artificial Sequence
  Synthetic oligonucleotide
gtgccggactcgtgcgaggtggtaatgggc

SEQ ID NO: 217686 - DNA, 30 bp, Artificial Sequence
  Synthetic oligonucleotide
aggtacattgggttgaagcctcatatgggc

SEQ ID NO: 217687 - DNA, 30 bp, Artificial Sequence
  Synthetic oligonucleotide
gggagcaccgaccgggcctatgctatgggc

SEQ ID NO: 217688 - DNA, 30 bp, Artificial Sequence
  Synthetic oligonucleotide
acacgcgactacctccccttatctatgggc

SEQ ID NO: 217689 - DNA, 30 bp, Artificial Sequence
  Synthetic oligonucleotide
acaagaagatatgcgttcgaggttatgggc

SEQ ID NO: 217690 - DNA, 30 bp, Artificial Sequence
  Synthetic oligonucleotide
gacagatgatagggcaagtggccactgggc

SEQ ID NO: 217691 - DNA, 30 bp, Artificial Sequence
  Synthetic oligonucleotide
tgtgcggattgccaggcgaaaagactgggc

SEQ ID NO: 217692 - DNA, 30 bp, Artificial Sequence
  Synthetic oligonucleotide
taaacaatgattgtgctgtgctgactgggc

SEQ ID NO: 217693 - DNA, 30 bp, Artificial Sequence
  Synthetic oligonucleotide
caggccgttgaaaggtacgtggccgtgggc

SEQ ID NO: 217694 - DNA, 30 bp, Artificial Sequence
  Synthetic oligonucleotide
aacagtcacattccaataatctgcgtgggc

SEQ ID NO: 217695 - DNA, 30 bp, Artificial Sequence
  Synthetic oligonucleotide
agagtaaattaaaaggatatgatcgtgggc

SEQ ID NO: 217696 - DNA, 30 bp, Artificial Sequence
  Synthetic oligonucleotide
gacagacgcccgaggacaaggaaggtgggc

SEQ ID NO: 217697 - DNA, 30 bp, Artificial Sequence
  Synthetic oligonucleotide
gcacagattgcgaggttgtacagtgtgggc

SEQ ID NO: 217698 - DNA, 30 bp, Artificial Sequence
  Synthetic oligonucleotide
tgagtatactgggggaggtgtaaattgggc

SEQ ID NO: 217699 - DNA, 30 bp, Artificial Sequence
  Synthetic oligonucleotide
aaatagtgtgcaacaggacgtccattgggc

SEQ ID NO: 217700 - DNA, 30 bp, Artificial Sequence
  Synthetic oligonucleotide
aagaactgaagtacgacttcaggcttgggc

SEQ ID NO: 217701 - DNA, 30 bp, Artificial Sequence
  Synthetic oligonucleotide
cctagcatgcagtaagagattcggttgggc

SEQ ID NO: 217702 - DNA, 30 bp, Artificial Sequence
  Synthetic oligonucleotide
gcggtgctcctggcatgcgtctggttgggc

SEQ ID NO: 217703 - DNA, 30 bp, Artificial Sequence
  Synthetic oligonucleotide
ctatgcgcatgggtaccagtcgctttgggc

SEQ ID NO: 217704 - DNA, 30 bp, Artificial Sequence
  Synthetic oligonucleotide
ttcggcgctaaaggcactgattcaaatggc

SEQ ID NO: 217705 - DNA, 30 bp, Artificial Sequence
  Synthetic oligonucleotide
gtcaggcaaacaaatactccgctaaatggc

SEQ ID NO: 217706 - DNA, 30 bp, Artificial Sequence
  Synthetic oligonucleotide
gtgttcaactacagatgacaacacaatggc

SEQ ID NO: 217707 - DNA, 30 bp, Artificial Sequence
  Synthetic oligonucleotide
tgtcgcgcagggggacatatgcagaatggc

SEQ ID NO: 217708 - DNA, 30 bp, Artificial Sequence
  Synthetic oligonucleotide
aagaggattggacagttaggacttaatggc

SEQ ID NO: 217709 - DNA, 30 bp, Artificial Sequence
  Synthetic oligonucleotide
catagagagaatttgctaggatcgcatggc

SEQ ID NO: 217710 - DNA, 30 bp, Artificial Sequence
  Synthetic oligonucleotide
gcttttaggggggctcaattatggcatggc

SEQ ID NO: 217711 - DNA, 30 bp, Artificial Sequence
  Synthetic oligonucleotide
aatgagcgttattacgacgtctctcatggc

SEQ ID NO: 217712 - DNA, 30 bp, Artificial Sequence
  Synthetic oligonucleotide
ccagaattcgcaaaaacaagttcagatggc

SEQ ID NO: 217713 - DNA, 30 bp, Artificial Sequence
  Synthetic oligonucleotide
gtaggctgtagtggaatctccactgatggc

SEQ ID NO: 217714 - DNA, 30 bp, Artificial Sequence
  Synthetic oligonucleotide
tcagtcgcgtgcactttttgaggatatggc

SEQ ID NO: 217715 - DNA, 30 bp, Artificial Sequence
  Synthetic oligonucleotide
agcggtccacaccctgatggtctttatggc

SEQ ID NO: 217716 - DNA, 30 bp, Artificial Sequence
  Synthetic oligonucleotide
tgttacccgcgtccggacaacaaaactggc

SEQ ID NO: 217717 - DNA, 30 bp, Artificial Sequence
  Synthetic oligonucleotide
aagcgacaggcgtccttccctctgactggc

SEQ ID NO: 217718 - DNA, 30 bp, Artificial Sequence
  Synthetic oligonucleotide
ggtggcaacgcaagcctgctattgactggc

SEQ ID NO: 217719 - DNA, 30 bp, Artificial Sequence
  Synthetic oligonucleotide
ctgttgcaagagttaggacaagctactggc

SEQ ID NO: 217720 - DNA, 30 bp, Artificial Sequence
  Synthetic oligonucleotide
cacacttcggttgagataatccaccctggc

SEQ ID NO: 217721 - DNA, 30 bp, Artificial Sequence
  Synthetic oligonucleotide
gggaggagaactggaaaggcttagcctggc

SEQ ID NO: 217722 - DNA, 30 bp, Artificial Sequence
  Synthetic oligonucleotide
taagttgcatattggcgggtctttcctggc

SEQ ID NO: 217723 - DNA, 30 bp, Artificial Sequence
  Synthetic oligonucleotide
acataagtgagataaccggcagacgctggc

SEQ ID NO: 217724 - DNA, 30 bp, Artificial Sequence
  Synthetic oligonucleotide
taaatttgggtacaattaataggggctggc

SEQ ID NO: 217725 - DNA, 30 bp, Artificial Sequence
  Synthetic oligonucleotide
cacaactccttgcgagaggaaagtgctggc

SEQ ID NO: 217726 - DNA, 30 bp, Artificial Sequence
  Synthetic oligonucleotide
aagagaactactcgagaaccgctctctggc

SEQ ID NO: 217727 - DNA, 30 bp, Artificial Sequence
  Synthetic oligonucleotide
agggtagtttggctaatggcagacagtggc

SEQ ID NO: 217728 - DNA, 30 bp, Artificial Sequence
  Synthetic oligonucleotide
acgtaccaggtaggaccctaaagtagtggc

SEQ ID NO: 217729 - DNA, 30 bp, Artificial Sequence
  Synthetic oligonucleotide
gcccggacaaggaggtttacacgtagtggc

SEQ ID NO: 217730 - DNA, 30 bp, Artificial Sequence
  Synthetic oligonucleotide
cctacgcactcgtggactcgatcacgtggc

SEQ ID NO: 217731 - DNA, 30 bp, Artificial Sequence
  Synthetic oligonucleotide
gagtactacctgattttcgtacaccgtggc

SEQ ID NO: 217732 - DNA, 30 bp, Artificial Sequence
  Synthetic oligonucleotide
cggcagggtagccgggctgggacgcgtggc

SEQ ID NO: 217733 - DNA, 30 bp, Artificial Sequence
  Synthetic oligonucleotide
cggggcctaactctgagtaaacctcgtggc

SEQ ID NO: 217734 - DNA, 30 bp, Artificial Sequence
  Synthetic oligonucleotide
tatagctttctgattccagctccaggtggc

SEQ ID NO: 217735 - DNA, 30 bp, Artificial Sequence
  Synthetic oligonucleotide
gtacagagtaaataaatgtactcaggtggc

SEQ ID NO: 217736 - DNA, 30 bp, Artificial Sequence
  Synthetic oligonucleotide
tcgatttgaaattcggcgggttactgtggc

SEQ ID NO: 217737 - DNA, 30 bp, Artificial Sequence
  Synthetic oligonucleotide
tccttggcagatgccacttaggagtgtggc

SEQ ID NO: 217738 - DNA, 30 bp, Artificial Sequence
  Synthetic oligonucleotide
ggcacgctttcgtatgtacgaagttgtggc

SEQ ID NO: 217739 - DNA, 30 bp, Artificial Sequence
  Synthetic oligonucleotide
gataactcgagttgagtaagctgttgtggc

SEQ ID NO: 217740 - DNA, 30 bp, Artificial Sequence
  Synthetic oligonucleotide
ttagatcatccacggaagtaaatttgtggc

SEQ ID NO: 217741 - DNA, 30 bp, Artificial Sequence
  Synthetic oligonucleotide
gtgggaggataacgttttcaataaattggc

SEQ ID NO: 217742 - DNA, 30 bp, Artificial Sequence
  Synthetic oligonucleotide
agggggaagtactcatggcccggaattggc

SEQ ID NO: 217743 - DNA, 30 bp, Artificial Sequence
  Synthetic oligonucleotide
tgggtggatcttaatgataataagattggc

SEQ ID NO: 217744 - DNA, 30 bp, Artificial Sequence
  Synthetic oligonucleotide
aggaacattccggtacaagtaacgattggc

SEQ ID NO: 217745 - DNA, 30 bp, Artificial Sequence
  Synthetic oligonucleotide
agacatgttgattcgactacacgacttggc

SEQ ID NO: 217746 - DNA, 30 bp, Artificial Sequence
  Synthetic oligonucleotide
aaggggggctgcacctgtaagggacttggc

SEQ ID NO: 217747 - DNA, 30 bp, Artificial Sequence
  Synthetic oligonucleotide
aggcgtccttggttggttaatcagcttggc

SEQ ID NO: 217748 - DNA, 30 bp, Artificial Sequence
  Synthetic oligonucleotide
ggactactactcgtttaacgatatcttggc

SEQ ID NO: 217749 - DNA, 30 bp, Artificial Sequence
  Synthetic oligonucleotide
gggggtagacatattgacggctgagttggc

SEQ ID NO: 217750 - DNA, 30 bp, Artificial Sequence
  Synthetic oligonucleotide
tccccggtgcgatgggaacatgccgttggc

SEQ ID NO: 217751 - DNA, 30 bp, Artificial Sequence
  Synthetic oligonucleotide
tagctcggcctgctgaaacatcgcgttggc

SEQ ID NO: 217752 - DNA, 30 bp, Artificial Sequence
  Synthetic oligonucleotide
gcgcgctggtgggggcgatcaggcgttggc

SEQ ID NO: 217753 - DNA, 30 bp, Artificial Sequence
  Synthetic oligonucleotide
tagcccaaagagagggggtcggaggttggc

SEQ ID NO: 217754 - DNA, 30 bp, Artificial Sequence
  Synthetic oligonucleotide
atgacgatattgccggcctgcccggttggc

SEQ ID NO: 217755 - DNA, 30 bp, Artificial Sequence
  Synthetic oligonucleotide
ccgctggtccggggccgtagggactttggc

SEQ ID NO: 217756 - DNA, 30 bp, Artificial Sequence
  Synthetic oligonucleotide
gccttacttagacaggtatctgtcaaatgc

SEQ ID NO: 217757 - DNA, 30 bp, Artificial Sequence
  Synthetic oligonucleotide
ggactggagtggggttccaccaataaatgc

SEQ ID NO: 217758 - DNA, 30 bp, Artificial Sequence
  Synthetic oligonucleotide
accgtaacatcgtttaccttcgctaaatgc

SEQ ID NO: 217759 - DNA, 30 bp, Artificial Sequence
  Synthetic oligonucleotide
atgataggttgaaactatttgattaaatgc

SEQ ID NO: 217760 - DNA, 30 bp, Artificial Sequence
  Synthetic oligonucleotide
tccttaggttcatagctgcaattacaatgc

SEQ ID NO: 217761 - DNA, 30 bp, Artificial Sequence
  Synthetic oligonucleotide
cggaataattacagttgaacggaccaatgc

SEQ ID NO: 217762 - DNA, 30 bp, Artificial Sequence
  Synthetic oligonucleotide
cattccattatataaattgcgcggcaatgc

SEQ ID NO: 217763 - DNA, 30 bp, Artificial Sequence
  Synthetic oligonucleotide
taaacagtgcgggaagatcacgatcaatgc

SEQ ID NO: 217764 - DNA, 30 bp, Artificial Sequence
  Synthetic oligonucleotide
cggagatttttttgcggactgactcaatgc

SEQ ID NO: 217765 - DNA, 30 bp, Artificial Sequence
  Synthetic oligonucleotide
ggtgaatatgtcaaaagatagagtcaatgc

SEQ ID NO: 217766 - DNA, 30 bp, Artificial Sequence
  Synthetic oligonucleotide
cgttgttaagggtctgagcaacgagaatgc

SEQ ID NO: 217767 - DNA, 30 bp, Artificial Sequence
  Synthetic oligonucleotide
ttagcgcccaaaatcgaacacctagaatgc

SEQ ID NO: 217768 - DNA, 30 bp, Artificial Sequence
  Synthetic oligonucleotide
ggctctgggacagtccaatggtccgaatgc

SEQ ID NO: 217769 - DNA, 30 bp, Artificial Sequence
  Synthetic oligonucleotide
gtacggtgcgacggttacggtacggaatgc

SEQ ID NO: 217770 - DNA, 31 bp, Artificial Sequence
  Synthetic oligonucleotide
tcaggttgacgtatccataaacagggaatgc

SEQ ID NO: 217771 - DNA, 30 bp, Artificial Sequence
  Synthetic oligonucleotide
tgggaaataccgtgaggctaaaatgaatgc

SEQ ID NO: 217772 - DNA, 30 bp, Artificial Sequence
  Synthetic oligonucleotide
acaacgggcgcaattgcatcgtgtgaatgc

SEQ ID NO: 217773 - DNA, 30 bp, Artificial Sequence
  Synthetic oligonucleotide
gagcgcctgtcattaaatgtcaaataatgc

SEQ ID NO: 217774 - DNA, 30 bp, Artificial Sequence
  Synthetic oligonucleotide
tcccagccggaaaagttatacagataatgc

SEQ ID NO: 217775 - DNA, 30 bp, Artificial Sequence
  Synthetic oligonucleotide
tttcccagtaggcatcggtacgagtaatgc

SEQ ID NO: 217776 - DNA, 30 bp, Artificial Sequence
  Synthetic oligonucleotide
cggccaacaccgcacagtcatacgtaatgc

SEQ ID NO: 217777 - DNA, 30 bp, Artificial Sequence
  Synthetic oligonucleotide
agcgttcataaggtggaaatgaccacatgc

SEQ ID NO: 217778 - DNA, 30 bp, Artificial Sequence
  Synthetic oligonucleotide
tgctcatttttggtatagtcactcacatgc

SEQ ID NO: 217779 - DNA, 30 bp, Artificial Sequence
  Synthetic oligonucleotide
aaggtttcccgactccctttggagacatgc

SEQ ID NO: 217780 - DNA, 30 bp, Artificial Sequence
  Synthetic oligonucleotide
agcagggggagatcttggggcgatacatgc

SEQ ID NO: 217781 - DNA, 30 bp, Artificial Sequence
  Synthetic oligonucleotide
atgtatgggacaaacgcttctcctacatgc

SEQ ID NO: 217782 - DNA, 30 bp, Artificial Sequence
  Synthetic oligonucleotide
caccagtagcgtaagcatgcttaagcatgc

SEQ ID NO: 217783 - DNA, 30 bp, Artificial Sequence
  Synthetic oligonucleotide
ggtctccctctgcgtgcaggtcgagcatgc

SEQ ID NO: 217784 - DNA, 30 bp, Artificial Sequence
  Synthetic oligonucleotide
agcggttggggtatagtattcgcggcatgc

SEQ ID NO: 217785 - DNA, 30 bp, Artificial Sequence
  Synthetic oligonucleotide
tactcgtgaaggcgtattgggttggcatgc

SEQ ID NO: 217786 - DNA, 30 bp, Artificial Sequence
  Synthetic oligonucleotide
gttaagctcaactgtgtcgtcttctcatgc

SEQ ID NO: 217787 - DNA, 30 bp, Artificial Sequence
  Synthetic oligonucleotide
gggaccaaacgtttgaaggtatattcatgc

SEQ ID NO: 217788 - DNA, 30 bp, Artificial Sequence
  Synthetic oligonucleotide
gtggaggcggggaaaacatgtgcaagatgc

SEQ ID NO: 217789 - DNA, 30 bp, Artificial Sequence
  Synthetic oligonucleotide
gttgtaaatgtacggtacccggacagatgc

SEQ ID NO: 217790 - DNA, 30 bp, Artificial Sequence
  Synthetic oligonucleotide
ggactcggcaaacaaagcagcgtgagatgc

SEQ ID NO: 217791 - DNA, 30 bp, Artificial Sequence
  Synthetic oligonucleotide
gactgttagatttaggtgtaaaatagatgc

SEQ ID NO: 217792 - DNA, 30 bp, Artificial Sequence
  Synthetic oligonucleotide
ggtttagggcaagtgtcactacgtagatgc

SEQ ID NO: 217793 - DNA, 30 bp, Artificial Sequence
  Synthetic oligonucleotide
tgagcaacatcggggatccgagtacgatgc

SEQ ID NO: 217794 - DNA, 30 bp, Artificial Sequence
  Synthetic oligonucleotide
tcgaagggtgaaaaattacgactgcgatgc

SEQ ID NO: 217795 - DNA, 30 bp, Artificial Sequence
  Synthetic oligonucleotide
caggcgaaagtactggaggacttgcgatgc

SEQ ID NO: 217796 - DNA, 30 bp, Artificial Sequence
  Synthetic oligonucleotide
cgtagcaaaattggccacctatacggatgc

SEQ ID NO: 217797 - DNA, 30 bp, Artificial Sequence
  Synthetic oligonucleotide
tttgcgcgactggtatctacggctggatgc

SEQ ID NO: 217798 - DNA, 30 bp, Artificial Sequence
  Synthetic oligonucleotide
gaccctaccttaaggcctagttactgatgc

SEQ ID NO: 217799 - DNA, 30 bp, Artificial Sequence
  Synthetic oligonucleotide
ttgggagctctgacaagtggacagtgatgc

SEQ ID NO: 217800 - DNA, 30 bp, Artificial Sequence
  Synthetic oligonucleotide
gaagttgatgccgagagaacgcaaatatgc

SEQ ID NO: 217801 - DNA, 30 bp, Artificial Sequence
  Synthetic oligonucleotide
ccaagacgaccgaagatataccgaatatgc

SEQ ID NO: 217802 - DNA, 30 bp, Artificial Sequence
  Synthetic oligonucleotide
aagggtatctgaaggcgttcatttatatgc

SEQ ID NO: 217803 - DNA, 30 bp, Artificial Sequence
  Synthetic oligonucleotide
aagtggacggagggaaaagaatacctatgc

SEQ ID NO: 217804 - DNA, 30 bp, Artificial Sequence
  Synthetic oligonucleotide
gctcgactcggtttgatagtggcgctatgc

SEQ ID NO: 217805 - DNA, 30 bp, Artificial Sequence
  Synthetic oligonucleotide
acatgtagcaggccattcgaggttctatgc

SEQ ID NO: 217806 - DNA, 30 bp, Artificial Sequence
  Synthetic oligonucleotide
cgcatagtctggaaccggcacggagtatgc

SEQ ID NO: 217807 - DNA, 30 bp, Artificial Sequence
  Synthetic oligonucleotide
gaaggtggctctcttcgcttttgagtatgc

SEQ ID NO: 217808 - DNA, 30 bp, Artificial Sequence
  Synthetic oligonucleotide
gcagaatgggacctctacgcacacgtatgc

SEQ ID NO: 217809 - DNA, 30 bp, Artificial Sequence
  Synthetic oligonucleotide
tagccgagagtacagcgttcatacgtatgc

SEQ ID NO: 217810 - DNA, 30 bp, Artificial Sequence
  Synthetic oligonucleotide
tgctactccataagtagaaatcgggtatgc

SEQ ID NO: 217811 - DNA, 30 bp, Artificial Sequence
  Synthetic oligonucleotide
taaacttgcacacggaagtccagtgtatgc

SEQ ID NO: 217812 - DNA, 30 bp, Artificial Sequence
  Synthetic oligonucleotide
atatgcacaggcgtataaagcagtgtatgc

SEQ ID NO: 217813 - DNA, 30 bp, Artificial Sequence
  Synthetic oligonucleotide
atgacgggatgaagattgggatgattatgc

SEQ ID NO: 217814 - DNA, 30 bp, Artificial Sequence
  Synthetic oligonucleotide
gaacagcccgttatatcctagctattatgc

SEQ ID NO: 217815 - DNA, 30 bp, Artificial Sequence
  Synthetic oligonucleotide
aggacactgtaggtatagccaggcttatgc

SEQ ID NO: 217816 - DNA, 30 bp, Artificial Sequence
  Synthetic oligonucleotide
actcgaagacatatactttcgcggttatgc

SEQ ID NO: 217817 - DNA, 30 bp, Artificial Sequence
  Synthetic oligonucleotide
aagaagaagtagggaataagcgaaaactgc

SEQ ID NO: 217818 - DNA, 30 bp, Artificial Sequence
  Synthetic oligonucleotide
tgcggcacgggctgtcatgttcagaactgc

SEQ ID NO: 217819 - DNA, 30 bp, Artificial Sequence
  Synthetic oligonucleotide
tcaaacgttgtcagttgccaccataactgc

SEQ ID NO: 217820 - DNA, 30 bp, Artificial Sequence
  Synthetic oligonucleotide
gccttgttggcctcgctaaagcgacactgc

SEQ ID NO: 217821 - DNA, 30 bp, Artificial Sequence
  Synthetic oligonucleotide
gtaattgtggttgcacataatccccactgc

SEQ ID NO: 217822 - DNA, 30 bp, Artificial Sequence
  Synthetic oligonucleotide
tcccagtccgatactgatcctttccactgc

SEQ ID NO: 217823 - DNA, 30 bp, Artificial Sequence
  Synthetic oligonucleotide
aacgtctatttgtgggtgggtatgcactgc

SEQ ID NO: 217824 - DNA, 30 bp, Artificial Sequence
  Synthetic oligonucleotide
cttaaattgtggtgagtcacttatcactgc

SEQ ID NO: 217825 - DNA, 30 bp, Artificial Sequence
  Synthetic oligonucleotide
acgattccgggtcatttgctcttcacctgc

SEQ ID NO: 217826 - DNA, 30 bp, Artificial Sequence
  Synthetic oligonucleotide
cgaaaagatggagcattgaagcagccctgc

SEQ ID NO: 217827 - DNA, 30 bp, Artificial Sequence
  Synthetic oligonucleotide
cgcgggccaccctaggtttatgatccctgc

SEQ ID NO: 217828 - DNA, 30 bp, Artificial Sequence
  Synthetic oligonucleotide
cacacaggcacgagcgtaaggtccgcctgc

SEQ ID NO: 217829 - DNA, 30 bp, Artificial Sequence
  Synthetic oligonucleotide
ttcgcccacgatgatactatcgaggcctgc

SEQ ID NO: 217830 - DNA, 30 bp, Artificial Sequence
  Synthetic oligonucleotide
aaatcggcatccatccagtaaccatcctgc

SEQ ID NO: 217831 - DNA, 30 bp, Artificial Sequence
  Synthetic oligonucleotide
gttgcgatttcacccgaattgtactcctgc

SEQ ID NO: 217832 - DNA, 30 bp, Artificial Sequence
  Synthetic oligonucleotide
aggtggtgaccaatattcaagccctcctgc

SEQ ID NO: 217833 - DNA, 30 bp, Artificial Sequence
  Synthetic oligonucleotide
gagagaaagcctccgagcaaggcgtcctgc

SEQ ID NO: 217834 - DNA, 30 bp, Artificial Sequence
  Synthetic oligonucleotide
atgccccatacgacgataaagggttcctgc

SEQ ID NO: 217835 - DNA, 30 bp, Artificial Sequence
  Synthetic oligonucleotide
gtcgcaccatgtcacagaccgaccagctgc

SEQ ID NO: 217836 - DNA, 30 bp, Artificial Sequence
  Synthetic oligonucleotide
aggcattataaacagtctccgatcagctgc

SEQ ID NO: 217837 - DNA, 30 bp, Artificial Sequence
  Synthetic oligonucleotide
cagctgtgtagggcggtggtgttgagctgc

SEQ ID NO: 217838 - DNA, 30 bp, Artificial Sequence
  Synthetic oligonucleotide
gtttataggcatcctggtgtgattagctgc

SEQ ID NO: 217839 - DNA, 30 bp, Artificial Sequence
  Synthetic oligonucleotide
ggggaaggcatgtaccctacgtcccgctgc

SEQ ID NO: 217840 - DNA, 30 bp, Artificial Sequence
  Synthetic oligonucleotide
tgtactcgaggggtttcacacgtgcgctgc

SEQ ID NO: 217841 - DNA, 30 bp, Artificial Sequence
  Synthetic oligonucleotide
cggagcttagacctttgagtgtatcgctgc

SEQ ID NO: 217842 - DNA, 30 bp, Artificial Sequence
  Synthetic oligonucleotide
tttggactcgtttccgtaatgcgtcgctgc

SEQ ID NO: 217843 - DNA, 30 bp, Artificial Sequence
  Synthetic oligonucleotide
tgtaaattgagatccacgacttaaggctgc

SEQ ID NO: 217844 - DNA, 30 bp, Artificial Sequence
  Synthetic oligonucleotide
cggttgtccacagcaatgggggtcggctgc

SEQ ID NO: 217845 - DNA, 30 bp, Artificial Sequence
  Synthetic oligonucleotide
tggcaattcccgtgcacacacaggggctgc

SEQ ID NO: 217846 - DNA, 30 bp, Artificial Sequence
  Synthetic oligonucleotide
gtggtcttgattggccatagttcctgctgc

SEQ ID NO: 217847 - DNA, 30 bp, Artificial Sequence
  Synthetic oligonucleotide
gagcaggctattaggaacggcttgtgctgc

SEQ ID NO: 217848 - DNA, 30 bp, Artificial Sequence
  Synthetic oligonucleotide
agtacactcgtgtcgatcaggaattgctgc

SEQ ID NO: 217849 - DNA, 30 bp, Artificial Sequence
  Synthetic oligonucleotide
gtagctttacggtttcctcgagcaatctgc

SEQ ID NO: 217850 - DNA, 30 bp, Artificial Sequence
  Synthetic oligonucleotide
cggtcacactagggttgcagagcgatctgc

SEQ ID NO: 217851 - DNA, 30 bp, Artificial Sequence
  Synthetic oligonucleotide
tagataaatacttgaagctaaggtatctgc

SEQ ID NO: 217852 - DNA, 30 bp, Artificial Sequence
  Synthetic oligonucleotide
ggagaaagacgcgaagatacataactctgc

SEQ ID NO: 217853 - DNA, 30 bp, Artificial Sequence
  Synthetic oligonucleotide
caactaaacgggtggaatagactactctgc

SEQ ID NO: 217854 - DNA, 30 bp, Artificial Sequence
  Synthetic oligonucleotide
catgcgtttgcaaacgaacatgacctctgc

SEQ ID NO: 217855 - DNA, 30 bp, Artificial Sequence
  Synthetic oligonucleotide
aagaaacagggtaattgtcctatcctctgc

SEQ ID NO: 217856 - DNA, 30 bp, Artificial Sequence
  Synthetic oligonucleotide
gggcaggaacctaacgcaatgcggctctgc

SEQ ID NO: 217857 - DNA, 30 bp, Artificial Sequence
  Synthetic oligonucleotide
ttaaaaggtgcgggggtaggagttctctgc

SEQ ID NO: 217858 - DNA, 30 bp, Artificial Sequence
  Synthetic oligonucleotide
atttaccagaaggacttcacatttctctgc

SEQ ID NO: 217859 - DNA, 30 bp, Artificial Sequence
  Synthetic oligonucleotide
ttccacgctactacacaggtgtgagtctgc

SEQ ID NO: 217860 - DNA, 30 bp, Artificial Sequence
  Synthetic oligonucleotide
cttcagtgtcgaaacagaatcaccgtctgc

SEQ ID NO: 217861 - DNA, 30 bp, Artificial Sequence
  Synthetic oligonucleotide
tttagaggataatccgctcggcgggtctgc

SEQ ID NO: 217862 - DNA, 30 bp, Artificial Sequence
  Synthetic oligonucleotide
cagtgtataatggcagatggggttgtctgc

SEQ ID NO: 217863 - DNA, 30 bp, Artificial Sequence
  Synthetic oligonucleotide
atatgaaccggcacttgaaatcgattctgc

SEQ ID NO: 217864 - DNA, 30 bp, Artificial Sequence
  Synthetic oligonucleotide
cgtgctactcgacttacgggtattttctgc

SEQ ID NO: 217865 - DNA, 30 bp, Artificial Sequence
  Synthetic oligonucleotide
acggctgcaccagctacccgatttttctgc

SEQ ID NO: 217866 - DNA, 30 bp, Artificial Sequence
  Synthetic oligonucleotide
ggaccttccaacaacggctccatcaagtgc

SEQ ID NO: 217867 - DNA, 30 bp, Artificial Sequence
  Synthetic oligonucleotide
gctcaaggtgagttatacacgatgaagtgc

SEQ ID NO: 217868 - DNA, 30 bp, Artificial Sequence
  Synthetic oligonucleotide
ggatagtcgccggatgctagcttacagtgc

SEQ ID NO: 217869 - DNA, 30 bp, Artificial Sequence
  Synthetic oligonucleotide
ggactaagattagacgacgttgaagagtgc

SEQ ID NO: 217870 - DNA, 30 bp, Artificial Sequence
  Synthetic oligonucleotide
ggggtgaaggctcgcgagggtttagagtgc

SEQ ID NO: 217871 - DNA, 29 bp, Artificial Sequence
  Synthetic oligonucleotide
atgagtttctaaggaaaggtggctagtgc

SEQ ID NO: 217872 - DNA, 30 bp, Artificial Sequence
  Synthetic oligonucleotide
aaaatggtgaggataatagaaacgtagtgc

SEQ ID NO: 217873 - DNA, 30 bp, Artificial Sequence
  Synthetic oligonucleotide
aaaagggattaccaataatggcggtagtgc

SEQ ID NO: 217874 - DNA, 30 bp, Artificial Sequence
  Synthetic oligonucleotide
tcgtttgccgacagagcgggtgggtagtgc

SEQ ID NO: 217875 - DNA, 30 bp, Artificial Sequence
  Synthetic oligonucleotide
tgatccggcaccaaaaatgagctgtagtgc

SEQ ID NO: 217876 - DNA, 30 bp, Artificial Sequence
  Synthetic oligonucleotide
tagttgtaattagtaggtgtgtaaacgtgc

SEQ ID NO: 217877 - DNA, 30 bp, Artificial Sequence
  Synthetic oligonucleotide
gagaaaagcagtgagtagtcatccacgtgc

SEQ ID NO: 217878 - DNA, 30 bp, Artificial Sequence
  Synthetic oligonucleotide
aaccagattaggcagtagaattccacgtgc

SEQ ID NO: 217879 - DNA, 30 bp, Artificial Sequence
  Synthetic oligonucleotide
tccgatggtctggggttcttgagtacgtgc

SEQ ID NO: 217880 - DNA, 30 bp, Artificial Sequence
  Synthetic oligonucleotide
accaagtctcacagaccttcacaaccgtgc

SEQ ID NO: 217881 - DNA, 30 bp, Artificial Sequence
  Synthetic oligonucleotide
aatgaatggatacgccctctcataccgtgc

SEQ ID NO: 217882 - DNA, 30 bp, Artificial Sequence
  Synthetic oligonucleotide
ggcttatcagtactcactgacattccgtgc

SEQ ID NO: 217883 - DNA, 30 bp, Artificial Sequence
  Synthetic oligonucleotide
agcctgcgacatccataaccggaagcgtgc

SEQ ID NO: 217884 - DNA, 30 bp, Artificial Sequence
  Synthetic oligonucleotide
tcgagcatgtcggctaaatccgaggcgtgc

SEQ ID NO: 217885 - DNA, 30 bp, Artificial Sequence
  Synthetic oligonucleotide
tacaaactgggtttcatcatgatggcgtgc

SEQ ID NO: 217886 - DNA, 30 bp, Artificial Sequence
  Synthetic oligonucleotide
cagcaaggggagaaaatacggaagtcgtgc

SEQ ID NO: 217887 - DNA, 30 bp, Artificial Sequence
  Synthetic oligonucleotide
ataccaaaacaaggggattcggtttcgtgc

SEQ ID NO: 217888 - DNA, 30 bp, Artificial Sequence
  Synthetic oligonucleotide
acttccccagaaggtgatgtcgaaaggtgc

SEQ ID NO: 217889 - DNA, 30 bp, Artificial Sequence
  Synthetic oligonucleotide
aagtacggacgtgattagtgaagaaggtgc

SEQ ID NO: 217890 - DNA, 30 bp, Artificial Sequence
  Synthetic oligonucleotide
ggagtaaggttctaccatgccgtaaggtgc

SEQ ID NO: 217891 - DNA, 30 bp, Artificial Sequence
  Synthetic oligonucleotide
gtcggcacagatcatcaaggttccaggtgc

SEQ ID NO: 217892 - DNA, 30 bp, Artificial Sequence
  Synthetic oligonucleotide
ggatattccaaggcgataatgatcaggtgc

SEQ ID NO: 217893 - DNA, 30 bp, Artificial Sequence
  Synthetic oligonucleotide
tcacagagctgggaattgcatgagaggtgc

SEQ ID NO: 217894 - DNA, 30 bp, Artificial Sequence
  Synthetic oligonucleotide
agacgtattaatgtaccgtgggcgaggtgc

SEQ ID NO: 217895 - DNA, 30 bp, Artificial Sequence
  Synthetic oligonucleotide
gggggaaagagccgggctaataataggtgc

SEQ ID NO: 217896 - DNA, 30 bp, Artificial Sequence
  Synthetic oligonucleotide
agactcaaagggtcgtcgagctgtaggtgc

SEQ ID NO: 217897 - DNA, 30 bp, Artificial Sequence
  Synthetic oligonucleotide
ggcacccgctaaaactgttgtatacggtgc

SEQ ID NO: 217898 - DNA, 30 bp, Artificial Sequence
  Synthetic oligonucleotide
cgccagtgaggccacaccgatttccggtgc

SEQ ID NO: 217899 - DNA, 30 bp, Artificial Sequence
  Synthetic oligonucleotide
ggataccagtttaggtcccgttcagggtgc

SEQ ID NO: 217900 - DNA, 29 bp, Artificial Sequence
  Synthetic oligonucleotide
gtagaggcttactgcggccaatagggtgc

SEQ ID NO: 217901 - DNA, 30 bp, Artificial Sequence
  Synthetic oligonucleotide
tacgcggatggcagtgcttgaagggggtgc

SEQ ID NO: 217902 - DNA, 30 bp, Artificial Sequence
  Synthetic oligonucleotide
tagtggtttaaaaagaggtactttgggtgc

SEQ ID NO: 217903 - DNA, 30 bp, Artificial Sequence
  Synthetic oligonucleotide
agaagtgctacgatcagacaggaatggtgc

SEQ ID NO: 217904 - DNA, 30 bp, Artificial Sequence
  Synthetic oligonucleotide
attagtcagtcgagcaaaacgtgatggtgc

SEQ ID NO: 217905 - DNA, 30 bp, Artificial Sequence
  Synthetic oligonucleotide
cctcaggataactgcggcatgggctggtgc

SEQ ID NO: 217906 - DNA, 30 bp, Artificial Sequence
  Synthetic oligonucleotide
gttgtcggggtctgacgatggacaatgtgc

SEQ ID NO: 217907 - DNA, 30 bp, Artificial Sequence
  Synthetic oligonucleotide
tgtgtagtagccaggacatcgaaactgtgc

SEQ ID NO: 217908 - DNA, 30 bp, Artificial Sequence
  Synthetic oligonucleotide
gcttcatttataagcatgagttaactgtgc

SEQ ID NO: 217909 - DNA, 30 bp, Artificial Sequence
  Synthetic oligonucleotide
taggaacgggtaattgagcaatgactgtgc

SEQ ID NO: 217910 - DNA, 30 bp, Artificial Sequence
  Synthetic oligonucleotide
taacgtcagtgggtcgacggtctcctgtgc

SEQ ID NO: 217911 - DNA, 30 bp, Artificial Sequence
  Synthetic oligonucleotide
tgtacaaggttgctgtccacaacgctgtgc

SEQ ID NO: 217912 - DNA, 30 bp, Artificial Sequence
  Synthetic oligonucleotide
gggacttcggtcagaccttgatcgctgtgc

SEQ ID NO: 217913 - DNA, 31 bp, Artificial Sequence
  Synthetic oligonucleotide
gtgttctttcgaactgtggagtggtctgtgc

SEQ ID NO: 217914 - DNA, 30 bp, Artificial Sequence
  Synthetic oligonucleotide
aactcttgggctagcgcttcgcaagtgtgc

SEQ ID NO: 217915 - DNA, 30 bp, Artificial Sequence
  Synthetic oligonucleotide
ctataacgtattaaccaagggacagtgtgc

SEQ ID NO: 217916 - DNA, 30 bp, Artificial Sequence
  Synthetic oligonucleotide
atggttgatccatctacaccccacgtgtgc

SEQ ID NO: 217917 - DNA, 30 bp, Artificial Sequence
  Synthetic oligonucleotide
gcgccaaacactaccaagtaacgtgtgtgc

SEQ ID NO: 217918 - DNA, 30 bp, Artificial Sequence
  Synthetic oligonucleotide
ttgtgttcgcttatgtccccatccttgtgc

SEQ ID NO: 217919 - DNA, 30 bp, Artificial Sequence
  Synthetic oligonucleotide
agaagtctgtcgtcattcgatcagttgtgc

SEQ ID NO: 217920 - DNA, 30 bp, Artificial Sequence
  Synthetic oligonucleotide
gaatggaaatcggggagatgcaccaattgc

SEQ ID NO: 217921 - DNA, 30 bp, Artificial Sequence
  Synthetic oligonucleotide
cgccaggggacataggtacaaagtaattgc

SEQ ID NO: 217922 - DNA, 30 bp, Artificial Sequence
  Synthetic oligonucleotide
aggagagcatcagccctgtccattaattgc

SEQ ID NO: 217923 - DNA, 30 bp, Artificial Sequence
  Synthetic oligonucleotide
aaatgaagcttaggttcgtaggaacattgc

SEQ ID NO: 217924 - DNA, 30 bp, Artificial Sequence
  Synthetic oligonucleotide
agcgtaatcggaatttgtatgggccattgc

SEQ ID NO: 217925 - DNA, 30 bp, Artificial Sequence
  Synthetic oligonucleotide
tcgccactggtctgcgtaattaggcattgc

SEQ ID NO: 217926 - DNA, 30 bp, Artificial Sequence
  Synthetic oligonucleotide
gacactctctaacacaaggccaatcattgc

SEQ ID NO: 217927 - DNA, 30 bp, Artificial Sequence
  Synthetic oligonucleotide
gctcgcagtcctcagggtagttcagattgc

SEQ ID NO: 217928 - DNA, 30 bp, Artificial Sequence
  Synthetic oligonucleotide
atgaagggctcttggcttagactagattgc

SEQ ID NO: 217929 - DNA, 30 bp, Artificial Sequence
  Synthetic oligonucleotide
ccgttgggaacccaataaccggccgattgc

SEQ ID NO: 217930 - DNA, 30 bp, Artificial Sequence
  Synthetic oligonucleotide
gaactatgtactgggtgcaatagatattgc

SEQ ID NO: 217931 - DNA, 30 bp, Artificial Sequence
  Synthetic oligonucleotide
cgcatttcccgccatcttagctgctattgc

SEQ ID NO: 217932 - DNA, 30 bp, Artificial Sequence
  Synthetic oligonucleotide
tcttctcaaactgctatttgttggtattgc

SEQ ID NO: 217933 - DNA, 30 bp, Artificial Sequence
  Synthetic oligonucleotide
ttacctcgtattttagagcgactaacttgc

SEQ ID NO: 217934 - DNA, 30 bp, Artificial Sequence
  Synthetic oligonucleotide
aatgggggtacgggaaggattaggacttgc

SEQ ID NO: 217935 - DNA, 30 bp, Artificial Sequence
  Synthetic oligonucleotide
accgcgtagtggaccagatgggggacttgc

SEQ ID NO: 217936 - DNA, 30 bp, Artificial Sequence
  Synthetic oligonucleotide
cgcatatgtgaccgaggtggtagtacttgc

SEQ ID NO: 217937 - DNA, 30 bp, Artificial Sequence
  Synthetic oligonucleotide
acgaacgtactaagggacattggtacttgc

SEQ ID NO: 217938 - DNA, 30 bp, Artificial Sequence
  Synthetic oligonucleotide
agactggctcaccccaaccaggaaccttgc

SEQ ID NO: 217939 - DNA, 30 bp, Artificial Sequence
  Synthetic oligonucleotide
aggccgcaggatccataaagagtaccttgc

SEQ ID NO: 217940 - DNA, 30 bp, Artificial Sequence
  Synthetic oligonucleotide
acaggtcagggattgaccgatgagccttgc

SEQ ID NO: 217941 - DNA, 30 bp, Artificial Sequence
  Synthetic oligonucleotide
ccatgaagctggacccgcacccggccttgc

SEQ ID NO: 217942 - DNA, 30 bp, Artificial Sequence
  Synthetic oligonucleotide
ttttgcgagaactgtggggaggttccttgc

SEQ ID NO: 217943 - DNA, 30 bp, Artificial Sequence
  Synthetic oligonucleotide
gactgcaagttaactcggggcgccgcttgc

SEQ ID NO: 217944 - DNA, 30 bp, Artificial Sequence
  Synthetic oligonucleotide
tgaaccctcgagaagcttccagaatcttgc

SEQ ID NO: 217945 - DNA, 30 bp, Artificial Sequence
  Synthetic oligonucleotide
gggactaggatattagggacaggctcttgc

SEQ ID NO: 217946 - DNA, 30 bp, Artificial Sequence
  Synthetic oligonucleotide
ttaaatggtaatcctgcggtggcaagttgc

SEQ ID NO: 217947 - DNA, 30 bp, Artificial Sequence
  Synthetic oligonucleotide
gagtaagtggacttctagcgcgacagttgc

SEQ ID NO: 217948 - DNA, 30 bp, Artificial Sequence
  Synthetic oligonucleotide
caactgtcgccctgagtagtgtgcagttgc

SEQ ID NO: 217949 - DNA, 30 bp, Artificial Sequence
  Synthetic oligonucleotide
ctcagtggaggtgcgatattgactagttgc

SEQ ID NO: 217950 - DNA, 30 bp, Artificial Sequence
  Synthetic oligonucleotide
agcatcccgctatagatattccctagttgc

SEQ ID NO: 217951 - DNA, 30 bp, Artificial Sequence
  Synthetic oligonucleotide
acactgcattcgtacaagacgcgtagttgc

SEQ ID NO: 217952 - DNA, 30 bp, Artificial Sequence
  Synthetic oligonucleotide
ctgactttcagggtaagctctatacgttgc

SEQ ID NO: 217953 - DNA, 30 bp, Artificial Sequence
  Synthetic oligonucleotide
aaccgtaaacagcggatctagcctcgttgc

SEQ ID NO: 217954 - DNA, 30 bp, Artificial Sequence
  Synthetic oligonucleotide
gtatttcatcagactaggcgttgtcgttgc

SEQ ID NO: 217955 - DNA, 30 bp, Artificial Sequence
  Synthetic oligonucleotide
attggaagccgttcgcacgaggtgggttgc

SEQ ID NO: 217956 - DNA, 30 bp, Artificial Sequence
  Synthetic oligonucleotide
catgataccacaatctgtgctattggttgc

SEQ ID NO: 217957 - DNA, 30 bp, Artificial Sequence
  Synthetic oligonucleotide
gccgtaactagatattggaatgaatgttgc

SEQ ID NO: 217958 - DNA, 30 bp, Artificial Sequence
  Synthetic oligonucleotide
cttatgattccgaaactactaacatgttgc

SEQ ID NO: 217959 - DNA, 30 bp, Artificial Sequence
  Synthetic oligonucleotide
gaagagattttgagcccttgtaggtgttgc

SEQ ID NO: 217960 - DNA, 30 bp, Artificial Sequence
  Synthetic oligonucleotide
ggtgttcagtgagaatgaaatagcatttgc

SEQ ID NO: 217961 - DNA, 30 bp, Artificial Sequence
  Synthetic oligonucleotide
ggcggatcactgtcgggagaacctctttgc

SEQ ID NO: 217962 - DNA, 30 bp, Artificial Sequence
  Synthetic oligonucleotide
cgacgtcaatttgtgtggagcgcagtttgc

SEQ ID NO: 217963 - DNA, 30 bp, Artificial Sequence
  Synthetic oligonucleotide
tgccagtccataaaaaactacgtagtttgc

SEQ ID NO: 217964 - DNA, 30 bp, Artificial Sequence
  Synthetic oligonucleotide
aaaaatagaagttaaatgtgagacgtttgc

SEQ ID NO: 217965 - DNA, 30 bp, Artificial Sequence
  Synthetic oligonucleotide
gttaaagttgggctgcggtgagaggtttgc

SEQ ID NO: 217966 - DNA, 30 bp, Artificial Sequence
  Synthetic oligonucleotide
atcgagccttcaaaccttgcctgggtttgc

SEQ ID NO: 217967 - DNA, 30 bp, Artificial Sequence
  Synthetic oligonucleotide
acttgtcggatcgaccggtttagtgtttgc

SEQ ID NO: 217968 - DNA, 30 bp, Artificial Sequence
  Synthetic oligonucleotide
taaagatgtccgtggagcttagaattttgc

SEQ ID NO: 217969 - DNA, 30 bp, Artificial Sequence
  Synthetic oligonucleotide
tcggtcgcatccctgttagtaatattttgc

SEQ ID NO: 217970 - DNA, 30 bp, Artificial Sequence
  Synthetic oligonucleotide
atccagagagtgctagaaatccataaaatc

SEQ ID NO: 217971 - DNA, 30 bp, Artificial Sequence
  Synthetic oligonucleotide
tgcgaagtgattggaaaaaccgaacaaatc

SEQ ID NO: 217972 - DNA, 30 bp, Artificial Sequence
  Synthetic oligonucleotide
catacttgattacggcacgtttcacaaatc

SEQ ID NO: 217973 - DNA, 30 bp, Artificial Sequence
  Synthetic oligonucleotide
agggttatcttgctcgcaatggcccaaatc

SEQ ID NO: 217974 - DNA, 30 bp, Artificial Sequence
  Synthetic oligonucleotide
gggacacaatttgctttgccacgccaaatc

SEQ ID NO: 217975 - DNA, 30 bp, Artificial Sequence
  Synthetic oligonucleotide
caaaaactatcgtacgtagcacgcgaaatc

SEQ ID NO: 217976 - DNA, 30 bp, Artificial Sequence
  Synthetic oligonucleotide
ggaacctgataggagtccccgggcgaaatc

SEQ ID NO: 217977 - DNA, 30 bp, Artificial Sequence
  Synthetic oligonucleotide
ctgactgcgattatttgctccagataaatc

SEQ ID NO: 217978 - DNA, 30 bp, Artificial Sequence
  Synthetic oligonucleotide
ataaggtataagtgttattacggataaatc

SEQ ID NO: 217979 - DNA, 30 bp, Artificial Sequence
  Synthetic oligonucleotide
atcacaacgtccctggatcgtgactaaatc

SEQ ID NO: 217980 - DNA, 30 bp, Artificial Sequence
  Synthetic oligonucleotide
cgacacggggtcagcccggactactaaatc

SEQ ID NO: 217981 - DNA, 30 bp, Artificial Sequence
  Synthetic oligonucleotide
ataacgctacatcccagcaggggctaaatc

SEQ ID NO: 217982 - DNA, 30 bp, Artificial Sequence
  Synthetic oligonucleotide
aaaagcatcggtcctcagcatgagtaaatc

SEQ ID NO: 217983 - DNA, 30 bp, Artificial Sequence
  Synthetic oligonucleotide
aggagccggaccgttatatgtgcgtaaatc

SEQ ID NO: 217984 - DNA, 30 bp, Artificial Sequence
  Synthetic oligonucleotide
aatacatcgagtccaaagggttggtaaatc

SEQ ID NO: 217985 - DNA, 30 bp, Artificial Sequence
  Synthetic oligonucleotide
tggtatctgccatcctcaacgacttaaatc

SEQ ID NO: 217986 - DNA, 30 bp, Artificial Sequence
  Synthetic oligonucleotide
gcggacgaaagatttagccaatgttaaatc

SEQ ID NO: 217987 - DNA, 30 bp, Artificial Sequence
  Synthetic oligonucleotide
gcatcaactacggatccgtgcaaaacaatc

SEQ ID NO: 217988 - DNA, 30 bp, Artificial Sequence
  Synthetic oligonucleotide
ggccacgcgcttaaagagatctgaacaatc

SEQ ID NO: 217989 - DNA, 30 bp, Artificial Sequence
  Synthetic oligonucleotide
gggcgattcacaccggagaccgacacaatc

SEQ ID NO: 217990 - DNA, 30 bp, Artificial Sequence
  Synthetic oligonucleotide
tgaaaatatgggtagaactgtagcacaatc

SEQ ID NO: 217991 - DNA, 30 bp, Artificial Sequence
  Synthetic oligonucleotide
ttatgttgagtcatggcaggtacgacaatc

SEQ ID NO: 217992 - DNA, 30 bp, Artificial Sequence
  Synthetic oligonucleotide
tggttccggtgtcgggaagggtctacaatc

SEQ ID NO: 217993 - DNA, 30 bp, Artificial Sequence
  Synthetic oligonucleotide
ttcgtgttggtcagaaaaatgtctacaatc

SEQ ID NO: 217994 - DNA, 30 bp, Artificial Sequence
  Synthetic oligonucleotide
aggtttggggaatatggacgaattacaatc

SEQ ID NO: 217995 - DNA, 30 bp, Artificial Sequence
  Synthetic oligonucleotide
gcggttctgacaaaggtcagacaaccaatc

SEQ ID NO: 217996 - DNA, 30 bp, Artificial Sequence
  Synthetic oligonucleotide
gctcgtatttctcaattcagcaacccaatc

SEQ ID NO: 217997 - DNA, 30 bp, Artificial Sequence
  Synthetic oligonucleotide
ttgacgtggactacaacacttggcccaatc

SEQ ID NO: 217998 - DNA, 30 bp, Artificial Sequence
  Synthetic oligonucleotide
cttatcgactaccacgtaccgtggccaatc

SEQ ID NO: 217999 - DNA, 30 bp, Artificial Sequence
  Synthetic oligonucleotide
gctactgggacggagaaatgggctccaatc

SEQ ID NO: 218000 - DNA, 30 bp, Artificial Sequence
  Synthetic oligonucleotide
caggtcatcggcaggtcagacgaagcaatc

SEQ ID NO: 218001 - DNA, 30 bp, Artificial Sequence
  Synthetic oligonucleotide
tataaggcaaaaagcgattcaatagcaatc

SEQ ID NO: 218002 - DNA, 30 bp, Artificial Sequence
  Synthetic oligonucleotide
gatcaggatagttcaatacacggcgcaatc

SEQ ID NO: 218003 - DNA, 30 bp, Artificial Sequence
  Synthetic oligonucleotide
atgctgctcttatacgggagggcatcaatc

SEQ ID NO: 218004 - DNA, 30 bp, Artificial Sequence
  Synthetic oligonucleotide
cttacgacaccacaactgttgcactcaatc

SEQ ID NO: 218005 - DNA, 30 bp, Artificial Sequence
  Synthetic oligonucleotide
atccaaagactgtcatagctctagtcaatc

SEQ ID NO: 218006 - DNA, 30 bp, Artificial Sequence
  Synthetic oligonucleotide
cagctgctattagggtgttcatggtcaatc

SEQ ID NO: 218007 - DNA, 30 bp, Artificial Sequence
  Synthetic oligonucleotide
tcggtaatcgatacgaccgacccttcaatc

SEQ ID NO: 218008 - DNA, 30 bp, Artificial Sequence
  Synthetic oligonucleotide
acaataacttcaccttgaagaagaagaatc

SEQ ID NO: 218009 - DNA, 30 bp, Artificial Sequence
  Synthetic oligonucleotide
acagtaactcgcattaaaagtagaagaatc

SEQ ID NO: 218010 - DNA, 30 bp, Artificial Sequence
  Synthetic oligonucleotide
gtccgtgaccgactagtcgttagcagaatc

SEQ ID NO: 218011 - DNA, 30 bp, Artificial Sequence
  Synthetic oligonucleotide
gcgaagcattgctgaggttgtatcagaatc

SEQ ID NO: 218012 - DNA, 30 bp, Artificial Sequence
  Synthetic oligonucleotide
ttaaagcattccttctaactcctgagaatc

SEQ ID NO: 218013 - DNA, 30 bp, Artificial Sequence
  Synthetic oligonucleotide
ccaggacgtttggaacaggcagaacgaatc

SEQ ID NO: 218014 - DNA, 30 bp, Artificial Sequence
  Synthetic oligonucleotide
taatggtttttaggagcggaacgccgaatc

SEQ ID NO: 218015 - DNA, 30 bp, Artificial Sequence
  Synthetic oligonucleotide
attgtacctgggagtactcggtgtcgaatc

SEQ ID NO: 218016 - DNA, 30 bp, Artificial Sequence
  Synthetic oligonucleotide
acggttataccaagcatcttataaggaatc

SEQ ID NO: 218017 - DNA, 30 bp, Artificial Sequence
  Synthetic oligonucleotide
ttacgacataggtatattaatctcggaatc

SEQ ID NO: 218018 - DNA, 29 bp, Artificial Sequence
  Synthetic oligonucleotide
ttacacgggcgtcaattaaggatggaatc

SEQ ID NO: 218019 - DNA, 30 bp, Artificial Sequence
  Synthetic oligonucleotide
ccgatctctctcgccccagcaactggaatc

SEQ ID NO: 218020 - DNA, 30 bp, Artificial Sequence
  Synthetic oligonucleotide
gtgttataaaccactttagtagctggaatc

SEQ ID NO: 218021 - DNA, 30 bp, Artificial Sequence
  Synthetic oligonucleotide
gcaaagatgagaagataagaatctggaatc

SEQ ID NO: 218022 - DNA, 30 bp, Artificial Sequence
  Synthetic oligonucleotide
gtggtatcgtacagtagacaacgtggaatc

SEQ ID NO: 218023 - DNA, 30 bp, Artificial Sequence
  Synthetic oligonucleotide
agcgtctaactttacgtaaaggttggaatc

SEQ ID NO: 218024 - DNA, 30 bp, Artificial Sequence
  Synthetic oligonucleotide
actgactcggtagtgcatcgttcatgaatc

SEQ ID NO: 218025 - DNA, 30 bp, Artificial Sequence
  Synthetic oligonucleotide
agattaacggcccgcctactatagtgaatc

SEQ ID NO: 218026 - DNA, 30 bp, Artificial Sequence
  Synthetic oligonucleotide
gcctggcttatttcaaaacaccggtgaatc

SEQ ID NO: 218027 - DNA, 30 bp, Artificial Sequence
  Synthetic oligonucleotide
atgaaggctgagggtgcggcggggtgaatc

SEQ ID NO: 218028 - DNA, 30 bp, Artificial Sequence
  Synthetic oligonucleotide
gagctgccaaccggagaggggctgtgaatc

SEQ ID NO: 218029 - DNA, 30 bp, Artificial Sequence
  Synthetic oligonucleotide
tgtatggcaacgctttagcttgggataatc

SEQ ID NO: 218030 - DNA, 30 bp, Artificial Sequence
  Synthetic oligonucleotide
aaaaacaggccatcgactggacctataatc

SEQ ID NO: 218031 - DNA, 30 bp, Artificial Sequence
  Synthetic oligonucleotide
gtgttatagggagcgccaagatcgctaatc

SEQ ID NO: 218032 - DNA, 30 bp, Artificial Sequence
  Synthetic oligonucleotide
gggctgaaggaatcggacatagtgctaatc

SEQ ID NO: 218033 - DNA, 30 bp, Artificial Sequence
  Synthetic oligonucleotide
gcatgactctgccagggtcctaatctaatc

SEQ ID NO: 218034 - DNA, 30 bp, Artificial Sequence
  Synthetic oligonucleotide
gtgcacttaaacggggggaaagaagtaatc

SEQ ID NO: 218035 - DNA, 30 bp, Artificial Sequence
  Synthetic oligonucleotide
gtcgtcgcgatgaatgtgatgagagtaatc

SEQ ID NO: 218036 - DNA, 30 bp, Artificial Sequence
  Synthetic oligonucleotide
cgagccaagccttgcatttccgcggtaatc

SEQ ID NO: 218037 - DNA, 30 bp, Artificial Sequence
  Synthetic oligonucleotide
agttcggtgttgtcacaataacgggtaatc

SEQ ID NO: 218038 - DNA, 30 bp, Artificial Sequence
  Synthetic oligonucleotide
tacgaagtttaatcgcgtcctatggtaatc

SEQ ID NO: 218039 - DNA, 31 bp, Artificial Sequence
  Synthetic oligonucleotide
tagtcttctccaggggtcgagacctgtaatc

SEQ ID NO: 218040 - DNA, 30 bp, Artificial Sequence
  Synthetic oligonucleotide
acgttttggcgagggcgaatttgtgtaatc

SEQ ID NO: 218041 - DNA, 30 bp, Artificial Sequence
  Synthetic oligonucleotide
gctaatagtgaataaggcgtgaaattaatc

SEQ ID NO: 218042 - DNA, 30 bp, Artificial Sequence
  Synthetic oligonucleotide
attagcatagaacccgtatgcgcattaatc

SEQ ID NO: 218043 - DNA, 30 bp, Artificial Sequence
  Synthetic oligonucleotide
ctgggaacacaggggtagtgcgtattaatc

SEQ ID NO: 218044 - DNA, 30 bp, Artificial Sequence
  Synthetic oligonucleotide
caatgcctcctagctttctaacacttaatc

SEQ ID NO: 218045 - DNA, 30 bp, Artificial Sequence
  Synthetic oligonucleotide
ggcccttacccgatttcggcgaccttaatc

SEQ ID NO: 218046 - DNA, 30 bp, Artificial Sequence
  Synthetic oligonucleotide
ggatatgtcccagtaatgattgggttaatc

SEQ ID NO: 218047 - DNA, 30 bp, Artificial Sequence
  Synthetic oligonucleotide
acgcgacgggataaagtttataacaacatc

SEQ ID NO: 218048 - DNA, 30 bp, Artificial Sequence
  Synthetic oligonucleotide
ggcagggacaggggcacgtatttgaacatc

SEQ ID NO: 218049 - DNA, 30 bp, Artificial Sequence
  Synthetic oligonucleotide
agaatcgaatgggtctagtcgtgtaacatc

SEQ ID NO: 218050 - DNA, 30 bp, Artificial Sequence
  Synthetic oligonucleotide
gtgcgttacaggatccgccccttacacatc

SEQ ID NO: 218051 - DNA, 30 bp, Artificial Sequence
  Synthetic oligonucleotide
gagggggttgtagcggactcccagcacatc

SEQ ID NO: 218052 - DNA, 30 bp, Artificial Sequence
  Synthetic oligonucleotide
acgcgcaataggctcctggaagggcacatc

SEQ ID NO: 218053 - DNA, 30 bp, Artificial Sequence
  Synthetic oligonucleotide
atcatacgattgtaatgaggaatgcacatc

SEQ ID NO: 218054 - DNA, 30 bp, Artificial Sequence
  Synthetic oligonucleotide
atacaaatgcgtctactataagttcacatc

SEQ ID NO: 218055 - DNA, 30 bp, Artificial Sequence
  Synthetic oligonucleotide
aaagtgcacgctgccaatacaggagacatc

SEQ ID NO: 218056 - DNA, 30 bp, Artificial Sequence
  Synthetic oligonucleotide
tgccatctgcacttatgagagctagacatc

SEQ ID NO: 218057 - DNA, 30 bp, Artificial Sequence
  Synthetic oligonucleotide
aacggcatttaggcggtaataaccgacatc

SEQ ID NO: 218058 - DNA, 30 bp, Artificial Sequence
  Synthetic oligonucleotide
cggaccagtcgatcgcaccgggtcgacatc

SEQ ID NO: 218059 - DNA, 30 bp, Artificial Sequence
  Synthetic oligonucleotide
aggccgaggccgaattcttgcgaggacatc

SEQ ID NO: 218060 - DNA, 30 bp, Artificial Sequence
  Synthetic oligonucleotide
gcccagcaagggctatgtatgccggacatc

SEQ ID NO: 218061 - DNA, 30 bp, Artificial Sequence
  Synthetic oligonucleotide
gtcgacctattgcacactcaggtggacatc

SEQ ID NO: 218062 - DNA, 30 bp, Artificial Sequence
  Synthetic oligonucleotide
tcacataaatggactttaagtattgacatc

SEQ ID NO: 218063 - DNA, 30 bp, Artificial Sequence
  Synthetic oligonucleotide
cgaacatctcacagatactaaggatacatc

SEQ ID NO: 218064 - DNA, 30 bp, Artificial Sequence
  Synthetic oligonucleotide
tctggcataggagatgggctcgtatacatc

SEQ ID NO: 218065 - DNA, 30 bp, Artificial Sequence
  Synthetic oligonucleotide
ctagttacgttggggatagaaatctacatc

SEQ ID NO: 218066 - DNA, 30 bp, Artificial Sequence
  Synthetic oligonucleotide
tgatctctacaggagtaagtcgtctacatc

SEQ ID NO: 218067 - DNA, 30 bp, Artificial Sequence
  Synthetic oligonucleotide
ttgtgtgcttgggcaaccaaaacttacatc

SEQ ID NO: 218068 - DNA, 30 bp, Artificial Sequence
  Synthetic oligonucleotide
gtcgtattatagactccatggaaaaccatc

SEQ ID NO: 218069 - DNA, 30 bp, Artificial Sequence
  Synthetic oligonucleotide
gcatcttctgctgggtgtgcaataaccatc

SEQ ID NO: 218070 - DNA, 30 bp, Artificial Sequence
  Synthetic oligonucleotide
acatgtagtgcaacaggatatgtaaccatc

SEQ ID NO: 218071 - DNA, 30 bp, Artificial Sequence
  Synthetic oligonucleotide
gatcattggatggaacaggggtacaccatc

SEQ ID NO: 218072 - DNA, 30 bp, Artificial Sequence
  Synthetic oligonucleotide
ggccgttttcgtgtaagcaaccagaccatc

SEQ ID NO: 218073 - DNA, 30 bp, Artificial Sequence
  Synthetic oligonucleotide
agtcggcactacgcgcacgttgataccatc

SEQ ID NO: 218074 - DNA, 30 bp, Artificial Sequence
  Synthetic oligonucleotide
ctctgaccgcacttcgttaagcctaccatc

SEQ ID NO: 218075 - DNA, 30 bp, Artificial Sequence
  Synthetic oligonucleotide
atgtcagagacgttaaaaatgccacccatc

SEQ ID NO: 218076 - DNA, 30 bp, Artificial Sequence
  Synthetic oligonucleotide
cggtcgataaagtttgtggcctaagccatc

SEQ ID NO: 218077 - DNA, 30 bp, Artificial Sequence
  Synthetic oligonucleotide
ggagcaggagtaccgcgcgcaacagccatc

SEQ ID NO: 218078 - DNA, 30 bp, Artificial Sequence
  Synthetic oligonucleotide
gagggtacttgacaccccgtgatagccatc

SEQ ID NO: 218079 - DNA, 30 bp, Artificial Sequence
  Synthetic oligonucleotide
gatgggcacccaaagctttactgcgccatc

SEQ ID NO: 218080 - DNA, 29 bp, Artificial Sequence
  Synthetic oligonucleotide
aatatacatcaccgctaacttatgccatc

SEQ ID NO: 218081 - DNA, 30 bp, Artificial Sequence
  Synthetic oligonucleotide
tagccactcatcaagtgcacagaatccatc

SEQ ID NO: 218082 - DNA, 30 bp, Artificial Sequence
  Synthetic oligonucleotide
atgaatttccattcaattggaaactccatc

SEQ ID NO: 218083 - DNA, 30 bp, Artificial Sequence
  Synthetic oligonucleotide
acggttgtttgagtagttctgaagtccatc

SEQ ID NO: 218084 - DNA, 30 bp, Artificial Sequence
  Synthetic oligonucleotide
gtggcatcagaccggggtaaggagtccatc

SEQ ID NO: 218085 - DNA, 30 bp, Artificial Sequence
  Synthetic oligonucleotide
gctaccgtccaaattgcatggtggtccatc

SEQ ID NO: 218086 - DNA, 30 bp, Artificial Sequence
  Synthetic oligonucleotide
gaaagacgaaaagtgggcacccattccatc

SEQ ID NO: 218087 - DNA, 30 bp, Artificial Sequence
  Synthetic oligonucleotide
gacgttctctgagtcgtgcggaaaagcatc

SEQ ID NO: 218088 - DNA, 30 bp, Artificial Sequence
  Synthetic oligonucleotide
cctatacgatgtaaacttcgtgacagcatc

SEQ ID NO: 218089 - DNA, 30 bp, Artificial Sequence
  Synthetic oligonucleotide
atctaagattacggtcccctaggcagcatc

SEQ ID NO: 218090 - DNA, 30 bp, Artificial Sequence
  Synthetic oligonucleotide
ccaacatcaggatggtcgatgtgcagcatc

SEQ ID NO: 218091 - DNA, 30 bp, Artificial Sequence
  Synthetic oligonucleotide
cgcaattatagtgttccgtgcctacgcatc

SEQ ID NO: 218092 - DNA, 30 bp, Artificial Sequence
  Synthetic oligonucleotide
tcatagtagcaaccacattaggaccgcatc

SEQ ID NO: 218093 - DNA, 30 bp, Artificial Sequence
  Synthetic oligonucleotide
ttgctaaattggatccaggatttccgcatc

SEQ ID NO: 218094 - DNA, 30 bp, Artificial Sequence
  Synthetic oligonucleotide
tagatcgctgactcaccccatctgcgcatc

SEQ ID NO: 218095 - DNA, 30 bp, Artificial Sequence
  Synthetic oligonucleotide
gatcaagggcgcgcctgaagtgtgcgcatc

SEQ ID NO: 218096 - DNA, 30 bp, Artificial Sequence
  Synthetic oligonucleotide
caggccgtaaagggcgaggtagtaggcatc

SEQ ID NO: 218097 - DNA, 30 bp, Artificial Sequence
  Synthetic oligonucleotide
ttcctcaggtcgactcgatacgacggcatc

SEQ ID NO: 218098 - DNA, 30 bp, Artificial Sequence
  Synthetic oligonucleotide
caccaggcatgctccatgtaaaggggcatc

SEQ ID NO: 218099 - DNA, 30 bp, Artificial Sequence
  Synthetic oligonucleotide
cgtaagttcgttttctgcgtcactggcatc

SEQ ID NO: 218100 - DNA, 30 bp, Artificial Sequence
  Synthetic oligonucleotide
cttgaggacaccactgcctcagaatgcatc

SEQ ID NO: 218101 - DNA, 30 bp, Artificial Sequence
  Synthetic oligonucleotide
ttctggccgatcggacatgaccactgcatc

SEQ ID NO: 218102 - DNA, 30 bp, Artificial Sequence
  Synthetic oligonucleotide
acaacgttagtggtataatcccaaatcatc

SEQ ID NO: 218103 - DNA, 31 bp, Artificial Sequence
  Synthetic oligonucleotide
ttaacgccaagtatctgtagccggaatcatc

SEQ ID NO: 218104 - DNA, 30 bp, Artificial Sequence
  Synthetic oligonucleotide
tacaccatgggggttacatgatacatcatc

SEQ ID NO: 218105 - DNA, 30 bp, Artificial Sequence
  Synthetic oligonucleotide
gaggttgtaagaaaggtgctagccatcatc

SEQ ID NO: 218106 - DNA, 30 bp, Artificial Sequence
  Synthetic oligonucleotide
agtcgttactaatgccttgaaacgatcatc

SEQ ID NO: 218107 - DNA, 30 bp, Artificial Sequence
  Synthetic oligonucleotide
aaatgaccaatcagcgtcaccaggatcatc

SEQ ID NO: 218108 - DNA, 30 bp, Artificial Sequence
  Synthetic oligonucleotide
actctagtgctccgacccgaattgatcatc

SEQ ID NO: 218109 - DNA, 30 bp, Artificial Sequence
  Synthetic oligonucleotide
gctaatgcttccaacccttgggctatcatc

SEQ ID NO: 218110 - DNA, 30 bp, Artificial Sequence
  Synthetic oligonucleotide
cggctaaacatggctcaatgttcactcatc

SEQ ID NO: 218111 - DNA, 29 bp, Artificial Sequence
  Synthetic oligonucleotide
attaacacaaacccaataacggcctcatc

SEQ ID NO: 218112 - DNA, 30 bp, Artificial Sequence
  Synthetic oligonucleotide
tctcgctatactagcacgatatatctcatc

SEQ ID NO: 218113 - DNA, 30 bp, Artificial Sequence
  Synthetic oligonucleotide
ctagccgtctgggcagggatgcgtgtcatc

SEQ ID NO: 218114 - DNA, 30 bp, Artificial Sequence
  Synthetic oligonucleotide
ggccgacgaaccgattaagggggtgtcatc

SEQ ID NO: 218115 - DNA, 30 bp, Artificial Sequence
  Synthetic oligonucleotide
ctatgcgttgtagtaagtcacgtcttcatc

SEQ ID NO: 218116 - DNA, 30 bp, Artificial Sequence
  Synthetic oligonucleotide
tagtaaatgttcgttgggttccagttcatc

SEQ ID NO: 218117 - DNA, 30 bp, Artificial Sequence
  Synthetic oligonucleotide
ttgagaagaaagtattgatagcagttcatc

SEQ ID NO: 218118 - DNA, 30 bp, Artificial Sequence
  Synthetic oligonucleotide
ggaaagggaaaagagacgaaggggttcatc

SEQ ID NO: 218119 - DNA, 30 bp, Artificial Sequence
  Synthetic oligonucleotide
tcgttaaagggcatggagatataaaagatc

SEQ ID NO: 218120 - DNA, 30 bp, Artificial Sequence
  Synthetic oligonucleotide
ctatacgtcctttagtcacccggaaagatc

SEQ ID NO: 218121 - DNA, 30 bp, Artificial Sequence
  Synthetic oligonucleotide
atgtgctgccgtctacaagcaaggaagatc

SEQ ID NO: 218122 - DNA, 30 bp, Artificial Sequence
  Synthetic oligonucleotide
actgcgactttcagcgcttaaaataagatc

SEQ ID NO: 218123 - DNA, 30 bp, Artificial Sequence
  Synthetic oligonucleotide
tgacgtggttataagtaggatgctaagatc

SEQ ID NO: 218124 - DNA, 30 bp, Artificial Sequence
  Synthetic oligonucleotide
accttcacttagggttggccgtttaagatc

SEQ ID NO: 218125 - DNA, 30 bp, Artificial Sequence
  Synthetic oligonucleotide
accaaaccggagggtttattggcacagatc

SEQ ID NO: 218126 - DNA, 30 bp, Artificial Sequence
  Synthetic oligonucleotide
gagatccatgagtcggaataggcccagatc

SEQ ID NO: 218127 - DNA, 30 bp, Artificial Sequence
  Synthetic oligonucleotide
gtagcggacttaatgctacctaggcagatc

SEQ ID NO: 218128 - DNA, 30 bp, Artificial Sequence
  Synthetic oligonucleotide
ataggttccattaagtagtaactagagatc

SEQ ID NO: 218129 - DNA, 30 bp, Artificial Sequence
  Synthetic oligonucleotide
ttcagggcgtgagtcgttagaatcgagatc

SEQ ID NO: 218130 - DNA, 30 bp, Artificial Sequence
  Synthetic oligonucleotide
aatcttacgacaacggagatgaaggagatc

SEQ ID NO: 218131 - DNA, 30 bp, Artificial Sequence
  Synthetic oligonucleotide
agtgacgtgaagtcgactataaatgagatc

SEQ ID NO: 218132 - DNA, 30 bp, Artificial Sequence
  Synthetic oligonucleotide
actgtcactgctgtttggttcgttgagatc

SEQ ID NO: 218133 - DNA, 30 bp, Artificial Sequence
  Synthetic oligonucleotide
tcgtgttactatagctggagcgaatagatc

SEQ ID NO: 218134 - DNA, 30 bp, Artificial Sequence
  Synthetic oligonucleotide
aaaggataacgcacagtgatgaactagatc

SEQ ID NO: 218135 - DNA, 31 bp, Artificial Sequence
  Synthetic oligonucleotide
ttcgaactaaggcgcttcgctttcctagatc

SEQ ID NO: 218136 - DNA, 30 bp, Artificial Sequence
  Synthetic oligonucleotide
atgacaatcgaaccgttacctggctagatc

SEQ ID NO: 218137 - DNA, 30 bp, Artificial Sequence
  Synthetic oligonucleotide
catgtggaaaactataatccaacgtagatc

SEQ ID NO: 218138 - DNA, 29 bp, Artificial Sequence
  Synthetic oligonucleotide
gtaacggcggttagggtttgttgtagatc

SEQ ID NO: 218139 - DNA, 30 bp, Artificial Sequence
  Synthetic oligonucleotide
tgttcatgagttgttccgggatgaccgatc

SEQ ID NO: 218140 - DNA, 30 bp, Artificial Sequence
  Synthetic oligonucleotide
tctgcgggatccgccgtattctgaccgatc

SEQ ID NO: 218141 - DNA, 30 bp, Artificial Sequence
  Synthetic oligonucleotide
atgcacggaattttcgaacggttgccgatc

SEQ ID NO: 218142 - DNA, 30 bp, Artificial Sequence
  Synthetic oligonucleotide
aatcaggtctaaaagtcgaacgctgcgatc

SEQ ID NO: 218143 - DNA, 30 bp, Artificial Sequence
  Synthetic oligonucleotide
tcactatcgacgaaagacgtaaagtcgatc

SEQ ID NO: 218144 - DNA, 30 bp, Artificial Sequence
  Synthetic oligonucleotide
aggttaacctcatgtagatatatttcgatc

SEQ ID NO: 218145 - DNA, 30 bp, Artificial Sequence
  Synthetic oligonucleotide
aagtgacacttgaccactgggagaaggatc

SEQ ID NO: 218146 - DNA, 30 bp, Artificial Sequence
  Synthetic oligonucleotide
aaagattagccttaactggtatccaggatc

SEQ ID NO: 218147 - DNA, 30 bp, Artificial Sequence
  Synthetic oligonucleotide
gtaggggcacaagagccctgcggcaggatc

SEQ ID NO: 218148 - DNA, 30 bp, Artificial Sequence
  Synthetic oligonucleotide
attactctgtgggatatcgttagtaggatc

SEQ ID NO: 218149 - DNA, 30 bp, Artificial Sequence
  Synthetic oligonucleotide
cttggatgcccgggtgataatgttaggatc

SEQ ID NO: 218150 - DNA, 30 bp, Artificial Sequence
  Synthetic oligonucleotide
gggcaactgtgaaataaattggaacggatc

SEQ ID NO: 218151 - DNA, 30 bp, Artificial Sequence
  Synthetic oligonucleotide
agagaatggaactcctacatttgacggatc

SEQ ID NO: 218152 - DNA, 30 bp, Artificial Sequence
  Synthetic oligonucleotide
atgtgggggatcctaacggttcgccggatc

SEQ ID NO: 218153 - DNA, 30 bp, Artificial Sequence
  Synthetic oligonucleotide
agagctctgatagcgggtggctagcggatc

SEQ ID NO: 218154 - DNA, 30 bp, Artificial Sequence
  Synthetic oligonucleotide
gcgaatgcttgttcaggtaccctgcggatc

SEQ ID NO: 218155 - DNA, 30 bp, Artificial Sequence
  Synthetic oligonucleotide
catgcagggtgatgaggacgcctgcggatc

SEQ ID NO: 218156 - DNA, 30 bp, Artificial Sequence
  Synthetic oligonucleotide
tagagtcacacgttgctgagtacggggatc

SEQ ID NO: 218157 - DNA, 30 bp, Artificial Sequence
  Synthetic oligonucleotide
taaaagggaaggtaggacacaatggggatc

SEQ ID NO: 218158 - DNA, 30 bp, Artificial Sequence
  Synthetic oligonucleotide
agtgggtcagaacgctctctggttgggatc

SEQ ID NO: 218159 - DNA, 30 bp, Artificial Sequence
  Synthetic oligonucleotide
tatgacagaaatacatcctcatcctggatc

SEQ ID NO: 218160 - DNA, 30 bp, Artificial Sequence
  Synthetic oligonucleotide
gccatctagtccgaccgaataggctggatc

SEQ ID NO: 218161 - DNA, 30 bp, Artificial Sequence
  Synthetic oligonucleotide
cagcgagctaaggacgggcggccgtggatc

SEQ ID NO: 218162 - DNA, 30 bp, Artificial Sequence
  Synthetic oligonucleotide
cgctaggagaatcacgcaatgatgtggatc

SEQ ID NO: 218163 - DNA, 30 bp, Artificial Sequence
  Synthetic oligonucleotide
gctccccaatggggttaaagtaccatgatc

SEQ ID NO: 218164 - DNA, 30 bp, Artificial Sequence
  Synthetic oligonucleotide
atcggtccaatgaattcgactattatgatc

SEQ ID NO: 218165 - DNA, 30 bp, Artificial Sequence
  Synthetic oligonucleotide
ctacaacagtgcttaaatgtctttatgatc

SEQ ID NO: 218166 - DNA, 30 bp, Artificial Sequence
  Synthetic oligonucleotide
tgtgggtcggtcagaattcgattcctgatc

SEQ ID NO: 218167 - DNA, 30 bp, Artificial Sequence
  Synthetic oligonucleotide
gcgtgcttatgcttccatcggcgcgtgatc

SEQ ID NO: 218168 - DNA, 30 bp, Artificial Sequence
  Synthetic oligonucleotide
tagcgttacgtctaatgagtgcaggtgatc

SEQ ID NO: 218169 - DNA, 30 bp, Artificial Sequence
  Synthetic oligonucleotide
accggctagctaggtcatactatattgatc

SEQ ID NO: 218170 - DNA, 30 bp, Artificial Sequence
  Synthetic oligonucleotide
cgcgactcgggcgtgtcggtgatcttgatc

SEQ ID NO: 218171 - DNA, 30 bp, Artificial Sequence
  Synthetic oligonucleotide
tcgcacaaccaccgtcagaagcatttgatc

SEQ ID NO: 218172 - DNA, 30 bp, Artificial Sequence
  Synthetic oligonucleotide
gtgggtactcccttcggacatggaaatatc

SEQ ID NO: 218173 - DNA, 30 bp, Artificial Sequence
  Synthetic oligonucleotide
gataggcgtgactgactatctaacaatatc

SEQ ID NO: 218174 - DNA, 31 bp, Artificial Sequence
  Synthetic oligonucleotide
acaggtacagaagaaagttccctttaatatc

SEQ ID NO: 218175 - DNA, 30 bp, Artificial Sequence
  Synthetic oligonucleotide
ggaagtataacaagcggaacgtgacatatc

SEQ ID NO: 218176 - DNA, 30 bp, Artificial Sequence
  Synthetic oligonucleotide
ttggggtacgggcctgaggctgcccatatc

SEQ ID NO: 218177 - DNA, 30 bp, Artificial Sequence
  Synthetic oligonucleotide
tacaaaaggtagaattaccgggagcatatc

SEQ ID NO: 218178 - DNA, 30 bp, Artificial Sequence
  Synthetic oligonucleotide
ggccaaaataaaccgactgaaagagatatc

SEQ ID NO: 218179 - DNA, 30 bp, Artificial Sequence
  Synthetic oligonucleotide
tgcgtaacgagaattatagacggcgatatc

SEQ ID NO: 218180 - DNA, 30 bp, Artificial Sequence
  Synthetic oligonucleotide
gtcgctcgcgctcaaatcaaggcggatatc

SEQ ID NO: 218181 - DNA, 30 bp, Artificial Sequence
  Synthetic oligonucleotide
cggaaatttaagcatgtccatgtggatatc

SEQ ID NO: 218182 - DNA, 30 bp, Artificial Sequence
  Synthetic oligonucleotide
ctgtcgtactgatcccaggggaattatatc

SEQ ID NO: 218183 - DNA, 30 bp, Artificial Sequence
  Synthetic oligonucleotide
aacaacagagcgcctgcgcagcgaactatc

SEQ ID NO: 218184 - DNA, 30 bp, Artificial Sequence
  Synthetic oligonucleotide
cgcgcccaaatatacgcgtgccgccctatc

SEQ ID NO: 218185 - DNA, 30 bp, Artificial Sequence
  Synthetic oligonucleotide
tccgtgtgaggatctcctgatacgcctatc

SEQ ID NO: 218186 - DNA, 30 bp, Artificial Sequence
  Synthetic oligonucleotide
ttagtagcgtagcgtggggtgttgcctatc

SEQ ID NO: 218187 - DNA, 30 bp, Artificial Sequence
  Synthetic oligonucleotide
cgttgaatattattcgcccgatgagctatc

SEQ ID NO: 218188 - DNA, 30 bp, Artificial Sequence
  Synthetic oligonucleotide
atgaactaatcaaaggatgtcgtagctatc

SEQ ID NO: 218189 - DNA, 30 bp, Artificial Sequence
  Synthetic oligonucleotide
atccccggtacttctaacgggatggctatc

SEQ ID NO: 218190 - DNA, 30 bp, Artificial Sequence
  Synthetic oligonucleotide
accatctaaacaacgaaaaccctggctatc

SEQ ID NO: 218191 - DNA, 30 bp, Artificial Sequence
  Synthetic oligonucleotide
cttcgcaaaatcgaagcctttcactctatc

SEQ ID NO: 218192 - DNA, 30 bp, Artificial Sequence
  Synthetic oligonucleotide
ctcggcctagggcaaccgctactgtctatc

SEQ ID NO: 218193 - DNA, 30 bp, Artificial Sequence
  Synthetic oligonucleotide
gagaggggattcgatcagggccgttctatc

SEQ ID NO: 218194 - DNA, 30 bp, Artificial Sequence
  Synthetic oligonucleotide
tctgtcctgtgcaaatctctactaagtatc

SEQ ID NO: 218195 - DNA, 30 bp, Artificial Sequence
  Synthetic oligonucleotide
tcgcggtggagttgaacgctcaggagtatc

SEQ ID NO: 218196 - DNA, 30 bp, Artificial Sequence
  Synthetic oligonucleotide
tggttagcggacactccctgtgttagtatc

SEQ ID NO: 218197 - DNA, 30 bp, Artificial Sequence
  Synthetic oligonucleotide
cgggtactaggtgttgataggatacgtatc

SEQ ID NO: 218198 - DNA, 30 bp, Artificial Sequence
  Synthetic oligonucleotide
tagatggaagtacgaggcgtgcagcgtatc

SEQ ID NO: 218199 - DNA, 30 bp, Artificial Sequence
  Synthetic oligonucleotide
ctaaagctttattctgccgtggatcgtatc

SEQ ID NO: 218200 - DNA, 30 bp, Artificial Sequence
  Synthetic oligonucleotide
ggcagggttaccactacgtgatcaggtatc

SEQ ID NO: 218201 - DNA, 30 bp, Artificial Sequence
  Synthetic oligonucleotide
cgttgtatatcatggtgccatacgggtatc

SEQ ID NO: 218202 - DNA, 30 bp, Artificial Sequence
  Synthetic oligonucleotide
aagataaccggggtcgtcatgcggggtatc

SEQ ID NO: 218203 - DNA, 30 bp, Artificial Sequence
  Synthetic oligonucleotide
cgaatataagtagcccacaagattggtatc

SEQ ID NO: 218204 - DNA, 30 bp, Artificial Sequence
  Synthetic oligonucleotide
gtctcataccccaggtagtgaccatgtatc

SEQ ID NO: 218205 - DNA, 30 bp, Artificial Sequence
  Synthetic oligonucleotide
gcgattacttttttcagaagggcatgtatc

SEQ ID NO: 218206 - DNA, 30 bp, Artificial Sequence
  Synthetic oligonucleotide
cgccgtgaaccgggtaactaaacgtgtatc

SEQ ID NO: 218207 - DNA, 30 bp, Artificial Sequence
  Synthetic oligonucleotide
actcggatgtggtcacaaccttggtgtatc

SEQ ID NO: 218208 - DNA, 30 bp, Artificial Sequence
  Synthetic oligonucleotide
ggccttccatggggagtaggggcttgtatc

SEQ ID NO: 218209 - DNA, 30 bp, Artificial Sequence
  Synthetic oligonucleotide
gtcaggctgtctaatgccgaacaaattatc

SEQ ID NO: 218210 - DNA, 30 bp, Artificial Sequence
  Synthetic oligonucleotide
actctgcgaggtggtttcattaagattatc

SEQ ID NO: 218211 - DNA, 30 bp, Artificial Sequence
  Synthetic oligonucleotide
caaatctgtgagccggcatcgacgattatc

SEQ ID NO: 218212 - DNA, 30 bp, Artificial Sequence
  Synthetic oligonucleotide
cgacaaagcagacttgaacaagtccttatc

SEQ ID NO: 218213 - DNA, 30 bp, Artificial Sequence
  Synthetic oligonucleotide
ttagttacaatagtttaacagggagttatc

SEQ ID NO: 218214 - DNA, 30 bp, Artificial Sequence
  Synthetic oligonucleotide
ttaacgttcggaagccatacagtggttatc

SEQ ID NO: 218215 - DNA, 30 bp, Artificial Sequence
  Synthetic oligonucleotide
aatctcagggagtggaaatgtcatgttatc

SEQ ID NO: 218216 - DNA, 30 bp, Artificial Sequence
  Synthetic oligonucleotide
cggatgcgatgcgcacagccaaaatttatc

SEQ ID NO: 218217 - DNA, 30 bp, Artificial Sequence
  Synthetic oligonucleotide
cgtgccagagatgtagaacacaggtttatc

SEQ ID NO: 218218 - DNA, 30 bp, Artificial Sequence
  Synthetic oligonucleotide
acgacaagggatggctaatccttgtttatc

SEQ ID NO: 218219 - DNA, 30 bp, Artificial Sequence
  Synthetic oligonucleotide
gcgagtatagcgatacctcggatttttatc

SEQ ID NO: 218220 - DNA, 30 bp, Artificial Sequence
  Synthetic oligonucleotide
gctggaatgaaatatatggcgaaaaaactc

SEQ ID NO: 218221 - DNA, 30 bp, Artificial Sequence
  Synthetic oligonucleotide
tgtgaagagatcctgtgttaaatgaaactc

SEQ ID NO: 218222 - DNA, 30 bp, Artificial Sequence
  Synthetic oligonucleotide
aactagggggtttgcccgagagcacaactc

SEQ ID NO: 218223 - DNA, 30 bp, Artificial Sequence
  Synthetic oligonucleotide
gtagggatgccgtgtcatgcttagcaactc

SEQ ID NO: 218224 - DNA, 30 bp, Artificial Sequence
  Synthetic oligonucleotide
gcttgtctagataacacaagaaatcaactc

SEQ ID NO: 218225 - DNA, 30 bp, Artificial Sequence
  Synthetic oligonucleotide
accgggatatatccaagaaaacatcaactc

SEQ ID NO: 218226 - DNA, 30 bp, Artificial Sequence
  Synthetic oligonucleotide
gagggatcttcttcccgttcagctcaactc

SEQ ID NO: 218227 - DNA, 30 bp, Artificial Sequence
  Synthetic oligonucleotide
tggctgcgggtggaagtattatgggaactc

SEQ ID NO: 218228 - DNA, 30 bp, Artificial Sequence
  Synthetic oligonucleotide
atcaggtcataggagttcaacgtggaactc

SEQ ID NO: 218229 - DNA, 30 bp, Artificial Sequence
  Synthetic oligonucleotide
tatatcgggcacccctcatcggaataactc

SEQ ID NO: 218230 - DNA, 30 bp, Artificial Sequence
  Synthetic oligonucleotide
agccgaccaggaatcgtggtaacataactc

SEQ ID NO: 218231 - DNA, 30 bp, Artificial Sequence
  Synthetic oligonucleotide
taccggttatctgtcgcgaacccataactc

SEQ ID NO: 218232 - DNA, 30 bp, Artificial Sequence
  Synthetic oligonucleotide
tgtgtgtatagaattagtcctctctaactc

SEQ ID NO: 218233 - DNA, 30 bp, Artificial Sequence
  Synthetic oligonucleotide
aggccggcaatctccggggacttttaactc

SEQ ID NO: 218234 - DNA, 30 bp, Artificial Sequence
  Synthetic oligonucleotide
aatacatgaccttatatcccgacgacactc

SEQ ID NO: 218235 - DNA, 30 bp, Artificial Sequence
  Synthetic oligonucleotide
ttgaagggactagacgtaagctcgacactc

SEQ ID NO: 218236 - DNA, 30 bp, Artificial Sequence
  Synthetic oligonucleotide
acccgtatccaattcgtagcccggacactc

SEQ ID NO: 218237 - DNA, 30 bp, Artificial Sequence
  Synthetic oligonucleotide
actcggtcttgggattcggggcctacactc

SEQ ID NO: 218238 - DNA, 30 bp, Artificial Sequence
  Synthetic oligonucleotide
actggttaaagatcaaacagaattacactc

SEQ ID NO: 218239 - DNA, 30 bp, Artificial Sequence
  Synthetic oligonucleotide
tacgggcttgaatccttcggataaccactc

SEQ ID NO: 218240 - DNA, 30 bp, Artificial Sequence
  Synthetic oligonucleotide
cgagggaccagatcttatatgctatcactc

SEQ ID NO: 218241 - DNA, 30 bp, Artificial Sequence
  Synthetic oligonucleotide
accttgtcacatgcctcgcggaagtcactc

SEQ ID NO: 218242 - DNA, 30 bp, Artificial Sequence
  Synthetic oligonucleotide
gagcgaggccgagcaggctagcagtcactc

SEQ ID NO: 218243 - DNA, 30 bp, Artificial Sequence
  Synthetic oligonucleotide
tatcactcatttgttggccaaaaaagactc

SEQ ID NO: 218244 - DNA, 30 bp, Artificial Sequence
  Synthetic oligonucleotide
accatagccgagggatatctggacagactc

SEQ ID NO: 218245 - DNA, 30 bp, Artificial Sequence
  Synthetic oligonucleotide
gtcgatgctttgttacaaacatacagactc

SEQ ID NO: 218246 - DNA, 30 bp, Artificial Sequence
  Synthetic oligonucleotide
gtatcccgtaaactaagtcgttagagactc

SEQ ID NO: 218247 - DNA, 30 bp, Artificial Sequence
  Synthetic oligonucleotide
aacggcagcacttcctctcaaagtagactc

SEQ ID NO: 218248 - DNA, 30 bp, Artificial Sequence
  Synthetic oligonucleotide
attcactgaggataaagtcaagaccgactc

SEQ ID NO: 218249 - DNA, 30 bp, Artificial Sequence
  Synthetic oligonucleotide
agatgcccctcatcgtggctcgggcgactc

SEQ ID NO: 218250 - DNA, 30 bp, Artificial Sequence
  Synthetic oligonucleotide
gctacagactcggttcactagactcgactc

SEQ ID NO: 218251 - DNA, 30 bp, Artificial Sequence
  Synthetic oligonucleotide
tcacggcggtgcgactacaatcttcgactc

SEQ ID NO: 218252 - DNA, 30 bp, Artificial Sequence
  Synthetic oligonucleotide
cggaacgttagccacttggagtaatgactc

SEQ ID NO: 218253 - DNA, 30 bp, Artificial Sequence
  Synthetic oligonucleotide
ttgtagcgttggttcgtcctaagatgactc

SEQ ID NO: 218254 - DNA, 30 bp, Artificial Sequence
  Synthetic oligonucleotide
gtcgagccttggtcgtgcaacttctgactc

SEQ ID NO: 218255 - DNA, 30 bp, Artificial Sequence
  Synthetic oligonucleotide
gaagatacggacgaggaggaatcttgactc

SEQ ID NO: 218256 - DNA, 30 bp, Artificial Sequence
  Synthetic oligonucleotide
cggtgctgtttgataccagatcgttgactc

SEQ ID NO: 218257 - DNA, 30 bp, Artificial Sequence
  Synthetic oligonucleotide
gggagtttgccgattagcaggcgcatactc

SEQ ID NO: 218258 - DNA, 30 bp, Artificial Sequence
  Synthetic oligonucleotide
gcttgggtattcataaggttagtgatactc

SEQ ID NO: 218259 - DNA, 30 bp, Artificial Sequence
  Synthetic oligonucleotide
gatgtgattggcggtggaccctctatactc

SEQ ID NO: 218260 - DNA, 30 bp, Artificial Sequence
  Synthetic oligonucleotide
gtatggggcatgctgggacctaaactactc

SEQ ID NO: 218261 - DNA, 30 bp, Artificial Sequence
  Synthetic oligonucleotide
agaaaagtggtcgagagagagtaactactc

SEQ ID NO: 218262 - DNA, 30 bp, Artificial Sequence
  Synthetic oligonucleotide
tccgatcaagataaaaggtggtcactactc

SEQ ID NO: 218263 - DNA, 30 bp, Artificial Sequence
  Synthetic oligonucleotide
agcggttctctagacggacggcgcctactc

SEQ ID NO: 218264 - DNA, 30 bp, Artificial Sequence
  Synthetic oligonucleotide
agagtgattgaaattcgaattcatctactc

SEQ ID NO: 218265 - DNA, 30 bp, Artificial Sequence
  Synthetic oligonucleotide
tggccgttagggccgggaatgagtctactc

SEQ ID NO: 218266 - DNA, 30 bp, Artificial Sequence
  Synthetic oligonucleotide
cctttgaagtccgctgtgacgtccgtactc

SEQ ID NO: 218267 - DNA, 30 bp, Artificial Sequence
  Synthetic oligonucleotide
gagtagcgatttgaactttgattggtactc

SEQ ID NO: 218268 - DNA, 30 bp, Artificial Sequence
  Synthetic oligonucleotide
gtccgtcaatagagggtgagacaattactc

SEQ ID NO: 218269 - DNA, 30 bp, Artificial Sequence
  Synthetic oligonucleotide
atcccaccctccccttaccacgaattactc

SEQ ID NO: 218270 - DNA, 30 bp, Artificial Sequence
  Synthetic oligonucleotide
atgctggacaacgaaggctacatattactc

SEQ ID NO: 218271 - DNA, 30 bp, Artificial Sequence
  Synthetic oligonucleotide
tatagggacagtggagagtgcatattactc

SEQ ID NO: 218272 - DNA, 30 bp, Artificial Sequence
  Synthetic oligonucleotide
caccggagcatcccctctttgatattactc

SEQ ID NO: 218273 - DNA, 30 bp, Artificial Sequence
  Synthetic oligonucleotide
gcttgaactttattttttaacaacttactc

SEQ ID NO: 218274 - DNA, 30 bp, Artificial Sequence
  Synthetic oligonucleotide
gggccgtcataatggcggttgtgtttactc

SEQ ID NO: 218275 - DNA, 30 bp, Artificial Sequence
  Synthetic oligonucleotide
caaagcgtgtgagcgaatttacataacctc

SEQ ID NO: 218276 - DNA, 30 bp, Artificial Sequence
  Synthetic oligonucleotide
gggtgggagtaacgcttgtacccacacctc

SEQ ID NO: 218277 - DNA, 30 bp, Artificial Sequence
  Synthetic oligonucleotide
ctgagttgaccacatagccatggacacctc

SEQ ID NO: 218278 - DNA, 31 bp, Artificial Sequence
  Synthetic oligonucleotide
aagagatccaggagatatgccagaccacctc

SEQ ID NO: 218279 - DNA, 30 bp, Artificial Sequence
  Synthetic oligonucleotide
cggaatcatcagattccgacaaagcacctc

SEQ ID NO: 218280 - DNA, 30 bp, Artificial Sequence
  Synthetic oligonucleotide
taaggcgggcctaaattcagatccgacctc

SEQ ID NO: 218281 - DNA, 30 bp, Artificial Sequence
  Synthetic oligonucleotide
taggcgcttcgcctggcacctaatgacctc

SEQ ID NO: 218282 - DNA, 30 bp, Artificial Sequence
  Synthetic oligonucleotide
caattcgctttggcccctcgagatgacctc

SEQ ID NO: 218283 - DNA, 30 bp, Artificial Sequence
  Synthetic oligonucleotide
ttcaggaaaaaagtatgtataaagtacctc

SEQ ID NO: 218284 - DNA, 30 bp, Artificial Sequence
  Synthetic oligonucleotide
tctggcgtagagctggcgcgagcttacctc

SEQ ID NO: 218285 - DNA, 30 bp, Artificial Sequence
  Synthetic oligonucleotide
cgtgttgatttacagcaattcaagaccctc

SEQ ID NO: 218286 - DNA, 30 bp, Artificial Sequence
  Synthetic oligonucleotide
gacggtactgcttctcattacggtaccctc

SEQ ID NO: 218287 - DNA, 30 bp, Artificial Sequence
  Synthetic oligonucleotide
tagaacacacatctatcgagcttacccctc

SEQ ID NO: 218288 - DNA, 30 bp, Artificial Sequence
  Synthetic oligonucleotide
tgatcagtgagatcggcgccgcttcccctc

SEQ ID NO: 218289 - DNA, 30 bp, Artificial Sequence
  Synthetic oligonucleotide
atagcctacgtataagcagtttatgccctc

SEQ ID NO: 218290 - DNA, 30 bp, Artificial Sequence
  Synthetic oligonucleotide
attagggacatgatggtgacggttgccctc

SEQ ID NO: 218291 - DNA, 30 bp, Artificial Sequence
  Synthetic oligonucleotide
gagggtactacacaagatgcactatccctc

SEQ ID NO: 218292 - DNA, 31 bp, Artificial Sequence
  Synthetic oligonucleotide
gatggagcttggcgaaatggagtactccctc

SEQ ID NO: 218293 - DNA, 30 bp, Artificial Sequence
  Synthetic oligonucleotide
atgtgatgtgcgagtagaagtaattccctc

SEQ ID NO: 218294 - DNA, 30 bp, Artificial Sequence
  Synthetic oligonucleotide
atctctgaacgctgtactgtctcttccctc

SEQ ID NO: 218295 - DNA, 30 bp, Artificial Sequence
  Synthetic oligonucleotide
gggccaggctgaattacaaccataagcctc

SEQ ID NO: 218296 - DNA, 30 bp, Artificial Sequence
  Synthetic oligonucleotide
aaaaagaataggcaaacgcgagagagcctc

SEQ ID NO: 218297 - DNA, 30 bp, Artificial Sequence
  Synthetic oligonucleotide
gatacgatggctctaaatgaggagagcctc

SEQ ID NO: 218298 - DNA, 31 bp, Artificial Sequence
  Synthetic oligonucleotide
gggagcatatctgagagtaacaatgcgcctc

SEQ ID NO: 218299 - DNA, 30 bp, Artificial Sequence
  Synthetic oligonucleotide
ccgatagtagccacgggggtgaaaggcctc

SEQ ID NO: 218300 - DNA, 30 bp, Artificial Sequence
  Synthetic oligonucleotide
catggcttcgcgcgtgtcgctacctgcctc

SEQ ID NO: 218301 - DNA, 30 bp, Artificial Sequence
  Synthetic oligonucleotide
tctttgcggtgtttcagttggaagtgcctc

SEQ ID NO: 218302 - DNA, 30 bp, Artificial Sequence
  Synthetic oligonucleotide
ggtggtcactaccgatctagccgactcctc

SEQ ID NO: 218303 - DNA, 30 bp, Artificial Sequence
  Synthetic oligonucleotide
gcagtgaagagcaggaagacgtacgtcctc

SEQ ID NO: 218304 - DNA, 30 bp, Artificial Sequence
  Synthetic oligonucleotide
tgatacttctagtgtaggcaaaaggtcctc

SEQ ID NO: 218305 - DNA, 30 bp, Artificial Sequence
  Synthetic oligonucleotide
aagttacctcgtgtggctcttaatgtcctc

SEQ ID NO: 218306 - DNA, 30 bp, Artificial Sequence
  Synthetic oligonucleotide
aattgaaatacacgcggtcggccattcctc

SEQ ID NO: 218307 - DNA, 30 bp, Artificial Sequence
  Synthetic oligonucleotide
tcgcaaaactgcccggtaatggagttcctc

SEQ ID NO: 218308 - DNA, 30 bp, Artificial Sequence
  Synthetic oligonucleotide
ttgccagattcgtctacttcgtagaagctc

SEQ ID NO: 218309 - DNA, 30 bp, Artificial Sequence
  Synthetic oligonucleotide
cgagtgggacagagacccctatcgaagctc

SEQ ID NO: 218310 - DNA, 30 bp, Artificial Sequence
  Synthetic oligonucleotide
tagcgctaaaaactgtggtgacataagctc

SEQ ID NO: 218311 - DNA, 30 bp, Artificial Sequence
  Synthetic oligonucleotide
cgcactaagtggatgagcgcaagacagctc

SEQ ID NO: 218312 - DNA, 30 bp, Artificial Sequence
  Synthetic oligonucleotide
ctggaatttatacctggaacttcccagctc

SEQ ID NO: 218313 - DNA, 30 bp, Artificial Sequence
  Synthetic oligonucleotide
gcggcaggttgggtatgacatagtcagctc

SEQ ID NO: 218314 - DNA, 30 bp, Artificial Sequence
  Synthetic oligonucleotide
gacacccagccgaaatacgttcgtcagctc

SEQ ID NO: 218315 - DNA, 30 bp, Artificial Sequence
  Synthetic oligonucleotide
cctcacagagggtctagctctattcagctc

SEQ ID NO: 218316 - DNA, 30 bp, Artificial Sequence
  Synthetic oligonucleotide
ctgaccacgcctttttggagcaaagagctc

SEQ ID NO: 218317 - DNA, 30 bp, Artificial Sequence
  Synthetic oligonucleotide
gaacgcccttcaaagctcaaaaaggagctc

SEQ ID NO: 218318 - DNA, 30 bp, Artificial Sequence
  Synthetic oligonucleotide
ataagttgggttacctgttctgaggagctc

SEQ ID NO: 218319 - DNA, 30 bp, Artificial Sequence
  Synthetic oligonucleotide
agggcgggacaggcattgtcaaatgagctc

SEQ ID NO: 218320 - DNA, 30 bp, Artificial Sequence
  Synthetic oligonucleotide
aggcctgatgctttctatacagatgagctc

SEQ ID NO: 218321 - DNA, 30 bp, Artificial Sequence
  Synthetic oligonucleotide
tgagtctggtgaaagatagcaggatagctc

SEQ ID NO: 218322 - DNA, 30 bp, Artificial Sequence
  Synthetic oligonucleotide
cccggaacttacagaacgggcggatagctc

SEQ ID NO: 218323 - DNA, 30 bp, Artificial Sequence
  Synthetic oligonucleotide
tcgctcgcgaagtcttaaagatagtagctc

SEQ ID NO: 218324 - DNA, 30 bp, Artificial Sequence
  Synthetic oligonucleotide
gttagtaatggtcgcgaacgtaggtagctc

SEQ ID NO: 218325 - DNA, 30 bp, Artificial Sequence
  Synthetic oligonucleotide
atgagtaaaggtcgtagactgtgaacgctc

SEQ ID NO: 218326 - DNA, 30 bp, Artificial Sequence
  Synthetic oligonucleotide
ggcctgtggttttaagtctctaacacgctc

SEQ ID NO: 218327 - DNA, 30 bp, Artificial Sequence
  Synthetic oligonucleotide
atagaggaagaggggctgttgttcacgctc

SEQ ID NO: 218328 - DNA, 30 bp, Artificial Sequence
  Synthetic oligonucleotide
acattttagaaggaatgtccaattacgctc

SEQ ID NO: 218329 - DNA, 30 bp, Artificial Sequence
  Synthetic oligonucleotide
cagcccttgtaaatctctcgatggccgctc

SEQ ID NO: 218330 - DNA, 30 bp, Artificial Sequence
  Synthetic oligonucleotide
aggggtggaataagactaccaggagcgctc

SEQ ID NO: 218331 - DNA, 30 bp, Artificial Sequence
  Synthetic oligonucleotide
actgacaagccatatacgctctcggcgctc

SEQ ID NO: 218332 - DNA, 30 bp, Artificial Sequence
  Synthetic oligonucleotide
tgccatacaatgtcgactaatagctcgctc

SEQ ID NO: 218333 - DNA, 30 bp, Artificial Sequence
  Synthetic oligonucleotide
ggcagaaggtggagaaacgtaaattcgctc

SEQ ID NO: 218334 - DNA, 30 bp, Artificial Sequence
  Synthetic oligonucleotide
gggtcaacaaacggtcggtttgcttcgctc

SEQ ID NO: 218335 - DNA, 30 bp, Artificial Sequence
  Synthetic oligonucleotide
tatgaaagctggttcgatgaagaaaggctc

SEQ ID NO: 218336 - DNA, 30 bp, Artificial Sequence
  Synthetic oligonucleotide
ctttctcacggccgtacacaaacaaggctc

SEQ ID NO: 218337 - DNA, 30 bp, Artificial Sequence
  Synthetic oligonucleotide
cattcggatgagtacttcatccgcaggctc

SEQ ID NO: 218338 - DNA, 30 bp, Artificial Sequence
  Synthetic oligonucleotide
gcatgctgtatttggggggttcagaggctc

SEQ ID NO: 218339 - DNA, 30 bp, Artificial Sequence
  Synthetic oligonucleotide
ccaagtatacagaggccttagaataggctc

SEQ ID NO: 218340 - DNA, 30 bp, Artificial Sequence
  Synthetic oligonucleotide
ggtgtgccttaatgatgttgagataggctc

SEQ ID NO: 218341 - DNA, 30 bp, Artificial Sequence
  Synthetic oligonucleotide
ctccagagagtgaagatagaaactaggctc

SEQ ID NO: 218342 - DNA, 30 bp, Artificial Sequence
  Synthetic oligonucleotide
gacggtggttcgattagagcacgccggctc

SEQ ID NO: 218343 - DNA, 30 bp, Artificial Sequence
  Synthetic oligonucleotide
cactttaaggtagtggcgtgcggtcggctc

SEQ ID NO: 218344 - DNA, 30 bp, Artificial Sequence
  Synthetic oligonucleotide
taacaccacaagggaggtacttaagggctc

SEQ ID NO: 218345 - DNA, 30 bp, Artificial Sequence
  Synthetic oligonucleotide
agggtcaacagaaaattttcaccagggctc

SEQ ID NO: 218346 - DNA, 30 bp, Artificial Sequence
  Synthetic oligonucleotide
aaggggattcttaaacgacgggtggggctc

SEQ ID NO: 218347 - DNA, 30 bp, Artificial Sequence
  Synthetic oligonucleotide
taccgtcaagaggttaaatgggatgggctc

SEQ ID NO: 218348 - DNA, 30 bp, Artificial Sequence
  Synthetic oligonucleotide
tgtatggggctggtttggctcccatggctc

SEQ ID NO: 218349 - DNA, 30 bp, Artificial Sequence
  Synthetic oligonucleotide
tcgatcgagtggtgtgaggtaggctggctc

SEQ ID NO: 218350 - DNA, 30 bp, Artificial Sequence
  Synthetic oligonucleotide
tccgcgtcgtgtctttacgtcaagtggctc

SEQ ID NO: 218351 - DNA, 30 bp, Artificial Sequence
  Synthetic oligonucleotide
attagcccatggcggcattataagtggctc

SEQ ID NO: 218352 - DNA, 30 bp, Artificial Sequence
  Synthetic oligonucleotide
atgtccgaagcgggggtccaacattggctc

SEQ ID NO: 218353 - DNA, 30 bp, Artificial Sequence
  Synthetic oligonucleotide
ggtgtgcccacgtggcctaaacagatgctc

SEQ ID NO: 218354 - DNA, 30 bp, Artificial Sequence
  Synthetic oligonucleotide
aatgggtgcccattatggctctggatgctc

SEQ ID NO: 218355 - DNA, 30 bp, Artificial Sequence
  Synthetic oligonucleotide
aggacattgattaaaaacgagcctatgctc

SEQ ID NO: 218356 - DNA, 30 bp, Artificial Sequence
  Synthetic oligonucleotide
cgcatggggtagccagcagtgggtatgctc

SEQ ID NO: 218357 - DNA, 30 bp, Artificial Sequence
  Synthetic oligonucleotide
cccacccaccggaggatgggatttatgctc

SEQ ID NO: 218358 - DNA, 30 bp, Artificial Sequence
  Synthetic oligonucleotide
caacgtgagagccacagcattcaactgctc

SEQ ID NO: 218359 - DNA, 31 bp, Artificial Sequence
  Synthetic oligonucleotide
tatgggggcgcgcaggccgatgttactgctc

SEQ ID NO: 218360 - DNA, 31 bp, Artificial Sequence
  Synthetic oligonucleotide
acttgttggcaagaagtcggtcgtcctgctc

SEQ ID NO: 218361 - DNA, 30 bp, Artificial Sequence
  Synthetic oligonucleotide
tgaagccttagtcgcggtagccgagtgctc

SEQ ID NO: 218362 - DNA, 30 bp, Artificial Sequence
  Synthetic oligonucleotide
cttccaatgttgagttgttcgcccgtgctc

SEQ ID NO: 218363 - DNA, 30 bp, Artificial Sequence
  Synthetic oligonucleotide
gcaagggtttacggagaaagcggcgtgctc

SEQ ID NO: 218364 - DNA, 30 bp, Artificial Sequence
  Synthetic oligonucleotide
ctccacgcgtctgatacggcgagggtgctc

SEQ ID NO: 218365 - DNA, 30 bp, Artificial Sequence
  Synthetic oligonucleotide
tcgaatgaatattccggaaatgtggtgctc

SEQ ID NO: 218366 - DNA, 30 bp, Artificial Sequence
  Synthetic oligonucleotide
cctctgcgtataaaatacaatactgtgctc

SEQ ID NO: 218367 - DNA, 30 bp, Artificial Sequence
  Synthetic oligonucleotide
gcgtcatgctcggacgcaagtgctgtgctc

SEQ ID NO: 218368 - DNA, 30 bp, Artificial Sequence
  Synthetic oligonucleotide
aatgaaaccggggttactagaagattgctc

SEQ ID NO: 218369 - DNA, 30 bp, Artificial Sequence
  Synthetic oligonucleotide
ttagatactggacacattccttgattgctc

SEQ ID NO: 218370 - DNA, 30 bp, Artificial Sequence
  Synthetic oligonucleotide
ctggaactctgtcaccaaattgaaaatctc

SEQ ID NO: 218371 - DNA, 30 bp, Artificial Sequence
  Synthetic oligonucleotide
gtcaggaccgaatttagcactgtaaatctc

SEQ ID NO: 218372 - DNA, 30 bp, Artificial Sequence
  Synthetic oligonucleotide
acagtctgcttaaactagctccacaatctc

SEQ ID NO: 218373 - DNA, 30 bp, Artificial Sequence
  Synthetic oligonucleotide
atcagagtggggaacccgaaaaagaatctc

SEQ ID NO: 218374 - DNA, 30 bp, Artificial Sequence
  Synthetic oligonucleotide
taatttaactgtcaggcaaaggaacatctc

SEQ ID NO: 218375 - DNA, 30 bp, Artificial Sequence
  Synthetic oligonucleotide
ttggagagtatggtagatccgacccatctc

SEQ ID NO: 218376 - DNA, 30 bp, Artificial Sequence
  Synthetic oligonucleotide
agtaggacagctctaaaaatggtctatctc

SEQ ID NO: 218377 - DNA, 30 bp, Artificial Sequence
  Synthetic oligonucleotide
gaagtagaggaacttgcgtggtggtatctc

SEQ ID NO: 218378 - DNA, 30 bp, Artificial Sequence
  Synthetic oligonucleotide
gcgcctgcttacggtgcctaggtcactctc

SEQ ID NO: 218379 - DNA, 30 bp, Artificial Sequence
  Synthetic oligonucleotide
tgaacacaattgaggaccgggggccctctc

SEQ ID NO: 218380 - DNA, 30 bp, Artificial Sequence
  Synthetic oligonucleotide
gagtcatacttaaattgttggcctcctctc

SEQ ID NO: 218381 - DNA, 30 bp, Artificial Sequence
  Synthetic oligonucleotide
tcttccgatgcatctgtctggagcgctctc

SEQ ID NO: 218382 - DNA, 30 bp, Artificial Sequence
  Synthetic oligonucleotide
ggtgacatccagcgccgatagccggctctc

SEQ ID NO: 218383 - DNA, 30 bp, Artificial Sequence
  Synthetic oligonucleotide
aggtcttgtctcacccacatcgaatctctc

SEQ ID NO: 218384 - DNA, 30 bp, Artificial Sequence
  Synthetic oligonucleotide
tgggggagatgatcatggaaagtatctctc

SEQ ID NO: 218385 - DNA, 30 bp, Artificial Sequence
  Synthetic oligonucleotide
agatttatagcggaagttgtttactctctc

SEQ ID NO: 218386 - DNA, 30 bp, Artificial Sequence
  Synthetic oligonucleotide
cgggcacaatacagtctgatcatctctctc

SEQ ID NO: 218387 - DNA, 30 bp, Artificial Sequence
  Synthetic oligonucleotide
atgcgtgcaaagcgagtggcattctctctc

SEQ ID NO: 218388 - DNA, 30 bp, Artificial Sequence
  Synthetic oligonucleotide
aaggacgattcctaagtggacgagtctctc

SEQ ID NO: 218389 - DNA, 30 bp, Artificial Sequence
  Synthetic oligonucleotide
gacaaaggaggtttcaccagattgtctctc

SEQ ID NO: 218390 - DNA, 30 bp, Artificial Sequence
  Synthetic oligonucleotide
ctaagtctgtcgggaacgttgtaaagtctc

SEQ ID NO: 218391 - DNA, 30 bp, Artificial Sequence
  Synthetic oligonucleotide
taatcacacgtatgtgataacttcagtctc

SEQ ID NO: 218392 - DNA, 30 bp, Artificial Sequence
  Synthetic oligonucleotide
caggattagctttcgatagaatagagtctc

SEQ ID NO: 218393 - DNA, 30 bp, Artificial Sequence
  Synthetic oligonucleotide
tgggccacttctatgtctgtgaggagtctc

SEQ ID NO: 218394 - DNA, 30 bp, Artificial Sequence
  Synthetic oligonucleotide
tgagcgtatttcactaggggtacccgtctc

SEQ ID NO: 218395 - DNA, 30 bp, Artificial Sequence
  Synthetic oligonucleotide
ccccatcaaaagcgacttaaagaaggtctc

SEQ ID NO: 218396 - DNA, 30 bp, Artificial Sequence
  Synthetic oligonucleotide
gcaactaaacggatcgatccaccaggtctc

SEQ ID NO: 218397 - DNA, 30 bp, Artificial Sequence
  Synthetic oligonucleotide
tccagggtccaggagggtccgcacggtctc

SEQ ID NO: 218398 - DNA, 30 bp, Artificial Sequence
  Synthetic oligonucleotide
gtgagagttcaaagacagaactaatgtctc

SEQ ID NO: 218399 - DNA, 30 bp, Artificial Sequence
  Synthetic oligonucleotide
tcaatcaagtgggcatgttggagatgtctc

SEQ ID NO: 218400 - DNA, 30 bp, Artificial Sequence
  Synthetic oligonucleotide
tgctggcacttgagtccatgtggaattctc

SEQ ID NO: 218401 - DNA, 30 bp, Artificial Sequence
  Synthetic oligonucleotide
gcaaccgcgatcctcaaggactggattctc

SEQ ID NO: 218402 - DNA, 30 bp, Artificial Sequence
  Synthetic oligonucleotide
cagggagaagtaccggtttcgcttattctc

SEQ ID NO: 218403 - DNA, 30 bp, Artificial Sequence
  Synthetic oligonucleotide
atagtgttagctgaaacgggtgggcttctc

SEQ ID NO: 218404 - DNA, 30 bp, Artificial Sequence
  Synthetic oligonucleotide
tttctacctggggggttaactgccgttctc

SEQ ID NO: 218405 - DNA, 30 bp, Artificial Sequence
  Synthetic oligonucleotide
cggcgcaggtcggttcacgatcgggttctc

SEQ ID NO: 218406 - DNA, 30 bp, Artificial Sequence
  Synthetic oligonucleotide
atggcagctcgctgagagcggatggttctc

SEQ ID NO: 218407 - DNA, 30 bp, Artificial Sequence
  Synthetic oligonucleotide
cgattaatatgtcaccagcagggatttctc

SEQ ID NO: 218408 - DNA, 30 bp, Artificial Sequence
  Synthetic oligonucleotide
gtggaatgcgagacgttgacagcgtttctc

SEQ ID NO: 218409 - DNA, 30 bp, Artificial Sequence
  Synthetic oligonucleotide
catgaggggagtatgagacgctcaaaagtc

SEQ ID NO: 218410 - DNA, 30 bp, Artificial Sequence
  Synthetic oligonucleotide
tgccagatagcaagaactttaaacaaagtc

SEQ ID NO: 218411 - DNA, 30 bp, Artificial Sequence
  Synthetic oligonucleotide
aaaatactcatcaatatacaaaccaaagtc

SEQ ID NO: 218412 - DNA, 30 bp, Artificial Sequence
  Synthetic oligonucleotide
tcaagatggcacacaggatatcagaaagtc

SEQ ID NO: 218413 - DNA, 30 bp, Artificial Sequence
  Synthetic oligonucleotide
ttgatcatgtgagtgcccggggttaaagtc

SEQ ID NO: 218414 - DNA, 30 bp, Artificial Sequence
  Synthetic oligonucleotide
gtccaaggtggtacttctcgttttaaagtc

SEQ ID NO: 218415 - DNA, 30 bp, Artificial Sequence
  Synthetic oligonucleotide
taacttagtcttttctaatgtaaacaagtc

SEQ ID NO: 218416 - DNA, 30 bp, Artificial Sequence
  Synthetic oligonucleotide
ctatggttgtctatagctagaggccaagtc

SEQ ID NO: 218417 - DNA, 30 bp, Artificial Sequence
  Synthetic oligonucleotide
gcggtcccgcagagagatgacatccaagtc

SEQ ID NO: 218418 - DNA, 30 bp, Artificial Sequence
  Synthetic oligonucleotide
actgaagttcgtctccatcaggtccaagtc

SEQ ID NO: 218419 - DNA, 30 bp, Artificial Sequence
  Synthetic oligonucleotide
acgacagacttacatctgtcatagcaagtc

SEQ ID NO: 218420 - DNA, 30 bp, Artificial Sequence
  Synthetic oligonucleotide
gtgttcccacagcgtaatagggcgcaagtc

SEQ ID NO: 218421 - DNA, 30 bp, Artificial Sequence
  Synthetic oligonucleotide
taacgctgccgaagagttcgggggcaagtc

SEQ ID NO: 218422 - DNA, 30 bp, Artificial Sequence
  Synthetic oligonucleotide
taaaattagaccgtagtggtaagagaagtc

SEQ ID NO: 218423 - DNA, 30 bp, Artificial Sequence
  Synthetic oligonucleotide
cgagtttagctaggtatcactagagaagtc

SEQ ID NO: 218424 - DNA, 31 bp, Artificial Sequence
  Synthetic oligonucleotide
agcggcacgaccacgcgcaggagtagaagtc

SEQ ID NO: 218425 - DNA, 30 bp, Artificial Sequence
  Synthetic oligonucleotide
atctcatgcagaggtgtggcatgcgaagtc

SEQ ID NO: 218426 - DNA, 30 bp, Artificial Sequence
  Synthetic oligonucleotide
atgaacgcgcatctttacagtaaggaagtc

SEQ ID NO: 218427 - DNA, 30 bp, Artificial Sequence
  Synthetic oligonucleotide
ggccgtttcgggtcttgttacggggaagtc

SEQ ID NO: 218428 - DNA, 31 bp, Artificial Sequence
  Synthetic oligonucleotide
atttaggccatcgtaaagccagccataagtc

SEQ ID NO: 218429 - DNA, 30 bp, Artificial Sequence
  Synthetic oligonucleotide
ggtcaaggtaggctgttataaaaaacagtc

SEQ ID NO: 218430 - DNA, 30 bp, Artificial Sequence
  Synthetic oligonucleotide
aatattaccaggggtcccattgaaacagtc

SEQ ID NO: 218431 - DNA, 30 bp, Artificial Sequence
  Synthetic oligonucleotide
acgtgaaggttaaagccacgtttaacagtc

SEQ ID NO: 218432 - DNA, 30 bp, Artificial Sequence
  Synthetic oligonucleotide
ctaagggggctgaacagtgaccacacagtc

SEQ ID NO: 218433 - DNA, 30 bp, Artificial Sequence
  Synthetic oligonucleotide
ccgagagtgcaagacacttgtgtcacagtc

SEQ ID NO: 218434 - DNA, 30 bp, Artificial Sequence
  Synthetic oligonucleotide
gttcatcgatttaatactacatcgacagtc

SEQ ID NO: 218435 - DNA, 30 bp, Artificial Sequence
  Synthetic oligonucleotide
tcaatctctccttgaatcacaaggacagtc

SEQ ID NO: 218436 - DNA, 30 bp, Artificial Sequence
  Synthetic oligonucleotide
aaggcgggggtaaccatgccttggacagtc

SEQ ID NO: 218437 - DNA, 30 bp, Artificial Sequence
  Synthetic oligonucleotide
ttcggatgtctttaagattcctgaccagtc

SEQ ID NO: 218438 - DNA, 30 bp, Artificial Sequence
  Synthetic oligonucleotide
gtggtcgacttttatcttcaatccccagtc

SEQ ID NO: 218439 - DNA, 30 bp, Artificial Sequence
  Synthetic oligonucleotide
ggactcaaatgtcaacgtttccgcccagtc

SEQ ID NO: 218440 - DNA, 30 bp, Artificial Sequence
  Synthetic oligonucleotide
aaggaccttgatgaaccaaaggtcccagtc

SEQ ID NO: 218441 - DNA, 30 bp, Artificial Sequence
  Synthetic oligonucleotide
cggtttctagaatttcgcttcaggccagtc

SEQ ID NO: 218442 - DNA, 30 bp, Artificial Sequence
  Synthetic oligonucleotide
acaaggcctatcgagggggcttggccagtc

SEQ ID NO: 218443 - DNA, 30 bp, Artificial Sequence
  Synthetic oligonucleotide
tcgtcgcgtcctgttgagtgggtgccagtc

SEQ ID NO: 218444 - DNA, 30 bp, Artificial Sequence
  Synthetic oligonucleotide
gataagaccgagggtccccaacgtccagtc

SEQ ID NO: 218445 - DNA, 30 bp, Artificial Sequence
  Synthetic oligonucleotide
gaaagacgaaaatatccctctcgcgcagtc

SEQ ID NO: 218446 - DNA, 30 bp, Artificial Sequence
  Synthetic oligonucleotide
cgtgtcttggcatgcccagtattcgcagtc

SEQ ID NO: 218447 - DNA, 30 bp, Artificial Sequence
  Synthetic oligonucleotide
ggagctgctcgattataacaaaaggcagtc

SEQ ID NO: 218448 - DNA, 30 bp, Artificial Sequence
  Synthetic oligonucleotide
ctcaacgtgttagacgtgaaacaggcagtc

SEQ ID NO: 218449 - DNA, 30 bp, Artificial Sequence
  Synthetic oligonucleotide
atgatgcatatgttagtgtaacctgcagtc

SEQ ID NO: 218450 - DNA, 30 bp, Artificial Sequence
  Synthetic oligonucleotide
cgggctaacatctaaggggtgtctgcagtc

SEQ ID NO: 218451 - DNA, 30 bp, Artificial Sequence
  Synthetic oligonucleotide
tagtgctggtcagatattcagcgctcagtc

SEQ ID NO: 218452 - DNA, 30 bp, Artificial Sequence
  Synthetic oligonucleotide
ggtgccgatcaggcggaacgccagtcagtc

SEQ ID NO: 218453 - DNA, 30 bp, Artificial Sequence
  Synthetic oligonucleotide
gcaagaaacctccggatatatgaaagagtc

SEQ ID NO: 218454 - DNA, 30 bp, Artificial Sequence
  Synthetic oligonucleotide
attactttagccattgccgatccaagagtc

SEQ ID NO: 218455 - DNA, 30 bp, Artificial Sequence
  Synthetic oligonucleotide
atagatgaagaattcagaaaagccagagtc

SEQ ID NO: 218456 - DNA, 30 bp, Artificial Sequence
  Synthetic oligonucleotide
aatgactttggcaacacaggatagagagtc

SEQ ID NO: 218457 - DNA, 30 bp, Artificial Sequence
  Synthetic oligonucleotide
ccggaaaacccacagcatcatgcgagagtc

SEQ ID NO: 218458 - DNA, 30 bp, Artificial Sequence
  Synthetic oligonucleotide
tcatgcacaactcaggagttcgttagagtc

SEQ ID NO: 218459 - DNA, 30 bp, Artificial Sequence
  Synthetic oligonucleotide
aaaggacggtttcgggtaagggaacgagtc

SEQ ID NO: 218460 - DNA, 30 bp, Artificial Sequence
  Synthetic oligonucleotide
agatggcttgttcaactttcctcgcgagtc

SEQ ID NO: 218461 - DNA, 30 bp, Artificial Sequence
  Synthetic oligonucleotide
gtactgctgaacgaataacgaagtcgagtc

SEQ ID NO: 218462 - DNA, 30 bp, Artificial Sequence
  Synthetic oligonucleotide
gcgcaagccatctgacagtccttcggagtc

SEQ ID NO: 218463 - DNA, 30 bp, Artificial Sequence
  Synthetic oligonucleotide
actgacgaatccacgttattgtgatgagtc

SEQ ID NO: 218464 - DNA, 30 bp, Artificial Sequence
  Synthetic oligonucleotide
tcgtgggaggcggattaaaagatctgagtc

SEQ ID NO: 218465 - DNA, 30 bp, Artificial Sequence
  Synthetic oligonucleotide
cctccctcaaccgatgccacgaattgagtc

SEQ ID NO: 218466 - DNA, 30 bp, Artificial Sequence
  Synthetic oligonucleotide
gggaatatgcaaccattgccaggttgagtc

SEQ ID NO: 218467 - DNA, 30 bp, Artificial Sequence
  Synthetic oligonucleotide
actagagagggcgaaaaactaccaatagtc

SEQ ID NO: 218468 - DNA, 30 bp, Artificial Sequence
  Synthetic oligonucleotide
caacattccacaattactgtcctaatagtc

SEQ ID NO: 218469 - DNA, 30 bp, Artificial Sequence
  Synthetic oligonucleotide
tcatgccccatgtcgtaagcgagcatagtc

SEQ ID NO: 218470 - DNA, 30 bp, Artificial Sequence
  Synthetic oligonucleotide
ctcgtggaccgaagtagggttcttatagtc

SEQ ID NO: 218471 - DNA, 30 bp, Artificial Sequence
  Synthetic oligonucleotide
cccttataataagggtctgggactgtagtc

SEQ ID NO: 218472 - DNA, 30 bp, Artificial Sequence
  Synthetic oligonucleotide
aaaagaactgttagggcacgaagtgtagtc

SEQ ID NO: 218473 - DNA, 30 bp, Artificial Sequence
  Synthetic oligonucleotide
tgaaattgtttgttagaagatagcttagtc

SEQ ID NO: 218474 - DNA, 30 bp, Artificial Sequence
  Synthetic oligonucleotide
ttccccacgatagatcaaggcgcaaacgtc

SEQ ID NO: 218475 - DNA, 30 bp, Artificial Sequence
  Synthetic oligonucleotide
tagcaagtcatgcgcacaacaggcaacgtc

SEQ ID NO: 218476 - DNA, 30 bp, Artificial Sequence
  Synthetic oligonucleotide
gagggttaacccgtaaaacatgggaacgtc

SEQ ID NO: 218477 - DNA, 30 bp, Artificial Sequence
  Synthetic oligonucleotide
ccgtactgcgatctgaattagaataacgtc

SEQ ID NO: 218478 - DNA, 30 bp, Artificial Sequence
  Synthetic oligonucleotide
ggtctacacacattgtcttggaataacgtc

SEQ ID NO: 218479 - DNA, 30 bp, Artificial Sequence
  Synthetic oligonucleotide
gatgtaatgtgattacggcacggtaacgtc

SEQ ID NO: 218480 - DNA, 30 bp, Artificial Sequence
  Synthetic oligonucleotide
agaccgtaaagtcgactgtgtgaccacgtc

SEQ ID NO: 218481 - DNA, 30 bp, Artificial Sequence
  Synthetic oligonucleotide
cccgactcccagaaactagttgaccacgtc

SEQ ID NO: 218482 - DNA, 30 bp, Artificial Sequence
  Synthetic oligonucleotide
gcgactggacagccgaacgcgagccacgtc

SEQ ID NO: 218483 - DNA, 30 bp, Artificial Sequence
  Synthetic oligonucleotide
cgaacgagatccggcatagcgttccacgtc

SEQ ID NO: 218484 - DNA, 30 bp, Artificial Sequence
  Synthetic oligonucleotide
caaatggtcaataccatgcgtagcgacgtc

SEQ ID NO: 218485 - DNA, 30 bp, Artificial Sequence
  Synthetic oligonucleotide
tgagattgtcacaaggacgtttcggacgtc

SEQ ID NO: 218486 - DNA, 30 bp, Artificial Sequence
  Synthetic oligonucleotide
ctatcctgtgcgccgacttagcgtgacgtc

SEQ ID NO: 218487 - DNA, 30 bp, Artificial Sequence
  Synthetic oligonucleotide
ggaagctccattaggccggcatgtgacgtc

SEQ ID NO: 218488 - DNA, 30 bp, Artificial Sequence
  Synthetic oligonucleotide
catctacggatcgggccttcgcaatacgtc

SEQ ID NO: 218489 - DNA, 30 bp, Artificial Sequence
  Synthetic oligonucleotide
gaacctaatccatgtccaaggtaatacgtc

SEQ ID NO: 218490 - DNA, 30 bp, Artificial Sequence
  Synthetic oligonucleotide
gcagttagatcggaagtgtgtccatacgtc

SEQ ID NO: 218491 - DNA, 30 bp, Artificial Sequence
  Synthetic oligonucleotide
cctgtgggaaatcgacctatgtgatacgtc

SEQ ID NO: 218492 - DNA, 30 bp, Artificial Sequence
  Synthetic oligonucleotide
cggggtttggatgactagagactatacgtc

SEQ ID NO: 218493 - DNA, 30 bp, Artificial Sequence
  Synthetic oligonucleotide
acccgtaataattgcataagtctatacgtc

SEQ ID NO: 218494 - DNA, 30 bp, Artificial Sequence
  Synthetic oligonucleotide
tgtgctgggactgaaaggcacgagtacgtc

SEQ ID NO: 218495 - DNA, 30 bp, Artificial Sequence
  Synthetic oligonucleotide
taaaatccatacaggacttggtagaccgtc

SEQ ID NO: 218496 - DNA, 30 bp, Artificial Sequence
  Synthetic oligonucleotide
gtggtgttatgtgatgtaatacgtaccgtc

SEQ ID NO: 218497 - DNA, 30 bp, Artificial Sequence
  Synthetic oligonucleotide
tagtttaatttgtgtataaatggtaccgtc

SEQ ID NO: 218498 - DNA, 30 bp, Artificial Sequence
  Synthetic oligonucleotide
gacgcgggctgcgtaggataattacccgtc

SEQ ID NO: 218499 - DNA, 30 bp, Artificial Sequence
  Synthetic oligonucleotide
tgagagaaatataggcccctctgccccgtc

SEQ ID NO: 218500 - DNA, 30 bp, Artificial Sequence
  Synthetic oligonucleotide
attggtagctcctatgcggtgtgccccgtc

SEQ ID NO: 218501 - DNA, 30 bp, Artificial Sequence
  Synthetic oligonucleotide
gaatagagcatatacaggccgaccgccgtc

SEQ ID NO: 218502 - DNA, 30 bp, Artificial Sequence
  Synthetic oligonucleotide
cttgtacccgcgtcactgtttggatccgtc

SEQ ID NO: 218503 - DNA, 30 bp, Artificial Sequence
  Synthetic oligonucleotide
tcgccggccacgtgtagtttggagtccgtc

SEQ ID NO: 218504 - DNA, 30 bp, Artificial Sequence
  Synthetic oligonucleotide
ccccacgggttttggtggtagtcgtccgtc

SEQ ID NO: 218505 - DNA, 30 bp, Artificial Sequence
  Synthetic oligonucleotide
tagaacaatatggaatctatattaagcgtc

SEQ ID NO: 218506 - DNA, 30 bp, Artificial Sequence
  Synthetic oligonucleotide
tcgttatatcttggcccgtccgtcagcgtc

SEQ ID NO: 218507 - DNA, 30 bp, Artificial Sequence
  Synthetic oligonucleotide
gccgcatacttgggctttatcgttagcgtc

SEQ ID NO: 218508 - DNA, 30 bp, Artificial Sequence
  Synthetic oligonucleotide
agcgtaaatgtacctgtactggatcgcgtc

SEQ ID NO: 218509 - DNA, 30 bp, Artificial Sequence
  Synthetic oligonucleotide
tataaatgtagattaatatccggaggcgtc

SEQ ID NO: 218510 - DNA, 30 bp, Artificial Sequence
  Synthetic oligonucleotide
tgcagtgtcgaacagcacctcataggcgtc

SEQ ID NO: 218511 - DNA, 30 bp, Artificial Sequence
  Synthetic oligonucleotide
ttaccccctgtttgtcaatcatcgggcgtc

SEQ ID NO: 218512 - DNA, 30 bp, Artificial Sequence
  Synthetic oligonucleotide
ttacaatagacacaggctatcttgggcgtc

SEQ ID NO: 218513 - DNA, 30 bp, Artificial Sequence
  Synthetic oligonucleotide
atgcatgaggagtatttgcgttgtggcgtc

SEQ ID NO: 218514 - DNA, 30 bp, Artificial Sequence
  Synthetic oligonucleotide
tgagatggtacctgacggtgagaatgcgtc

SEQ ID NO: 218515 - DNA, 30 bp, Artificial Sequence
  Synthetic oligonucleotide
tactgagagatacggttttcgatatgcgtc

SEQ ID NO: 218516 - DNA, 30 bp, Artificial Sequence
  Synthetic oligonucleotide
atttgttaactatacacggggaattgcgtc

SEQ ID NO: 218517 - DNA, 30 bp, Artificial Sequence
  Synthetic oligonucleotide
ccgaggtgatagtccggcccaggttgcgtc

SEQ ID NO: 218518 - DNA, 30 bp, Artificial Sequence
  Synthetic oligonucleotide
actcagaggactggtccataccacatcgtc

SEQ ID NO: 218519 - DNA, 30 bp, Artificial Sequence
  Synthetic oligonucleotide
aggctcccaccggtataatcatccatcgtc

SEQ ID NO: 218520 - DNA, 30 bp, Artificial Sequence
  Synthetic oligonucleotide
caagactgggcatgattgacagagatcgtc

SEQ ID NO: 218521 - DNA, 30 bp, Artificial Sequence
  Synthetic oligonucleotide
tagaaagtccacttgggtaggtgtatcgtc

SEQ ID NO: 218522 - DNA, 30 bp, Artificial Sequence
  Synthetic oligonucleotide
ccatacgctccctgaagtgattccctcgtc

SEQ ID NO: 218523 - DNA, 30 bp, Artificial Sequence
  Synthetic oligonucleotide
gtaacaccccatgagcttaatttcctcgtc

SEQ ID NO: 218524 - DNA, 30 bp, Artificial Sequence
  Synthetic oligonucleotide
cactcctacgttctgaaatcggagctcgtc

SEQ ID NO: 218525 - DNA, 30 bp, Artificial Sequence
  Synthetic oligonucleotide
ttcgtgccagataaggattgctggctcgtc

SEQ ID NO: 218526 - DNA, 30 bp, Artificial Sequence
  Synthetic oligonucleotide
tctccgtttagctcgcgcttaggtctcgtc

SEQ ID NO: 218527 - DNA, 31 bp, Artificial Sequence
  Synthetic oligonucleotide
tagtcggtttcagatccggaaatgagtcgtc

SEQ ID NO: 218528 - DNA, 30 bp, Artificial Sequence
  Synthetic oligonucleotide
ctgaaagtttgacagacgtcaagtgtcgtc

SEQ ID NO: 218529 - DNA, 30 bp, Artificial Sequence
  Synthetic oligonucleotide
gcaaatgaagattccattcacattgtcgtc

SEQ ID NO: 218530 - DNA, 30 bp, Artificial Sequence
  Synthetic oligonucleotide
tgtatccatcaggtacctgtccacttcgtc

SEQ ID NO: 218531 - DNA, 30 bp, Artificial Sequence
  Synthetic oligonucleotide
gagtaatgtactgagtttacatgcttcgtc

SEQ ID NO: 218532 - DNA, 30 bp, Artificial Sequence
  Synthetic oligonucleotide
tatctgaatagacgtggacgggggttcgtc

SEQ ID NO: 218533 - DNA, 30 bp, Artificial Sequence
  Synthetic oligonucleotide
aggccttgtacgtacaacaacctgttcgtc

SEQ ID NO: 218534 - DNA, 30 bp, Artificial Sequence
  Synthetic oligonucleotide
gtctcaacagggtaaagctcatatttcgtc

SEQ ID NO: 218535 - DNA, 30 bp, Artificial Sequence
  Synthetic oligonucleotide
tacgcccgcgagattggggcaagaaaggtc

SEQ ID NO: 218536 - DNA, 30 bp, Artificial Sequence
  Synthetic oligonucleotide
cgtcctggtttactcagtaaggtaaaggtc

SEQ ID NO: 218537 - DNA, 30 bp, Artificial Sequence
  Synthetic oligonucleotide
gtgagagggcccgggtgagcggacaaggtc

SEQ ID NO: 218538 - DNA, 30 bp, Artificial Sequence
  Synthetic oligonucleotide
agtctgaaataggctttgcgctggaaggtc

SEQ ID NO: 218539 - DNA, 30 bp, Artificial Sequence
  Synthetic oligonucleotide
tagtatggaccgtcagacgtaatgaaggtc

SEQ ID NO: 218540 - DNA, 30 bp, Artificial Sequence
  Synthetic oligonucleotide
gtgatcctaggttagtgaataactaaggtc

SEQ ID NO: 218541 - DNA, 30 bp, Artificial Sequence
  Synthetic oligonucleotide
agcaaggcctcttgacaaggttcacaggtc

SEQ ID NO: 218542 - DNA, 30 bp, Artificial Sequence
  Synthetic oligonucleotide
cacataagcgaatgcttgccagaccaggtc

SEQ ID NO: 218543 - DNA, 30 bp, Artificial Sequence
  Synthetic oligonucleotide
taaatgggtggaaacataggtggccaggtc

SEQ ID NO: 218544 - DNA, 30 bp, Artificial Sequence
  Synthetic oligonucleotide
agtactaaaccaatggaaacgtagcaggtc

SEQ ID NO: 218545 - DNA, 30 bp, Artificial Sequence
  Synthetic oligonucleotide
agctcatcatcacttggagtagtgcaggtc

SEQ ID NO: 218546 - DNA, 30 bp, Artificial Sequence
  Synthetic oligonucleotide
ccattagctcaagaggtgctggctcaggtc

SEQ ID NO: 218547 - DNA, 30 bp, Artificial Sequence
  Synthetic oligonucleotide
aacggatggtattgcacgcggtcagaggtc

SEQ ID NO: 218548 - DNA, 30 bp, Artificial Sequence
  Synthetic oligonucleotide
acggtgggcgattaaagaacgttagaggtc

SEQ ID NO: 218549 - DNA, 30 bp, Artificial Sequence
  Synthetic oligonucleotide
tcggtgcgcgaatagtgaggaggcgaggtc

SEQ ID NO: 218550 - DNA, 30 bp, Artificial Sequence
  Synthetic oligonucleotide
ttgataggtgcgcaaaataatcttgaggtc

SEQ ID NO: 218551 - DNA, 30 bp, Artificial Sequence
  Synthetic oligonucleotide
atagaaaatcacggggtaccgcaataggtc

SEQ ID NO: 218552 - DNA, 30 bp, Artificial Sequence
  Synthetic oligonucleotide
gacatcgcagagcatctagtctgctaggtc

SEQ ID NO: 218553 - DNA, 30 bp, Artificial Sequence
  Synthetic oligonucleotide
gtggcattgatcgatgtttaagcttaggtc

SEQ ID NO: 218554 - DNA, 30 bp, Artificial Sequence
  Synthetic oligonucleotide
cgatccaggaggcgatcgcagtgcacggtc

SEQ ID NO: 218555 - DNA, 30 bp, Artificial Sequence
  Synthetic oligonucleotide
cagtaggtcacacgctcgtagtgcacggtc

SEQ ID NO: 218556 - DNA, 30 bp, Artificial Sequence
  Synthetic oligonucleotide
gaaagtaaacgtacgaacgggatcacggtc

SEQ ID NO: 218557 - DNA, 30 bp, Artificial Sequence
  Synthetic oligonucleotide
attcgaacaaataaaatcgcgacgacggtc

SEQ ID NO: 218558 - DNA, 30 bp, Artificial Sequence
  Synthetic oligonucleotide
acagtccgtgtcaacaagcggtggacggtc

SEQ ID NO: 218559 - DNA, 30 bp, Artificial Sequence
  Synthetic oligonucleotide
gtcgtaaggtgcgttagatctatcccggtc

SEQ ID NO: 218560 - DNA, 30 bp, Artificial Sequence
  Synthetic oligonucleotide
aatgcgtgtcccgcagcttagcagccggtc

SEQ ID NO: 218561 - DNA, 30 bp, Artificial Sequence
  Synthetic oligonucleotide
gagaggccgatctttaaatagaaagcggtc

SEQ ID NO: 218562 - DNA, 30 bp, Artificial Sequence
  Synthetic oligonucleotide
tcctaactaggacaaacaaaggaggcggtc

SEQ ID NO: 218563 - DNA, 30 bp, Artificial Sequence
  Synthetic oligonucleotide
gtccgaaataaatatcgtacgaatgcggtc

SEQ ID NO: 218564 - DNA, 30 bp, Artificial Sequence
  Synthetic oligonucleotide
atctttcaatggcggtaaccgaatgcggtc

SEQ ID NO: 218565 - DNA, 30 bp, Artificial Sequence
  Synthetic oligonucleotide
ctaacacgtatgtagcgttcatgtgcggtc

SEQ ID NO: 218566 - DNA, 30 bp, Artificial Sequence
  Synthetic oligonucleotide
gcatgagccccccttcgtgtatactcggtc

SEQ ID NO: 218567 - DNA, 30 bp, Artificial Sequence
  Synthetic oligonucleotide
gttaagactggttgcaaagagctgtcggtc

SEQ ID NO: 218568 - DNA, 30 bp, Artificial Sequence
  Synthetic oligonucleotide
accaatgggcatacccagaggagaagggtc

SEQ ID NO: 218569 - DNA, 30 bp, Artificial Sequence
  Synthetic oligonucleotide
gcaggagagttgctctggttgcgaagggtc

SEQ ID NO: 218570 - DNA, 30 bp, Artificial Sequence
  Synthetic oligonucleotide
tttacggtccatttcagctattcgagggtc

SEQ ID NO: 218571 - DNA, 30 bp, Artificial Sequence
  Synthetic oligonucleotide
tggttcagagtagaactgtcacaaggggtc

SEQ ID NO: 218572 - DNA, 30 bp, Artificial Sequence
  Synthetic oligonucleotide
tcgggaatgaggagacagaggcagggggtc

SEQ ID NO: 218573 - DNA, 30 bp, Artificial Sequence
  Synthetic oligonucleotide
agaaactcgttggtgatcattactggggtc

SEQ ID NO: 218574 - DNA, 30 bp, Artificial Sequence
  Synthetic oligonucleotide
aagacttctaaactaacgtccaattgggtc

SEQ ID NO: 218575 - DNA, 30 bp, Artificial Sequence
  Synthetic oligonucleotide
tccagatgaatacttagttcacacatggtc

SEQ ID NO: 218576 - DNA, 30 bp, Artificial Sequence
  Synthetic oligonucleotide
tagattatcggcaacctattatacatggtc

SEQ ID NO: 218577 - DNA, 30 bp, Artificial Sequence
  Synthetic oligonucleotide
gagatagtatacttatatgcgaagatggtc

SEQ ID NO: 218578 - DNA, 30 bp, Artificial Sequence
  Synthetic oligonucleotide
ctgaacatgtaccgattggctaagatggtc

SEQ ID NO: 218579 - DNA, 30 bp, Artificial Sequence
  Synthetic oligonucleotide
gcagcttcacggggtaggattcagatggtc

SEQ ID NO: 218580 - DNA, 30 bp, Artificial Sequence
  Synthetic oligonucleotide
gactggacggaacccgaaccattgatggtc

SEQ ID NO: 218581 - DNA, 30 bp, Artificial Sequence
  Synthetic oligonucleotide
tgtatggaaaataagattttgaatatggtc

SEQ ID NO: 218582 - DNA, 30 bp, Artificial Sequence
  Synthetic oligonucleotide
gttaacgcgtaatagcgcaagggtatggtc

SEQ ID NO: 218583 - DNA, 30 bp, Artificial Sequence
  Synthetic oligonucleotide
gttgacggatgttaaatccaatgtatggtc

SEQ ID NO: 218584 - DNA, 30 bp, Artificial Sequence
  Synthetic oligonucleotide
aggcaccggattaaagtacagctactggtc

SEQ ID NO: 218585 - DNA, 30 bp, Artificial Sequence
  Synthetic oligonucleotide
gggtaaccatccatgacgcctgctctggtc

SEQ ID NO: 218586 - DNA, 30 bp, Artificial Sequence
  Synthetic oligonucleotide
atagtacatcgttagctcgcaaaagtggtc

SEQ ID NO: 218587 - DNA, 30 bp, Artificial Sequence
  Synthetic oligonucleotide
cgctcaccgaatgattataccaaagtggtc

SEQ ID NO: 218588 - DNA, 30 bp, Artificial Sequence
  Synthetic oligonucleotide
tagccgtgttaccataccgataaagtggtc

SEQ ID NO: 218589 - DNA, 30 bp, Artificial Sequence
  Synthetic oligonucleotide
tactgatgactacaagtgtcacaagtggtc

SEQ ID NO: 218590 - DNA, 30 bp, Artificial Sequence
  Synthetic oligonucleotide
tcccattagtactcgggggaatgagtggtc

SEQ ID NO: 218591 - DNA, 30 bp, Artificial Sequence
  Synthetic oligonucleotide
ctcctctcataacgacgtaaaaccgtggtc

SEQ ID NO: 218592 - DNA, 30 bp, Artificial Sequence
  Synthetic oligonucleotide
cgacgtcaacgaaaagatccacaggtggtc

SEQ ID NO: 218593 - DNA, 30 bp, Artificial Sequence
  Synthetic oligonucleotide
cgtttccacactgaaactagctaggtggtc

SEQ ID NO: 218594 - DNA, 30 bp, Artificial Sequence
  Synthetic oligonucleotide
gtccgtacagagcgtctgttttgggtggtc

SEQ ID NO: 218595 - DNA, 30 bp, Artificial Sequence
  Synthetic oligonucleotide
aaccgggcatgtcgtggcgggactttggtc

SEQ ID NO: 218596 - DNA, 30 bp, Artificial Sequence
  Synthetic oligonucleotide
tactgcggtcagtaaaggataagtttggtc

SEQ ID NO: 218597 - DNA, 30 bp, Artificial Sequence
  Synthetic oligonucleotide
aagttagtagacaacatgcgctgtttggtc

SEQ ID NO: 218598 - DNA, 30 bp, Artificial Sequence
  Synthetic oligonucleotide
aaatgagatcttccgccaggatgaaatgtc

SEQ ID NO: 218599 - DNA, 29 bp, Artificial Sequence
  Synthetic oligonucleotide
ggaacggacctagatcaaaaataaatgtc

SEQ ID NO: 218600 - DNA, 30 bp, Artificial Sequence
  Synthetic oligonucleotide
aggggacaagccgggagccaccagaatgtc

SEQ ID NO: 218601 - DNA, 30 bp, Artificial Sequence
  Synthetic oligonucleotide
aagacgaatgcgtcgaagtggtcgaatgtc

SEQ ID NO: 218602 - DNA, 30 bp, Artificial Sequence
  Synthetic oligonucleotide
catgctaacagcgtcgcattgcggaatgtc

SEQ ID NO: 218603 - DNA, 30 bp, Artificial Sequence
  Synthetic oligonucleotide
gcgaagggaccattcagtctatgacatgtc

SEQ ID NO: 218604 - DNA, 30 bp, Artificial Sequence
  Synthetic oligonucleotide
caagtttggttgtgtacagcttcagatgtc

SEQ ID NO: 218605 - DNA, 30 bp, Artificial Sequence
  Synthetic oligonucleotide
aagttgaccgtgaactaaccgctagatgtc

SEQ ID NO: 218606 - DNA, 30 bp, Artificial Sequence
  Synthetic oligonucleotide
cattgactatactacgtatatatcgatgtc

SEQ ID NO: 218607 - DNA, 30 bp, Artificial Sequence
  Synthetic oligonucleotide
tagtatgtcaaaccgccactgttggatgtc

SEQ ID NO: 218608 - DNA, 30 bp, Artificial Sequence
  Synthetic oligonucleotide
agataatcaaggaaacgcgtttctgatgtc

SEQ ID NO: 218609 - DNA, 30 bp, Artificial Sequence
  Synthetic oligonucleotide
atgatgttgaggaatagccactcatatgtc

SEQ ID NO: 218610 - DNA, 30 bp, Artificial Sequence
  Synthetic oligonucleotide
ggcaattgtatggaggaggtcaactatgtc

SEQ ID NO: 218611 - DNA, 30 bp, Artificial Sequence
  Synthetic oligonucleotide
acaccatagacttcaagcataacctatgtc

SEQ ID NO: 218612 - DNA, 30 bp, Artificial Sequence
  Synthetic oligonucleotide
gcaggggcaaactcacggagcaagtatgtc

SEQ ID NO: 218613 - DNA, 30 bp, Artificial Sequence
  Synthetic oligonucleotide
tggcggtttagaaacattagaggttatgtc

SEQ ID NO: 218614 - DNA, 30 bp, Artificial Sequence
  Synthetic oligonucleotide
acataagtcgcacgccctcgtatcactgtc

SEQ ID NO: 218615 - DNA, 30 bp, Artificial Sequence
  Synthetic oligonucleotide
ttctcgtcggtcttggtacaactcactgtc

SEQ ID NO: 218616 - DNA, 30 bp, Artificial Sequence
  Synthetic oligonucleotide
acggattagttgatgccactggatactgtc

SEQ ID NO: 218617 - DNA, 30 bp, Artificial Sequence
  Synthetic oligonucleotide
cgtccgcatccgtcattttgcagtactgtc

SEQ ID NO: 218618 - DNA, 31 bp, Artificial Sequence
  Synthetic oligonucleotide
gcactgcatgctcgtcatgcggagtactgtc

SEQ ID NO: 218619 - DNA, 30 bp, Artificial Sequence
  Synthetic oligonucleotide
cgaacatcgcgggcgaatccaatacctgtc

SEQ ID NO: 218620 - DNA, 30 bp, Artificial Sequence
  Synthetic oligonucleotide
agagtcctcacacaagcgaggaatcctgtc

SEQ ID NO: 218621 - DNA, 30 bp, Artificial Sequence
  Synthetic oligonucleotide
caataatcatacgtgtgaggatacgctgtc

SEQ ID NO: 218622 - DNA, 30 bp, Artificial Sequence
  Synthetic oligonucleotide
tagtaacaatgattcacctagcccgctgtc

SEQ ID NO: 218623 - DNA, 30 bp, Artificial Sequence
  Synthetic oligonucleotide
tctgagagaatgatgacagaacaggctgtc

SEQ ID NO: 218624 - DNA, 30 bp, Artificial Sequence
  Synthetic oligonucleotide
ggtctagctgaaggcgtgatacgggctgtc

SEQ ID NO: 218625 - DNA, 30 bp, Artificial Sequence
  Synthetic oligonucleotide
tcggctgccaccactttcgctacatctgtc

SEQ ID NO: 218626 - DNA, 29 bp, Artificial Sequence
  Synthetic oligonucleotide
tattaggacacattacctatgcgtctgtc

SEQ ID NO: 218627 - DNA, 30 bp, Artificial Sequence
  Synthetic oligonucleotide
catactgcaaattggggtagcgggtctgtc

SEQ ID NO: 218628 - DNA, 30 bp, Artificial Sequence
  Synthetic oligonucleotide
tcccgctcatccctcgtatacataagtgtc

SEQ ID NO: 218629 - DNA, 30 bp, Artificial Sequence
  Synthetic oligonucleotide
tagacgtgataaaattcaatgcgcagtgtc

SEQ ID NO: 218630 - DNA, 30 bp, Artificial Sequence
  Synthetic oligonucleotide
cgtaattatagaccgtggcatcagagtgtc

SEQ ID NO: 218631 - DNA, 30 bp, Artificial Sequence
  Synthetic oligonucleotide
aaatcaaatgcgtcacgggcggcgagtgtc

SEQ ID NO: 218632 - DNA, 30 bp, Artificial Sequence
  Synthetic oligonucleotide
gggtcgcagacaaatgaccgcaggagtgtc

SEQ ID NO: 218633 - DNA, 30 bp, Artificial Sequence
  Synthetic oligonucleotide
ataaaatctctaaataacatagctagtgtc

SEQ ID NO: 218634 - DNA, 30 bp, Artificial Sequence
  Synthetic oligonucleotide
agcgtttaatacacgtgggccattagtgtc

SEQ ID NO: 218635 - DNA, 30 bp, Artificial Sequence
  Synthetic oligonucleotide
gggggaaactgagcccctggctcccgtgtc

SEQ ID NO: 218636 - DNA, 30 bp, Artificial Sequence
  Synthetic oligonucleotide
ctcagatcgagtggagaaagatggcgtgtc

SEQ ID NO: 218637 - DNA, 30 bp, Artificial Sequence
  Synthetic oligonucleotide
cgatggggttgaattctaatcagaggtgtc

SEQ ID NO: 218638 - DNA, 30 bp, Artificial Sequence
  Synthetic oligonucleotide
gctgatcaagacgaccgataaccgggtgtc

SEQ ID NO: 218639 - DNA, 30 bp, Artificial Sequence
  Synthetic oligonucleotide
atatcactagtcctaaggcctgttggtgtc

SEQ ID NO: 218640 - DNA, 30 bp, Artificial Sequence
  Synthetic oligonucleotide
gaactacgaagatatgtcaattcatgtgtc

SEQ ID NO: 218641 - DNA, 30 bp, Artificial Sequence
  Synthetic oligonucleotide
tgaactgcgcgaaaatcgttcctatgtgtc

SEQ ID NO: 218642 - DNA, 30 bp, Artificial Sequence
  Synthetic oligonucleotide
cgagcttaattggggaggggtgactgtgtc

SEQ ID NO: 218643 - DNA, 30 bp, Artificial Sequence
  Synthetic oligonucleotide
aaccaaaatagtcgtggagtgctgtgtgtc

SEQ ID NO: 218644 - DNA, 30 bp, Artificial Sequence
  Synthetic oligonucleotide
gccaggcgaggcgaggccaagacttgtgtc

SEQ ID NO: 218645 - DNA, 30 bp, Artificial Sequence
  Synthetic oligonucleotide
cgggtgcatgaccgccaatatgccattgtc

SEQ ID NO: 218646 - DNA, 30 bp, Artificial Sequence
  Synthetic oligonucleotide
agatcatcacatgaaaatctatccattgtc

SEQ ID NO: 218647 - DNA, 30 bp, Artificial Sequence
  Synthetic oligonucleotide
tttacggggagtattagtccacagattgtc

SEQ ID NO: 218648 - DNA, 30 bp, Artificial Sequence
  Synthetic oligonucleotide
agttcgaggatgcgtgctcacactattgtc

SEQ ID NO: 218649 - DNA, 30 bp, Artificial Sequence
  Synthetic oligonucleotide
aggttgtactatcatgcgatgccacttgtc

SEQ ID NO: 218650 - DNA, 30 bp, Artificial Sequence
  Synthetic oligonucleotide
gttaaactttaagccttacgtccacttgtc

SEQ ID NO: 218651 - DNA, 30 bp, Artificial Sequence
  Synthetic oligonucleotide
atatggtcgcttaacacattaaaccttgtc

SEQ ID NO: 218652 - DNA, 30 bp, Artificial Sequence
  Synthetic oligonucleotide
acaagacgcaataaaattggcacgcttgtc

SEQ ID NO: 218653 - DNA, 30 bp, Artificial Sequence
  Synthetic oligonucleotide
tgaaaaagcataggggagacgcctcttgtc

SEQ ID NO: 218654 - DNA, 30 bp, Artificial Sequence
  Synthetic oligonucleotide
acaatgggtggcccagatggaccagttgtc

SEQ ID NO: 218655 - DNA, 30 bp, Artificial Sequence
  Synthetic oligonucleotide
tcgcttcgagtgagttcacctcgcgttgtc

SEQ ID NO: 218656 - DNA, 30 bp, Artificial Sequence
  Synthetic oligonucleotide
agctgatgttgagacaactacgcggttgtc

SEQ ID NO: 218657 - DNA, 30 bp, Artificial Sequence
  Synthetic oligonucleotide
cgtggctagactcatcttagagtggttgtc

SEQ ID NO: 218658 - DNA, 30 bp, Artificial Sequence
  Synthetic oligonucleotide
tttcgtattatctgcgtgatcagatttgtc

SEQ ID NO: 218659 - DNA, 30 bp, Artificial Sequence
  Synthetic oligonucleotide
accaccataatctaatgaaggacgtttgtc

SEQ ID NO: 218660 - DNA, 30 bp, Artificial Sequence
  Synthetic oligonucleotide
cactgtgctcttccggaatccctgtttgtc

SEQ ID NO: 218661 - DNA, 30 bp, Artificial Sequence
  Synthetic oligonucleotide
aagggctcatgccagaaaaggtcaaaattc

SEQ ID NO: 218662 - DNA, 30 bp, Artificial Sequence
  Synthetic oligonucleotide
ttcgcgaagctcgataaggcagtaaaattc

SEQ ID NO: 218663 - DNA, 30 bp, Artificial Sequence
  Synthetic oligonucleotide
gctgaagcacgttgcacggtatacaaattc

SEQ ID NO: 218664 - DNA, 30 bp, Artificial Sequence
  Synthetic oligonucleotide
gaaggagtagatcacccaagcttgaaattc

SEQ ID NO: 218665 - DNA, 30 bp, Artificial Sequence
  Synthetic oligonucleotide
atacggtcaggggaatccgccgcgcaattc

SEQ ID NO: 218666 - DNA, 30 bp, Artificial Sequence
  Synthetic oligonucleotide
tcgatagtccaatcagcctagattgaattc

SEQ ID NO: 218667 - DNA, 30 bp, Artificial Sequence
  Synthetic oligonucleotide
tgagcattttgcagaatcggaccataattc

SEQ ID NO: 218668 - DNA, 30 bp, Artificial Sequence
  Synthetic oligonucleotide
tgtagcgaagctatgtcgctcaactaattc

SEQ ID NO: 218669 - DNA, 30 bp, Artificial Sequence
  Synthetic oligonucleotide
cgtcgctagaacttgaaactagtttaattc

SEQ ID NO: 218670 - DNA, 30 bp, Artificial Sequence
  Synthetic oligonucleotide
gaagtatatggacaagtgaaagacacattc

SEQ ID NO: 218671 - DNA, 30 bp, Artificial Sequence
  Synthetic oligonucleotide
agctagcgatcgatcccgattgcgacattc

SEQ ID NO: 218672 - DNA, 30 bp, Artificial Sequence
  Synthetic oligonucleotide
ctcttcgtcttcctcacatattgaccattc

SEQ ID NO: 218673 - DNA, 30 bp, Artificial Sequence
  Synthetic oligonucleotide
ccccaaacaacgataacccaatggccattc

SEQ ID NO: 218674 - DNA, 30 bp, Artificial Sequence
  Synthetic oligonucleotide
accttctacaaaaggagtattatgtcattc

SEQ ID NO: 218675 - DNA, 30 bp, Artificial Sequence
  Synthetic oligonucleotide
ggggttgaaaaatgggctcatggttcattc

SEQ ID NO: 218676 - DNA, 30 bp, Artificial Sequence
  Synthetic oligonucleotide
gggcggtccataatgcgagcgccaagattc

SEQ ID NO: 218677 - DNA, 30 bp, Artificial Sequence
  Synthetic oligonucleotide
aaaagtctaccccaccgtgcccgaagattc

SEQ ID NO: 218678 - DNA, 30 bp, Artificial Sequence
  Synthetic oligonucleotide
aggtggcacctcagtaaatgcgacagattc

SEQ ID NO: 218679 - DNA, 30 bp, Artificial Sequence
  Synthetic oligonucleotide
aaggggattctccgggcgaattacagattc

SEQ ID NO: 218680 - DNA, 30 bp, Artificial Sequence
  Synthetic oligonucleotide
acgtcaccacaacacagtgctaccagattc

SEQ ID NO: 218681 - DNA, 30 bp, Artificial Sequence
  Synthetic oligonucleotide
accgatacggccagtaggccgcccagattc

SEQ ID NO: 218682 - DNA, 30 bp, Artificial Sequence
  Synthetic oligonucleotide
tgggaacggttggaaagacccaatagattc

SEQ ID NO: 218683 - DNA, 30 bp, Artificial Sequence
  Synthetic oligonucleotide
gctttacggatatacttacacgctagattc

SEQ ID NO: 218684 - DNA, 29 bp, Artificial Sequence
  Synthetic oligonucleotide
ggctaagtggcatagcaatgttacgattc

SEQ ID NO: 218685 - DNA, 30 bp, Artificial Sequence
  Synthetic oligonucleotide
attcaattgaagttgaactgtagccgattc

SEQ ID NO: 218686 - DNA, 30 bp, Artificial Sequence
  Synthetic oligonucleotide
catggtcgatggccagacgcgaggcgattc

SEQ ID NO: 218687 - DNA, 30 bp, Artificial Sequence
  Synthetic oligonucleotide
ttacaggttgtagaacctgtgatgcgattc

SEQ ID NO: 218688 - DNA, 30 bp, Artificial Sequence
  Synthetic oligonucleotide
aaaaacaaggatcggtatgatgctcgattc

SEQ ID NO: 218689 - DNA, 30 bp, Artificial Sequence
  Synthetic oligonucleotide
ttccgtccaagaccaagcgtaagaggattc

SEQ ID NO: 218690 - DNA, 30 bp, Artificial Sequence
  Synthetic oligonucleotide
agattgttatcccgccacagagtaggattc

SEQ ID NO: 218691 - DNA, 30 bp, Artificial Sequence
  Synthetic oligonucleotide
aatgcatcaagtgcggaaatgcgcggattc

SEQ ID NO: 218692 - DNA, 30 bp, Artificial Sequence
  Synthetic oligonucleotide
aaatcaagacatctggatctagcgggattc

SEQ ID NO: 218693 - DNA, 30 bp, Artificial Sequence
  Synthetic oligonucleotide
gctggtttcgctaccgaagcagttggattc

SEQ ID NO: 218694 - DNA, 30 bp, Artificial Sequence
  Synthetic oligonucleotide
atgtgcttcacgactcttttaatatgattc

SEQ ID NO: 218695 - DNA, 30 bp, Artificial Sequence
  Synthetic oligonucleotide
agagccgcctctgtgtgcgtatactgattc

SEQ ID NO: 218696 - DNA, 30 bp, Artificial Sequence
  Synthetic oligonucleotide
ggtgagctggactgctgcgaaacctgattc

SEQ ID NO: 218697 - DNA, 30 bp, Artificial Sequence
  Synthetic oligonucleotide
tccagcgttttaaaaaccatctcaatattc

SEQ ID NO: 218698 - DNA, 30 bp, Artificial Sequence
  Synthetic oligonucleotide
ctcaaaacgcactcggtcgttctcatattc

SEQ ID NO: 218699 - DNA, 30 bp, Artificial Sequence
  Synthetic oligonucleotide
atgcagaggcggtaggaaagatcgatattc

SEQ ID NO: 218700 - DNA, 30 bp, Artificial Sequence
  Synthetic oligonucleotide
tacatgggatcgtagtctaagtcgatattc

SEQ ID NO: 218701 - DNA, 30 bp, Artificial Sequence
  Synthetic oligonucleotide
ccgtcttccagcccgggagtaaggatattc

SEQ ID NO: 218702 - DNA, 30 bp, Artificial Sequence
  Synthetic oligonucleotide
taatcgccaaaagagcatatcaatatattc

SEQ ID NO: 218703 - DNA, 30 bp, Artificial Sequence
  Synthetic oligonucleotide
tcgtgagagttgaacttgtggggactattc

SEQ ID NO: 218704 - DNA, 30 bp, Artificial Sequence
  Synthetic oligonucleotide
ccaaaactgtcgacacgacgatggctattc

SEQ ID NO: 218705 - DNA, 30 bp, Artificial Sequence
  Synthetic oligonucleotide
gaagtgtgggtcgatctgatgaaagtattc

SEQ ID NO: 218706 - DNA, 30 bp, Artificial Sequence
  Synthetic oligonucleotide
ttagtatgctcatccatggtcttcgtattc

SEQ ID NO: 218707 - DNA, 30 bp, Artificial Sequence
  Synthetic oligonucleotide
ccctaccagttacctaggaaagccttattc

SEQ ID NO: 218708 - DNA, 30 bp, Artificial Sequence
  Synthetic oligonucleotide
gggatctcgaccgcgccatgcttcttattc

SEQ ID NO: 218709 - DNA, 30 bp, Artificial Sequence
  Synthetic oligonucleotide
tcgacaactgaacgctgagtagcgttattc

SEQ ID NO: 218710 - DNA, 30 bp, Artificial Sequence
  Synthetic oligonucleotide
gtcaagacatcgaagctgatgagaaacttc

SEQ ID NO: 218711 - DNA, 30 bp, Artificial Sequence
  Synthetic oligonucleotide
caaacccgtgtcactatccatcgaaacttc

SEQ ID NO: 218712 - DNA, 30 bp, Artificial Sequence
  Synthetic oligonucleotide
tcctgtccaagaatctctaaaagcaacttc

SEQ ID NO: 218713 - DNA, 28 bp, Artificial Sequence
  Synthetic oligonucleotide
gcggcctgtcatatagctagagaacttc

SEQ ID NO: 218714 - DNA, 30 bp, Artificial Sequence
  Synthetic oligonucleotide
cagacaatggtcctgggtcgagcgaacttc

SEQ ID NO: 218715 - DNA, 30 bp, Artificial Sequence
  Synthetic oligonucleotide
gtcaggaaattacaataaaaggcgaacttc

SEQ ID NO: 218716 - DNA, 30 bp, Artificial Sequence
  Synthetic oligonucleotide
attaggatctaggaacgaagtcctaacttc

SEQ ID NO: 218717 - DNA, 30 bp, Artificial Sequence
  Synthetic oligonucleotide
aggggcttgagtgtacatcacgaacacttc

SEQ ID NO: 218718 - DNA, 30 bp, Artificial Sequence
  Synthetic oligonucleotide
caatcaatacccctcagtcagccacacttc

SEQ ID NO: 218719 - DNA, 30 bp, Artificial Sequence
  Synthetic oligonucleotide
agatactttggtaggcacttgtatcacttc

SEQ ID NO: 218720 - DNA, 30 bp, Artificial Sequence
  Synthetic oligonucleotide
tggccttgattgcttgagatttgtgacttc

SEQ ID NO: 218721 - DNA, 30 bp, Artificial Sequence
  Synthetic oligonucleotide
gctcattcctgagtaatattaaggtacttc

SEQ ID NO: 218722 - DNA, 30 bp, Artificial Sequence
  Synthetic oligonucleotide
ccagtccgtcgatcaaagttccggtacttc

SEQ ID NO: 218723 - DNA, 30 bp, Artificial Sequence
  Synthetic oligonucleotide
tttaggactgtagactgctactggtacttc

SEQ ID NO: 218724 - DNA, 30 bp, Artificial Sequence
  Synthetic oligonucleotide
catttgcacttttcagccacacattacttc

SEQ ID NO: 218725 - DNA, 30 bp, Artificial Sequence
  Synthetic oligonucleotide
aaccaggcctagagattaatgtattacttc

SEQ ID NO: 218726 - DNA, 30 bp, Artificial Sequence
  Synthetic oligonucleotide
cttggttattatcatggatggttttacttc

SEQ ID NO: 218727 - DNA, 30 bp, Artificial Sequence
  Synthetic oligonucleotide
tggctttggccaagacggacctggaccttc

SEQ ID NO: 218728 - DNA, 30 bp, Artificial Sequence
  Synthetic oligonucleotide
gagggtacttagaatactgggttgaccttc

SEQ ID NO: 218729 - DNA, 30 bp, Artificial Sequence
  Synthetic oligonucleotide
aaacgtccgggtcggaataatggtaccttc

SEQ ID NO: 218730 - DNA, 30 bp, Artificial Sequence
  Synthetic oligonucleotide
acactggggttcgcaagaaacgttaccttc

SEQ ID NO: 218731 - DNA, 30 bp, Artificial Sequence
  Synthetic oligonucleotide
tactctcagaccacctgcgtaagacccttc

SEQ ID NO: 218732 - DNA, 30 bp, Artificial Sequence
  Synthetic oligonucleotide
tagtatacactatatatacaggcgcccttc

SEQ ID NO: 218733 - DNA, 30 bp, Artificial Sequence
  Synthetic oligonucleotide
catatatcgacaccacaaactggcgccttc

SEQ ID NO: 218734 - DNA, 30 bp, Artificial Sequence
  Synthetic oligonucleotide
tggggagtagtcctggcacgcaaggccttc

SEQ ID NO: 218735 - DNA, 30 bp, Artificial Sequence
  Synthetic oligonucleotide
ttagcggacacaactcgatatacatccttc

SEQ ID NO: 218736 - DNA, 30 bp, Artificial Sequence
  Synthetic oligonucleotide
gacaaatgatcttccggactatactccttc

SEQ ID NO: 218737 - DNA, 30 bp, Artificial Sequence
  Synthetic oligonucleotide
atgtatcgggtggatcgcgtttactccttc

SEQ ID NO: 218738 - DNA, 30 bp, Artificial Sequence
  Synthetic oligonucleotide
aatggacgggtctctatatgcagctccttc

SEQ ID NO: 218739 - DNA, 30 bp, Artificial Sequence
  Synthetic oligonucleotide
gcactggcgcatggcggatggggctccttc

SEQ ID NO: 218740 - DNA, 30 bp, Artificial Sequence
  Synthetic oligonucleotide
aacggtttggacataatcgagaagtccttc

SEQ ID NO: 218741 - DNA, 30 bp, Artificial Sequence
  Synthetic oligonucleotide
cgtgacaagatttaccacacacagtccttc

SEQ ID NO: 218742 - DNA, 30 bp, Artificial Sequence
  Synthetic oligonucleotide
cggtggaaagatacaatcactggttccttc

SEQ ID NO: 218743 - DNA, 30 bp, Artificial Sequence
  Synthetic oligonucleotide
ctacccacctaccattacatctgttccttc

SEQ ID NO: 218744 - DNA, 30 bp, Artificial Sequence
  Synthetic oligonucleotide
gagagtggtgaacacccattttaaagcttc

SEQ ID NO: 218745 - DNA, 30 bp, Artificial Sequence
  Synthetic oligonucleotide
aactgtctttaagagtttaaaccaagcttc

SEQ ID NO: 218746 - DNA, 30 bp, Artificial Sequence
  Synthetic oligonucleotide
gctgcgttactggtggactcgagaagcttc

SEQ ID NO: 218747 - DNA, 30 bp, Artificial Sequence
  Synthetic oligonucleotide
cttgcggtgacaattccagtacagagcttc

SEQ ID NO: 218748 - DNA, 30 bp, Artificial Sequence
  Synthetic oligonucleotide
gcccacggcaacctgagtgcctggagcttc

SEQ ID NO: 218749 - DNA, 30 bp, Artificial Sequence
  Synthetic oligonucleotide
gtgggtcttcggctaaaacgaagtagcttc

SEQ ID NO: 218750 - DNA, 30 bp, Artificial Sequence
  Synthetic oligonucleotide
gttgcacgccattcgtctcatgttagcttc

SEQ ID NO: 218751 - DNA, 30 bp, Artificial Sequence
  Synthetic oligonucleotide
taggaccgggaatgccaaaatttacgcttc

SEQ ID NO: 218752 - DNA, 30 bp, Artificial Sequence
  Synthetic oligonucleotide
tgttggcggtacggacgtcaataccgcttc

SEQ ID NO: 218753 - DNA, 30 bp, Artificial Sequence
  Synthetic oligonucleotide
cgcctcgtggttagtcgtagttagcgcttc

SEQ ID NO: 218754 - DNA, 30 bp, Artificial Sequence
  Synthetic oligonucleotide
gtcgcaggcgacaaacctgcaactcgcttc

SEQ ID NO: 218755 - DNA, 30 bp, Artificial Sequence
  Synthetic oligonucleotide
tgcattgcaggaccgaaagattaaggcttc

SEQ ID NO: 218756 - DNA, 30 bp, Artificial Sequence
  Synthetic oligonucleotide
gtaaacatctcagtacgctaaacaggcttc

SEQ ID NO: 218757 - DNA, 30 bp, Artificial Sequence
  Synthetic oligonucleotide
cgatgcgtcaccgatatcttctgcggcttc

SEQ ID NO: 218758 - DNA, 30 bp, Artificial Sequence
  Synthetic oligonucleotide
aatacgagagagaccctgccaattggcttc

SEQ ID NO: 218759 - DNA, 30 bp, Artificial Sequence
  Synthetic oligonucleotide
tggtgtgatcagagaagacgacgttgcttc

SEQ ID NO: 218760 - DNA, 30 bp, Artificial Sequence
  Synthetic oligonucleotide
tttcacctagtctccataagattttgcttc

SEQ ID NO: 218761 - DNA, 30 bp, Artificial Sequence
  Synthetic oligonucleotide
acttagaagactgtgtgatcaataatcttc

SEQ ID NO: 218762 - DNA, 30 bp, Artificial Sequence
  Synthetic oligonucleotide
gaagctgaccttatctagtgcgaactcttc

SEQ ID NO: 218763 - DNA, 30 bp, Artificial Sequence
  Synthetic oligonucleotide
gaggctcacgtgcctctcacgtacctcttc

SEQ ID NO: 218764 - DNA, 30 bp, Artificial Sequence
  Synthetic oligonucleotide
ggcaagatccctctgaatttaggcctcttc

SEQ ID NO: 218765 - DNA, 30 bp, Artificial Sequence
  Synthetic oligonucleotide
gccaatgttcttacacggtgaaagctcttc

SEQ ID NO: 218766 - DNA, 30 bp, Artificial Sequence
  Synthetic oligonucleotide
cttctatggcactctccgaccgacgtcttc

SEQ ID NO: 218767 - DNA, 30 bp, Artificial Sequence
  Synthetic oligonucleotide
catttcacggtatgggtcatcgttgtcttc

SEQ ID NO: 218768 - DNA, 30 bp, Artificial Sequence
  Synthetic oligonucleotide
tatgttgttagaacaactagcatcttcttc

SEQ ID NO: 218769 - DNA, 30 bp, Artificial Sequence
  Synthetic oligonucleotide
atagaagcattctccttacaagaaaagttc

SEQ ID NO: 218770 - DNA, 30 bp, Artificial Sequence
  Synthetic oligonucleotide
gcgtacgttgctgtcctttaagcaaagttc

SEQ ID NO: 218771 - DNA, 31 bp, Artificial Sequence
  Synthetic oligonucleotide
tgtgacaatagcggtgctgcacttcaagttc

SEQ ID NO: 218772 - DNA, 30 bp, Artificial Sequence
  Synthetic oligonucleotide
ggttggttcaagcccgcggtaaggaagttc

SEQ ID NO: 218773 - DNA, 30 bp, Artificial Sequence
  Synthetic oligonucleotide
gtccagattccagaaacgtgtcttaagttc

SEQ ID NO: 218774 - DNA, 30 bp, Artificial Sequence
  Synthetic oligonucleotide
agggccccagacatatgatgatttaagttc

SEQ ID NO: 218775 - DNA, 30 bp, Artificial Sequence
  Synthetic oligonucleotide
ctcatttagccgatcactaacaaacagttc

SEQ ID NO: 218776 - DNA, 30 bp, Artificial Sequence
  Synthetic oligonucleotide
tataggttatctaccgtcgtactacagttc

SEQ ID NO: 218777 - DNA, 30 bp, Artificial Sequence
  Synthetic oligonucleotide
gcttctaagtgtctaagcgatgggcagttc

SEQ ID NO: 218778 - DNA, 30 bp, Artificial Sequence
  Synthetic oligonucleotide
atttgacaaatgagaacgtttaatcagttc

SEQ ID NO: 218779 - DNA, 30 bp, Artificial Sequence
  Synthetic oligonucleotide
ctatatgctggtggcgtaaaaactcagttc

SEQ ID NO: 218780 - DNA, 30 bp, Artificial Sequence
  Synthetic oligonucleotide
agatgagggtcgagcgagccaacagagttc

SEQ ID NO: 218781 - DNA, 30 bp, Artificial Sequence
  Synthetic oligonucleotide
cggtagagccacggattcgtgggcgagttc

SEQ ID NO: 218782 - DNA, 30 bp, Artificial Sequence
  Synthetic oligonucleotide
atgggccctgcacagaggactgaggagttc

SEQ ID NO: 218783 - DNA, 30 bp, Artificial Sequence
  Synthetic oligonucleotide
tagtcggagacacacctatggattgagttc

SEQ ID NO: 218784 - DNA, 30 bp, Artificial Sequence
  Synthetic oligonucleotide
tattcgcccgtgttaataaagtttgagttc

SEQ ID NO: 218785 - DNA, 30 bp, Artificial Sequence
  Synthetic oligonucleotide
gttagtttcaatacaaggttccaatagttc

SEQ ID NO: 218786 - DNA, 30 bp, Artificial Sequence
  Synthetic oligonucleotide
ctggtgttgtgaacctgtcacccatagttc

SEQ ID NO: 218787 - DNA, 30 bp, Artificial Sequence
  Synthetic oligonucleotide
tatcgtccaaggacataggcatcatagttc

SEQ ID NO: 218788 - DNA, 30 bp, Artificial Sequence
  Synthetic oligonucleotide
gcaataaggattggccgcatctcctagttc

SEQ ID NO: 218789 - DNA, 30 bp, Artificial Sequence
  Synthetic oligonucleotide
gcataccgccgccaaagattcggctagttc

SEQ ID NO: 218790 - DNA, 30 bp, Artificial Sequence
  Synthetic oligonucleotide
tcttctccgtcgtaaccgctatgctagttc

SEQ ID NO: 218791 - DNA, 30 bp, Artificial Sequence
  Synthetic oligonucleotide
attgccagagagaagctagaacagtagttc

SEQ ID NO: 218792 - DNA, 30 bp, Artificial Sequence
  Synthetic oligonucleotide
cattacaatgcacaatcccatctttagttc

SEQ ID NO: 218793 - DNA, 30 bp, Artificial Sequence
  Synthetic oligonucleotide
gtggtccctgagactcgatcgaaaacgttc

SEQ ID NO: 218794 - DNA, 30 bp, Artificial Sequence
  Synthetic oligonucleotide
cgtggtaaaaccgggtatcggtaaacgttc

SEQ ID NO: 218795 - DNA, 30 bp, Artificial Sequence
  Synthetic oligonucleotide
gggttacacactggaattgtgtcaacgttc

SEQ ID NO: 218796 - DNA, 30 bp, Artificial Sequence
  Synthetic oligonucleotide
cttgtcgtgcctccctggattcgaacgttc

SEQ ID NO: 218797 - DNA, 30 bp, Artificial Sequence
  Synthetic oligonucleotide
gctgcgtcgcagtgggtggttctaacgttc

SEQ ID NO: 218798 - DNA, 30 bp, Artificial Sequence
  Synthetic oligonucleotide
gagggttacctcttgggcgcgacgacgttc

SEQ ID NO: 218799 - DNA, 30 bp, Artificial Sequence
  Synthetic oligonucleotide
cactaaggaatgccaccatggcaaccgttc

SEQ ID NO: 218800 - DNA, 30 bp, Artificial Sequence
  Synthetic oligonucleotide
gcttacattgtcggttccgaaaggccgttc

SEQ ID NO: 218801 - DNA, 30 bp, Artificial Sequence
  Synthetic oligonucleotide
cgatcgtcgagaccgctgttcctgccgttc

SEQ ID NO: 218802 - DNA, 30 bp, Artificial Sequence
  Synthetic oligonucleotide
gcgtaactcttgaggaagaacgatccgttc

SEQ ID NO: 218803 - DNA, 30 bp, Artificial Sequence
  Synthetic oligonucleotide
gactcgtcataaaggccagaccgggcgttc

SEQ ID NO: 218804 - DNA, 30 bp, Artificial Sequence
  Synthetic oligonucleotide
cgcaaagtggagccatagacggctgcgttc

SEQ ID NO: 218805 - DNA, 30 bp, Artificial Sequence
  Synthetic oligonucleotide
ttagcccgttgcatctaacggtctgcgttc

SEQ ID NO: 218806 - DNA, 30 bp, Artificial Sequence
  Synthetic oligonucleotide
cgggtttggatatggttcgtgattgcgttc

SEQ ID NO: 218807 - DNA, 30 bp, Artificial Sequence
  Synthetic oligonucleotide
taggcaagatgatatataggttcatcgttc

SEQ ID NO: 218808 - DNA, 30 bp, Artificial Sequence
  Synthetic oligonucleotide
aaacacatgcgaaggccgttggccaggttc

SEQ ID NO: 218809 - DNA, 30 bp, Artificial Sequence
  Synthetic oligonucleotide
tgacgtttctacagggaagtcgataggttc

SEQ ID NO: 218810 - DNA, 30 bp, Artificial Sequence
  Synthetic oligonucleotide
acccggtacaagtaaaacggatataggttc

SEQ ID NO: 218811 - DNA, 30 bp, Artificial Sequence
  Synthetic oligonucleotide
catacttagtgacccgtgtgctgccggttc

SEQ ID NO: 218812 - DNA, 30 bp, Artificial Sequence
  Synthetic oligonucleotide
ttgtattaggttgtgacgaggctccggttc

SEQ ID NO: 218813 - DNA, 30 bp, Artificial Sequence
  Synthetic oligonucleotide
ttaattaccacaggagcattataagggttc

SEQ ID NO: 218814 - DNA, 30 bp, Artificial Sequence
  Synthetic oligonucleotide
tgaatgaagtgttgtccggcctgagggttc

SEQ ID NO: 218815 - DNA, 30 bp, Artificial Sequence
  Synthetic oligonucleotide
aaagcaactcgactcgattacagggggttc

SEQ ID NO: 218816 - DNA, 30 bp, Artificial Sequence
  Synthetic oligonucleotide
taactggatgatccagtgtaacgggggttc

SEQ ID NO: 218817 - DNA, 30 bp, Artificial Sequence
  Synthetic oligonucleotide
gctacgcggagtactcggcccgagtggttc

SEQ ID NO: 218818 - DNA, 30 bp, Artificial Sequence
  Synthetic oligonucleotide
taatgcccaataggacattggatttggttc

SEQ ID NO: 218819 - DNA, 30 bp, Artificial Sequence
  Synthetic oligonucleotide
tacgacagactcctgctgctcttaatgttc

SEQ ID NO: 218820 - DNA, 30 bp, Artificial Sequence
  Synthetic oligonucleotide
agtgctcacgatcaagagacgttaatgttc

SEQ ID NO: 218821 - DNA, 30 bp, Artificial Sequence
  Synthetic oligonucleotide
ggaagaatcctgccatcaatgaacatgttc

SEQ ID NO: 218822 - DNA, 30 bp, Artificial Sequence
  Synthetic oligonucleotide
tgaagtgtagcactcgctatctacatgttc

SEQ ID NO: 218823 - DNA, 30 bp, Artificial Sequence
  Synthetic oligonucleotide
cttactcagtctgtctcagatgtcatgttc

SEQ ID NO: 218824 - DNA, 30 bp, Artificial Sequence
  Synthetic oligonucleotide
cacggcagaatgatccgataaactatgttc

SEQ ID NO: 218825 - DNA, 30 bp, Artificial Sequence
  Synthetic oligonucleotide
agtaagaataataccgttagtaggctgttc

SEQ ID NO: 218826 - DNA, 30 bp, Artificial Sequence
  Synthetic oligonucleotide
ggagacagagcagggtcgaggcggctgttc

SEQ ID NO: 218827 - DNA, 30 bp, Artificial Sequence
  Synthetic oligonucleotide
agcgactacgcaaataggaaagggctgttc

SEQ ID NO: 218828 - DNA, 30 bp, Artificial Sequence
  Synthetic oligonucleotide
aggctagttttccggttcgtgattctgttc

SEQ ID NO: 218829 - DNA, 30 bp, Artificial Sequence
  Synthetic oligonucleotide
cagacgcggaaccgaatatatctcgtgttc

SEQ ID NO: 218830 - DNA, 30 bp, Artificial Sequence
  Synthetic oligonucleotide
tactatagaataatcctgtatgctgtgttc

SEQ ID NO: 218831 - DNA, 30 bp, Artificial Sequence
  Synthetic oligonucleotide
taactaggtcggtacttccaatctgtgttc

SEQ ID NO: 218832 - DNA, 30 bp, Artificial Sequence
  Synthetic oligonucleotide
cgggaggatgtcgtgtgaaaagtcttgttc

SEQ ID NO: 218833 - DNA, 30 bp, Artificial Sequence
  Synthetic oligonucleotide
gccgagggaaatcggatttgattcttgttc

SEQ ID NO: 218834 - DNA, 30 bp, Artificial Sequence
  Synthetic oligonucleotide
agattattaccaaatcttacgagcaatttc

SEQ ID NO: 218835 - DNA, 30 bp, Artificial Sequence
  Synthetic oligonucleotide
aacatgatttgaatggaacatgtgaatttc

SEQ ID NO: 218836 - DNA, 30 bp, Artificial Sequence
  Synthetic oligonucleotide
cagaacgaaaagggtaccgagcctaatttc

SEQ ID NO: 218837 - DNA, 30 bp, Artificial Sequence
  Synthetic oligonucleotide
aaagttacgatttgtcctataagtaatttc

SEQ ID NO: 218838 - DNA, 30 bp, Artificial Sequence
  Synthetic oligonucleotide
tcctggccacaaatgaatattgcacatttc

SEQ ID NO: 218839 - DNA, 30 bp, Artificial Sequence
  Synthetic oligonucleotide
atgattagaagaaacaagtcccaagatttc

SEQ ID NO: 218840 - DNA, 30 bp, Artificial Sequence
  Synthetic oligonucleotide
tcattggtaatgattgtaacctatgatttc

SEQ ID NO: 218841 - DNA, 30 bp, Artificial Sequence
  Synthetic oligonucleotide
tcgccagcgataaggctaaaaggatatttc

SEQ ID NO: 218842 - DNA, 30 bp, Artificial Sequence
  Synthetic oligonucleotide
tactaggccttggacggtgatctctatttc

SEQ ID NO: 218843 - DNA, 30 bp, Artificial Sequence
  Synthetic oligonucleotide
cgggtacgatagaaacaggcaggttatttc

SEQ ID NO: 218844 - DNA, 30 bp, Artificial Sequence
  Synthetic oligonucleotide
tgaaaagaaagtagagagatagaccctttc

SEQ ID NO: 218845 - DNA, 30 bp, Artificial Sequence
  Synthetic oligonucleotide
acagcgactggagacgtcgtccgtcctttc

SEQ ID NO: 218846 - DNA, 30 bp, Artificial Sequence
  Synthetic oligonucleotide
ccaactaagtgtggaattggcaacgctttc

SEQ ID NO: 218847 - DNA, 30 bp, Artificial Sequence
  Synthetic oligonucleotide
taaccatagcgatcctcagttagcgctttc

SEQ ID NO: 218848 - DNA, 30 bp, Artificial Sequence
  Synthetic oligonucleotide
aaaggagccgaggagcaacctggcgctttc

SEQ ID NO: 218849 - DNA, 30 bp, Artificial Sequence
  Synthetic oligonucleotide
acattgcaggcggttaaaggctcatctttc

SEQ ID NO: 218850 - DNA, 30 bp, Artificial Sequence
  Synthetic oligonucleotide
tgaccgcggtggtcaaaggtttcgtctttc

SEQ ID NO: 218851 - DNA, 30 bp, Artificial Sequence
  Synthetic oligonucleotide
gggtacaaaacagtgctagttcaaagtttc

SEQ ID NO: 218852 - DNA, 30 bp, Artificial Sequence
  Synthetic oligonucleotide
agagcaacgcgcagagctcgataaagtttc

SEQ ID NO: 218853 - DNA, 30 bp, Artificial Sequence
  Synthetic oligonucleotide
ctgtcaacagtgcttagccagtggagtttc

SEQ ID NO: 218854 - DNA, 30 bp, Artificial Sequence
  Synthetic oligonucleotide
aacacgggaggcaataacgctgtgagtttc

SEQ ID NO: 218855 - DNA, 30 bp, Artificial Sequence
  Synthetic oligonucleotide
gaaacaggacggtatagaggttaacgtttc

SEQ ID NO: 218856 - DNA, 30 bp, Artificial Sequence
  Synthetic oligonucleotide
cggacgtgagacatctggtaggcccgtttc

SEQ ID NO: 218857 - DNA, 30 bp, Artificial Sequence
  Synthetic oligonucleotide
gctaacgggcgtatataagttgcgcgtttc

SEQ ID NO: 218858 - DNA, 30 bp, Artificial Sequence
  Synthetic oligonucleotide
ttgagcgaatttgagcagctgccgggtttc

SEQ ID NO: 218859 - DNA, 30 bp, Artificial Sequence
  Synthetic oligonucleotide
ctaccgtgataaggttgtccatggggtttc

SEQ ID NO: 218860 - DNA, 30 bp, Artificial Sequence
  Synthetic oligonucleotide
gaggtgatcggcggaactctcgtgggtttc

SEQ ID NO: 218861 - DNA, 30 bp, Artificial Sequence
  Synthetic oligonucleotide
ttgcagacaatcactacgcatatctgtttc

SEQ ID NO: 218862 - DNA, 30 bp, Artificial Sequence
  Synthetic oligonucleotide
cctggcacaagttgcgttaagttctgtttc

SEQ ID NO: 218863 - DNA, 30 bp, Artificial Sequence
  Synthetic oligonucleotide
catatctataatgaacggtcagtgtgtttc

SEQ ID NO: 218864 - DNA, 30 bp, Artificial Sequence
  Synthetic oligonucleotide
cataccgtgcaccccgcaccgaacattttc

SEQ ID NO: 218865 - DNA, 30 bp, Artificial Sequence
  Synthetic oligonucleotide
ggtcattgaagaattactcgttccattttc

SEQ ID NO: 218866 - DNA, 30 bp, Artificial Sequence
  Synthetic oligonucleotide
acatccggcgcctaaggaatacgcattttc

SEQ ID NO: 218867 - DNA, 30 bp, Artificial Sequence
  Synthetic oligonucleotide
accgatggcatcacagtgtctagtattttc

SEQ ID NO: 218868 - DNA, 30 bp, Artificial Sequence
  Synthetic oligonucleotide
cactctggggaccaacctaagtcacttttc

SEQ ID NO: 218869 - DNA, 30 bp, Artificial Sequence
  Synthetic oligonucleotide
gtcaagctggtattgaatgatcaccttttc

SEQ ID NO: 218870 - DNA, 30 bp, Artificial Sequence
  Synthetic oligonucleotide
cattgtcagtgctattggtcgtgtcttttc

SEQ ID NO: 218871 - DNA, 30 bp, Artificial Sequence
  Synthetic oligonucleotide
tgttgtcatggcttagtgagtggagttttc

SEQ ID NO: 218872 - DNA, 30 bp, Artificial Sequence
  Synthetic oligonucleotide
acagcgcattaggttcacaccgccgttttc

SEQ ID NO: 218873 - DNA, 31 bp, Artificial Sequence
  Synthetic oligonucleotide
tcttatctgttgtgttttcctcccatttttc

SEQ ID NO: 218874 - DNA, 30 bp, Artificial Sequence
  Synthetic oligonucleotide
cgccagggagaaccgatgcttgagtttttc

SEQ ID NO: 218875 - DNA, 30 bp, Artificial Sequence
  Synthetic oligonucleotide
ggggcaatttcctcacataaagcgtttttc

SEQ ID NO: 218876 - DNA, 30 bp, Artificial Sequence
  Synthetic oligonucleotide
ccatgcttatgtacacattcgacttttttc

SEQ ID NO: 218877 - DNA, 30 bp, Artificial Sequence
  Synthetic oligonucleotide
aggaggttaggtttttgcgaaacaaaaaag

SEQ ID NO: 218878 - DNA, 30 bp, Artificial Sequence
  Synthetic oligonucleotide
ttagggtgtggcttgactcagataaaaaag

SEQ ID NO: 218879 - DNA, 30 bp, Artificial Sequence
  Synthetic oligonucleotide
cctcgccgggggggcgtacgcctaaaaaag

SEQ ID NO: 218880 - DNA, 30 bp, Artificial Sequence
  Synthetic oligonucleotide
caattcaactatgagtggttcctaaaaaag

SEQ ID NO: 218881 - DNA, 30 bp, Artificial Sequence
  Synthetic oligonucleotide
ggtgatcggaaggcggagattcacaaaaag

SEQ ID NO: 218882 - DNA, 30 bp, Artificial Sequence
  Synthetic oligonucleotide
ccggatcaataggggtttctgtacaaaaag

SEQ ID NO: 218883 - DNA, 30 bp, Artificial Sequence
  Synthetic oligonucleotide
cacattgggtggattagctgacccaaaaag

SEQ ID NO: 218884 - DNA, 29 bp, Artificial Sequence
  Synthetic oligonucleotide
gaatccgctactggagagctgggaaaaag

SEQ ID NO: 218885 - DNA, 30 bp, Artificial Sequence
  Synthetic oligonucleotide
ctggacagaggcattcacttaactaaaaag

SEQ ID NO: 218886 - DNA, 30 bp, Artificial Sequence
  Synthetic oligonucleotide
aactgcacatacccgcgccataaacaaaag

SEQ ID NO: 218887 - DNA, 30 bp, Artificial Sequence
  Synthetic oligonucleotide
gcagataattgaaaaagggataaacaaaag

SEQ ID NO: 218888 - DNA, 30 bp, Artificial Sequence
  Synthetic oligonucleotide
tcaccgtcggctgcgacgtgataacaaaag

SEQ ID NO: 218889 - DNA, 30 bp, Artificial Sequence
  Synthetic oligonucleotide
acagtacatccctaatttcatatacaaaag

SEQ ID NO: 218890 - DNA, 31 bp, Artificial Sequence
  Synthetic oligonucleotide
tgcaacgcttagatcctgttgtccccaaaag

SEQ ID NO: 218891 - DNA, 30 bp, Artificial Sequence
  Synthetic oligonucleotide
ttagtcgtatctcggggactcgtgcaaaag

SEQ ID NO: 218892 - DNA, 30 bp, Artificial Sequence
  Synthetic oligonucleotide
acgtgcgcctggtgcatgcactatcaaaag

SEQ ID NO: 218893 - DNA, 30 bp, Artificial Sequence
  Synthetic oligonucleotide
tggagcgactcgcaggctatacgtcaaaag

SEQ ID NO: 218894 - DNA, 30 bp, Artificial Sequence
  Synthetic oligonucleotide
ttgagcgctcctggaggcctgtaagaaaag

SEQ ID NO: 218895 - DNA, 30 bp, Artificial Sequence
  Synthetic oligonucleotide
ctctatgccgcagatggacacgtagaaaag

SEQ ID NO: 218896 - DNA, 30 bp, Artificial Sequence
  Synthetic oligonucleotide
attcttgcggtccgtctacgccccgaaaag

SEQ ID NO: 218897 - DNA, 30 bp, Artificial Sequence
  Synthetic oligonucleotide
tctctggtagcagagtgtggcaaggaaaag

SEQ ID NO: 218898 - DNA, 30 bp, Artificial Sequence
  Synthetic oligonucleotide
atcacgggtggtatcgtggcttcggaaaag

SEQ ID NO: 218899 - DNA, 31 bp, Artificial Sequence
  Synthetic oligonucleotide
tgatgggccgggtggggacaaggatgaaaag

SEQ ID NO: 218900 - DNA, 30 bp, Artificial Sequence
  Synthetic oligonucleotide
tcgacggcatacgttctcaatagtgaaaag

SEQ ID NO: 218901 - DNA, 30 bp, Artificial Sequence
  Synthetic oligonucleotide
aatgtagcgcgaatgaacacctgtgaaaag

SEQ ID NO: 218902 - DNA, 30 bp, Artificial Sequence
  Synthetic oligonucleotide
gggcacgatcttaggtttaacccataaaag

SEQ ID NO: 218903 - DNA, 30 bp, Artificial Sequence
  Synthetic oligonucleotide
ggcaaccgcgatgcggagaccttataaaag

SEQ ID NO: 218904 - DNA, 30 bp, Artificial Sequence
  Synthetic oligonucleotide
ttcgttattgctcaagagcagatctaaaag

SEQ ID NO: 218905 - DNA, 30 bp, Artificial Sequence
  Synthetic oligonucleotide
gctcggggtaatcttgttgtgggaacaaag

SEQ ID NO: 218906 - DNA, 30 bp, Artificial Sequence
  Synthetic oligonucleotide
atgtatagcaatacatttagcgggacaaag

SEQ ID NO: 218907 - DNA, 30 bp, Artificial Sequence
  Synthetic oligonucleotide
gttgaagcggttagggcggactggacaaag

SEQ ID NO: 218908 - DNA, 30 bp, Artificial Sequence
  Synthetic oligonucleotide
cctcaacgcacatttcatagtagtacaaag

SEQ ID NO: 218909 - DNA, 30 bp, Artificial Sequence
  Synthetic oligonucleotide
cattatatgtgtctaatcggagacccaaag

SEQ ID NO: 218910 - DNA, 30 bp, Artificial Sequence
  Synthetic oligonucleotide
aagaaaccagttaaaacgtgcgagccaaag

SEQ ID NO: 218911 - DNA, 30 bp, Artificial Sequence
  Synthetic oligonucleotide
aaaagggtggataggcgcatgccagcaaag

SEQ ID NO: 218912 - DNA, 30 bp, Artificial Sequence
  Synthetic oligonucleotide
gggccggcggcggccgataagagagcaaag

SEQ ID NO: 218913 - DNA, 30 bp, Artificial Sequence
  Synthetic oligonucleotide
tttggagacgaagctcgacccatcgcaaag

SEQ ID NO: 218914 - DNA, 30 bp, Artificial Sequence
  Synthetic oligonucleotide
taactctccagaaaatgggatgcggcaaag

SEQ ID NO: 218915 - DNA, 30 bp, Artificial Sequence
  Synthetic oligonucleotide
cgatgcgttggcacaatgcgaattgcaaag

SEQ ID NO: 218916 - DNA, 30 bp, Artificial Sequence
  Synthetic oligonucleotide
aagaacgggtataaagcgggctttgcaaag

SEQ ID NO: 218917 - DNA, 30 bp, Artificial Sequence
  Synthetic oligonucleotide
gcatgacctctgttggttattatatcaaag

SEQ ID NO: 218918 - DNA, 30 bp, Artificial Sequence
  Synthetic oligonucleotide
cacagtatgaggcccagggttccttcaaag

SEQ ID NO: 218919 - DNA, 30 bp, Artificial Sequence
  Synthetic oligonucleotide
ggctctctatcacactatgatcgttcaaag

SEQ ID NO: 218920 - DNA, 30 bp, Artificial Sequence
  Synthetic oligonucleotide
gcagtgaagattggatgatggtcaagaaag

SEQ ID NO: 218921 - DNA, 30 bp, Artificial Sequence
  Synthetic oligonucleotide
ggcgatacgaaactaggtaattcaagaaag

SEQ ID NO: 218922 - DNA, 30 bp, Artificial Sequence
  Synthetic oligonucleotide
gctgcaggacggtctgacagagacagaaag

SEQ ID NO: 218923 - DNA, 30 bp, Artificial Sequence
  Synthetic oligonucleotide
tcctataaggatggcgtaggtaccagaaag

SEQ ID NO: 218924 - DNA, 30 bp, Artificial Sequence
  Synthetic oligonucleotide
tctttaatgccctgccggtcgaagagaaag

SEQ ID NO: 218925 - DNA, 30 bp, Artificial Sequence
  Synthetic oligonucleotide
ttcaggggaacaatggtcacagggagaaag

SEQ ID NO: 218926 - DNA, 30 bp, Artificial Sequence
  Synthetic oligonucleotide
tgagtgtgactttctagtggattgagaaag

SEQ ID NO: 218927 - DNA, 30 bp, Artificial Sequence
  Synthetic oligonucleotide
ccctgggtggcggtaaaagcttatagaaag

SEQ ID NO: 218928 - DNA, 30 bp, Artificial Sequence
  Synthetic oligonucleotide
gtagtcagcctattctgaatgactagaaag

SEQ ID NO: 218929 - DNA, 30 bp, Artificial Sequence
  Synthetic oligonucleotide
tgagttctcagggatactatctagcgaaag

SEQ ID NO: 218930 - DNA, 30 bp, Artificial Sequence
  Synthetic oligonucleotide
gcatttcttaccaaattttgtggaggaaag

SEQ ID NO: 218931 - DNA, 30 bp, Artificial Sequence
  Synthetic oligonucleotide
acgcgatcgtaaaacgtggcattaggaaag

SEQ ID NO: 218932 - DNA, 30 bp, Artificial Sequence
  Synthetic oligonucleotide
gagaatccgcatgtcgcgttcgggggaaag

SEQ ID NO: 218933 - DNA, 30 bp, Artificial Sequence
  Synthetic oligonucleotide
ttctgatagtatcgagataacaatggaaag

SEQ ID NO: 218934 - DNA, 30 bp, Artificial Sequence
  Synthetic oligonucleotide
gggacgctaacatcggcttcatttggaaag

SEQ ID NO: 218935 - DNA, 30 bp, Artificial Sequence
  Synthetic oligonucleotide
cctcgtcaaatccttagtggctcatgaaag

SEQ ID NO: 218936 - DNA, 30 bp, Artificial Sequence
  Synthetic oligonucleotide
cccggcggagcatgtttatagctctgaaag

SEQ ID NO: 218937 - DNA, 30 bp, Artificial Sequence
  Synthetic oligonucleotide
aatcgggacgtgcccgtattggtctgaaag

SEQ ID NO: 218938 - DNA, 30 bp, Artificial Sequence
  Synthetic oligonucleotide
ctgatagaagtcaccaaagcaacttgaaag

SEQ ID NO: 218939 - DNA, 30 bp, Artificial Sequence
  Synthetic oligonucleotide
catccgtcaagcgctcttggggcttgaaag

SEQ ID NO: 218940 - DNA, 30 bp, Artificial Sequence
  Synthetic oligonucleotide
ccccaaatatgggttggtggataaataaag

SEQ ID NO: 218941 - DNA, 30 bp, Artificial Sequence
  Synthetic oligonucleotide
tgtgagttgcggtatcaggtgacaataaag

SEQ ID NO: 218942 - DNA, 30 bp, Artificial Sequence
  Synthetic oligonucleotide
atcgcatataaacggggagtcccaataaag

SEQ ID NO: 218943 - DNA, 30 bp, Artificial Sequence
  Synthetic oligonucleotide
ggcgtgcggccgctactccagtgaataaag

SEQ ID NO: 218944 - DNA, 30 bp, Artificial Sequence
  Synthetic oligonucleotide
attccccggggggcgggatgaaagataaag

SEQ ID NO: 218945 - DNA, 30 bp, Artificial Sequence
  Synthetic oligonucleotide
atagagcggcccccctaaggctcgataaag

SEQ ID NO: 218946 - DNA, 30 bp, Artificial Sequence
  Synthetic oligonucleotide
agggacagatagctccacacttatataaag

SEQ ID NO: 218947 - DNA, 30 bp, Artificial Sequence
  Synthetic oligonucleotide
aagtctcgtattaagtgattctgactaaag

SEQ ID NO: 218948 - DNA, 30 bp, Artificial Sequence
  Synthetic oligonucleotide
cttattggcattgccagcggtatactaaag

SEQ ID NO: 218949 - DNA, 30 bp, Artificial Sequence
  Synthetic oligonucleotide
gaaagacagtctcccgggcacaggctaaag

SEQ ID NO: 218950 - DNA, 30 bp, Artificial Sequence
  Synthetic oligonucleotide
cggaatactagtgggcgtggcgggctaaag

SEQ ID NO: 218951 - DNA, 30 bp, Artificial Sequence
  Synthetic oligonucleotide
tggggttctaaggcacggacgatgctaaag

SEQ ID NO: 218952 - DNA, 30 bp, Artificial Sequence
  Synthetic oligonucleotide
gaaccagaggattatatccgctatctaaag

SEQ ID NO: 218953 - DNA, 30 bp, Artificial Sequence
  Synthetic oligonucleotide
aggtatctagacgcatacagttaagtaaag

SEQ ID NO: 218954 - DNA, 30 bp, Artificial Sequence
  Synthetic oligonucleotide
gttcaagatctcggtaggcaatcagtaaag

SEQ ID NO: 218955 - DNA, 30 bp, Artificial Sequence
  Synthetic oligonucleotide
tatgcacagcgcatcgcacagcatgtaaag

SEQ ID NO: 218956 - DNA, 30 bp, Artificial Sequence
  Synthetic oligonucleotide
gaacccaaagccagagctccgaaattaaag

SEQ ID NO: 218957 - DNA, 30 bp, Artificial Sequence
  Synthetic oligonucleotide
agttagttgcgaattagttttaaattaaag

SEQ ID NO: 218958 - DNA, 30 bp, Artificial Sequence
  Synthetic oligonucleotide
caagaagtgatacatcataatggcttaaag

SEQ ID NO: 218959 - DNA, 30 bp, Artificial Sequence
  Synthetic oligonucleotide
gtatatggggcacagtcatttgggaacaag

SEQ ID NO: 218960 - DNA, 27 bp, Artificial Sequence
  Synthetic oligonucleotide
gtccgagcgcacataaagggacacaag

SEQ ID NO: 218961 - DNA, 30 bp, Artificial Sequence
  Synthetic oligonucleotide
agcactcgaggggaggtccgctaccacaag

SEQ ID NO: 218962 - DNA, 30 bp, Artificial Sequence
  Synthetic oligonucleotide
gatggtgtacttactcattgcacccacaag

SEQ ID NO: 218963 - DNA, 30 bp, Artificial Sequence
  Synthetic oligonucleotide
ggagaacgatgtattcttgatacgcacaag

SEQ ID NO: 218964 - DNA, 30 bp, Artificial Sequence
  Synthetic oligonucleotide
cgtatttcgaagactgtgctgcggcacaag

SEQ ID NO: 218965 - DNA, 30 bp, Artificial Sequence
  Synthetic oligonucleotide
ctactcctgcggacggggtgccaagacaag

SEQ ID NO: 218966 - DNA, 30 bp, Artificial Sequence
  Synthetic oligonucleotide
ctccttggactccggtatacgcgagacaag

SEQ ID NO: 218967 - DNA, 30 bp, Artificial Sequence
  Synthetic oligonucleotide
ctactagaggcttaggtatattatgacaag

SEQ ID NO: 218968 - DNA, 30 bp, Artificial Sequence
  Synthetic oligonucleotide
gcccaccgtttttcccgacggtctgacaag

SEQ ID NO: 218969 - DNA, 31 bp, Artificial Sequence
  Synthetic oligonucleotide
aatagggtatgccactaccacaattgacaag

SEQ ID NO: 218970 - DNA, 30 bp, Artificial Sequence
  Synthetic oligonucleotide
aagctcaccccacgcggggagtttgacaag

SEQ ID NO: 218971 - DNA, 30 bp, Artificial Sequence
  Synthetic oligonucleotide
acttctagaactaaaaagcgccgatacaag

SEQ ID NO: 218972 - DNA, 30 bp, Artificial Sequence
  Synthetic oligonucleotide
cagtaattgactggtcttttgtggtacaag

SEQ ID NO: 218973 - DNA, 29 bp, Artificial Sequence
  Synthetic oligonucleotide
agctactgttaaagtttgtgttgtacaag

SEQ ID NO: 218974 - DNA, 30 bp, Artificial Sequence
  Synthetic oligonucleotide
gcctttgaataacaacccgggcaaaccaag

SEQ ID NO: 218975 - DNA, 30 bp, Artificial Sequence
  Synthetic oligonucleotide
agtaagtagagcacagtctgataaaccaag

SEQ ID NO: 218976 - DNA, 30 bp, Artificial Sequence
  Synthetic oligonucleotide
agctcggttacaagctagcaagtaaccaag

SEQ ID NO: 218977 - DNA, 30 bp, Artificial Sequence
  Synthetic oligonucleotide
aaccccgtcttttcttgctactgcaccaag

SEQ ID NO: 218978 - DNA, 31 bp, Artificial Sequence
  Synthetic oligonucleotide
acaacggattccgtgggcaactctacccaag

SEQ ID NO: 218979 - DNA, 30 bp, Artificial Sequence
  Synthetic oligonucleotide
accgcttaactgacgtaattaagccccaag

SEQ ID NO: 218980 - DNA, 30 bp, Artificial Sequence
  Synthetic oligonucleotide
atcacgtgcgactcggttctcgtccccaag

SEQ ID NO: 218981 - DNA, 30 bp, Artificial Sequence
  Synthetic oligonucleotide
gttaagagaagaaatttcgcgcagcccaag

SEQ ID NO: 218982 - DNA, 31 bp, Artificial Sequence
  Synthetic oligonucleotide
acaccgccatcaccagccgctgaggcccaag

SEQ ID NO: 218983 - DNA, 30 bp, Artificial Sequence
  Synthetic oligonucleotide
ggctcaatcgccatgccccgccacgccaag

SEQ ID NO: 218984 - DNA, 30 bp, Artificial Sequence
  Synthetic oligonucleotide
aggttggactgaagtaggttttgggccaag

SEQ ID NO: 218985 - DNA, 30 bp, Artificial Sequence
  Synthetic oligonucleotide
acggcacttcaggcatgtgcgatggccaag

SEQ ID NO: 218986 - DNA, 30 bp, Artificial Sequence
  Synthetic oligonucleotide
tgcaggtcccgggggtgggtatatgccaag

SEQ ID NO: 218987 - DNA, 30 bp, Artificial Sequence
  Synthetic oligonucleotide
tggtcaatgccgtccatataacttgccaag

SEQ ID NO: 218988 - DNA, 30 bp, Artificial Sequence
  Synthetic oligonucleotide
ggccgttgatgcatactttacatatccaag

SEQ ID NO: 218989 - DNA, 30 bp, Artificial Sequence
  Synthetic oligonucleotide
gccatcgatagcatggaaggaccttccaag

SEQ ID NO: 218990 - DNA, 30 bp, Artificial Sequence
  Synthetic oligonucleotide
gatccggaaaatcgcgtgcaattaagcaag

SEQ ID NO: 218991 - DNA, 30 bp, Artificial Sequence
  Synthetic oligonucleotide
tcaaacaacacatttagataaggcagcaag

SEQ ID NO: 218992 - DNA, 30 bp, Artificial Sequence
  Synthetic oligonucleotide
gggagaggaacgtgctacgcttcacgcaag

SEQ ID NO: 218993 - DNA, 30 bp, Artificial Sequence
  Synthetic oligonucleotide
ctaacgacgctccaacatgaagcccgcaag

SEQ ID NO: 218994 - DNA, 30 bp, Artificial Sequence
  Synthetic oligonucleotide
ggctgcgcagtgggcaaggttcctcgcaag

SEQ ID NO: 218995 - DNA, 30 bp, Artificial Sequence
  Synthetic oligonucleotide
acgaagtagccaacccgcgtttgtcgcaag

SEQ ID NO: 218996 - DNA, 30 bp, Artificial Sequence
  Synthetic oligonucleotide
caatagttacatgcgaggtagtgaggcaag

SEQ ID NO: 218997 - DNA, 30 bp, Artificial Sequence
  Synthetic oligonucleotide
gaaaagggcggtgaattgattgccggcaag

SEQ ID NO: 218998 - DNA, 30 bp, Artificial Sequence
  Synthetic oligonucleotide
gtctgtcggaatccacgttacaggggcaag

SEQ ID NO: 218999 - DNA, 30 bp, Artificial Sequence
  Synthetic oligonucleotide
gttggtggggctggactagcacggggcaag

SEQ ID NO: 219000 - DNA, 30 bp, Artificial Sequence
  Synthetic oligonucleotide
acaggctagatacaaagacgctctggcaag

SEQ ID NO: 219001 - DNA, 30 bp, Artificial Sequence
  Synthetic oligonucleotide
agcaatgagggttagaacaacaaatgcaag

SEQ ID NO: 219002 - DNA, 30 bp, Artificial Sequence
  Synthetic oligonucleotide
ggacaatctaccgcgcactggttgtgcaag

SEQ ID NO: 219003 - DNA, 30 bp, Artificial Sequence
  Synthetic oligonucleotide
agatcttaatggattatggctgcttgcaag

SEQ ID NO: 219004 - DNA, 30 bp, Artificial Sequence
  Synthetic oligonucleotide
ttttcgggaaaagtcaagtattcaatcaag

SEQ ID NO: 219005 - DNA, 30 bp, Artificial Sequence
  Synthetic oligonucleotide
gcttctccccgcaatagggatttaatcaag

SEQ ID NO: 219006 - DNA, 30 bp, Artificial Sequence
  Synthetic oligonucleotide
gtctctgatggattcaacgtgtagatcaag

SEQ ID NO: 219007 - DNA, 30 bp, Artificial Sequence
  Synthetic oligonucleotide
tcatccgatatagtttatgatgcgatcaag

SEQ ID NO: 219008 - DNA, 30 bp, Artificial Sequence
  Synthetic oligonucleotide
gagtgataaaccatacattcgtcactcaag

SEQ ID NO: 219009 - DNA, 30 bp, Artificial Sequence
  Synthetic oligonucleotide
cttatgctgtgtataagtcgtctactcaag

SEQ ID NO: 219010 - DNA, 30 bp, Artificial Sequence
  Synthetic oligonucleotide
acctacgggataattcacaattgcctcaag

SEQ ID NO: 219011 - DNA, 30 bp, Artificial Sequence
  Synthetic oligonucleotide
acgccaggtttatttccaagaatcctcaag

SEQ ID NO: 219012 - DNA, 30 bp, Artificial Sequence
  Synthetic oligonucleotide
cctagataagtaatcgcatacgctctcaag

SEQ ID NO: 219013 - DNA, 30 bp, Artificial Sequence
  Synthetic oligonucleotide
gtcggacacattgggtatagtgctctcaag

SEQ ID NO: 219014 - DNA, 30 bp, Artificial Sequence
  Synthetic oligonucleotide
cagttacaattgataagatcagacgtcaag

SEQ ID NO: 219015 - DNA, 30 bp, Artificial Sequence
  Synthetic oligonucleotide
taggatagaattatgacccggtcggtcaag

SEQ ID NO: 219016 - DNA, 30 bp, Artificial Sequence
  Synthetic oligonucleotide
acattcggttgtgtttcgcttaatgtcaag

SEQ ID NO: 219017 - DNA, 30 bp, Artificial Sequence
  Synthetic oligonucleotide
taagtgagcggtatcttacaggaattcaag

SEQ ID NO: 219018 - DNA, 30 bp, Artificial Sequence
  Synthetic oligonucleotide
gcgacagtatacctcctgcgggccttcaag

SEQ ID NO: 219019 - DNA, 30 bp, Artificial Sequence
  Synthetic oligonucleotide
aagtaagatgggatgatggttccgttcaag

SEQ ID NO: 219020 - DNA, 30 bp, Artificial Sequence
  Synthetic oligonucleotide
aagcaacggcaggtatatagttcgttcaag

SEQ ID NO: 219021 - DNA, 30 bp, Artificial Sequence
  Synthetic oligonucleotide
acgatctggctttacttcggacttttcaag

SEQ ID NO: 219022 - DNA, 30 bp, Artificial Sequence
  Synthetic oligonucleotide
atacccgacggatagcaaagagttttcaag

SEQ ID NO: 219023 - DNA, 30 bp, Artificial Sequence
  Synthetic oligonucleotide
gagacgcggctgcgcataacctagaagaag

SEQ ID NO: 219024 - DNA, 30 bp, Artificial Sequence
  Synthetic oligonucleotide
ccgccctagaaccaacgttggacgaagaag

SEQ ID NO: 219025 - DNA, 30 bp, Artificial Sequence
  Synthetic oligonucleotide
aatatcaccgaatccacggtttataagaag

SEQ ID NO: 219026 - DNA, 30 bp, Artificial Sequence
  Synthetic oligonucleotide
cacttctcatgcgcgggggtatctaagaag

SEQ ID NO: 219027 - DNA, 30 bp, Artificial Sequence
  Synthetic oligonucleotide
cgatcaatgccgcttggtcgttctaagaag

SEQ ID NO: 219028 - DNA, 30 bp, Artificial Sequence
  Synthetic oligonucleotide
gcatcgctgtcggtccgatagtgtaagaag

SEQ ID NO: 219029 - DNA, 30 bp, Artificial Sequence
  Synthetic oligonucleotide
ttaagccccggcttcggtccacagcagaag

SEQ ID NO: 219030 - DNA, 30 bp, Artificial Sequence
  Synthetic oligonucleotide
gtctagcgcgagccggggattcagcagaag

SEQ ID NO: 219031 - DNA, 30 bp, Artificial Sequence
  Synthetic oligonucleotide
gactaagtctaaggggtttcagcgcagaag

SEQ ID NO: 219032 - DNA, 30 bp, Artificial Sequence
  Synthetic oligonucleotide
ggaatcttgcaaattacccccgatcagaag

SEQ ID NO: 219033 - DNA, 30 bp, Artificial Sequence
  Synthetic oligonucleotide
gcgaccctagaattgaattggagtcagaag

SEQ ID NO: 219034 - DNA, 30 bp, Artificial Sequence
  Synthetic oligonucleotide
ctgaactgtgtgtatatggaaattcagaag

SEQ ID NO: 219035 - DNA, 30 bp, Artificial Sequence
  Synthetic oligonucleotide
gcgtacactcgtgagacacattttcagaag

SEQ ID NO: 219036 - DNA, 30 bp, Artificial Sequence
  Synthetic oligonucleotide
gccttagaccctcggatgtcgacagagaag

SEQ ID NO: 219037 - DNA, 30 bp, Artificial Sequence
  Synthetic oligonucleotide
gttcatagtgatgggacggggaacgagaag

SEQ ID NO: 219038 - DNA, 30 bp, Artificial Sequence
  Synthetic oligonucleotide
atccacgcgtaccgatccgtcccggagaag

SEQ ID NO: 219039 - DNA, 30 bp, Artificial Sequence
  Synthetic oligonucleotide
tgcatcatcgggatcgccatacatgagaag

SEQ ID NO: 219040 - DNA, 30 bp, Artificial Sequence
  Synthetic oligonucleotide
ccatgcatccatggtttagacagtgagaag

SEQ ID NO: 219041 - DNA, 30 bp, Artificial Sequence
  Synthetic oligonucleotide
aggcggtaatgcgtcgtcctagcatagaag

SEQ ID NO: 219042 - DNA, 30 bp, Artificial Sequence
  Synthetic oligonucleotide
tggaacgggacccgttcaggtatatagaag

SEQ ID NO: 219043 - DNA, 30 bp, Artificial Sequence
  Synthetic oligonucleotide
cgactttcgagtataaaaagatactagaag

SEQ ID NO: 219044 - DNA, 30 bp, Artificial Sequence
  Synthetic oligonucleotide
attactcaattacatcgattgcgctagaag

SEQ ID NO: 219045 - DNA, 30 bp, Artificial Sequence
  Synthetic oligonucleotide
ccgcgccggctcaaaggatgactctagaag

SEQ ID NO: 219046 - DNA, 30 bp, Artificial Sequence
  Synthetic oligonucleotide
tgtttggcggacgtcctcgtcaagtagaag

SEQ ID NO: 219047 - DNA, 30 bp, Artificial Sequence
  Synthetic oligonucleotide
gcatgatcctgtgcatgctttacgtagaag

SEQ ID NO: 219048 - DNA, 30 bp, Artificial Sequence
  Synthetic oligonucleotide
agggcgcaaggcttatacgggaggtagaag

SEQ ID NO: 219049 - DNA, 30 bp, Artificial Sequence
  Synthetic oligonucleotide
tatttacggggaataagtacaaattagaag

SEQ ID NO: 219050 - DNA, 30 bp, Artificial Sequence
  Synthetic oligonucleotide
aacgactataattaggtagtaataacgaag

SEQ ID NO: 219051 - DNA, 30 bp, Artificial Sequence
  Synthetic oligonucleotide
agggtttcaccaaaccagtatagcacgaag

SEQ ID NO: 219052 - DNA, 30 bp, Artificial Sequence
  Synthetic oligonucleotide
gggtaccacgtagtgttccatatcccgaag

SEQ ID NO: 219053 - DNA, 30 bp, Artificial Sequence
  Synthetic oligonucleotide
aaaaagggatagatttgggccgctccgaag

SEQ ID NO: 219054 - DNA, 30 bp, Artificial Sequence
  Synthetic oligonucleotide
gaggtcttaggggttcgtagctcagcgaag

SEQ ID NO: 219055 - DNA, 30 bp, Artificial Sequence
  Synthetic oligonucleotide
cttggtatgtgtcccaaagagctagcgaag

SEQ ID NO: 219056 - DNA, 30 bp, Artificial Sequence
  Synthetic oligonucleotide
tccttggcttgttgtagcagatgcgcgaag

SEQ ID NO: 219057 - DNA, 30 bp, Artificial Sequence
  Synthetic oligonucleotide
cactgggtgcttcgcaaggcgtgcgcgaag

SEQ ID NO: 219058 - DNA, 30 bp, Artificial Sequence
  Synthetic oligonucleotide
ccatacatcgcgttgcatcaacgggcgaag

SEQ ID NO: 219059 - DNA, 30 bp, Artificial Sequence
  Synthetic oligonucleotide
gtactcgacgggtagcaataggatgcgaag

SEQ ID NO: 219060 - DNA, 30 bp, Artificial Sequence
  Synthetic oligonucleotide
tccgttatggttcccaaaacctctgcgaag

SEQ ID NO: 219061 - DNA, 30 bp, Artificial Sequence
  Synthetic oligonucleotide
ctatctagaagacgtatcgcaagtgcgaag

SEQ ID NO: 219062 - DNA, 30 bp, Artificial Sequence
  Synthetic oligonucleotide
acataacttaatgtcggtaagatatcgaag

SEQ ID NO: 219063 - DNA, 30 bp, Artificial Sequence
  Synthetic oligonucleotide
ctctctcgaggggtgtggcagtactcgaag

SEQ ID NO: 219064 - DNA, 30 bp, Artificial Sequence
  Synthetic oligonucleotide
ggatttcatacagcaattaccgcctcgaag

SEQ ID NO: 219065 - DNA, 30 bp, Artificial Sequence
  Synthetic oligonucleotide
gccgtttttatcaacggttgagcgtcgaag

SEQ ID NO: 219066 - DNA, 31 bp, Artificial Sequence
  Synthetic oligonucleotide
ggtcattggctaggtgataagtatgtcgaag

SEQ ID NO: 219067 - DNA, 30 bp, Artificial Sequence
  Synthetic oligonucleotide
gcacgatcgctactcttaaaaaattcgaag

SEQ ID NO: 219068 - DNA, 30 bp, Artificial Sequence
  Synthetic oligonucleotide
tgggtagaggaaaccattcgttattcgaag

SEQ ID NO: 219069 - DNA, 30 bp, Artificial Sequence
  Synthetic oligonucleotide
atactagctgcacgttattgttattcgaag

SEQ ID NO: 219070 - DNA, 30 bp, Artificial Sequence
  Synthetic oligonucleotide
aataacggatgaaggccaaatccttcgaag

SEQ ID NO: 219071 - DNA, 30 bp, Artificial Sequence
  Synthetic oligonucleotide
gtctgactggcgtcctcgacgacaaggaag

SEQ ID NO: 219072 - DNA, 30 bp, Artificial Sequence
  Synthetic oligonucleotide
tgtgaagattgggctctgtgttcaaggaag

SEQ ID NO: 219073 - DNA, 30 bp, Artificial Sequence
  Synthetic oligonucleotide
aacttccattacagcggccaaggcaggaag

SEQ ID NO: 219074 - DNA, 30 bp, Artificial Sequence
  Synthetic oligonucleotide
aagctgcatagcctctgctagatcaggaag

SEQ ID NO: 219075 - DNA, 30 bp, Artificial Sequence
  Synthetic oligonucleotide
ctccaagcctaactataagggccgaggaag

SEQ ID NO: 219076 - DNA, 30 bp, Artificial Sequence
  Synthetic oligonucleotide
tcagatttataattccgcaaagggaggaag

SEQ ID NO: 219077 - DNA, 30 bp, Artificial Sequence
  Synthetic oligonucleotide
ttcactcgctcaacgtgaacgactaggaag

SEQ ID NO: 219078 - DNA, 30 bp, Artificial Sequence
  Synthetic oligonucleotide
cgccatgttgttgggttttgggctaggaag

SEQ ID NO: 219079 - DNA, 30 bp, Artificial Sequence
  Synthetic oligonucleotide
agcgcgctatagtgcagcggccttaggaag

SEQ ID NO: 219080 - DNA, 30 bp, Artificial Sequence
  Synthetic oligonucleotide
agagcttggccagggtaaactgtacggaag

SEQ ID NO: 219081 - DNA, 30 bp, Artificial Sequence
  Synthetic oligonucleotide
ggttgtacgtaaccctccgccgaccggaag

SEQ ID NO: 219082 - DNA, 30 bp, Artificial Sequence
  Synthetic oligonucleotide
gttcatttccgaaaagtatcgaagcggaag

SEQ ID NO: 219083 - DNA, 30 bp, Artificial Sequence
  Synthetic oligonucleotide
gcagctgactcaaatggtctctggcggaag

SEQ ID NO: 219084 - DNA, 30 bp, Artificial Sequence
  Synthetic oligonucleotide
ccagcgctacgggatactacagctcggaag

SEQ ID NO: 219085 - DNA, 30 bp, Artificial Sequence
  Synthetic oligonucleotide
caatacatctgagtagtggacattcggaag

SEQ ID NO: 219086 - DNA, 30 bp, Artificial Sequence
  Synthetic oligonucleotide
caaaacaggacacactgattggttcggaag

SEQ ID NO: 219087 - DNA, 30 bp, Artificial Sequence
  Synthetic oligonucleotide
tcgatatttcatggatgcattgccgggaag

SEQ ID NO: 219088 - DNA, 30 bp, Artificial Sequence
  Synthetic oligonucleotide
tcatgagcgcaaagattcagtttggggaag

SEQ ID NO: 219089 - DNA, 30 bp, Artificial Sequence
  Synthetic oligonucleotide
ttcatgatcctaattacattggatgggaag

SEQ ID NO: 219090 - DNA, 30 bp, Artificial Sequence
  Synthetic oligonucleotide
gccggacccgtcctcaaataggttgggaag

SEQ ID NO: 219091 - DNA, 30 bp, Artificial Sequence
  Synthetic oligonucleotide
aaggcagtaactgactatttggtatggaag

SEQ ID NO: 219092 - DNA, 29 bp, Artificial Sequence
  Synthetic oligonucleotide
ctcttagatcatgcactgcgttgtggaag

SEQ ID NO: 219093 - DNA, 30 bp, Artificial Sequence
  Synthetic oligonucleotide
ttcgaggtagaccctaaattcgcaatgaag

SEQ ID NO: 219094 - DNA, 30 bp, Artificial Sequence
  Synthetic oligonucleotide
acagagttcgtaaggttgcacagcatgaag

SEQ ID NO: 219095 - DNA, 30 bp, Artificial Sequence
  Synthetic oligonucleotide
gatgcggcgtgggttaattcaaagatgaag

SEQ ID NO: 219096 - DNA, 30 bp, Artificial Sequence
  Synthetic oligonucleotide
cacgccggactacctaggtttaagatgaag

SEQ ID NO: 219097 - DNA, 30 bp, Artificial Sequence
  Synthetic oligonucleotide
caaaccatgtcattcatcatagctatgaag

SEQ ID NO: 219098 - DNA, 30 bp, Artificial Sequence
  Synthetic oligonucleotide
gtatataactcctacacctgtggtatgaag

SEQ ID NO: 219099 - DNA, 30 bp, Artificial Sequence
  Synthetic oligonucleotide
ccgccgcgggcggcttacgcgtgtatgaag

SEQ ID NO: 219100 - DNA, 30 bp, Artificial Sequence
  Synthetic oligonucleotide
ttgtcgttggccaacagtaaggttatgaag

SEQ ID NO: 219101 - DNA, 30 bp, Artificial Sequence
  Synthetic oligonucleotide
taactaaacttggcggctgtagaactgaag

SEQ ID NO: 219102 - DNA, 30 bp, Artificial Sequence
  Synthetic oligonucleotide
atacggggaagcgcgactgcagtactgaag

SEQ ID NO: 219103 - DNA, 30 bp, Artificial Sequence
  Synthetic oligonucleotide
ctataccccacgaagtctgctaccctgaag

SEQ ID NO: 219104 - DNA, 30 bp, Artificial Sequence
  Synthetic oligonucleotide
acactccaacttaattaattcggcctgaag

SEQ ID NO: 219105 - DNA, 30 bp, Artificial Sequence
  Synthetic oligonucleotide
tcaacaggcggtggagcttctatcctgaag

SEQ ID NO: 219106 - DNA, 30 bp, Artificial Sequence
  Synthetic oligonucleotide
ggggtttagatgcaggatatgtatctgaag

SEQ ID NO: 219107 - DNA, 30 bp, Artificial Sequence
  Synthetic oligonucleotide
ccccaagaggagtgaattcgcgctctgaag

SEQ ID NO: 219108 - DNA, 30 bp, Artificial Sequence
  Synthetic oligonucleotide
cgttctagatgacaagtgtcaatagtgaag

SEQ ID NO: 219109 - DNA, 30 bp, Artificial Sequence
  Synthetic oligonucleotide
taacactgttggtgtccaaacagcgtgaag

SEQ ID NO: 219110 - DNA, 30 bp, Artificial Sequence
  Synthetic oligonucleotide
agcgttccaaagcccttaaggggcgtgaag

SEQ ID NO: 219111 - DNA, 30 bp, Artificial Sequence
  Synthetic oligonucleotide
taggataacaaaattaacctgcaggtgaag

SEQ ID NO: 219112 - DNA, 30 bp, Artificial Sequence
  Synthetic oligonucleotide
cccgcgtgaaacgttgagctacgggtgaag

SEQ ID NO: 219113 - DNA, 30 bp, Artificial Sequence
  Synthetic oligonucleotide
tgtaggatctgatgctaggaaggggtgaag

SEQ ID NO: 219114 - DNA, 30 bp, Artificial Sequence
  Synthetic oligonucleotide
tttacaagcactcgcgtttcagtggtgaag

SEQ ID NO: 219115 - DNA, 30 bp, Artificial Sequence
  Synthetic oligonucleotide
taggctcgatgtcctccttttacgttgaag

SEQ ID NO: 219116 - DNA, 30 bp, Artificial Sequence
  Synthetic oligonucleotide
gtgcttagcgccatccagtacccgttgaag

SEQ ID NO: 219117 - DNA, 30 bp, Artificial Sequence
  Synthetic oligonucleotide
ttaccggtaggcagagtttataatttgaag

SEQ ID NO: 219118 - DNA, 30 bp, Artificial Sequence
  Synthetic oligonucleotide
cataagcacaattcgaggtagtccaataag

SEQ ID NO: 219119 - DNA, 30 bp, Artificial Sequence
  Synthetic oligonucleotide
ttagctgagcagttcgcgcggtccaataag

SEQ ID NO: 219120 - DNA, 30 bp, Artificial Sequence
  Synthetic oligonucleotide
gaccgaatcgtgctgacctgttgcaataag

SEQ ID NO: 219121 - DNA, 30 bp, Artificial Sequence
  Synthetic oligonucleotide
atgcggatctgcgcgtaggaattgaataag

SEQ ID NO: 219122 - DNA, 30 bp, Artificial Sequence
  Synthetic oligonucleotide
tcgtacctcaattgtccgatagataataag

SEQ ID NO: 219123 - DNA, 30 bp, Artificial Sequence
  Synthetic oligonucleotide
acagtctattttcatccacaggttaataag

SEQ ID NO: 219124 - DNA, 30 bp, Artificial Sequence
  Synthetic oligonucleotide
caaggggtgtagcccccagcccgtcataag

SEQ ID NO: 219125 - DNA, 30 bp, Artificial Sequence
  Synthetic oligonucleotide
ataggtcacctctgcccacgatttcataag

SEQ ID NO: 219126 - DNA, 30 bp, Artificial Sequence
  Synthetic oligonucleotide
ttagcgattcggaaataagcctaagataag

SEQ ID NO: 219127 - DNA, 30 bp, Artificial Sequence
  Synthetic oligonucleotide
gcagtgatggtaactctgctgccagataag

SEQ ID NO: 219128 - DNA, 30 bp, Artificial Sequence
  Synthetic oligonucleotide
aatcatgatctgtatagaagattagataag

SEQ ID NO: 219129 - DNA, 30 bp, Artificial Sequence
  Synthetic oligonucleotide
ggttacaccggtacagcgccaaccgataag

SEQ ID NO: 219130 - DNA, 30 bp, Artificial Sequence
  Synthetic oligonucleotide
tggtctctgaatggttaattccgggataag

SEQ ID NO: 219131 - DNA, 30 bp, Artificial Sequence
  Synthetic oligonucleotide
agcccatttaatgagtacagcttggataag

SEQ ID NO: 219132 - DNA, 30 bp, Artificial Sequence
  Synthetic oligonucleotide
gccagttccgtagagtctgcttctgataag

SEQ ID NO: 219133 - DNA, 30 bp, Artificial Sequence
  Synthetic oligonucleotide
tacggagggtccatccttagttcatataag

SEQ ID NO: 219134 - DNA, 30 bp, Artificial Sequence
  Synthetic oligonucleotide
acgctgacagcggataccggttcatataag

SEQ ID NO: 219135 - DNA, 30 bp, Artificial Sequence
  Synthetic oligonucleotide
ctgacacagttgcacagtagccagtataag

SEQ ID NO: 219136 - DNA, 30 bp, Artificial Sequence
  Synthetic oligonucleotide
cacgcttcggcgtatagatgcatgtataag

SEQ ID NO: 219137 - DNA, 31 bp, Artificial Sequence
  Synthetic oligonucleotide
aacacgcccagctctatttgctcgttataag

SEQ ID NO: 219138 - DNA, 30 bp, Artificial Sequence
  Synthetic oligonucleotide
caagagcactggagggatttagaaactaag

SEQ ID NO: 219139 - DNA, 30 bp, Artificial Sequence
  Synthetic oligonucleotide
tggaagccccagaaatagtattacactaag

SEQ ID NO: 219140 - DNA, 30 bp, Artificial Sequence
  Synthetic oligonucleotide
cagaaagccaccgctctttgtgcgactaag

SEQ ID NO: 219141 - DNA, 30 bp, Artificial Sequence
  Synthetic oligonucleotide
agagtattttctctattacccaggactaag

SEQ ID NO: 219142 - DNA, 30 bp, Artificial Sequence
  Synthetic oligonucleotide
atgtattgcctaaacggaaacaaacctaag

SEQ ID NO: 219143 - DNA, 30 bp, Artificial Sequence
  Synthetic oligonucleotide
accccccgctgtcacatctgaagccctaag

SEQ ID NO: 219144 - DNA, 30 bp, Artificial Sequence
  Synthetic oligonucleotide
acgggtagtgtcacattatgcagccctaag

SEQ ID NO: 219145 - DNA, 30 bp, Artificial Sequence
  Synthetic oligonucleotide
tgacaggcacaaatttttcccgacgctaag

SEQ ID NO: 219146 - DNA, 30 bp, Artificial Sequence
  Synthetic oligonucleotide
cacgtctatgttcagtcagagatggctaag

SEQ ID NO: 219147 - DNA, 30 bp, Artificial Sequence
  Synthetic oligonucleotide
atgcggataagctagagggtccatgctaag

SEQ ID NO: 219148 - DNA, 30 bp, Artificial Sequence
  Synthetic oligonucleotide
cgagtgatcacgtgtgggctgtatgctaag

SEQ ID NO: 219149 - DNA, 30 bp, Artificial Sequence
  Synthetic oligonucleotide
atcaacccgacgaccgctcccagctctaag

SEQ ID NO: 219150 - DNA, 30 bp, Artificial Sequence
  Synthetic oligonucleotide
aaccactctaaccagcgacacgagtctaag

SEQ ID NO: 219151 - DNA, 31 bp, Artificial Sequence
  Synthetic oligonucleotide
aactagtggcagaaatgagggtgtgtctaag

SEQ ID NO: 219152 - DNA, 31 bp, Artificial Sequence
  Synthetic oligonucleotide
accttggccgagccctccacataaaagtaag

SEQ ID NO: 219153 - DNA, 30 bp, Artificial Sequence
  Synthetic oligonucleotide
ttctcttggtacgggagcaaaggaagtaag

SEQ ID NO: 219154 - DNA, 30 bp, Artificial Sequence
  Synthetic oligonucleotide
gggcggcaaatggcgcgctaatgaagtaag

SEQ ID NO: 219155 - DNA, 30 bp, Artificial Sequence
  Synthetic oligonucleotide
gcccgtaaaccagcgcgcgctaacagtaag

SEQ ID NO: 219156 - DNA, 30 bp, Artificial Sequence
  Synthetic oligonucleotide
ataatgctttcgctttaattgaccagtaag

SEQ ID NO: 219157 - DNA, 30 bp, Artificial Sequence
  Synthetic oligonucleotide
ttggattgttgtatagatatcggcagtaag

SEQ ID NO: 219158 - DNA, 30 bp, Artificial Sequence
  Synthetic oligonucleotide
taggggccggggggcgcaggtactagtaag

SEQ ID NO: 219159 - DNA, 30 bp, Artificial Sequence
  Synthetic oligonucleotide
agaagtaggtactggtgagtgattagtaag

SEQ ID NO: 219160 - DNA, 30 bp, Artificial Sequence
  Synthetic oligonucleotide
aacagctgtatgtttaaagatgaacgtaag

SEQ ID NO: 219161 - DNA, 30 bp, Artificial Sequence
  Synthetic oligonucleotide
tgtatagaaagatcagtggcctagcgtaag

SEQ ID NO: 219162 - DNA, 30 bp, Artificial Sequence
  Synthetic oligonucleotide
aattacgggccacgctccgactgtcgtaag

SEQ ID NO: 219163 - DNA, 30 bp, Artificial Sequence
  Synthetic oligonucleotide
ctttgcgtagagtctcacccgataggtaag

SEQ ID NO: 219164 - DNA, 30 bp, Artificial Sequence
  Synthetic oligonucleotide
gctagttagcattgttaaggcaacggtaag

SEQ ID NO: 219165 - DNA, 30 bp, Artificial Sequence
  Synthetic oligonucleotide
tttagcatgaggaaaccaagcaccggtaag

SEQ ID NO: 219166 - DNA, 30 bp, Artificial Sequence
  Synthetic oligonucleotide
attgtggatacttgcgcaaggtccggtaag

SEQ ID NO: 219167 - DNA, 30 bp, Artificial Sequence
  Synthetic oligonucleotide
ctatggcatccccacgggtcagtgggtaag

SEQ ID NO: 219168 - DNA, 30 bp, Artificial Sequence
  Synthetic oligonucleotide
attagccttgtgccaatccgttttggtaag

SEQ ID NO: 219169 - DNA, 30 bp, Artificial Sequence
  Synthetic oligonucleotide
gtctacctcaaaaggcgtgtttactgtaag

SEQ ID NO: 219170 - DNA, 30 bp, Artificial Sequence
  Synthetic oligonucleotide
gtcatgattggccataaatctgagtgtaag

SEQ ID NO: 219171 - DNA, 30 bp, Artificial Sequence
  Synthetic oligonucleotide
acagttgttactcgattactcgggtgtaag

SEQ ID NO: 219172 - DNA, 30 bp, Artificial Sequence
  Synthetic oligonucleotide
gcaacaaatcagtattctctgtattgtaag

SEQ ID NO: 219173 - DNA, 30 bp, Artificial Sequence
  Synthetic oligonucleotide
ttatgagagattcatattacaacttgtaag

SEQ ID NO: 219174 - DNA, 30 bp, Artificial Sequence
  Synthetic oligonucleotide
catacgattacggaagccgtcccttgtaag

SEQ ID NO: 219175 - DNA, 30 bp, Artificial Sequence
  Synthetic oligonucleotide
actaatcaaatccggggcccgaaaattaag

SEQ ID NO: 219176 - DNA, 30 bp, Artificial Sequence
  Synthetic oligonucleotide
ctgtgctccaccttagttgcgataattaag

SEQ ID NO: 219177 - DNA, 30 bp, Artificial Sequence
  Synthetic oligonucleotide
cagatacacgatcagacacaggcgattaag

SEQ ID NO: 219178 - DNA, 30 bp, Artificial Sequence
  Synthetic oligonucleotide
caattaggtatcgttaggcacctgattaag

SEQ ID NO: 219179 - DNA, 30 bp, Artificial Sequence
  Synthetic oligonucleotide
acagggggactgttacacggagtgattaag

SEQ ID NO: 219180 - DNA, 30 bp, Artificial Sequence
  Synthetic oligonucleotide
gcgatcggctctgggccgttacgtattaag

SEQ ID NO: 219181 - DNA, 30 bp, Artificial Sequence
  Synthetic oligonucleotide
ctttaacacatgccatccatcggtattaag

SEQ ID NO: 219182 - DNA, 30 bp, Artificial Sequence
  Synthetic oligonucleotide
gcacctgacttaactcaaagatttattaag

SEQ ID NO: 219183 - DNA, 30 bp, Artificial Sequence
  Synthetic oligonucleotide
aacgatccacagggggacagccaccttaag

SEQ ID NO: 219184 - DNA, 30 bp, Artificial Sequence
  Synthetic oligonucleotide
taggaggaagacagtatggctgggcttaag

SEQ ID NO: 219185 - DNA, 30 bp, Artificial Sequence
  Synthetic oligonucleotide
tccgcgtccgcttatattaaactcgttaag

SEQ ID NO: 219186 - DNA, 30 bp, Artificial Sequence
  Synthetic oligonucleotide
cacccaaaagtcgtgaacgccttcgttaag

SEQ ID NO: 219187 - DNA, 30 bp, Artificial Sequence
  Synthetic oligonucleotide
gtagagtatcttaagagcgagaatgttaag

SEQ ID NO: 219188 - DNA, 30 bp, Artificial Sequence
  Synthetic oligonucleotide
tgcagtctcaaaatgcaataacgtgttaag

SEQ ID NO: 219189 - DNA, 30 bp, Artificial Sequence
  Synthetic oligonucleotide
ggatactacaggctcttcgggtttgttaag

SEQ ID NO: 219190 - DNA, 30 bp, Artificial Sequence
  Synthetic oligonucleotide
tataggttgccccgagtacatggatttaag

SEQ ID NO: 219191 - DNA, 30 bp, Artificial Sequence
  Synthetic oligonucleotide
actcaaagttagaggtaacatcactttaag

SEQ ID NO: 219192 - DNA, 30 bp, Artificial Sequence
  Synthetic oligonucleotide
aactgtgcacacgccaggttagcctttaag

SEQ ID NO: 219193 - DNA, 30 bp, Artificial Sequence
  Synthetic oligonucleotide
acttaccaacgtgtgaacgtgggaaaacag

SEQ ID NO: 219194 - DNA, 30 bp, Artificial Sequence
  Synthetic oligonucleotide
tttagctgtcaagattaagaagacaaacag

SEQ ID NO: 219195 - DNA, 30 bp, Artificial Sequence
  Synthetic oligonucleotide
agaaagagcggtttccaaaatagcaaacag

SEQ ID NO: 219196 - DNA, 30 bp, Artificial Sequence
  Synthetic oligonucleotide
gagcaaagcccaggatgtagtctcaaacag

SEQ ID NO: 219197 - DNA, 30 bp, Artificial Sequence
  Synthetic oligonucleotide
gcgctatgaactaattattaattcaaacag

SEQ ID NO: 219198 - DNA, 30 bp, Artificial Sequence
  Synthetic oligonucleotide
ctgatcaccacctgatttgggtgacaacag

SEQ ID NO: 219199 - DNA, 30 bp, Artificial Sequence
  Synthetic oligonucleotide
tcattaataacgttcgcgagaccgcaacag

SEQ ID NO: 219200 - DNA, 30 bp, Artificial Sequence
  Synthetic oligonucleotide
accacactggcaaatgggttgattcaacag

SEQ ID NO: 219201 - DNA, 30 bp, Artificial Sequence
  Synthetic oligonucleotide
ccacagagtgctgaggcggaacgcgaacag

SEQ ID NO: 219202 - DNA, 30 bp, Artificial Sequence
  Synthetic oligonucleotide
gttgtctccagactgggttcgtgcgaacag

SEQ ID NO: 219203 - DNA, 30 bp, Artificial Sequence
  Synthetic oligonucleotide
ctccgggagttttcggacactatggaacag

SEQ ID NO: 219204 - DNA, 30 bp, Artificial Sequence
  Synthetic oligonucleotide
caggggctacaattttccattgatgaacag

SEQ ID NO: 219205 - DNA, 30 bp, Artificial Sequence
  Synthetic oligonucleotide
gtgcggatgcttaatgttcgtactgaacag

SEQ ID NO: 219206 - DNA, 30 bp, Artificial Sequence
  Synthetic oligonucleotide
cagtatatatttataataagatcataacag

SEQ ID NO: 219207 - DNA, 30 bp, Artificial Sequence
  Synthetic oligonucleotide
catatgggccatcgcacacgcggataacag

SEQ ID NO: 219208 - DNA, 30 bp, Artificial Sequence
  Synthetic oligonucleotide
gatctgctgttgtcggctatatgataacag

SEQ ID NO: 219209 - DNA, 30 bp, Artificial Sequence
  Synthetic oligonucleotide
atcaaggccggatagggcagaacctaacag

SEQ ID NO: 219210 - DNA, 30 bp, Artificial Sequence
  Synthetic oligonucleotide
aacgaaagaccgtagttcagaaagtaacag

SEQ ID NO: 219211 - DNA, 30 bp, Artificial Sequence
  Synthetic oligonucleotide
atctcaggacaatggctgcgccagtaacag

SEQ ID NO: 219212 - DNA, 30 bp, Artificial Sequence
  Synthetic oligonucleotide
ttcaacgttattatctgatacacgtaacag

SEQ ID NO: 219213 - DNA, 30 bp, Artificial Sequence
  Synthetic oligonucleotide
cgacatttagttgtagttctaccgtaacag

SEQ ID NO: 219214 - DNA, 30 bp, Artificial Sequence
  Synthetic oligonucleotide
tttctcggtaacagacatcacgggtaacag

SEQ ID NO: 219215 - DNA, 30 bp, Artificial Sequence
  Synthetic oligonucleotide
tgttctttgacggccgcttgcgccacacag

SEQ ID NO: 219216 - DNA, 30 bp, Artificial Sequence
  Synthetic oligonucleotide
aggttgggggacttgttcgggatcacacag

SEQ ID NO: 219217 - DNA, 30 bp, Artificial Sequence
  Synthetic oligonucleotide
caatgacgacaatcgcgctaggttacacag

SEQ ID NO: 219218 - DNA, 30 bp, Artificial Sequence
  Synthetic oligonucleotide
caatccaggatttatgactaggaaccacag

SEQ ID NO: 219219 - DNA, 30 bp, Artificial Sequence
  Synthetic oligonucleotide
tcgagacagatggcggtggtctaaccacag

SEQ ID NO: 219220 - DNA, 30 bp, Artificial Sequence
  Synthetic oligonucleotide
actgggttacgaaggtgaaggaaagcacag

SEQ ID NO: 219221 - DNA, 30 bp, Artificial Sequence
  Synthetic oligonucleotide
caatggtaccaggaaagactgcaagcacag

SEQ ID NO: 219222 - DNA, 30 bp, Artificial Sequence
  Synthetic oligonucleotide
tgtcgagaaggaggtttcggaggagcacag

SEQ ID NO: 219223 - DNA, 30 bp, Artificial Sequence
  Synthetic oligonucleotide
ggtttaaagactaaccgcgaacaggcacag

SEQ ID NO: 219224 - DNA, 30 bp, Artificial Sequence
  Synthetic oligonucleotide
tcgctggattcaaagttctgacactcacag

SEQ ID NO: 219225 - DNA, 30 bp, Artificial Sequence
  Synthetic oligonucleotide
cctttcctgtgccaattcgagacctcacag

SEQ ID NO: 219226 - DNA, 30 bp, Artificial Sequence
  Synthetic oligonucleotide
gcgcgcatcgcgttaggactctagtcacag

SEQ ID NO: 219227 - DNA, 30 bp, Artificial Sequence
  Synthetic oligonucleotide
aggctttgtctaatgaaatcatcgtcacag

SEQ ID NO: 219228 - DNA, 30 bp, Artificial Sequence
  Synthetic oligonucleotide
gttggccctcagcggaccgacccttcacag

SEQ ID NO: 219229 - DNA, 30 bp, Artificial Sequence
  Synthetic oligonucleotide
ccggcccaatagcgcaccagattttcacag

SEQ ID NO: 219230 - DNA, 30 bp, Artificial Sequence
  Synthetic oligonucleotide
actgaatttgttatgtaatcaagcagacag

SEQ ID NO: 219231 - DNA, 30 bp, Artificial Sequence
  Synthetic oligonucleotide
acctatcggatgaaaatcgtagtgagacag

SEQ ID NO: 219232 - DNA, 30 bp, Artificial Sequence
  Synthetic oligonucleotide
gtattcgcgcgagccgtgggggtgagacag

SEQ ID NO: 219233 - DNA, 30 bp, Artificial Sequence
  Synthetic oligonucleotide
ctttaggtacgacactggaggggtagacag

SEQ ID NO: 219234 - DNA, 30 bp, Artificial Sequence
  Synthetic oligonucleotide
aaccggaagtctcacatgcttagacgacag

SEQ ID NO: 219235 - DNA, 30 bp, Artificial Sequence
  Synthetic oligonucleotide
aagattcctatccattgaatataccgacag

SEQ ID NO: 219236 - DNA, 30 bp, Artificial Sequence
  Synthetic oligonucleotide
agagacgcttattgtgagaactaccgacag

SEQ ID NO: 219237 - DNA, 30 bp, Artificial Sequence
  Synthetic oligonucleotide
ttgagcgtttacttcgacaatacgcgacag

SEQ ID NO: 219238 - DNA, 30 bp, Artificial Sequence
  Synthetic oligonucleotide
tcacagacgcgcaaccttatcaggcgacag

SEQ ID NO: 219239 - DNA, 30 bp, Artificial Sequence
  Synthetic oligonucleotide
cgcaaggggcatggccgccggaggcgacag

SEQ ID NO: 219240 - DNA, 30 bp, Artificial Sequence
  Synthetic oligonucleotide
agatgtatggagtatgcccacggaggacag

SEQ ID NO: 219241 - DNA, 30 bp, Artificial Sequence
  Synthetic oligonucleotide
gatacaagtcggaggggctctcccggacag

SEQ ID NO: 219242 - DNA, 30 bp, Artificial Sequence
  Synthetic oligonucleotide
atcgtacgtagtggagtgttcatgggacag

SEQ ID NO: 219243 - DNA, 30 bp, Artificial Sequence
  Synthetic oligonucleotide
caccgaactacgcaccaggctatgggacag

SEQ ID NO: 219244 - DNA, 30 bp, Artificial Sequence
  Synthetic oligonucleotide
tacaaattacgttttcagagaaatggacag

SEQ ID NO: 219245 - DNA, 30 bp, Artificial Sequence
  Synthetic oligonucleotide
ttcataggaattaagagtagtgaatgacag

SEQ ID NO: 219246 - DNA, 30 bp, Artificial Sequence
  Synthetic oligonucleotide
gccattcatactctaatcctaatatgacag

SEQ ID NO: 219247 - DNA, 30 bp, Artificial Sequence
  Synthetic oligonucleotide
ttgcgagaacccttgaggcacacgtgacag

SEQ ID NO: 219248 - DNA, 30 bp, Artificial Sequence
  Synthetic oligonucleotide
ccacagatgaaagcgcgttgttattgacag

SEQ ID NO: 219249 - DNA, 30 bp, Artificial Sequence
  Synthetic oligonucleotide
tcattaatccggaccggaaagtcttgacag

SEQ ID NO: 219250 - DNA, 30 bp, Artificial Sequence
  Synthetic oligonucleotide
gtcggaatgtcttttggtaatgtttgacag

SEQ ID NO: 219251 - DNA, 30 bp, Artificial Sequence
  Synthetic oligonucleotide
aggcgtggcagcatgtccatattaatacag

SEQ ID NO: 219252 - DNA, 30 bp, Artificial Sequence
  Synthetic oligonucleotide
tggtttgaaaactctttaggacggatacag

SEQ ID NO: 219253 - DNA, 30 bp, Artificial Sequence
  Synthetic oligonucleotide
ttctaagggaacagacccaataatatacag

SEQ ID NO: 219254 - DNA, 30 bp, Artificial Sequence
  Synthetic oligonucleotide
agttagtcacacctaaacagatgtatacag

SEQ ID NO: 219255 - DNA, 30 bp, Artificial Sequence
  Synthetic oligonucleotide
cgggatgagtactgacaatctcaactacag

SEQ ID NO: 219256 - DNA, 30 bp, Artificial Sequence
  Synthetic oligonucleotide
gacgaactggttgaccggacgacactacag

SEQ ID NO: 219257 - DNA, 30 bp, Artificial Sequence
  Synthetic oligonucleotide
atcttttgatatagagcgggccacctacag

SEQ ID NO: 219258 - DNA, 30 bp, Artificial Sequence
  Synthetic oligonucleotide
tgcgtataatgggtctttctgttagtacag

SEQ ID NO: 219259 - DNA, 30 bp, Artificial Sequence
  Synthetic oligonucleotide
tcgcccgactactcgaatccttccgtacag

SEQ ID NO: 219260 - DNA, 30 bp, Artificial Sequence
  Synthetic oligonucleotide
ggtatcgcggaagttccacccgtcgtacag

SEQ ID NO: 219261 - DNA, 30 bp, Artificial Sequence
  Synthetic oligonucleotide
tcgcttgcgtcgtcgtagggaccggtacag

SEQ ID NO: 219262 - DNA, 30 bp, Artificial Sequence
  Synthetic oligonucleotide
catggagtctgagccatgtcgggggtacag

SEQ ID NO: 219263 - DNA, 30 bp, Artificial Sequence
  Synthetic oligonucleotide
tgcaccttcgctctaggtcgtcctgtacag

SEQ ID NO: 219264 - DNA, 30 bp, Artificial Sequence
  Synthetic oligonucleotide
aggtggggctaacccgggatcggtgtacag

SEQ ID NO: 219265 - DNA, 30 bp, Artificial Sequence
  Synthetic oligonucleotide
ctgtggtatgcgtggaaacgtcgcttacag

SEQ ID NO: 219266 - DNA, 30 bp, Artificial Sequence
  Synthetic oligonucleotide
atcagttcggaaaaacgctgtaagttacag

SEQ ID NO: 219267 - DNA, 30 bp, Artificial Sequence
  Synthetic oligonucleotide
taaattggacgggtgccggcttggttacag

SEQ ID NO: 219268 - DNA, 30 bp, Artificial Sequence
  Synthetic oligonucleotide
gcggagagtaactattgcattatgttacag

SEQ ID NO: 219269 - DNA, 30 bp, Artificial Sequence
  Synthetic oligonucleotide
atatggctgtatgtttaacctaatttacag

SEQ ID NO: 219270 - DNA, 30 bp, Artificial Sequence
  Synthetic oligonucleotide
caggcgctagccgttacagcaccaaaccag

SEQ ID NO: 219271 - DNA, 30 bp, Artificial Sequence
  Synthetic oligonucleotide
gtttgatggtcatctatctatgcaaaccag

SEQ ID NO: 219272 - DNA, 30 bp, Artificial Sequence
  Synthetic oligonucleotide
attagtaccaattcttccggaaccaaccag

SEQ ID NO: 219273 - DNA, 30 bp, Artificial Sequence
  Synthetic oligonucleotide
gtaatggcaaatttaagaccatcacaccag

SEQ ID NO: 219274 - DNA, 30 bp, Artificial Sequence
  Synthetic oligonucleotide
acacccgggacttggccactcggacaccag

SEQ ID NO: 219275 - DNA, 30 bp, Artificial Sequence
  Synthetic oligonucleotide
tgcaagccaattcccggggctgagcaccag

SEQ ID NO: 219276 - DNA, 30 bp, Artificial Sequence
  Synthetic oligonucleotide
cgctagttggcgggtcatcgggggcaccag

SEQ ID NO: 219277 - DNA, 30 bp, Artificial Sequence
  Synthetic oligonucleotide
gcacgaatcgcttgtctagaactgcaccag

SEQ ID NO: 219278 - DNA, 30 bp, Artificial Sequence
  Synthetic oligonucleotide
ctcatatgattgcgttgggtatgtcaccag

SEQ ID NO: 219279 - DNA, 30 bp, Artificial Sequence
  Synthetic oligonucleotide
aggccaggtgcggaaagcggacttcaccag

SEQ ID NO: 219280 - DNA, 30 bp, Artificial Sequence
  Synthetic oligonucleotide
aaccaataatcgagaaacgctatagaccag

SEQ ID NO: 219281 - DNA, 30 bp, Artificial Sequence
  Synthetic oligonucleotide
gccgtaatcgcctcgtcgtcgggggaccag

SEQ ID NO: 219282 - DNA, 30 bp, Artificial Sequence
  Synthetic oligonucleotide
aagtaaaatgttggatataacgtggaccag

SEQ ID NO: 219283 - DNA, 30 bp, Artificial Sequence
  Synthetic oligonucleotide
aacagaacgggataagcctcttatgaccag

SEQ ID NO: 219284 - DNA, 30 bp, Artificial Sequence
  Synthetic oligonucleotide
actagtgtttgacgttcaaaaactgaccag

SEQ ID NO: 219285 - DNA, 30 bp, Artificial Sequence
  Synthetic oligonucleotide
gtgagtcagtgtagtagttgtttgtaccag

SEQ ID NO: 219286 - DNA, 30 bp, Artificial Sequence
  Synthetic oligonucleotide
gttcgagaactctgcataaagccttaccag

SEQ ID NO: 219287 - DNA, 30 bp, Artificial Sequence
  Synthetic oligonucleotide
tagggactgtaacgagccacgcgttaccag

SEQ ID NO: 219288 - DNA, 30 bp, Artificial Sequence
  Synthetic oligonucleotide
gttggggcccagtacgaagaatgttaccag

SEQ ID NO: 219289 - DNA, 30 bp, Artificial Sequence
  Synthetic oligonucleotide
tccgacccgtaaccaggcctacgcacccag

SEQ ID NO: 219290 - DNA, 30 bp, Artificial Sequence
  Synthetic oligonucleotide
tcattcatgcaacgctgaggggagacccag

SEQ ID NO: 219291 - DNA, 30 bp, Artificial Sequence
  Synthetic oligonucleotide
ctgcagtcggtgtaaggtatgctaccccag

SEQ ID NO: 219292 - DNA, 30 bp, Artificial Sequence
  Synthetic oligonucleotide
ggatgactgttttgtgccgtccgcccccag

SEQ ID NO: 219293 - DNA, 30 bp, Artificial Sequence
  Synthetic oligonucleotide
ggtatattgcggacgaacccaaggccccag

SEQ ID NO: 219294 - DNA, 30 bp, Artificial Sequence
  Synthetic oligonucleotide
acacaaatttctaccacattcgccgcccag

SEQ ID NO: 219295 - DNA, 30 bp, Artificial Sequence
  Synthetic oligonucleotide
tctgtctcatcgaattcgagaaaggcccag

SEQ ID NO: 219296 - DNA, 30 bp, Artificial Sequence
  Synthetic oligonucleotide
aaaagactggaaccaattgacaaaagccag

SEQ ID NO: 219297 - DNA, 30 bp, Artificial Sequence
  Synthetic oligonucleotide
tagagctactaataacggttcagaagccag

SEQ ID NO: 219298 - DNA, 30 bp, Artificial Sequence
  Synthetic oligonucleotide
gcttcgtgtgcattgcataagcgcagccag

SEQ ID NO: 219299 - DNA, 30 bp, Artificial Sequence
  Synthetic oligonucleotide
ggttgccgtagaaacaaaggcgtgagccag

SEQ ID NO: 219300 - DNA, 30 bp, Artificial Sequence
  Synthetic oligonucleotide
agactggcaaacatctgagtgtctagccag

SEQ ID NO: 219301 - DNA, 31 bp, Artificial Sequence
  Synthetic oligonucleotide
gtgaacacgtatccgatattgagtacgccag

SEQ ID NO: 219302 - DNA, 30 bp, Artificial Sequence
  Synthetic oligonucleotide
aagagatatcacttactagctgtccgccag

SEQ ID NO: 219303 - DNA, 30 bp, Artificial Sequence
  Synthetic oligonucleotide
gggcgagttgaatggatgctcgcgggccag

SEQ ID NO: 219304 - DNA, 30 bp, Artificial Sequence
  Synthetic oligonucleotide
ccactcaggattcgaggcgtaatgggccag

SEQ ID NO: 219305 - DNA, 30 bp, Artificial Sequence
  Synthetic oligonucleotide
gggtacagcgtccatggctgcatgggccag

SEQ ID NO: 219306 - DNA, 30 bp, Artificial Sequence
  Synthetic oligonucleotide
tgggatgtgggggcagttagtcttggccag

SEQ ID NO: 219307 - DNA, 30 bp, Artificial Sequence
  Synthetic oligonucleotide
ttgcacgatctctctgggactccatgccag

SEQ ID NO: 219308 - DNA, 30 bp, Artificial Sequence
  Synthetic oligonucleotide
cgcagttgaaataagccacactgatgccag

SEQ ID NO: 219309 - DNA, 30 bp, Artificial Sequence
  Synthetic oligonucleotide
ttacagggcatgcggggcatggcctgccag

SEQ ID NO: 219310 - DNA, 30 bp, Artificial Sequence
  Synthetic oligonucleotide
agagcaaccagtaagaataatgggtgccag

SEQ ID NO: 219311 - DNA, 30 bp, Artificial Sequence
  Synthetic oligonucleotide
gcacctgtatcgattttaaagagttgccag

SEQ ID NO: 219312 - DNA, 30 bp, Artificial Sequence
  Synthetic oligonucleotide
ataaggtaaggaagagtctttggaatccag

SEQ ID NO: 219313 - DNA, 30 bp, Artificial Sequence
  Synthetic oligonucleotide
cactccggtgggatgggattcttaatccag

SEQ ID NO: 219314 - DNA, 30 bp, Artificial Sequence
  Synthetic oligonucleotide
agtccatctacaccgccgtgtaccatccag

SEQ ID NO: 219315 - DNA, 30 bp, Artificial Sequence
  Synthetic oligonucleotide
aagacttcccttcgcacttatgatatccag

SEQ ID NO: 219316 - DNA, 30 bp, Artificial Sequence
  Synthetic oligonucleotide
aggcattagcgtgacggctgggctatccag

SEQ ID NO: 219317 - DNA, 30 bp, Artificial Sequence
  Synthetic oligonucleotide
taatgggagccccaactcccaagtatccag

SEQ ID NO: 219318 - DNA, 30 bp, Artificial Sequence
  Synthetic oligonucleotide
acggttgctcacagtcattgttttatccag

SEQ ID NO: 219319 - DNA, 30 bp, Artificial Sequence
  Synthetic oligonucleotide
caggttccgcatagtgcaatcgcactccag

SEQ ID NO: 219320 - DNA, 30 bp, Artificial Sequence
  Synthetic oligonucleotide
tagcatagtatagggtgcctaagcctccag

SEQ ID NO: 219321 - DNA, 30 bp, Artificial Sequence
  Synthetic oligonucleotide
ggaatacccatgtcgaagtataatctccag

SEQ ID NO: 219322 - DNA, 30 bp, Artificial Sequence
  Synthetic oligonucleotide
actcaaatatttggcctactgattctccag

SEQ ID NO: 219323 - DNA, 30 bp, Artificial Sequence
  Synthetic oligonucleotide
tacaaatatgctctccaaaagatcgtccag

SEQ ID NO: 219324 - DNA, 30 bp, Artificial Sequence
  Synthetic oligonucleotide
acagacgaaatggaacccggaagggtccag

SEQ ID NO: 219325 - DNA, 30 bp, Artificial Sequence
  Synthetic oligonucleotide
atcaccgagcgtgctcatcaccagttccag

SEQ ID NO: 219326 - DNA, 30 bp, Artificial Sequence
  Synthetic oligonucleotide
ctgctccctggtccgcttggaaaaaagcag

SEQ ID NO: 219327 - DNA, 30 bp, Artificial Sequence
  Synthetic oligonucleotide
agctggaacacgcggttaatgctaaagcag

SEQ ID NO: 219328 - DNA, 30 bp, Artificial Sequence
  Synthetic oligonucleotide
ttatttagccgggtaaggaaccacaagcag

SEQ ID NO: 219329 - DNA, 30 bp, Artificial Sequence
  Synthetic oligonucleotide
tagcatcctcgtgaaagagtcgacaagcag

SEQ ID NO: 219330 - DNA, 30 bp, Artificial Sequence
  Synthetic oligonucleotide
atagaatagcgcctgtatggacctaagcag

SEQ ID NO: 219331 - DNA, 30 bp, Artificial Sequence
  Synthetic oligonucleotide
gcccacagtgcgtggagtgcttaacagcag

SEQ ID NO: 219332 - DNA, 30 bp, Artificial Sequence
  Synthetic oligonucleotide
agtacccggggaacacggcgggcccagcag

SEQ ID NO: 219333 - DNA, 30 bp, Artificial Sequence
  Synthetic oligonucleotide
tgtactaaaggagtggtgatctagcagcag

SEQ ID NO: 219334 - DNA, 30 bp, Artificial Sequence
  Synthetic oligonucleotide
gtggcggggttatttttatccgggcagcag

SEQ ID NO: 219335 - DNA, 30 bp, Artificial Sequence
  Synthetic oligonucleotide
cgaccaggtgtaacgtttcttgcagagcag

SEQ ID NO: 219336 - DNA, 30 bp, Artificial Sequence
  Synthetic oligonucleotide
taacttagtatcaactgacaatgagagcag

SEQ ID NO: 219337 - DNA, 30 bp, Artificial Sequence
  Synthetic oligonucleotide
gcggcattctaagatacgtaaatcgagcag

SEQ ID NO: 219338 - DNA, 30 bp, Artificial Sequence
  Synthetic oligonucleotide
tcttgtaattagggggtatccagggagcag

SEQ ID NO: 219339 - DNA, 31 bp, Artificial Sequence
  Synthetic oligonucleotide
gcatgtatcataattggtctaaatggagcag

SEQ ID NO: 219340 - DNA, 30 bp, Artificial Sequence
  Synthetic oligonucleotide
agtcatgacccaccctgggacagtgagcag

SEQ ID NO: 219341 - DNA, 30 bp, Artificial Sequence
  Synthetic oligonucleotide
gcccaagacgtactgtccctctttgagcag

SEQ ID NO: 219342 - DNA, 30 bp, Artificial Sequence
  Synthetic oligonucleotide
aatgtaaggccgaaaggggactcctagcag

SEQ ID NO: 219343 - DNA, 30 bp, Artificial Sequence
  Synthetic oligonucleotide
cgaacgcaggctctaagacggaaaacgcag

SEQ ID NO: 219344 - DNA, 30 bp, Artificial Sequence
  Synthetic oligonucleotide
gcgtcagctaaggcccactccgaaacgcag

SEQ ID NO: 219345 - DNA, 30 bp, Artificial Sequence
  Synthetic oligonucleotide
acaattcaaatgctaccgccgtcaccgcag

SEQ ID NO: 219346 - DNA, 30 bp, Artificial Sequence
  Synthetic oligonucleotide
aagttttggcatgcaatcggaagaccgcag

SEQ ID NO: 219347 - DNA, 31 bp, Artificial Sequence
  Synthetic oligonucleotide
ttcgtgagtgtggaatgccatatgcccgcag

SEQ ID NO: 219348 - DNA, 30 bp, Artificial Sequence
  Synthetic oligonucleotide
ttaaatggcaaacgcttgagcccgccgcag

SEQ ID NO: 219349 - DNA, 30 bp, Artificial Sequence
  Synthetic oligonucleotide
tagaactttcctaaaaataaagatccgcag

SEQ ID NO: 219350 - DNA, 30 bp, Artificial Sequence
  Synthetic oligonucleotide
acaaataagagatatggatcgaacgcgcag

SEQ ID NO: 219351 - DNA, 30 bp, Artificial Sequence
  Synthetic oligonucleotide
tcctagaaggcctcaagaaggttcgcgcag

SEQ ID NO: 219352 - DNA, 30 bp, Artificial Sequence
  Synthetic oligonucleotide
gttgttgtaggagaatcgtacgaggcgcag

SEQ ID NO: 219353 - DNA, 30 bp, Artificial Sequence
  Synthetic oligonucleotide
catcatctaactatcagcctataggcgcag

SEQ ID NO: 219354 - DNA, 30 bp, Artificial Sequence
  Synthetic oligonucleotide
atatctgctcagtagagtagtagatcgcag

SEQ ID NO: 219355 - DNA, 30 bp, Artificial Sequence
  Synthetic oligonucleotide
ccctttcactgacagtgactcctatcgcag

SEQ ID NO: 219356 - DNA, 30 bp, Artificial Sequence
  Synthetic oligonucleotide
ccgcctacggcgtcgatggctctatcgcag

SEQ ID NO: 219357 - DNA, 30 bp, Artificial Sequence
  Synthetic oligonucleotide
caactgacgaagaagaattcgagctcgcag

SEQ ID NO: 219358 - DNA, 30 bp, Artificial Sequence
  Synthetic oligonucleotide
gggttcgtctgaatctccataacaaggcag

SEQ ID NO: 219359 - DNA, 30 bp, Artificial Sequence
  Synthetic oligonucleotide
cctaagactatcggtgttcggctcaggcag

SEQ ID NO: 219360 - DNA, 30 bp, Artificial Sequence
  Synthetic oligonucleotide
aaaaaggaaatttacaggcaactgaggcag

SEQ ID NO: 219361 - DNA, 30 bp, Artificial Sequence
  Synthetic oligonucleotide
cacatacgtataagtgaaacctataggcag

SEQ ID NO: 219362 - DNA, 31 bp, Artificial Sequence
  Synthetic oligonucleotide
ctttggcgctatgtagtaccatcttaggcag

SEQ ID NO: 219363 - DNA, 30 bp, Artificial Sequence
  Synthetic oligonucleotide
tcaccagcagactggctggaaagccggcag

SEQ ID NO: 219364 - DNA, 30 bp, Artificial Sequence
  Synthetic oligonucleotide
cacccgcgatctaagaaatccttccggcag

SEQ ID NO: 219365 - DNA, 30 bp, Artificial Sequence
  Synthetic oligonucleotide
ttgccgtagaagacaatatgcacagggcag

SEQ ID NO: 219366 - DNA, 30 bp, Artificial Sequence
  Synthetic oligonucleotide
ctgagcatgacgacctcgctcagcgggcag

SEQ ID NO: 219367 - DNA, 30 bp, Artificial Sequence
  Synthetic oligonucleotide
tatcattggtcatggttgaggcatgggcag

SEQ ID NO: 219368 - DNA, 30 bp, Artificial Sequence
  Synthetic oligonucleotide
cctcgtatatgcaagtcacttgatgggcag

SEQ ID NO: 219369 - DNA, 30 bp, Artificial Sequence
  Synthetic oligonucleotide
ttatggatgtgcagtaatgtcgctgggcag

SEQ ID NO: 219370 - DNA, 30 bp, Artificial Sequence
  Synthetic oligonucleotide
tccacccatacagtatgtgctcaatggcag

SEQ ID NO: 219371 - DNA, 30 bp, Artificial Sequence
  Synthetic oligonucleotide
caggtaattaggagtcgatgtggctggcag

SEQ ID NO: 219372 - DNA, 30 bp, Artificial Sequence
  Synthetic oligonucleotide
tgatgccgtcgtcggtagttcgtctggcag

SEQ ID NO: 219373 - DNA, 30 bp, Artificial Sequence
  Synthetic oligonucleotide
tatagacgactgtatcggaaatagtggcag

SEQ ID NO: 219374 - DNA, 30 bp, Artificial Sequence
  Synthetic oligonucleotide
cggctgcccagctaggcgatgacgtggcag

SEQ ID NO: 219375 - DNA, 30 bp, Artificial Sequence
  Synthetic oligonucleotide
caccgaaggttaattgctctattgtggcag

SEQ ID NO: 219376 - DNA, 30 bp, Artificial Sequence
  Synthetic oligonucleotide
aagacctaatttgtgacctgttattggcag

SEQ ID NO: 219377 - DNA, 30 bp, Artificial Sequence
  Synthetic oligonucleotide
acccggggcgataggaaatacccttggcag

SEQ ID NO: 219378 - DNA, 30 bp, Artificial Sequence
  Synthetic oligonucleotide
taggaaaggttggctaatcggtcgatgcag

SEQ ID NO: 219379 - DNA, 30 bp, Artificial Sequence
  Synthetic oligonucleotide
atcattatcaatgccgtgagccggatgcag

SEQ ID NO: 219380 - DNA, 30 bp, Artificial Sequence
  Synthetic oligonucleotide
cagatatatgaaaatgacactgctatgcag

SEQ ID NO: 219381 - DNA, 30 bp, Artificial Sequence
  Synthetic oligonucleotide
ttataaaattctatgtcttcttgtatgcag

SEQ ID NO: 219382 - DNA, 30 bp, Artificial Sequence
  Synthetic oligonucleotide
gatcgtctctacttcatcaacccgctgcag

SEQ ID NO: 219383 - DNA, 30 bp, Artificial Sequence
  Synthetic oligonucleotide
tgcgccaggggggtgctcaaatctctgcag

SEQ ID NO: 219384 - DNA, 30 bp, Artificial Sequence
  Synthetic oligonucleotide
ggtaaatagcgatccgcaataaaagtgcag

SEQ ID NO: 219385 - DNA, 30 bp, Artificial Sequence
  Synthetic oligonucleotide
atacccggcattgccattcgcgtagtgcag

SEQ ID NO: 219386 - DNA, 30 bp, Artificial Sequence
  Synthetic oligonucleotide
ggttctgccggcctatctgtaccggtgcag

SEQ ID NO: 219387 - DNA, 30 bp, Artificial Sequence
  Synthetic oligonucleotide
cattgcagatgggagtggaagcgggtgcag

SEQ ID NO: 219388 - DNA, 30 bp, Artificial Sequence
  Synthetic oligonucleotide
ctttatacaagtaaccaaatactggtgcag

SEQ ID NO: 219389 - DNA, 30 bp, Artificial Sequence
  Synthetic oligonucleotide
atgataagggatgtacagtaaaatgtgcag

SEQ ID NO: 219390 - DNA, 30 bp, Artificial Sequence
  Synthetic oligonucleotide
taactatcacacaccatggcaagtgtgcag

SEQ ID NO: 219391 - DNA, 30 bp, Artificial Sequence
  Synthetic oligonucleotide
ggaacgacgcaatattagtgtcacttgcag

SEQ ID NO: 219392 - DNA, 30 bp, Artificial Sequence
  Synthetic oligonucleotide
gaggcgggaggacgggaataaccgttgcag

SEQ ID NO: 219393 - DNA, 30 bp, Artificial Sequence
  Synthetic oligonucleotide
cggtcgtatcccggcacatataggttgcag

SEQ ID NO: 219394 - DNA, 30 bp, Artificial Sequence
  Synthetic oligonucleotide
tcgctcgagggcttggcaataattttgcag

SEQ ID NO: 219395 - DNA, 30 bp, Artificial Sequence
  Synthetic oligonucleotide
cattcgattttgcaggtaagtcttttgcag

SEQ ID NO: 219396 - DNA, 30 bp, Artificial Sequence
  Synthetic oligonucleotide
cgcctaccgttccgtctacagtacaatcag

SEQ ID NO: 219397 - DNA, 30 bp, Artificial Sequence
  Synthetic oligonucleotide
attcagggacacgcgatgtctcggaatcag

SEQ ID NO: 219398 - DNA, 30 bp, Artificial Sequence
  Synthetic oligonucleotide
tggatagccgacacagaggcccataatcag

SEQ ID NO: 219399 - DNA, 30 bp, Artificial Sequence
  Synthetic oligonucleotide
actgtgaaccgcagcgcgaccagccatcag

SEQ ID NO: 219400 - DNA, 30 bp, Artificial Sequence
  Synthetic oligonucleotide
gtagtatctgaaaaataaagaagtcatcag

SEQ ID NO: 219401 - DNA, 30 bp, Artificial Sequence
  Synthetic oligonucleotide
agcacctcttttgccgtctcgattcatcag

SEQ ID NO: 219402 - DNA, 30 bp, Artificial Sequence
  Synthetic oligonucleotide
gattgaaatcacgatcataattttcatcag

SEQ ID NO: 219403 - DNA, 30 bp, Artificial Sequence
  Synthetic oligonucleotide
cttctgatgtgggtggcctccagcgatcag

SEQ ID NO: 219404 - DNA, 30 bp, Artificial Sequence
  Synthetic oligonucleotide
aaatggtctttgtgcgcaatacgcgatcag

SEQ ID NO: 219405 - DNA, 30 bp, Artificial Sequence
  Synthetic oligonucleotide
aaacattttccgaagagggcccctgatcag

SEQ ID NO: 219406 - DNA, 30 bp, Artificial Sequence
  Synthetic oligonucleotide
agcgcccacggaccgccttgatcatatcag

SEQ ID NO: 219407 - DNA, 30 bp, Artificial Sequence
  Synthetic oligonucleotide
cccttcaaaccttgtggctaattatatcag

SEQ ID NO: 219408 - DNA, 30 bp, Artificial Sequence
  Synthetic oligonucleotide
atgttttcatagggagaaacgttatatcag

SEQ ID NO: 219409 - DNA, 30 bp, Artificial Sequence
  Synthetic oligonucleotide
atagttgcctggtcgcgacttcgaactcag

SEQ ID NO: 219410 - DNA, 30 bp, Artificial Sequence
  Synthetic oligonucleotide
cagacggattacttatcgtaactaactcag

SEQ ID NO: 219411 - DNA, 30 bp, Artificial Sequence
  Synthetic oligonucleotide
taacggggcgcgttacgtacattaactcag

SEQ ID NO: 219412 - DNA, 30 bp, Artificial Sequence
  Synthetic oligonucleotide
ttacagcaggagggggtatatgtcactcag

SEQ ID NO: 219413 - DNA, 30 bp, Artificial Sequence
  Synthetic oligonucleotide
cattgtcttattaagaaccgtgtgactcag

SEQ ID NO: 219414 - DNA, 30 bp, Artificial Sequence
  Synthetic oligonucleotide
catccggtgtcaagcagagtcttgactcag

SEQ ID NO: 219415 - DNA, 30 bp, Artificial Sequence
  Synthetic oligonucleotide
cagactgcgccgagggcgccaatacctcag

SEQ ID NO: 219416 - DNA, 30 bp, Artificial Sequence
  Synthetic oligonucleotide
atcgaggatatgctaccaggataccctcag

SEQ ID NO: 219417 - DNA, 30 bp, Artificial Sequence
  Synthetic oligonucleotide
accgcaggagtcatgtccattaagcctcag

SEQ ID NO: 219418 - DNA, 30 bp, Artificial Sequence
  Synthetic oligonucleotide
agtcgatgagactttcacgtcttagctcag

SEQ ID NO: 219419 - DNA, 30 bp, Artificial Sequence
  Synthetic oligonucleotide
cataaagtttacggcaactgatctgctcag

SEQ ID NO: 219420 - DNA, 30 bp, Artificial Sequence
  Synthetic oligonucleotide
gtaccacaagtgattgcgttttctgctcag

SEQ ID NO: 219421 - DNA, 30 bp, Artificial Sequence
  Synthetic oligonucleotide
cagcttagatcatcggagagataatctcag

SEQ ID NO: 219422 - DNA, 30 bp, Artificial Sequence
  Synthetic oligonucleotide
aacagtgttcgggtctgaatgctatctcag

SEQ ID NO: 219423 - DNA, 30 bp, Artificial Sequence
  Synthetic oligonucleotide
gcagttgctgtggactgtttggcctctcag

SEQ ID NO: 219424 - DNA, 30 bp, Artificial Sequence
  Synthetic oligonucleotide
ataggtgcctcaacacgaggcttctctcag

SEQ ID NO: 219425 - DNA, 30 bp, Artificial Sequence
  Synthetic oligonucleotide
atacgagataatttgaagcttgtgtctcag

SEQ ID NO: 219426 - DNA, 30 bp, Artificial Sequence
  Synthetic oligonucleotide
cgcaaagtataaaatttggcctattctcag

SEQ ID NO: 219427 - DNA, 30 bp, Artificial Sequence
  Synthetic oligonucleotide
tggaatcagtcgagcatgaccgcaagtcag

SEQ ID NO: 219428 - DNA, 30 bp, Artificial Sequence
  Synthetic oligonucleotide
ctttcagacagcaccgcatccgcaagtcag

SEQ ID NO: 219429 - DNA, 30 bp, Artificial Sequence
  Synthetic oligonucleotide
agaggataatggtagtcctttagcagtcag

SEQ ID NO: 219430 - DNA, 30 bp, Artificial Sequence
  Synthetic oligonucleotide
acaaactgaccgggcagttgagggagtcag

SEQ ID NO: 219431 - DNA, 30 bp, Artificial Sequence
  Synthetic oligonucleotide
accaggattgggagacgttctggtagtcag

SEQ ID NO: 219432 - DNA, 30 bp, Artificial Sequence
  Synthetic oligonucleotide
taggctttgcagacttaattatcgcgtcag

SEQ ID NO: 219433 - DNA, 30 bp, Artificial Sequence
  Synthetic oligonucleotide
actttaataactagaggcatgagtcgtcag

SEQ ID NO: 219434 - DNA, 30 bp, Artificial Sequence
  Synthetic oligonucleotide
atgtttactagctgggaagacccaggtcag

SEQ ID NO: 219435 - DNA, 31 bp, Artificial Sequence
  Synthetic oligonucleotide
ttgtaaaacgtagggtagtttcaacggtcag

SEQ ID NO: 219436 - DNA, 30 bp, Artificial Sequence
  Synthetic oligonucleotide
ttagcgcctggaaacacaagggctggtcag

SEQ ID NO: 219437 - DNA, 30 bp, Artificial Sequence
  Synthetic oligonucleotide
gaatgctaggtcggttcttatcaatgtcag

SEQ ID NO: 219438 - DNA, 30 bp, Artificial Sequence
  Synthetic oligonucleotide
tgcgcagacgaatctttttatcaatgtcag

SEQ ID NO: 219439 - DNA, 30 bp, Artificial Sequence
  Synthetic oligonucleotide
ttatgtcaatcacgaaaaaggaggtgtcag

SEQ ID NO: 219440 - DNA, 30 bp, Artificial Sequence
  Synthetic oligonucleotide
gaatttaagtgaagctctaggccttgtcag

SEQ ID NO: 219441 - DNA, 30 bp, Artificial Sequence
  Synthetic oligonucleotide
acacgcctatttgtatagacgagttgtcag

SEQ ID NO: 219442 - DNA, 30 bp, Artificial Sequence
  Synthetic oligonucleotide
acactcgcggaaccgcaccctatttgtcag

SEQ ID NO: 219443 - DNA, 30 bp, Artificial Sequence
  Synthetic oligonucleotide
atgtgcgtttctataccgtctcacattcag

SEQ ID NO: 219444 - DNA, 30 bp, Artificial Sequence
  Synthetic oligonucleotide
acatgtaggattgtccgtcgcgcgattcag

SEQ ID NO: 219445 - DNA, 30 bp, Artificial Sequence
  Synthetic oligonucleotide
taagcggatacatattgcctgatgattcag

SEQ ID NO: 219446 - DNA, 30 bp, Artificial Sequence
  Synthetic oligonucleotide
tattgggcacaaatattctagggagttcag

SEQ ID NO: 219447 - DNA, 30 bp, Artificial Sequence
  Synthetic oligonucleotide
tcgattacagaatgtaaccgatacgttcag

SEQ ID NO: 219448 - DNA, 30 bp, Artificial Sequence
  Synthetic oligonucleotide
acttatgacacatcggtgattagggttcag

SEQ ID NO: 219449 - DNA, 30 bp, Artificial Sequence
  Synthetic oligonucleotide
cacggtgctgtgcccttgcgtactgttcag

SEQ ID NO: 219450 - DNA, 30 bp, Artificial Sequence
  Synthetic oligonucleotide
ttatattaaactcaatggggaagtgttcag

SEQ ID NO: 219451 - DNA, 30 bp, Artificial Sequence
  Synthetic oligonucleotide
atagtaaaggttccccagattgcatttcag

SEQ ID NO: 219452 - DNA, 30 bp, Artificial Sequence
  Synthetic oligonucleotide
atggtattgagattagctcccgactttcag

SEQ ID NO: 219453 - DNA, 30 bp, Artificial Sequence
  Synthetic oligonucleotide
acacggcaggctaccagtgtgcgctttcag

SEQ ID NO: 219454 - DNA, 30 bp, Artificial Sequence
  Synthetic oligonucleotide
acggataacaattataaagttcgctttcag

SEQ ID NO: 219455 - DNA, 30 bp, Artificial Sequence
  Synthetic oligonucleotide
aaattcagagggtaacaaagatgctttcag

SEQ ID NO: 219456 - DNA, 30 bp, Artificial Sequence
  Synthetic oligonucleotide
aaactgtgtacaagtcagggcctgtttcag

SEQ ID NO: 219457 - DNA, 30 bp, Artificial Sequence
  Synthetic oligonucleotide
tattaaaaattaatggacatcaattttcag

SEQ ID NO: 219458 - DNA, 30 bp, Artificial Sequence
  Synthetic oligonucleotide
agaactgtgagcggaagtacacgttttcag

SEQ ID NO: 219459 - DNA, 30 bp, Artificial Sequence
  Synthetic oligonucleotide
ttctcccggactacgggatggatttttcag

SEQ ID NO: 219460 - DNA, 30 bp, Artificial Sequence
  Synthetic oligonucleotide
tagctcgagcgggccatcatcccaaaagag

SEQ ID NO: 219461 - DNA, 30 bp, Artificial Sequence
  Synthetic oligonucleotide
atcctacaaatgtacgtgcgtataaaagag

SEQ ID NO: 219462 - DNA, 30 bp, Artificial Sequence
  Synthetic oligonucleotide
cattcatgttgggagccgtgcccgaaagag

SEQ ID NO: 219463 - DNA, 30 bp, Artificial Sequence
  Synthetic oligonucleotide
gttggatagtaggggtgggtgtataaagag

SEQ ID NO: 219464 - DNA, 30 bp, Artificial Sequence
  Synthetic oligonucleotide
gaggcggaacggcgtttaggtcctaaagag

SEQ ID NO: 219465 - DNA, 30 bp, Artificial Sequence
  Synthetic oligonucleotide
ggatgcgccctcattcacaattgacaagag

SEQ ID NO: 219466 - DNA, 30 bp, Artificial Sequence
  Synthetic oligonucleotide
cttggtatacgattcgccccttcgcaagag

SEQ ID NO: 219467 - DNA, 30 bp, Artificial Sequence
  Synthetic oligonucleotide
gtttccgtatgagtttaaagtgggcaagag

SEQ ID NO: 219468 - DNA, 30 bp, Artificial Sequence
  Synthetic oligonucleotide
agtggctcggtccggccgagttggcaagag

SEQ ID NO: 219469 - DNA, 30 bp, Artificial Sequence
  Synthetic oligonucleotide
ttgtatatatggtcaaaggggttgcaagag

SEQ ID NO: 219470 - DNA, 30 bp, Artificial Sequence
  Synthetic oligonucleotide
gccacaatcccgaaacaggagcttcaagag

SEQ ID NO: 219471 - DNA, 30 bp, Artificial Sequence
  Synthetic oligonucleotide
tacttgtagggacggtgggtaaaagaagag

SEQ ID NO: 219472 - DNA, 30 bp, Artificial Sequence
  Synthetic oligonucleotide
gaggtttcatagccgtgggaggaagaagag

SEQ ID NO: 219473 - DNA, 30 bp, Artificial Sequence
  Synthetic oligonucleotide
ctaggtcaacggttgggaacctaagaagag

SEQ ID NO: 219474 - DNA, 30 bp, Artificial Sequence
  Synthetic oligonucleotide
tcggtaaatggtatgaaaaccggagaagag

SEQ ID NO: 219475 - DNA, 30 bp, Artificial Sequence
  Synthetic oligonucleotide
gacgccggagtaatataatattacgaagag

SEQ ID NO: 219476 - DNA, 30 bp, Artificial Sequence
  Synthetic oligonucleotide
aggtccaccttggataccgtgctggaagag

SEQ ID NO: 219477 - DNA, 30 bp, Artificial Sequence
  Synthetic oligonucleotide
taaagtacccacggagaggggactgaagag

SEQ ID NO: 219478 - DNA, 30 bp, Artificial Sequence
  Synthetic oligonucleotide
ttctacataaatcaagaaacatgataagag

SEQ ID NO: 219479 - DNA, 30 bp, Artificial Sequence
  Synthetic oligonucleotide
gttgtaggctcgcaggaaactgtataagag

SEQ ID NO: 219480 - DNA, 30 bp, Artificial Sequence
  Synthetic oligonucleotide
aagggtatactgtccttatatatgtaagag

SEQ ID NO: 219481 - DNA, 30 bp, Artificial Sequence
  Synthetic oligonucleotide
aggtgacccaatttagatgacccttaagag

SEQ ID NO: 219482 - DNA, 30 bp, Artificial Sequence
  Synthetic oligonucleotide
agaagaaaagcagaggttaagtcttaagag

SEQ ID NO: 219483 - DNA, 30 bp, Artificial Sequence
  Synthetic oligonucleotide
tgggggttaagacccgtgaggagaacagag

SEQ ID NO: 219484 - DNA, 30 bp, Artificial Sequence
  Synthetic oligonucleotide
atcgagacagatacaacgccggccacagag

SEQ ID NO: 219485 - DNA, 30 bp, Artificial Sequence
  Synthetic oligonucleotide
tacggcggccctggtcggttcgatacagag

SEQ ID NO: 219486 - DNA, 30 bp, Artificial Sequence
  Synthetic oligonucleotide
agaagttcccgcgccctggagtcagcagag

SEQ ID NO: 219487 - DNA, 30 bp, Artificial Sequence
  Synthetic oligonucleotide
cgcgttccataaaacctagggttagcagag

SEQ ID NO: 219488 - DNA, 30 bp, Artificial Sequence
  Synthetic oligonucleotide
tccaggtagggtgatgtcgcattcgcagag

SEQ ID NO: 219489 - DNA, 30 bp, Artificial Sequence
  Synthetic oligonucleotide
ggattaacagatatcctccgttgggcagag

SEQ ID NO: 219490 - DNA, 30 bp, Artificial Sequence
  Synthetic oligonucleotide
cttaatttaaaagttgatatggtggcagag

SEQ ID NO: 219491 - DNA, 30 bp, Artificial Sequence
  Synthetic oligonucleotide
caatcatagtgcagccggcaagaatcagag

SEQ ID NO: 219492 - DNA, 30 bp, Artificial Sequence
  Synthetic oligonucleotide
ccggcactgtgagtttaacactgctcagag

SEQ ID NO: 219493 - DNA, 30 bp, Artificial Sequence
  Synthetic oligonucleotide
cggctcacggctaaccaacaaaagtcagag

SEQ ID NO: 219494 - DNA, 30 bp, Artificial Sequence
  Synthetic oligonucleotide
aaaaaccttagtacgaaaaaacagtcagag

SEQ ID NO: 219495 - DNA, 30 bp, Artificial Sequence
  Synthetic oligonucleotide
ggtgatagtcttttgtgccacagttcagag

SEQ ID NO: 219496 - DNA, 30 bp, Artificial Sequence
  Synthetic oligonucleotide
tactaccgtgcagatcaccataaaagagag

SEQ ID NO: 219497 - DNA, 30 bp, Artificial Sequence
  Synthetic oligonucleotide
ggggaataggttaaaaggcaggccagagag

SEQ ID NO: 219498 - DNA, 30 bp, Artificial Sequence
  Synthetic oligonucleotide
gtgtatatcctgaaaccgtgctggagagag

SEQ ID NO: 219499 - DNA, 30 bp, Artificial Sequence
  Synthetic oligonucleotide
ccgcaaggtgcaaccttattaatgagagag

SEQ ID NO: 219500 - DNA, 30 bp, Artificial Sequence
  Synthetic oligonucleotide
ctatctgccggacttggcctgtatagagag

SEQ ID NO: 219501 - DNA, 30 bp, Artificial Sequence
  Synthetic oligonucleotide
cagtgttgctcgggtatttcaccccgagag

SEQ ID NO: 219502 - DNA, 30 bp, Artificial Sequence
  Synthetic oligonucleotide
acgcgaagctgtacccggtgctttcgagag

SEQ ID NO: 219503 - DNA, 30 bp, Artificial Sequence
  Synthetic oligonucleotide
ggcgctcggctactccgtgcgcaaggagag

SEQ ID NO: 219504 - DNA, 30 bp, Artificial Sequence
  Synthetic oligonucleotide
gtgccccgctcgtggagttcgtacggagag

SEQ ID NO: 219505 - DNA, 30 bp, Artificial Sequence
  Synthetic oligonucleotide
aatttccgatgactgagaatagggggagag

SEQ ID NO: 219506 - DNA, 30 bp, Artificial Sequence
  Synthetic oligonucleotide
tttcaatcactagcagcaggattgggagag

SEQ ID NO: 219507 - DNA, 30 bp, Artificial Sequence
  Synthetic oligonucleotide
aggatccttgcctaattgccctttggagag

SEQ ID NO: 219508 - DNA, 30 bp, Artificial Sequence
  Synthetic oligonucleotide
agtggagcgtgtctgttgtggtactgagag

SEQ ID NO: 219509 - DNA, 30 bp, Artificial Sequence
  Synthetic oligonucleotide
ctttggttagcatctcgtgaagcctgagag

SEQ ID NO: 219510 - DNA, 30 bp, Artificial Sequence
  Synthetic oligonucleotide
tcgacctgaatagacggtgcctggtgagag

SEQ ID NO: 219511 - DNA, 30 bp, Artificial Sequence
  Synthetic oligonucleotide
acaggtatggaaactttatgctcaatagag

SEQ ID NO: 219512 - DNA, 30 bp, Artificial Sequence
  Synthetic oligonucleotide
cacgtgctgagggatggctaactcatagag

SEQ ID NO: 219513 - DNA, 30 bp, Artificial Sequence
  Synthetic oligonucleotide
tcagtctaatagagttggttacggatagag

SEQ ID NO: 219514 - DNA, 30 bp, Artificial Sequence
  Synthetic oligonucleotide
tcagatgcctgtagttattacttgatagag

SEQ ID NO: 219515 - DNA, 30 bp, Artificial Sequence
  Synthetic oligonucleotide
ctctggcaccactcgatgggctatatagag

SEQ ID NO: 219516 - DNA, 30 bp, Artificial Sequence
  Synthetic oligonucleotide
gccaaatggggcctataacgtcgtatagag

SEQ ID NO: 219517 - DNA, 30 bp, Artificial Sequence
  Synthetic oligonucleotide
cgggatcgccgactggagggtacactagag

SEQ ID NO: 219518 - DNA, 30 bp, Artificial Sequence
  Synthetic oligonucleotide
catactgagatatgttgtctgagactagag

SEQ ID NO: 219519 - DNA, 30 bp, Artificial Sequence
  Synthetic oligonucleotide
acacctttgcacgaaagggctttactagag

SEQ ID NO: 219520 - DNA, 30 bp, Artificial Sequence
  Synthetic oligonucleotide
acgacaggttggcaacgattttgcctagag

SEQ ID NO: 219521 - DNA, 30 bp, Artificial Sequence
  Synthetic oligonucleotide
aataatagtctattcaccgagttcctagag

SEQ ID NO: 219522 - DNA, 30 bp, Artificial Sequence
  Synthetic oligonucleotide
ttaatccttctgcaaagcacagagctagag

SEQ ID NO: 219523 - DNA, 30 bp, Artificial Sequence
  Synthetic oligonucleotide
acaccgcatagaatggaccactgtctagag

SEQ ID NO: 219524 - DNA, 30 bp, Artificial Sequence
  Synthetic oligonucleotide
agcaaccattatggtaggggttttctagag

SEQ ID NO: 219525 - DNA, 30 bp, Artificial Sequence
  Synthetic oligonucleotide
cattggagagcctgatgagctccagtagag

SEQ ID NO: 219526 - DNA, 30 bp, Artificial Sequence
  Synthetic oligonucleotide
ttgctaatctggtcagattcccgcgtagag

SEQ ID NO: 219527 - DNA, 30 bp, Artificial Sequence
  Synthetic oligonucleotide
cgttttcgagtttggaaaccaagggtagag

SEQ ID NO: 219528 - DNA, 30 bp, Artificial Sequence
  Synthetic oligonucleotide
gtaaccataaaccacaggattagggtagag

SEQ ID NO: 219529 - DNA, 30 bp, Artificial Sequence
  Synthetic oligonucleotide
cgaagaatggtgaaagcagaatctgtagag

SEQ ID NO: 219530 - DNA, 30 bp, Artificial Sequence
  Synthetic oligonucleotide
ccatacccccacgcacaaaactacttagag

SEQ ID NO: 219531 - DNA, 30 bp, Artificial Sequence
  Synthetic oligonucleotide
tcatttattaaaccttccaagaaaaacgag

SEQ ID NO: 219532 - DNA, 30 bp, Artificial Sequence
  Synthetic oligonucleotide
atcgcgtttcacgacggcttatcaaacgag

SEQ ID NO: 219533 - DNA, 30 bp, Artificial Sequence
  Synthetic oligonucleotide
ggccgggacgatagcatatcgcccaacgag

SEQ ID NO: 219534 - DNA, 30 bp, Artificial Sequence
  Synthetic oligonucleotide
tattcccgactggtaaaccaatataacgag

SEQ ID NO: 219535 - DNA, 35 bp, Artificial Sequence
  Synthetic oligonucleotide
gtcctctatgctcgctaatgtctggcctccacgag

SEQ ID NO: 219536 - DNA, 30 bp, Artificial Sequence
  Synthetic oligonucleotide
tcacaggcttgggccttgttggcagacgag

SEQ ID NO: 219537 - DNA, 30 bp, Artificial Sequence
  Synthetic oligonucleotide
gaggtgcaattgagtgatctgtgtgacgag

SEQ ID NO: 219538 - DNA, 30 bp, Artificial Sequence
  Synthetic oligonucleotide
atcgacgaatgttgtgtgttcatctacgag

SEQ ID NO: 219539 - DNA, 30 bp, Artificial Sequence
  Synthetic oligonucleotide
tttgctaggcggttctaacggcagtacgag

SEQ ID NO: 219540 - DNA, 30 bp, Artificial Sequence
  Synthetic oligonucleotide
atgccgagtctgaagcataagctgtacgag

SEQ ID NO: 219541 - DNA, 30 bp, Artificial Sequence
  Synthetic oligonucleotide
tccgctcgatgtagtggaggcgcttacgag

SEQ ID NO: 219542 - DNA, 31 bp, Artificial Sequence
  Synthetic oligonucleotide
aattagctttttagtcacaaggtgttacgag

SEQ ID NO: 219543 - DNA, 30 bp, Artificial Sequence
  Synthetic oligonucleotide
cgcgactttcggaacctgtcaatcaccgag

SEQ ID NO: 219544 - DNA, 30 bp, Artificial Sequence
  Synthetic oligonucleotide
aagatttaactattcccagagaagaccgag

SEQ ID NO: 219545 - DNA, 30 bp, Artificial Sequence
  Synthetic oligonucleotide
gtaaagtcgaacatgaggaaggcacccgag

SEQ ID NO: 219546 - DNA, 30 bp, Artificial Sequence
  Synthetic oligonucleotide
acttgtaacgcggtcgcttgtagccccgag

SEQ ID NO: 219547 - DNA, 30 bp, Artificial Sequence
  Synthetic oligonucleotide
taagctgatccccgcagtatccgccccgag

SEQ ID NO: 219548 - DNA, 30 bp, Artificial Sequence
  Synthetic oligonucleotide
agccacgtattttatgtcgggtagcccgag

SEQ ID NO: 219549 - DNA, 30 bp, Artificial Sequence
  Synthetic oligonucleotide
aggacatgagcgtttggttatgcgcccgag

SEQ ID NO: 219550 - DNA, 30 bp, Artificial Sequence
  Synthetic oligonucleotide
ccccccggcgaggtatgagtttaggccgag

SEQ ID NO: 219551 - DNA, 30 bp, Artificial Sequence
  Synthetic oligonucleotide
gcttagatggtaccacccagcaatgccgag

SEQ ID NO: 219552 - DNA, 30 bp, Artificial Sequence
  Synthetic oligonucleotide
atgatacaataacatggacacagctccgag

SEQ ID NO: 219553 - DNA, 30 bp, Artificial Sequence
  Synthetic oligonucleotide
aagtggcgcagatatcccccgatctccgag

SEQ ID NO: 219554 - DNA, 30 bp, Artificial Sequence
  Synthetic oligonucleotide
tttctaggttctctattgtggtcgtccgag

SEQ ID NO: 219555 - DNA, 30 bp, Artificial Sequence
  Synthetic oligonucleotide
cgcgccggtgccccggttcaatggtccgag

SEQ ID NO: 219556 - DNA, 30 bp, Artificial Sequence
  Synthetic oligonucleotide
gtcctgtgtcgggaaagttagcgttccgag

SEQ ID NO: 219557 - DNA, 30 bp, Artificial Sequence
  Synthetic oligonucleotide
tggtgagaaaagttatgcgtaatcagcgag

SEQ ID NO: 219558 - DNA, 30 bp, Artificial Sequence
  Synthetic oligonucleotide
ccgcaagagccgtataaaggcccgagcgag

SEQ ID NO: 219559 - DNA, 30 bp, Artificial Sequence
  Synthetic oligonucleotide
cgcccgttgtatatgacactctttagcgag

SEQ ID NO: 219560 - DNA, 30 bp, Artificial Sequence
  Synthetic oligonucleotide
tacgtgcgtatctccattatctgccgcgag

SEQ ID NO: 219561 - DNA, 30 bp, Artificial Sequence
  Synthetic oligonucleotide
aattctgagcgtttaagaccttcaggcgag

SEQ ID NO: 219562 - DNA, 30 bp, Artificial Sequence
  Synthetic oligonucleotide
ttacaataaaaatgggaattgtacggcgag

SEQ ID NO: 219563 - DNA, 30 bp, Artificial Sequence
  Synthetic oligonucleotide
ggtctgggtgtgaaaagaggatcgggcgag

SEQ ID NO: 219564 - DNA, 30 bp, Artificial Sequence
  Synthetic oligonucleotide
gatccgctggtgactctgagcggtggcgag

SEQ ID NO: 219565 - DNA, 30 bp, Artificial Sequence
  Synthetic oligonucleotide
acgtattctataatggtggatggtggcgag

SEQ ID NO: 219566 - DNA, 30 bp, Artificial Sequence
  Synthetic oligonucleotide
atttacaatagtaatatcacatttggcgag

SEQ ID NO: 219567 - DNA, 30 bp, Artificial Sequence
  Synthetic oligonucleotide
cactctagtctgagggagacggaatgcgag

SEQ ID NO: 219568 - DNA, 30 bp, Artificial Sequence
  Synthetic oligonucleotide
tatcatgtgctttaaggcgtcgcatgcgag

SEQ ID NO: 219569 - DNA, 30 bp, Artificial Sequence
  Synthetic oligonucleotide
gcagtcggcaagataatcatcccgtgcgag

SEQ ID NO: 219570 - DNA, 30 bp, Artificial Sequence
  Synthetic oligonucleotide
agccggaccagaccgtcttacaggtgcgag

SEQ ID NO: 219571 - DNA, 30 bp, Artificial Sequence
  Synthetic oligonucleotide
gccctcgatagactcatgttgttgtgcgag

SEQ ID NO: 219572 - DNA, 30 bp, Artificial Sequence
  Synthetic oligonucleotide
ctcacgccaggtatttactttaaaatcgag

SEQ ID NO: 219573 - DNA, 30 bp, Artificial Sequence
  Synthetic oligonucleotide
caggggtgtgcattcaggtggataatcgag

SEQ ID NO: 219574 - DNA, 30 bp, Artificial Sequence
  Synthetic oligonucleotide
tgaggtctgggttcttgaactagtatcgag

SEQ ID NO: 219575 - DNA, 30 bp, Artificial Sequence
  Synthetic oligonucleotide
gataaggctatccagagccgaaagctcgag

SEQ ID NO: 219576 - DNA, 30 bp, Artificial Sequence
  Synthetic oligonucleotide
cgtggagctatccacgatcttcagctcgag

SEQ ID NO: 219577 - DNA, 30 bp, Artificial Sequence
  Synthetic oligonucleotide
catacgacgtggttacgggtcttgctcgag

SEQ ID NO: 219578 - DNA, 30 bp, Artificial Sequence
  Synthetic oligonucleotide
atgagcttaagctgcaagacaagagtcgag

SEQ ID NO: 219579 - DNA, 30 bp, Artificial Sequence
  Synthetic oligonucleotide
atcctaacgatattgccagagcgagtcgag

SEQ ID NO: 219580 - DNA, 30 bp, Artificial Sequence
  Synthetic oligonucleotide
atttgcacgtgattcggaatgcacgtcgag

SEQ ID NO: 219581 - DNA, 30 bp, Artificial Sequence
  Synthetic oligonucleotide
gtgcggctggcggtccgtgggcgggtcgag

SEQ ID NO: 219582 - DNA, 30 bp, Artificial Sequence
  Synthetic oligonucleotide
agctcacaattacgagttagcttggtcgag

SEQ ID NO: 219583 - DNA, 30 bp, Artificial Sequence
  Synthetic oligonucleotide
cacttactggtcagcaggaaacatgtcgag

SEQ ID NO: 219584 - DNA, 30 bp, Artificial Sequence
  Synthetic oligonucleotide
ttctggcggtcccatgcggtatatgtcgag

SEQ ID NO: 219585 - DNA, 30 bp, Artificial Sequence
  Synthetic oligonucleotide
ggctattataggccatctttcagtgtcgag

SEQ ID NO: 219586 - DNA, 30 bp, Artificial Sequence
  Synthetic oligonucleotide
tgtaggataagtcggtaccttatattcgag

SEQ ID NO: 219587 - DNA, 30 bp, Artificial Sequence
  Synthetic oligonucleotide
tagaataatgagagctcatgcgtgttcgag

SEQ ID NO: 219588 - DNA, 30 bp, Artificial Sequence
  Synthetic oligonucleotide
ataatagagctggtaacctagtatttcgag

SEQ ID NO: 219589 - DNA, 30 bp, Artificial Sequence
  Synthetic oligonucleotide
agttcacgccccatcatatactgaaaggag

SEQ ID NO: 219590 - DNA, 30 bp, Artificial Sequence
  Synthetic oligonucleotide
taggtatgttggtatagattagtcaaggag

SEQ ID NO: 219591 - DNA, 30 bp, Artificial Sequence
  Synthetic oligonucleotide
gcgggttccacgcctaggggtgggaaggag

SEQ ID NO: 219592 - DNA, 30 bp, Artificial Sequence
  Synthetic oligonucleotide
cagacgctactaagcggagctgtgaaggag

SEQ ID NO: 219593 - DNA, 30 bp, Artificial Sequence
  Synthetic oligonucleotide
cccgcttgccagggaaatggctctaaggag

SEQ ID NO: 219594 - DNA, 30 bp, Artificial Sequence
  Synthetic oligonucleotide
tttctgatactagaacattaacgccaggag

SEQ ID NO: 219595 - DNA, 30 bp, Artificial Sequence
  Synthetic oligonucleotide
cttgtatgagtaaccattgtgcagcaggag

SEQ ID NO: 219596 - DNA, 30 bp, Artificial Sequence
  Synthetic oligonucleotide
ttgtccccttctcatagggtatcgcaggag

SEQ ID NO: 219597 - DNA, 30 bp, Artificial Sequence
  Synthetic oligonucleotide
cgtaatgaaagaagcccggtcatgcaggag

SEQ ID NO: 219598 - DNA, 30 bp, Artificial Sequence
  Synthetic oligonucleotide
catgtggaaaccactactgataatcaggag

SEQ ID NO: 219599 - DNA, 30 bp, Artificial Sequence
  Synthetic oligonucleotide
aacggcgaggtgaaatttctacatcaggag

SEQ ID NO: 219600 - DNA, 30 bp, Artificial Sequence
  Synthetic oligonucleotide
ttccggatttaacttgcttggcaagaggag

SEQ ID NO: 219601 - DNA, 30 bp, Artificial Sequence
  Synthetic oligonucleotide
cttaaatgcttttagctatacaaataggag

SEQ ID NO: 219602 - DNA, 31 bp, Artificial Sequence
  Synthetic oligonucleotide
cctgcaagttttgaacacactctaataggag

SEQ ID NO: 219603 - DNA, 30 bp, Artificial Sequence
  Synthetic oligonucleotide
tctatttacgggctcataaggagataggag

SEQ ID NO: 219604 - DNA, 30 bp, Artificial Sequence
  Synthetic oligonucleotide
attgggggtactcatcatagacgataggag

SEQ ID NO: 219605 - DNA, 30 bp, Artificial Sequence
  Synthetic oligonucleotide
cggaccggatggcataatatacgctaggag

SEQ ID NO: 219606 - DNA, 30 bp, Artificial Sequence
  Synthetic oligonucleotide
cgcaaggctcttgcgaagcgaagcacggag

SEQ ID NO: 219607 - DNA, 30 bp, Artificial Sequence
  Synthetic oligonucleotide
ctgtcgtccctctaaggctgaaggacggag

SEQ ID NO: 219608 - DNA, 30 bp, Artificial Sequence
  Synthetic oligonucleotide
taaggtattagtacagcgacttcaccggag

SEQ ID NO: 219609 - DNA, 30 bp, Artificial Sequence
  Synthetic oligonucleotide
atcagggcgggtctttactagtgaccggag

SEQ ID NO: 219610 - DNA, 30 bp, Artificial Sequence
  Synthetic oligonucleotide
attatagggttagcaagaccctggccggag

SEQ ID NO: 219611 - DNA, 30 bp, Artificial Sequence
  Synthetic oligonucleotide
caaacatttcagtagttaggtttgccggag

SEQ ID NO: 219612 - DNA, 30 bp, Artificial Sequence
  Synthetic oligonucleotide
gtcgagttcgtttagtcaatcgatccggag

SEQ ID NO: 219613 - DNA, 30 bp, Artificial Sequence
  Synthetic oligonucleotide
atatggactatgattggcttctaagcggag

SEQ ID NO: 219614 - DNA, 30 bp, Artificial Sequence
  Synthetic oligonucleotide
agcacagttcttcaatgaaccgtggcggag

SEQ ID NO: 219615 - DNA, 30 bp, Artificial Sequence
  Synthetic oligonucleotide
tagggggcacgggacaggggcggtgcggag

SEQ ID NO: 219616 - DNA, 29 bp, Artificial Sequence
  Synthetic oligonucleotide
tagctgcgcatgccgtgaaggaatcggag

SEQ ID NO: 219617 - DNA, 30 bp, Artificial Sequence
  Synthetic oligonucleotide
ccgaaattttaagagaaattgagatcggag

SEQ ID NO: 219618 - DNA, 30 bp, Artificial Sequence
  Synthetic oligonucleotide
cttaaggcatataaggtcttttactcggag

SEQ ID NO: 219619 - DNA, 30 bp, Artificial Sequence
  Synthetic oligonucleotide
tagatcaatacgaatctatggaagtcggag

SEQ ID NO: 219620 - DNA, 30 bp, Artificial Sequence
  Synthetic oligonucleotide
gtactggaaaactgtgaggttatgtcggag

SEQ ID NO: 219621 - DNA, 30 bp, Artificial Sequence
  Synthetic oligonucleotide
ttacgatgctaatagagccggccttcggag

SEQ ID NO: 219622 - DNA, 30 bp, Artificial Sequence
  Synthetic oligonucleotide
gaggcatggtgggtgtttaagggaagggag

SEQ ID NO: 219623 - DNA, 30 bp, Artificial Sequence
  Synthetic oligonucleotide
tcgctgctggaaacggtcgcgaacagggag

SEQ ID NO: 219624 - DNA, 30 bp, Artificial Sequence
  Synthetic oligonucleotide
tattggtgcctaactgcatacatgagggag

SEQ ID NO: 219625 - DNA, 30 bp, Artificial Sequence
  Synthetic oligonucleotide
gaatcttagttagcgtcaatgctccgggag

SEQ ID NO: 219626 - DNA, 30 bp, Artificial Sequence
  Synthetic oligonucleotide
gtatcacagtttagttggcataagcgggag

SEQ ID NO: 219627 - DNA, 30 bp, Artificial Sequence
  Synthetic oligonucleotide
ataataacaggaggaattaaaaatcgggag

SEQ ID NO: 219628 - DNA, 30 bp, Artificial Sequence
  Synthetic oligonucleotide
agtatccaaaatctttatgaaataggggag

SEQ ID NO: 219629 - DNA, 30 bp, Artificial Sequence
  Synthetic oligonucleotide
ataaaggatagtgagagcatgctaggggag

SEQ ID NO: 219630 - DNA, 30 bp, Artificial Sequence
  Synthetic oligonucleotide
cctctgtcgggtttcggcatcttaggggag

SEQ ID NO: 219631 - DNA, 30 bp, Artificial Sequence
  Synthetic oligonucleotide
acgtgatcagattttatggtgttcggggag

SEQ ID NO: 219632 - DNA, 30 bp, Artificial Sequence
  Synthetic oligonucleotide
aacgtgtatgcacatcgaaatctgggggag

SEQ ID NO: 219633 - DNA, 30 bp, Artificial Sequence
  Synthetic oligonucleotide
gtgtactgaaacataaaacgcgtgggggag

SEQ ID NO: 219634 - DNA, 30 bp, Artificial Sequence
  Synthetic oligonucleotide
tggaatagactataatgggtgttgggggag

SEQ ID NO: 219635 - DNA, 30 bp, Artificial Sequence
  Synthetic oligonucleotide
ggatagatggtgtcggctaacgatggggag

SEQ ID NO: 219636 - DNA, 30 bp, Artificial Sequence
  Synthetic oligonucleotide
tttaaaggtcggggttccgcgcctggggag

SEQ ID NO: 219637 - DNA, 30 bp, Artificial Sequence
  Synthetic oligonucleotide
aaacagaggggcggtccctgggcgtgggag

SEQ ID NO: 219638 - DNA, 30 bp, Artificial Sequence
  Synthetic oligonucleotide
aaaacacgagttacaccgctgtcgtgggag

SEQ ID NO: 219639 - DNA, 30 bp, Artificial Sequence
  Synthetic oligonucleotide
tgcctcgtcggtaaatagtaaaaaatggag

SEQ ID NO: 219640 - DNA, 30 bp, Artificial Sequence
  Synthetic oligonucleotide
gcaatccggggtagttcccgacgaatggag

SEQ ID NO: 219641 - DNA, 30 bp, Artificial Sequence
  Synthetic oligonucleotide
gatgatatattatattaggattgcatggag

SEQ ID NO: 219642 - DNA, 30 bp, Artificial Sequence
  Synthetic oligonucleotide
atagcagtattaatataagcaggtatggag

SEQ ID NO: 219643 - DNA, 30 bp, Artificial Sequence
  Synthetic oligonucleotide
gattaaagtgcgttgtatcgtgcactggag

SEQ ID NO: 219644 - DNA, 30 bp, Artificial Sequence
  Synthetic oligonucleotide
tacgacagtgagacagtgttacatctggag

SEQ ID NO: 219645 - DNA, 30 bp, Artificial Sequence
  Synthetic oligonucleotide
gaggcctaccgctacgctgagcatctggag

SEQ ID NO: 219646 - DNA, 31 bp, Artificial Sequence
  Synthetic oligonucleotide
agtcccccataagattattgggggagtggag

SEQ ID NO: 219647 - DNA, 30 bp, Artificial Sequence
  Synthetic oligonucleotide
tgattgatttgaagtagaagatgcgtggag

SEQ ID NO: 219648 - DNA, 30 bp, Artificial Sequence
  Synthetic oligonucleotide
gtaataacacaccgtggggcctcggtggag

SEQ ID NO: 219649 - DNA, 30 bp, Artificial Sequence
  Synthetic oligonucleotide
agtgccgcacgttcagcagctttggtggag

SEQ ID NO: 219650 - DNA, 30 bp, Artificial Sequence
  Synthetic oligonucleotide
gttgttcacctgcaattacctcatgtggag

SEQ ID NO: 219651 - DNA, 30 bp, Artificial Sequence
  Synthetic oligonucleotide
tggaaattccatagcttgggagctgtggag

SEQ ID NO: 219652 - DNA, 30 bp, Artificial Sequence
  Synthetic oligonucleotide
tacaactttgtgggcaagatgagtgtggag

SEQ ID NO: 219653 - DNA, 30 bp, Artificial Sequence
  Synthetic oligonucleotide
tattatgagcgctgactgtagtaattggag

SEQ ID NO: 219654 - DNA, 30 bp, Artificial Sequence
  Synthetic oligonucleotide
attaagcacagtattgtgcgtatattggag

SEQ ID NO: 219655 - DNA, 30 bp, Artificial Sequence
  Synthetic oligonucleotide
catgaaacgcaagggtctcctttattggag

SEQ ID NO: 219656 - DNA, 30 bp, Artificial Sequence
  Synthetic oligonucleotide
agcccttacccaacaccatacctgttggag

SEQ ID NO: 219657 - DNA, 30 bp, Artificial Sequence
  Synthetic oligonucleotide
gttatggttataacacggcagagtttggag

SEQ ID NO: 219658 - DNA, 30 bp, Artificial Sequence
  Synthetic oligonucleotide
cggtacgttcacaaatctctgcccaatgag

SEQ ID NO: 219659 - DNA, 29 bp, Artificial Sequence
  Synthetic oligonucleotide
taggaactgcggcccagaagcgcaatgag

SEQ ID NO: 219660 - DNA, 30 bp, Artificial Sequence
  Synthetic oligonucleotide
atcccatcaaattacacgtgtgagaatgag

SEQ ID NO: 219661 - DNA, 30 bp, Artificial Sequence
  Synthetic oligonucleotide
catcccttgtggactcatgtccttaatgag

SEQ ID NO: 219662 - DNA, 30 bp, Artificial Sequence
  Synthetic oligonucleotide
ttagttagtaagataccgctaagacatgag

SEQ ID NO: 219663 - DNA, 30 bp, Artificial Sequence
  Synthetic oligonucleotide
tacagcttataggacacgagtctacatgag

SEQ ID NO: 219664 - DNA, 30 bp, Artificial Sequence
  Synthetic oligonucleotide
ctggaagttgaaccggggcaagggcatgag

SEQ ID NO: 219665 - DNA, 30 bp, Artificial Sequence
  Synthetic oligonucleotide
gctcaatggaaaagcagggcgcgtcatgag

SEQ ID NO: 219666 - DNA, 30 bp, Artificial Sequence
  Synthetic oligonucleotide
aacggaatgattccggtacatcgagatgag

SEQ ID NO: 219667 - DNA, 30 bp, Artificial Sequence
  Synthetic oligonucleotide
cacggtacctgggtaattttaatcgatgag

SEQ ID NO: 219668 - DNA, 30 bp, Artificial Sequence
  Synthetic oligonucleotide
acaaccctatagtcagttctagaggatgag

SEQ ID NO: 219669 - DNA, 30 bp, Artificial Sequence
  Synthetic oligonucleotide
tgcaattacgcaatcagttatccatatgag

SEQ ID NO: 219670 - DNA, 30 bp, Artificial Sequence
  Synthetic oligonucleotide
caagtttataaggggcctgcaaactatgag

SEQ ID NO: 219671 - DNA, 30 bp, Artificial Sequence
  Synthetic oligonucleotide
ggcggacctgaggtagggaaatgctatgag

SEQ ID NO: 219672 - DNA, 30 bp, Artificial Sequence
  Synthetic oligonucleotide
cagaaatcggcgaccgagtgtggttatgag

SEQ ID NO: 219673 - DNA, 30 bp, Artificial Sequence
  Synthetic oligonucleotide
gcgatcgtgcgacgtgcaccgatttatgag

SEQ ID NO: 219674 - DNA, 30 bp, Artificial Sequence
  Synthetic oligonucleotide
gctttgggggtcgagttgctactttatgag

SEQ ID NO: 219675 - DNA, 30 bp, Artificial Sequence
  Synthetic oligonucleotide
atgtactagatctatcgcattctttatgag

SEQ ID NO: 219676 - DNA, 30 bp, Artificial Sequence
  Synthetic oligonucleotide
acctagttggggttgcatagctcaactgag

SEQ ID NO: 219677 - DNA, 30 bp, Artificial Sequence
  Synthetic oligonucleotide
gtcctagggaacggagcgagtagaactgag

SEQ ID NO: 219678 - DNA, 30 bp, Artificial Sequence
  Synthetic oligonucleotide
agcttttgctgggtcagggcatgaactgag

SEQ ID NO: 219679 - DNA, 30 bp, Artificial Sequence
  Synthetic oligonucleotide
acttgctggctcctattgggctgaactgag

SEQ ID NO: 219680 - DNA, 30 bp, Artificial Sequence
  Synthetic oligonucleotide
ctgacagccttggctttatcacacactgag

SEQ ID NO: 219681 - DNA, 30 bp, Artificial Sequence
  Synthetic oligonucleotide
gcccccagggcacgcataagcatcactgag

SEQ ID NO: 219682 - DNA, 30 bp, Artificial Sequence
  Synthetic oligonucleotide
cccccacgcagggtttcgttgatcactgag

SEQ ID NO: 219683 - DNA, 30 bp, Artificial Sequence
  Synthetic oligonucleotide
acctggtgggacttagactcgatgactgag

SEQ ID NO: 219684 - DNA, 30 bp, Artificial Sequence
  Synthetic oligonucleotide
taagggccgcggaatatatgacctactgag

SEQ ID NO: 219685 - DNA, 30 bp, Artificial Sequence
  Synthetic oligonucleotide
atgcgttgtgtaaaccgattcattactgag

SEQ ID NO: 219686 - DNA, 30 bp, Artificial Sequence
  Synthetic oligonucleotide
tacttggctatcacgggccgccaacctgag

SEQ ID NO: 219687 - DNA, 30 bp, Artificial Sequence
  Synthetic oligonucleotide
aaatcaccgtgtaggaggggtcggcctgag

SEQ ID NO: 219688 - DNA, 30 bp, Artificial Sequence
  Synthetic oligonucleotide
agcattatggacgtcctagctactcctgag

SEQ ID NO: 219689 - DNA, 30 bp, Artificial Sequence
  Synthetic oligonucleotide
agatcgcgggagggtgtggttggagctgag

SEQ ID NO: 219690 - DNA, 30 bp, Artificial Sequence
  Synthetic oligonucleotide
atggtagacccctgggccagggacgctgag

SEQ ID NO: 219691 - DNA, 30 bp, Artificial Sequence
  Synthetic oligonucleotide
tacaatccgggcgcgtgcgcaatcgctgag

SEQ ID NO: 219692 - DNA, 30 bp, Artificial Sequence
  Synthetic oligonucleotide
atccgattccgggagcgggcaaaatctgag

SEQ ID NO: 219693 - DNA, 30 bp, Artificial Sequence
  Synthetic oligonucleotide
gccgaaattttcgtaaaatcacgatctgag

SEQ ID NO: 219694 - DNA, 30 bp, Artificial Sequence
  Synthetic oligonucleotide
aagatctaatgttccatagcatcttctgag

SEQ ID NO: 219695 - DNA, 30 bp, Artificial Sequence
  Synthetic oligonucleotide
gatctagaaagatgtaatcaggaaagtgag

SEQ ID NO: 219696 - DNA, 30 bp, Artificial Sequence
  Synthetic oligonucleotide
atggatgtacacagtgctcaaagcagtgag

SEQ ID NO: 219697 - DNA, 30 bp, Artificial Sequence
  Synthetic oligonucleotide
cccaaacaaataaaaaagccttgcagtgag

SEQ ID NO: 219698 - DNA, 30 bp, Artificial Sequence
  Synthetic oligonucleotide
ccaccagacaagcatccctgctgtagtgag

SEQ ID NO: 219699 - DNA, 30 bp, Artificial Sequence
  Synthetic oligonucleotide
cctgttcgtctgttctggagaatacgtgag

SEQ ID NO: 219700 - DNA, 30 bp, Artificial Sequence
  Synthetic oligonucleotide
gactctcaacgagggtccatcagccgtgag

SEQ ID NO: 219701 - DNA, 30 bp, Artificial Sequence
  Synthetic oligonucleotide
gcgcgtccggataaggcgatcggccgtgag

SEQ ID NO: 219702 - DNA, 30 bp, Artificial Sequence
  Synthetic oligonucleotide
cgtaattagaccaggcctggtggccgtgag

SEQ ID NO: 219703 - DNA, 30 bp, Artificial Sequence
  Synthetic oligonucleotide
tggatgataaagcttgattgttagcgtgag

SEQ ID NO: 219704 - DNA, 30 bp, Artificial Sequence
  Synthetic oligonucleotide
atcacggacactagtagcgaatcgcgtgag

SEQ ID NO: 219705 - DNA, 30 bp, Artificial Sequence
  Synthetic oligonucleotide
cctgaaatgtacttccatacttctcgtgag

SEQ ID NO: 219706 - DNA, 30 bp, Artificial Sequence
  Synthetic oligonucleotide
gtcaccgttattcagtatttcggtcgtgag

SEQ ID NO: 219707 - DNA, 30 bp, Artificial Sequence
  Synthetic oligonucleotide
caatacgggtgcccgtttttttgcggtgag

SEQ ID NO: 219708 - DNA, 30 bp, Artificial Sequence
  Synthetic oligonucleotide
agatagggacaccgcttaaaatctggtgag

SEQ ID NO: 219709 - DNA, 30 bp, Artificial Sequence
  Synthetic oligonucleotide
aataaaataaggctatggaggaactgtgag

SEQ ID NO: 219710 - DNA, 30 bp, Artificial Sequence
  Synthetic oligonucleotide
accgagcggtgggatttttggtcgtgtgag

SEQ ID NO: 219711 - DNA, 30 bp, Artificial Sequence
  Synthetic oligonucleotide
agtcttcggctgtgttaattgtaaattgag

SEQ ID NO: 219712 - DNA, 30 bp, Artificial Sequence
  Synthetic oligonucleotide
aagtcttaccaagtttttctgacgattgag

SEQ ID NO: 219713 - DNA, 30 bp, Artificial Sequence
  Synthetic oligonucleotide
tgacagtggagcagctgccgggatattgag

SEQ ID NO: 219714 - DNA, 30 bp, Artificial Sequence
  Synthetic oligonucleotide
atggtcgtataagtcacagagcgtattgag

SEQ ID NO: 219715 - DNA, 30 bp, Artificial Sequence
  Synthetic oligonucleotide
agtgctccacagacgtacggatgacttgag

SEQ ID NO: 219716 - DNA, 30 bp, Artificial Sequence
  Synthetic oligonucleotide
ggggtcgcggtagtaatttgaactcttgag

SEQ ID NO: 219717 - DNA, 30 bp, Artificial Sequence
  Synthetic oligonucleotide
tagattgcaccgctaagggctatcgttgag

SEQ ID NO: 219718 - DNA, 30 bp, Artificial Sequence
  Synthetic oligonucleotide
ctttaagccttgggctgccgattcgttgag

SEQ ID NO: 219719 - DNA, 30 bp, Artificial Sequence
  Synthetic oligonucleotide
cagtgggagtaaggcctattacaggttgag

SEQ ID NO: 219720 - DNA, 30 bp, Artificial Sequence
  Synthetic oligonucleotide
gcaggggaatagtcattcgtcgttgttgag

SEQ ID NO: 219721 - DNA, 30 bp, Artificial Sequence
  Synthetic oligonucleotide
gatcctaaactacggcgtagcaaatttgag

SEQ ID NO: 219722 - DNA, 30 bp, Artificial Sequence
  Synthetic oligonucleotide
ataggcaaggttttatagctttagtttgag

SEQ ID NO: 219723 - DNA, 30 bp, Artificial Sequence
  Synthetic oligonucleotide
acaaccctcgggagagaaggtccgtttgag

SEQ ID NO: 219724 - DNA, 30 bp, Artificial Sequence
  Synthetic oligonucleotide
cttccataaatggattgcaatcggtttgag

SEQ ID NO: 219725 - DNA, 30 bp, Artificial Sequence
  Synthetic oligonucleotide
gacgggctggctgcgcaatgctcttttgag

SEQ ID NO: 219726 - DNA, 30 bp, Artificial Sequence
  Synthetic oligonucleotide
aagaatccacaatttctgccaagttttgag

SEQ ID NO: 219727 - DNA, 30 bp, Artificial Sequence
  Synthetic oligonucleotide
cacgccgcgtcgtgtgccatgctttttgag

SEQ ID NO: 219728 - DNA, 30 bp, Artificial Sequence
  Synthetic oligonucleotide
gggtataacggaccctttgtatgaaaatag

SEQ ID NO: 219729 - DNA, 30 bp, Artificial Sequence
  Synthetic oligonucleotide
gcaccagattgaccatcaaggatcaaatag

SEQ ID NO: 219730 - DNA, 30 bp, Artificial Sequence
  Synthetic oligonucleotide
tcgtcggtctattagttctgcgtcaaatag

SEQ ID NO: 219731 - DNA, 30 bp, Artificial Sequence
  Synthetic oligonucleotide
tgggaggtatccggcgcgattgagaaatag

SEQ ID NO: 219732 - DNA, 30 bp, Artificial Sequence
  Synthetic oligonucleotide
cggctaagttctacttgcctagaacaatag

SEQ ID NO: 219733 - DNA, 30 bp, Artificial Sequence
  Synthetic oligonucleotide
gattgattggccggacaggccctacaatag

SEQ ID NO: 219734 - DNA, 30 bp, Artificial Sequence
  Synthetic oligonucleotide
tgattcaaattactatgtcggcaccaatag

SEQ ID NO: 219735 - DNA, 30 bp, Artificial Sequence
  Synthetic oligonucleotide
ttgacaccttgttaattggtatatcaatag

SEQ ID NO: 219736 - DNA, 30 bp, Artificial Sequence
  Synthetic oligonucleotide
ggatgagcggttgctgggtcccctcaatag

SEQ ID NO: 219737 - DNA, 30 bp, Artificial Sequence
  Synthetic oligonucleotide
gagtacacgagcccaatgtagattcaatag

SEQ ID NO: 219738 - DNA, 30 bp, Artificial Sequence
  Synthetic oligonucleotide
agtcgatctatttctgttgcgaaagaatag

SEQ ID NO: 219739 - DNA, 30 bp, Artificial Sequence
  Synthetic oligonucleotide
tagtgactgccccaccgcatattagaatag

SEQ ID NO: 219740 - DNA, 30 bp, Artificial Sequence
  Synthetic oligonucleotide
tatccgtaaaaagaatgataaagggaatag

SEQ ID NO: 219741 - DNA, 29 bp, Artificial Sequence
  Synthetic oligonucleotide
acatgggttgtgtccgttacggggaatag

SEQ ID NO: 219742 - DNA, 30 bp, Artificial Sequence
  Synthetic oligonucleotide
gtgttatcgaagctgacggttatggaatag

SEQ ID NO: 219743 - DNA, 30 bp, Artificial Sequence
  Synthetic oligonucleotide
tgagggagagtctcttacgtgttggaatag

SEQ ID NO: 219744 - DNA, 30 bp, Artificial Sequence
  Synthetic oligonucleotide
tagggtaaactggtgcgcgttaaataatag

SEQ ID NO: 219745 - DNA, 30 bp, Artificial Sequence
  Synthetic oligonucleotide
gtcagtcccgacctcggggggggataatag

SEQ ID NO: 219746 - DNA, 30 bp, Artificial Sequence
  Synthetic oligonucleotide
agacgttacatcatcgggtacgtataatag

SEQ ID NO: 219747 - DNA, 30 bp, Artificial Sequence
  Synthetic oligonucleotide
ctggtggtagaatgtgctgagaactaatag

SEQ ID NO: 219748 - DNA, 30 bp, Artificial Sequence
  Synthetic oligonucleotide
gctgagcctgctggaattatggacacatag

SEQ ID NO: 219749 - DNA, 30 bp, Artificial Sequence
  Synthetic oligonucleotide
cacttgaagacccggacaaataagacatag

SEQ ID NO: 219750 - DNA, 30 bp, Artificial Sequence
  Synthetic oligonucleotide
acgcttaaacccggtattgattagacatag

SEQ ID NO: 219751 - DNA, 30 bp, Artificial Sequence
  Synthetic oligonucleotide
cttccgcatcccatcacattgcggacatag

SEQ ID NO: 219752 - DNA, 30 bp, Artificial Sequence
  Synthetic oligonucleotide
gttataatggaccaaatgcgcattacatag

SEQ ID NO: 219753 - DNA, 30 bp, Artificial Sequence
  Synthetic oligonucleotide
gtggtatcgtttcacaggtacgttacatag

SEQ ID NO: 219754 - DNA, 30 bp, Artificial Sequence
  Synthetic oligonucleotide
aatgggtctgtacgctaaggttacccatag

SEQ ID NO: 219755 - DNA, 30 bp, Artificial Sequence
  Synthetic oligonucleotide
tacagttaatggcatgattaaaagccatag

SEQ ID NO: 219756 - DNA, 30 bp, Artificial Sequence
  Synthetic oligonucleotide
ggcgctaaaacagcgaaaagtccgccatag

SEQ ID NO: 219757 - DNA, 30 bp, Artificial Sequence
  Synthetic oligonucleotide
atcgttcgggtggtcgggggagggccatag

SEQ ID NO: 219758 - DNA, 30 bp, Artificial Sequence
  Synthetic oligonucleotide
ctagatgcactctgggtttgccatccatag

SEQ ID NO: 219759 - DNA, 30 bp, Artificial Sequence
  Synthetic oligonucleotide
ccaatacggctggcgtcccattatgcatag

SEQ ID NO: 219760 - DNA, 30 bp, Artificial Sequence
  Synthetic oligonucleotide
atggctggttacaataagccccaatcatag

SEQ ID NO: 219761 - DNA, 30 bp, Artificial Sequence
  Synthetic oligonucleotide
atgccgattgaggtgtatgggacctcatag

SEQ ID NO: 219762 - DNA, 30 bp, Artificial Sequence
  Synthetic oligonucleotide
aaaacagcaaggataatgacgagctcatag

SEQ ID NO: 219763 - DNA, 30 bp, Artificial Sequence
  Synthetic oligonucleotide
cgtcgttgggtagactttggccgctcatag

SEQ ID NO: 219764 - DNA, 30 bp, Artificial Sequence
  Synthetic oligonucleotide
tgagaattatataggacataaatctcatag

SEQ ID NO: 219765 - DNA, 30 bp, Artificial Sequence
  Synthetic oligonucleotide
ataataggtcaactcacaaatccgtcatag

SEQ ID NO: 219766 - DNA, 30 bp, Artificial Sequence
  Synthetic oligonucleotide
gatctggtggtacgacaccgtgtgtcatag

SEQ ID NO: 219767 - DNA, 30 bp, Artificial Sequence
  Synthetic oligonucleotide
gcccggtgttacctgtactggagaagatag

SEQ ID NO: 219768 - DNA, 30 bp, Artificial Sequence
  Synthetic oligonucleotide
ggtatattagccagcttaacacccagatag

SEQ ID NO: 219769 - DNA, 30 bp, Artificial Sequence
  Synthetic oligonucleotide
acggacatttatgcggtcaactccagatag

SEQ ID NO: 219770 - DNA, 30 bp, Artificial Sequence
  Synthetic oligonucleotide
caactggcgtctaggtcaggcttcagatag

SEQ ID NO: 219771 - DNA, 30 bp, Artificial Sequence
  Synthetic oligonucleotide
gataatccgtatcgagaggacgagagatag

SEQ ID NO: 219772 - DNA, 30 bp, Artificial Sequence
  Synthetic oligonucleotide
ggtgggctccgcagggtatcatggagatag

SEQ ID NO: 219773 - DNA, 30 bp, Artificial Sequence
  Synthetic oligonucleotide
tcggcctctgtcacagcggcaagacgatag

SEQ ID NO: 219774 - DNA, 30 bp, Artificial Sequence
  Synthetic oligonucleotide
gaacgtggctttataccaccgggccgatag

SEQ ID NO: 219775 - DNA, 30 bp, Artificial Sequence
  Synthetic oligonucleotide
ctctccataaagtaggtatatgcgcgatag

SEQ ID NO: 219776 - DNA, 30 bp, Artificial Sequence
  Synthetic oligonucleotide
ggtggtgcatgtctataccattaaggatag

SEQ ID NO: 219777 - DNA, 30 bp, Artificial Sequence
  Synthetic oligonucleotide
aactgccagacgtgccggagcataggatag

SEQ ID NO: 219778 - DNA, 30 bp, Artificial Sequence
  Synthetic oligonucleotide
atgagcgatagtcttgaggcgcccggatag

SEQ ID NO: 219779 - DNA, 30 bp, Artificial Sequence
  Synthetic oligonucleotide
ggtacagggcgtttatatcaagcgggatag

SEQ ID NO: 219780 - DNA, 30 bp, Artificial Sequence
  Synthetic oligonucleotide
tggataatgactccatgcggccctggatag

SEQ ID NO: 219781 - DNA, 30 bp, Artificial Sequence
  Synthetic oligonucleotide
attggcaggcactacagagatacatgatag

SEQ ID NO: 219782 - DNA, 30 bp, Artificial Sequence
  Synthetic oligonucleotide
aagtagggcattcagaaaaaattgtgatag

SEQ ID NO: 219783 - DNA, 30 bp, Artificial Sequence
  Synthetic oligonucleotide
tagattgtataatacggctgaacaatatag

SEQ ID NO: 219784 - DNA, 30 bp, Artificial Sequence
  Synthetic oligonucleotide
agttatatccttttcgagggcacaatatag

SEQ ID NO: 219785 - DNA, 30 bp, Artificial Sequence
  Synthetic oligonucleotide
caagatgtgccgtgaggttcgcgaatatag

SEQ ID NO: 219786 - DNA, 30 bp, Artificial Sequence
  Synthetic oligonucleotide
ggatctgttcgcgtttaccgaggaatatag

SEQ ID NO: 219787 - DNA, 30 bp, Artificial Sequence
  Synthetic oligonucleotide
tacgaatggtcaaatggattaataatatag

SEQ ID NO: 219788 - DNA, 30 bp, Artificial Sequence
  Synthetic oligonucleotide
tgatgggggccggagcgtacccagatatag

SEQ ID NO: 219789 - DNA, 30 bp, Artificial Sequence
  Synthetic oligonucleotide
acactcttacaatctgtgtgctgtatatag

SEQ ID NO: 219790 - DNA, 30 bp, Artificial Sequence
  Synthetic oligonucleotide
gcttaatgaactgaattgcggatactatag

SEQ ID NO: 219791 - DNA, 30 bp, Artificial Sequence
  Synthetic oligonucleotide
gaatctgatgatgtgtgtgtctccctatag

SEQ ID NO: 219792 - DNA, 30 bp, Artificial Sequence
  Synthetic oligonucleotide
cacccgccttcacggtcaccacagctatag

SEQ ID NO: 219793 - DNA, 30 bp, Artificial Sequence
  Synthetic oligonucleotide
gccctcaaccgcggaatcgataatctatag

SEQ ID NO: 219794 - DNA, 30 bp, Artificial Sequence
  Synthetic oligonucleotide
cgttacctgagtttgcatttccatctatag

SEQ ID NO: 219795 - DNA, 30 bp, Artificial Sequence
  Synthetic oligonucleotide
ggaatagtgctcagcgggtcttaagtatag

SEQ ID NO: 219796 - DNA, 30 bp, Artificial Sequence
  Synthetic oligonucleotide
aagcagcgcgaacaccaaatcgtagtatag

SEQ ID NO: 219797 - DNA, 30 bp, Artificial Sequence
  Synthetic oligonucleotide
taatcttttggaatgaactgcaacgtatag

SEQ ID NO: 219798 - DNA, 30 bp, Artificial Sequence
  Synthetic oligonucleotide
ggcaatcaaatggacacactttacgtatag

SEQ ID NO: 219799 - DNA, 30 bp, Artificial Sequence
  Synthetic oligonucleotide
attagtcggggaagtagatataccgtatag

SEQ ID NO: 219800 - DNA, 30 bp, Artificial Sequence
  Synthetic oligonucleotide
ggtaccgcccgtacggactaaagcgtatag

SEQ ID NO: 219801 - DNA, 30 bp, Artificial Sequence
  Synthetic oligonucleotide
tggctttacgtttacatgcgaatcgtatag

SEQ ID NO: 219802 - DNA, 30 bp, Artificial Sequence
  Synthetic oligonucleotide
gtggggtgccttataaggtcagtggtatag

SEQ ID NO: 219803 - DNA, 30 bp, Artificial Sequence
  Synthetic oligonucleotide
gtttcggtgaactaaccaagagatgtatag

SEQ ID NO: 219804 - DNA, 30 bp, Artificial Sequence
  Synthetic oligonucleotide
gtatgcaatccaccgtcaccacgtgtatag

SEQ ID NO: 219805 - DNA, 29 bp, Artificial Sequence
  Synthetic oligonucleotide
cccttaggataggatagagagaattatag

SEQ ID NO: 219806 - DNA, 30 bp, Artificial Sequence
  Synthetic oligonucleotide
cagtgggcgaatatgttaagagccttatag

SEQ ID NO: 219807 - DNA, 30 bp, Artificial Sequence
  Synthetic oligonucleotide
accgaacgtcaagggagtacacagttatag

SEQ ID NO: 219808 - DNA, 30 bp, Artificial Sequence
  Synthetic oligonucleotide
ggtcactaatggcacgtccgaacgttatag

SEQ ID NO: 219809 - DNA, 30 bp, Artificial Sequence
  Synthetic oligonucleotide
gaacagggatctggattttatcctttatag

SEQ ID NO: 219810 - DNA, 30 bp, Artificial Sequence
  Synthetic oligonucleotide
gaaaaaatgcaagggattgtctctttatag

SEQ ID NO: 219811 - DNA, 30 bp, Artificial Sequence
  Synthetic oligonucleotide
ccgaagtcggattacaaaaactgtttatag

SEQ ID NO: 219812 - DNA, 30 bp, Artificial Sequence
  Synthetic oligonucleotide
aataatcactgtgaggggcggaacaactag

SEQ ID NO: 219813 - DNA, 30 bp, Artificial Sequence
  Synthetic oligonucleotide
gcaagcgcggtccaacctaccctcaactag

SEQ ID NO: 219814 - DNA, 30 bp, Artificial Sequence
  Synthetic oligonucleotide
cagaaacactcgactactgatccgaactag

SEQ ID NO: 219815 - DNA, 30 bp, Artificial Sequence
  Synthetic oligonucleotide
aaactcgagtgaatacacggcagtaactag

SEQ ID NO: 219816 - DNA, 30 bp, Artificial Sequence
  Synthetic oligonucleotide
ccagtttgtacggaactgggtgagcactag

SEQ ID NO: 219817 - DNA, 30 bp, Artificial Sequence
  Synthetic oligonucleotide
tagggaaggtcgtgttgtggttatcactag

SEQ ID NO: 219818 - DNA, 30 bp, Artificial Sequence
  Synthetic oligonucleotide
cgaaaccacatttctttctcccctcactag

SEQ ID NO: 219819 - DNA, 30 bp, Artificial Sequence
  Synthetic oligonucleotide
cataaattaacatcggctattcttcactag

SEQ ID NO: 219820 - DNA, 30 bp, Artificial Sequence
  Synthetic oligonucleotide
atctgccgactcagtatttgggtagactag

SEQ ID NO: 219821 - DNA, 30 bp, Artificial Sequence
  Synthetic oligonucleotide
aaatcagttcgtatgccagacaatgactag

SEQ ID NO: 219822 - DNA, 30 bp, Artificial Sequence
  Synthetic oligonucleotide
tgtgctgggagaatcagagtcaatgactag

SEQ ID NO: 219823 - DNA, 30 bp, Artificial Sequence
  Synthetic oligonucleotide
gttgaactgggaccgacgtgttgatactag

SEQ ID NO: 219824 - DNA, 30 bp, Artificial Sequence
  Synthetic oligonucleotide
tcacggcaaagtatcatagatgtatactag

SEQ ID NO: 219825 - DNA, 30 bp, Artificial Sequence
  Synthetic oligonucleotide
acgacttgaatgtccatggaccggtactag

SEQ ID NO: 219826 - DNA, 30 bp, Artificial Sequence
  Synthetic oligonucleotide
aggtctagtgttaagcagcgcaatacctag

SEQ ID NO: 219827 - DNA, 30 bp, Artificial Sequence
  Synthetic oligonucleotide
taggtccaattcgatagtgggtttacctag

SEQ ID NO: 219828 - DNA, 30 bp, Artificial Sequence
  Synthetic oligonucleotide
acgctctcaggtggtatccctgacccctag

SEQ ID NO: 219829 - DNA, 30 bp, Artificial Sequence
  Synthetic oligonucleotide
gggcggtacagtaaaccggggacagcctag

SEQ ID NO: 219830 - DNA, 30 bp, Artificial Sequence
  Synthetic oligonucleotide
gccaagcgggcggcatggtccccagcctag

SEQ ID NO: 219831 - DNA, 30 bp, Artificial Sequence
  Synthetic oligonucleotide
gctctcgtataaacacgctctacatcctag

SEQ ID NO: 219832 - DNA, 30 bp, Artificial Sequence
  Synthetic oligonucleotide
gacaggatatttgttatatctgactcctag

SEQ ID NO: 219833 - DNA, 30 bp, Artificial Sequence
  Synthetic oligonucleotide
tgttccgattaagacaactgactctcctag

SEQ ID NO: 219834 - DNA, 30 bp, Artificial Sequence
  Synthetic oligonucleotide
tactaggtttgactccacaactacagctag

SEQ ID NO: 219835 - DNA, 30 bp, Artificial Sequence
  Synthetic oligonucleotide
ggtcagaacatgggttcgtgcaaacgctag

SEQ ID NO: 219836 - DNA, 30 bp, Artificial Sequence
  Synthetic oligonucleotide
tcaggtgccttttattagcgtcagcgctag

SEQ ID NO: 219837 - DNA, 30 bp, Artificial Sequence
  Synthetic oligonucleotide
gaacgctgattgatttcattgaagggctag

SEQ ID NO: 219838 - DNA, 27 bp, Artificial Sequence
  Synthetic oligonucleotide
atcctctagcacacggaatcgggctag

SEQ ID NO: 219839 - DNA, 30 bp, Artificial Sequence
  Synthetic oligonucleotide
tttggcgcaatattaagattctggggctag

SEQ ID NO: 219840 - DNA, 30 bp, Artificial Sequence
  Synthetic oligonucleotide
ggtcaaatatttactattgaagctggctag

SEQ ID NO: 219841 - DNA, 30 bp, Artificial Sequence
  Synthetic oligonucleotide
aatcctgcgccagctgcggaatgtggctag

SEQ ID NO: 219842 - DNA, 30 bp, Artificial Sequence
  Synthetic oligonucleotide
gtaaatcaatgactcgcttacaaatgctag

SEQ ID NO: 219843 - DNA, 30 bp, Artificial Sequence
  Synthetic oligonucleotide
aaagagtcataggtgtagaacgtttgctag

SEQ ID NO: 219844 - DNA, 30 bp, Artificial Sequence
  Synthetic oligonucleotide
ccctcggcacatagtgcaggtaaaatctag

SEQ ID NO: 219845 - DNA, 30 bp, Artificial Sequence
  Synthetic oligonucleotide
atttatacgatcgtgtgcgtaataatctag

SEQ ID NO: 219846 - DNA, 30 bp, Artificial Sequence
  Synthetic oligonucleotide
ttagcgggattgtagagtggcctaatctag

SEQ ID NO: 219847 - DNA, 30 bp, Artificial Sequence
  Synthetic oligonucleotide
ctcactatcggtgctcgtaaaatcatctag

SEQ ID NO: 219848 - DNA, 30 bp, Artificial Sequence
  Synthetic oligonucleotide
caagcgatgagtaacataaaccctatctag

SEQ ID NO: 219849 - DNA, 30 bp, Artificial Sequence
  Synthetic oligonucleotide
gctatcttcccgacaaatggacgtatctag

SEQ ID NO: 219850 - DNA, 30 bp, Artificial Sequence
  Synthetic oligonucleotide
gccaggtgtgttttaaagaacggtatctag

SEQ ID NO: 219851 - DNA, 30 bp, Artificial Sequence
  Synthetic oligonucleotide
ttcgtcggacgtatatgcttacttatctag

SEQ ID NO: 219852 - DNA, 28 bp, Artificial Sequence
  Synthetic oligonucleotide
ttaggaacggttgcccgtatgactctag

SEQ ID NO: 219853 - DNA, 30 bp, Artificial Sequence
  Synthetic oligonucleotide
cctataggcgaattcgatcgcgggctctag

SEQ ID NO: 219854 - DNA, 30 bp, Artificial Sequence
  Synthetic oligonucleotide
taatatgtaatagttgggatccctctctag

SEQ ID NO: 219855 - DNA, 30 bp, Artificial Sequence
  Synthetic oligonucleotide
agttagtctctaactgaagatcaagtctag

SEQ ID NO: 219856 - DNA, 30 bp, Artificial Sequence
  Synthetic oligonucleotide
gggtggattttaggtcagacatcagtctag

SEQ ID NO: 219857 - DNA, 30 bp, Artificial Sequence
  Synthetic oligonucleotide
gcgaaccggcttaactccatccgagtctag

SEQ ID NO: 219858 - DNA, 30 bp, Artificial Sequence
  Synthetic oligonucleotide
agagtgcatttccggacgatgggcgtctag

SEQ ID NO: 219859 - DNA, 30 bp, Artificial Sequence
  Synthetic oligonucleotide
aaatggaccgtggtcttgagacgtgtctag

SEQ ID NO: 219860 - DNA, 30 bp, Artificial Sequence
  Synthetic oligonucleotide
ccctcttgcgagtgttggccgccattctag

SEQ ID NO: 219861 - DNA, 30 bp, Artificial Sequence
  Synthetic oligonucleotide
ccttgaatcgcagagacatgtttattctag

SEQ ID NO: 219862 - DNA, 30 bp, Artificial Sequence
  Synthetic oligonucleotide
gtcgccgaggcaattgttacaccgttctag

SEQ ID NO: 219863 - DNA, 30 bp, Artificial Sequence
  Synthetic oligonucleotide
ggggattttgcttcgtcaagcaaaaagtag

SEQ ID NO: 219864 - DNA, 30 bp, Artificial Sequence
  Synthetic oligonucleotide
ctaaccggggcaccgctttaagagaagtag

SEQ ID NO: 219865 - DNA, 30 bp, Artificial Sequence
  Synthetic oligonucleotide
acacaggcaccgcgctgctttgagaagtag

SEQ ID NO: 219866 - DNA, 30 bp, Artificial Sequence
  Synthetic oligonucleotide
ccagttaccgtgtagcagtataggaagtag

SEQ ID NO: 219867 - DNA, 30 bp, Artificial Sequence
  Synthetic oligonucleotide
ataagtaaccactaacacggcgctaagtag

SEQ ID NO: 219868 - DNA, 30 bp, Artificial Sequence
  Synthetic oligonucleotide
tgagaatggatgtcctgctttccccagtag

SEQ ID NO: 219869 - DNA, 30 bp, Artificial Sequence
  Synthetic oligonucleotide
tcatgcaatgggcgcggtacgtcccagtag

SEQ ID NO: 219870 - DNA, 30 bp, Artificial Sequence
  Synthetic oligonucleotide
atatgaccatgcccgcaagctatccagtag

SEQ ID NO: 219871 - DNA, 30 bp, Artificial Sequence
  Synthetic oligonucleotide
cacaactgattagaacaggagccgcagtag

SEQ ID NO: 219872 - DNA, 30 bp, Artificial Sequence
  Synthetic oligonucleotide
gttcccatgacctagagtctactgcagtag

SEQ ID NO: 219873 - DNA, 30 bp, Artificial Sequence
  Synthetic oligonucleotide
cacggtcctgtggtctcccggaatcagtag

SEQ ID NO: 219874 - DNA, 30 bp, Artificial Sequence
  Synthetic oligonucleotide
gatgggcctatacttgcgggggatcagtag

SEQ ID NO: 219875 - DNA, 30 bp, Artificial Sequence
  Synthetic oligonucleotide
gcagatggtaatacctggaggcgagagtag

SEQ ID NO: 219876 - DNA, 30 bp, Artificial Sequence
  Synthetic oligonucleotide
cagttctgcggatctgcgtcccacgagtag

SEQ ID NO: 219877 - DNA, 30 bp, Artificial Sequence
  Synthetic oligonucleotide
gttacatgactatttccgtggggggagtag

SEQ ID NO: 219878 - DNA, 30 bp, Artificial Sequence
  Synthetic oligonucleotide
actgtgttggtcggtatcacccgtgagtag

SEQ ID NO: 219879 - DNA, 30 bp, Artificial Sequence
  Synthetic oligonucleotide
cgcaaggtcgcagacagcaactgtgagtag

SEQ ID NO: 219880 - DNA, 30 bp, Artificial Sequence
  Synthetic oligonucleotide
gggaagatcaagggatgtttacgctagtag

SEQ ID NO: 219881 - DNA, 30 bp, Artificial Sequence
  Synthetic oligonucleotide
tgagaatacgcgatagtgtttttctagtag

SEQ ID NO: 219882 - DNA, 30 bp, Artificial Sequence
  Synthetic oligonucleotide
gtacactcatctttctgtgacggaacgtag

SEQ ID NO: 219883 - DNA, 30 bp, Artificial Sequence
  Synthetic oligonucleotide
cttaagaggggaggctagggctagacgtag

SEQ ID NO: 219884 - DNA, 30 bp, Artificial Sequence
  Synthetic oligonucleotide
acttgcgtatgaccgttatttccgacgtag

SEQ ID NO: 219885 - DNA, 30 bp, Artificial Sequence
  Synthetic oligonucleotide
caaaacgagttcattcgcaaggcgacgtag

SEQ ID NO: 219886 - DNA, 30 bp, Artificial Sequence
  Synthetic oligonucleotide
agcgatcaaataagatcgccatcgacgtag

SEQ ID NO: 219887 - DNA, 30 bp, Artificial Sequence
  Synthetic oligonucleotide
gaactagtagcgagtatggggagtacgtag

SEQ ID NO: 219888 - DNA, 30 bp, Artificial Sequence
  Synthetic oligonucleotide
gtatcccagaaagtctctcactgtacgtag

SEQ ID NO: 219889 - DNA, 30 bp, Artificial Sequence
  Synthetic oligonucleotide
gcccctcgggcgtggaagaatttcccgtag

SEQ ID NO: 219890 - DNA, 30 bp, Artificial Sequence
  Synthetic oligonucleotide
aaccccctaaatcaatcggagaagccgtag

SEQ ID NO: 219891 - DNA, 30 bp, Artificial Sequence
  Synthetic oligonucleotide
gtaatgccttgcatagaatcctcgccgtag

SEQ ID NO: 219892 - DNA, 30 bp, Artificial Sequence
  Synthetic oligonucleotide
cagttaacagttaaaagaaagtctccgtag

SEQ ID NO: 219893 - DNA, 30 bp, Artificial Sequence
  Synthetic oligonucleotide
atcgggagggaaaacctgcaaattccgtag

SEQ ID NO: 219894 - DNA, 30 bp, Artificial Sequence
  Synthetic oligonucleotide
gaggggcgaggggtttttttagttccgtag

SEQ ID NO: 219895 - DNA, 30 bp, Artificial Sequence
  Synthetic oligonucleotide
gagaagcctgtagatcctccgagagcgtag

SEQ ID NO: 219896 - DNA, 30 bp, Artificial Sequence
  Synthetic oligonucleotide
cactcggtgtagacatgtagcggagcgtag

SEQ ID NO: 219897 - DNA, 30 bp, Artificial Sequence
  Synthetic oligonucleotide
taactcagggtcgtccggcttaacgcgtag

SEQ ID NO: 219898 - DNA, 30 bp, Artificial Sequence
  Synthetic oligonucleotide
tatgggaacatccgtttttttggggcgtag

SEQ ID NO: 219899 - DNA, 30 bp, Artificial Sequence
  Synthetic oligonucleotide
ttaatgcggctgtcttggttcgcatcgtag

SEQ ID NO: 219900 - DNA, 30 bp, Artificial Sequence
  Synthetic oligonucleotide
ttgttcaaagtaggtttttcaagctcgtag

SEQ ID NO: 219901 - DNA, 30 bp, Artificial Sequence
  Synthetic oligonucleotide
tagtgggcatttgcgtagtttccgtcgtag

SEQ ID NO: 219902 - DNA, 30 bp, Artificial Sequence
  Synthetic oligonucleotide
ccggacatcaaaggaactgttgtgtcgtag

SEQ ID NO: 219903 - DNA, 30 bp, Artificial Sequence
  Synthetic oligonucleotide
gtaaagttgagccactcgacggattcgtag

SEQ ID NO: 219904 - DNA, 30 bp, Artificial Sequence
  Synthetic oligonucleotide
acaatcctaggtcataaggtggaaaggtag

SEQ ID NO: 219905 - DNA, 30 bp, Artificial Sequence
  Synthetic oligonucleotide
ttaaagctatgccacatatcggacaggtag

SEQ ID NO: 219906 - DNA, 30 bp, Artificial Sequence
  Synthetic oligonucleotide
atcgtattcagtgtgccgcataccaggtag

SEQ ID NO: 219907 - DNA, 30 bp, Artificial Sequence
  Synthetic oligonucleotide
atgatctccgagtgcagtatgggcaggtag

SEQ ID NO: 219908 - DNA, 30 bp, Artificial Sequence
  Synthetic oligonucleotide
ccgattggttataagttagttatcaggtag

SEQ ID NO: 219909 - DNA, 30 bp, Artificial Sequence
  Synthetic oligonucleotide
cagaacgccgctactccaccctgtaggtag

SEQ ID NO: 219910 - DNA, 30 bp, Artificial Sequence
  Synthetic oligonucleotide
atcgctaatttcccttggttccggcggtag

SEQ ID NO: 219911 - DNA, 30 bp, Artificial Sequence
  Synthetic oligonucleotide
acatcacatccttcgggcagctggcggtag

SEQ ID NO: 219912 - DNA, 30 bp, Artificial Sequence
  Synthetic oligonucleotide
tacaccaggtctctgatagctggagggtag

SEQ ID NO: 219913 - DNA, 30 bp, Artificial Sequence
  Synthetic oligonucleotide
tacatggcaccgggcatatctcacgggtag

SEQ ID NO: 219914 - DNA, 30 bp, Artificial Sequence
  Synthetic oligonucleotide
gaactaaaactttcagtggatggtgggtag

SEQ ID NO: 219915 - DNA, 30 bp, Artificial Sequence
  Synthetic oligonucleotide
atcgggagcgagttccgtctcacatggtag

SEQ ID NO: 219916 - DNA, 30 bp, Artificial Sequence
  Synthetic oligonucleotide
gtaatcgatttcaatgtatcaagctggtag

SEQ ID NO: 219917 - DNA, 30 bp, Artificial Sequence
  Synthetic oligonucleotide
cggggcaggtctgttcagcaatagtggtag

SEQ ID NO: 219918 - DNA, 30 bp, Artificial Sequence
  Synthetic oligonucleotide
cctttcacagacaccgtcacagcgtggtag

SEQ ID NO: 219919 - DNA, 30 bp, Artificial Sequence
  Synthetic oligonucleotide
cgatattgagtcatcgcggccgcgtggtag

SEQ ID NO: 219920 - DNA, 30 bp, Artificial Sequence
  Synthetic oligonucleotide
tattgcgacatatcttcttcgccttggtag

SEQ ID NO: 219921 - DNA, 30 bp, Artificial Sequence
  Synthetic oligonucleotide
agaggtaaaccggtttacaaagtaatgtag

SEQ ID NO: 219922 - DNA, 30 bp, Artificial Sequence
  Synthetic oligonucleotide
cttgccggggcgtaagttggtcgcatgtag

SEQ ID NO: 219923 - DNA, 30 bp, Artificial Sequence
  Synthetic oligonucleotide
agccccaagcacggggcagcttgtatgtag

SEQ ID NO: 219924 - DNA, 30 bp, Artificial Sequence
  Synthetic oligonucleotide
aatgggaagcgagatatgtagcgcctgtag

SEQ ID NO: 219925 - DNA, 30 bp, Artificial Sequence
  Synthetic oligonucleotide
atcggtaccgagctgtaaagcgggctgtag

SEQ ID NO: 219926 - DNA, 30 bp, Artificial Sequence
  Synthetic oligonucleotide
cacgaaaaggcttattctctcccagtgtag

SEQ ID NO: 219927 - DNA, 30 bp, Artificial Sequence
  Synthetic oligonucleotide
gatcagccgataacgtgacgaagagtgtag

SEQ ID NO: 219928 - DNA, 30 bp, Artificial Sequence
  Synthetic oligonucleotide
ccctgccgcacgacgtatgtttgagtgtag

SEQ ID NO: 219929 - DNA, 30 bp, Artificial Sequence
  Synthetic oligonucleotide
acctgcgcatggctattcaagggtgtgtag

SEQ ID NO: 219930 - DNA, 30 bp, Artificial Sequence
  Synthetic oligonucleotide
agtagttaagttccggcatttgatttgtag

SEQ ID NO: 219931 - DNA, 30 bp, Artificial Sequence
  Synthetic oligonucleotide
aatcacggtgtatggccagaggttttgtag

SEQ ID NO: 219932 - DNA, 30 bp, Artificial Sequence
  Synthetic oligonucleotide
cttttgcatcagatcagggtcaaaaattag

SEQ ID NO: 219933 - DNA, 30 bp, Artificial Sequence
  Synthetic oligonucleotide
tgagtgacatgggatgagtctgaaaattag

SEQ ID NO: 219934 - DNA, 30 bp, Artificial Sequence
  Synthetic oligonucleotide
ggcgcttgatcagccaggacttcaaattag

SEQ ID NO: 219935 - DNA, 30 bp, Artificial Sequence
  Synthetic oligonucleotide
gttctcggatgagcacaaaacgccaattag

SEQ ID NO: 219936 - DNA, 30 bp, Artificial Sequence
  Synthetic oligonucleotide
gttaacacataagggtaccctagcaattag

SEQ ID NO: 219937 - DNA, 30 bp, Artificial Sequence
  Synthetic oligonucleotide
gaagggtcagtcctgactcgggataattag

SEQ ID NO: 219938 - DNA, 30 bp, Artificial Sequence
  Synthetic oligonucleotide
aatagcatgggattgggttgttataattag

SEQ ID NO: 219939 - DNA, 30 bp, Artificial Sequence
  Synthetic oligonucleotide
cgacggcgtcttccagccgaccttaattag

SEQ ID NO: 219940 - DNA, 30 bp, Artificial Sequence
  Synthetic oligonucleotide
tcatagaggctggaaacagtctttaattag

SEQ ID NO: 219941 - DNA, 30 bp, Artificial Sequence
  Synthetic oligonucleotide
gccagtcggattaggtggatccaccattag

SEQ ID NO: 219942 - DNA, 30 bp, Artificial Sequence
  Synthetic oligonucleotide
aattacgccgactggacctaactccattag

SEQ ID NO: 219943 - DNA, 30 bp, Artificial Sequence
  Synthetic oligonucleotide
attcgtaggaggttgtgttcagggcattag

SEQ ID NO: 219944 - DNA, 30 bp, Artificial Sequence
  Synthetic oligonucleotide
ccgccatcccccatctcgtgtgctcattag

SEQ ID NO: 219945 - DNA, 30 bp, Artificial Sequence
  Synthetic oligonucleotide
gtcaacagatacccgttgttgggtcattag

SEQ ID NO: 219946 - DNA, 30 bp, Artificial Sequence
  Synthetic oligonucleotide
aaatccgggtaacgggatctttgtcattag

SEQ ID NO: 219947 - DNA, 30 bp, Artificial Sequence
  Synthetic oligonucleotide
ttagccgtagaatttcggttatgagattag

SEQ ID NO: 219948 - DNA, 30 bp, Artificial Sequence
  Synthetic oligonucleotide
aactccgagagacacatttatcacgattag

SEQ ID NO: 219949 - DNA, 30 bp, Artificial Sequence
  Synthetic oligonucleotide
gagctgactcgatactccgcatccgattag

SEQ ID NO: 219950 - DNA, 30 bp, Artificial Sequence
  Synthetic oligonucleotide
tccaaggacgttagtgacacgtccgattag

SEQ ID NO: 219951 - DNA, 30 bp, Artificial Sequence
  Synthetic oligonucleotide
gtctggggggtgtacaaaaacaactattag

SEQ ID NO: 219952 - DNA, 30 bp, Artificial Sequence
  Synthetic oligonucleotide
gtgatggatagcctacgtcagcgttattag

SEQ ID NO: 219953 - DNA, 30 bp, Artificial Sequence
  Synthetic oligonucleotide
gtatggtgcgtgaaagaacaaagcacttag

SEQ ID NO: 219954 - DNA, 30 bp, Artificial Sequence
  Synthetic oligonucleotide
aataataggatcgcaatcttttgcacttag

SEQ ID NO: 219955 - DNA, 30 bp, Artificial Sequence
  Synthetic oligonucleotide
taacttgttttaaagaggaaccagacttag

SEQ ID NO: 219956 - DNA, 30 bp, Artificial Sequence
  Synthetic oligonucleotide
gaaggatcgtatcagttaactagtacttag

SEQ ID NO: 219957 - DNA, 30 bp, Artificial Sequence
  Synthetic oligonucleotide
actaattagaaaagcgcaattcaaccttag

SEQ ID NO: 219958 - DNA, 30 bp, Artificial Sequence
  Synthetic oligonucleotide
agtacagtcccaactggagcgtgaccttag

SEQ ID NO: 219959 - DNA, 30 bp, Artificial Sequence
  Synthetic oligonucleotide
actgtcttgtctggatcctcacccccttag

SEQ ID NO: 219960 - DNA, 30 bp, Artificial Sequence
  Synthetic oligonucleotide
taactcgggggtaagtcctaatagccttag

SEQ ID NO: 219961 - DNA, 30 bp, Artificial Sequence
  Synthetic oligonucleotide
attctggtctaggttacacatgtgccttag

SEQ ID NO: 219962 - DNA, 30 bp, Artificial Sequence
  Synthetic oligonucleotide
cgcgcaatgtgtaagagttggtgtccttag

SEQ ID NO: 219963 - DNA, 30 bp, Artificial Sequence
  Synthetic oligonucleotide
cctcggtaagttaagacatataaagcttag

SEQ ID NO: 219964 - DNA, 30 bp, Artificial Sequence
  Synthetic oligonucleotide
ttgtcagcgcggcgagtattcagagcttag

SEQ ID NO: 219965 - DNA, 30 bp, Artificial Sequence
  Synthetic oligonucleotide
cactcaatccgacttgcctggctagcttag

SEQ ID NO: 219966 - DNA, 30 bp, Artificial Sequence
  Synthetic oligonucleotide
gaattcacaacataaatcaactccgcttag

SEQ ID NO: 219967 - DNA, 30 bp, Artificial Sequence
  Synthetic oligonucleotide
gtgatcttcgtcattgataaaggcgcttag

SEQ ID NO: 219968 - DNA, 30 bp, Artificial Sequence
  Synthetic oligonucleotide
gacagtcgagtggataagcttgcggcttag

SEQ ID NO: 219969 - DNA, 30 bp, Artificial Sequence
  Synthetic oligonucleotide
cgcagccgggggaggacctgcgactcttag

SEQ ID NO: 219970 - DNA, 30 bp, Artificial Sequence
  Synthetic oligonucleotide
tgctcgcgtgcatatcaaagcacctcttag

SEQ ID NO: 219971 - DNA, 30 bp, Artificial Sequence
  Synthetic oligonucleotide
ctgggaggactccccccgaccggaagttag

SEQ ID NO: 219972 - DNA, 30 bp, Artificial Sequence
  Synthetic oligonucleotide
agtggaacctgttgatctaagtgaagttag

SEQ ID NO: 219973 - DNA, 30 bp, Artificial Sequence
  Synthetic oligonucleotide
gtccctattaacacattaagccccagttag

SEQ ID NO: 219974 - DNA, 30 bp, Artificial Sequence
  Synthetic oligonucleotide
cgcggaccgtgcttccttgtagccagttag

SEQ ID NO: 219975 - DNA, 30 bp, Artificial Sequence
  Synthetic oligonucleotide
cagtataggagcgccggcccaatgagttag

SEQ ID NO: 219976 - DNA, 30 bp, Artificial Sequence
  Synthetic oligonucleotide
agagagttacgcttgcgtgcgcatagttag

SEQ ID NO: 219977 - DNA, 30 bp, Artificial Sequence
  Synthetic oligonucleotide
cgacactaaatgcgcgcgtctcatagttag

SEQ ID NO: 219978 - DNA, 30 bp, Artificial Sequence
  Synthetic oligonucleotide
agaacgggggcttttgtgcgatgacgttag

SEQ ID NO: 219979 - DNA, 30 bp, Artificial Sequence
  Synthetic oligonucleotide
tcttgttaagcgagtatcggcaaccgttag

SEQ ID NO: 219980 - DNA, 30 bp, Artificial Sequence
  Synthetic oligonucleotide
atatacgttagtcaactggatgtgcgttag

SEQ ID NO: 219981 - DNA, 30 bp, Artificial Sequence
  Synthetic oligonucleotide
aagatgatcaaacttcataacaatcgttag

SEQ ID NO: 219982 - DNA, 30 bp, Artificial Sequence
  Synthetic oligonucleotide
acatagcacagtggccgcgatattcgttag

SEQ ID NO: 219983 - DNA, 30 bp, Artificial Sequence
  Synthetic oligonucleotide
acttgccggtattcccattggggaggttag

SEQ ID NO: 219984 - DNA, 30 bp, Artificial Sequence
  Synthetic oligonucleotide
ctggtgttgttacaaaagaagaccggttag

SEQ ID NO: 219985 - DNA, 30 bp, Artificial Sequence
  Synthetic oligonucleotide
cagctgttttccaacagaacgaagtgttag

SEQ ID NO: 219986 - DNA, 30 bp, Artificial Sequence
  Synthetic oligonucleotide
ttgtccgcctgataagaaaaaatgtgttag

SEQ ID NO: 219987 - DNA, 30 bp, Artificial Sequence
  Synthetic oligonucleotide
aaactggcagttggtaaggggatgtgttag

SEQ ID NO: 219988 - DNA, 30 bp, Artificial Sequence
  Synthetic oligonucleotide
cgacctgtttacgtgcttcttgattgttag

SEQ ID NO: 219989 - DNA, 30 bp, Artificial Sequence
  Synthetic oligonucleotide
gtgtacagatcaatataaggggcttgttag

SEQ ID NO: 219990 - DNA, 29 bp, Artificial Sequence
  Synthetic oligonucleotide
aatgcactcgacctcgatggtcttgttag

SEQ ID NO: 219991 - DNA, 30 bp, Artificial Sequence
  Synthetic oligonucleotide
ataggcattgctgtgacagaccaaatttag

SEQ ID NO: 219992 - DNA, 30 bp, Artificial Sequence
  Synthetic oligonucleotide
ccaatgctgagatcaccttgatagatttag

SEQ ID NO: 219993 - DNA, 30 bp, Artificial Sequence
  Synthetic oligonucleotide
agttttgcacatctggaacatagtatttag

SEQ ID NO: 219994 - DNA, 30 bp, Artificial Sequence
  Synthetic oligonucleotide
ttcctacccggtggaaatgaaattatttag

SEQ ID NO: 219995 - DNA, 30 bp, Artificial Sequence
  Synthetic oligonucleotide
tttagccctaggtcaggatcgaaactttag

SEQ ID NO: 219996 - DNA, 30 bp, Artificial Sequence
  Synthetic oligonucleotide
ggataagggttacgtaacctcgcactttag

SEQ ID NO: 219997 - DNA, 30 bp, Artificial Sequence
  Synthetic oligonucleotide
cgtataacctccgtgctcatgcgactttag

SEQ ID NO: 219998 - DNA, 30 bp, Artificial Sequence
  Synthetic oligonucleotide
gtagcatatgccgaacattatttactttag

SEQ ID NO: 219999 - DNA, 30 bp, Artificial Sequence
  Synthetic oligonucleotide
gtgttacggacaggtacaagtcatctttag

SEQ ID NO: 220000 - DNA, 30 bp, Artificial Sequence
  Synthetic oligonucleotide
aacatacaaatcgcggcgcgtcgagtttag

SEQ ID NO: 220001 - DNA, 30 bp, Artificial Sequence
  Synthetic oligonucleotide
aacgagacactaaggtgggtgcacgtttag

SEQ ID NO: 220002 - DNA, 30 bp, Artificial Sequence
  Synthetic oligonucleotide
agggttctggcctatcactggatcgtttag

SEQ ID NO: 220003 - DNA, 30 bp, Artificial Sequence
  Synthetic oligonucleotide
ttctgcactatggacgtatatgaggtttag

SEQ ID NO: 220004 - DNA, 30 bp, Artificial Sequence
  Synthetic oligonucleotide
gggacaacaggtaaattgcaccatgtttag

SEQ ID NO: 220005 - DNA, 30 bp, Artificial Sequence
  Synthetic oligonucleotide
gaatgcgtaaccgggtaacaagctgtttag

SEQ ID NO: 220006 - DNA, 30 bp, Artificial Sequence
  Synthetic oligonucleotide
tagggaagacacaaatatatttcattttag

SEQ ID NO: 220007 - DNA, 30 bp, Artificial Sequence
  Synthetic oligonucleotide
agtataaacgtcatgtgggagcgattttag

SEQ ID NO: 220008 - DNA, 30 bp, Artificial Sequence
  Synthetic oligonucleotide
gtcgcctggggtcgcataagtcgattttag

SEQ ID NO: 220009 - DNA, 31 bp, Artificial Sequence
  Synthetic oligonucleotide
tatcgaggataattctttcaaggacttttag

SEQ ID NO: 220010 - DNA, 30 bp, Artificial Sequence
  Synthetic oligonucleotide
tacggaaaaggtcagattattcgcttttag

SEQ ID NO: 220011 - DNA, 30 bp, Artificial Sequence
  Synthetic oligonucleotide
gggatggcaagcggtggtaacttgttttag

SEQ ID NO: 220012 - DNA, 30 bp, Artificial Sequence
  Synthetic oligonucleotide
gccccaccacgaaccataatgaatttttag

SEQ ID NO: 220013 - DNA, 30 bp, Artificial Sequence
  Synthetic oligonucleotide
ttcaggcatcgaagccagcgggttttttag

SEQ ID NO: 220014 - DNA, 30 bp, Artificial Sequence
  Synthetic oligonucleotide
cttccagtgacaaaccacgacagcaaaacg

SEQ ID NO: 220015 - DNA, 31 bp, Artificial Sequence
  Synthetic oligonucleotide
ccgtatttgccccaactggcctctcaaaacg

SEQ ID NO: 220016 - DNA, 30 bp, Artificial Sequence
  Synthetic oligonucleotide
gctaacaatggagctcctgctcataaaacg

SEQ ID NO: 220017 - DNA, 30 bp, Artificial Sequence
  Synthetic oligonucleotide
tattgagacccagggtcgggtactaaaacg

SEQ ID NO: 220018 - DNA, 30 bp, Artificial Sequence
  Synthetic oligonucleotide
gtaacagtttgagtctcatagctacaaacg

SEQ ID NO: 220019 - DNA, 30 bp, Artificial Sequence
  Synthetic oligonucleotide
acaaaataccacccggacaacttgcaaacg

SEQ ID NO: 220020 - DNA, 30 bp, Artificial Sequence
  Synthetic oligonucleotide
tcagtagatcgcattttcttcaatcaaacg

SEQ ID NO: 220021 - DNA, 30 bp, Artificial Sequence
  Synthetic oligonucleotide
gaagatcgttgaagtttattcgaagaaacg

SEQ ID NO: 220022 - DNA, 30 bp, Artificial Sequence
  Synthetic oligonucleotide
tcactagaataacgtccgcagaacgaaacg

SEQ ID NO: 220023 - DNA, 30 bp, Artificial Sequence
  Synthetic oligonucleotide
gatactacccgatgcgaggggtacgaaacg

SEQ ID NO: 220024 - DNA, 30 bp, Artificial Sequence
  Synthetic oligonucleotide
catggcgttcctggcctcgtaaaggaaacg

SEQ ID NO: 220025 - DNA, 30 bp, Artificial Sequence
  Synthetic oligonucleotide
ctagttcaaggtagtgtgttcatggaaacg

SEQ ID NO: 220026 - DNA, 30 bp, Artificial Sequence
  Synthetic oligonucleotide
gcggtccaggtgagcacagcaaatgaaacg

SEQ ID NO: 220027 - DNA, 30 bp, Artificial Sequence
  Synthetic oligonucleotide
ccccagcgaattagcgggctctttgaaacg

SEQ ID NO: 220028 - DNA, 31 bp, Artificial Sequence
  Synthetic oligonucleotide
caatgagtcataaacacgtctatgctaaacg

SEQ ID NO: 220029 - DNA, 30 bp, Artificial Sequence
  Synthetic oligonucleotide
aatcaaggttacggcacatacagttaaacg

SEQ ID NO: 220030 - DNA, 30 bp, Artificial Sequence
  Synthetic oligonucleotide
tagatacccatttgatacactgcaacaacg

SEQ ID NO: 220031 - DNA, 30 bp, Artificial Sequence
  Synthetic oligonucleotide
aaccgaagacccgttgcagtcctaacaacg

SEQ ID NO: 220032 - DNA, 30 bp, Artificial Sequence
  Synthetic oligonucleotide
caaggtcttcgttttgtttacgagacaacg

SEQ ID NO: 220033 - DNA, 30 bp, Artificial Sequence
  Synthetic oligonucleotide
agcaaccgccgtttcggattcaggacaacg

SEQ ID NO: 220034 - DNA, 30 bp, Artificial Sequence
  Synthetic oligonucleotide
acgcacaacgtccgcactcgccggacaacg

SEQ ID NO: 220035 - DNA, 30 bp, Artificial Sequence
  Synthetic oligonucleotide
ctccgaggtctagttgccccaggtacaacg

SEQ ID NO: 220036 - DNA, 30 bp, Artificial Sequence
  Synthetic oligonucleotide
tgacagaaaaggctgtttactggtacaacg

SEQ ID NO: 220037 - DNA, 30 bp, Artificial Sequence
  Synthetic oligonucleotide
tgcggggcgtacgtacttgtctcgccaacg

SEQ ID NO: 220038 - DNA, 30 bp, Artificial Sequence
  Synthetic oligonucleotide
taatagctggttccgaccacatctccaacg

SEQ ID NO: 220039 - DNA, 30 bp, Artificial Sequence
  Synthetic oligonucleotide
agagttcatttccaatacattggtccaacg

SEQ ID NO: 220040 - DNA, 30 bp, Artificial Sequence
  Synthetic oligonucleotide
gtcccatcatcgccccattacccggcaacg

SEQ ID NO: 220041 - DNA, 30 bp, Artificial Sequence
  Synthetic oligonucleotide
tcttttgtcagtacctaacctgactcaacg

SEQ ID NO: 220042 - DNA, 30 bp, Artificial Sequence
  Synthetic oligonucleotide
gcgcgtcaaacattcgctatcccctcaacg

SEQ ID NO: 220043 - DNA, 30 bp, Artificial Sequence
  Synthetic oligonucleotide
gatacgtggagcgatctgcatgcctcaacg

SEQ ID NO: 220044 - DNA, 30 bp, Artificial Sequence
  Synthetic oligonucleotide
gcatcgatcggaatagtggcctcttcaacg

SEQ ID NO: 220045 - DNA, 30 bp, Artificial Sequence
  Synthetic oligonucleotide
aagtaggtcaagcgcaatggccgttcaacg

SEQ ID NO: 220046 - DNA, 30 bp, Artificial Sequence
  Synthetic oligonucleotide
ccactgagcatgttttcttaatgcagaacg

SEQ ID NO: 220047 - DNA, 30 bp, Artificial Sequence
  Synthetic oligonucleotide
aatgaggggatttaagtgccatgcagaacg

SEQ ID NO: 220048 - DNA, 30 bp, Artificial Sequence
  Synthetic oligonucleotide
tgggatgacagataggccgctatgagaacg

SEQ ID NO: 220049 - DNA, 30 bp, Artificial Sequence
  Synthetic oligonucleotide
tgcagtaactatacatgatccgtgagaacg

SEQ ID NO: 220050 - DNA, 30 bp, Artificial Sequence
  Synthetic oligonucleotide
tacataacttaatatttctgggctagaacg

SEQ ID NO: 220051 - DNA, 30 bp, Artificial Sequence
  Synthetic oligonucleotide
accgatgggtgtgttgaatctgttagaacg

SEQ ID NO: 220052 - DNA, 30 bp, Artificial Sequence
  Synthetic oligonucleotide
gtggcgtcccctggtccctcaagacgaacg

SEQ ID NO: 220053 - DNA, 30 bp, Artificial Sequence
  Synthetic oligonucleotide
cttaggtcacgaccatccgaactccgaacg

SEQ ID NO: 220054 - DNA, 30 bp, Artificial Sequence
  Synthetic oligonucleotide
gcgtcagttctaggtgctcctcagcgaacg

SEQ ID NO: 220055 - DNA, 30 bp, Artificial Sequence
  Synthetic oligonucleotide
tctacggggtggggtcaaaaggcgcgaacg

SEQ ID NO: 220056 - DNA, 30 bp, Artificial Sequence
  Synthetic oligonucleotide
agggaatgtgattctcattccaaaggaacg

SEQ ID NO: 220057 - DNA, 30 bp, Artificial Sequence
  Synthetic oligonucleotide
cgagtcctatgagcgtaccagacaggaacg

SEQ ID NO: 220058 - DNA, 30 bp, Artificial Sequence
  Synthetic oligonucleotide
tagtaaatccgacttataagagcaggaacg

SEQ ID NO: 220059 - DNA, 30 bp, Artificial Sequence
  Synthetic oligonucleotide
tcctcaatggatggaaccatatccggaacg

SEQ ID NO: 220060 - DNA, 30 bp, Artificial Sequence
  Synthetic oligonucleotide
caacgcgctcggttggcgattatcggaacg

SEQ ID NO: 220061 - DNA, 30 bp, Artificial Sequence
  Synthetic oligonucleotide
agctccatacacggtccgcactctggaacg

SEQ ID NO: 220062 - DNA, 30 bp, Artificial Sequence
  Synthetic oligonucleotide
acggtgcttatcatttccgttctatgaacg

SEQ ID NO: 220063 - DNA, 30 bp, Artificial Sequence
  Synthetic oligonucleotide
gccgatagactgaaatgaccagtttgaacg

SEQ ID NO: 220064 - DNA, 30 bp, Artificial Sequence
  Synthetic oligonucleotide
tctaccgcggatagtcctaaacgaataacg

SEQ ID NO: 220065 - DNA, 30 bp, Artificial Sequence
  Synthetic oligonucleotide
catttagtgtggaacgccagcggcataacg

SEQ ID NO: 220066 - DNA, 30 bp, Artificial Sequence
  Synthetic oligonucleotide
ttctcatgtcacatcggatagggcataacg

SEQ ID NO: 220067 - DNA, 30 bp, Artificial Sequence
  Synthetic oligonucleotide
ttaacatagtcacaaactcatccgataacg

SEQ ID NO: 220068 - DNA, 30 bp, Artificial Sequence
  Synthetic oligonucleotide
acatgctgtatacgggatgtccggataacg

SEQ ID NO: 220069 - DNA, 30 bp, Artificial Sequence
  Synthetic oligonucleotide
agctctaagctaggatgcaccagtataacg

SEQ ID NO: 220070 - DNA, 30 bp, Artificial Sequence
  Synthetic oligonucleotide
caaagcacaccgagtgttaggaatctaacg

SEQ ID NO: 220071 - DNA, 30 bp, Artificial Sequence
  Synthetic oligonucleotide
tcggactagccttaattgctatgtctaacg

SEQ ID NO: 220072 - DNA, 30 bp, Artificial Sequence
  Synthetic oligonucleotide
actgaccgacgcattagccactgagtaacg

SEQ ID NO: 220073 - DNA, 30 bp, Artificial Sequence
  Synthetic oligonucleotide
ggttctgtagggaggaatgcattcgtaacg

SEQ ID NO: 220074 - DNA, 30 bp, Artificial Sequence
  Synthetic oligonucleotide
tactgcagggcatgatggcctttcgtaacg

SEQ ID NO: 220075 - DNA, 30 bp, Artificial Sequence
  Synthetic oligonucleotide
ttaactgggtctaacaaaagaagggtaacg

SEQ ID NO: 220076 - DNA, 30 bp, Artificial Sequence
  Synthetic oligonucleotide
actcaaatgagtaaacttctgcttgtaacg

SEQ ID NO: 220077 - DNA, 30 bp, Artificial Sequence
  Synthetic oligonucleotide
ctatggtcttggtgcgcccggcaattaacg

SEQ ID NO: 220078 - DNA, 30 bp, Artificial Sequence
  Synthetic oligonucleotide
ataactcgttgtcatggtcggcaattaacg

SEQ ID NO: 220079 - DNA, 30 bp, Artificial Sequence
  Synthetic oligonucleotide
gtcggcattaagcgtgtggttaagttaacg

SEQ ID NO: 220080 - DNA, 30 bp, Artificial Sequence
  Synthetic oligonucleotide
agccatctcaagggttctaacacgttaacg

SEQ ID NO: 220081 - DNA, 30 bp, Artificial Sequence
  Synthetic oligonucleotide
actggattgtgtttatggcacatgttaacg

SEQ ID NO: 220082 - DNA, 30 bp, Artificial Sequence
  Synthetic oligonucleotide
tgtgtctccgaaccaacgcgaactttaacg

SEQ ID NO: 220083 - DNA, 30 bp, Artificial Sequence
  Synthetic oligonucleotide
gataggggggcccactccaagtgtttaacg

SEQ ID NO: 220084 - DNA, 30 bp, Artificial Sequence
  Synthetic oligonucleotide
acagcctttacaatggagggtgaaaacacg

SEQ ID NO: 220085 - DNA, 30 bp, Artificial Sequence
  Synthetic oligonucleotide
ccagactcatggtttcacctagcaaacacg

SEQ ID NO: 220086 - DNA, 31 bp, Artificial Sequence
  Synthetic oligonucleotide
tcgaagggtccatggcgacacctcaaacacg

SEQ ID NO: 220087 - DNA, 30 bp, Artificial Sequence
  Synthetic oligonucleotide
gatgttttaccgccctgccttagaaacacg

SEQ ID NO: 220088 - DNA, 31 bp, Artificial Sequence
  Synthetic oligonucleotide
ctaacagggaaatgcgcattgtatcaacacg

SEQ ID NO: 220089 - DNA, 30 bp, Artificial Sequence
  Synthetic oligonucleotide
atcacgattggaccttgtaccgctaacacg

SEQ ID NO: 220090 - DNA, 30 bp, Artificial Sequence
  Synthetic oligonucleotide
cctgccttatcagataaacatgaacacacg

SEQ ID NO: 220091 - DNA, 30 bp, Artificial Sequence
  Synthetic oligonucleotide
tagtatcttgcgttggggttataacacacg

SEQ ID NO: 220092 - DNA, 30 bp, Artificial Sequence
  Synthetic oligonucleotide
agaccgcagagatctgattcaacacacacg

SEQ ID NO: 220093 - DNA, 30 bp, Artificial Sequence
  Synthetic oligonucleotide
agacccttgtactaaccaggccgacacacg

SEQ ID NO: 220094 - DNA, 30 bp, Artificial Sequence
  Synthetic oligonucleotide
aggtgattgatgcagtggtactgacacacg

SEQ ID NO: 220095 - DNA, 30 bp, Artificial Sequence
  Synthetic oligonucleotide
tggtttcccagtacccagaatcaccacacg

SEQ ID NO: 220096 - DNA, 30 bp, Artificial Sequence
  Synthetic oligonucleotide
gaccttggtatatggccggggatgcacacg

SEQ ID NO: 220097 - DNA, 30 bp, Artificial Sequence
  Synthetic oligonucleotide
taatgttcgccttggtggtgattgcacacg

SEQ ID NO: 220098 - DNA, 30 bp, Artificial Sequence
  Synthetic oligonucleotide
ccgcattgatggtctttgtattctcacacg

SEQ ID NO: 220099 - DNA, 30 bp, Artificial Sequence
  Synthetic oligonucleotide
gggagtgtccactcgtagatagttcacacg

SEQ ID NO: 220100 - DNA, 30 bp, Artificial Sequence
  Synthetic oligonucleotide
gataggactaagtagctttcatcagacacg

SEQ ID NO: 220101 - DNA, 30 bp, Artificial Sequence
  Synthetic oligonucleotide
ttgaagcgatgcgtgacgagatcagacacg

SEQ ID NO: 220102 - DNA, 30 bp, Artificial Sequence
  Synthetic oligonucleotide
cgggaagtctcttgggtagaagacgacacg

SEQ ID NO: 220103 - DNA, 30 bp, Artificial Sequence
  Synthetic oligonucleotide
gaaaagatctttgtattgcaaatcgacacg

SEQ ID NO: 220104 - DNA, 30 bp, Artificial Sequence
  Synthetic oligonucleotide
tcgacatcgttaacatattctagggacacg

SEQ ID NO: 220105 - DNA, 30 bp, Artificial Sequence
  Synthetic oligonucleotide
tcacacagagaccgtctatgtaatgacacg

SEQ ID NO: 220106 - DNA, 30 bp, Artificial Sequence
  Synthetic oligonucleotide
gagtaggagacaacaggccctagtgacacg

SEQ ID NO: 220107 - DNA, 30 bp, Artificial Sequence
  Synthetic oligonucleotide
tttgaaatagataaatgcttaggatacacg

SEQ ID NO: 220108 - DNA, 30 bp, Artificial Sequence
  Synthetic oligonucleotide
cgcatctgacctctatattggtactacacg

SEQ ID NO: 220109 - DNA, 30 bp, Artificial Sequence
  Synthetic oligonucleotide
ataagggggtctcgctaaggagctaccacg

SEQ ID NO: 220110 - DNA, 30 bp, Artificial Sequence
  Synthetic oligonucleotide
atcacggtgagccttgcatagcttcccacg

SEQ ID NO: 220111 - DNA, 30 bp, Artificial Sequence
  Synthetic oligonucleotide
agttagccatagaagcgtgtgcaagccacg

SEQ ID NO: 220112 - DNA, 30 bp, Artificial Sequence
  Synthetic oligonucleotide
actgttggagatcgattagactgagccacg

SEQ ID NO: 220113 - DNA, 30 bp, Artificial Sequence
  Synthetic oligonucleotide
gccggctaaagtcgaccgggcatcgccacg

SEQ ID NO: 220114 - DNA, 30 bp, Artificial Sequence
  Synthetic oligonucleotide
cttgacagttaatgcagttgaatggccacg

SEQ ID NO: 220115 - DNA, 30 bp, Artificial Sequence
  Synthetic oligonucleotide
acgacattttagcatgggaacgcatccacg

SEQ ID NO: 220116 - DNA, 30 bp, Artificial Sequence
  Synthetic oligonucleotide
gagagttgtagcaccttcgcacgatccacg

SEQ ID NO: 220117 - DNA, 30 bp, Artificial Sequence
  Synthetic oligonucleotide
tagatcttcacgacgaggaaaaactccacg

SEQ ID NO: 220118 - DNA, 30 bp, Artificial Sequence
  Synthetic oligonucleotide
gattgtatcatgaacagtgaaacctccacg

SEQ ID NO: 220119 - DNA, 30 bp, Artificial Sequence
  Synthetic oligonucleotide
aactggcactggattttatctcgttccacg

SEQ ID NO: 220120 - DNA, 30 bp, Artificial Sequence
  Synthetic oligonucleotide
tctactgtaatttggaaaaggataagcacg

SEQ ID NO: 220121 - DNA, 30 bp, Artificial Sequence
  Synthetic oligonucleotide
atatgcaccaaaaagctgggatggagcacg

SEQ ID NO: 220122 - DNA, 30 bp, Artificial Sequence
  Synthetic oligonucleotide
cataacttagtcggtcttccgtctagcacg

SEQ ID NO: 220123 - DNA, 30 bp, Artificial Sequence
  Synthetic oligonucleotide
cacctaaagctctgacaatacacccgcacg

SEQ ID NO: 220124 - DNA, 30 bp, Artificial Sequence
  Synthetic oligonucleotide
aagtaggtcggggtcgcagttctgcgcacg

SEQ ID NO: 220125 - DNA, 30 bp, Artificial Sequence
  Synthetic oligonucleotide
caggtaggattgactgttggagtaggcacg

SEQ ID NO: 220126 - DNA, 30 bp, Artificial Sequence
  Synthetic oligonucleotide
tgccatatgtgtcacggagtactcggcacg

SEQ ID NO: 220127 - DNA, 30 bp, Artificial Sequence
  Synthetic oligonucleotide
ccaaattgcgggaagcggaatgagggcacg

SEQ ID NO: 220128 - DNA, 30 bp, Artificial Sequence
  Synthetic oligonucleotide
cattaaattatcacgctttcgtagggcacg

SEQ ID NO: 220129 - DNA, 30 bp, Artificial Sequence
  Synthetic oligonucleotide
tgggtgtgcccagaaggtaaatcgggcacg

SEQ ID NO: 220130 - DNA, 30 bp, Artificial Sequence
  Synthetic oligonucleotide
tattaccagatttcgctatccctgggcacg

SEQ ID NO: 220131 - DNA, 30 bp, Artificial Sequence
  Synthetic oligonucleotide
atggtatgcagggagcgtatcgcatgcacg

SEQ ID NO: 220132 - DNA, 30 bp, Artificial Sequence
  Synthetic oligonucleotide
gaccactatatgggcactgccctatgcacg

SEQ ID NO: 220133 - DNA, 30 bp, Artificial Sequence
  Synthetic oligonucleotide
ctaagcaaatgtgacatagtcctgtgcacg

SEQ ID NO: 220134 - DNA, 30 bp, Artificial Sequence
  Synthetic oligonucleotide
cgctgtcggatctctcccggagtgtgcacg

SEQ ID NO: 220135 - DNA, 30 bp, Artificial Sequence
  Synthetic oligonucleotide
ggggacccaatatcaggatcgacttgcacg

SEQ ID NO: 220136 - DNA, 30 bp, Artificial Sequence
  Synthetic oligonucleotide
aatgaggttaatctgaatgttagaatcacg

SEQ ID NO: 220137 - DNA, 30 bp, Artificial Sequence
  Synthetic oligonucleotide
gcgcgtactcgcggcatctgatttatcacg

SEQ ID NO: 220138 - DNA, 30 bp, Artificial Sequence
  Synthetic oligonucleotide
ttaggtgtttagcagtgggggagcctcacg

SEQ ID NO: 220139 - DNA, 30 bp, Artificial Sequence
  Synthetic oligonucleotide
ggttaataagagttgtcggtaaaagtcacg

SEQ ID NO: 220140 - DNA, 30 bp, Artificial Sequence
  Synthetic oligonucleotide
tataggaacattaggaagcaatcagtcacg

SEQ ID NO: 220141 - DNA, 30 bp, Artificial Sequence
  Synthetic oligonucleotide
acttcctgtccaaagtgtgtcaccgtcacg

SEQ ID NO: 220142 - DNA, 30 bp, Artificial Sequence
  Synthetic oligonucleotide
cgagaagtaagcaatctcgtagaggtcacg

SEQ ID NO: 220143 - DNA, 30 bp, Artificial Sequence
  Synthetic oligonucleotide
gtcctgtaggctaagggttttcgtgtcacg

SEQ ID NO: 220144 - DNA, 30 bp, Artificial Sequence
  Synthetic oligonucleotide
aggacgcttcagacgccgccgcaattcacg

SEQ ID NO: 220145 - DNA, 30 bp, Artificial Sequence
  Synthetic oligonucleotide
atacgcgattgacgcccgcaaggcaagacg

SEQ ID NO: 220146 - DNA, 30 bp, Artificial Sequence
  Synthetic oligonucleotide
gtagcgtttactaaaagcatgatcaagacg

SEQ ID NO: 220147 - DNA, 30 bp, Artificial Sequence
  Synthetic oligonucleotide
atcgtcagggaagttgccggtgtcaagacg

SEQ ID NO: 220148 - DNA, 29 bp, Artificial Sequence
  Synthetic oligonucleotide
agggcggcaatttcgttgcttagaagacg

SEQ ID NO: 220149 - DNA, 30 bp, Artificial Sequence
  Synthetic oligonucleotide
aaaggctgataatgaatcatgcataagacg

SEQ ID NO: 220150 - DNA, 30 bp, Artificial Sequence
  Synthetic oligonucleotide
acaagcattgggactgcggtcgttaagacg

SEQ ID NO: 220151 - DNA, 30 bp, Artificial Sequence
  Synthetic oligonucleotide
cttaatttgctcctagattgtggacagacg

SEQ ID NO: 220152 - DNA, 31 bp, Artificial Sequence
  Synthetic oligonucleotide
ctatacaatcaagtctggcgtccggcagacg

SEQ ID NO: 220153 - DNA, 30 bp, Artificial Sequence
  Synthetic oligonucleotide
ccaaaatctacgatacttgaggggcagacg

SEQ ID NO: 220154 - DNA, 30 bp, Artificial Sequence
  Synthetic oligonucleotide
gatcaataacgtagtgcattgctgcagacg

SEQ ID NO: 220155 - DNA, 30 bp, Artificial Sequence
  Synthetic oligonucleotide
tgttgatgttaaagtatcaagttagagacg

SEQ ID NO: 220156 - DNA, 30 bp, Artificial Sequence
  Synthetic oligonucleotide
caaacttttacgccctcggataacgagacg

SEQ ID NO: 220157 - DNA, 30 bp, Artificial Sequence
  Synthetic oligonucleotide
gcacagatatcccgcgaagactacgagacg

SEQ ID NO: 220158 - DNA, 30 bp, Artificial Sequence
  Synthetic oligonucleotide
acgtattgtgctcgcggtgctgtggagacg

SEQ ID NO: 220159 - DNA, 30 bp, Artificial Sequence
  Synthetic oligonucleotide
ggacgtcaagataatgccttgggatagacg

SEQ ID NO: 220160 - DNA, 30 bp, Artificial Sequence
  Synthetic oligonucleotide
gcaaaatcagcgcgtcgcctagtatagacg

SEQ ID NO: 220161 - DNA, 30 bp, Artificial Sequence
  Synthetic oligonucleotide
gcgcgtcaccagaaggtaggtcactagacg

SEQ ID NO: 220162 - DNA, 30 bp, Artificial Sequence
  Synthetic oligonucleotide
tgagccactcgtaaacaattcatctagacg

SEQ ID NO: 220163 - DNA, 30 bp, Artificial Sequence
  Synthetic oligonucleotide
gtgtaaaacattcaccatataaagtagacg

SEQ ID NO: 220164 - DNA, 30 bp, Artificial Sequence
  Synthetic oligonucleotide
cagtgttgtataggatgacttcagtagacg

SEQ ID NO: 220165 - DNA, 30 bp, Artificial Sequence
  Synthetic oligonucleotide
aatggtagtggccaggaagatccgtagacg

SEQ ID NO: 220166 - DNA, 30 bp, Artificial Sequence
  Synthetic oligonucleotide
agcgccgaatgtgtttgagtgatcacgacg

SEQ ID NO: 220167 - DNA, 30 bp, Artificial Sequence
  Synthetic oligonucleotide
acaataagctccacggtgcatccgacgacg

SEQ ID NO: 220168 - DNA, 30 bp, Artificial Sequence
  Synthetic oligonucleotide
cgtgggaccatttaggtatctgttacgacg

SEQ ID NO: 220169 - DNA, 30 bp, Artificial Sequence
  Synthetic oligonucleotide
gtctgtccgtactggggacgcctaccgacg

SEQ ID NO: 220170 - DNA, 30 bp, Artificial Sequence
  Synthetic oligonucleotide
cattggtcggaagcttaatcaatcgcgacg

SEQ ID NO: 220171 - DNA, 30 bp, Artificial Sequence
  Synthetic oligonucleotide
cgggtattaggccatatatagcgtgcgacg

SEQ ID NO: 220172 - DNA, 30 bp, Artificial Sequence
  Synthetic oligonucleotide
ctactgtgtccagtcgtgcaacttgcgacg

SEQ ID NO: 220173 - DNA, 30 bp, Artificial Sequence
  Synthetic oligonucleotide
gtcgctgtttacccaccatgagtgcggacg

SEQ ID NO: 220174 - DNA, 30 bp, Artificial Sequence
  Synthetic oligonucleotide
tcctcgcgcgcaaacaagttcactcggacg

SEQ ID NO: 220175 - DNA, 30 bp, Artificial Sequence
  Synthetic oligonucleotide
ccattttgacctaagtataagcgtcggacg

SEQ ID NO: 220176 - DNA, 30 bp, Artificial Sequence
  Synthetic oligonucleotide
ctcatttgcttagggggcgaatcagggacg

SEQ ID NO: 220177 - DNA, 30 bp, Artificial Sequence
  Synthetic oligonucleotide
acttggatcacagggcgtcgacacgggacg

SEQ ID NO: 220178 - DNA, 30 bp, Artificial Sequence
  Synthetic oligonucleotide
aatctacttgactggtgacacgacgggacg

SEQ ID NO: 220179 - DNA, 30 bp, Artificial Sequence
  Synthetic oligonucleotide
gaccacttgtgacgagttgtcagcgggacg

SEQ ID NO: 220180 - DNA, 30 bp, Artificial Sequence
  Synthetic oligonucleotide
cgatgactgctatgtgcccttagcgggacg

SEQ ID NO: 220181 - DNA, 30 bp, Artificial Sequence
  Synthetic oligonucleotide
tctcgctgcgtttatcgttctcaggggacg

SEQ ID NO: 220182 - DNA, 30 bp, Artificial Sequence
  Synthetic oligonucleotide
aaaaggtcgcggtgagacacctctgggacg

SEQ ID NO: 220183 - DNA, 30 bp, Artificial Sequence
  Synthetic oligonucleotide
cgaccctgtagcccgtgaatcagtgggacg

SEQ ID NO: 220184 - DNA, 30 bp, Artificial Sequence
  Synthetic oligonucleotide
gaccccgacaattctgagtgcgcctggacg

SEQ ID NO: 220185 - DNA, 30 bp, Artificial Sequence
  Synthetic oligonucleotide
aggcacccacagctggcggtcgcctggacg

SEQ ID NO: 220186 - DNA, 30 bp, Artificial Sequence
  Synthetic oligonucleotide
agaacgattgctatgcgccgttcctggacg

SEQ ID NO: 220187 - DNA, 30 bp, Artificial Sequence
  Synthetic oligonucleotide
tggaagagcgtccaaacggttgtaatgacg

SEQ ID NO: 220188 - DNA, 30 bp, Artificial Sequence
  Synthetic oligonucleotide
accgctctagttcatgactagtggatgacg

SEQ ID NO: 220189 - DNA, 30 bp, Artificial Sequence
  Synthetic oligonucleotide
taacttattaaggtggtaactcttatgacg

SEQ ID NO: 220190 - DNA, 30 bp, Artificial Sequence
  Synthetic oligonucleotide
gacgtactggaatagttcgtcactctgacg

SEQ ID NO: 220191 - DNA, 30 bp, Artificial Sequence
  Synthetic oligonucleotide
atacactcactgtgatcatgccgtctgacg

SEQ ID NO: 220192 - DNA, 30 bp, Artificial Sequence
  Synthetic oligonucleotide
cactatcgagagcggcaacggctcgtgacg

SEQ ID NO: 220193 - DNA, 30 bp, Artificial Sequence
  Synthetic oligonucleotide
taattcggcttctgggacaagaaggtgacg

SEQ ID NO: 220194 - DNA, 30 bp, Artificial Sequence
  Synthetic oligonucleotide
ggtaggacgtaaacacccaactatgtgacg

SEQ ID NO: 220195 - DNA, 30 bp, Artificial Sequence
  Synthetic oligonucleotide
gggtgagggccgaggcactaacttgtgacg

SEQ ID NO: 220196 - DNA, 30 bp, Artificial Sequence
  Synthetic oligonucleotide
gtatgagctatgaccgtttaagttgtgacg

SEQ ID NO: 220197 - DNA, 30 bp, Artificial Sequence
  Synthetic oligonucleotide
gagcaggtttgggagacaaaagcattgacg

SEQ ID NO: 220198 - DNA, 30 bp, Artificial Sequence
  Synthetic oligonucleotide
taatggctatcaaacgcttaagacttgacg

SEQ ID NO: 220199 - DNA, 30 bp, Artificial Sequence
  Synthetic oligonucleotide
gctctaggctgttcaaaaaaactcttgacg

SEQ ID NO: 220200 - DNA, 30 bp, Artificial Sequence
  Synthetic oligonucleotide
cttgggaattagacttgctttcggttgacg

SEQ ID NO: 220201 - DNA, 30 bp, Artificial Sequence
  Synthetic oligonucleotide
agacaaggacctcaaggaggacgtttgacg

SEQ ID NO: 220202 - DNA, 30 bp, Artificial Sequence
  Synthetic oligonucleotide
ctcttgtaaggtaagacccaggaaaatacg

SEQ ID NO: 220203 - DNA, 30 bp, Artificial Sequence
  Synthetic oligonucleotide
gctaaatgattatagaaaatgctaaatacg

SEQ ID NO: 220204 - DNA, 30 bp, Artificial Sequence
  Synthetic oligonucleotide
cagattctgctgccttactgggtaaatacg

SEQ ID NO: 220205 - DNA, 30 bp, Artificial Sequence
  Synthetic oligonucleotide
cagtagagttattagcccgaggccaatacg

SEQ ID NO: 220206 - DNA, 30 bp, Artificial Sequence
  Synthetic oligonucleotide
aacggagtagccgcgatgagttcgaatacg

SEQ ID NO: 220207 - DNA, 30 bp, Artificial Sequence
  Synthetic oligonucleotide
aaacgcccttccgcggttaccgggaatacg

SEQ ID NO: 220208 - DNA, 30 bp, Artificial Sequence
  Synthetic oligonucleotide
tgctacgcccacttgtgcgacctgaatacg

SEQ ID NO: 220209 - DNA, 30 bp, Artificial Sequence
  Synthetic oligonucleotide
atatgagctagaaggccattcgttaatacg

SEQ ID NO: 220210 - DNA, 30 bp, Artificial Sequence
  Synthetic oligonucleotide
gctcttcggtgagcagacaagagccatacg

SEQ ID NO: 220211 - DNA, 30 bp, Artificial Sequence
  Synthetic oligonucleotide
ccttggctttagtgacgaaattcgcatacg

SEQ ID NO: 220212 - DNA, 30 bp, Artificial Sequence
  Synthetic oligonucleotide
atcaggacgctcagagaacgccggcatacg

SEQ ID NO: 220213 - DNA, 30 bp, Artificial Sequence
  Synthetic oligonucleotide
ggagtgaccgctttcacacactggcatacg

SEQ ID NO: 220214 - DNA, 30 bp, Artificial Sequence
  Synthetic oligonucleotide
ggaagtatggcatcgctacgatttcatacg

SEQ ID NO: 220215 - DNA, 30 bp, Artificial Sequence
  Synthetic oligonucleotide
cttctaccgtaatattaagagggagatacg

SEQ ID NO: 220216 - DNA, 30 bp, Artificial Sequence
  Synthetic oligonucleotide
taaatatgcaaggtttagtacggcgatacg

SEQ ID NO: 220217 - DNA, 30 bp, Artificial Sequence
  Synthetic oligonucleotide
tctgacacgccgtgatataacgtcgatacg

SEQ ID NO: 220218 - DNA, 30 bp, Artificial Sequence
  Synthetic oligonucleotide
atcagattactacatgcggatatggatacg

SEQ ID NO: 220219 - DNA, 30 bp, Artificial Sequence
  Synthetic oligonucleotide
tttcaagtgtttatataagatcgtgatacg

SEQ ID NO: 220220 - DNA, 30 bp, Artificial Sequence
  Synthetic oligonucleotide
cgtcggattttaaactaggcgcttgatacg

SEQ ID NO: 220221 - DNA, 30 bp, Artificial Sequence
  Synthetic oligonucleotide
tccgagtacggggaacctgagcgatatacg

SEQ ID NO: 220222 - DNA, 30 bp, Artificial Sequence
  Synthetic oligonucleotide
gcaccttggaacccggggtgtggatatacg

SEQ ID NO: 220223 - DNA, 30 bp, Artificial Sequence
  Synthetic oligonucleotide
tcactaggggcggagctgcagtagtatacg

SEQ ID NO: 220224 - DNA, 30 bp, Artificial Sequence
  Synthetic oligonucleotide
atatgagcccccaggcctgacgaaactacg

SEQ ID NO: 220225 - DNA, 30 bp, Artificial Sequence
  Synthetic oligonucleotide
ccgaatctgcgctcagagtctataactacg

SEQ ID NO: 220226 - DNA, 30 bp, Artificial Sequence
  Synthetic oligonucleotide
aagagatattggtcgacgtagacgactacg

SEQ ID NO: 220227 - DNA, 30 bp, Artificial Sequence
  Synthetic oligonucleotide
ggtcttgacaacgtcactgacttgactacg

SEQ ID NO: 220228 - DNA, 30 bp, Artificial Sequence
  Synthetic oligonucleotide
aagccaccatggcatccactatatactacg

SEQ ID NO: 220229 - DNA, 30 bp, Artificial Sequence
  Synthetic oligonucleotide
aacgaacccgccagggtcgtctaacctacg

SEQ ID NO: 220230 - DNA, 30 bp, Artificial Sequence
  Synthetic oligonucleotide
tgaattagccgatttgtaacggtacctacg

SEQ ID NO: 220231 - DNA, 30 bp, Artificial Sequence
  Synthetic oligonucleotide
gatctccccgagccggagataacccctacg

SEQ ID NO: 220232 - DNA, 30 bp, Artificial Sequence
  Synthetic oligonucleotide
ctattgtatttcagggaggtatagcctacg

SEQ ID NO: 220233 - DNA, 30 bp, Artificial Sequence
  Synthetic oligonucleotide
aaactgttatcgaatacggaatggcctacg

SEQ ID NO: 220234 - DNA, 30 bp, Artificial Sequence
  Synthetic oligonucleotide
agggcgctccgccacttgggtgtgcctacg

SEQ ID NO: 220235 - DNA, 30 bp, Artificial Sequence
  Synthetic oligonucleotide
cagaccgtctggttaagaaggggcgctacg

SEQ ID NO: 220236 - DNA, 30 bp, Artificial Sequence
  Synthetic oligonucleotide
taccaaggaggttcgagttccccggctacg

SEQ ID NO: 220237 - DNA, 30 bp, Artificial Sequence
  Synthetic oligonucleotide
gcccgtgatgaacggtagtcaatggctacg

SEQ ID NO: 220238 - DNA, 30 bp, Artificial Sequence
  Synthetic oligonucleotide
gtatgcgccttggtaagtaagagtgctacg

SEQ ID NO: 220239 - DNA, 30 bp, Artificial Sequence
  Synthetic oligonucleotide
tcatgtgggttgtggactctggcctctacg

SEQ ID NO: 220240 - DNA, 30 bp, Artificial Sequence
  Synthetic oligonucleotide
gggacctactataaaccttgacagtctacg

SEQ ID NO: 220241 - DNA, 30 bp, Artificial Sequence
  Synthetic oligonucleotide
caaccggtatcagcagtacctgtaagtacg

SEQ ID NO: 220242 - DNA, 30 bp, Artificial Sequence
  Synthetic oligonucleotide
actgagtaagcattggcctcgtacagtacg

SEQ ID NO: 220243 - DNA, 30 bp, Artificial Sequence
  Synthetic oligonucleotide
aggaccgaacagggtcatactgtcagtacg

SEQ ID NO: 220244 - DNA, 30 bp, Artificial Sequence
  Synthetic oligonucleotide
ccggagtcaataaagcacgtccgtagtacg

SEQ ID NO: 220245 - DNA, 30 bp, Artificial Sequence
  Synthetic oligonucleotide
gagggcgttaaaggcaagttcgggcgtacg

SEQ ID NO: 220246 - DNA, 31 bp, Artificial Sequence
  Synthetic oligonucleotide
agaggtattagtgggcatgggaaccggtacg

SEQ ID NO: 220247 - DNA, 30 bp, Artificial Sequence
  Synthetic oligonucleotide
gatcgcgatgtgtttccatcgtccggtacg

SEQ ID NO: 220248 - DNA, 30 bp, Artificial Sequence
  Synthetic oligonucleotide
ttaggatctcgttacttggcatatggtacg

SEQ ID NO: 220249 - DNA, 30 bp, Artificial Sequence
  Synthetic oligonucleotide
cgcggtcttgttcgaattacaacatgtacg

SEQ ID NO: 220250 - DNA, 30 bp, Artificial Sequence
  Synthetic oligonucleotide
gggcttcctcatagaagtagattatgtacg

SEQ ID NO: 220251 - DNA, 30 bp, Artificial Sequence
  Synthetic oligonucleotide
gcgctcaccagtgttcccctcacctgtacg

SEQ ID NO: 220252 - DNA, 30 bp, Artificial Sequence
  Synthetic oligonucleotide
cgatacttcgatcaccctgcacaaattacg

SEQ ID NO: 220253 - DNA, 30 bp, Artificial Sequence
  Synthetic oligonucleotide
gcggcggtgaaactcgggacgataattacg

SEQ ID NO: 220254 - DNA, 30 bp, Artificial Sequence
  Synthetic oligonucleotide
gtgtgtaggctcttaccgttttacattacg

SEQ ID NO: 220255 - DNA, 30 bp, Artificial Sequence
  Synthetic oligonucleotide
tgctaattaacgttcggttatagcattacg

SEQ ID NO: 220256 - DNA, 30 bp, Artificial Sequence
  Synthetic oligonucleotide
gatgacgttgacataactccagtcattacg

SEQ ID NO: 220257 - DNA, 31 bp, Artificial Sequence
  Synthetic oligonucleotide
gccccaagctttaatttacatgaggattacg

SEQ ID NO: 220258 - DNA, 28 bp, Artificial Sequence
  Synthetic oligonucleotide
cagtagtttattgggtggagttattacg

SEQ ID NO: 220259 - DNA, 30 bp, Artificial Sequence
  Synthetic oligonucleotide
cagtgggcgccgtaatagcagccgcttacg

SEQ ID NO: 220260 - DNA, 30 bp, Artificial Sequence
  Synthetic oligonucleotide
ctagctcaagtccccgggcctaatcttacg

SEQ ID NO: 220261 - DNA, 30 bp, Artificial Sequence
  Synthetic oligonucleotide
agtgggtatgatgtgtaatgcgatcttacg

SEQ ID NO: 220262 - DNA, 30 bp, Artificial Sequence
  Synthetic oligonucleotide
actgccgtcattccagattcccctcttacg

SEQ ID NO: 220263 - DNA, 30 bp, Artificial Sequence
  Synthetic oligonucleotide
ggcttgagttggcgcggtacttgtcttacg

SEQ ID NO: 220264 - DNA, 30 bp, Artificial Sequence
  Synthetic oligonucleotide
tctcatactcacatccgaaactgggttacg

SEQ ID NO: 220265 - DNA, 30 bp, Artificial Sequence
  Synthetic oligonucleotide
gtttggatctaaggaaagcaggaatttacg

SEQ ID NO: 220266 - DNA, 30 bp, Artificial Sequence
  Synthetic oligonucleotide
cacttgccaggtccgcgattataatttacg

SEQ ID NO: 220267 - DNA, 30 bp, Artificial Sequence
  Synthetic oligonucleotide
cgtcacccgagaagcttcctgaactttacg

SEQ ID NO: 220268 - DNA, 30 bp, Artificial Sequence
  Synthetic oligonucleotide
gtaatacatcttctttgtactgagtttacg

SEQ ID NO: 220269 - DNA, 30 bp, Artificial Sequence
  Synthetic oligonucleotide
attagactagtgacaccgtcggcttttacg

SEQ ID NO: 220270 - DNA, 30 bp, Artificial Sequence
  Synthetic oligonucleotide
gggtctctgggtgtctttcatcaaaaaccg

SEQ ID NO: 220271 - DNA, 30 bp, Artificial Sequence
  Synthetic oligonucleotide
caccgtctccgtgtagggtctagcaaaccg

SEQ ID NO: 220272 - DNA, 30 bp, Artificial Sequence
  Synthetic oligonucleotide
gggcgtttctctcgaagttaacagaaaccg

SEQ ID NO: 220273 - DNA, 30 bp, Artificial Sequence
  Synthetic oligonucleotide
taagctgcacgacacccgccgtagaaaccg

SEQ ID NO: 220274 - DNA, 30 bp, Artificial Sequence
  Synthetic oligonucleotide
ttgagccgtaagtacactgaacataaaccg

SEQ ID NO: 220275 - DNA, 30 bp, Artificial Sequence
  Synthetic oligonucleotide
tgtgtaacatcactggtttatcctaaaccg

SEQ ID NO: 220276 - DNA, 30 bp, Artificial Sequence
  Synthetic oligonucleotide
tgatattatcagatggtggtttaacaaccg

SEQ ID NO: 220277 - DNA, 30 bp, Artificial Sequence
  Synthetic oligonucleotide
tactattggtgtagcgttccccgacaaccg

SEQ ID NO: 220278 - DNA, 30 bp, Artificial Sequence
  Synthetic oligonucleotide
agatccggggccgagggggggcggcaaccg

SEQ ID NO: 220279 - DNA, 30 bp, Artificial Sequence
  Synthetic oligonucleotide
gggggacatcggcgtacataagggcaaccg

SEQ ID NO: 220280 - DNA, 30 bp, Artificial Sequence
  Synthetic oligonucleotide
caccacgtgagcaaatatgtggctcaaccg

SEQ ID NO: 220281 - DNA, 30 bp, Artificial Sequence
  Synthetic oligonucleotide
gcaagcctaaaactggttcagcaagaaccg

SEQ ID NO: 220282 - DNA, 30 bp, Artificial Sequence
  Synthetic oligonucleotide
caaggcaccggacacttctatccagaaccg

SEQ ID NO: 220283 - DNA, 30 bp, Artificial Sequence
  Synthetic oligonucleotide
atggattccgctatatgatcgagagaaccg

SEQ ID NO: 220284 - DNA, 30 bp, Artificial Sequence
  Synthetic oligonucleotide
aaaaagtgtggtgtgtttttcctagaaccg

SEQ ID NO: 220285 - DNA, 30 bp, Artificial Sequence
  Synthetic oligonucleotide
tgggccctaccaagcgggcaggtagaaccg

SEQ ID NO: 220286 - DNA, 30 bp, Artificial Sequence
  Synthetic oligonucleotide
acttggggaacactcaatctaaacgaaccg

SEQ ID NO: 220287 - DNA, 30 bp, Artificial Sequence
  Synthetic oligonucleotide
agcaaggtagcaccacccaacaccgaaccg

SEQ ID NO: 220288 - DNA, 30 bp, Artificial Sequence
  Synthetic oligonucleotide
caccacccagtcttctagcaaaatgaaccg

SEQ ID NO: 220289 - DNA, 30 bp, Artificial Sequence
  Synthetic oligonucleotide
tgccctagtgacagtagatatcaataaccg

SEQ ID NO: 220290 - DNA, 30 bp, Artificial Sequence
  Synthetic oligonucleotide
tacgaatgccagagcttcgtttcataaccg

SEQ ID NO: 220291 - DNA, 30 bp, Artificial Sequence
  Synthetic oligonucleotide
cgccggtctactactaaagcgacctaaccg

SEQ ID NO: 220292 - DNA, 30 bp, Artificial Sequence
  Synthetic oligonucleotide
aaatggttctgagcgttgccacgctaaccg

SEQ ID NO: 220293 - DNA, 30 bp, Artificial Sequence
  Synthetic oligonucleotide
tcccgttaaacagcatcttggacttaaccg

SEQ ID NO: 220294 - DNA, 30 bp, Artificial Sequence
  Synthetic oligonucleotide
agaagatattgggaaaaacctttttaaccg

SEQ ID NO: 220295 - DNA, 30 bp, Artificial Sequence
  Synthetic oligonucleotide
attcgggccggatgattgccgctaacaccg

SEQ ID NO: 220296 - DNA, 30 bp, Artificial Sequence
  Synthetic oligonucleotide
cacacgcgcaaccggtctaaaggcacaccg

SEQ ID NO: 220297 - DNA, 30 bp, Artificial Sequence
  Synthetic oligonucleotide
actatcagaagttcaagtacatcgacaccg

SEQ ID NO: 220298 - DNA, 30 bp, Artificial Sequence
  Synthetic oligonucleotide
tggatataaagtagaaagtagaacccaccg

SEQ ID NO: 220299 - DNA, 30 bp, Artificial Sequence
  Synthetic oligonucleotide
tccgagagcgcacagctacactagccaccg

SEQ ID NO: 220300 - DNA, 30 bp, Artificial Sequence
  Synthetic oligonucleotide
gttaaatgttgagctcgggataatccaccg

SEQ ID NO: 220301 - DNA, 30 bp, Artificial Sequence
  Synthetic oligonucleotide
ggatcggtgagccgacccatgcgagcaccg

SEQ ID NO: 220302 - DNA, 30 bp, Artificial Sequence
  Synthetic oligonucleotide
cgcaagctcctatcttaaaattctgcaccg

SEQ ID NO: 220303 - DNA, 30 bp, Artificial Sequence
  Synthetic oligonucleotide
ttacgtataataatgagttctttatcaccg

SEQ ID NO: 220304 - DNA, 31 bp, Artificial Sequence
  Synthetic oligonucleotide
ccttaaagggtctgagattaacaactcaccg

SEQ ID NO: 220305 - DNA, 30 bp, Artificial Sequence
  Synthetic oligonucleotide
ggggaccaaaccgtctaggaagtctcaccg

SEQ ID NO: 220306 - DNA, 30 bp, Artificial Sequence
  Synthetic oligonucleotide
ggaccacggggtcgtaatgatggttcaccg

SEQ ID NO: 220307 - DNA, 30 bp, Artificial Sequence
  Synthetic oligonucleotide
tgagcagacccccacgtactgctttcaccg

SEQ ID NO: 220308 - DNA, 30 bp, Artificial Sequence
  Synthetic oligonucleotide
cggattttgatgtaggaactagtttcaccg

SEQ ID NO: 220309 - DNA, 30 bp, Artificial Sequence
  Synthetic oligonucleotide
cagatgggtgacgtctcctgtgaaagaccg

SEQ ID NO: 220310 - DNA, 30 bp, Artificial Sequence
  Synthetic oligonucleotide
caaagctccggaagtaagaaatagagaccg

SEQ ID NO: 220311 - DNA, 30 bp, Artificial Sequence
  Synthetic oligonucleotide
ttggccactaccactttcagaagtagaccg

SEQ ID NO: 220312 - DNA, 30 bp, Artificial Sequence
  Synthetic oligonucleotide
gctctagggatattactgaatcgtagaccg

SEQ ID NO: 220313 - DNA, 30 bp, Artificial Sequence
  Synthetic oligonucleotide
gtgatggaggggctcacctgtgggcgaccg

SEQ ID NO: 220314 - DNA, 30 bp, Artificial Sequence
  Synthetic oligonucleotide
cctatttagaccaaatctttggatcgaccg

SEQ ID NO: 220315 - DNA, 30 bp, Artificial Sequence
  Synthetic oligonucleotide
tgtatgggataatagtatccatctcgaccg

SEQ ID NO: 220316 - DNA, 30 bp, Artificial Sequence
  Synthetic oligonucleotide
aacgagtgaagtagcgggagttaaggaccg

SEQ ID NO: 220317 - DNA, 30 bp, Artificial Sequence
  Synthetic oligonucleotide
caccaggcgcgttaggcgggtcccggaccg

SEQ ID NO: 220318 - DNA, 30 bp, Artificial Sequence
  Synthetic oligonucleotide
ggaatataggttacggtattgacgggaccg

SEQ ID NO: 220319 - DNA, 30 bp, Artificial Sequence
  Synthetic oligonucleotide
gatgagcttaggttgcttactaaatgaccg

SEQ ID NO: 220320 - DNA, 30 bp, Artificial Sequence
  Synthetic oligonucleotide
gtccgggaggagaggcctggcacgtgaccg

SEQ ID NO: 220321 - DNA, 30 bp, Artificial Sequence
  Synthetic oligonucleotide
ataaatgatctgtcgtcgggagggtgaccg

SEQ ID NO: 220322 - DNA, 30 bp, Artificial Sequence
  Synthetic oligonucleotide
atagctgtcgggtgtaggtccgtgtgaccg

SEQ ID NO: 220323 - DNA, 30 bp, Artificial Sequence
  Synthetic oligonucleotide
gttgacgtgatcatgacaacgagttgaccg

SEQ ID NO: 220324 - DNA, 30 bp, Artificial Sequence
  Synthetic oligonucleotide
tcggtgtcagaaacttaaaaaaaaataccg

SEQ ID NO: 220325 - DNA, 30 bp, Artificial Sequence
  Synthetic oligonucleotide
ttgcagaaccctaagtggtagaacataccg

SEQ ID NO: 220326 - DNA, 30 bp, Artificial Sequence
  Synthetic oligonucleotide
ggactgttagcccagaatagggctataccg

SEQ ID NO: 220327 - DNA, 30 bp, Artificial Sequence
  Synthetic oligonucleotide
taggcaactggacgatagctgcacctaccg

SEQ ID NO: 220328 - DNA, 30 bp, Artificial Sequence
  Synthetic oligonucleotide
aaagtgactgataagccgaaatcgctaccg

SEQ ID NO: 220329 - DNA, 30 bp, Artificial Sequence
  Synthetic oligonucleotide
gtgctcgtaataccgttagtatctctaccg

SEQ ID NO: 220330 - DNA, 30 bp, Artificial Sequence
  Synthetic oligonucleotide
cataaataatgtgctgaacggtgagtaccg

SEQ ID NO: 220331 - DNA, 30 bp, Artificial Sequence
  Synthetic oligonucleotide
gtcaaaccctgttgacgacctctagtaccg

SEQ ID NO: 220332 - DNA, 30 bp, Artificial Sequence
  Synthetic oligonucleotide
ttcctctcgttactgggcggctccgtaccg

SEQ ID NO: 220333 - DNA, 30 bp, Artificial Sequence
  Synthetic oligonucleotide
taacaaaggtctattcacgatagtgtaccg

SEQ ID NO: 220334 - DNA, 30 bp, Artificial Sequence
  Synthetic oligonucleotide
gttagacgcgcaaataggcgggaattaccg

SEQ ID NO: 220335 - DNA, 30 bp, Artificial Sequence
  Synthetic oligonucleotide
aacgtggtctctcgcttagctagcttaccg

SEQ ID NO: 220336 - DNA, 30 bp, Artificial Sequence
  Synthetic oligonucleotide
aacgattatttatgcaatttatcgttaccg

SEQ ID NO: 220337 - DNA, 30 bp, Artificial Sequence
  Synthetic oligonucleotide
tgagaatagattaatctcctggtgttaccg

SEQ ID NO: 220338 - DNA, 30 bp, Artificial Sequence
  Synthetic oligonucleotide
agttgatggttacggattattttgttaccg

SEQ ID NO: 220339 - DNA, 30 bp, Artificial Sequence
  Synthetic oligonucleotide
aagcgatcaatccctgtgacaataaacccg

SEQ ID NO: 220340 - DNA, 30 bp, Artificial Sequence
  Synthetic oligonucleotide
caaccagatagcggcggccatgcgaacccg

SEQ ID NO: 220341 - DNA, 30 bp, Artificial Sequence
  Synthetic oligonucleotide
ggcttacaatcgtgtaagtaagggaacccg

SEQ ID NO: 220342 - DNA, 30 bp, Artificial Sequence
  Synthetic oligonucleotide
tcgggggcacgacagggggtctcccacccg

SEQ ID NO: 220343 - DNA, 30 bp, Artificial Sequence
  Synthetic oligonucleotide
gagggctatttaggtcaagattctcacccg

SEQ ID NO: 220344 - DNA, 30 bp, Artificial Sequence
  Synthetic oligonucleotide
cttgggggggggtcagagccgagagacccg

SEQ ID NO: 220345 - DNA, 30 bp, Artificial Sequence
  Synthetic oligonucleotide
ggaaagcgtacttcctcgtgtcgagacccg

SEQ ID NO: 220346 - DNA, 30 bp, Artificial Sequence
  Synthetic oligonucleotide
ctcacgatgtggtggcaacttttcgacccg

SEQ ID NO: 220347 - DNA, 30 bp, Artificial Sequence
  Synthetic oligonucleotide
aaccggtgcagcgtgactccgcaggacccg

SEQ ID NO: 220348 - DNA, 30 bp, Artificial Sequence
  Synthetic oligonucleotide
acaaacaccgactcggtggtgcatgacccg

SEQ ID NO: 220349 - DNA, 30 bp, Artificial Sequence
  Synthetic oligonucleotide
cttagctacgtcggtctctgtacgtacccg

SEQ ID NO: 220350 - DNA, 30 bp, Artificial Sequence
  Synthetic oligonucleotide
cgtcaagacggtttaagagtctggtacccg

SEQ ID NO: 220351 - DNA, 30 bp, Artificial Sequence
  Synthetic oligonucleotide
gtcgcgacggggggtcggtctgtgtacccg

SEQ ID NO: 220352 - DNA, 30 bp, Artificial Sequence
  Synthetic oligonucleotide
tgctcagggtttaagggggacaattacccg

SEQ ID NO: 220353 - DNA, 30 bp, Artificial Sequence
  Synthetic oligonucleotide
gctgactatgctctgatacagggcaccccg

SEQ ID NO: 220354 - DNA, 30 bp, Artificial Sequence
  Synthetic oligonucleotide
cggcaagattataccgtgacgtggaccccg

SEQ ID NO: 220355 - DNA, 30 bp, Artificial Sequence
  Synthetic oligonucleotide
ctggattggatggatgctatcatgaccccg

SEQ ID NO: 220356 - DNA, 30 bp, Artificial Sequence
  Synthetic oligonucleotide
cacttgcttagtaggcgtttataacccccg

SEQ ID NO: 220357 - DNA, 30 bp, Artificial Sequence
  Synthetic oligonucleotide
gcatgggaaccaatttcacaggaccccccg

SEQ ID NO: 220358 - DNA, 30 bp, Artificial Sequence
  Synthetic oligonucleotide
cgtcctacccgctgtcatggaactcccccg

SEQ ID NO: 220359 - DNA, 30 bp, Artificial Sequence
  Synthetic oligonucleotide
cggataagcaactatggcacgcgcgccccg

SEQ ID NO: 220360 - DNA, 30 bp, Artificial Sequence
  Synthetic oligonucleotide
aaccgactgagctgcttgcgcaaggccccg

SEQ ID NO: 220361 - DNA, 30 bp, Artificial Sequence
  Synthetic oligonucleotide
tgcgagagcatagacagtggctcatccccg

SEQ ID NO: 220362 - DNA, 30 bp, Artificial Sequence
  Synthetic oligonucleotide
gagcagaaaaccgtcagcaacctatccccg

SEQ ID NO: 220363 - DNA, 30 bp, Artificial Sequence
  Synthetic oligonucleotide
acagggtttccgagggtcaaagattccccg

SEQ ID NO: 220364 - DNA, 30 bp, Artificial Sequence
  Synthetic oligonucleotide
cttcaggagcaagctatgcacagaagcccg

SEQ ID NO: 220365 - DNA, 30 bp, Artificial Sequence
  Synthetic oligonucleotide
taatagcccttaatttgggtgcacagcccg

SEQ ID NO: 220366 - DNA, 30 bp, Artificial Sequence
  Synthetic oligonucleotide
gtgacactcctatcagatcagggcagcccg

SEQ ID NO: 220367 - DNA, 30 bp, Artificial Sequence
  Synthetic oligonucleotide
cagtcggggccagcctggatctaacgcccg

SEQ ID NO: 220368 - DNA, 30 bp, Artificial Sequence
  Synthetic oligonucleotide
cacgcttagacttaggctatacagcgcccg

SEQ ID NO: 220369 - DNA, 30 bp, Artificial Sequence
  Synthetic oligonucleotide
atttattagtccttgacgggtgtgcgcccg

SEQ ID NO: 220370 - DNA, 30 bp, Artificial Sequence
  Synthetic oligonucleotide
atcatctaaaaagtcgggattgcaggcccg

SEQ ID NO: 220371 - DNA, 31 bp, Artificial Sequence
  Synthetic oligonucleotide
gctagtttcgataggcaatgagggaggcccg

SEQ ID NO: 220372 - DNA, 30 bp, Artificial Sequence
  Synthetic oligonucleotide
acttggattggcccaactctttgtggcccg

SEQ ID NO: 220373 - DNA, 30 bp, Artificial Sequence
  Synthetic oligonucleotide
gatacgttactcgacgatggcaaatgcccg

SEQ ID NO: 220374 - DNA, 30 bp, Artificial Sequence
  Synthetic oligonucleotide
attcgataattcagaaggttagcctgcccg

SEQ ID NO: 220375 - DNA, 30 bp, Artificial Sequence
  Synthetic oligonucleotide
ccacatggtttgtaaaggattatctgcccg

SEQ ID NO: 220376 - DNA, 30 bp, Artificial Sequence
  Synthetic oligonucleotide
ttacctcggcagtcatgaaggcggtgcccg

SEQ ID NO: 220377 - DNA, 30 bp, Artificial Sequence
  Synthetic oligonucleotide
gtaagcgggtgtaaagaggtcccactcccg

SEQ ID NO: 220378 - DNA, 30 bp, Artificial Sequence
  Synthetic oligonucleotide
aatcaagcaccactcctccataagctcccg

SEQ ID NO: 220379 - DNA, 30 bp, Artificial Sequence
  Synthetic oligonucleotide
catggaagctctaagagctatccagtcccg

SEQ ID NO: 220380 - DNA, 30 bp, Artificial Sequence
  Synthetic oligonucleotide
cggccgaagatttcagatgtagccgtcccg

SEQ ID NO: 220381 - DNA, 30 bp, Artificial Sequence
  Synthetic oligonucleotide
tggtccacatgactcacaaggttcgtcccg

SEQ ID NO: 220382 - DNA, 30 bp, Artificial Sequence
  Synthetic oligonucleotide
actattagggtagttcataagtaattcccg

SEQ ID NO: 220383 - DNA, 30 bp, Artificial Sequence
  Synthetic oligonucleotide
tactattagctttaacagcgatcattcccg

SEQ ID NO: 220384 - DNA, 30 bp, Artificial Sequence
  Synthetic oligonucleotide
tccagggaacaaaatgcttagatgttcccg

SEQ ID NO: 220385 - DNA, 30 bp, Artificial Sequence
  Synthetic oligonucleotide
tcatatagatgcgacctcgctcgaaagccg

SEQ ID NO: 220386 - DNA, 30 bp, Artificial Sequence
  Synthetic oligonucleotide
tcatattttaatgtggactacgtaaagccg

SEQ ID NO: 220387 - DNA, 31 bp, Artificial Sequence
  Synthetic oligonucleotide
cagcgttccaccggacccgaatgtcaagccg

SEQ ID NO: 220388 - DNA, 30 bp, Artificial Sequence
  Synthetic oligonucleotide
ttggtggggccgagaataatatctaagccg

SEQ ID NO: 220389 - DNA, 30 bp, Artificial Sequence
  Synthetic oligonucleotide
tctcttcactaggcaacgtaccgacagccg

SEQ ID NO: 220390 - DNA, 30 bp, Artificial Sequence
  Synthetic oligonucleotide
cacggatcccgggagcgaagtatccagccg

SEQ ID NO: 220391 - DNA, 30 bp, Artificial Sequence
  Synthetic oligonucleotide
gggaacgaccgcgggtattgatatcagccg

SEQ ID NO: 220392 - DNA, 30 bp, Artificial Sequence
  Synthetic oligonucleotide
agaaatgaccttcccgccgaccaagagccg

SEQ ID NO: 220393 - DNA, 30 bp, Artificial Sequence
  Synthetic oligonucleotide
cgttggacgtgtcgaccgcagtgagagccg

SEQ ID NO: 220394 - DNA, 30 bp, Artificial Sequence
  Synthetic oligonucleotide
aaaaggcgacctggatgatgcaacgagccg

SEQ ID NO: 220395 - DNA, 30 bp, Artificial Sequence
  Synthetic oligonucleotide
ggatcctgcgggtgctagtcaagggagccg

SEQ ID NO: 220396 - DNA, 30 bp, Artificial Sequence
  Synthetic oligonucleotide
acgcactcgtcgggtaacctttctgagccg

SEQ ID NO: 220397 - DNA, 30 bp, Artificial Sequence
  Synthetic oligonucleotide
atggttataccagggcatataccatagccg

SEQ ID NO: 220398 - DNA, 30 bp, Artificial Sequence
  Synthetic oligonucleotide
atgacgatagggccgaactcactatagccg

SEQ ID NO: 220399 - DNA, 30 bp, Artificial Sequence
  Synthetic oligonucleotide
gaatccagctgttcagcatctgtttagccg

SEQ ID NO: 220400 - DNA, 29 bp, Artificial Sequence
  Synthetic oligonucleotide
gataagagacggatacggagtcaacgccg

SEQ ID NO: 220401 - DNA, 30 bp, Artificial Sequence
  Synthetic oligonucleotide
ggatctgacaccgccttcgcgagaacgccg

SEQ ID NO: 220402 - DNA, 30 bp, Artificial Sequence
  Synthetic oligonucleotide
ctggcaaagctactataatactccacgccg

SEQ ID NO: 220403 - DNA, 30 bp, Artificial Sequence
  Synthetic oligonucleotide
tacttggacgacgtcctactcatgacgccg

SEQ ID NO: 220404 - DNA, 30 bp, Artificial Sequence
  Synthetic oligonucleotide
tatggtataaaagaaatttgagcaccgccg

SEQ ID NO: 220405 - DNA, 30 bp, Artificial Sequence
  Synthetic oligonucleotide
cacgacactgactctctgctggcaccgccg

SEQ ID NO: 220406 - DNA, 30 bp, Artificial Sequence
  Synthetic oligonucleotide
tatcacttgcgctgaatacaagccgcgccg

SEQ ID NO: 220407 - DNA, 30 bp, Artificial Sequence
  Synthetic oligonucleotide
gcgctgatcatgcgacgcatgtaatcgccg

SEQ ID NO: 220408 - DNA, 30 bp, Artificial Sequence
  Synthetic oligonucleotide
cacacatgatcccaagcactagacaggccg

SEQ ID NO: 220409 - DNA, 30 bp, Artificial Sequence
  Synthetic oligonucleotide
aaatagcggcatctgatgggtaccaggccg

SEQ ID NO: 220410 - DNA, 30 bp, Artificial Sequence
  Synthetic oligonucleotide
tattggaagtggagaagtcagtataggccg

SEQ ID NO: 220411 - DNA, 30 bp, Artificial Sequence
  Synthetic oligonucleotide
ccgtccacaagggtaaaaagtgctaggccg

SEQ ID NO: 220412 - DNA, 30 bp, Artificial Sequence
  Synthetic oligonucleotide
tagtctggagtgcggacatccgttaggccg

SEQ ID NO: 220413 - DNA, 30 bp, Artificial Sequence
  Synthetic oligonucleotide
ttcgttgaggtccactcgcgttaacggccg

SEQ ID NO: 220414 - DNA, 30 bp, Artificial Sequence
  Synthetic oligonucleotide
ggccagtgggatcctatcaatgaccggccg

SEQ ID NO: 220415 - DNA, 30 bp, Artificial Sequence
  Synthetic oligonucleotide
aacgaacacgtaccttacaaaggccggccg

SEQ ID NO: 220416 - DNA, 30 bp, Artificial Sequence
  Synthetic oligonucleotide
aatggacttggccataagtagtcgcggccg

SEQ ID NO: 220417 - DNA, 30 bp, Artificial Sequence
  Synthetic oligonucleotide
gacagcacgggatacgtatggcctcggccg

SEQ ID NO: 220418 - DNA, 30 bp, Artificial Sequence
  Synthetic oligonucleotide
tccagttcgagcttcgaccgaattcggccg

SEQ ID NO: 220419 - DNA, 30 bp, Artificial Sequence
  Synthetic oligonucleotide
gccagttagaagttgctaatactagggccg

SEQ ID NO: 220420 - DNA, 30 bp, Artificial Sequence
  Synthetic oligonucleotide
actccagggttaaaaagcccttgcgggccg

SEQ ID NO: 220421 - DNA, 30 bp, Artificial Sequence
  Synthetic oligonucleotide
gggattagcgttaaaacagatacggggccg

SEQ ID NO: 220422 - DNA, 29 bp, Artificial Sequence
  Synthetic oligonucleotide
tgccaccttcctgtatgttagctgggccg

SEQ ID NO: 220423 - DNA, 30 bp, Artificial Sequence
  Synthetic oligonucleotide
gtaacgagtggcaggtgggcacgatggccg

SEQ ID NO: 220424 - DNA, 30 bp, Artificial Sequence
  Synthetic oligonucleotide
tctgtgtgggtatgctgttagctgtggccg

SEQ ID NO: 220425 - DNA, 30 bp, Artificial Sequence
  Synthetic oligonucleotide
agatcattaagggagctgtcgttgtggccg

SEQ ID NO: 220426 - DNA, 30 bp, Artificial Sequence
  Synthetic oligonucleotide
catcgtggtgtgataaatcaatattggccg

SEQ ID NO: 220427 - DNA, 30 bp, Artificial Sequence
  Synthetic oligonucleotide
ttctgtttctgccacctggataacatgccg

SEQ ID NO: 220428 - DNA, 30 bp, Artificial Sequence
  Synthetic oligonucleotide
gccggtgggagaaggacagggttcatgccg

SEQ ID NO: 220429 - DNA, 30 bp, Artificial Sequence
  Synthetic oligonucleotide
cgtcatcaggagcatttggggaagatgccg

SEQ ID NO: 220430 - DNA, 30 bp, Artificial Sequence
  Synthetic oligonucleotide
ccgaattaaaatccggatctgctgatgccg

SEQ ID NO: 220431 - DNA, 30 bp, Artificial Sequence
  Synthetic oligonucleotide
agttgtcttatgtttatctcctgactgccg

SEQ ID NO: 220432 - DNA, 30 bp, Artificial Sequence
  Synthetic oligonucleotide
gatagttatcgcgaaaataactgcctgccg

SEQ ID NO: 220433 - DNA, 30 bp, Artificial Sequence
  Synthetic oligonucleotide
ggacggtttcatatgattctgtgtctgccg

SEQ ID NO: 220434 - DNA, 30 bp, Artificial Sequence
  Synthetic oligonucleotide
agttttacaatagctggaaaacaggtgccg

SEQ ID NO: 220435 - DNA, 30 bp, Artificial Sequence
  Synthetic oligonucleotide
gtctcaccttacaatagtacggaggtgccg

SEQ ID NO: 220436 - DNA, 30 bp, Artificial Sequence
  Synthetic oligonucleotide
tttaacaatgctttctattgcggcttgccg

SEQ ID NO: 220437 - DNA, 30 bp, Artificial Sequence
  Synthetic oligonucleotide
agagtagcccgagctcgctaagtcttgccg

SEQ ID NO: 220438 - DNA, 30 bp, Artificial Sequence
  Synthetic oligonucleotide
ttgagattgcatgtggcctgcaagttgccg

SEQ ID NO: 220439 - DNA, 30 bp, Artificial Sequence
  Synthetic oligonucleotide
atcctgtgtgctcgccgtcaccctttgccg

SEQ ID NO: 220440 - DNA, 30 bp, Artificial Sequence
  Synthetic oligonucleotide
aggttcaatctaatagtgtggctaaatccg

SEQ ID NO: 220441 - DNA, 30 bp, Artificial Sequence
  Synthetic oligonucleotide
gtattccttatcactcggtcatccaatccg

SEQ ID NO: 220442 - DNA, 30 bp, Artificial Sequence
  Synthetic oligonucleotide
ttaagcgagacttagtttgtaagcaatccg

SEQ ID NO: 220443 - DNA, 30 bp, Artificial Sequence
  Synthetic oligonucleotide
tgatgtattaaatcggggaaaatcaatccg

SEQ ID NO: 220444 - DNA, 30 bp, Artificial Sequence
  Synthetic oligonucleotide
agttgcaaaacgttcttgattgagcatccg

SEQ ID NO: 220445 - DNA, 30 bp, Artificial Sequence
  Synthetic oligonucleotide
tcgcacgtagggtctcggaccatgcatccg

SEQ ID NO: 220446 - DNA, 30 bp, Artificial Sequence
  Synthetic oligonucleotide
tattactaatcttccccatctcacgatccg

SEQ ID NO: 220447 - DNA, 30 bp, Artificial Sequence
  Synthetic oligonucleotide
tttaacagtttaccccccagcgtggatccg

SEQ ID NO: 220448 - DNA, 30 bp, Artificial Sequence
  Synthetic oligonucleotide
ggttgccatgacggacctaaagaatatccg

SEQ ID NO: 220449 - DNA, 30 bp, Artificial Sequence
  Synthetic oligonucleotide
aatgcacgctgaagcaccgcttgatatccg

SEQ ID NO: 220450 - DNA, 30 bp, Artificial Sequence
  Synthetic oligonucleotide
gcttccagagagtgggttagggcgtatccg

SEQ ID NO: 220451 - DNA, 30 bp, Artificial Sequence
  Synthetic oligonucleotide
caaatcactgctgtggaggcgggttatccg

SEQ ID NO: 220452 - DNA, 30 bp, Artificial Sequence
  Synthetic oligonucleotide
ctatgagtctcatcaaaaggattcactccg

SEQ ID NO: 220453 - DNA, 30 bp, Artificial Sequence
  Synthetic oligonucleotide
ttcagatcacggtaccgcggcatgactccg

SEQ ID NO: 220454 - DNA, 30 bp, Artificial Sequence
  Synthetic oligonucleotide
ctgatttgtgaagatatctttgtgactccg

SEQ ID NO: 220455 - DNA, 30 bp, Artificial Sequence
  Synthetic oligonucleotide
cttaattcgggttgcacactacctactccg

SEQ ID NO: 220456 - DNA, 30 bp, Artificial Sequence
  Synthetic oligonucleotide
ggatcaatcagtgtaagcttggcacctccg

SEQ ID NO: 220457 - DNA, 30 bp, Artificial Sequence
  Synthetic oligonucleotide
cgacaagcacgagggtcatctctagctccg

SEQ ID NO: 220458 - DNA, 30 bp, Artificial Sequence
  Synthetic oligonucleotide
acgtattacgaggtatcacgtttagctccg

SEQ ID NO: 220459 - DNA, 30 bp, Artificial Sequence
  Synthetic oligonucleotide
gtccatatccccccactaaaaatggctccg

SEQ ID NO: 220460 - DNA, 30 bp, Artificial Sequence
  Synthetic oligonucleotide
aaagtatgcggcagtcgacccacctctccg

SEQ ID NO: 220461 - DNA, 30 bp, Artificial Sequence
  Synthetic oligonucleotide
aaccacatacttcgtagtctttgctctccg

SEQ ID NO: 220462 - DNA, 30 bp, Artificial Sequence
  Synthetic oligonucleotide
gcaatgtaagccgccctatatgagtctccg

SEQ ID NO: 220463 - DNA, 30 bp, Artificial Sequence
  Synthetic oligonucleotide
taaaaccgtagtagcggacccgcttctccg

SEQ ID NO: 220464 - DNA, 30 bp, Artificial Sequence
  Synthetic oligonucleotide
gtctgtgttcaggccaggttgccaagtccg

SEQ ID NO: 220465 - DNA, 30 bp, Artificial Sequence
  Synthetic oligonucleotide
ttctacagcgtacacaatcgaagaagtccg

SEQ ID NO: 220466 - DNA, 30 bp, Artificial Sequence
  Synthetic oligonucleotide
ctgtgactgaccgtgttcacacgaagtccg

SEQ ID NO: 220467 - DNA, 30 bp, Artificial Sequence
  Synthetic oligonucleotide
gcagttgttaaagttcactagcacagtccg

SEQ ID NO: 220468 - DNA, 30 bp, Artificial Sequence
  Synthetic oligonucleotide
aggagtaaatgcaatgaggtccttagtccg

SEQ ID NO: 220469 - DNA, 30 bp, Artificial Sequence
  Synthetic oligonucleotide
ctcttcggagcggcgggatagacacgtccg

SEQ ID NO: 220470 - DNA, 30 bp, Artificial Sequence
  Synthetic oligonucleotide
atgcacggaaaagaaagatgaattcgtccg

SEQ ID NO: 220471 - DNA, 30 bp, Artificial Sequence
  Synthetic oligonucleotide
gtgcaaccagcacgacaaattggaggtccg

SEQ ID NO: 220472 - DNA, 30 bp, Artificial Sequence
  Synthetic oligonucleotide
tgcgtgttcagttattctccccgtggtccg

SEQ ID NO: 220473 - DNA, 30 bp, Artificial Sequence
  Synthetic oligonucleotide
ataaatgactgatgaggggcctgatgtccg

SEQ ID NO: 220474 - DNA, 30 bp, Artificial Sequence
  Synthetic oligonucleotide
gagacacctgagaccagacgcaaaattccg

SEQ ID NO: 220475 - DNA, 30 bp, Artificial Sequence
  Synthetic oligonucleotide
ttgactgtgtattaggccaccgtaattccg

SEQ ID NO: 220476 - DNA, 30 bp, Artificial Sequence
  Synthetic oligonucleotide
atcgtgtgagcaaatctcaagcttattccg

SEQ ID NO: 220477 - DNA, 30 bp, Artificial Sequence
  Synthetic oligonucleotide
atgcgggctctgatgtagggtgaccttccg

SEQ ID NO: 220478 - DNA, 30 bp, Artificial Sequence
  Synthetic oligonucleotide
ccaagaccgataaaacacatactccttccg

SEQ ID NO: 220479 - DNA, 30 bp, Artificial Sequence
  Synthetic oligonucleotide
ggggttccaagtcttccgctcaagcttccg

SEQ ID NO: 220480 - DNA, 30 bp, Artificial Sequence
  Synthetic oligonucleotide
ccatcgaagcgaggacgacagggtcttccg

SEQ ID NO: 220481 - DNA, 30 bp, Artificial Sequence
  Synthetic oligonucleotide
aggtgagcctttgggatgacacgagttccg

SEQ ID NO: 220482 - DNA, 30 bp, Artificial Sequence
  Synthetic oligonucleotide
tataaggaggtcttcgagggtaaaaaagcg

SEQ ID NO: 220483 - DNA, 30 bp, Artificial Sequence
  Synthetic oligonucleotide
tattaaatgagtctagaggtttcaaaagcg

SEQ ID NO: 220484 - DNA, 30 bp, Artificial Sequence
  Synthetic oligonucleotide
tatggtgaacacactccatccttcaaagcg

SEQ ID NO: 220485 - DNA, 30 bp, Artificial Sequence
  Synthetic oligonucleotide
atcgtgaaacgctcgacctggatgaaagcg

SEQ ID NO: 220486 - DNA, 30 bp, Artificial Sequence
  Synthetic oligonucleotide
cacacatttcgtaagaggagacttaaagcg

SEQ ID NO: 220487 - DNA, 30 bp, Artificial Sequence
  Synthetic oligonucleotide
cactcaaacaggaccctttgtttacaagcg

SEQ ID NO: 220488 - DNA, 30 bp, Artificial Sequence
  Synthetic oligonucleotide
ttatgcaaatatattagacgtaagcaagcg

SEQ ID NO: 220489 - DNA, 30 bp, Artificial Sequence
  Synthetic oligonucleotide
cttcccgaacagcaccaaaggttgcaagcg

SEQ ID NO: 220490 - DNA, 30 bp, Artificial Sequence
  Synthetic oligonucleotide
agcgacactgagggttacgtctaagaagcg

SEQ ID NO: 220491 - DNA, 30 bp, Artificial Sequence
  Synthetic oligonucleotide
tcatgtgggtgctcagccaagtaagaagcg

SEQ ID NO: 220492 - DNA, 30 bp, Artificial Sequence
  Synthetic oligonucleotide
attcaatgtggtcatatgattccagaagcg

SEQ ID NO: 220493 - DNA, 30 bp, Artificial Sequence
  Synthetic oligonucleotide
ggaaagatgtcgtgaattgcctcagaagcg

SEQ ID NO: 220494 - DNA, 30 bp, Artificial Sequence
  Synthetic oligonucleotide
ggcagccctggaagtcgtattatcgaagcg

SEQ ID NO: 220495 - DNA, 30 bp, Artificial Sequence
  Synthetic oligonucleotide
acgctctcagtactgctccggctcgaagcg

SEQ ID NO: 220496 - DNA, 30 bp, Artificial Sequence
  Synthetic oligonucleotide
gatgatcggacgtatgcaacattcgaagcg

SEQ ID NO: 220497 - DNA, 30 bp, Artificial Sequence
  Synthetic oligonucleotide
aaccgcgtcagtaatgcgtcacaggaagcg

SEQ ID NO: 220498 - DNA, 30 bp, Artificial Sequence
  Synthetic oligonucleotide
tcgttttatcgttggaccgtgcgtgaagcg

SEQ ID NO: 220499 - DNA, 30 bp, Artificial Sequence
  Synthetic oligonucleotide
tgcatgtaacatcacagggcataataagcg

SEQ ID NO: 220500 - DNA, 30 bp, Artificial Sequence
  Synthetic oligonucleotide
ggaatggagtatttcctggcatgctaagcg

SEQ ID NO: 220501 - DNA, 30 bp, Artificial Sequence
  Synthetic oligonucleotide
gtatacgttctgaagggatctgtgtaagcg

SEQ ID NO: 220502 - DNA, 30 bp, Artificial Sequence
  Synthetic oligonucleotide
tatgctaaacatcagcctaattcttaagcg

SEQ ID NO: 220503 - DNA, 30 bp, Artificial Sequence
  Synthetic oligonucleotide
cggcttccagctcgatggaagctttaagcg

SEQ ID NO: 220504 - DNA, 30 bp, Artificial Sequence
  Synthetic oligonucleotide
gtgccctatggttgcttcacaggtacagcg

SEQ ID NO: 220505 - DNA, 30 bp, Artificial Sequence
  Synthetic oligonucleotide
aaccgatgcaccacaatcactcaaccagcg

SEQ ID NO: 220506 - DNA, 30 bp, Artificial Sequence
  Synthetic oligonucleotide
cctacgtgcaccgttatttcctcaccagcg

SEQ ID NO: 220507 - DNA, 30 bp, Artificial Sequence
  Synthetic oligonucleotide
gtggtttgactgtgaagtctgggaccagcg

SEQ ID NO: 220508 - DNA, 30 bp, Artificial Sequence
  Synthetic oligonucleotide
gaaggacgccctttcggggatggaccagcg

SEQ ID NO: 220509 - DNA, 30 bp, Artificial Sequence
  Synthetic oligonucleotide
tgctgcagcgtggagtgctgcctaccagcg

SEQ ID NO: 220510 - DNA, 30 bp, Artificial Sequence
  Synthetic oligonucleotide
cagcttacgtttggagtcaggccagcagcg

SEQ ID NO: 220511 - DNA, 30 bp, Artificial Sequence
  Synthetic oligonucleotide
tacgctacaatgcgtaacgttcaggcagcg

SEQ ID NO: 220512 - DNA, 30 bp, Artificial Sequence
  Synthetic oligonucleotide
gtagattcgatgtgaggctacactgcagcg

SEQ ID NO: 220513 - DNA, 30 bp, Artificial Sequence
  Synthetic oligonucleotide
ttcgtctaggcttaccgcggaattgcagcg

SEQ ID NO: 220514 - DNA, 30 bp, Artificial Sequence
  Synthetic oligonucleotide
cggggtgagttcgtcatttgataatcagcg

SEQ ID NO: 220515 - DNA, 30 bp, Artificial Sequence
  Synthetic oligonucleotide
gcgcacggtctcgtcaaaccttcatcagcg

SEQ ID NO: 220516 - DNA, 30 bp, Artificial Sequence
  Synthetic oligonucleotide
cacaccttgagtccgaacggtaactcagcg

SEQ ID NO: 220517 - DNA, 30 bp, Artificial Sequence
  Synthetic oligonucleotide
cgactcgcgtcctctcaaacgtactcagcg

SEQ ID NO: 220518 - DNA, 30 bp, Artificial Sequence
  Synthetic oligonucleotide
aagcaaaatgccatttaaccgccctcagcg

SEQ ID NO: 220519 - DNA, 30 bp, Artificial Sequence
  Synthetic oligonucleotide
tcatgagtggcccacactattttctcagcg

SEQ ID NO: 220520 - DNA, 30 bp, Artificial Sequence
  Synthetic oligonucleotide
agacaactttccgggctccgtacgtcagcg

SEQ ID NO: 220521 - DNA, 30 bp, Artificial Sequence
  Synthetic oligonucleotide
aggtgccgtacgtacctctggtcgtcagcg

SEQ ID NO: 220522 - DNA, 30 bp, Artificial Sequence
  Synthetic oligonucleotide
aggctactggtccgtttgtaccattcagcg

SEQ ID NO: 220523 - DNA, 30 bp, Artificial Sequence
  Synthetic oligonucleotide
ggggaaggtcgcggtcgtggagtttcagcg

SEQ ID NO: 220524 - DNA, 30 bp, Artificial Sequence
  Synthetic oligonucleotide
tttgggtggtatgttatagagcatagagcg

SEQ ID NO: 220525 - DNA, 30 bp, Artificial Sequence
  Synthetic oligonucleotide
ggagattatggggcggttttgggtagagcg

SEQ ID NO: 220526 - DNA, 30 bp, Artificial Sequence
  Synthetic oligonucleotide
gctggggttgggtagggtcgagttagagcg

SEQ ID NO: 220527 - DNA, 30 bp, Artificial Sequence
  Synthetic oligonucleotide
gtgcaagtggattgaatgtgaccgcgagcg

SEQ ID NO: 220528 - DNA, 30 bp, Artificial Sequence
  Synthetic oligonucleotide
ctctgggtcagaagcttagtcaggcgagcg

SEQ ID NO: 220529 - DNA, 30 bp, Artificial Sequence
  Synthetic oligonucleotide
atcgaaaagcgaaacgtcataactcgagcg

SEQ ID NO: 220530 - DNA, 30 bp, Artificial Sequence
  Synthetic oligonucleotide
gaattaacaaatggacggaaggctcgagcg

SEQ ID NO: 220531 - DNA, 30 bp, Artificial Sequence
  Synthetic oligonucleotide
tcgtccgggtcataccatgttgaaggagcg

SEQ ID NO: 220532 - DNA, 30 bp, Artificial Sequence
  Synthetic oligonucleotide
tacaggcagtcatgtgcgtctggtggagcg

SEQ ID NO: 220533 - DNA, 30 bp, Artificial Sequence
  Synthetic oligonucleotide
gctttttaacgatggaaacaatgtggagcg

SEQ ID NO: 220534 - DNA, 30 bp, Artificial Sequence
  Synthetic oligonucleotide
aagtagccagtttacgcaccggaatgagcg

SEQ ID NO: 220535 - DNA, 30 bp, Artificial Sequence
  Synthetic oligonucleotide
gtccatcccggttcgccttgctcgtgagcg

SEQ ID NO: 220536 - DNA, 30 bp, Artificial Sequence
  Synthetic oligonucleotide
agtaactgtggatttgggagggggtgagcg

SEQ ID NO: 220537 - DNA, 30 bp, Artificial Sequence
  Synthetic oligonucleotide
caatttttggaatcactgcgctaaatagcg

SEQ ID NO: 220538 - DNA, 30 bp, Artificial Sequence
  Synthetic oligonucleotide
gtattaactagatccgctgttttaatagcg

SEQ ID NO: 220539 - DNA, 29 bp, Artificial Sequence
  Synthetic oligonucleotide
ggctgataggtaattcgtggctgatagcg

SEQ ID NO: 220540 - DNA, 30 bp, Artificial Sequence
  Synthetic oligonucleotide
cagcgcgtgatccggctgaatcatatagcg

SEQ ID NO: 220541 - DNA, 30 bp, Artificial Sequence
  Synthetic oligonucleotide
aattaatcgagggattgataaccgctagcg

SEQ ID NO: 220542 - DNA, 30 bp, Artificial Sequence
  Synthetic oligonucleotide
gtgtaattaaagaatttctgcaaggtagcg

SEQ ID NO: 220543 - DNA, 29 bp, Artificial Sequence
  Synthetic oligonucleotide
ggggtgattgtaactttcctttggtagcg

SEQ ID NO: 220544 - DNA, 30 bp, Artificial Sequence
  Synthetic oligonucleotide
gtgtaaaggctcctacacattcatgtagcg

SEQ ID NO: 220545 - DNA, 30 bp, Artificial Sequence
  Synthetic oligonucleotide
cactgtacaaactgggtgttaggtgtagcg

SEQ ID NO: 220546 - DNA, 30 bp, Artificial Sequence
  Synthetic oligonucleotide
tggacccgtttaataagatgtgccttagcg

SEQ ID NO: 220547 - DNA, 30 bp, Artificial Sequence
  Synthetic oligonucleotide
atacaggacaatggttcatagagcttagcg

SEQ ID NO: 220548 - DNA, 30 bp, Artificial Sequence
  Synthetic oligonucleotide
caaattcgcgacaatcctatagggttagcg

SEQ ID NO: 220549 - DNA, 30 bp, Artificial Sequence
  Synthetic oligonucleotide
gagggttccatacatacacgggtaaacgcg

SEQ ID NO: 220550 - DNA, 30 bp, Artificial Sequence
  Synthetic oligonucleotide
ctacacatccaggtaaggcttctcaacgcg

SEQ ID NO: 220551 - DNA, 30 bp, Artificial Sequence
  Synthetic oligonucleotide
tgtgggccaatgtccaagtagtagaacgcg

SEQ ID NO: 220552 - DNA, 30 bp, Artificial Sequence
  Synthetic oligonucleotide
gtaaccaaacatagaccgaacgggaacgcg

SEQ ID NO: 220553 - DNA, 30 bp, Artificial Sequence
  Synthetic oligonucleotide
cgtcgagagactgaaaggcctggacacgcg

SEQ ID NO: 220554 - DNA, 30 bp, Artificial Sequence
  Synthetic oligonucleotide
gtgaaggagcgcagcgcatccagccacgcg

SEQ ID NO: 220555 - DNA, 30 bp, Artificial Sequence
  Synthetic oligonucleotide
cgcagagtagtaatatgcggcagtcacgcg

SEQ ID NO: 220556 - DNA, 30 bp, Artificial Sequence
  Synthetic oligonucleotide
gtcgtattccgttcttacagagacgacgcg

SEQ ID NO: 220557 - DNA, 30 bp, Artificial Sequence
  Synthetic oligonucleotide
gggatggcgaagttctgagcggactacgcg

SEQ ID NO: 220558 - DNA, 30 bp, Artificial Sequence
  Synthetic oligonucleotide
agatgattttgtgagacggttatctacgcg

SEQ ID NO: 220559 - DNA, 30 bp, Artificial Sequence
  Synthetic oligonucleotide
caagcgggacgtccgctaagtttaaccgcg

SEQ ID NO: 220560 - DNA, 30 bp, Artificial Sequence
  Synthetic oligonucleotide
acacaaggttgagcctattgggagaccgcg

SEQ ID NO: 220561 - DNA, 30 bp, Artificial Sequence
  Synthetic oligonucleotide
tcaatgcgggttgaaaaggacactaccgcg

SEQ ID NO: 220562 - DNA, 30 bp, Artificial Sequence
  Synthetic oligonucleotide
ctacgttggcccgctcgtacatctaccgcg

SEQ ID NO: 220563 - DNA, 30 bp, Artificial Sequence
  Synthetic oligonucleotide
taacctagatttattagtcccacccccgcg

SEQ ID NO: 220564 - DNA, 30 bp, Artificial Sequence
  Synthetic oligonucleotide
gtaccgaactaaactcgcttgtcccccgcg

SEQ ID NO: 220565 - DNA, 30 bp, Artificial Sequence
  Synthetic oligonucleotide
aggacgtgtatgacttggacacctcccgcg

SEQ ID NO: 220566 - DNA, 30 bp, Artificial Sequence
  Synthetic oligonucleotide
acaaccctgggcttgttcctcagtcccgcg

SEQ ID NO: 220567 - DNA, 30 bp, Artificial Sequence
  Synthetic oligonucleotide
aggaatgtctagtcccacttacaggccgcg

SEQ ID NO: 220568 - DNA, 30 bp, Artificial Sequence
  Synthetic oligonucleotide
tctgagtgtggagcgtgagattatgccgcg

SEQ ID NO: 220569 - DNA, 30 bp, Artificial Sequence
  Synthetic oligonucleotide
tggaagcagaggtatgccgggactgccgcg

SEQ ID NO: 220570 - DNA, 30 bp, Artificial Sequence
  Synthetic oligonucleotide
cggagcttagcaaatttgtctcgtgccgcg

SEQ ID NO: 220571 - DNA, 30 bp, Artificial Sequence
  Synthetic oligonucleotide
tgggtactaagtgaataattccaatccgcg

SEQ ID NO: 220572 - DNA, 30 bp, Artificial Sequence
  Synthetic oligonucleotide
aaaccgtactcccgagtctcgggatccgcg

SEQ ID NO: 220573 - DNA, 30 bp, Artificial Sequence
  Synthetic oligonucleotide
ggcttgcggggagcaatgcttttctccgcg

SEQ ID NO: 220574 - DNA, 30 bp, Artificial Sequence
  Synthetic oligonucleotide
gccagtgtggagacaggggtagcaagcgcg

SEQ ID NO: 220575 - DNA, 30 bp, Artificial Sequence
  Synthetic oligonucleotide
gggaagccgacgtaggctaagggaagcgcg

SEQ ID NO: 220576 - DNA, 30 bp, Artificial Sequence
  Synthetic oligonucleotide
cccaagtaacatgaccacggctatagcgcg

SEQ ID NO: 220577 - DNA, 30 bp, Artificial Sequence
  Synthetic oligonucleotide
accgctcccattagagcacatactagcgcg

SEQ ID NO: 220578 - DNA, 30 bp, Artificial Sequence
  Synthetic oligonucleotide
ggtagccatcttgctaggcggtcacgcgcg

SEQ ID NO: 220579 - DNA, 30 bp, Artificial Sequence
  Synthetic oligonucleotide
gtgtagtgagctgacgggacaccccgcgcg

SEQ ID NO: 220580 - DNA, 30 bp, Artificial Sequence
  Synthetic oligonucleotide
gacagggatctgatgcgagggcgccgcgcg

SEQ ID NO: 220581 - DNA, 30 bp, Artificial Sequence
  Synthetic oligonucleotide
tatgcaggctttaaacttgttttgcgcgcg

SEQ ID NO: 220582 - DNA, 30 bp, Artificial Sequence
  Synthetic oligonucleotide
accacatggaaattcacatggcatcgcgcg

SEQ ID NO: 220583 - DNA, 30 bp, Artificial Sequence
  Synthetic oligonucleotide
ggacgcgggagttagcaaaaggctcgcgcg

SEQ ID NO: 220584 - DNA, 30 bp, Artificial Sequence
  Synthetic oligonucleotide
cgaaagcgcaattggcgtagttgtcgcgcg

SEQ ID NO: 220585 - DNA, 30 bp, Artificial Sequence
  Synthetic oligonucleotide
cagtatgacagacggccagttgaaggcgcg

SEQ ID NO: 220586 - DNA, 30 bp, Artificial Sequence
  Synthetic oligonucleotide
acttggtgggaagaaaggcgcagaggcgcg

SEQ ID NO: 220587 - DNA, 30 bp, Artificial Sequence
  Synthetic oligonucleotide
acagtgacacgacatcattggcacggcgcg

SEQ ID NO: 220588 - DNA, 30 bp, Artificial Sequence
  Synthetic oligonucleotide
aattagggttacagaagcaggactggcgcg

SEQ ID NO: 220589 - DNA, 30 bp, Artificial Sequence
  Synthetic oligonucleotide
aatggcgattagattttctgtgtctgcgcg

SEQ ID NO: 220590 - DNA, 30 bp, Artificial Sequence
  Synthetic oligonucleotide
gcacttcataagcggcgtctggaaatcgcg

SEQ ID NO: 220591 - DNA, 30 bp, Artificial Sequence
  Synthetic oligonucleotide
tgtgccttcgattttgtgcaaacaatcgcg

SEQ ID NO: 220592 - DNA, 30 bp, Artificial Sequence
  Synthetic oligonucleotide
ttgcgcagcattgtcaataacaagatcgcg

SEQ ID NO: 220593 - DNA, 30 bp, Artificial Sequence
  Synthetic oligonucleotide
ggggagtgcgatgacggccttagtatcgcg

SEQ ID NO: 220594 - DNA, 30 bp, Artificial Sequence
  Synthetic oligonucleotide
cgcctgtttcagacggtaaataagctcgcg

SEQ ID NO: 220595 - DNA, 30 bp, Artificial Sequence
  Synthetic oligonucleotide
taagagagttgtgccgtagcaatgctcgcg

SEQ ID NO: 220596 - DNA, 30 bp, Artificial Sequence
  Synthetic oligonucleotide
tttgcccccagtacagactgtaatctcgcg

SEQ ID NO: 220597 - DNA, 30 bp, Artificial Sequence
  Synthetic oligonucleotide
acatcagacgaaactgggtatgcagtcgcg

SEQ ID NO: 220598 - DNA, 30 bp, Artificial Sequence
  Synthetic oligonucleotide
gtgcaacttaatattatcatatcagtcgcg

SEQ ID NO: 220599 - DNA, 30 bp, Artificial Sequence
  Synthetic oligonucleotide
aagccaggtatgtactccactattgtcgcg

SEQ ID NO: 220600 - DNA, 30 bp, Artificial Sequence
  Synthetic oligonucleotide
cgtttgggtgcgtaaacgaatctcttcgcg

SEQ ID NO: 220601 - DNA, 30 bp, Artificial Sequence
  Synthetic oligonucleotide
ctccatgagacgagaatcttccatttcgcg

SEQ ID NO: 220602 - DNA, 30 bp, Artificial Sequence
  Synthetic oligonucleotide
cacctaccctcgaagggttgttgtttcgcg

SEQ ID NO: 220603 - DNA, 30 bp, Artificial Sequence
  Synthetic oligonucleotide
cctaagctccgtgggagagaggttttcgcg

SEQ ID NO: 220604 - DNA, 30 bp, Artificial Sequence
  Synthetic oligonucleotide
acgtcccattggtttacattagaaaaggcg

SEQ ID NO: 220605 - DNA, 30 bp, Artificial Sequence
  Synthetic oligonucleotide
cctgttaactaataatctacgaacaaggcg

SEQ ID NO: 220606 - DNA, 30 bp, Artificial Sequence
  Synthetic oligonucleotide
tgtaggcttcattcatgtaattccaaggcg

SEQ ID NO: 220607 - DNA, 30 bp, Artificial Sequence
  Synthetic oligonucleotide
taccagatggacacccgggagctcaaggcg

SEQ ID NO: 220608 - DNA, 30 bp, Artificial Sequence
  Synthetic oligonucleotide
atatctagggtgcagagggccactaaggcg

SEQ ID NO: 220609 - DNA, 30 bp, Artificial Sequence
  Synthetic oligonucleotide
gggtaagcagtgtgcgctggacttaaggcg

SEQ ID NO: 220610 - DNA, 30 bp, Artificial Sequence
  Synthetic oligonucleotide
ggatagtcacagagtcgcggagaacaggcg

SEQ ID NO: 220611 - DNA, 30 bp, Artificial Sequence
  Synthetic oligonucleotide
acgtacgaatttaattgtagtatacaggcg

SEQ ID NO: 220612 - DNA, 30 bp, Artificial Sequence
  Synthetic oligonucleotide
atttgccgatgaagaataattaagcaggcg

SEQ ID NO: 220613 - DNA, 30 bp, Artificial Sequence
  Synthetic oligonucleotide
cgtttaggccgagggataaaccagcaggcg

SEQ ID NO: 220614 - DNA, 30 bp, Artificial Sequence
  Synthetic oligonucleotide
ctttaaagacacaactgcggcccgcaggcg

SEQ ID NO: 220615 - DNA, 30 bp, Artificial Sequence
  Synthetic oligonucleotide
tgcacagagtgtagtcgcggcattcaggcg

SEQ ID NO: 220616 - DNA, 30 bp, Artificial Sequence
  Synthetic oligonucleotide
ttgtccccgttttaacatatctttcaggcg

SEQ ID NO: 220617 - DNA, 30 bp, Artificial Sequence
  Synthetic oligonucleotide
tcagcgggaaagttttagcagggagaggcg

SEQ ID NO: 220618 - DNA, 30 bp, Artificial Sequence
  Synthetic oligonucleotide
accaaacggcttgcaaatggagtggaggcg

SEQ ID NO: 220619 - DNA, 30 bp, Artificial Sequence
  Synthetic oligonucleotide
atggactacccatacctgtgcacataggcg

SEQ ID NO: 220620 - DNA, 30 bp, Artificial Sequence
  Synthetic oligonucleotide
atacactgccacgcttcatctccataggcg

SEQ ID NO: 220621 - DNA, 30 bp, Artificial Sequence
  Synthetic oligonucleotide
gtacccatgtaggggctggatttctaggcg

SEQ ID NO: 220622 - DNA, 30 bp, Artificial Sequence
  Synthetic oligonucleotide
tagcagaatatcaccagtctagagtaggcg

SEQ ID NO: 220623 - DNA, 30 bp, Artificial Sequence
  Synthetic oligonucleotide
gttttgacggtctgggacagagcttaggcg

SEQ ID NO: 220624 - DNA, 30 bp, Artificial Sequence
  Synthetic oligonucleotide
ttgagggcgaataacgcccaaaacacggcg

SEQ ID NO: 220625 - DNA, 30 bp, Artificial Sequence
  Synthetic oligonucleotide
gtacctcgggctacacgtcattccacggcg

SEQ ID NO: 220626 - DNA, 30 bp, Artificial Sequence
  Synthetic oligonucleotide
cagaggttcggggaaggtaattggacggcg

SEQ ID NO: 220627 - DNA, 30 bp, Artificial Sequence
  Synthetic oligonucleotide
tattgcaattgagccaagcagtatacggcg

SEQ ID NO: 220628 - DNA, 30 bp, Artificial Sequence
  Synthetic oligonucleotide
gggctataaaaccgatcgggacacccggcg

SEQ ID NO: 220629 - DNA, 30 bp, Artificial Sequence
  Synthetic oligonucleotide
gataacaagaattttaaggataagccggcg

SEQ ID NO: 220630 - DNA, 30 bp, Artificial Sequence
  Synthetic oligonucleotide
ctcatagagctagcctctgccatgccggcg

SEQ ID NO: 220631 - DNA, 30 bp, Artificial Sequence
  Synthetic oligonucleotide
aggctagcccgcgggcgaggctctccggcg

SEQ ID NO: 220632 - DNA, 30 bp, Artificial Sequence
  Synthetic oligonucleotide
cacacgggttggttatatagtcgtccggcg

SEQ ID NO: 220633 - DNA, 30 bp, Artificial Sequence
  Synthetic oligonucleotide
attgcatataatttttatttgattccggcg

SEQ ID NO: 220634 - DNA, 30 bp, Artificial Sequence
  Synthetic oligonucleotide
ctaacctgactccgtcgaacggtagcggcg

SEQ ID NO: 220635 - DNA, 30 bp, Artificial Sequence
  Synthetic oligonucleotide
atctggtcctgggaatgtacactcgcggcg

SEQ ID NO: 220636 - DNA, 30 bp, Artificial Sequence
  Synthetic oligonucleotide
aaagggccaagtcggtatgaaaaggcggcg

SEQ ID NO: 220637 - DNA, 30 bp, Artificial Sequence
  Synthetic oligonucleotide
atgggcagcaggagacacgagtcggcggcg

SEQ ID NO: 220638 - DNA, 30 bp, Artificial Sequence
  Synthetic oligonucleotide
gggtattcatgtacgaggcgtgttgcggcg

SEQ ID NO: 220639 - DNA, 30 bp, Artificial Sequence
  Synthetic oligonucleotide
cataacggaagctcgtaattaaactcggcg

SEQ ID NO: 220640 - DNA, 30 bp, Artificial Sequence
  Synthetic oligonucleotide
gttagggtcaagaccggaccctcttcggcg

SEQ ID NO: 220641 - DNA, 30 bp, Artificial Sequence
  Synthetic oligonucleotide
tcttatgaaccataattggatccaagggcg

SEQ ID NO: 220642 - DNA, 30 bp, Artificial Sequence
  Synthetic oligonucleotide
ctcttaaatttgcgctcttgatgaagggcg

SEQ ID NO: 220643 - DNA, 29 bp, Artificial Sequence
  Synthetic oligonucleotide
agatggctaggatttgctgggtaagggcg

SEQ ID NO: 220644 - DNA, 30 bp, Artificial Sequence
  Synthetic oligonucleotide
tcgataacgcggcgcaagcctcccagggcg

SEQ ID NO: 220645 - DNA, 30 bp, Artificial Sequence
  Synthetic oligonucleotide
ttacggtcaccgtctcctgtgtatagggcg

SEQ ID NO: 220646 - DNA, 30 bp, Artificial Sequence
  Synthetic oligonucleotide
taatgcgatctaatacattctatacgggcg

SEQ ID NO: 220647 - DNA, 30 bp, Artificial Sequence
  Synthetic oligonucleotide
ttgataagctcaggaccgattgatcgggcg

SEQ ID NO: 220648 - DNA, 30 bp, Artificial Sequence
  Synthetic oligonucleotide
gctcggggctgcgtcaggggaagtcgggcg

SEQ ID NO: 220649 - DNA, 30 bp, Artificial Sequence
  Synthetic oligonucleotide
catacctgtggatatggggatcacggggcg

SEQ ID NO: 220650 - DNA, 30 bp, Artificial Sequence
  Synthetic oligonucleotide
ggaagggttagaataaacgctgccggggcg

SEQ ID NO: 220651 - DNA, 30 bp, Artificial Sequence
  Synthetic oligonucleotide
tcgaatttagtgctgatcagttatggggcg

SEQ ID NO: 220652 - DNA, 30 bp, Artificial Sequence
  Synthetic oligonucleotide
gatctggctcgagtgttgggacgtggggcg

SEQ ID NO: 220653 - DNA, 30 bp, Artificial Sequence
  Synthetic oligonucleotide
ctcaacgtgtatgctattcaaggtggggcg

SEQ ID NO: 220654 - DNA, 30 bp, Artificial Sequence
  Synthetic oligonucleotide
ctgagggttggggatcagttgattggggcg

SEQ ID NO: 220655 - DNA, 31 bp, Artificial Sequence
  Synthetic oligonucleotide
gaaagactcagccgtgatagaacaatgggcg

SEQ ID NO: 220656 - DNA, 30 bp, Artificial Sequence
  Synthetic oligonucleotide
gagtacacggaatagttggggcgctgggcg

SEQ ID NO: 220657 - DNA, 30 bp, Artificial Sequence
  Synthetic oligonucleotide
aattacgtagcgtacgcttcagagtgggcg

SEQ ID NO: 220658 - DNA, 30 bp, Artificial Sequence
  Synthetic oligonucleotide
gtgcggtaatgaagagaatgctcttgggcg

SEQ ID NO: 220659 - DNA, 30 bp, Artificial Sequence
  Synthetic oligonucleotide
gccgtagatttcacagtccttgcaatggcg

SEQ ID NO: 220660 - DNA, 30 bp, Artificial Sequence
  Synthetic oligonucleotide
agcggggcaacgattgactccttgatggcg

SEQ ID NO: 220661 - DNA, 30 bp, Artificial Sequence
  Synthetic oligonucleotide
tcgaagttgcaagctcagcccactatggcg

SEQ ID NO: 220662 - DNA, 30 bp, Artificial Sequence
  Synthetic oligonucleotide
ttgctgaggttttaagcatagcctatggcg

SEQ ID NO: 220663 - DNA, 30 bp, Artificial Sequence
  Synthetic oligonucleotide
tgtaaacagcccggtagcgtacaactggcg

SEQ ID NO: 220664 - DNA, 30 bp, Artificial Sequence
  Synthetic oligonucleotide
tggggcagccagaacactcccccactggcg

SEQ ID NO: 220665 - DNA, 30 bp, Artificial Sequence
  Synthetic oligonucleotide
agggtgaccggcagttatgcgcccctggcg

SEQ ID NO: 220666 - DNA, 30 bp, Artificial Sequence
  Synthetic oligonucleotide
tgtcttgttagatggaccagtgctctggcg

SEQ ID NO: 220667 - DNA, 30 bp, Artificial Sequence
  Synthetic oligonucleotide
cataacgatatggtactcactggtctggcg

SEQ ID NO: 220668 - DNA, 30 bp, Artificial Sequence
  Synthetic oligonucleotide
tgtcggacttcgttcgtgggactagtggcg

SEQ ID NO: 220669 - DNA, 30 bp, Artificial Sequence
  Synthetic oligonucleotide
atggtatcattctgcgcgcgtttagtggcg

SEQ ID NO: 220670 - DNA, 30 bp, Artificial Sequence
  Synthetic oligonucleotide
gttcggcttggagttagccgagtattggcg

SEQ ID NO: 220671 - DNA, 30 bp, Artificial Sequence
  Synthetic oligonucleotide
agcgtttggtataagccatcaagcttggcg

SEQ ID NO: 220672 - DNA, 30 bp, Artificial Sequence
  Synthetic oligonucleotide
cagttgttcctcgtttataggcatttggcg

SEQ ID NO: 220673 - DNA, 30 bp, Artificial Sequence
  Synthetic oligonucleotide
gactatacttctggtccagattgtttggcg

SEQ ID NO: 220674 - DNA, 30 bp, Artificial Sequence
  Synthetic oligonucleotide
gatgcgagtggtgaggtcaattttttggcg

SEQ ID NO: 220675 - DNA, 30 bp, Artificial Sequence
  Synthetic oligonucleotide
atggattccgtctactggtcgataaatgcg

SEQ ID NO: 220676 - DNA, 30 bp, Artificial Sequence
  Synthetic oligonucleotide
acaacttaaacaaaacctttccgcaatgcg

SEQ ID NO: 220677 - DNA, 30 bp, Artificial Sequence
  Synthetic oligonucleotide
cgtctgtgggattttatacgtaagaatgcg

SEQ ID NO: 220678 - DNA, 30 bp, Artificial Sequence
  Synthetic oligonucleotide
ttgataacataattagatcttgggaatgcg

SEQ ID NO: 220679 - DNA, 30 bp, Artificial Sequence
  Synthetic oligonucleotide
ggggtccaatagacgtggttgtctaatgcg

SEQ ID NO: 220680 - DNA, 30 bp, Artificial Sequence
  Synthetic oligonucleotide
atgtgtatacattgacggttgagtaatgcg

SEQ ID NO: 220681 - DNA, 30 bp, Artificial Sequence
  Synthetic oligonucleotide
atagaggtgtgtagacattatcaacatgcg

SEQ ID NO: 220682 - DNA, 30 bp, Artificial Sequence
  Synthetic oligonucleotide
ctttgcgcggtgggggatttattacatgcg

SEQ ID NO: 220683 - DNA, 30 bp, Artificial Sequence
  Synthetic oligonucleotide
gtctgcattaaggtgattggcgcccatgcg

SEQ ID NO: 220684 - DNA, 30 bp, Artificial Sequence
  Synthetic oligonucleotide
attgagcgaggcattaaatatcgccatgcg

SEQ ID NO: 220685 - DNA, 30 bp, Artificial Sequence
  Synthetic oligonucleotide
aatgggcaagcccgcgcccgtggccatgcg

SEQ ID NO: 220686 - DNA, 30 bp, Artificial Sequence
  Synthetic oligonucleotide
gggaaattcgccagaacaccccatcatgcg

SEQ ID NO: 220687 - DNA, 30 bp, Artificial Sequence
  Synthetic oligonucleotide
ggacctgatggtcaatccgtgaacgatgcg

SEQ ID NO: 220688 - DNA, 30 bp, Artificial Sequence
  Synthetic oligonucleotide
gcaaggtagaattaagggttgcaggatgcg

SEQ ID NO: 220689 - DNA, 30 bp, Artificial Sequence
  Synthetic oligonucleotide
gccagtccgaaaagatgctgcgtggatgcg

SEQ ID NO: 220690 - DNA, 30 bp, Artificial Sequence
  Synthetic oligonucleotide
caaccccgtcgacgttttgttggatatgcg

SEQ ID NO: 220691 - DNA, 30 bp, Artificial Sequence
  Synthetic oligonucleotide
gtgatatatatggcagtcttccggtatgcg

SEQ ID NO: 220692 - DNA, 30 bp, Artificial Sequence
  Synthetic oligonucleotide
tcgctctatggaatacgggagtggtatgcg

SEQ ID NO: 220693 - DNA, 30 bp, Artificial Sequence
  Synthetic oligonucleotide
cacagtaaagttgggaacacaggaactgcg

SEQ ID NO: 220694 - DNA, 30 bp, Artificial Sequence
  Synthetic oligonucleotide
gccagaattagaagaataacaataactgcg

SEQ ID NO: 220695 - DNA, 30 bp, Artificial Sequence
  Synthetic oligonucleotide
ggcgcgacgctagggtcgcggtatactgcg

SEQ ID NO: 220696 - DNA, 30 bp, Artificial Sequence
  Synthetic oligonucleotide
ttcagaagcctgcctaatgtccctactgcg

SEQ ID NO: 220697 - DNA, 30 bp, Artificial Sequence
  Synthetic oligonucleotide
attagcctattgagggcatccgcgcctgcg

SEQ ID NO: 220698 - DNA, 30 bp, Artificial Sequence
  Synthetic oligonucleotide
catatactgctcctgacatattaagctgcg

SEQ ID NO: 220699 - DNA, 30 bp, Artificial Sequence
  Synthetic oligonucleotide
aaataacgacagtacaaccctgtagctgcg

SEQ ID NO: 220700 - DNA, 30 bp, Artificial Sequence
  Synthetic oligonucleotide
ttcaggatagcgacactcgtgtcggctgcg

SEQ ID NO: 220701 - DNA, 30 bp, Artificial Sequence
  Synthetic oligonucleotide
cgccaaaactgtgggttgtagttggctgcg

SEQ ID NO: 220702 - DNA, 30 bp, Artificial Sequence
  Synthetic oligonucleotide
ttacgtagctttgcccctcaagagtctgcg

SEQ ID NO: 220703 - DNA, 30 bp, Artificial Sequence
  Synthetic oligonucleotide
ggaggccagtaacagcaatattagtctgcg

SEQ ID NO: 220704 - DNA, 30 bp, Artificial Sequence
  Synthetic oligonucleotide
tgtcggagagtatagtcgggtaggtctgcg

SEQ ID NO: 220705 - DNA, 30 bp, Artificial Sequence
  Synthetic oligonucleotide
caaacaggaacttgggctgcgatttctgcg

SEQ ID NO: 220706 - DNA, 30 bp, Artificial Sequence
  Synthetic oligonucleotide
ctgttcttccggcccgagtccaggagtgcg

SEQ ID NO: 220707 - DNA, 30 bp, Artificial Sequence
  Synthetic oligonucleotide
aaggccttgcttggggacgaagtgagtgcg

SEQ ID NO: 220708 - DNA, 30 bp, Artificial Sequence
  Synthetic oligonucleotide
catcgaatagatcagttttgagctagtgcg

SEQ ID NO: 220709 - DNA, 30 bp, Artificial Sequence
  Synthetic oligonucleotide
aagtggcgaagctcggtcataaaacgtgcg

SEQ ID NO: 220710 - DNA, 30 bp, Artificial Sequence
  Synthetic oligonucleotide
gcataatgaagacagatcgcactccgtgcg

SEQ ID NO: 220711 - DNA, 30 bp, Artificial Sequence
  Synthetic oligonucleotide
ggttgtctctaatgcgtgtatgtccgtgcg

SEQ ID NO: 220712 - DNA, 30 bp, Artificial Sequence
  Synthetic oligonucleotide
aacctagtatagaagaagcgaacgcgtgcg

SEQ ID NO: 220713 - DNA, 30 bp, Artificial Sequence
  Synthetic oligonucleotide
tgctaccatatggtgaccgggccgcgtgcg

SEQ ID NO: 220714 - DNA, 30 bp, Artificial Sequence
  Synthetic oligonucleotide
ccaacatcaaaattgcctcacttgcgtgcg

SEQ ID NO: 220715 - DNA, 30 bp, Artificial Sequence
  Synthetic oligonucleotide
gtgcacgtttttcagtacgagcatcgtgcg

SEQ ID NO: 220716 - DNA, 30 bp, Artificial Sequence
  Synthetic oligonucleotide
ctacattcttgcgtgcacggaggtcgtgcg

SEQ ID NO: 220717 - DNA, 30 bp, Artificial Sequence
  Synthetic oligonucleotide
gtgcgccacgatatgccaacctacggtgcg

SEQ ID NO: 220718 - DNA, 30 bp, Artificial Sequence
  Synthetic oligonucleotide
taccgttagatcagggcatgaaccggtgcg

SEQ ID NO: 220719 - DNA, 30 bp, Artificial Sequence
  Synthetic oligonucleotide
gtggagttctcccgagtcggtttcggtgcg

SEQ ID NO: 220720 - DNA, 30 bp, Artificial Sequence
  Synthetic oligonucleotide
ctctgcgatatccggcaaagggagggtgcg

SEQ ID NO: 220721 - DNA, 30 bp, Artificial Sequence
  Synthetic oligonucleotide
gcatagtagaagggggcgagaaggggtgcg

SEQ ID NO: 220722 - DNA, 30 bp, Artificial Sequence
  Synthetic oligonucleotide
caatggtggatggaccagcatcgtggtgcg

SEQ ID NO: 220723 - DNA, 30 bp, Artificial Sequence
  Synthetic oligonucleotide
ggtgtgaatgataccgcagagttgtgtgcg

SEQ ID NO: 220724 - DNA, 30 bp, Artificial Sequence
  Synthetic oligonucleotide
aagggccgcttgtcttatccgtcttgtgcg

SEQ ID NO: 220725 - DNA, 30 bp, Artificial Sequence
  Synthetic oligonucleotide
tttgtattgatcctcccacctcccattgcg

SEQ ID NO: 220726 - DNA, 30 bp, Artificial Sequence
  Synthetic oligonucleotide
aagtgttcgtgttacgaaatagcgattgcg

SEQ ID NO: 220727 - DNA, 30 bp, Artificial Sequence
  Synthetic oligonucleotide
gaaaaaggcacctatctgaggaggattgcg

SEQ ID NO: 220728 - DNA, 30 bp, Artificial Sequence
  Synthetic oligonucleotide
ccatttggtgacttacgacggaggattgcg

SEQ ID NO: 220729 - DNA, 30 bp, Artificial Sequence
  Synthetic oligonucleotide
ggaaggaccctcggaaatatgatgattgcg

SEQ ID NO: 220730 - DNA, 30 bp, Artificial Sequence
  Synthetic oligonucleotide
ggctaatgcacataatagctagaacttgcg

SEQ ID NO: 220731 - DNA, 30 bp, Artificial Sequence
  Synthetic oligonucleotide
ctgagtcatcgggaaggctccaaccttgcg

SEQ ID NO: 220732 - DNA, 30 bp, Artificial Sequence
  Synthetic oligonucleotide
gctaccaacactgtatacacttaagttgcg

SEQ ID NO: 220733 - DNA, 30 bp, Artificial Sequence
  Synthetic oligonucleotide
gaataaggtattgactccttgcgagttgcg

SEQ ID NO: 220734 - DNA, 30 bp, Artificial Sequence
  Synthetic oligonucleotide
acggaggcttctttgatttggttagttgcg

SEQ ID NO: 220735 - DNA, 30 bp, Artificial Sequence
  Synthetic oligonucleotide
ggcggggttgatgggactgagaacgttgcg

SEQ ID NO: 220736 - DNA, 30 bp, Artificial Sequence
  Synthetic oligonucleotide
tatacgaactgttgtacaggtcacgttgcg

SEQ ID NO: 220737 - DNA, 30 bp, Artificial Sequence
  Synthetic oligonucleotide
atttcgatgtcataaggaccacatgttgcg

SEQ ID NO: 220738 - DNA, 30 bp, Artificial Sequence
  Synthetic oligonucleotide
gcagcgtgcggtgcgagccgtgatgttgcg

SEQ ID NO: 220739 - DNA, 30 bp, Artificial Sequence
  Synthetic oligonucleotide
gtgaggagctctgccaaatctcttgttgcg

SEQ ID NO: 220740 - DNA, 30 bp, Artificial Sequence
  Synthetic oligonucleotide
gccgggtattgatcagacagagcgtttgcg

SEQ ID NO: 220741 - DNA, 30 bp, Artificial Sequence
  Synthetic oligonucleotide
taggtcctggacgcgaatttagcgtttgcg

SEQ ID NO: 220742 - DNA, 30 bp, Artificial Sequence
  Synthetic oligonucleotide
gatcaatggtcgtgaccaaatagaaaatcg

SEQ ID NO: 220743 - DNA, 30 bp, Artificial Sequence
  Synthetic oligonucleotide
ccaatttacccgttagacttttgaaaatcg

SEQ ID NO: 220744 - DNA, 30 bp, Artificial Sequence
  Synthetic oligonucleotide
ggtggacgtatggctttaagctccaaatcg

SEQ ID NO: 220745 - DNA, 30 bp, Artificial Sequence
  Synthetic oligonucleotide
atccgggaaccagtgaatccaggcaaatcg

SEQ ID NO: 220746 - DNA, 30 bp, Artificial Sequence
  Synthetic oligonucleotide
gcggcttcgactggctctcgccggaaatcg

SEQ ID NO: 220747 - DNA, 30 bp, Artificial Sequence
  Synthetic oligonucleotide
caactatggggaggcctaggttggaaatcg

SEQ ID NO: 220748 - DNA, 30 bp, Artificial Sequence
  Synthetic oligonucleotide
aaatccaaatttaaccacagtttgaaatcg

SEQ ID NO: 220749 - DNA, 30 bp, Artificial Sequence
  Synthetic oligonucleotide
tccgcgagtacgcggtcatcaaagcaatcg

SEQ ID NO: 220750 - DNA, 30 bp, Artificial Sequence
  Synthetic oligonucleotide
gcgagattgctctcaatattaatgcaatcg

SEQ ID NO: 220751 - DNA, 30 bp, Artificial Sequence
  Synthetic oligonucleotide
ctcttaactggctttacgacaggagaatcg

SEQ ID NO: 220752 - DNA, 30 bp, Artificial Sequence
  Synthetic oligonucleotide
gctatcgccgaaaggtggcaccgggaatcg

SEQ ID NO: 220753 - DNA, 30 bp, Artificial Sequence
  Synthetic oligonucleotide
acagactgcttcggggtcaaacgtgaatcg

SEQ ID NO: 220754 - DNA, 30 bp, Artificial Sequence
  Synthetic oligonucleotide
acacgtatattttcgtcggtttagtaatcg

SEQ ID NO: 220755 - DNA, 30 bp, Artificial Sequence
  Synthetic oligonucleotide
agtttaaacagccctcaaccatgttaatcg

SEQ ID NO: 220756 - DNA, 30 bp, Artificial Sequence
  Synthetic oligonucleotide
ggaggttcaagtgttctcggtatttaatcg

SEQ ID NO: 220757 - DNA, 30 bp, Artificial Sequence
  Synthetic oligonucleotide
tcaattatggcaacgagcgcctaaacatcg

SEQ ID NO: 220758 - DNA, 30 bp, Artificial Sequence
  Synthetic oligonucleotide
tcccggtagttctgaacggcgggaacatcg

SEQ ID NO: 220759 - DNA, 30 bp, Artificial Sequence
  Synthetic oligonucleotide
ccccgagatgtatgatggggggcgacatcg

SEQ ID NO: 220760 - DNA, 30 bp, Artificial Sequence
  Synthetic oligonucleotide
atgcatcgattggaaccaggaaatacatcg

SEQ ID NO: 220761 - DNA, 30 bp, Artificial Sequence
  Synthetic oligonucleotide
ggtggtctgggtggggggcattctacatcg

SEQ ID NO: 220762 - DNA, 30 bp, Artificial Sequence
  Synthetic oligonucleotide
cgaagccatacagttctggtaggtacatcg

SEQ ID NO: 220763 - DNA, 30 bp, Artificial Sequence
  Synthetic oligonucleotide
agtaagtatttccagcatatatttacatcg

SEQ ID NO: 220764 - DNA, 30 bp, Artificial Sequence
  Synthetic oligonucleotide
cctccacttaatttggattggttaccatcg

SEQ ID NO: 220765 - DNA, 30 bp, Artificial Sequence
  Synthetic oligonucleotide
atggactgatcggggcgcggcgagccatcg

SEQ ID NO: 220766 - DNA, 30 bp, Artificial Sequence
  Synthetic oligonucleotide
ccgattaaagaattaaataatcggccatcg

SEQ ID NO: 220767 - DNA, 30 bp, Artificial Sequence
  Synthetic oligonucleotide
cttctcccaccacaagcgtagtatccatcg

SEQ ID NO: 220768 - DNA, 30 bp, Artificial Sequence
  Synthetic oligonucleotide
gaaatagaacctaggaaggtgggtccatcg

SEQ ID NO: 220769 - DNA, 30 bp, Artificial Sequence
  Synthetic oligonucleotide
ccctcattgggaatttgacggtgtccatcg

SEQ ID NO: 220770 - DNA, 30 bp, Artificial Sequence
  Synthetic oligonucleotide
cattccactgattgcttattacttccatcg

SEQ ID NO: 220771 - DNA, 30 bp, Artificial Sequence
  Synthetic oligonucleotide
atgagtatgggcgtactcagaaaagcatcg

SEQ ID NO: 220772 - DNA, 30 bp, Artificial Sequence
  Synthetic oligonucleotide
cccggaatgcacgcgtagatgtgagcatcg

SEQ ID NO: 220773 - DNA, 30 bp, Artificial Sequence
  Synthetic oligonucleotide
acagcctggccactgtctctgcacgcatcg

SEQ ID NO: 220774 - DNA, 30 bp, Artificial Sequence
  Synthetic oligonucleotide
cacttagtcgcagtataaagtggcgcatcg

SEQ ID NO: 220775 - DNA, 30 bp, Artificial Sequence
  Synthetic oligonucleotide
gtcaggcgactgtagcggtgcagtgcatcg

SEQ ID NO: 220776 - DNA, 26 bp, Artificial Sequence
  Synthetic oligonucleotide
acgggggatatacctggcactcatcg

SEQ ID NO: 220777 - DNA, 30 bp, Artificial Sequence
  Synthetic oligonucleotide
acggataccttttcttcgctttcgtcatcg

SEQ ID NO: 220778 - DNA, 30 bp, Artificial Sequence
  Synthetic oligonucleotide
cgcccgattctggttgagcgcgcaagatcg

SEQ ID NO: 220779 - DNA, 30 bp, Artificial Sequence
  Synthetic oligonucleotide
ccagataacggatcgctagcgagaagatcg

SEQ ID NO: 220780 - DNA, 30 bp, Artificial Sequence
  Synthetic oligonucleotide
gaccgcgttgaacgctttggtaacagatcg

SEQ ID NO: 220781 - DNA, 30 bp, Artificial Sequence
  Synthetic oligonucleotide
gttatcacgactgtggtgacgtacagatcg

SEQ ID NO: 220782 - DNA, 30 bp, Artificial Sequence
  Synthetic oligonucleotide
tctagtcttgtaacaggaacaaaacgatcg

SEQ ID NO: 220783 - DNA, 30 bp, Artificial Sequence
  Synthetic oligonucleotide
ataaacaattacttaatgttaaaacgatcg

SEQ ID NO: 220784 - DNA, 30 bp, Artificial Sequence
  Synthetic oligonucleotide
atgacgaccgagctgcatctcatccgatcg

SEQ ID NO: 220785 - DNA, 30 bp, Artificial Sequence
  Synthetic oligonucleotide
gtaagacacgtgtacttgccaactcgatcg

SEQ ID NO: 220786 - DNA, 30 bp, Artificial Sequence
  Synthetic oligonucleotide
ttacatagccggtaggtccattaaggatcg

SEQ ID NO: 220787 - DNA, 30 bp, Artificial Sequence
  Synthetic oligonucleotide
atacggggactctgtgagtattaaggatcg

SEQ ID NO: 220788 - DNA, 30 bp, Artificial Sequence
  Synthetic oligonucleotide
ccgcctgatctagtctggtaacccggatcg

SEQ ID NO: 220789 - DNA, 30 bp, Artificial Sequence
  Synthetic oligonucleotide
cgctcccttgatttactgaagaagggatcg

SEQ ID NO: 220790 - DNA, 30 bp, Artificial Sequence
  Synthetic oligonucleotide
gtggaagcggcaccaggcggattatgatcg

SEQ ID NO: 220791 - DNA, 30 bp, Artificial Sequence
  Synthetic oligonucleotide
gtgagctgctgttctaccgcccgctgatcg

SEQ ID NO: 220792 - DNA, 30 bp, Artificial Sequence
  Synthetic oligonucleotide
tctcaacctcctgcacaccgtgtctgatcg

SEQ ID NO: 220793 - DNA, 30 bp, Artificial Sequence
  Synthetic oligonucleotide
aatagacctcaccagcacaaaaaaatatcg

SEQ ID NO: 220794 - DNA, 30 bp, Artificial Sequence
  Synthetic oligonucleotide
cgccccgacatcggaattgacgaaatatcg

SEQ ID NO: 220795 - DNA, 30 bp, Artificial Sequence
  Synthetic oligonucleotide
aatgacgtacaactggaggattcgatatcg

SEQ ID NO: 220796 - DNA, 30 bp, Artificial Sequence
  Synthetic oligonucleotide
cttgtgttaactcatttccctgatctatcg

SEQ ID NO: 220797 - DNA, 30 bp, Artificial Sequence
  Synthetic oligonucleotide
cccatcgtataggctcggataagcgtatcg

SEQ ID NO: 220798 - DNA, 30 bp, Artificial Sequence
  Synthetic oligonucleotide
gctggtgtaggacattcatacaaggtatcg

SEQ ID NO: 220799 - DNA, 30 bp, Artificial Sequence
  Synthetic oligonucleotide
tcataaggtacctctgacgcacaggtatcg

SEQ ID NO: 220800 - DNA, 30 bp, Artificial Sequence
  Synthetic oligonucleotide
tgatggcaatttaagtggttagaggtatcg

SEQ ID NO: 220801 - DNA, 30 bp, Artificial Sequence
  Synthetic oligonucleotide
acgaaatgggttataatactgcgggtatcg

SEQ ID NO: 220802 - DNA, 30 bp, Artificial Sequence
  Synthetic oligonucleotide
caataagctagcgcctccctcaatgtatcg

SEQ ID NO: 220803 - DNA, 30 bp, Artificial Sequence
  Synthetic oligonucleotide
cctgttcttaggctgagtttctctgtatcg

SEQ ID NO: 220804 - DNA, 30 bp, Artificial Sequence
  Synthetic oligonucleotide
ttaaggatgaaccaggcgttaggattatcg

SEQ ID NO: 220805 - DNA, 30 bp, Artificial Sequence
  Synthetic oligonucleotide
aagttgagatgtcagttgagctgcttatcg

SEQ ID NO: 220806 - DNA, 30 bp, Artificial Sequence
  Synthetic oligonucleotide
caaggagctcttaggaaacttttcttatcg

SEQ ID NO: 220807 - DNA, 30 bp, Artificial Sequence
  Synthetic oligonucleotide
ctcagtcgatcggacatacgtaaaaactcg

SEQ ID NO: 220808 - DNA, 30 bp, Artificial Sequence
  Synthetic oligonucleotide
tgattgttcgaggaacacccgaccaactcg

SEQ ID NO: 220809 - DNA, 30 bp, Artificial Sequence
  Synthetic oligonucleotide
gctccgagtacgcggttgaagagtaactcg

SEQ ID NO: 220810 - DNA, 30 bp, Artificial Sequence
  Synthetic oligonucleotide
gcttgtgcgttgatcaggcaaattaactcg

SEQ ID NO: 220811 - DNA, 30 bp, Artificial Sequence
  Synthetic oligonucleotide
atctcaagaggggcaaacgggtaacactcg

SEQ ID NO: 220812 - DNA, 30 bp, Artificial Sequence
  Synthetic oligonucleotide
agataatagtcaaatgcccggacacactcg

SEQ ID NO: 220813 - DNA, 30 bp, Artificial Sequence
  Synthetic oligonucleotide
gcttatcccctgattgtatcactacactcg

SEQ ID NO: 220814 - DNA, 30 bp, Artificial Sequence
  Synthetic oligonucleotide
gtttagccactagaaatccgctcccactcg

SEQ ID NO: 220815 - DNA, 30 bp, Artificial Sequence
  Synthetic oligonucleotide
tgggttctggagcttacagccaaagactcg

SEQ ID NO: 220816 - DNA, 30 bp, Artificial Sequence
  Synthetic oligonucleotide
aattgttccgtacgatatgatcgagactcg

SEQ ID NO: 220817 - DNA, 30 bp, Artificial Sequence
  Synthetic oligonucleotide
tctcctttgggattcgcactaatcgactcg

SEQ ID NO: 220818 - DNA, 30 bp, Artificial Sequence
  Synthetic oligonucleotide
gacaccctggatcttgtcgacagggactcg

SEQ ID NO: 220819 - DNA, 30 bp, Artificial Sequence
  Synthetic oligonucleotide
cgccctgaaatcccgtgttcaggatactcg

SEQ ID NO: 220820 - DNA, 30 bp, Artificial Sequence
  Synthetic oligonucleotide
cccggattccgcatgtattggtgatactcg

SEQ ID NO: 220821 - DNA, 30 bp, Artificial Sequence
  Synthetic oligonucleotide
tgcaataggactaaaagatctcagtactcg

SEQ ID NO: 220822 - DNA, 30 bp, Artificial Sequence
  Synthetic oligonucleotide
aacctcgatgaggaggctctcgtgtactcg

SEQ ID NO: 220823 - DNA, 30 bp, Artificial Sequence
  Synthetic oligonucleotide
aaagcacgggatggcgcggggaaaccctcg

SEQ ID NO: 220824 - DNA, 30 bp, Artificial Sequence
  Synthetic oligonucleotide
tcaaccattgcgttgtcgttgcagccctcg

SEQ ID NO: 220825 - DNA, 30 bp, Artificial Sequence
  Synthetic oligonucleotide
ctagccacttcgggctaggactacgcctcg

SEQ ID NO: 220826 - DNA, 30 bp, Artificial Sequence
  Synthetic oligonucleotide
gcacaccgcccatcactattctacgcctcg

SEQ ID NO: 220827 - DNA, 30 bp, Artificial Sequence
  Synthetic oligonucleotide
accgataagattagcagacgtgaggcctcg

SEQ ID NO: 220828 - DNA, 30 bp, Artificial Sequence
  Synthetic oligonucleotide
gccggttgtattcggctaatatcaagctcg

SEQ ID NO: 220829 - DNA, 30 bp, Artificial Sequence
  Synthetic oligonucleotide
ctgtctctttgggctttcgcatccagctcg

SEQ ID NO: 220830 - DNA, 30 bp, Artificial Sequence
  Synthetic oligonucleotide
ttggttacgactaggccccgtagcagctcg

SEQ ID NO: 220831 - DNA, 30 bp, Artificial Sequence
  Synthetic oligonucleotide
ttgtaagggtgaccacggctaatcagctcg

SEQ ID NO: 220832 - DNA, 30 bp, Artificial Sequence
  Synthetic oligonucleotide
gggggaaccaaagtaatttcaccgagctcg

SEQ ID NO: 220833 - DNA, 30 bp, Artificial Sequence
  Synthetic oligonucleotide
tatacatgtgatgtggccaaaaggagctcg

SEQ ID NO: 220834 - DNA, 30 bp, Artificial Sequence
  Synthetic oligonucleotide
tagtaaagccactgtccccccgttagctcg

SEQ ID NO: 220835 - DNA, 30 bp, Artificial Sequence
  Synthetic oligonucleotide
gtatccgctgaactccagataagccgctcg

SEQ ID NO: 220836 - DNA, 30 bp, Artificial Sequence
  Synthetic oligonucleotide
gttgtcgggtcctatttccctatccgctcg

SEQ ID NO: 220837 - DNA, 30 bp, Artificial Sequence
  Synthetic oligonucleotide
tagctatgcactagcaattttatccgctcg

SEQ ID NO: 220838 - DNA, 30 bp, Artificial Sequence
  Synthetic oligonucleotide
gccactgccacgacgacggtcaatcgctcg

SEQ ID NO: 220839 - DNA, 30 bp, Artificial Sequence
  Synthetic oligonucleotide
acaccctcgcacgtgcagttttaaggctcg

SEQ ID NO: 220840 - DNA, 30 bp, Artificial Sequence
  Synthetic oligonucleotide
caccaagattgtattgcatcacccggctcg

SEQ ID NO: 220841 - DNA, 30 bp, Artificial Sequence
  Synthetic oligonucleotide
taggagtgcgggttggtacaccagggctcg

SEQ ID NO: 220842 - DNA, 30 bp, Artificial Sequence
  Synthetic oligonucleotide
gtgcacgaatccacgatagatttgggctcg

SEQ ID NO: 220843 - DNA, 30 bp, Artificial Sequence
  Synthetic oligonucleotide
agagtacgtaatcgcgtcgcatgtggctcg

SEQ ID NO: 220844 - DNA, 30 bp, Artificial Sequence
  Synthetic oligonucleotide
ctagatactctgctgagacttcgatgctcg

SEQ ID NO: 220845 - DNA, 30 bp, Artificial Sequence
  Synthetic oligonucleotide
agcgaggggaactaaaattgtactatctcg

SEQ ID NO: 220846 - DNA, 30 bp, Artificial Sequence
  Synthetic oligonucleotide
ctatgggatggggcatcaactagtatctcg

SEQ ID NO: 220847 - DNA, 30 bp, Artificial Sequence
  Synthetic oligonucleotide
ctaaggatgggtgctagggtggccctctcg

SEQ ID NO: 220848 - DNA, 30 bp, Artificial Sequence
  Synthetic oligonucleotide
gcctaggctcatagaccggcggctctctcg

SEQ ID NO: 220849 - DNA, 30 bp, Artificial Sequence
  Synthetic oligonucleotide
catagacccatccgtgggtgtatagtctcg

SEQ ID NO: 220850 - DNA, 30 bp, Artificial Sequence
  Synthetic oligonucleotide
cacataacggaatcagtagagttagtctcg

SEQ ID NO: 220851 - DNA, 30 bp, Artificial Sequence
  Synthetic oligonucleotide
gatgtagcgggagctacgaggatggtctcg

SEQ ID NO: 220852 - DNA, 30 bp, Artificial Sequence
  Synthetic oligonucleotide
agacttataacgattaatatactggtctcg

SEQ ID NO: 220853 - DNA, 30 bp, Artificial Sequence
  Synthetic oligonucleotide
cgccctaaggtggttcaatacggattctcg

SEQ ID NO: 220854 - DNA, 30 bp, Artificial Sequence
  Synthetic oligonucleotide
ataggcgtattgaacgtttacaccttctcg

SEQ ID NO: 220855 - DNA, 30 bp, Artificial Sequence
  Synthetic oligonucleotide
gaatcggtatacacgttctccttcttctcg

SEQ ID NO: 220856 - DNA, 30 bp, Artificial Sequence
  Synthetic oligonucleotide
ctaaatttctgatacctgcttatgttctcg

SEQ ID NO: 220857 - DNA, 30 bp, Artificial Sequence
  Synthetic oligonucleotide
ctggctggttatgcgtaggagcatttctcg

SEQ ID NO: 220858 - DNA, 30 bp, Artificial Sequence
  Synthetic oligonucleotide
tgcgctcggatcacccaatgcattttctcg

SEQ ID NO: 220859 - DNA, 30 bp, Artificial Sequence
  Synthetic oligonucleotide
gagtcgccataattgaatgtagttttctcg

SEQ ID NO: 220860 - DNA, 30 bp, Artificial Sequence
  Synthetic oligonucleotide
tggagaggttcactacccagcgcaaagtcg

SEQ ID NO: 220861 - DNA, 30 bp, Artificial Sequence
  Synthetic oligonucleotide
ctagggcgggcgctgcatttaataaagtcg

SEQ ID NO: 220862 - DNA, 30 bp, Artificial Sequence
  Synthetic oligonucleotide
ttgctaggcggttgtttcgtgaacaagtcg

SEQ ID NO: 220863 - DNA, 30 bp, Artificial Sequence
  Synthetic oligonucleotide
cagccagagggcgacgatattcacaagtcg

SEQ ID NO: 220864 - DNA, 30 bp, Artificial Sequence
  Synthetic oligonucleotide
cagcttctaactcacgtccccagcaagtcg

SEQ ID NO: 220865 - DNA, 30 bp, Artificial Sequence
  Synthetic oligonucleotide
tgcgtgctgtgggtccatcataggaagtcg

SEQ ID NO: 220866 - DNA, 30 bp, Artificial Sequence
  Synthetic oligonucleotide
ggtaaaaagccgggccaatccgtacagtcg

SEQ ID NO: 220867 - DNA, 30 bp, Artificial Sequence
  Synthetic oligonucleotide
tacgtatcggaaggtggctgtaatcagtcg

SEQ ID NO: 220868 - DNA, 30 bp, Artificial Sequence
  Synthetic oligonucleotide
atgcgcgacgacctaaaacttaatcagtcg

SEQ ID NO: 220869 - DNA, 30 bp, Artificial Sequence
  Synthetic oligonucleotide
atccgcggagtcgtgatgtgatgtcagtcg

SEQ ID NO: 220870 - DNA, 30 bp, Artificial Sequence
  Synthetic oligonucleotide
tgttacgcgaacacatcagtgtgtcagtcg

SEQ ID NO: 220871 - DNA, 30 bp, Artificial Sequence
  Synthetic oligonucleotide
ggaacatttttacatgcgtaacttcagtcg

SEQ ID NO: 220872 - DNA, 30 bp, Artificial Sequence
  Synthetic oligonucleotide
gctcgatgatcagatctaagtcaagagtcg

SEQ ID NO: 220873 - DNA, 30 bp, Artificial Sequence
  Synthetic oligonucleotide
gcaggactggggcgcatttacctagagtcg

SEQ ID NO: 220874 - DNA, 30 bp, Artificial Sequence
  Synthetic oligonucleotide
catactgcggatgatcgggacttagagtcg

SEQ ID NO: 220875 - DNA, 30 bp, Artificial Sequence
  Synthetic oligonucleotide
gtacacaataggtttcacgactacgagtcg

SEQ ID NO: 220876 - DNA, 30 bp, Artificial Sequence
  Synthetic oligonucleotide
gtagccaacatctgtccactggtcgagtcg

SEQ ID NO: 220877 - DNA, 30 bp, Artificial Sequence
  Synthetic oligonucleotide
aggcggaagacagcgactttgggggagtcg

SEQ ID NO: 220878 - DNA, 30 bp, Artificial Sequence
  Synthetic oligonucleotide
gaatgcttttccatgggaacagaatagtcg

SEQ ID NO: 220879 - DNA, 30 bp, Artificial Sequence
  Synthetic oligonucleotide
gcgtcgagtggatgctattaaataacgtcg

SEQ ID NO: 220880 - DNA, 30 bp, Artificial Sequence
  Synthetic oligonucleotide
tcaacgagtatgtactcatacgatacgtcg

SEQ ID NO: 220881 - DNA, 30 bp, Artificial Sequence
  Synthetic oligonucleotide
atcgtcgtctacttggatacgcaaccgtcg

SEQ ID NO: 220882 - DNA, 29 bp, Artificial Sequence
  Synthetic oligonucleotide
atagagctacgcaagattactcaccgtcg

SEQ ID NO: 220883 - DNA, 30 bp, Artificial Sequence
  Synthetic oligonucleotide
ggcgtgactagcgcatcgcgccccccgtcg

SEQ ID NO: 220884 - DNA, 30 bp, Artificial Sequence
  Synthetic oligonucleotide
aactatgttctaagcggaggtcgtccgtcg

SEQ ID NO: 220885 - DNA, 30 bp, Artificial Sequence
  Synthetic oligonucleotide
tccgaaatctcctccgcaatggacgcgtcg

SEQ ID NO: 220886 - DNA, 30 bp, Artificial Sequence
  Synthetic oligonucleotide
tataacgaacgaaatcatagttccgcgtcg

SEQ ID NO: 220887 - DNA, 30 bp, Artificial Sequence
  Synthetic oligonucleotide
atcacccggtagatgctagaaactgcgtcg

SEQ ID NO: 220888 - DNA, 30 bp, Artificial Sequence
  Synthetic oligonucleotide
taatcgcactggcttctagaacgctcgtcg

SEQ ID NO: 220889 - DNA, 30 bp, Artificial Sequence
  Synthetic oligonucleotide
acaattaaagggctaagtatttgctcgtcg

SEQ ID NO: 220890 - DNA, 30 bp, Artificial Sequence
  Synthetic oligonucleotide
gcatcctgtagtctctatggactgtcgtcg

SEQ ID NO: 220891 - DNA, 30 bp, Artificial Sequence
  Synthetic oligonucleotide
tatagttgtctaagccttagggtgtcgtcg

SEQ ID NO: 220892 - DNA, 30 bp, Artificial Sequence
  Synthetic oligonucleotide
gcaaggacctccctctgtgtcggaaggtcg

SEQ ID NO: 220893 - DNA, 30 bp, Artificial Sequence
  Synthetic oligonucleotide
ggctggtgtagaacgggcagcgaccggtcg

SEQ ID NO: 220894 - DNA, 30 bp, Artificial Sequence
  Synthetic oligonucleotide
cttcaaggtagttttcagtggtgccggtcg

SEQ ID NO: 220895 - DNA, 30 bp, Artificial Sequence
  Synthetic oligonucleotide
gctgacaggtgctcttaccataggcggtcg

SEQ ID NO: 220896 - DNA, 30 bp, Artificial Sequence
  Synthetic oligonucleotide
ctagggtacggttggcaaaccgggcggtcg

SEQ ID NO: 220897 - DNA, 30 bp, Artificial Sequence
  Synthetic oligonucleotide
acaagaaataatgttcagcagattcggtcg

SEQ ID NO: 220898 - DNA, 30 bp, Artificial Sequence
  Synthetic oligonucleotide
gcggatgctatactcgggtaggacgggtcg

SEQ ID NO: 220899 - DNA, 30 bp, Artificial Sequence
  Synthetic oligonucleotide
ctatctacgactgggcatttcagcgggtcg

SEQ ID NO: 220900 - DNA, 30 bp, Artificial Sequence
  Synthetic oligonucleotide
ttagactagccgggacgcgagaaatggtcg

SEQ ID NO: 220901 - DNA, 30 bp, Artificial Sequence
  Synthetic oligonucleotide
gcgctaagagtttcacattaaagatggtcg

SEQ ID NO: 220902 - DNA, 30 bp, Artificial Sequence
  Synthetic oligonucleotide
gcccgtagtctgtatgtttgaaactggtcg

SEQ ID NO: 220903 - DNA, 30 bp, Artificial Sequence
  Synthetic oligonucleotide
agcgacagatgagctaaacgcccctggtcg

SEQ ID NO: 220904 - DNA, 30 bp, Artificial Sequence
  Synthetic oligonucleotide
tggtcctacaattttgatacggcgtggtcg

SEQ ID NO: 220905 - DNA, 30 bp, Artificial Sequence
  Synthetic oligonucleotide
gaccaaccaaccgcccaggagcgttggtcg

SEQ ID NO: 220906 - DNA, 30 bp, Artificial Sequence
  Synthetic oligonucleotide
tcagattaatcttttttggtagaaatgtcg

SEQ ID NO: 220907 - DNA, 30 bp, Artificial Sequence
  Synthetic oligonucleotide
caaaccgcggggaccacggatggcatgtcg

SEQ ID NO: 220908 - DNA, 28 bp, Artificial Sequence
  Synthetic oligonucleotide
cattccatattttgagaaatatatgtcg

SEQ ID NO: 220909 - DNA, 29 bp, Artificial Sequence
  Synthetic oligonucleotide
ttataacagtttcaacaatgtacctgtcg

SEQ ID NO: 220910 - DNA, 30 bp, Artificial Sequence
  Synthetic oligonucleotide
tccaggaaggttggaggagcaatcctgtcg

SEQ ID NO: 220911 - DNA, 30 bp, Artificial Sequence
  Synthetic oligonucleotide
tatactgctttgaaacaccacgtgctgtcg

SEQ ID NO: 220912 - DNA, 30 bp, Artificial Sequence
  Synthetic oligonucleotide
gtatggaactacgcccaatcgggtctgtcg

SEQ ID NO: 220913 - DNA, 30 bp, Artificial Sequence
  Synthetic oligonucleotide
cgggtcaagttattttccggagaagtgtcg

SEQ ID NO: 220914 - DNA, 30 bp, Artificial Sequence
  Synthetic oligonucleotide
ctcaccaacaggtggtcaagtgcagtgtcg

SEQ ID NO: 220915 - DNA, 30 bp, Artificial Sequence
  Synthetic oligonucleotide
ctccggtagaagcaatgcccgcacgtgtcg

SEQ ID NO: 220916 - DNA, 30 bp, Artificial Sequence
  Synthetic oligonucleotide
gtgtaagctgtcacttcactgcaggtgtcg

SEQ ID NO: 220917 - DNA, 30 bp, Artificial Sequence
  Synthetic oligonucleotide
tagcggaattactgattgtactaggtgtcg

SEQ ID NO: 220918 - DNA, 30 bp, Artificial Sequence
  Synthetic oligonucleotide
ggccccctagaatagacgatacctttgtcg
